United States Patent Application Publication US 2007/0054278 A1 - sequence listing, part 137

SEQ ID NO: 417156 - DNA, 201 bp, Homo sapiens
cttggagtcacatagcactgtacttggaaagggctttagagatcattgccagcctctttcactgtacaaatgaaataatgacgtgccttgctttaaggcamgaaatccttagccagctttgattccagagtcattgttggttttcccatcatgggtgtggggaggagaaacaagaactaattccaggatgttgccctccca

SEQ ID NO: 417157 - DNA, 201 bp, Homo sapiens
ttaggggcctgccggctggcggggtcagggccggaggggctgtggcgccgcgggaagaacctgcctcggggcagagcgtctggttccgcgagagccctccrgcccgaatagcgcctggaagacagcgcggagggctcggtggagaggatcgcccggtcccagagctccgtggggccacctgtgccccccacactcctgatg

SEQ ID NO: 417158 - DNA, 201 bp, Homo sapiens
ctgttttagtctctggcttatattccaatgagtatcattatttattttgatgctcaaattgtcttatatttagccagtgggaaccccttcaagtttgcttytgtgtcatttgacatgcccccatcattttttgagcacttttttttgctctctgacacaagatgttacaggttcatcttatactttccctgcctcagtcct

SEQ ID NO: 417159 - DNA, 201 bp, Homo sapiens
atggtttcatgttccttgccatgtggacctttctattggacttttcagacatagcatctggtttcccccaggagtgatgagagagagagggagagatgctmagcaggaagccttagtgccttttttcgcctagactctgagtcactcattgctgctttattctctttattaaaagcatgtcactaagtccagcccacacaa

SEQ ID NO: 417160 - DNA, 201 bp, Homo sapiens
tgcttaggccctgggcataaaggtatataagactcaggtcctgcccttgagggtcctaaagtttagaaagacactgtggacctgtaaataaacaaatgtgrtaagccttaatggggttatgattatgctatagagttcctttaaaagagaaagattgaacaactagagcatatttagagaagtgaagaccaggaggggaag

SEQ ID NO: 417161 - DNA, 201 bp, Homo sapiens
gaaatgcttcctatgtgtcagcctagaatgactgagagggaggtgccaagccacacatgtcctgtcccatctcctaaactcaccagttggttacatgaccrctgtcccctagaaagcagtgaggatggggaagggcagggagaaaagctggagtgttgttttactaatggaaattttgtcacatggaaacatgaaaaatga

SEQ ID NO: 417162 - DNA, 201 bp, Homo sapiens
ggccagtggtcctaatattcttctggtccaaacttacccccaaatctctaggctttccccacagggaaatgcttcctatgtgtcagcctagaatgactgasagggaggtgccaagccacacatgtcctgtcccatctcctaaactcaccagttggttacatgaccactgtcccctagaaagcagtgaggatggggaagggc

SEQ ID NO: 417163 - DNA, 201 bp, Homo sapiens
ttcactgcgacctcaaacttctgggctcaagcgatcctctaggttctgccttccaagtagctgggactacagatatgtgccaccacactcagctaattttwaaatttttattcttgtagagatggggtcttggtatgttgcccaggcttgtcttgaactctcagcctctgacagtcttcctgccttctcctcccaaagtgt

SEQ ID NO: 417164 - DNA, 201 bp, Homo sapiens
ggtgtatcacttgaggtcaggagttcgagaccaccctggccaacatggtaaaaccccgtctctactaaaaatacaaaaattagccaggcgtggtaccccaygcctatagtcccagctactctgtagtcccagctatttgggaggccgaggcaggcgaatcacttgatcctgggaggtggaggttgcagtgaactgagattg

SEQ ID NO: 417165 - DNA, 201 bp, Homo sapiens
cagagtaaagctggagagagattataatttgaagtttatcaagagtcacctctcttcctagaacagttacattaaaggaattgaaaggcagggcctgtggytatagtcgaatgccccagcggggctcagtctggcatggtggaggctggctgggtagtctttccaggatcccagcctctttggtcatggacatttatctta

SEQ ID NO: 417166 - DNA, 201 bp, Homo sapiens
tcaaaaactgctcagggctgtacgaggggactttttggtgatagatatgctcatcatcttgattgtggtaaagattttactagtgtaggatgggcatggtrgataatgcctataatctcagcactttgggaggctgagatgagcagattgctggagcccagaagtttgagaacagcctgggcaacatgatgaaatcccatc

SEQ ID NO: 417167 - DNA, 201 bp, Homo sapiens
agttctacagatatcaagggccctaattatttctatctctctgtttcactatccttaacataggcctttgtcttcaagattttctcaaggtccaagatggytgctagcaatattcagccagatagaagggagaaaggacaaagagaggcctttttttttttttgagacggtgtctcgctctgtcacccaggctggagtgca

SEQ ID NO: 417168 - DNA, 201 bp, Homo sapiens
aagaaaggcaaacaacagttgtaataggttgtgttaaatttcccttcgtcttgctttatcctggatttagggcctctcacagtgttacaaaaattggtacsgtaatttgaacctcagagtgcccatgtgtcatgttacttttctcccaggtgttcagcagccttgcacccctggtaatgggacagccacggagatctcagg

SEQ ID NO: 417169 - DNA, 201 bp, Homo sapiens
tacatgcagaggaaaggccatgtgaggacacagcaagaaggcagccatctgcaggccagggagagacttgctagaaaccaactctgatggcaccttgattrtagacgtctagcttctagaactgtgagaaaattaatttctgttgtttcagctacccagtctgtggtattttttgttatggcagcccaagcagactaatac

SEQ ID NO: 417170 - DNA, 201 bp, Homo sapiens
acccatactctttctcttataagatgctgcctgttgtgatacaccaagaaaggaaccctgtgagtgaggtgtactgacttcatcttgatgtttcatctttytgtataccctggcccttttctagggtcataccatcttgctgtttcttattcttaaaatcatacacctaatgtccaagcttcagagctttctgtatttacc

SEQ ID NO: 417171 - DNA, 201 bp, Homo sapiens
ctgagagacccaatggtctccacttataaattacccattagagaaggagccctgggtcctgctgactttggattccaaggtcactccaatctctgccagayaactgcatccttcctcctcagactaagcctggttcagccagtgctggttgttcagcaaggctggtgcctccccaagaatgcttggtaggaatgggtcttg

SEQ ID NO: 417172 - DNA, 201 bp, Homo sapiens
tgtttatgtgttttttgttttctttttcaacctacccaaatctgcttttatactcaaaaccaacacttaggtttagtcataaacacttggtcttaaaacartgcttttttgaggatcagggtagtttacattgtcacccctaaaagttttcatctgaaatagttttaagctctattagggattttgtttgtaggtttactt

SEQ ID NO: 417173 - DNA, 201 bp, Homo sapiens
taaaagtttatacatatttacttatcacatattattaagtttacagtcttgagataaagaaaatttgaaatatttcttagactgaaatacactgaaaaccrgtaaatggtctgagtactcacacttagaaaatgtatgcttactaagtgatacggtttgaatgtttgtcccctccaaaattcatgttaaaacttggtcatt

SEQ ID NO: 417174 - DNA, 201 bp, Homo sapiens
ctatttgcatgtctaagtctaaattaaaagcatcagaaaatgttaagtgaaagataaatatctaaagattgaggtaggaacattattttgattcatagctrgcatggaattctgatttaaacttttgttgacctaataaactatgtgtattggttcagacatctcatatattccctcagatgttaccacatcatgccatac

SEQ ID NO: 417175 - DNA, 201 bp, Homo sapiens
tttttttggtcataagtttgacagtttgacagactagagaataagagactcacaggatgttttaatgataatccagtttgatattttcctctttccccaaracactggaaatagctttccgagggtcatggactgggcgaggagaagaagggcctgcagacttatagcctagtgctcttcccagcacagtccaaagtctca

SEQ ID NO: 417176 - DNA, 201 bp, Homo sapiens
ttcatcaactgttttctgaatactgatgtcaagcactgtatttagagttccaagatgttaaaatatggttgaggagatcaaggaatcaggagccctttacrattcaatatggaaatggttgtgatggcataaacataagatgtttgtggagcataagaggagggatatgtcatccagatttgagggagctggtcagaacag

SEQ ID NO: 417177 - DNA, 201 bp, Homo sapiens
ggatggggacacagccaaaccatatcgccatctcacacataatgacagaatcccaaaaggggaagttgctaacccaaggtcagacaactagttaatgatgktgctggagctggggccagaaccagatcttctagcttcagatatagtggactttttacactctgtgatgaaacctatgctctggggagattaatgaggctt

SEQ ID NO: 417178 - DNA, 201 bp, Homo sapiens
agtttctgcttttattttttctactgtcagatttgttgttggttctgctttctccctaatctgtcccatatttctcaccatttgtcctgtcagtattgctytgattcattaaggctcccccatctatcaggtaggcttggtttcccacgtgcatttatttatttactcactcactcattcatcaactgttttctgaatact

SEQ ID NO: 417179 - DNA, 201 bp, Homo sapiens
acatacctgaaactgagcagtttaccaaagaaagaggttaaattggacttacagttccacgtggctggggaggcctcacaatcatggcggaaggcaaggakgagcaactcacatgttatgtgcatggttgcaggcaaaaaatgagagagcttgtgcaggggaatgcctctttttaaaaccatcagatctcatgagacttat

SEQ ID NO: 417180 - DNA, 201 bp, Homo sapiens
tctatacctttttattcttgggagagttccatggattccagcaagaagaagttttacctctcaggccctgagattcttctgtggcttctcttgctgatgayggaaccctatccatttccctttgctagagctcttactagtttctgcttttattttttctactgtcagatttgttgttggttctgctttctccctaatctg

SEQ ID NO: 417181 - DNA, 201 bp, Homo sapiens
atctagtggtctttctactgcaccccactaaatacatttggaagctaaggtcatgcttaagtcctctccatagctctctctatcacactcttccctactgyccagaggccacttcaagtctctctgtcagataccgcctgtttagttttatgccagttcaggaaacatcatccttccctggcatgctgcacccctgacatt

SEQ ID NO: 417182 - DNA, 201 bp, Homo sapiens
ctctgctgcttctatacctttttattcttgggagagttccatggattccagcaagaagaagttttacctctcaggccctgagattcttctgtggcttctcwtgctgatgatggaaccctatccatttccctttgctagagctcttactagtttctgcttttattttttctactgtcagatttgttgttggttctgctttct

SEQ ID NO: 417183 - DNA, 201 bp, Homo sapiens
ttcttttcttcttctcttccttcctttgccctccagaaggcttctagaatgcagtccctttcaccctgcagtagcgtatttcttctgccatgagtggtgtstttgtgatgtgtgtgacagacagatggacttctgggaccttagagacttggtgggttactgtatctctttcgtggtgcccagtggcctagtcatgtagag

SEQ ID NO: 417184 - DNA, 201 bp, Homo sapiens
ttgcccaggcttgtcttgaactctcagcctctgacagtcttcctgccttctcctcccaaagtgttgggattacaggtgtgagcctctgtgcccagcctgartgaggtctacatattgtaattagttgatatgtatcacaagtctttctttctttttttaaaaaattatttttttcttaattttatcatggtaaaatatacg

SEQ ID NO: 417185 - DNA, 201 bp, Homo sapiens
acactgcactagaggtgccttttagacatctgggtatggatattccatgcccatggccaccaagggtaggccacaatggccttaggatgccccgagaaatstgacccagatccagcctctctgggggtcagccttgtttggtagctggcctgaggactcatggtttgcttcccacccttgtggttctatttccttaccaga

SEQ ID NO: 417186 - DNA, 201 bp, Homo sapiens
caattacattgctcctttcatttacgaagtgttgtatgtctcatatgtttctttaaatagttctgtgaaataggtatcatatgcccattttgccaatgaakaatctaagattcctaggaaaacaatggcttgacttgcccaaggtcacagaggtagtaagtggtggagctacctaactccaaaaccggtcctctttccatt

SEQ ID NO: 417187 - DNA, 201 bp, Homo sapiens
cagctcaccaaatgtgctctggcgcccacccacctgcttacagggtgcagtgaagcagtggaattcaatttgcggcagtgacctaagaagagctatttttrgtaagaaagtaggtcaggggctgcagcggtgctgcctgataaaggaacagcctcccctgtcaccaggaggcttgctcacttctcgcacagccagtgtgga

SEQ ID NO: 417188 - DNA, 201 bp, Homo sapiens
acacataataattaatgtttcttcatttcttccttgcaacagctctctggtaagtaggaatgtggtttcaaggttaagggcactgcatttcaaatcaaggsgaccaaggtttgaatcctaactctgtaacttaacagttatatgacctggtacaaattattgaactcctctgagcataggtttcctcttctgtcagctgga

SEQ ID NO: 417189 - DNA, 201 bp, Homo sapiens
gggtcacacaattatgtagtagtatatatctaaggtgggacttgaaaaatgttcctgagcccacagttccagactccgtgctactactctctgatactgtygcagccactttcccctccctggtcctgtcatgcagaggggcaagactacagagttctttctctgatagttctcatggatttctgtcttcactttattggg

SEQ ID NO: 417190 - DNA, 201 bp, Homo sapiens
gaagttgacgtgattttgagagggacactaagtccatgaaagaaactcagctctgctccttcctagcaatgcaacgttgagtgaattataacctccttgarcctcagtttccctatgtagataaagaatgaaaatgctcagagcaactatgacagttagacgggataatatatataaaggactgagcttagtgcctgatgc

SEQ ID NO: 417191 - DNA, 201 bp, Homo sapiens
tatgtgatattggaatttgctttgatggtcttagtctgtcctgaagactggatttgtgattggcttggtggtaatccctgggccagttacaggacctcttraagcaattgagcttctccataacactcatattaactgagaaagaattgggaatttctcatagcagtgaggttcaaagggcaatctagtcttatcctgatg

SEQ ID NO: 417192 - DNA, 201 bp, Homo sapiens
attcatactttctttgttcctttacagttggcttaagagggttttggaaggaaatagagataaaggtgtgggctcaatctatcccgattaatggaagttcmtactgctctttgtaggccacagctgacaaggatagagaaagtggtcccacagtggccctgagaatgtgaggcaggctggaagttgtgtgactgcacagta

SEQ ID NO: 417193 - DNA, 201 bp, Homo sapiens
tgataatgtactgaactgtaaatgtgagtcttgtgatgtatggattatgtggggggatcagaatggcaattaaaccaagtgcagatccactggatgggtgktaaaaagggaaatagaacatgtccctttgttaaatacattcccctgaagataagtttgtaatttgacaatctaggcagctggaaaaattagaaactgctt

SEQ ID NO: 417194 - DNA, 201 bp, Homo sapiens
ctgttccctatcttccttcttctttagattagtctcattttggtggggcacaggactcagtacctttcccggaaaagaggagttgaagataaattttttgrttctttgaaattctgaaaatatacttactctattttcacatttgattgacactttcactgtttgtagaaatctaggttggcaatttttttcattctgact

SEQ ID NO: 417195 - DNA, 201 bp, Homo sapiens
tccctcttacctcaaattcattgccccaaattcattcactagctaaccctttttgagtattgactctcagtcagggattgggataagtaagggctttagakaagttcactcatttcttcctccttgggtgtagagattattatcatcttcactctacagactaggaaattgaggcttagagagtttaaatgacttggcaaa

SEQ ID NO: 417196 - DNA, 201 bp, Homo sapiens
ctaaaaggcttagtaatggcaatttctgcctcaccttttcccactcttttgtccaatttccggagccaaccattttgaattattttggggtgtctatctcyatatttctaaactaaatgtctatttaagatatcaattttaaaataaattttatctgttgctttcttataaataaaaatttaattatcttataccaccacc

SEQ ID NO: 417197 - DNA, 201 bp, Homo sapiens
gctggaattttccatattcatgctcctctattgcacaaattgtaagacagcaaacatggaaggaaggtgatttattacaactcatagacctacactttatrtgaagaagtcttggggaatgccaagggccagttgcaatttttctgagactcagtttctacctaacttcttgagctggccagcttcactttccccctctct

SEQ ID NO: 417198 - DNA, 201 bp, Homo sapiens
aacagagaaacctgggaggaatggcagtggtttcaatcttgtggctttgtaagatattaatttggtaagtttttgctttttaacgagacaagatgctaccracctattggataggggatgtcatgatttacagtctgactgtggctctagaatccccatcagactcctttatccagattctgccccattctagttggcaac

SEQ ID NO: 417199 - DNA, 201 bp, Homo sapiens
ggagccaggcactctgatactggaaagacttagccatgcaggttttccatctgtttacctgtctctccctgcctctggccctgcttgtgagaactgtcttsttctgtggttgtggagggtaagattctggaagcttcttaggatcaggccctctagggtagcagaggtggcagaggctcctctccccatcatcatttgtac

SEQ ID NO: 417200 - DNA, 201 bp, Homo sapiens
gttcaccactgtctcctcatcaccttgcatagcacccagcacacagcaggtgctgagcaaatgattgttatagggatgaatgtgtgcccttactttctgayggcttcctatcctgaatgaagtctaaaatctctggattttcataagaagctcttcttgatccagcttctgtcaaaatacccagcctcaccttctaccagt

SEQ ID NO: 417201 - DNA, 201 bp, Homo sapiens
tagaagctagtactgttcaacagagaaacctgggaggaatggcagtggtttcaatcttgtggctttgtaagatattaatttggtaagtttttgctttttarcgagacaagatgctaccaacctattggataggggatgtcatgatttacagtctgactgtggctctagaatccccatcagactcctttatccagattctgc

SEQ ID NO: 417202 - DNA, 201 bp, Homo sapiens
tatcttggaagccatcagaccggggagggagctgaagacaggttggtgagtgaatagaagtctgaataatgaagtctactttcctttttaaattagaaagmaaataacttatgtttccaggattgtcatctgacttgtttactattaatgcttttctattcttatgtcttttctctaccccaaccttcccctcttgttctc

SEQ ID NO: 417203 - DNA, 201 bp, Homo sapiens
atttctaaatcaaacttgaagttctttgaggacagacattatttatctttgtataattagggcaaggtttggtacaaagtaagtaataatagaattgtgcygaaaaaagtgtgagagctcatgttggttggcttaaatcttcgtggttagattggaaggaaaattatctgctggagtgatgagattagggcagggaggcta

SEQ ID NO: 417204 - DNA, 201 bp, Homo sapiens
gagactcagtttctacctaacttcttgagctggccagcttcactttccccctctctccaccccatctccattcttttcttctcaacccaaatcaccccccrcacccccactgttctatgtttgtctccagtcttaccccttttttctaccctccacactgccaccacagtgcttctatgtttcactctcttactcaaaacc

SEQ ID NO: 417205 - DNA, 201 bp, Homo sapiens
ctagcttcctgagcctgggcagcaccatcgtatctgcaaaactcagactcacagtattgcctctccgcatccacaggcctcagcttatgctagtgcccctstgtatcacctgtcctatgactgctgtccctgctgcctcttgcctctggaatcctctgttcctccttggtgcacctaaagcccttaaatgtagaacagcta

SEQ ID NO: 417206 - DNA, 201 bp, Homo sapiens
gaagaggtttcacttaatgctgtctctggcatgtaggcccacaagctgttagaacctaagcagtggggtctgtgtgtcccttctgtctctctcagatctgyttctgctgagtttacatctcagggaagcagtgtccccacttcctgagtcaagccctgggatagctttagtggttttccattgaacctgtgctccaggcac

SEQ ID NO: 417207 - DNA, 201 bp, Homo sapiens
ggcctcagccccagcgctcacagggctcagggagatttctgctcctctgcacagtatctttctctcgccagctggagttcttgccttccattacttcctgygttcccataggtggactgttactctgtaccttttcttaattacctgggaagcaacgtttttgctagagagaacagtataatattaaatagaagagggcct

SEQ ID NO: 417208 - DNA, 201 bp, Homo sapiens
gagcacctaccgtctacctggtgccatgctaatcattagggttttgataatgaccaagttagataaggttccattctcccaaagcttgcattcttgtaacrtagtttgtatgagggagatgaggggtgatacatgataagttaaggagataggcagtgtgtattagcataataatatgaataattattagtattcgtaacc

SEQ ID NO: 417209 - DNA, 201 bp, Homo sapiens
aaacagataaaaatataactgttctggttgaattgggaatagggataggaaagtcagggatgggagaaggaagccttatcacttggctgcctactggcagrtttcctttgtggtggctcctgaggcacatccaggagcactagggccctataggacttagtttgagaaaatctttgtctaaattaagtgagaaataggacc

SEQ ID NO: 417210 - DNA, 201 bp, Homo sapiens
cagatcttgcctttctcagccctggaactgatatattcgttgccactaccacacctggccgcttggggcaccatattttcctctccaacaggccagaaacrtgataaaccttttacatttaagaaagatgtttcacaataaatacagagtgttttttttacagaatcttgcttattgctcaagtcacatttctgttaagtc

SEQ ID NO: 417211 - DNA, 201 bp, Homo sapiens
ttggaactgggtaacagacagaggttggaacagtctggagggatcagaagaagacaggaaaatgtgggaaagtttggagccccctagagacttgttgagtractttgatcaaaatactgataatgatatggacaatggaatccagactcaggtggtctaagatggagatgaggaacttgttgggaactggagtaaaggtga

SEQ ID NO: 417212 - DNA, 201 bp, Homo sapiens
gctgactcctccagtagtctcagcatgaggggcatagaaatataggcatctttttcaatctgcattgctccattcctcagacacctattttagggtgagarcacagaggcgtgcaaatggtgcatttccctttgcacccctcaaggtgaaatttctgctgttgcatggggacttttgggagcagttctgtagttactgctg

SEQ ID NO: 417213 - DNA, 201 bp, Homo sapiens
taagtctcacgagatctgatggttttaaaaaggggagtttccctgcacaagctctctctttgcctgccaccatccatgtaagatgtgactttctcctcctkgctttctgccatgattgtgaggcctcccctgccatgtggaactgtaagtccattaaatctctttatttcgtaaattgcccagtctcaggtatgtctttat

SEQ ID NO: 417214 - DNA, 201 bp, Homo sapiens
gtggctcattcccctatataaggccatctgcttgattccaagggttgctgttccttggagcttcttgcttggaagctttctgaccaatgggacctccttgytgtttacactgacctgaattaagcctctctttgccaggctccattgggtactttatattggatagctgccttaggagcgagccctgtagttccccatctt

SEQ ID NO: 417215 - DNA, 201 bp, Homo sapiens
tgaataagtctcacgagatctgatggttttaaaaaggggagtttccctgcacaagctctctctttgcctgccaccatccatgtaagatgtgactttctcckccttgctttctgccatgattgtgaggcctcccctgccatgtggaactgtaagtccattaaatctctttatttcgtaaattgcccagtctcaggtatgtct

SEQ ID NO: 417216 - DNA, 201 bp, Homo sapiens
ctgtaatattttgtcatgcaaccttttattttactatagattaaatgtatcagtcttttcctgtatggcttttggattttgagtcagggaatccttctctmctccagagtataatggtctttctttatattttattctagtatggtcatgcattgcctaaaaatcgggatacgtggccagggtcagtcgctcacacctgta

SEQ ID NO: 417217 - DNA, 201 bp, Homo sapiens
atggtcagctagggaggaagttggagacttatgaaggctggaaactagaaaagcaagattcatttctcccctgttcaagaccaccgaacagcatgccttcrtctccgcattgcttaactggagcaactgaggtaggaagtgacttctcacagatgtaatctgtccctttttcttgtctttcagtgaatcatttactgaggg

SEQ ID NO: 417218 - DNA, 201 bp, Homo sapiens
ccacctcagcctcccaaagcactaggattataggcctgagcgcacctagccatcctgaagactatgttttgtaaaagcaggtcatcctgcttgaatgagcmaaattgttcatactcctagttccctttggtgttaactgcatccccaaggagaaggagaactcagaggaatcagcaacattatttgctttggccaggaatt

SEQ ID NO: 417219 - DNA, 201 bp, Homo sapiens
tgcttgaatccagctctggtactcacagcttatttgatcttgggcaagtcatttaacctctctgaaccttagtttccacatctgtaaaaatatgagtgcaygtgccttctttacaggaagataggaaggctcctggtaggtggtactaaaataaatgtcacactttctcttgtaattcattgcctacccatgagagcacag

SEQ ID NO: 417220 - DNA, 201 bp, Homo sapiens
ggtggcttcttttgtcaaattcaaagacttaagtccgaagactttaagtctttgcccattgttttaagttgggttttgtctatgtttctcttagtgatttkcaggcatcccttatatcttgtagattccagtccgttgttgaatatgcatattgcaaacatcttctcccagccagtggcttactctttttttttttttttt

SEQ ID NO: 417221 - DNA, 201 bp, Homo sapiens
tggcaccatattctgccagtcttgcctgtctttgacttcaataatcaataacaggaaagctctaagatgttttacttcatgtgaaagaaaggattcaatgygtgatttctggtaaaattatttctgtagtcttagagataacaacttcctagtttttcccagcagaggaacggtcatttaagcagcaacagtctcatcccc

SEQ ID NO: 417222 - DNA, 201 bp, Homo sapiens
ttttgtaatgcttggtaatattctactgtataaatataccacaacttatttaaccatttaactgttgaacatttgggttgtttctagtttggggatgctaygtacattcttatacacgccttttgatagatatgtgcatttatttctcttgggtgcatgattaagactaggaattctagttcatatttagtattagtaaat

SEQ ID NO: 417223 - DNA, 201 bp, Homo sapiens
gagttttactcttgttgcccaggctggagtgcagtggtgtgatctcggctcactgcaacctctgcctcctgggttcaagcaattctcctgcctcagcctcrtgagtagctgggattacaggtgcgtgccactgtgcccagctaattattttgtttgtttgtttgtttttgcttttgtttttgttttttagtagagatgggg

SEQ ID NO: 417224 - DNA, 201 bp, Homo sapiens
ctttccaaatacagtaaggtactaaaggttagggcttcaacacgtgaattttgggggaataaagttcggttcacaggaaggggatttaccttgttaggggkgtgtgtgtgtgtgtgtgtgtgtgtgtgtatgtgtgcatgtgcacgtgtgatatgtctggagtgtttgtgaggaagaaaggcaaacaacagttgtaatagg

SEQ ID NO: 417225 - DNA, 201 bp, Homo sapiens
aaccccgtctctactaaaaatataaaaaattagctgggcatggtggcacgtgcctgtagtctcagctacttggaaggctgaggcaggagaaccgcttgaayctgggaggtggaggttgcagtgagctgagatcgcaccactgcactctagcctgggcaacagagccagactctgtctcaaaaaacaaacaaataaaccaaa

SEQ ID NO: 417226 - DNA, 201 bp, Homo sapiens
catttactaactgtccctttacagaaaacatttactaactcttggactagatgaccttagaagtgcctcccagccctgagagttgttgtcatatggtattgtgatatggtattttaaaagatatatttttttcttttagggataaatgtagaggtattaatgggtggaaatattggggggagtggttgctttaaaccagtc

SEQ ID NO: 417227 - DNA, 201 bp, Homo sapiens
ttattttgatgatccaaaatttagggattcaacaacactgagaactattttccagttttcctacttgcccatctatatatttgtaatacttaaaacagcatttttttttttttgcctaatttaaaagtattttacaagtagtttgttcttcaatagagggtttatttgttttgaacttaagggaatatagatactgtctca

SEQ ID NO: 417228 - DNA, 201 bp, Homo sapiens
atttactaactgtccctttacagaaaacatttactaactcttggactagatgaccttagaagtgcctcccagccctgagagttgttgtcatatggtattgtgatatggtattttaaaagatatatttttttcttttagggataaatgtagaggtattaatgggtggaaatattggggggagtggttgctttaaaccagtca

SEQ ID NO: 417229 - DNA, 201 bp, Homo sapiens
ttccgcatctctattcccaccccaatgcaatgacaaacaagaaaagataaatccaagcagtagctctgggcagcaactaagctgtgctgggttgatttcaycacctggtggcagaggctaagaaatgtttcaatattccttcattacctcctttctccttctatggctcctttctcctcttagggctgatcctcccatctt

SEQ ID NO: 417230 - DNA, 201 bp, Homo sapiens
tttactaactgtccctttacagaaaacatttactaactcttggactagatgaccttagaagtgcctcccagccctgagagttgttgtcatatggtattgtgatatggtattttaaaagatatatttttttcttttagggataaatgtagaggtattaatgggtggaaatattggggggagtggttgctttaaaccagtcag

SEQ ID NO: 417231 - DNA, 201 bp, Homo sapiens
attccttcattacctcctttctccttctatggctcctttctcctcttagggctgatcctcccatctttctttttttattcagagctcaacaaattcaactytaagcagtctctttctcatatgtgcacacatttatttttccatcctttcaaaaattctaccttcattttaaaattattgaccccaggaacatttattgct

SEQ ID NO: 417232 - DNA, 201 bp, Homo sapiens
cttatttatgaattttttttaaaaagtgaccttaattatgattgctgagtctgagagatctgccagcgaatgtgtgggaacaccctttgaagtgatgggcyctcagttgaagaaaaggcctatatttggaaatgaagcaccacacaggaaaaggcctagggccttaggccgcagaggtttttgaacacgcgcagacattcc

SEQ ID NO: 417233 - DNA, 201 bp, Homo sapiens
tgagtcccttccacactggacaaggggaagtgggtggtgccaaaaattgccagatggccccaaatgagtctctagtgtgggttaaccctcataatccaggagcaaaaggtgtgtctgggacactgaagcagccttcagacttcagaatttgcttagcactctttcttttaggatgtgctaagtggcaaagagggcataccg

SEQ ID NO: 417234 - DNA, 201 bp, Homo sapiens
tcaaaagagtcaaaggcggtgcctaggacattgctgctactgctatcactggactgggagaggctggcttcccctgggaccaacataaacaagaagatggyagggaatctaaatttgtgaaagcacaaaatccagatgaaggaatgggtcagagctagcaaagcagcaggctgagctgacgtaggcagcctggggctgtag

SEQ ID NO: 417235 - DNA, 201 bp, Homo sapiens
atcaaaagagtcaaaggcggtgcctaggacattgctgctactgctatcactggactgggagaggctggcttcccctgggaccaacataaacaagaagatgkcagggaatctaaatttgtgaaagcacaaaatccagatgaaggaatgggtcagagctagcaaagcagcaggctgagctgacgtaggcagcctggggctgta

SEQ ID NO: 417236 - DNA, 201 bp, Homo sapiens
aatcttatagatttaggcaattctgttgagtgtgcagtgtggaatctcactgattttaatttgcatttctctcataactaatgatgtggagtacctttttwcatgcttataggccatttgggtggcttcttttgtcaaattcaaagacttaagtccgaagactttaagtctttgcccattgttttaagttgggttttgtct

SEQ ID NO: 417237 - DNA, 201 bp, Homo sapiens
attcttatacacgccttttgatagatatgtgcatttatttctcttgggtgcatgattaagactaggaattctagttcatatttagtattagtaaatactgygcaacagtgtttaaagtagttgcaccaatttacacccccaccagcaatatgagagttccatttgtgctatactctcgccagatattttcaatcttataga

SEQ ID NO: 417238 - DNA, 201 bp, Homo sapiens
tttctgtggtacgttgatatcttttgcagtctatacttcttggctctgtagttatttctctgtgctaattcttacatggacatgccttataaattgtgttkcacttgctgacttcgttttgagctattttgtcatctctgtcatttatcatttacctggagacacatacctatactttttggatgacattagtgtatctat

SEQ ID NO: 417239 - DNA, 201 bp, Homo sapiens
gaaggtgagcagtttactccacccaggtcacacaagtaggaagaatttgtgtgttaggtcttttacccccacctctaatttcagagcctgtggaccgatgstgccttcctgcagactggtgacagtctggcctgtttttaaagccaccagataggagtacttcatctttttgtttcagtatttaagatgaaaaactccctt

SEQ ID NO: 417240 - DNA, 201 bp, Homo sapiens
ttattgagtgcctactttgtgttgggcattattctaggacacaagaatgagtgaaatagccagtccccagtgtcatggagctggctctctggaagaggagrcacacattaattaaacagtcctaatgagtgtgcatttataaactgaggtaaatgctcccaggatgaggaacatggtcctctgagattgttgcacagagga

SEQ ID NO: 417241 - DNA, 201 bp, Homo sapiens
ccatcttctaggtacgggaaaatgaagctgaaggtgagcagtttactccacccaggtcacacaagtaggaagaatttgtgtgttaggtcttttacccccayctctaatttcagagcctgtggaccgatgctgccttcctgcagactggtgacagtctggcctgtttttaaagccaccagataggagtacttcatctttttg

SEQ ID NO: 417242 - DNA, 201 bp, Homo sapiens
gtgacaataaaattaaattgtataccagtcattttaatactgaagatttttaggcatcataattaaaatgtagatcagggaggtatccaagaggtcatctrttgcggttctctcattttatagatgggaaaactgggtgcctaaagcagaagggacctgttcaaggccatgcagcctagaagagaagccaggattaggcct

SEQ ID NO: 417243 - DNA, 201 bp, Homo sapiens
gcacaatgagataggcagaatgtaaatgctttacctacctcatcccatttaatcctcacagcaaattgatgagctggtactctggttaatcccatcttctrggtacgggaaaatgaagctgaaggtgagcagtttactccacccaggtcacacaagtaggaagaatttgtgtgttaggtcttttacccccacctctaattt

SEQ ID NO: 417244 - DNA, 201 bp, Homo sapiens
aaggtgacaataaaattaaattgtataccagtcattttaatactgaagatttttaggcatcataattaaaatgtagatcagggaggtatccaagaggtcayctattgcggttctctcattttatagatgggaaaactgggtgcctaaagcagaagggacctgttcaaggccatgcagcctagaagagaagccaggattagg

SEQ ID NO: 417245 - DNA, 201 bp, Homo sapiens
cctggtgctgtgtcccacatgtaaaaggcacaaaatagttatagactagactagaagagaacataaagcagccaaactttgcccaagggtataagcaaccytaatgtctgatgaatgtgtgacagatgaatcaacttggaaagggaggtgaaacagagaatggtgaaaggacatgattgagaacctagtctgtcttaggtt

SEQ ID NO: 417246 - DNA, 201 bp, Homo sapiens
tcccctcttttagccttattttcattttctttaaaatcaagggattagacttgctgcttggcttcagctaccctccctcacccctccacccacactcctcrccccccagcctactactagcttttctgtagggtgtgattcttagctgcagaagccctggggtatagtttcctttcttgccgggagggagaaaagcaagat

SEQ ID NO: 417247 - DNA, 201 bp, Homo sapiens
tcattacccagcccttgggcctcccaaaagccatccctgggatggaggcagtgaggaatcgtggggacatcacctgtctgctcttccctgccaaggagctyaggaagcccatgataattaggtgaggcaggtctcaatggaagcttggaaaagttgacttgtacaggcataccttggagttattgcaggtttggtcccaga

SEQ ID NO: 417248 - DNA, 201 bp, Homo sapiens
cccagggatggggttagactaaatttgagaggcactgtctaaagtcatgtaccaagatgttctcactggttgaccacaaattggcatcctaggataggctycttcccttccctactgctgcctctgggtgaattgcttacccaaagattggggccaacctttgtctcctctattggagatcttaatctgagcttcccattt

SEQ ID NO: 417249 - DNA, 201 bp, Homo sapiens
gtgggtagatgctgacaggagcattatgaagcaaatggtcattgatacagtttcactgagggagtataacactgggattttgcagcctgtggtgttcagtstcctgacctctatgccagcacacagacagcaagaagcagtggggaactttgagcttcaagctctacattggtttgacaaaatcaattcatcactgtctca

SEQ ID NO: 417250 - DNA, 201 bp, Homo sapiens
aaccccctactttggaattactgggactctaagtctcctgattatcttccctttcctggtgggtccttgaacattgtatgttctcctcagtggcctccttyggtgatgctcattattgccactgctcaatgcaagtgccaagtccccaaaccactgacagtggagtggtcattatctccattggcatcttcctgaccatgt

SEQ ID NO: 417251 - DNA, 201 bp, Homo sapiens
aactttagctctcttcttctcaccccaacttctctggaagatagcagaacctagttcaagatcatttttttcacaggcatacatacaatgtgctttttttwaaaatgtatatataacatatacacatatatatgaaataaaatacaaattcaagcccacagagagagttaaagatatcttagtaaggctaggttcttccag

SEQ ID NO: 417252 - DNA, 201 bp, Homo sapiens
agataatcttaaactgtgtcaagtttttacaaaaggtcacattggtgacttggaggttcttggcagttgagctgctagtagagggtgtttgtattctgggrcctgagggacagatgggagcagggagcagagcaggagggagattagtagatgtggaagggaaaggtggccgtcccaccctgggtctgccctggcaacccc

SEQ ID NO: 417253 - DNA, 201 bp, Homo sapiens
caaggcgggtggatcacgaggtcaggagtttgagaccagcctggccaatatggtgaaatcccatctctgctaaaaaaaaaaaaaaaaaaaaaatgaaaatyagccgaggtggtggtgcatgcctgtagtcccatctactcgggaggctgaggcaagagaatcacttgaaccctggaggcagaggttgcagagagccaagat

SEQ ID NO: 417254 - DNA, 201 bp, Homo sapiens
ggaggctgaggcaggagaattgcatgaacccgggtgacggaggttgcagtgagccgagatcacaccactgtactccagcctgggtgacagagcaagactcygtctcaaaaaaaaaaaagattaatagccctctctttcttcatctagttcaagctgttacacattggattttgttcaatgctctttagacactttctctgg

SEQ ID NO: 417255 - DNA, 201 bp, Homo sapiens
acgtgttatgatgggtggactgttggagttacctgggcatgaatgttggcttggccactttctggctgtatgaatttgttcatttttgtatctattcagtraacacctgttgagcaccaactgtgtaccaggcactgtcctagagatacagcagtgaagaaagtatacacgcttcttccctcaccacagagtgcagtctag

SEQ ID NO: 417256 - DNA, 201 bp, Homo sapiens
tgaggcaggagaattgcatgaacccgggtgacggaggttgcagtgagccgagatcacaccactgtactccagcctgggtgacagagcaagactccgtctcaaaaaaaaaaaagattaatagccctctctttcttcatctagttcaagctgttacacattggattttgttcaatgctctttagacactttctctggagtggt

SEQ ID NO: 417257 - DNA, 201 bp, Homo sapiens
gccttgattaatttatcttctagaacagtgctaatagaaatataatatgagccatagttcaaaaagtaaaaagaaacaggtgggattaattttaataatayatctacttaacccagtatatccaaaatattatttcaacatgtaacccatatcaaattataaggagccacactcttttttgcactaagtctttgcagtcca

SEQ ID NO: 417258 - DNA, 201 bp, Homo sapiens
tctgggaagcactaagacagagcagctttccacagccacctttgcttctcaccccttacccttggggagttgtgtcccccttctccagaaggccccaatcrgcaagctggaacttgctttttctatagtggggtcctgtttcctgtaactgacttctgttacagtcttctgtgctttgctgtgctggagttgccagaagaa

SEQ ID NO: 417259 - DNA, 201 bp, Homo sapiens
tattgttttttctttaagaacaaattaaatacaaagcatttctctgaagtacaaggaggaccttgggttcctgtaaatggcttaaaaaacaaaagaaaaaraagagtacacctgaaagattttgtcggtggaactccatccccaagtttgcatgtgaataaaaaattgctggccgggatcccaggcctgtttgtagatggt

SEQ ID NO: 417260 - DNA, 201 bp, Homo sapiens
aacaaaagacaccataaaccaagtgaagagacacaccacagacttctggaagaagatacttccaaatgcacataacaacaaagaatcatagaaacaaaatmatacacaaagaatacttgcaaatcaataaggaaaaggcaaacaaccaaagaacaaaacagagaatgtatatagacaattcacagaagaggcaacttaaac

SEQ ID NO: 417261 - DNA, 201 bp, Homo sapiens
cctgggttcaagcgattctcctgcctcagcttcccaagtagctgggattacaggcatgcaccaccacacctggctaagtttttgtattttttgtagagacrgggtttcaccatgttagccaggatggtcttgatctcctgacctcgtgatccgcccacctcagcctcccaaggtgctgggattacaggtgtgagccaccat

SEQ ID NO: 417262 - DNA, 201 bp, Homo sapiens
gagtctcgctctattgcccaggctggagtgcagtggcgcaatctcggttcactgcaatctctgcttcatgggttcaagcgattctcctgcctcagcctccygagtagctaggactacaggcgcgtgccaccatgcccagctaattttttatatttttagtagagacagggtttcaccgttttagccaggatagtctcgatt

SEQ ID NO: 417263 - DNA, 201 bp, Homo sapiens
atagcttttgatttaaagtgagagatatgtgactcttcctttcacttgaatacttagaggccatggtagggttattaattggcctaatttcaatattgttktgtctccggaaatagggaggcctgaggagagggagagagatggaagaagggctggtcggtggagcagtcagaacacaatcgattaagtttgccatcttat

SEQ ID NO: 417264 - DNA, 201 bp, Homo sapiens
gttttagccaggatagtctcgattccctgaccttttgatccactcgccttggcctcccaaagtgttgggattacaggcgtgagccaccgtgcctggctgcrgttttttttttttttttagatggagttttgctcttgttgcccaggctggagtgcaatggcacaatctcagctcactgcaacctccgctccccaggttcaa

SEQ ID NO: 417265 - DNA, 201 bp, Homo sapiens
tagcaattaacgtcatttgccataggtaatgttttgttgttgttgttgtctgtctttcccctcattagatttaagctccatgatgggagggagttttgtctttttttttttttttaaattagagacaggttcttgttctgtcactcaggctggagtgcagtagcatggtcatagctccctgcaaccttgaattcctaggct

SEQ ID NO: 417266 - DNA, 201 bp, Homo sapiens
agaattgcttgaatccaggaggtggaggttacagtgagccaagatcatgccactgcactccagcctggataatgcagtaagactctgtgtcaaaaaaaaawttttttttttttttttttttttttttttttactaatagtaagcaaccaagtttagggatccctggtctggagggtgagatccagatccagccatggcact

SEQ ID NO: 417267 - DNA, 201 bp, Homo sapiens
aggatggtgattgggtctagtattgctgatacaggcttatgcagagaggactgcctgcccttggccagatgctgcgggtagccagtgcatccccagggtcrtatactacccaaaaggacaggcaagcaagagttgctagtgcagatattttttctttccctctgtctgtttagccagggctgacctaactcacagtcattt

SEQ ID NO: 417268 - DNA, 201 bp, Homo sapiens
ttaagaccagcctcgacaacataacaagactccatctctataaaaaaattttttttaattagctgggcgtggtggcacatgcctgtagtcctaactactcrggaggttgaggcaggaggattgcttgagcccaagagtttgaggttacagtgagctatgagttcaccactgcattctaacctgggtagcacagtgagaccc

SEQ ID NO: 417269 - DNA, 201 bp, Homo sapiens
aaaatgatcatttaaaatggctatgcagtaaacattacatgattagaaggttctgggatttctcaaaccattctttggatattagacatttagatcatcctttttttttttttttcccaccactagtgaatctctgttgaactgttttcctgaagatatgatcttggggatgcaatgacaagggcaaaggtccggagcatc

SEQ ID NO: 417270 - DNA, 201 bp, Homo sapiens
gttcaccactgcattctaacctgggtagcacagtgagaccctgtctctaagcaaaccaactaaccaaccctgaacttacaagatttagccttggagggaaagagagagagagagagagagagagtgtgtgtgtgtgtgtgtgtgtgtaggtggcaaatggttccaagtctgttcctctgaattcaccttctcttttggatc

SEQ ID NO: 417271 - DNA, 201 bp, Homo sapiens
ttgtccaagccataaatcaccaaacatcccacttttctgtctaatagagtcctttctaatatgttccaggctggagtgcagtggtatgatctcaactcackgcaacctccacctcccagagatgctccatggtttcctgtagtgtgtgttctccttcacagcaataagtagtaaacccgtctgttcaactacacacaagtt

SEQ ID NO: 417272 - DNA, 201 bp, Homo sapiens
ttcaccactgcattctaacctgggtagcacagtgagaccctgtctctaagcaaaccaactaaccaaccctgaacttacaagatttagccttggagggaaagagagagagagagagagagagagtgtgtgtgtgtgtgtgtgtgtgtaggtggcaaatggttccaagtctgttcctctgaattcaccttctcttttggatct

SEQ ID NO: 417273 - DNA, 201 bp, Homo sapiens
tcaccactgcattctaacctgggtagcacagtgagaccctgtctctaagcaaaccaactaaccaaccctgaacttacaagatttagccttggagggaaagagagagagagagagagagagagtgtgtgtgtgtgtgtgtgtgtgtaggtggcaaatggttccaagtctgttcctctgaattcaccttctcttttggatctt

SEQ ID NO: 417274 - DNA, 201 bp, Homo sapiens
agttctcttctgggcaaaatggtaagtgcttatcactccccacaatgcctccagcaccacagaaataacagccaccctttactgagtgcctactgtgcttsagtcctttgacatcactatgagtggttattattagctcattttatagggcagtaggttatgattaagactgtagactttcaagtttgaccaaggttcaaa

SEQ ID NO: 417275 - DNA, 201 bp, Homo sapiens
caccactgcattctaacctgggtagcacagtgagaccctgtctctaagcaaaccaactaaccaaccctgaacttacaagatttagccttggagggaaagagagagagagagagagagagagtgtgtgtgtgtgtgtgtgtgtgtaggtggcaaatggttccaagtctgttcctctgaattcaccttctcttttggatctta

SEQ ID NO: 417276 - DNA, 201 bp, Homo sapiens
accactgcattctaacctgggtagcacagtgagaccctgtctctaagcaaaccaactaaccaaccctgaacttacaagatttagccttggagggaaagagrgagagagagagagagagagtgtgtgtgtgtgtgtgtgtgtgtaggtggcaaatggttccaagtctgttcctctgaattcaccttctcttttggatcttag

SEQ ID NO: 417277 - DNA, 201 bp, Homo sapiens
gtctgggccacatcataagaccccgtctctacaaaaaatcaatcagtccatcaatctcaggtctgggtgtgcttgtatcattggagattgctgctcacagsctccctcagtggacaaagctgagaaaacatgtgagagaaaacgtgagaaaaacatgagtttgtgcatatacagacacacacacacacagccctacttttc

SEQ ID NO: 417278 - DNA, 201 bp, Homo sapiens
ggctcatgcctgtaatctcaacactttgggagcctgggaggtgggagtatcgcttgagcccaggggtttgagaccagtctgggccacatcataagaccccrtctctacaaaaaatcaatcagtccatcaatctcaggtctgggtgtgcttgtatcattggagattgctgctcacaggctccctcagtggacaaagctgaga

SEQ ID NO: 417279 - DNA, 201 bp, Homo sapiens
cacaagatgcctctaggtaagagcttcacataggaagatttctgttttagtctctggcttatattccaatgagtatcattatttattttgatgctcaaatygtcttatatttagccagtgggaaccccttcaagtttgcttctgtgtcatttgacatgcccccatcattttttgagcacttttttttgctctctgacacaa

SEQ ID NO: 417280 - DNA, 201 bp, Homo sapiens
ttcttatagatgtactaaagtttgctaatcaaatgaagtatttgtgtaggatctttcagggccaatttcaagaccaacatgttttggaagacagttgatawttcagatgtcaagtagtctctgggttgagcaaagttggaaaaacagatgaacccattaggataggtgaaacttctgcctgtgagaattaggctttgatga

SEQ ID NO: 417281 - DNA, 201 bp, Homo sapiens
tccatcactcgtcacagcctagattgagccctgtgagcaggaggcctgaactccaagggcctagggaatccctctgtaaatatggggctctccacccaagkctcagccatgtgccccaggaccagcaaagcagatctccgtcaaccaggtgggattctggtgtcttcgaagacctgacaagtgccaagcacactgcagaga

SEQ ID NO: 417282 - DNA, 201 bp, Homo sapiens
ggcctcctgtacctgcagaggctgcagaaggcggcgcagaggcggcaggtggccacagcatggcactgtctcctagagcctgagccaccaagcgccccacycccacttagctctgtgctgcaacccccaccccaccaaccccctttgcaggtgattgttcctgtggccattttgccttctgtttctctaaagaccacaaag

SEQ ID NO: 417283 - DNA, 201 bp, Homo sapiens
gatttgggagtcctggattctagtcctgactagaatagctgtgtggctatagacaaattactttacctctctgagcctggttcttcatctgtaaaatggamgtagtagtacctccgagggttgccgtggaaattaaggtgacatttttatgaaactgagaagcaccatccctaggtcgcagccctcatgctcatggtcaga

SEQ ID NO: 417284 - DNA, 201 bp, Homo sapiens
ggcactggtgagaagtggccagatcctggctgtattttgcacattaccttccccaaaccctttttccacaggccctgcccttttcttacctggtggacagycacagcctccttgctggcctccttgcctccaaccctcaccccccatctactcctctcacctcattctcagggctgctgtggatcttggtgtgaaggggac

SEQ ID NO: 417285 - DNA, 201 bp, Homo sapiens
aagtgcaaaggtcctgaggcaagtactgtttgaggaacagtaagaaagtcagtgtcactatggtgatgttagcagagtggatcatgatagaacatgatgtyagagaaggagctggagacccgctgttgtttattctgagtaacaggagaagccactgaaggattctaaacagtgcagtgccttgtctgacataggttttaa

SEQ ID NO: 417286 - DNA, 201 bp, Homo sapiens
attctctaagagaggacctcttcttttattctccattcctttcctgcttttactggcacttatcatctgaccttattttatctgtttagtatctgtttccscatcagaatttaaactccatgagagcagggccctttgtgttgatcactattatattacagtgcctagaacagtgcctgacacaaaataaccctcaataaa

SEQ ID NO: 417287 - DNA, 201 bp, Homo sapiens
gcagccaataagcccagaaagccagcagttctgagagaacacagaattcagaaagacagtctgtagggaggatttcagttgtttataaaacaggccaacaygtttccaccttgtaagttctaaatccgtcatcatagctccctagatctaagaatagtcacccactggagccaacgtgccacagcacgctctcactgcagg

SEQ ID NO: 417288 - DNA, 201 bp, Homo sapiens
aaccaccagcatacgggccaggccaggtaagagataggagaacaagtcctccagaaactgtttaagagtttttgcaggccgcgggttcagcaaggggaagyggacttggcctccaaagcagcgaatgtggcctcaggctaagctaacagaggtggaaccttggggactatgtgtgcatcttggtgggcccttcatctctgg

SEQ ID NO: 417289 - DNA, 201 bp, Homo sapiens
tcccagaatggcatccattcctccacccctctgctagtgcccctcggagattggcatgttcatttaataagatgacttttaatggaaacaacctgaaagtyccagccaggtctaaaccaccagcatacgggccaggccaggtaagagataggagaacaagtcctccagaaactgtttaagagtttttgcaggccgcgggtt

SEQ ID NO: 417290 - DNA, 201 bp, Homo sapiens
cctatggacagcatagatggggaagggagttttgtatgcttttgtctaaatgcttcaaaagccaaaaggaatgggctcagtctctgccatcttctccccayggctgcagccattggatcctccatctgtaggcttagtcgtgggcctagtattgtaccttggtcagacacactgaaggagctcaagttcaaagcttgggag

SEQ ID NO: 417291 - DNA, 201 bp, Homo sapiens
atgtgaactctagtaccctaatcttcctgcatgtggattcttctggacctgccactggattccagagcagaccttcttactaccacctccactattgcccyaattccctagcttcctcttctgcacactggtgattcccaaacaggcttgaggagagcaaggtaaggaggctctggtggtgaccaggcttcaggaatggca

SEQ ID NO: 417292 - DNA, 201 bp, Homo sapiens
ctgggatgctatctttgaccttcccttattcctgtgcctgaatcctgttttgataagttctgatagaattggggccctgccttggtgttgtcaactctttygtaaccataggcaagttgggaagtgggtaggaggataacatttgttgagcatctattttgtgccagttactttacccacatcatgttatttaatcttcac

SEQ ID NO: 417293 - DNA, 201 bp, Homo sapiens
cccaggttcacgccgttctcctgcctcagcctcccgagtagctgggactacaggcgcccaccaccacgcccggctaattttttgtatttttagtagagacrggctttcaccgtgttagccaggatggtcttgatctcctgacctcgtgatccacccgcctcggcctcccaaagtgctgggattacaggtgtgagccaccgt

SEQ ID NO: 417294 - DNA, 201 bp, Homo sapiens
tctgttggtaccttgatgaataatcctaaaacaatataggctggcctgctagagccctctctgtgagtgtgtgtgatctgtctcactgccagagctcattkgggctcgtttaataattgaaggccagtgttaagcattttgcagtttgtccttcgtagacaggagtggttttctgtgtgtaaagtgatatgctctattctc

SEQ ID NO: 417295 - DNA, 201 bp, Homo sapiens
cctgtggtttgctcaaggtcttaattatttagtagtagaactgggaccagaatggggacctctagttcagttcttgtttcactagtctgatgaaagtacatttttttttttttttttttttggtcataagtttgacagtttgacagactagagaataagagactcacaggatgttttaatgataatccagtttgatatttt

SEQ ID NO: 417296 - DNA, 201 bp, Homo sapiens
tcctctccttggcgtacctgaccctgagttctggtccgcaacccggtgttcgtttcccaccccactcttccgcgccccgatttccccgtttagaatgttcvacaatctggcggcgttctgtcgccatgggtatccatgaggagggcaggcgacagaactttgttgccactttgcagccgttcccctaagaaatatccctgg

SEQ ID NO: 417297 - DNA, 201 bp, Homo sapiens
tcctggggaaccatttatgcctttgtattcccagtcacttcctcctgctagcagttgggacatatggagactgaagggcaagaagtatctcccactggttggaaactctggattcagaaagccaaaaattgtcttttatgtattaggtatttgttcttttatgtactttgttctttcattcattccctcatttagcagatg

SEQ ID NO: 417298 - DNA, 201 bp, Homo sapiens
tttccttcctaaattttgccaaaaatggatgttagtgtcattagaaaagaactatgattataaaatatactggctgaaatatctatccattttctttgtctttttttttttttacaggtctcttgtggctcagagcataatttggcaataattggtaagtaatttttatactgataactgtttcttctgaaaatcatgtgg

SEQ ID NO: 417299 - DNA, 201 bp, Homo sapiens
ccctctgtaaatatggggctctccacccaaggctcagccatgtgccccaggaccagcaaagcagatctccgtcaaccaggtgggattctggtgtcttcgargacctgacaagtgccaagcacactgcagagagccctctgtaaagccagggatcgtcctctaacttacctgttttgaaaactggacgttccatgttccatg

SEQ ID NO: 417300 - DNA, 201 bp, Homo sapiens
ccgaagactttaagtctttgcccattgttttaagttgggttttgtctatgtttctcttagtgatttgcaggcatcccttatatcttgtagattccagtcckttgttgaatatgcatattgcaaacatcttctcccagccagtggcttactcttttttttttttttttttttggagatggagtctcgctctgtcacccaggc

SEQ ID NO: 417301 - DNA, 201 bp, Homo sapiens
gccaaatcaacttctttataaattatccagcctgtggtattcggttatagcaacagaaaaaaagaccaggagaagatcatgtatcttgaaagtaacagagrtagaactgaaatgacatttgctgagacataatatagtaaagcagaaaaaaacatagatttttgagtaagacatacttgagtttaaatcctgattttgcca

SEQ ID NO: 417302 - DNA, 201 bp, Homo sapiens
gctgcccaagaccatgggaacccacctgttaacatcagcatgacctggctgtgagacatggaggcaatggagatcattttggaactttaagatttgactaygctactggattttggacttgcatggggcctgtggcccctttgttttggccaatttctcccattttgaatggctatatttacccaaagcctgtacccccat

SEQ ID NO: 417303 - DNA, 201 bp, Homo sapiens
tgggttgtctttattaacagtgttaaaacagactaataaaatggtgaaaccgcgtctctactaaaaatacaaaaaaattagctgggcttagtggcacatgmctgtaatcccagttacttgggaggctgaggcacaagaattgtttgaaccagggaggcggaggttgtagcgagccaagatcctgccactggactccagcct

SEQ ID NO: 417304 - DNA, 201 bp, Homo sapiens
tgcctggttctcaaggggctttctcaagtggttgcctgagctgtttgccagacagggagacagcagctaaaggcagagcaacagttttttagctctcttgrttaccagtgctctgtcccagatcttgcctttctcagccctggaactgatatattcgttgccactaccacacctggccgcttggggcaccatattttcctc

SEQ ID NO: 417305 - DNA, 201 bp, Homo sapiens
ggaagacagacaagagggaaacttaccctgtcttcagttattgttctttactgaattgtccatttggtaggctatctcaaagtggaaaagaaagggtatasagccaagataaatacatcaaacacttccagtatttccccaaatgagcctctttgcaattgttgttgttgttcctcttccctagaaggcctaattcttttc

SEQ ID NO: 417306 - DNA, 201 bp, Homo sapiens
tagcttggctataaatcccagtttgttcatttgttcagtgaatatgtatcgaatcctactatattctagcctctgtgctcgtaactggagaggcagtcccygctcacatggagcttaccatctatctgagactataaagtaatgatggatgtgtagaatgttaaaaaggaaatgctgtaggaatatagagcagacaagcct

SEQ ID NO: 417307 - DNA, 201 bp, Homo sapiens
caatggccttggattgtgaatattagaggttatacaaagaagccaatcttccttcagtctttcattatcatccttctgtttttggactgactcatcataamtgacctgctttataatttaataatgagtacttttaaaacttaaaaaaattactttcttttaattttgcagtttcacagtttagcattgagtacaataatg

SEQ ID NO: 417308 - DNA, 201 bp, Homo sapiens
tgggaaggctctgtctccctgaggaaaaaccagatggagttgtccatttctgcagagtgacctgaaagcacatagcaccacgtatgattaatgactttgtrtagcagctcactgccccagtaaacaaggccagcccagtcacattgcctgggaagaagcactgtgtgctcttcctcaaccctagacctcgtcttaacaggt

SEQ ID NO: 417309 - DNA, 201 bp, Homo sapiens
cagtttgtccttcgtagacaggagtggttttctgtgtgtaaagtgatatgctctattctccaaggacactctgtttcctgaagtgcagctgactcagcatsttcagacgttgccattgggtaacttagatttcatcaagttctcttttaaagagaaatctctcccatctcatctttgagacaagtccatgaggcttggtgg

SEQ ID NO: 417310 - DNA, 201 bp, Homo sapiens
agatatttattgagtgcctactttgtgttgggcattattctaggacacaagaatgagtgaaatagccagtccccagtgtcatggagctggctctctggaakaggagacacacattaattaaacagtcctaatgagtgtgcatttataaactgaggtaaatgctcccaggatgaggaacatggtcctctgagattgttgcac

SEQ ID NO: 417311 - DNA, 201 bp, Homo sapiens
ctcctgacctcaggtgatccacccgcctcggcctcacaaagtgctggaattacaggcgtgagccaccgtgcccagcctcctggtccctttttatagggacraactcaccttagtagactttccagattccaagaagctattgcaaaggttgagtcctcaataggaactccatacgtggatacatgggaaggctctgtctcc

SEQ ID NO: 417312 - DNA, 201 bp, Homo sapiens
atgattccagagcttctcctcagtgttctgcttgttctcaggggactaaaaaatacccccagtggagacaattgagtaaactcctgagtaccacatagtaygccaaaaactgaccagtatgaaactgccacccaaggagcaaaaagttgttaatgaaatatttgccagcataggctgtgttataatacttagaaaaaaacc

SEQ ID NO: 417313 - DNA, 201 bp, Homo sapiens
cacatgacattagaaacatgtataatgtaaacttggacttctcaaacatttttgtcttcttcatcaaggtattcacttctccccaggcatatcctgccttytcatttctctgtgcttatgggaaaactgttacctctgcccgaaatgccttttcctttgtgttccctctgggaaaaattctaagaattttttttttttttt

SEQ ID NO: 417314 - DNA, 201 bp, Homo sapiens
aggtctcttttctcttggtggagtcactggcattgcattttaatcaagccaggggagtcagtctgcactggcattctctagcctagctttttcctgtgcaygactgaggagtagatagtgcagctaagcctccttcctgaaatgataggctgttttatccagagaagcatttctacaggcagaactcagtaccccccaaag

SEQ ID NO: 417315 - DNA, 201 bp, Homo sapiens
tcatagagcttttcattctggtggggaaacagacaaacaaaagtatatgatagggtattacgtgctgggaaggaaaattaagcagtataaagagaatgaamggatgaaattgggtgatcagggaaggccctctgagaaagtgccatttgaatgatgccctgattgaagggagggagggagggagccatatggttatctggg

SEQ ID NO: 417316 - DNA, 201 bp, Homo sapiens
tcctctattcttaagtcaatgccacagacatgcattactggaaatgttcttcctgggtacacaatatgaagctaagccttgtggatgaagtgagaggacayaggaaatggccctttccctcactgcttgctacctgattattgtgggtgttagggtggagagggtttagccttcactcttgaaacaaagctgaggtgatct

SEQ ID NO: 417317 - DNA, 201 bp, Homo sapiens
ggcgagggtagccaaagaagacgtatatgcttctagtctgggagggactgcttttcagagcggggagaagcaaaatcttagctgatctaatgtaagaagarccctggggtcatagaaccacagactttcatggtggaggggactttagaaacagcctaatctttacagaagaggaaattaaggcctaagtttggaaatgat

SEQ ID NO: 417318 - DNA, 201 bp, Homo sapiens
caagtgtccagtgagcgtgtgtcacgtgatggagtctgtgctgggcactttacatattcgtttagaaaaaggcaaggaaaagacgattgttcttatttacmgatgaagaaaccaagaattaggtatatacagtaggtgacagaggcaagatcaaatccaagcctgtctggctccaaaactactgagcagcaacaactctct

SEQ ID NO: 417319 - DNA, 201 bp, Homo sapiens
tgcatggtatgttatttagtttccacagaaaccccatgaatctacatttatgaatggggaaactgagactgcaagtcatacagtgaggacacaaaagaacragcagtatttgaagccaggtatgattccagagcttctcctcagtgttctgcttgttctcaggggactaaaaaatacccccagtggagacaattgagtaaa

SEQ ID NO: 417320 - DNA, 201 bp, Homo sapiens
agctctctggtaagtaggaatgtggtttcaaggttaagggcactgcatttcaaatcaaggggaccaaggtttgaatcctaactctgtaacttaacagttayatgacctggtacaaattattgaactcctctgagcataggtttcctcttctgtcagctggagataatagcacccgtctcacaggactgtaaggaggagtga

SEQ ID NO: 417321 - DNA, 201 bp, Homo sapiens
ggtccaggccccattcacataatctgcagcaagcgtgtgaggaatgtgcatgagagtgtgaaggtttctggagtaccaggagtctctggagattgcctgtkctcagctcatttgtcattgcctaggtttcctggagcatttccatcctaggaaattttttcttggcctcaggacagaacttctaagaacatgtcccaggat

SEQ ID NO: 417322 - DNA, 201 bp, Homo sapiens
tataactattcttccactcatttattctgcaactctggcagatgaaaagataaataagtatgcaaaacacagaggatttttagggcagcaaaactattcartatgaccttataattaggtggatccatgtcattatacatttgtcaaacccgtataatgtacaacaccaagatcatccataatgtaaaccacccactttga

SEQ ID NO: 417323 - DNA, 201 bp, Homo sapiens
ggtctgacactcagccccacactgccatggagccatgtggctgttaggaagggaaaattttgcattttctcttgcctgagtatctcatttgaattcatttkaaactgttagataaagagtttctcagagaactgtgtgcatcagacagtattttcaacagtctttgttttccaaactttttttgttatgaaagtaatatat

SEQ ID NO: 417324 - DNA, 201 bp, Homo sapiens
gtctcagtaatagggagtggctggtccagaagcacacacaggagagcaggaagaggggatcgcacccatcttttgactctaacactggtggtctttccacygcatgaagcttttagggtctgtagttcttttaggatatgatcccaatgaggtaaagaatactaggcttggagttgaaataccttgattttggtcatgacc

SEQ ID NO: 417325 - DNA, 201 bp, Homo sapiens
ttggcctgattttagatctttagattttagttcaagtgttacctcctctgtgaagttttctatatatgccaaggcaaaatttggtgctttcctttctgctytcagagtaattcaaatgtattcctactatattatttattacataattccagaaccatttgtttgaatgtttttctctccctcttacctcaaattcattgc

SEQ ID NO: 417326 - DNA, 201 bp, Homo sapiens
tgatattagaggaatgtttgttgactagttgaatgtgcgaatgatgggaacaaggaaccatccatgttgctgggctctatacttctgtctagtgttttcasctttggtgcagtttagtctccatagggtgggagccaggccaagcttacagtctgtcctgtgtagctcagcttgcaagtcaagtgacttgctcattcaggt

SEQ ID NO: 417327 - DNA, 201 bp, Homo sapiens
gggcctggcttccttatcagtaaagggaccaggtgagtggcccaaagtatgtttataggagctgaaccttggcaccagtgctcagcagttgcttgtccatyaatgggttgtgttgttgttgcatgggttttggtgaattttttttgggggggggagttctttgaggaagattccacaagcagcctggcatggcactgccgg

SEQ ID NO: 417328 - DNA, 201 bp, Homo sapiens
gcagagtgtgagggtcctgctcagccagtaagagtttgactcaggcctttagccccaagaaactctcagattaggggacactaatcttgtggctgcacatwctagggggtcagcagggctatcaaagggaaatgggctctcttcctgggtcaggactgacttagaaattggcatgttctcaatttggaaacaccttgttct

SEQ ID NO: 417329 - DNA, 201 bp, Homo sapiens
cagagggttacttacagggaatgtggtaggagaatatgaggcaatagtggttgccaaagcagtgatggcagctttttcacactgtgggatttttttttttytaaatgtgttaggcagatctgtttggtctttgtgaagccaggtagcaggataggatatggccagagggttattagagtaatgcacttgggaacagccagc

SEQ ID NO: 417330 - DNA, 201 bp, Homo sapiens
tggcattacatagcaagaagggggaaaaatatggggagctcttagacagatgctttttaaaattttaattttgccaaatggcgagggtagccaaagaagaygtatatgcttctagtctgggagggactgcttttcagagcggggagaagcaaaatcttagctgatctaatgtaagaagaaccctggggtcatagaaccaca

SEQ ID NO: 417331 - DNA, 201 bp, Homo sapiens
taaactgtgggtttctcatccttaaagactgagataataatagcttctgtatgtgtgtatcattggagcgaattatgtggtttatggaaaagctcttggcrcagagtaggtgctcagaatgtctgtttctgtttcctctgactcacttcagtgctctttctggtgtttcgccttgcttcccatatggccctctttgtcatc

SEQ ID NO: 417332 - DNA, 201 bp, Homo sapiens
gagctcctcccctcaatcctactgcctttgcctgctttagagggatttccctgccttcagtttcattccctgaactctagcccttcagtgcctggtgctgkgtcccacatgtaaaaggcacaaaatagttatagactagactagaagagaacataaagcagccaaactttgcccaagggtataagcaaccctaatgtctga

SEQ ID NO: 417333 - DNA, 201 bp, Homo sapiens
gtgcccattacatgccagatactgaactgcacagtgggagatgtggagatgaattcctagagctctggtctcaggaggccctccaggtggattctgcatcragatagtcttttggagtaatagcaaggtaggactctggtcttggtgaaacggtttattaggtggggattcagatagaggaaacaatcaattcagggtcac

SEQ ID NO: 417334 - DNA, 201 bp, Homo sapiens
tatatatgacatatgtactgtattacttttctaaaagctgtaaaattctgaatctgaaatacatctgactgtaagcatttcagattagggattatggaccytttttgtataataataataataatagacatattgcctgtcaaggggaaatctgtccccttactggaatctcaccatgtgaatcttggagtcacatagcac

SEQ ID NO: 417335 - DNA, 201 bp, Homo sapiens
caacataaacaagaagatggcagggaatctaaatttgtgaaagcacaaaatccagatgaaggaatgggtcagagctagcaaagcagcaggctgagctgacrtaggcagcctggggctgtagaaggagcaaagactctgcaggcagacagccttggttcaaactggctccatctctgtgtgagcgtccatattcttctcatc

SEQ ID NO: 417336 - DNA, 201 bp, Homo sapiens
ctaagtggcaaagagggcataccgggaatagagtaggtatgtttgacccagagaccctgtcaggggcctggagttggaacaacaaagcagccaaagaacayggtgacaggcgatggttggtttatccgtcaaagaggtcctgtgagttggggaggggcataggagcagacagtctgcagtgatctagaccagtgggtaacc

SEQ ID NO: 417337 - DNA, 201 bp, Homo sapiens
ttctatctacttagaatgctctttcttccctctcccctaacttttcttcttcctccaggaagtctcttctgatccctcagattatttattccttgctagcmggtgccatgaatggttcattttatatcccttatgatatctaccaagtaagacaaaatagacattttatgaatgactggaaagaccgggtttagcccccta

SEQ ID NO: 417338 - DNA, 201 bp, Homo sapiens
gtagcacagtgagaccctgtctctaagcaaaccaactaaccaaccctgaacttacaagatttagccttggagggaaagagagagagagagagagagagagwgtgtgtgtgtgtgtgtgtgtgtaggtggcaaatggttccaagtctgttcctctgaattcaccttctcttttggatcttaggggaactgtaggcctccttt

SEQ ID NO: 417339 - DNA, 201 bp, Homo sapiens
ctcctccatggactgactctgtgggtctgtgaccccagagtttgtagccctctctcacctttgccatactgtctaggctcagacagtgttcctttcaatgkggtcttgtctgtgagattccaactgagactgaagttctgtaggtgaggaccagtcaggagacaggtgaggccgggagaaatgctgtggttacagaggtga

SEQ ID NO: 417340 - DNA, 201 bp, Homo sapiens
tacacacacatctctagactcccaaatatctagtgactcttatttcagaagtttctggcttttgcaggttttcaggtcagcttcagctatccttggtaagwcacatatactacgcatttctatacacaaatgtagacttatgagcagtcatacctatgatgcttttaattggtcttttaaaacatttcatgatcattttgc

SEQ ID NO: 417341 - DNA, 201 bp, Homo sapiens
tgacttgctcattcaggtttcatatccagctgccctgtggcccaggacttaaacttcccagggctttgggtttcttgaaggacaaatgggatggattcctycctacctttgggcccaataaatggtattcatggtaactgacatctaactttataacatacaaaaggtttccattcactcttccatgagcctcaccacagc

SEQ ID NO: 417342 - DNA, 201 bp, Homo sapiens
aactaccaccattatctttgcaatcccctccttcccccagctaggtctttgttcccactgttctatctacttagaatgctctttcttccctctcccctaamttttcttcttcctccaggaagtctcttctgatccctcagattatttattccttgctagcaggtgccatgaatggttcattttatatcccttatgatatct

SEQ ID NO: 417343 - DNA, 201 bp, Homo sapiens
tgtttgttagcataccttggtccagaaaaaaatgccaagctagtttgagtccctttttttttcaggtttaaatctcctagaccccttggggtcttctgttstggcttttggactgaggagtaagcttagttcacgagtttgaagggtagtctcgactgacactgatgaaaccaagcgaatgatctttggtccttgtttctt

SEQ ID NO: 417344 - DNA, 201 bp, Homo sapiens
gaagatggggaagggaacaagtgtccagtgagcgtgtgtcacgtgatggagtctgtgctgggcactttacatattcgtttagaaaaaggcaaggaaaagaygattgttcttatttacagatgaagaaaccaagaattaggtatatacagtaggtgacagaggcaagatcaaatccaagcctgtctggctccaaaactactg

SEQ ID NO: 417345 - DNA, 201 bp, Homo sapiens
tgctatctttgaccttcccttattcctgtgcctgaatcctgttttgataagttctgatagaattggggccctgccttggtgttgtcaactctttcgtaacyataggcaagttgggaagtgggtaggaggataacatttgttgagcatctattttgtgccagttactttacccacatcatgttatttaatcttcactacatc

SEQ ID NO: 417346 - DNA, 201 bp, Homo sapiens
taagaagaatgggtaggacatattaaatggcatttagtgaatgttgggtatgtgtttggatggaggtggttagtattgcaaggcagcaggcccaggacatktgagtattatttgcagtgtttctgtaagaaaaaggttctgggttatgaatgggctaccttactgtgtgtggcattacatgtttgtgaagtaggcattata

SEQ ID NO: 417347 - DNA, 201 bp, Homo sapiens
aaaacttagttggagttaaacattaatgtataattcagtatagcctttatcatcatgagcactttttattacatgattgtccatgcattttaaaatataaygatgctctttaattagggccactgaattagtatgcataaaaacaatccatttctcattatactctccctgctcccagccacccagcttgaagttgctctg

SEQ ID NO: 417348 - DNA, 201 bp, Homo sapiens
aagtcttccctgatgtccaggtcctaattgatcacttcattctctgaacttccagtaggtagggggagagaaagagagagagagagagagtgtgtgtgtadgtgtgtgtgtgtgtgtgtgtgtgtgtctgttcctgctttatttatcttactgattatgaattccttaagtcatggggacattttcacctacagcacctgg

SEQ ID NO: 417349 - DNA, 201 bp, Homo sapiens
gatacccagtttagtgctctttccaatagaagtccaactcaatgcatatcatttttcttcctcagtttgccatttggatgtcacaagatgacattaatcartcaatacagattaaaataagatcaatgaggactagtagtgaattggaacaacattattaaatttacaaccctccaagccaagagttgtataaacctccat

SEQ ID NO: 417350 - DNA, 201 bp, Homo sapiens
atattacataatgcttttagcacattagggggctttgatattcaaatgataatgtagaacctcagagaatatcttaccctgccctcttattttatagatarggaaactcaggctcagagaacttaatcatcttatccagtattacccagaagaatagggcaactaggtcctcacttctaattctttttggtcacattcttg

SEQ ID NO: 417351 - DNA, 201 bp, Homo sapiens
ttgagttaatgctgaaatgaattaagactttaggacactgttaagaaaacatgattggttttgaaatgtgaggacatgagatttaggaggggccaggggcrgaatgatatggtttggctgtgtcccagatctcatcttgaattcccatgtgttgtaggagagacacagtgggaggtaatggaatcacggaggcaggtcttt

SEQ ID NO: 417352 - DNA, 201 bp, Homo sapiens
caggagcaggaaatgtggaaataaaagttaaaccagagattgggtaattgtcaagcccaaatgccatcagctctcatttgcagcaggactaaaactgctaraggatcaacctgtgcacagggtctaagtgcaatctgtcggaatgagtgggaaagaagctatttttagtttgcagagtcactcactcagctgtgttagctg

SEQ ID NO: 417353 - DNA, 201 bp, Homo sapiens
cccaagttgacttgtagatttaaagcaaccccaatcaaaatctcaagagacttttttgggggttgaagttgataagctgattctgacatttatatggaaayataaaaggctgtgactatccaaagtaatcttggaaaagaagaatgaagttgcaagatccacctaacccgacttcaaatttgctataaatctacaaggtct

SEQ ID NO: 417354 - DNA, 201 bp, Homo sapiens
gctgttgccttccatctgagggccctaatcctcaggggcttggggccaccccagtgatacctaaggacagagaaataaggcaggttagaaccagggcattytccctaaatggggaccctagtctgatgcatatcatgacagaagacctccaccaagaatacactagggtcaaagaaagagaggccacttctctccaggtcc

SEQ ID NO: 417355 - DNA, 201 bp, Homo sapiens
aatcctagaagggaccattttatccttatttgaaatttgaggaaacagaagcccagtgagagatgatttgtccccatggtcccacagctaacacgtagcasagccagccaggattagaacccaatgggtcccttgtctaggacccctccactgccccacatgagcccttttatgagagactttggcttctttgtggaggaa

SEQ ID NO: 417356 - DNA, 201 bp, Homo sapiens
ctatggacttgggttctaggcatagcccttattctgtcttctccaggccccagttttctgttcggtagaattttgagggttgggccaatgatctgtagatkcccttgctgctctgaaatttaactatagctcagtgtaggcatgattgttgtagacattttagaggaaggaggacttgagctgagccttgaaggctaggct

SEQ ID NO: 417357 - DNA, 201 bp, Homo sapiens
tactaccacccactattttcttatttatatttatcatctctcttttctcactaaaatagaaaatccaagagagcaagggccttctctgtcttgttcaaagwtgtgatcccagtgtctagaatagtccctggcaccttgtgggtacttagtgaatgtttactgactgaataagtgaaaaatgaatgaaagtaatggttttgg

SEQ ID NO: 417358 - DNA, 201 bp, Homo sapiens
tcttgggcaagtcattgggcctgaacttcctcacctgtaaaatgagggccttaattcctaatttgtctgcttcacaggggtgtcttatatcctttactcaytcacaattcctccctttattccttcactcatttgttcaacaaatatttgttgcataggcagaagtgaggggagggcattccaaacagaaggaatactgcg

SEQ ID NO: 417359 - DNA, 201 bp, Homo sapiens
caagaggctccgggctagaacactgatactggatgcagaaatctctttcggatgtaaaagtctcctttgaatgtatcatctctgttctcacccccagtccrgtggctaggcttggcttgcatcccagaacagagaagaattgctggaaggaggtttttggtggtggttttttttttttttcttcacctgtatcctgctttt

SEQ ID NO: 417360 - DNA, 201 bp, Homo sapiens
atccctatggctgtgcccttattgcctaggactgacctcagtgacactgccttcttggatttcttgcccaccatccccaccactggctgtttgtgtgctgycccaccttttatgctctcctggatctttctgacatttacctccttcttgacttttgagttcttgcccattccataaacattggttgacacctgtcatgca

SEQ ID NO: 417361 - DNA, 201 bp, Homo sapiens
aaggaagatgtgctgttgccccagcaactgaatgacttctgtaaacccaggagtgtcaggaggatcacaggaggagggggccactctgcagttgtcacagstaatttccttcaaaagtagatagtcactcattttcttatttagacgttttcccctggatatgatattgccatctttcagccttttgtattttgcagagga

SEQ ID NO: 417362 - DNA, 201 bp, Homo sapiens
gctctgaaatgagccacctctcttcccaaggtgcttattctctgaccttcttgcttcagggttgtggtggggctgatggagctttggaaggtctaaaactycacatgagtgactgaggagaagagcactgtatccatgagccaccgtgagctcagcaaggctgtacgcccagcacagccagataggctgtagaattacagc

SEQ ID NO: 417363 - DNA, 201 bp, Homo sapiens
ccattaggataggtgaaacttctgcctgtgagaattaggctttgatgacccagggaatcaggcatccaggactgatccagttctcaagcagaagtttctgycttgcactgcattgcattgtgttttgggtcagagaaggtggttttaaatgcctctaaataatttccttggtcttggaaggttatatctgtttgcagactg

SEQ ID NO: 417364 - DNA, 201 bp, Homo sapiens
gctgaccaactgcctttaattcttcttagttgcctttaatgtccaagggataagcaggaggaggagtgaattgtctggtgtctcagataggatgtctgcamagaagggtccagaaggatagccaagcaggagaggaaaacacaggtagacagagctagactgtggtataaccatcccttcctgggaaccaaagaaagcaaa

SEQ ID NO: 417365 - DNA, 201 bp, Homo sapiens
caggttcagactccaggctattactctctggtaaattgggtctgggaattgtctccagctgtggatatccaggtctggcctgctaggcatgtatttgctcsaggccaagagagagccaggccaggaggcagctatatgctactaagagtgggttcaccttggagaagacaagagccacactaaactaggtgctaccttggt

SEQ ID NO: 417366 - DNA, 201 bp, Homo sapiens
tttattcatccctggatttctccaactatagacgagagactcgagtgctggtggcatgggatgggtagaacttttggatgtggaagtgatgctatttccartggctgtgttcaggagatacagcctgtagctggccctgccctcttcctaccttcttggagaagcccaggccagagagcctcagctccctgaggctgacag

SEQ ID NO: 417367 - DNA, 201 bp, Homo sapiens
agcccagaaggactaagacagccttttatattgtcagtctttttctaataaatgtctaggtgttctttacatattagggagattaggcattgttctgtgakttgaattgcaaatgtattttcccagctttttatcttctgtttttgatgtttttgtttattttgtctgtaatattttgtcatgcaaccttttattttacta

SEQ ID NO: 417368 - DNA, 201 bp, Homo sapiens
ttttctttatctcttatgacattgacattttttaagagtacaggacagttgttttgtatataatgtccctcaattggttttatctgatttttcctcatgaktggatttcacttacacacttttggcaggaatactaaataagtgatgttgtgtctgtctttagtgcatcatatgaggaggcacctgatgtcagtttggcac

SEQ ID NO: 417369 - DNA, 201 bp, Homo sapiens
ttctgagcatgatcatcttttccaagagctatgggtaacctcatgaccctaagatctctgaaagacccttgtctgttggtaccttgatgaataatcctaaracaatataggctggcctgctagagccctctctgtgagtgtgtgtgatctgtctcactgccagagctcatttgggctcgtttaataattgaaggccagtgt

SEQ ID NO: 417370 - DNA, 201 bp, Homo sapiens
ttaggataggtgaaacttctgcctgtgagaattaggctttgatgacccagggaatcaggcatccaggactgatccagttctcaagcagaagtttctgtctygcactgcattgcattgtgttttgggtcagagaaggtggttttaaatgcctctaaataatttccttggtcttggaaggttatatctgtttgcagactggta

SEQ ID NO: 417371 - DNA, 201 bp, Homo sapiens
gaaaggcaaacaacagttgtaataggttgtgttaaatttcccttcgtcttgctttatcctggatttagggcctctcacagtgttacaaaaattggtaccgyaatttgaacctcagagtgcccatgtgtcatgttacttttctcccaggtgttcagcagccttgcacccctggtaatgggacagccacggagatctcagggc

SEQ ID NO: 417372 - DNA, 201 bp, Homo sapiens
aattctttgtcaaacctctcagaatgtctgtctgtcctgtctttcttcctccacgctgagcctagatgcagcatgtctggaagcatgagctaatgggaaaygacgggtttttgaactagataaatctgtgcttgatatgatctgacaagcaagtggcttcttagcttggagccttagtcaaacccattattttctctaaac

SEQ ID NO: 417373 - DNA, 201 bp, Homo sapiens
gaagaatgttttagatgggatctctaaggtagcaaaaggttgtgaaaagagctctggaccaagaattagaagactggaaccctgctttgccactgtctccycacatgatcatgagcaagtcacctcatgagcttaggcctcagctacctttttataagattctggaaacaaaactccacctcatctttgcacagacaccac

SEQ ID NO: 417374 - DNA, 201 bp, Homo sapiens
attaagtaagataagagttattgctccattttactaatgagaaaactggggctaggatagggtaaagtagcttattctacagttgtgtggatgtaaaatakgaaggctgtgacttgttgaagctggagccgagaggccacttgtcagggctgccttaggtggaatgtatacacattgtggtagaagaagtagtgaatgctt

SEQ ID NO: 417375 - DNA, 201 bp, Homo sapiens
gctccaaatcctgcacttattccgctatatctctcagagcctgtagcttggctataaatcccagtttgttcatttgttcagtgaatatgtatcgaatcctrctatattctagcctctgtgctcgtaactggagaggcagtccccgctcacatggagcttaccatctatctgagactataaagtaatgatggatgtgtagaa

SEQ ID NO: 417376 - DNA, 201 bp, Homo sapiens
tcatccagtaaaaccctagtatgctgcagatgtgcgatgatagaggcctggaaaagcaagcgacctagttaaagtcacacaatgtgctttttcagggtctrcactgtaaaggaaggctgcagacagagccaagggtatgatcagttgagtccacaaagaatagacaggtcccatgttgtgcagaaacctaaaggatctact

SEQ ID NO: 417377 - DNA, 201 bp, Homo sapiens
ttaagacatgttggacaaatgaaaaaacccaacttctttgaacttatttccttattaggaaagtggggaaataactgctgacctgatatgaggattaaaasagatgatgtattaaagcatccagcacaggactggctcatatgtcttttaaagacacattagctcccactactcttttggaaactcttgagctctctagag

SEQ ID NO: 417378 - DNA, 201 bp, Homo sapiens
aaccacacagttcccatttgtgcacttgtcctcatttctaatgggtctctgaaaacattcacttcttctttctgggtttcactcctgtcacctctgactcytgtcatgtgagctctgagagacccaatggtctccacttataaattacccattagagaaggagccctgggtcctgctgactttggattccaaggtcactcc

SEQ ID NO: 417379 - DNA, 201 bp, Homo sapiens
gcagtgtccccacttcctgagtcaagccctgggatagctttagtggttttccattgaacctgtgctccaggcacagatatacagataacgagttttcctcyatatcctgtacacattgttttcaatctgcttctctaatgtttgcggtgttgcattccttatttttgtttctgaggtttgatcagaagatgtgggctctgc

SEQ ID NO: 417380 - DNA, 201 bp, Homo sapiens
caggactgagctagcaggagcaagtggtgtcagactgcacgcttacctttccatttacctatgtgccaaacttcagtattttttatgtgaccttaaacacrttggggagtactgttctgggaggccatgcctttgaggcaataagcaagatagtgaccaagtggaaactgctgaaagttcaaatggcaggaagcttagcaa

SEQ ID NO: 417381 - DNA, 201 bp, Homo sapiens
gggttggctcaggccagagccagagctgattctggatcttgtctcaggccacaagagacaagactctgcaggacagatttcccaaccaggataccaagacraggatcgcctcagcactttggggtggctggccaggactgagctagcaggagcaagtggtgtcagactgcacgcttacctttccatttacctatgtgccaa

SEQ ID NO: 417382 - DNA, 201 bp, Homo sapiens
agatcacctctccctttgatttcttctgtgaccttgggccagttaggtgatcatctctgaagaatagttttctctttaaaaaggggaggttgagctcagtratctcaggatgagcttgatattctgtgatcttgtgatgacctagtcgcaggaaatatgccatcaaaataacttgtcccaaaattcagtcaagttcaccca

SEQ ID NO: 417383 - DNA, 201 bp, Homo sapiens
ccttttaaaatcacatctaatggggtgccaagccctgtaaattctttcttctttgttttcctatgacttctattctagtttaggccttgatgcatcctagrcttgtgttattgttgttgtttctttcttttcttctcttttcacttgctacctctgtgactttgggtaagtaccttgttccctgtcagtaacatggggatg

SEQ ID NO: 417384 - DNA, 201 bp, Homo sapiens
caaggccagtgtggccaaccacttgttgcagcacaacccatcactacgtcaacagtccctgcacctgctgctgtccctcacctggccagactctttagctyctccctggttttccagccactggcttctttgcctagcctttcccatgtagcctggcattgccttaccatatctcattggaacttggctaaggatggaaaa

SEQ ID NO: 417385 - DNA, 201 bp, Homo sapiens
tgtatttactacaaagccagggaagcccatgccaactgtataacttttggctctcttgagcattttgtttggaaagttattctaggaaattggtcttcatygcatccagatggatgctgtgattccacagacttttaagaaaaatggaaaaaaaaaggttttacttgcttgtcttcaggccagtttgtttgcccacagcaa

SEQ ID NO: 417386 - DNA, 201 bp, Homo sapiens
gcctggaaattctggtaagagtagcataaaacattacaaaacctggaaaaggttagaatagcctgtttgttagcataccttggtccagaaaaaaatgccargctagtttgagtccctttttttttcaggtttaaatctcctagaccccttggggtcttctgttgtggcttttggactgaggagtaagcttagttcacgagt

SEQ ID NO: 417387 - DNA, 201 bp, Homo sapiens
atgagcctaataaatctcatctgttacagggtctgagagatacgtcagggtgagagagacagagacaggtaaatagacattgacagttgtggttcccacaytttttcatccttggcttattcatccctagggtgcaaatagctatgggcaacttggcctcggccataaggaagatgtgctgttgccccagcaactgaatga

SEQ ID NO: 417388 - DNA, 201 bp, Homo sapiens
acattttttcttttgtaggtctagagaattctaaagcaatgtgtgttcttgctggctcagaccactcagcttcattaacaggtaggtaccagctctttcayggtttaacatgccattcaggattctgtatgtgactgcctgaagtggtgatattgaaatacagagggaatgtcatagactttggagctagaattctgatgc

SEQ ID NO: 417389 - DNA, 201 bp, Homo sapiens
catcatgtggacgacggttgtgccctgggcagactcttccattgtttttcacagcaaaggaaccaagcagagtgacaggtaagatgcttctttctttagtyctatatttgttctttgtcaggaagtagagacataaacatgcagaagaggattaaatggatttttgattttgctatttcttggtctctctaactttctcta

SEQ ID NO: 417390 - DNA, 201 bp, Homo sapiens
aactggacttctggcagtgggattctagcaagctgcccctggggacaggacagcagcactcctaagtctgctgacttgtcgggctgtgcctaggaagagastctgtcaggctgggttacgtggcaccagtcagctgcaaaagatatattcatcattcttgctgctgtgttcaatgttatattgtatacacttgctatgata

SEQ ID NO: 417391 - DNA, 201 bp, Homo sapiens
tggacttcggcaatgtggagcaaaataattcacttgtactttaggaagaccattttgacagagtgggggagaggtcagaggggagaggagcacaaggaagytgctgcacaatcccaggcaagagctaaggccagaattaagactcagaccatttctctgacaccctcagtgtcatggaggctgagcaagatatttagttcc

SEQ ID NO: 417392 - DNA, 201 bp, Homo sapiens
atcccaggcaagagctaaggccagaattaagactcagaccatttctctgacaccctcagtgtcatggaggctgagcaagatatttagttccaccctttctrtgtgcctgtggttttcttgctggaggaacactggtttgagtgatagtttattccatgtagcccataacttttaatattgtgaagttatgttcagccttct

SEQ ID NO: 417393 - DNA, 201 bp, Homo sapiens
ctgatttccctgggcctggagtgtttcagaatcctctgccccacttgttctgccgtgtattaactgcagagctgtggcaaattgcaaggcactcattggcratacacaggtggacatgagcttgttaacagaatgcagtaattgacataccgtgattcattatgcacagcacgaaggactctagtagaagcccactttatg

SEQ ID NO: 417394 - DNA, 201 bp, Homo sapiens
tgctctgttgcccaggctcaagtgcagtggcatgatctcagctcactgcaacctccacctcccaggttaaagcaattcttctgcctcagcctcctgagcaratgggatcataggcacccgccaccacgccccaccaattatttttgtatttttagtagagacggggtttcaccatgttggccaggctggtctcgaactcct

SEQ ID NO: 417395 - DNA, 201 bp, Homo sapiens
attcacaaaagtgggtggtccaaagtgttctgtaattctgctatttgcaaaattcctagtttatgacatagagaaatagaattctatagattgagtttcarcaaatgttaatgtagatgatgattatgtgttaggtactttcacattgcatttaataactaaaatataaatagcatctagtttctagaaaagaatttcttg

SEQ ID NO: 417396 - DNA, 201 bp, Homo sapiens
tgacctgaattaagcctctctttgccaggctccattgggtactttatattggatagctgccttaggagcgagccctgtagttccccatcttccccaaagawgactgccgtctggctccagcctcttctttgcctgaaatgtcctgaaccactgaggccttgcctggtaggcacctcttgaggtagataaagagaaaacatt

SEQ ID NO: 417397 - DNA, 201 bp, Homo sapiens
gataaattcagtgtcattcatttagcatttcctgagtactaatgtgtcagcctctgagccaggagcagtaaggggtacccagataagtggcttcaattcawcaaacatctcattaagacctactatgtacacagcactgtgcaagccactggggatagaaatgaatgaaatatatcccgcgtgattaagaaagttataatc

SEQ ID NO: 417398 - DNA, 201 bp, Homo sapiens
gtttgtggcctgaacaaagatgggcaactggggcttggtcacacagaggatatcccatattttaccccctgcaaatccctctttggctgtcccatccaacrggtggcctgtggctgggattttacgattatgctcacaggtgagttcactcctaggtagatttttgtcaccacaaaggctttgggtgagaacagtatgatg

SEQ ID NO: 417399 - DNA, 201 bp, Homo sapiens
ctcccggcctgcgggccgcttcccaccacagaccccgccccgcgccctacccatcacgcgtccccggtccggctccggcgctcacctacccccggcaggcsccgcccccgtgccgtccctcccggaagcgccggcggagcgtcctcgcatggagcgcgagcccagcgcctcggaggccgcccccgcggcggccgcgctctt

SEQ ID NO: 417400 - DNA, 201 bp, Homo sapiens
ggccgcttcccaccacagaccccgccccgcgccctacccatcacgcgtccccggtccggctccggcgctcacctacccccggcaggcgccgcccccgtgcsgtccctcccggaagcgccggcggagcgtcctcgcatggagcgcgagcccagcgcctcggaggccgcccccgcggcggccgcgctcttcgcctgggtacgt

SEQ ID NO: 417401 - DNA, 201 bp, Homo sapiens
cacttggcacctcgagccagcaggtgtgggggggcctggccgaggggcagttcctcagccgagtagcagtgtggggtaccgtgactgtgggggtgcccccygagggaggggtcatggtgggccaggcatgtgtgcagccaggtcagaaacaggaggccggggaggagctggtgaaacaggcaggtgggtggttaggaggtg

SEQ ID NO: 417402 - DNA, 201 bp, Homo sapiens
ggagcctcccttccacttcatcacccagccccacttctgcaggagctcaggtgacgggcccagaatttccccaggggaccctggccacctaggacagtggsaggcagggcacggccagccgcaagcagcagctcagccgtccaggtcaggagggccggagggagggagctcaggtggccacgcccacttgacaggtgagaa

SEQ ID NO: 417403 - DNA, 201 bp, Homo sapiens
accccaagggtagtgttgggggaggcatataaataacaataaatacacataaatagggggtgccctctggggagcacacgtgtccagtctaggggccccayggcctcggcggtcacactgaacggggcagcacgcaggtgcagccgacggggacgtggatgaactcggtgtggaaggcaaaggccccaggtgtggggagcc

SEQ ID NO: 417404 - DNA, 201 bp, Homo sapiens; identical to SEQ ID NO: 133728

SEQ ID NO: 417405 - DNA, 201 bp, Homo sapiens; identical to SEQ ID NO: 133749

SEQ ID NO: 417406 - DNA, 201 bp, Homo sapiens; identical to SEQ ID NO: 133750

SEQ ID NO: 417407 - DNA, 201 bp, Homo sapiens
tccccagggccctccaagagcacagagcagggtccggaggcctctaggagcctcccttccacttcatcacccagccccacttctgcaggagctcaggtgamgggcccagaatttccccaggggaccctggccacctaggacagtgggaggcagggcacggccagccgcaagcagcagctcagccgtccaggtcaggagggc

SEQ ID NO: 417408 - DNA, 201 bp, Homo sapiens
caccgctcagcttactttaataaataagcagccatgatttatagttgacaagagcaccagccaaaatctattctccttgacttatagttacactgattataaaaaaaaaaaaaaaagataatgtctctggtgcttaaaagcatattatcatagagtctttaaaacttgaaaggattttgattttattctctactctcattc

SEQ ID NO: 417409 - DNA, 201 bp, Homo sapiens
accgctcagcttactttaataaataagcagccatgatttatagttgacaagagcaccagccaaaatctattctccttgacttatagttacactgattataaaaaaaaaaaaaaaagataatgtctctggtgcttaaaagcatattatcatagagtctttaaaacttgaaaggattttgattttattctctactctcattca

SEQ ID NO: 417410 - DNA, 201 bp, Homo sapiens
tctactgcacggttcttttggagttgtttatattaactttatcaggatatcttctctcatccaaaagagatgagtgttattacgataaaggaaggggtgtgtgtgtgtgtgtgtgtgtgtgtgtgtgtgtgtgtgtgtgatctaaaagaagccaccctggcatatgatttcttccctcctcacatacccacttccaaacat

SEQ ID NO: 417411 - DNA, 201 bp, Homo sapiens
tactgatagtgtgaagagaaaaccttttgcgggtaagtagaatccaagcagcaagccatgccacctgccaatgaagcaattctatttcatcttaatccatktagcagtaggaaaggggtatttcatcatcagaggctagaatggggtaaaatctgattgccatgactctgaacataggaaggacagttcatttgaacaaag

SEQ ID NO: 417412 - DNA, 201 bp, Homo sapiens
ctactgcacggttcttttggagttgtttatattaactttatcaggatatcttctctcatccaaaagagatgagtgttattacgataaaggaaggggtgtgtgtgtgtgtgtgtgtgtgtgtgtgtgtgtgtgtgtgtgatctaaaagaagccaccctggcatatgatttcttccctcctcacatacccacttccaaacatg

SEQ ID NO: 417413 - DNA, 201 bp, Homo sapiens
tggctgtcagctaatccttgctagggtgatggtttaacatagtatctccctagggatattgacatttttcgtaaaggattttgaaagatctaaaaaaatcmcctaaaaatttttaagagaactcacccagtagtgcaattccaggccccaagacaggctgacacagaactgaaagagaattctaggatgggaattctatcc

SEQ ID NO: 417414 - DNA, 201 bp, Homo sapiens
tactgcacggttcttttggagttgtttatattaactttatcaggatatcttctctcatccaaaagagatgagtgttattacgataaaggaaggggtgtgtgtgtgtgtgtgtgtgtgtgtgtgtgtgtgtgtgtgtgatctaaaagaagccaccctggcatatgatttcttccctcctcacatacccacttccaaacatgt

SEQ ID NO: 417415 - DNA, 201 bp, Homo sapiens
caatcctccatttgctgtactctttgctagtaccaaaagtagactgattacactgaggtgaggctacaaggggtgtgtaaccgtgtaacacgtgaaggcartgctcacctcttctttaccagaacggttctttgaccagcacattaacttctggactgccggctctagtaccttttcagtaaagtggttctctgccttttt

SEQ ID NO: 417416 - DNA, 201 bp, Homo sapiens
  misc_feature (1)...(201): n = A,T,C or G
ctccccttgctctcttcctctcctctccttccaccctcaccccccgcccccaccccgcctccaggtttcctggcagctctggggaaatgttttattgcctnttgggggtagtcctaacctggacaaaggggaggaagactggcgctcctggctacttcacagagaatcgtgttacagtccctgggaaaacaattcctgggc

SEQ ID NO: 417417 - DNA, 201 bp, Homo sapiens
actgcacggttcttttggagttgtttatattaactttatcaggatatcttctctcatccaaaagagatgagtgttattacgataaaggaaggggtgtgtgtgtgtgtgtgtgtgtgtgtgtgtgtgtgtgtgtgtgatctaaaagaagccaccctggcatatgatttcttccctcctcacatacccacttccaaacatgtc

SEQ ID NO: 417418 - DNA, 201 bp, Homo sapiens
gcattctaaggaaattctcatgccagtcaataaaatttgtagtgggtgggggccagggtggcagaggaccagcgctgttccttattctaacttttctgctscttctgacttagtaaattcctccccttgctctcttcctctcctctccttccaccctcaccccccgcccccaccccgcctccaggtttcctggcagctctg

SEQ ID NO: 417419 - DNA, 201 bp, Homo sapiens
tcgccctttctcccccctcccaccccactgagttttctcatctgtaaatgagaagggtgcagagaagactcttttcttcggagtcagtgcctccggtttgcactgcttttcattcataagctgacttagtttagcgcagacataggatggagggacgcgctgtcagcggacagatcatgggtgcactggctacgcccggga

SEQ ID NO: 417420 - DNA, 201 bp, Homo sapiens
cgcatctacaaggactgtgttatggggagttttaaaaaccaaacttttcttatcagcatttatcaagtcttacaggagcatcagcacaggtatgaaggctygagaaagccccaaaggtggggctggcccctgtttcccaccttttgtcatgacaataaccccagctatgtctgtgcagggtgacctggagttcaggggcag

SEQ ID NO: 417421 - DNA, 201 bp, Homo sapiens
tgcacggttcttttggagttgtttatattaactttatcaggatatcttctctcatccaaaagagatgagtgttattacgataaaggaaggggtgtgtgtgtgtgtgtgtgtgtgtgtgtgtgtgtgtgtgtgtgatctaaaagaagccaccctggcatatgatttcttccctcctcacatacccacttccaaacatgtcag

SEQ ID NO: 417422 - DNA, 201 bp, Homo sapiens
aatgtcaagctaaggaattctgatctctcaaggattatcccacactgtaaattgcaggcaaagccatcgggtaggaaattaaagcagaggttaaagtaacttttttttttttaaactctcacttaaaacttacatatttttaaaaattacctcctcttctcattagccatctggccatgcaaactggctttcacactcctt

SEQ ID NO: 417423 - DNA, 201 bp, Homo sapiens
tctcagctcactgcaatctccacttcgcgggttcacgccattctcctgcctcagcctcccaagtagctgggactacaggcacccgccaccacacccggctmattttttgtgtttttagtagagatgggttttcaccgtgttagccaggatggtcttgatttcctgaccttgtgatctgcccacctcggcctcccaaagtgc

SEQ ID NO: 417424 - DNA, 201 bp, Homo sapiens
gaggtgccccttttcttgctgactgtcagccagggctgctctcagatcctagaagctgcctgtatttctcaccaagtggccctttccatcttcatagccartaacagctcattatgcctgggatccctctgcctctctcttctgttaccagctagagaaaactatgtgcttttaaagagctgctgagattcaattaggccc

SEQ ID NO: 417425 - DNA, 201 bp, Homo sapiens
ttaacagtaaagatgtgcttcgtgttaacattttcctttgtctccagttgctggacttcctaatacaacccatttatccaaaaatagagcaagaggaaacagaacatagtagcattgtagaaataaatagtcgttctggctggaaaccaaatggttggcaggggcattttactaatcactggtgtattgatatggcctaag

SEQ ID NO: 417426 - DNA, 201 bp, Homo sapiens
taacagtaaagatgtgcttcgtgttaacattttcctttgtctccagttgctggacttcctaatacaacccatttatccaaaaatagagcaagaggaaacagaacatagtagcattgtagaaataaatagtcgttctggctggaaaccaaatggttggcaggggcattttactaatcactggtgtattgatatggcctaagc

SEQ ID NO: 417427 - DNA, 201 bp, Homo sapiens
aaatggttggcaggggcattttactaatcactggtgtattgatatggcctaagctgtgcttgttggcaaaattgttacagtctgacttggtgactctttargatggggttgtaattttattttagaatatttcacacagtaaaggactaaggaagtccggtctcctaggttgcaaagccatcagttagtaggttagaaaat

SEQ ID NO: 417428 - DNA, 201 bp, Homo sapiens
aaaattgttacagtctgacttggtgactctttaggatggggttgtaattttattttagaatatttcacacagtaaaggactaaggaagtccggtctcctargttgcaaagccatcagttagtaggttagaaaattgctggagaggcttgtgtgtgtacttacaccattgttcagcattaattgagtatgtattctgacaaa

SEQ ID NO: 417429 - DNA, 201 bp, Homo sapiens
tgactctttaggatggggttgtaattttattttagaatatttcacacagtaaaggactaaggaagtccggtctcctaggttgcaaagccatcagttagtargttagaaaattgctggagaggcttgtgtgtgtacttacaccattgttcagcattaattgagtatgtattctgacaaatggattaagaagggagcaggaaa

SEQ ID NO: 417430 - DNA, 201 bp, Homo sapiens
gtggaggtggtgcaggatgctcaattattaaaaaatgatgtgattatatattaaggtcaaaaactgcctgatgcacatatacaccatggaatactatgcarccataaaaaaggatgagttcatgtcctttgtagggacatggatgaggctagaaaccatcattctgagaaactatcacaaggacagaaaaccaaacaccgc

SEQ ID NO: 417431 - DNA, 201 bp, Homo sapiens
aatctcagcactttgggaggccaaggcaggaggcttgcttgaggctaggagttcaagaccagcctcggcaacatagcaagtccccatctctgcattaaaarttagcttgtggtggcccgttcttgtagtcccagctgcttgggaggctgagtgggaggattgcttgagcccaggaggtcaagtctgcagtgagccatgatt

SEQ ID NO: 417432 - DNA, 201 bp, Homo sapiens
gaattgaacaatgagaacacttggacacagggcggggaacatcacacacgggggcctgtcgtggcgtggggggtggggggagggatagcattaggagatayacctaatgtaaatgatgagttaatgggtgcagcacaccaacatggcacatgtatacatatgtaacaaacctgcacattgtgcacatgtaccctagaactt

SEQ ID NO: 417433 - DNA, 201 bp, Homo sapiens
agggcaggtctattttactcagtctactgactcaaatacttatttcttccagaaataccttcacagatacaccccaaaataatgtcttaacagttgccagrctcagtagcttacacctataatctcagcactttgggaggccaaggcaggaggcttgcttgaggctaggagttcaagaccagcctcggcaacatagcaagt

SEQ ID NO: 417434 - DNA, 201 bp, Homo sapiens
gaattgactcaggcaattacggaggccaagaagtcacatgagctgctgtctgcaagctggagaaccaggaaagctggtggtgtaattcagtcttgagtccraaggcttgagaaccaggtgagccagtggtgtaagtcctagttggaagtcaaagccctgagtactggggagggctgctggtataagtcctgaagtgcaaag

SEQ ID NO: 417435 - DNA, 201 bp, Homo sapiens
tgagttttgtaaactacaaaattaaggactaaaagtttttacttaattttgatttttattcagattttatttgtagactcccatatcggaataagttaacracggagaagctgtacattttttagaaagagagggtttttttttaagatcagtttgaggttcacagcaaaactgagcaaaattttgcagagatttcccagg

SEQ ID NO: 417436 - DNA, 201 bp, Homo sapiens
tagggaatccgacagcggctgggaactttgaaaacttggcatgagtatgtttagaggtatccacggcactaggggaggttgcagagggaagtcccaaaagsaccgcggaaggcgctcggatcccggccgggcggggctcgcttctgtttggggcgggatgaaagctcaactggggtaatccatcctgtgccccggctcaca

SEQ ID NO: 417437 - DNA, 201 bp, Homo sapiens
tggcctctcagcagcattctactgaagacttaggcagggcatggaggggtgttacacagggtggtgcagggcaggctgtatagcagaaacccaaaactgcrcatcagccattcctttccttagaagtccttttaggtcggatgcggtggctcatgcctgtaatcccagcactttgggaggccgaggcgggtggatcacctg

SEQ ID NO: 417438 - DNA, 201 bp, Homo sapiens
cgtggggggtggggggagggatagcattaggagatatacctaatgtaaatgatgagttaatgggtgcagcacaccaacatggcacatgtatacatatgtarcaaacctgcacattgtgcacatgtaccctagaacttaaagtataatttaaaaaaaaaactgcctgatgttttaaagctgaattgaaagtgtatttttaaa

SEQ ID NO: 417439 - DNA, 201 bp, Homo sapiens
atgatgagttaatgggtgcagcacaccaacatggcacatgtatacatatgtaacaaacctgcacattgtgcacatgtaccctagaacttaaagtataattwaaaaaaaaaactgcctgatgttttaaagctgaattgaaagtgtatttttaaatttagatttggccttttgctaaccaagatattagattatctagaacat

SEQ ID NO: 417440 - DNA, 201 bp, Homo sapiens
acatgtctttttttaatgtcaagatgagcgtggcaacctcgtgtttgttttatacttttggacattttatattccactctgctaaaggggacttggggtgaaaaaacagaaaagattttggaatctttaatactccctgtagaatcatgttatttaacttacggccacaacttgtggaatatttcagcacttgtaattctg

SEQ ID NO: 417441 - DNA, 201 bp, Homo sapiens
agcaattcagagtgttttggatcttaagccatagcaactagtggaaaccttgtggaaacctcagcaggaccccccatgctacagtaggattggtgctggttgtgtgtgtgtgtgtgtgtgtgtgtgtgtgtgtgtgtgtgtgtgtacacactggtaaatagggctcttttatttctagcactggtctattccgaagtttcc

SEQ ID NO: 417442 - DNA, 201 bp, Homo sapiens
gcaattcagagtgttttggatcttaagccatagcaactagtggaaaccttgtggaaacctcagcaggaccccccatgctacagtaggattggtgctggttgtgtgtgtgtgtgtgtgtgtgtgtgtgtgtgtgtgtgtgtgtgtacacactggtaaatagggctcttttatttctagcactggtctattccgaagtttccg

SEQ ID NO: 417443 - DNA, 201 bp, Homo sapiens
gccaggcatggtggcgcatgcctgtaatcactgctactcgggaggctgaggcaggagagccacttgaacccgggaggcagagattgcagtgagtcgagatygtgtcattgcgctccagcctgggcaacaagagtgaaagtccatctcgaaaaaaaaaaaacaaaaaccaaaaaaaaaactttagtgtttttcagagacata

SEQ ID NO: 417444 - DNA, 201 bp, Homo sapiens
acttgaacccgggaggcagagattgcagtgagtcgagattgtgtcattgcgctccagcctgggcaacaagagtgaaagtccatctcgaaaaaaaaaaaacaaaaaccaaaaaaaaaactttagtgtttttcagagacatagtgtttccccaagttgtcatttgaagtacacaccccttcttccaaccacatgggcgtcagc

SEQ ID NO: 417445 - DNA, 201 bp, Homo sapiens
cttgaacccgggaggcagagattgcagtgagtcgagattgtgtcattgcgctccagcctgggcaacaagagtgaaagtccatctcgaaaaaaaaaaaacaaaaaccaaaaaaaaaactttagtgtttttcagagacatagtgtttccccaagttgtcatttgaagtacacaccccttcttccaaccacatgggcgtcagca

SEQ ID NO: 417446 - DNA, 201 bp, Homo sapiens
ttgaacccgggaggcagagattgcagtgagtcgagattgtgtcattgcgctccagcctgggcaacaagagtgaaagtccatctcgaaaaaaaaaaaacaaaaaccaaaaaaaaaactttagtgtttttcagagacatagtgtttccccaagttgtcatttgaagtacacaccccttcttccaaccacatgggcgtcagcaa

SEQ ID NO: 417447 - DNA, 201 bp, Homo sapiens
tcaggtagggattatttagttaacacagaagttatgtgatttatattttttaagaacagaaagatgggagtgataaggcactatttttcccactctttttwaagtttcttacaggtgttttctgtttttgttttgttttgtttctaaatcatacattcaaatgcttgagcctggtgaattttttgttagcttgcttgtttt

SEQ ID NO: 417448 - DNA, 201 bp, Homo sapiens
actctctatgccctaactattgaataataatttagctagtccgggtttttactagtcagaattttccagagagacagaatcaataggatatatggagatayatatatatataggaggagatttattatgggaattgactcaggcaattacggaggccaagaagtcacatgagctgctgtctgcaagctggagaaccaggaa

SEQ ID NO: 417449 - DNA, 201 bp, Homo sapiens
atcacaccactgcactccagcctgggcaatggagtgagaccctgtctcaaaaatttcttaaaaacccacaaaaacaaaaaaatccagacaagcttgtcaaygctatgtgagatagcacacttgccaccctgtactctctatgccctaactattgaataataatttagctagtccgggtttttactagtcagaattttccag

SEQ ID NO: 417450 - DNA, 201 bp, Homo sapiens
gcacatggccacagctaactgcagtgggaaatgtcatctggctgtgtgctcaggaggttgatagaggatgtgggttgctaataaacacatcacagccgccrcatggttgttcctggaataggtgaagcaggctgcttcctcagggccttcacattgtcattcccactctaggaaattctctcaccccagatggcctcatgc

SEQ ID NO: 417451 - DNA, 201 bp, Homo sapiens
ggattccacgtcaccaatatgatttgcagagtatgaagctgtgcttagctcggattgccagtatcaggaaaattcagtatttttctaaccaactgttgttytatcttatgaatattgagactcttataaatgaacatgtttctatattctttggtcacttcaaaagtcagatcaacctctctttatcatatggtatttagt

SEQ ID NO: 417452 - DNA, 201 bp, Homo sapiens
ttgttttaattttttgtagagatggggtctcattatgttgcccagactagtctcaaactcctgggctcaagcgatcctcctgctttggcctccaaaagtgytgggcttacaggcatgagccaccagacccagcctagagcagcattctaatttctgatgcctgtttgcagctgagctgcatgaggcttcaacgaaggagtt

SEQ ID NO: 417453 - DNA, 201 bp, Homo sapiens
gacacatgggtaatgctggaagtctttttctctttccctatgaatggaaaattcattcattcatttagcaaacatctggtgtcttttacgtgccagtcacwgtgctgggtttgaagaatacacagataaaaatatgctcggtcccttcacatagcttctattctaaacacaaggagagtttgttagtagattatttctaca

SEQ ID NO: 417454 - DNA, 201 bp, Homo sapiens
ccaatcaccatttgactagggctcatcacttttcaactttttcaggatttcttttggcaagagcaccccccctctctctcatgtgagctcactctctcctstctctcatatccgtgctcctcttcctacagtgctgacctctgaggtatccttttttcttttgactctcatcagtctacaacctctgtctatttctccttc

SEQ ID NO: 417455 - DNA, 201 bp, Homo sapiens
cctgaggttcccacattaagccgggactgtcaaagggagagaaagtggttctggctggtggtgttcctcacaagaacaaatgctttttttttttttttttwtaggaaaaaaaaagtaacccaatttaaatattcaggatgaatttcaattaaaaactaccaaaaaatcaaaaatcttcaaacacacaaggaaatacaccac

SEQ ID NO: 417456 - DNA, 201 bp, Homo sapiens
ctgaggttcccacattaagccgggactgtcaaagggagagaaagtggttctggctggtggtgttcctcacaagaacaaatgctttttttttttttttttawaggaaaaaaaaagtaacccaatttaaatattcaggatgaatttcaattaaaaactaccaaaaaatcaaaaatcttcaaacacacaaggaaatacaccacc

SEQ ID NO: 417457 - DNA, 201 bp, Homo sapiens
gaggttcccacattaagccgggactgtcaaagggagagaaagtggttctggctggtggtgttcctcacaagaacaaatgctttttttttttttttttatargaaaaaaaaagtaacccaatttaaatattcaggatgaatttcaattaaaaactaccaaaaaatcaaaaatcttcaaacacacaaggaaatacaccaccaa

SEQ ID NO: 417458 - DNA, 201 bp, Homo sapiens
aatgcaagacaataatatagaaatacagaaagaatgatagtataataaataatagtaaatatatgacaatttaccattgaaaatgacagcacaaaccaaasaaaaagggagcaatttgaatttttttttttttaaatcattgaggtggaaaaactagggtgtggtgacatgcacctggtgacatgtagtcctagctacttg

SEQ ID NO: 417459 - DNA, 201 bp, Homo sapiens
aaatacagaaagaatgatagtataataaataatagtaaatatatgacaatttaccattgaaaatgacagcacaaaccaaacaaaaagggagcaatttgaatttttttttttttaaatcattgaggtggaaaaactagggtgtggtgacatgcacctggtgacatgtagtcctagctacttgggaggctgaggtaggatcac

SEQ ID NO: 417460 - DNA, 201 bp, Homo sapiens
gtgctggaattacccgtgtgagccactgcgcccggcctatctccccagtttaaagtgaaattaatacctatatttgggtatgaaaatggttttaacatgattttttttttaaaaaaaaatgactattaaccctttgtgctaataatatgtaggtgcctagtgtcctaaagctctttacgatacatgtactggatatcttct

SEQ ID NO: 417461 - DNA, 201 bp, Homo sapiens
tgaggaaatctgatcactttaacaattttattattattttacagagacagggtctcactctgttgcccaggctggagcgcagtggtgtaatcatagctcaytgcagcctcacactcctgggctcaagcagtcctcctgccttggcctcccaaggggccgggactacaggcaatgccactgcacctggctgctttaacagtt

SEQ ID NO: 417462 - DNA, 201 bp, Homo sapiens
gggctgaggcttagtgagctcgtctatttttgctgtgtttgtacagattcagcctcagcaagcacacagcaggcctggctgtgggaggcagtgtggtttasagcaaagagtatgatggcctttagcatttgttagtctggctttggcttgtactctgtcactcaccgcctcaccacattatttaattgagtctctctccat

SEQ ID NO: 417463 - DNA, 201 bp, Homo sapiens
ttggggctaaactgtggtttacttttctggttggacttcttcttgcttatattcaagcttttacagaagccaaagcttattcttttttaaccctcaaaataaaaaaaaaaaagaactcgaatctaaaaaatgtgttgtgtaattacatggcagtttcagaaattctttttaaaaaatcttgtacctatagatggcttaact

SEQ ID NO: 417464 - DNA, 201 bp, Homo sapiens
gcatttatgcacataccacgttttcttcattcatctttcagtgcacaataggttgattccatattaaaaaaccttttagattctatcctttccccccagttttttttttttttcaatgtaaaccatgagaaaatagcagtggctctgctctgttggtgatttccttccacatctttgtggcatctacatgcagattaaatg

SEQ ID NO: 417465 - DNA, 201 bp, Homo sapiens
cagcggccatgcccacctatgatacatgagccattcacccgctgacaggcagacgaccctccacacaggctgccttgctcttaaccataaccaggcctacrttttccatgtgagcctgcctgtacaacttcatcatgtctctaaaaaggaaaggaaaggaggagaaccgaacagtgtatgatttagtgatacacacatgca

SEQ ID NO: 417466 - DNA, 201 bp, Homo sapiens
agtagccaagagactgtttatattctgcttaatcctcaccaaatttctgcaaaataagtagtatcgttacttttattaccactttacagataaggaagccraggcacagaaagattgagtgatgtgctaaagttcacatggccagtaaatgacaaaacccatgctcgttcatacgtaccatgccactgtctctgtcagctt

SEQ ID NO: 417467 - DNA, 201 bp, Homo sapiens
acatctgggggaagaagtatgcccagcagtaagaaacgcaagcctctttggagaacgctgggctggagatagaaatttgagagctttcactgttaactatsataggtgagatcataaaactgagtagcacagggaagccacttcactgcttttggcctcagattcctgttgatttgatggtggtcataatatttgctctgc

SEQ ID NO: 417468 - DNA, 201 bp, Homo sapiens
agctatgtgaagacagttttagacacccctgtgatttcatcctcggtcagtcagtgatttcagttccccagctccctgcctgtcaaagtaccctaaaaacyctagcctccaaattctcggggaggcatatttgagaaatacctcctgtcgtactagttggctggtcctatgattattgacctctttctttgctgtaatacc

SEQ ID NO: 417469 - DNA, 201 bp, Homo sapiens
cctgtctcttttctctctctacagctaaaacttaggtaatatctatattgtgtagagaacgtgctactgcgatggacctgccatttgcacatcagatgttygttctgatggtgttatatggaggtcagatttctgcaccatgatggacctctggcttttggttgcctcccagtccccaattctttttattaaaaaaatttt

SEQ ID NO: 417470 - DNA, 201 bp, Homo sapiens
accttggcctcccaaagtgctgggatcacaggcctgagcccacgcgcccggccgggaccttgtttaacatgcacattttggggctccatcccagacctacmaattcagaaactccaggagcgggtcccagcaatttgtgtttctactggccctccaggtggttctaatgcatgctaagtttgaaaacccttgttatgttgg

SEQ ID NO: 417471 - DNA, 201 bp, Homo sapiens
agttttaataacctcctgacaagaggattccactgtttctctgctatcccatttcaatatttaacaactttctaaaagtctgagcatctcttgcttcagaytgtcaatttttctgttattgttaggaaacagagggtcattctcttacgtaatactctccttatgattgtggtcggggaagagaatggtgccccacaggaa

SEQ ID NO: 417472 - DNA, 201 bp, Homo sapiens
gcactagctgccttgaattttgattttctccccagctggtgatactgcgtaaagctctaggccgctaccaattgctgcttggtgtctgtgcctcgtactakaaattatcaaatgccctgaaaggaaaaggcagcagcaaacacaaggctcaccttaatgcatttcctttctccctgaggtcttgacccatctagtgttgcc

SEQ ID NO: 417473 - DNA, 201 bp, Homo sapiens
ataaaagagcacgtacaacacatgagccaaactgcctgggttcaaattccagctctgcccttgctggctgtgtgaccatgtgcaagccacttaatctcaayctctctctctctctctttttttttttttttttttttttttttgagatgagttgtgctctgtcgctcaggctggggtgcagtggcacaatctcagctcact

SEQ ID NO: 417474 - DNA, 201 bp, Homo sapiens
gcacattaacttctggactgccggctctagtaccttttcagtaaagtggttctctgcctttttactatacagcataccacgccacagggttagaaccaacraagaaaataaaatgagggtgcccagcttataagaatggtgttagggggatgagcatgctgtttatgaacggaaatcatgatttcccttgtagaaagtgag

SEQ ID NO: 417475 - DNA, 201 bp, Homo sapiens
aaaacttacattaaaacttaatgtgactttagaattgagaaactgacaaaatatcgtactggccctaagggcaggatcagaggactttaaaaggcttcctyaggagagactatttagatcagagtaaaactaaattaacagagactccatcaattcagaggtctttgtaagtgatatatcgaataggcttatttgcctttg

SEQ ID NO: 417476 - DNA, 201 bp, Homo sapiens
tccctccaatgtggtcatcaccctagacactggctgccgtactacccattcttgatgtcacctttgagtcactccctcaggttatacactgcagggtggaracatttgattggctttgatgaagtcatgagtccgtacttcagatgctaggggacaaagaggggagctatctgtcgtgggaaatggggctctgagtcccac

SEQ ID NO: 417477 - DNA, 201 bp, Homo sapiens
acacatgagccaaactgcctgggttcaaattccagctctgcccttgctggctgtgtgaccatgtgcaagccacttaatctcaatctctctctctctctctytttttttttttttttttttttttttgagatgagttgtgctctgtcgctcaggctggggtgcagtggcacaatctcagctcactgcaacctgcacctccca

SEQ ID NO: 417478 - DNA, 201 bp, Homo sapiens
tggtgagggcaggtctattttactcagtctactgactcaaatacttatttcttccagaaataccttcacagatacaccccaaaataatgtcttaacagttrccagactcagtagcttacacctataatctcagcactttgggaggccaaggcaggaggcttgcttgaggctaggagttcaagaccagcctcggcaacatag

SEQ ID NO: 417479 - DNA, 201 bp, Homo sapiens
caagaccacagaatcaccttactgagtatttcataaatctgcttactttgaatatataaatgccagtttatcaagagcatttttttttttttttttttgaracggagtctcgctctgtcgcccaggctggagtgcagtggcgggatctcggctcactgcaagctccgcctcccgggttcacgccattctcctgcctcagcc

SEQ ID NO: 417480 - DNA, 201 bp, Homo sapiens
gatctcggctcactgcaagctccgcctcccgggttcacgccattctcctgcctcagcctcccaagtagctgggactacaggcgcccgccactacgcccggytaattttttgtatttttagtagagatggggtttcaccgttttagccgggatggtctcgatctcctgacctcgtgatccgcccgcctcggcctcccaaagt

SEQ ID NO: 417481 - DNA, 201 bp, Homo sapiens
ttttttaaaaaatcatttatttgtaatttatcctaattcgcaaaaagatctgtcataagcagcactagcaagatttttggtaaagttgagagggtctgcctgtgtcggggtgaaagctgatttctatgaagcgccttatcagatgtgcctgtctctcctaattgtgtcatgcctgtgtcctgggtggtaccacgcctttca

SEQ ID NO: 417482 - DNA, 201 bp, Homo sapiens
ttagtaaagacaggatttcaccatgttgaccaggatggtctcgatctcctgacctcgtgatccacccaccttggcctcccaaagtgctgggattacaggcrtgagccactgcgcctggccaggggttctgtctttaggcatggctggatccatgggctcagatgataatcaggaatctctctctttttctgtttttctatt

SEQ ID NO: 417483 - DNA, 201 bp, Homo sapiens
agttcgagaccagcctggccaacgtggtgaaaccccatccctactaaaaatacaaaaaattagctgggtgtggtggcatgtgcctgtaatcccagctactygggaggctgaagcaggagaatcacttgaacccaggaggtggaggttgcagtgagccaagattaagattatgcctgagtgacagagcgagactccatcgaa

SEQ ID NO: 417484 - DNA, 201 bp, Homo sapiens
tttcaccatgttggtcaggctggtctcaaactcctgacctcaagtgatccacttgcctcggcctcccaaagtgttgggattacaggtatgagccaccacayctggccagcattttgtagagtaagttctccttccctccttttcccacccccaaacatgtatctttaaggaccttgggggaaattgtggctctagtacatt

SEQ ID NO: 417485 - DNA, 201 bp, Homo sapiens
accgaggagatgatacctatccgtgttggtgagggcaggtctattttactcagtctactgactcaaatacttatttcttccagaaataccttcacagatayaccccaaaataatgtcttaacagttgccagactcagtagcttacacctataatctcagcactttgggaggccaaggcaggaggcttgcttgaggctagga

SEQ ID NO: 417486 - DNA, 201 bp, Homo sapiens
ggagattttggtccctagcacgagacggtattttggaggaagcttacttcacaagcagaatgaggttggatggggaaaatcccaggctaagactgtaagtwgtgtgatcatgcagtttatcatctaatctaacccaggacacctttaggagcgcagggcgttaggaccttggggtcttcaggagactcccctgctgcaccc

SEQ ID NO: 417487 - DNA, 201 bp, Homo sapiens
gcctgtctctgccaccttcttttccactacagatcatggagagtcttgctgaagaaccttccttaggggaaacaggcatgtctgtcttggatctttttttwaaaaaacaacaacaacaacaaaaaaaaacgggtctcactctgttgccagactggagtgcagtggcacaatctcagctcactgcaacctctgcctcccggg

SEQ ID NO: 417488 - DNA, 201 bp, Homo sapiens
tcaccatgttggtcaggctggtctcaaactcctgacctcaagtgatccacttgcctcggcctcccaaagtgttgggattacaggtatgagccaccacaccyggccagcattttgtagagtaagttctccttccctccttttcccacccccaaacatgtatctttaaggaccttgggggaaattgtggctctagtacattca

SEQ ID NO: 417489 - DNA, 201 bp, Homo sapiens
aacaccccggtctcttatggtagaaaatggcaggcacttccacatggtcccgccatcgggaatggatgggacacttctacctgtttctctaccactgattkcatcgtgcagaaggcctaaatgagatgcaagcctccctttggcaaagtattggaaaaatgaaggcaacgtattggaaacataaaggcttcataaagacac

SEQ ID NO: 417490 - DNA, 201 bp, Homo sapiens
tcaggctggtctcaaactcctgacctcaagtgatccacttgcctcggcctcccaaagtgttgggattacaggtatgagccaccacacctggccagcatttygtagagtaagttctccttccctccttttcccacccccaaacatgtatctttaaggaccttgggggaaattgtggctctagtacattcagggatactcctg

SEQ ID NO: 417491 - DNA, 201 bp, Homo sapiens
tgcaacctctgcctcccgggttcaagcaattctcctgcctcggcctcccgagtagctgggactacaggcatgtgccatcatgcccctctaattttttgtakttttagtagagacagggtttcaccatgttggtcaggctggtctcaaactcctgacctcaaacaatccacctgcctcagcctcccaaagtgctgggattac

SEQ ID NO: 417492 - DNA, 201 bp, Homo sapiens
agtcaggatggtggctgcgcccttcccttctcctctgggtctcatacctatgggcctctcctggcctccagtgccagggaagcctgcctgtcactggcccrtcatggcatatagggattgagcttcagagctaaccaacagtgggctcctttgcacttcgctgtgtgcgtggctcttcaggagggccagataaaaaggatg

SEQ ID NO: 417493 - DNA, 201 bp, Homo sapiens
aagcttcctgtatcatgggccccacttgcctgtcccacactgtgagaggaaacccatttacatctcatgtccaaagccatttttttcctacaaatagttttgtgtgtgtgtgtgtgtattgaggggttataaaggaaagcagaatattttatcatggtttttgcttcagtggctttaggacaaattagaactcaactctgg

SEQ ID NO: 417494 - DNA, 201 bp, Homo sapiens
ttccactggccctcttcagcccattcatcaaaaccaataccaagggcagtgggagtgaggggaaagttttttctgtaatctgtaatctgtcaatctgtttaaaaaaaaaaaaaaaaagtgtgtcagtataattccatgcagaacccagggtactgaccctgagtggcagacacaagtattccaaggagcatcaaccttcat

SEQ ID NO: 417495 - DNA, 201 bp, Homo sapiens
accctgtactctctatgccctaactattgaataataatttagctagtccgggtttttactagtcagaattttccagagagacagaatcaataggatatatrgagatatatatatatataggaggagatttattatgggaattgactcaggcaattacggaggccaagaagtcacatgagctgctgtctgcaagctggagaa

SEQ ID NO: 417496 - DNA, 201 bp, Homo sapiens
tgtactctctatgccctaactattgaataataatttagctagtccgggtttttactagtcagaattttccagagagacagaatcaataggatatatggagwtatatatatatataggaggagatttattatgggaattgactcaggcaattacggaggccaagaagtcacatgagctgctgtctgcaagctggagaaccag

SEQ ID NO: 417497 - DNA, 201 bp, Homo sapiens
gtttctagtccttcttttcttccttccattattttaggtattcttccttttttttcctctagtttttgtttttagttttgttattgttttgttttgttttrgtattcttcctttagagcttagttcagatgactcttatccacagtctctggggtcctctgggtcttcccttgcattccagccatcctcttgagagacttt

SEQ ID NO: 417498 - DNA, 201 bp, Homo sapiens
gaagatggaatatgaccagacacgctgtgttaggtgggcaggtctacctaacacagaaggtctctctgaggagatgatatgtgagcagagatgtgacaagrggagagagaaagctgtgtggctgtctggggtaagagcatctgcactgaggaaatagcatgtgcaaaggtcctgtggcaggagactggctggggccttcag

SEQ ID NO: 417499 - DNA, 201 bp, Homo sapiens
ctttggagagaagcagttgaagaggatcaggaaagaatacaacagtctcagtcactttctggttttcaggttgggtgatggtttccttggtgctttactaktatgcttcattacctccgtaaattgcatacatccttttgtatgtataattacataatttacattttaaatcttaaaccagtgacttttattccttaaggc

SEQ ID NO: 417500 - DNA, 201 bp, Homo sapiens
catgaggacatgagtaattagaaggagaaacattgttcataatgacaaggtggaatgtgaaaattggctggagcagaaagggggaaaaagacaagctgcartgtgagatttaggcacacagacaggcgtgtggtgtctttgtgtgtgagtacatatgtgagtgtgtgactgttcacgcgtgcacatgtgacctctagccta

SEQ ID NO: 417501 - DNA, 201 bp, Homo sapiens
ggatatacttgcttgggggagaaaatgggagactatctagaaggaaggtctgatttggagggatgtagcgctggcatggtagttgctatgtccgcctttcractggttgctatggggttgagccccagttcgggcaaatgtatgttcccggagaaaagcattttcagtcggcaattcctgacccaccctttgaaatgactt

SEQ ID NO: 417502 - DNA, 201 bp, Homo sapiens
cttttcatgtaatacttgtctactggtgataaatcccctcagcttttatttatctgaaaaaattctctatctgtgttgtggaaagatattcactgggtctrtaatttgagattgacagtatttatttcccttgcagcactttatagacagtgttttactgacttctaccctggatggcctgatgacatcttggttcctttg

SEQ ID NO: 417503 - DNA, 201 bp, Homo sapiens
gtagaatgtaagaattttacaacagtatacttcaatttccttcttctgttctttgtactattgttttcatatattttatttctgtttatgttacaaagccyataataccctgttagtgtttgcatcaagcagtcaatcacgttttaaataaattaaaaatgagaaaaagtctcttacgtatacccacctatttaccatttc

SEQ ID NO: 417504 - DNA, 201 bp, Homo sapiens
gaagcagaggagatctgaaactgaaagccgagcagatatttttattctttggagtttctgaaattgtgcagtgcagtgttttagcttaacattctcacagygacttttgcaataacgataacttatttttattggatggtttgcttgtgtgttacctgtctttttgctgcttaattaaatgacctatataaatatagcagc

SEQ ID NO: 417505 - DNA, 201 bp, Homo sapiens
ttgttaggaaacagagggtcattctcttacgtaatactctccttatgattgtggtcggggaagagaatggtgccccacaggaatcttagacctcctgttcyatctccatcctttcgatatacaaagggcagcagttctcaaagtgtggtccatggaccagcagcatcagcatctcctgggacctcgttgttttttgtttgt

SEQ ID NO: 417506 - DNA, 201 bp, Homo sapiens
ttggaacctccaccttccagtttcaagtgattctcctgcctcagcctccagagtagcacaggccaccacacccggctgatttttgcatttttagtagagayggggtttcaccatgttggccagactggtctcgaactcctgacctagtgatccgcccaccttggcctcccaaagtgctgggatcacaggcctgagcccacg

SEQ ID NO: 417507 - DNA, 201 bp, Homo sapiens
acaaacaaattacaccttccacttacagaatattgtactgatacttcttgaaatgcttgcacgtatattacttcattttagcattggacagctctttgagrcagatgagtcgttattacctccctttagccaatgaagacaataaatttgagaaggttactcaaagaattattgactatcagctatgtgacatatgggata

SEQ ID NO: 417508 - DNA, 201 bp, Homo sapiens
acaccttccacttacagaatattgtactgatacttcttgaaatgcttgcacgtatattacttcattttagcattggacagctctttgagacagatgagtcrttattacctccctttagccaatgaagacaataaatttgagaaggttactcaaagaattattgactatcagctatgtgacatatgggatattaaaaggcac

SEQ ID NO: 417509 - DNA, 201 bp, Homo sapiens
gctcaaacatttaacatgttgtgtgcccttgaacatctgcgtgcctactgtgtgctggctgatttgccaggtgccaaggatcctgaaatactaaggccacrttcgtctaagagcatgctgttccaaaggagaggctgacgtgtagatacatggaacttccgaactgcagaggtaccatgatagagatatgtttgggggagt

SEQ ID NO: 417510 - DNA, 201 bp, Homo sapiens
cattgaataaatgtcagtttctcaaaaataaaactggtgtatgccgtctccttccattctctcattacaaataacatcaagcatttgaacgagagaattayaaactgtgaagcatgtgtgctattataagaaatgcttattaagttctgtatgtggcagtggttataaaaagggaaaagagaagttaccttcttgcagggt

SEQ ID NO: 417511 - DNA, 201 bp, Homo sapiens
catatcagactcctgactttcagaaaagagccaatcaccatttgactagggctcatcacttttcaactttttcaggatttcttttggcaagagcacccccyctctctctcatgtgagctcactctctcctctctctcatatccgtgctcctcttcctacagtgctgacctctgaggtatccttttttcttttgactctcat

SEQ ID NO: 417512 - DNA, 201 bp, Homo sapiens
tggttattactgcaaatgctatttgttgattttttagggtcgacagcccaatggctgaacagtgcatgattgagtatgaattcatactgcgttcagcttgyaaaaaagacttgctatgtacaaagtagcctcatcggtttgaatgcttaggaatttttctagggaacaaaacattatcaaagacagcaaaattaagggaaa

SEQ ID NO: 417513 - DNA, 201 bp, Homo sapiens
ttactaccccacaagcagagggaggttggtcaccaaatccggaaacatgggcaaacccacaataaatgggttattgatactacattccagtatacagtaaratactcttgtctttgtttccagattttatggccactctgtagaagcttcaagggactgaaaataagtcatttgatgcagctaaaaagagacattgctgcc

SEQ ID NO: 417514 - DNA, 201 bp, Homo sapiens
ctcttagtacctattgcttctacatgtgaataggcaatctataagttacattccctgtgtcccatttttaggattactaaccagctgattgcccatgtgargacatctttatgagtgtttgcattatcctggtgagaatttatgtagctcttctaatgtgtaaattgctaaactttttcttcccctacctgaaattttgac

SEQ ID NO: 417515 - DNA, 201 bp, Homo sapiens
tgatgcggtataatttaataggaatatgaatccccagtaacccggggaaccaaagcaaggaattggcctctcagttacttttaactttcaaaacttgaacrtttccttaaaccaaatagccccatcgtcatggtcagaagtccactgtggagaaaggcaggatttagtgtttatttaagctgccaccccatgagagaaact

SEQ ID NO: 417516 - DNA, 201 bp, Homo sapiens
ctgtcatacttgaatgtttcccactttatttctgtctttctgactttatcctgtccatcattctcgtcatctgtgagtaaaagcacccaaaagcaccttgrtagattggcgtcaatttgggtcttatacataaaactgcctgacaaatgacagcgttcaggtagggattatttagttaacacagaagttatgtgatttata

SEQ ID NO: 417517 - DNA, 201 bp, Homo sapiens
gagggagagagagtaactgagaaacctttggctggtcactttattgttccttgtggctcccccttcccttccctcagatatatacttggataagaatttcsttctccagcccagtatttcctaaactcaatcctgcagtaaaatgacaaggccgtgttagacatggaaattattgcagagcaacaaatccaagattgttat

SEQ ID NO: 417518 - DNA, 201 bp, Homo sapiens
tcaccagagcaaagaatgtgctctctggtgctacaccaataataaagtacaatgttttgaattagaggagggagagagagtaactgagaaacctttggctsgtcactttattgttccttgtggctcccccttcccttccctcagatatatacttggataagaatttccttctccagcccagtatttcctaaactcaatcct

SEQ ID NO: 417519 - DNA, 201 bp, Homo sapiens
ggcagggggagccacccgccatgtagccccaccctgtgccctccctgaccccgtcgccccctgtgcggacctgctgcgcttcaggggaaaacagcacgttwagtgagcagtttagcttggactgaatccggaggcaaatcaagtaactttatactgagatactctctccattgtgttctcaggaagatgaagtgaatcacc

SEQ ID NO: 417520 - DNA, 201 bp, Homo sapiens
agacaggaagagcaaaaggcagagcaaagcgtctgctgcaggtgaatcaagatgtagcatgatcttgtcccaaatatgcatagccacacagtcacctctcrtgggagcacagtcctgtgtgtttgcctatccacgctgcatggctgattcctttcttgatatatgcttcctgtcttttgtagggggaggtgctctttggca

SEQ ID NO: 417521 - DNA, 201 bp, Homo sapiens
agcaccagacaggaagagcaaaaggcagagcaaagcgtctgctgcaggtgaatcaagatgtagcatgatcttgtcccaaatatgcatagccacacagtcayctctcatgggagcacagtcctgtgtgtttgcctatccacgctgcatggctgattcctttcttgatatatgcttcctgtcttttgtagggggaggtgctct

SEQ ID NO: 417522 - DNA, 201 bp, Homo sapiens
aagtagaattcagaaaactgctagtcacttggattaattcagggaagtcctgttcagattattgaaaagatcaaagttatgatttctttttttgaagaagkgctatttgattccaactgaatgttagtgtgccagttatttaactcttctgggccttccttataaataaggagtatagacaatgatgaaattaaggtctct

SEQ ID NO: 417523 - DNA, 201 bp, Homo sapiens
taactagttgacttgtttggtggggtgtgaagtaccaaggagaccaagtcttggatttaatgatgacaaaagtcaacctatattccacatatgtccttatytctgtagagtccattaggcttcttgtatttgaaggccacagggtatacctttaggccactcagccaagttcttgccatgagtcacaaagcagaaccagat

SEQ ID NO: 417524 - DNA, 201 bp, Homo sapiens
catctcttagaccttgactttattaataacagcaacaaaaagaagagaccgatacaagttatagagaacctcaaaatgaaaagcaaatttattctagattstacctttttgttttatgtgtgtttttcttttactaaacaatcttatctggtaatttgttccatcatgatgctttgagaaacatagaaactggttattgaa

SEQ ID NO: 417525 - DNA, 201 bp, Homo sapiens
caatgtgaaattgtgtttgaggtgagaaacaagagtgggtgctgagagggagtaataaaccatccaactgcaaatggcgacatttcatcacaccactgttstcattggacattattcacaagcatacttttgatttatttttctcagtgggtctgtaaatctctttcttggagtgcaaattgcatgagtagtaagttccat

SEQ ID NO: 417526 - DNA, 201 bp, Homo sapiens
gttctcagtctccaaaataaatctaacacgggcagcacccccctcccatccgccacacaaaacatgagctgttacacatcccgagtaatgaagtgtatagycgcttcagctttctcttggcatccgaggctaaggagctaatattctaagaggtgatgtattttaatcctaataagcacctaagaattcattgagtgaaaa

SEQ ID NO: 417527 - DNA, 201 bp, Homo sapiens
actttttttaaacaaaagaaggttgctgtattcaccattgaatcaaatctttagatttccaaattagtgaactaattctgtgaaataatcatcttattcawagctattcaaatctttctggataattcgttctgtttcccaggtatcggcacaatcataggctcataaacagaactccaatgcgttgtttctgtttctctt

SEQ ID NO: 417528 - DNA, 201 bp, Homo sapiens
gaatattaattttaggctttgtcttgctgtcacaatattttaactaatttttcctaagttcttatcaggtacataatggacattctaattagaaaaaaacsatccgtatgccctaaaccttacctctgagggtatcttcatagtgaagaagtttctattttgccagaaaaaaagcgatacttataaaataaatgttttctc

SEQ ID NO: 417529 - DNA, 201 bp, Homo sapiens
tggcagattttatgaggatgaagccaaactgccaccctcgtggccaagatggccttgatcctgtcgcaggaaagtcccttctgtgcttggtagaagaatartacttttttcaccctgttccccacactgttgcattaagcatgctaaatagcatcacccccttcctcatctataggaatattaattttaggctttgtcttg

SEQ ID NO: 417530 - DNA, 201 bp, Homo sapiens
gggttcacgccattctcctgcctcagcctcccaagtagctgggactacaggcacccgccaccacacccggctaattttttgtgtttttagtagagatgggktttcaccgtgttagccaggatggtcttgatttcctgaccttgtgatctgcccacctcggcctcccaaagtgctgggattacaggcgtgagccaccgcgcc

SEQ ID NO: 417531 - DNA, 201 bp, Homo sapiens
gaaggaaagcatgttgaacatctctttgccaggcacgggagataaagctcctgctgtgttctgggttttacagacataaaggaaatgaagcatagtccccrtgtctgtaacctttcatggggagaaacacaagggcagacaattttcattcatccccactcttgagattttgaaagaggcatgtgcaagggcagccagaac

SEQ ID NO: 417532 - DNA, 201 bp, Homo sapiens
taaaacaacaaacccagacagatgtgttcagcaggttctccagcttagctgtttgcatcttggagaactgttcctgggtcctggggaaagaccactggggstggggtcagaagcctgagttctgttctgcctccttatgcccatggaggatactgcagagctcaggaaagagcacgaagcaggacccagccctggctcaca

SEQ ID NO: 417533 - DNA, 201 bp, Homo sapiens
tttatgttgtggatttgtgatggtcgccacatctcagccaatcaaagtaggggacagggtcaggtgcgaaatcagtaattctgtataaagtagaattcagraaactgctagtcacttggattaattcagggaagtcctgttcagattattgaaaagatcaaagttatgatttctttttttgaagaagggctatttgattcc

SEQ ID NO: 417534 - DNA, 201 bp, Homo sapiens
atgttacttacgacttatgttgcactgggctccttaatgccaacctctgggcgtttgaaggttataaaaagagaaaaatcaaaactcagaccatcagttgygctgattactaattgctttggtgggagattttgtgggaaagacactaatagtcaaaggtggtttgaacaatcacctgtgacttaacctcattccgacttt

SEQ ID NO: 417535 - DNA, 201 bp, Homo sapiens
ctcctggagaggcttgcttgggtccaagcacatattgctggcaacctacgtgcttccaggtagcagctgaggccctgtgggcctctgcaaggagcgagggytctggggtcagatggaccaggttcacttcccagcattgccacttgaatgtgaacttggacaaattcctaagccttcctgcgtctgtatccttgcctgtgc

SEQ ID NO: 417536 - DNA, 201 bp, Homo sapiens
cagcctgtctgacagaatattccccagtcttcttccctatcggcattttgaggcagggacacactacagcaaaatcagtccagacccttatataaaataastcttccgtccaccacagtggccaatatttccttttcctaccttggccctgcctgatcacacacaccagctctgcagccagaggacccctcatgggtgaag

SEQ ID NO: 417537 - DNA, 201 bp, Homo sapiens
tggtgaaaccccatctctactaaaaatacaaaattagccaggcatggtggcgcatgcctgtaatcactgctactcgggaggctgaggcaggagagccactkgaacccgggaggcagagattgcagtgagtcgagattgtgtcattgcgctccagcctgggcaacaagagtgaaagtccatctcgaaaaaaaaaaaacaaaa

SEQ ID NO: 417538 - DNA, 201 bp, Homo sapiens
ttaggccaggcgtggtggatcacacctgtcatcccagcactttgggaggctgaggcgggcggatcacctgaggtcaggaattcgagaccagcctgaccaayatggtgaaaccccatctctactaaaaatacaaaattagccaggcatggtggcgcatgcctgtaatcactgctactcgggaggctgaggcaggagagccac

SEQ ID NO: 417539 - DNA, 201 bp, Homo sapiens
ccaaaagggtaatctgataattccaaaagggtaatctgataatcccaaaagcttattaacataccttgtagataatagatatccagttagtatttgttgcrtttggtgatttgtggttgaatattgagtgttggtattttctagaaccttacattcaattctcttccctatatttgtggttagagtcacacttcactttca

SEQ ID NO: 417540 - DNA, 201 bp, Homo sapiens
acgaaaaaggcatgttaggtggctgttgcagtggtttagataacagatggtgatggtttagtccacagtgttagtggtggaggtggtgagcagattgggtwctgatagattttgaagacagggcaggcagggtttgctggtgtcatggaggcaggtgtccaagaaaggcaggagtcagggggaccctgagctcagaagaat

SEQ ID NO: 417541 - DNA, 201 bp, Homo sapiens
ataggctggaggggcaaagtagaacgaaaaaggcatgttaggtggctgttgcagtggtttagataacagatggtgatggtttagtccacagtgttagtggyggaggtggtgagcagattgggtactgatagattttgaagacagggcaggcagggtttgctggtgtcatggaggcaggtgtccaagaaaggcaggagtcag

SEQ ID NO: 417542 - DNA, 201 bp, Homo sapiens
tcctatcctattggtgaatttattgctctatttcaaaaaagtcaaacaaaatcaaaaagaatcaaataccttcagacacttaggattggcccagtaaggtrtaaatcaaatggatatggaatcgtataatttttatttttattttttatttatttatttatttttttaaatgatagtttgtttgttttttttttgagacgg

SEQ ID NO: 417543 - DNA, 201 bp, Homo sapiens
ttgctctatttcaaaaaagtcaaacaaaatcaaaaagaatcaaataccttcagacacttaggattggcccagtaaggtgtaaatcaaatggatatggaatmgtataatttttatttttattttttatttatttatttatttttttaaatgatagtttgtttgttttttttttgagacggagtctcgctctgtcacccaggc

SEQ ID NO: 417544 - DNA, 201 bp, Homo sapiens
attacaacagcagtgaattgaaaacagcctgcaggaagcatgagctgtatgtgagtttccaagacctgggatggcaggtgagttctctggacacgggggayaaaggtcctttctcagcagtttactctcatctgaatggtggcagccattaccaaacacccagagcttgattgaaggctgagctgcttccttctgtggaag

SEQ ID NO: 417545 - DNA, 201 bp, Homo sapiens
ccctgtgcagtttcaaaatgctccgtttggactgcagcaaatcctgcctagtagcgttgtctgatcatgtgaatgtgatgccttcccggtcaggcgcctcyggggtgtactgggcaagtcggcccacgcctccataggccttgcatgcagcagggctcacaacacacctctgttgcttaagggtgtccattcaagtcaccc

SEQ ID NO: 417546 - DNA, 201 bp, Homo sapiens
ttcacttgcccagggtcgtaagtgataggacagggatttggacacaggttggtctgacttcactgtgccatactgctcataagaagagaacatggaggaasgatcactttctaagggatacccaacagtgtgaaaagacccatttatagtatttctgaatcctggaaaggctctccctattctatagagaaattttccaag

SEQ ID NO: 417547 - DNA, 201 bp, Homo sapiens
cttgaaagcccctgtgcagtttcaaaatgctccgtttggactgcagcaaatcctgcctagtagcgttgtctgatcatgtgaatgtgatgccttcccggtcwggcgcctccggggtgtactgggcaagtcggcccacgcctccataggccttgcatgcagcagggctcacaacacacctctgttgcttaagggtgtccattc

SEQ ID NO: 417548 - DNA, 201 bp, Homo sapiens
ccaggaaaactcagtcgattaagagtttttttcaggtaagtcttaatattcctgtagatgaatggataaacaaactggcacatccagacgatgggctattmttcagcactaaaaagaaatgagctttcaagctacagaggaatatagagtttgctctacatattgttaactaaagaagccaaactgaaaaggttacatact

SEQ ID NO: 417549 - DNA, 201 bp, Homo sapiens
tgcatcttcatgtcacaaacttgcaagaaatagaatttctttattatcttataaattggtttgtctcacttgtcccacttctgcctgatgggagaaacttratatacagttaatgccaggaaaactcagtcgattaagagtttttttcaggtaagtcttaatattcctgtagatgaatggataaacaaactggcacatcca

SEQ ID NO: 417550 - DNA, 201 bp, Homo sapiens
gttacgtgtttttttcattatgtagcaactgtgcatcttcatgtcacaaacttgcaagaaatagaatttctttattatcttataaattggtttgtctcacktgtcccacttctgcctgatgggagaaacttgatatacagttaatgccaggaaaactcagtcgattaagagtttttttcaggtaagtcttaatattcctgt

SEQ ID NO: 417551 - DNA, 201 bp, Homo sapiens
agatgaacccctttgcagctgagtgtttcatactcaagggtctagtaacataaactaactgttgtctaccatgtatcagatgctcaaatatagttacgtgwttttttcattatgtagcaactgtgcatcttcatgtcacaaacttgcaagaaatagaatttctttattatcttataaattggtttgtctcacttgtcccac

SEQ ID NO: 417552 - DNA, 201 bp, Homo sapiens
cagcaaaaagggctttatcttagattccttcctacctgttgtcttatccccagtttcaatggccaaatcacatccattctacctcagtatattttatatcmgtctacttatttttatcctttgccaccctttgcctcctacttaagaatcaaaaaccctgtaagacttccttgacctcataagaacaggttagattcttgt

SEQ ID NO: 417553 - DNA, 201 bp, Homo sapiens
ggtgctcctggagtctcatggagagggggtcacttgctcccaagcagccagttccaaagtgtcttgacggcttcctttctggaagtactcggggctggttrgtaattatttcccagcttatgggatttcttagactctccctggctggccttttaaaaatgaatgaccctcctatcctttcaagatgaagcaggctcttta

SEQ ID NO: 417554 - DNA, 201 bp, Homo sapiens
atttaacgtgcttgaagtttgcatcctgaatttagaatgcaaagcagtatgtggatgagtattctgggccaatagtgctgctgcttaaaacaacaaacccrgacagatgtgttcagcaggttctccagcttagctgtttgcatcttggagaactgttcctgggtcctggggaaagaccactgggggtggggtcagaagcct

SEQ ID NO: 417555 - DNA, 201 bp, Homo sapiens
taaacatgggtagaaaaatggaaagaagaatgagacccatgagacggtaattcacatgaatcattgatgtgaaaatatgtggatgatattgaggggcagayggacagacaggttggcaggtgctcctggagtctcatggagagggggtcacttgctcccaagcagccagttccaaagtgtcttgacggcttcctttctgga

SEQ ID NO: 417556 - DNA, 201 bp, Homo sapiens
gagctacagttcaagatgagatttgggtggggacacagccaaaccatatcaaagaggaagagcaaaagagaatggaagaggtatatgccccaaagaactgwaaacacgtactcacatacaagtacatgcatgttcatagaagcactattcacaatagccaaaaggtggaaagagtccaaatgtccatcgatggatgaatgg

SEQ ID NO: 417557 - DNA, 201 bp, Homo sapiens
cccacgattcaactgtctcccaccaggtacctcccacaacacatggggattatgggagctacagttcaagatgagatttgggtggggacacagccaaaccwtatcaaagaggaagagcaaaagagaatggaagaggtatatgccccaaagaactgaaaacacgtactcacatacaagtacatgcatgttcatagaagcact

SEQ ID NO: 417558 - DNA, 201 bp, Homo sapiens
tgctctgaggaggaggacttttgagggttacctactgggaatgatatcatctggtttatattttaaaaggatccttctggccactgtgtagagaataggcyggaggggcaaagtagaacgaaaaaggcatgttaggtggctgttgcagtggtttagataacagatggtgatggtttagtccacagtgttagtggtggaggt

SEQ ID NO: 417559 - DNA, 201 bp, Homo sapiens
ccctgaaaaggtttttgctctgaggaggaggacttttgagggttacctactgggaatgatatcatctggtttatattttaaaaggatccttctggccactstgtagagaataggctggaggggcaaagtagaacgaaaaaggcatgttaggtggctgttgcagtggtttagataacagatggtgatggtttagtccacagt

SEQ ID NO: 417560 - DNA, 201 bp, Homo sapiens
cagggaatgagatttaacctaaaatagggcttacggttatgaattttaactatccacattccctctacccagtgaaaccatcaactgactgcacgttgccrtggactgcaggagggacttttttttttttgagacagagttttggtcttgttgcccaggctagagtgcaatgacacgatctcggctgactgcaacctccgc

SEQ ID NO: 417561 - DNA, 201 bp, Homo sapiens
agtcaatatattcattcttaagcaagacattctccactgtctaagactattcaacacaaggcacactgaaaaggtctatacagagggactttggctgttcrgaatgtgaaggggaaagttgcagggaatgagatttaacctaaaatagggcttacggttatgaattttaactatccacattccctctacccagtgaaacca

SEQ ID NO: 417562 - DNA, 201 bp, Homo sapiens
atttggcttactgtcaggagtcaatatattcattcttaagcaagacattctccactgtctaagactattcaacacaaggcacactgaaaaggtctatacaragggactttggctgttcggaatgtgaaggggaaagttgcagggaatgagatttaacctaaaatagggcttacggttatgaattttaactatccacattcc

SEQ ID NO: 417563 - DNA, 201 bp, Homo sapiens
agggtttgtgctcctatgagaagctagtgccaaggctaatctgacaggaggtggagctcaggcggaaatgctcatcgccagccatgcaccttctgctgtgyggcccaatccctaacagggcacaggccagtgcctcgggtctgcagccctggggttggggacccctcttctatgggacatcattctgcctgttgtgggctg

SEQ ID NO: 417564 - DNA, 201 bp, Homo sapiens
tgacctatcataaaatgcaggtgagcagaaggagaccctcacaccgtcatcccacagccccttgattatgttagttcaaaactgtgaaaaagtcagtcttycctgaagggcctaatggaaggaatggattctctgactttgcctcaaagaaccccagctgtagctcaccactgtgctgggatgaactttaaaatcactcag

SEQ ID NO: 417565 - DNA, 201 bp, Homo sapiens
tccatggaccaggtggggaggggggtggtttgggatgaaactgttctacctcagatcaccaggcattagatcctcagaaggagcacgcgatctagatcgcytgtgtgcccggttcacaatagggtttgtgctcctatgagaagctagtgccaaggctaatctgacaggaggtggagctcaggcggaaatgctcatcgccag

SEQ ID NO: 417566 - DNA, 201 bp, Homo sapiens
tttgattcatgttctccctctttaattcattccttctctttctgctcttctctgttttcctcctcctccttggatgatgtgcgtctgcctcattccccacrttctcttggacgaggctgccattttctttatcacagaccctgatctttaaaaataaaagctcattctgccagctgtgctaccctcacgctttgaactgta

SEQ ID NO: 417567 - DNA, 201 bp, Homo sapiens
tttccatggaccaggtggggaggggggtggtttgggatgaaactgttctacctcagatcaccaggcattagatcctcagaaggagcacgcgatctagatcscttgtgtgcccggttcacaatagggtttgtgctcctatgagaagctagtgccaaggctaatctgacaggaggtggagctcaggcggaaatgctcatcgcc

SEQ ID NO: 417568 - DNA, 201 bp, Homo sapiens
tgtcttatggtgatagttggttgattgtttttactgagagagtccttgtcctgcattgtgaaaatttccctccagggcttctctggggtccttaaagttamaggcagggtggttctgttgggtaacataggcaggtggagaggataaataaatttagaattataaaccacctaaaaaagttgccccatctcttctcccagt

SEQ ID NO: 417569 - DNA, 201 bp, Homo sapiens
tagactgcacttgttgacctcacaagcttcttaagcagtgagaacagtcagtgttctcattgtacgattacaaaagtgtgccacagaacaacgcaaattcrtggggccccagagtgactcggtagcagagtcgggatggaaactgggctctccacatccacgaatctgcactgaccccgtaggtgcaattgcttcatgtca

SEQ ID NO: 417570 - DNA, 201 bp, Homo sapiens
accagttttgtagaagatcatttttccatggaccaggtggggaggggggtggtttgggatgaaactgttctacctcagatcaccaggcattagatcctcakaaggagcacgcgatctagatcgcttgtgtgcccggttcacaatagggtttgtgctcctatgagaagctagtgccaaggctaatctgacaggaggtggagc

SEQ ID NO: 417571 - DNA, 201 bp, Homo sapiens
catgcaaatgtagggtctgagttagttgagaacaaaatagtcaataactgcattaaaaattatcttcccttgtttcaagattttctttcgtggtttgccamcttgagagtatgtcacctcaataggaaggtccaagtaatctaggcatggtgatgattttggccagtctctaggattctttatcagtgacacacattttag

SEQ ID NO: 417572 - DNA, 201 bp, Homo sapiens
ggacctttctagcgctccagttgccttatggcctgggagccctcagcatctttctgtctgcctgcctggaggaaattaggtggggacagtgaactagagcytggcccagctgctcattccccgaggcaggtgagcatgccctgggtggaagcctgcagcacatttttctaggagctgagttgctcgttcttcatctttccc

SEQ ID NO: 417573 - DNA, 201 bp, Homo sapiens
agcttcaatctccagggatcaagcagtcctcccaccttagcctcccaaatagccgagaccacaggcacacaccactatgtccagctaattttatatcttgyagagacagggtctgtgttgcccaggctgatctcaaactcatgggttcaaacagtcttcccaccttagcctccaatagtgctgggattacaggcatgaggc

SEQ ID NO: 417574 - DNA, 201 bp, Homo sapiens
tcaaaaccaataccaagggcagtgggagtgaggggaaagttttttctgtaatctgtaatctgtcaatctgtttaaaaaaaaaaaaaaaaagtgtgtcagtrtaattccatgcagaacccagggtactgaccctgagtggcagacacaagtattccaaggagcatcaaccttcataaatatttatacgttctttgccagcac

SEQ ID NO: 417575 - DNA, 201 bp, Homo sapiens
gtgaagattagagtataccccagtgtatggaagcattgttgtgtttatgtggccaaagagagcagactgggtagccgtcagtttgtataaagtttccatcytctttccccctcttaccctgccttggacatatagaaccaagacttctaataacactgatactttggactcgatctcacctgcagttctgtttattagcct

SEQ ID NO: 417576 - DNA, 201 bp, Homo sapiens
tgagctcatttccatgcagccccctttttttctgggactttagctcttctcacgcactagctgccttgaattttgattttctccccagctggtgatactgygtaaagctctaggccgctaccaattgctgcttggtgtctgtgcctcgtactagaaattatcaaatgccctgaaaggaaaaggcagcagcaaacacaaggc

SEQ ID NO: 417577 - DNA, 201 bp, Homo sapiens
tacctctctttgtcccactggagtgaccatgttcctgttgaattgtcaccacatacatttccactggccctcttcagcccattcatcaaaaccaataccargggcagtgggagtgaggggaaagttttttctgtaatctgtaatctgtcaatctgtttaaaaaaaaaaaaaaaaagtgtgtcagtataattccatgcagaa

SEQ ID NO: 417578 - DNA, 201 bp, Homo sapiens
ggctcctctgtcttgggtcagcttctctggtttttggtttgtcgcctctctctagctgtctcacttcctttctctgccctgcccttgactggtgaatccaytggggcaaagctgtgttacctctctttgtcccactggagtgaccatgttcctgttgaattgtcaccacatacatttccactggccctcttcagcccattc

SEQ ID NO: 417579 - DNA, 201 bp, Homo sapiens
gaaggtttccctgcggaagcagtttattaaatgggactgaaagccgcgctgctaaaggcaattaacatctgatacattctcaaagctcagaaatctttggygagaggaatgtttctgcctgtgtaagagcaggccagggagttaccttctgcttatggaaggaattcgtcctgggggggcttttatgattgttggattttg

SEQ ID NO: 417580 - DNA, 201 bp, Homo sapiens
gccaggagactcagtctaggaagtggcagagagtatagaaggtgcttagagcacagagggtcttagagctaagtttttaaaggaaatctttgtctatttgyaggacagttccatattcttttagaatcaagacaaaggctgaaaagagaccaaagtcccacccagattaaatggggccttatgagatcctgaaatctcctg

SEQ ID NO: 417581 - DNA, 201 bp, Homo sapiens
ccacatgttaaggctgtagctgaaaccaagagtcatcatatgcatcctgtatggaaagaactggggatcatacttcagtctttccagccaaactatgtgtrtaccatcactaacttaagaaacacagtgtatgctattgtgtgctggtacacaatggggaaaatgactggctgccttcaaatcctgtcttctatgtctagg

SEQ ID NO: 417582 - DNA, 201 bp, Homo sapiens
ctcccaaggttcactccttgcaaatgtgcaaatggcaacaattctaaaaggcaataagaagaagcttatgcaggtaccgtgagatgcctaagtcattcccratcattgccaaccctgggagggcactggggccaggagactcagtctaggaagtggcagagagtatagaaggtgcttagagcacagagggtcttagagcta

SEQ ID NO: 417583 - DNA, 201 bp, Homo sapiens
tgagtcagtgtctgaaaaggagctacacctctaaaacagttatcaagtatttagggatgaggtgctgcaaagccaagagagtgaaaacaatccttaaaggygtgtttggccagctctcaaaaatcttagacagttgcaacacagtccttggctcagacactggatttttcccattcatgtacttttttgacagatgaattg

SEQ ID NO: 417584 - DNA, 201 bp, Homo sapiens
gtgcttggtgggaggcagacagggggcatatgagaactctctgtaccttgtgctcagcatagctgtaaacccaaaagtgctctaaaagataaagcctattraaaaacaaagtcttattagtcctcctccatggggttgcttttcatttatggggagttcacatggcttcaaagaagtgagaggcgtgtgaccatcctcagt

SEQ ID NO: 417585 - DNA, 201 bp, Homo sapiens
tttgggaacgaggctaaagccatggccgatttccccaacatgctttctatttctattttcgttaatctttttaagttcaatttttaaaatcatctaaatgratctaaacattctttagcaatttgcttaaatcatcttgtatattatatagaaatgttagatgcatttatttctagcctgcttactctgtatttcacatag

SEQ ID NO: 417586 - DNA, 201 bp, Homo sapiens
aaaggaaagggataaagaaaaatgtgaacaatggttaaatttaagcacaggacttaaaaatttaaatattctaagggaagccttctagcttaattgaatcmtgtacatggggccttttcagaaacagctcactagattgcttgggatttccacgcgtttactacctgacttttggtcatcttgtttaggctagggttaatg

SEQ ID NO: 417587 - DNA, 201 bp, Homo sapiens
cctccttgctggggctgcagagtttacgctgaggaagtgaaagaaggttgtgtgtttattacagtttgaggtgtacttttcactccaggaaggggaagccsctagaacttttcccatttggcaaggggtaaccaatgcttgcaaaccaagaagtgtagtcatggagatgagaaagtttagatgaattctgatctcccagcc

SEQ ID NO: 417588 - DNA, 201 bp, Homo sapiens
accaggatgcaagaatcaatgagacttccaaaatttggatttcttctcagaatccatgaggctaagtctcctctccccctggacaccgcttggggagaacrtgtcctgtctttgtctctggacccttctatctaaggtcccatggctggcaggtgacagattcccctcccctagttggtgttcccattctcacatttcttc

SEQ ID NO: 417589 - DNA, 201 bp, Homo sapiens
aaaagagaaggaagtgtagtaagttgatcttggaccatactttgaagtggtctgttttctcagtaggatgctaacctacagctaataggagcagctgaggraaggagggaccagctgtccccaaggagcttggcagccttctaccttgggattgcacagtcacctcctccttgctggggctgcagagtttacgctgaggaa

SEQ ID NO: 417590 - DNA, 201 bp, Homo sapiens
tggactgcagttagcagtggcacctggacttcacgaaacgggtcttagaggctagaataaggtgtttttcgatgaagagagacacatggaactcaatccayggcagggtttgggtggctccctcagcctggtggcagagaaaattctcaggttgcttgctctcattcctgctttctgccttccacccaagaaagcatagca

SEQ ID NO: 417591 - DNA, 201 bp, Homo sapiens
gtcttaaaggcccacggcccaatctgtcagtaatgaatttatttatttatgatgaaattataaggactgagggggaccagaccactctagtcaaacagccrgaacactctctccctgtagatggggccaaagcaagccaaatcccaaactcaatgccagtttgttgatttacagtgagaatgacaactgccaatgggaccg

SEQ ID NO: 417592 - DNA, 201 bp, Homo sapiens
cagagagacgtggtcattccagcctcacctgccggaggaggtatagtcctgggccaaggtgggagtggactgcagttagcagtggcacctggacttcacgraacgggtcttagaggctagaataaggtgtttttcgatgaagagagacacatggaactcaatccacggcagggtttgggtggctccctcagcctggtggca

SEQ ID NO: 417593 - DNA, 201 bp, Homo sapiens
agatgtcagctgggcttgtccagctccttaagctgactgcattgaatctccagtccatgtcctcagagcatctgctaatttgatgtttgtgggactctacyggcctctgccttggtgtctgctgctgtgcctagagttgttctgcactgagttgacccagatgtgaaatcacccctccttcacacaaaaccctcataataa

SEQ ID NO: 417594 - DNA, 201 bp, Homo sapiens
ttgtgcgattgcactccagcctgggcgacagagcaagcctgcctcaaaaaaaaaaaccaaaaaaacaaaaaaaaacaaacccaaaaaaacccttttagctktcatgcttcaacctcttagggtcatccttgggaaccccacactcccctccctctattttacagaccactctgctctcaatgtgcataaccaaactcattc

SEQ ID NO: 417595 - DNA, 201 bp, Homo sapiens
aaaatcccttaaggaatgactggaaccacatgtaacaattggttctgtctctgggccttgtgacctacccggtaaagattgcatagtctcgggactgggartttttttcacgatttgtcttcatctgagtcctggacataggttgggactggaacaaaacctcagttggagggattctggattaacagatgtaaatatgtg

SEQ ID NO: 417596 - DNA, 201 bp, Homo sapiens
acaaattttaattgagacagggttggaaaaaaattacctaatggttaacatctccaatggctgcaaaccagctcaccaaacgatgcagaagagcacacgtytgcctcgtacctgagaaccatcactagtttgtaagaaaggcagcaactttaatcacaggtggtgagcgataaaaggtagcttccatatgcaggtggcact

SEQ ID NO: 417597 - DNA, 201 bp, Homo sapiens
aatcaatagccacatttcccaatattctcacctcatcctttcaaagcccataggacatacatttatttgggcatttaaacaaattttaattgagacagggktggaaaaaaattacctaatggttaacatctccaatggctgcaaaccagctcaccaaacgatgcagaagagcacacgtttgcctcgtacctgagaaccatc

SEQ ID NO: 417598 - DNA, 201 bp, Homo sapiens
accaccccttcattcactgagttcttggagggaggaaagccatgtctgacttaccgtctattggccgtggtgccaggcagaaggcatgtcacgtaagagtygctccagtgggcctcagtgaattggggcacccccagtgctcttgctggtgattcagttaagccaggctagtggcccctgtgctgcacagggtgggtacat

SEQ ID NO: 417599 - DNA, 201 bp, Homo sapiens
agtggtttggatcgacgtctccctggatggctttcacttgcccttgcttctctgcagctggctgctctaaatgaaggctggatgttggttggctctgttayacttctccaggggcttggatagcctctgcatggtatcatttattgtttttacacatgtttgactagtcctggtcctagccgtctttgccccattggggat

SEQ ID NO: 417600 - DNA, 201 bp, Homo sapiens
gccttgcagatttgctggaattaaatgaaaagcatcaaaatctggctcataatagcactcaaagattatttatatgccattgtaggaagtaggttctcagrgcatatgttgggatccctggaaaacaagtaaaataattctggaagatgcattaattcttccaggtaattgtacagaaatgtcatttttggtggccaaaca

SEQ ID NO: 417601 - DNA, 201 bp, Homo sapiens
aaggagtccacgtccacccccgagccgcaggcctggtgggcagagacggcccttacgacaagcagcccttcatggtggctttcttcaaagtgagtgaggtscacgtgcgcaccaccaggtcagcctccagccggcgccgacaacagagtcgtaatcgctctacccagtcccaggacgtggcgcgggtctccagtgcttcag

SEQ ID NO: 417602 - DNA, 201 bp, Homo sapiens
agtttctgtggaataaagagatgcatgctttgatttgcattaaaggagtccacgtccacccccgagccgcaggcctggtgggcagagacggcccttacgayaagcagcccttcatggtggctttcttcaaagtgagtgaggtccacgtgcgcaccaccaggtcagcctccagccggcgccgacaacagagtcgtaatcgct

SEQ ID NO: 417603 - DNA, 201 bp, Homo sapiens
tccccacccaggtgcattggtggtggtttgggaagctgtgaccaaaactccacaaacctcgcaaatcgaaagctctgagaaaagtgtttttctggctctcrggacttgctgatgactgcgcattggctctttttgcttcacgtgaccccttctgtccccaccaaagggagttctgcctggggacctttctagcgctccagt

SEQ ID NO: 417604 - DNA, 201 bp, Homo sapiens
atgagcaaagcccagtttataaatgctcatatggatcctgatttttatcttttctcaatcctgtttctcgctgtctcctactttccctgtttttagagctyattagccataaagtaagctagtcactaatagtatcataaataaatttttaaaacataatagaagtattaaaatgtaaatgccactgcactacagcctagg

SEQ ID NO: 417605 - DNA, 201 bp, Homo sapiens
acaggactaagactttcacctcaagatgatagatccccacccaggtgcattggtggtggtttgggaagctgtgaccaaaactccacaaacctcgcaaatcraaagctctgagaaaagtgtttttctggctctcgggacttgctgatgactgcgcattggctctttttgcttcacgtgaccccttctgtccccaccaaaggg

SEQ ID NO: 417606 - DNA, 201 bp, Homo sapiens
ggggaaaaggcctctaagcctcactgggaaggtcctggtaatgtcactgaaccaacatgagcccaaccacaggaaccaagaatctgctctggaaatcctgyttagttgtatttaagtttttttccctccagttaccattttcttccaaaactcggcatgtaagtgaagatggtctttaaatcccagatgttgtttttccat

SEQ ID NO: 417607 - DNA, 201 bp, Homo sapiens
cgataatgaggatttcagttcaagaaagtggtatttacttaggccttctttaataactctcagtaatatagttttttgtatgtcttgaacatttttattakattaattttaggtattgaagtttctgatgctgttgtaaatggtattaatagttttttaaaaattcagtgccaaattggtttttgctcacatatagcatac

SEQ ID NO: 417608 - DNA, 201 bp, Homo sapiens
aagttttgagctcagcagaatgagctaaactacagtaggagattgttgagaccacagggcgaaccactgaagtaggtcacatagaccagatgtgtaagaayagaaaacctaattgaccctgtaccatttattgaaaatactatctttttctcatgtgctttagtggcaactttctcataaattaggtgactatatatgtgt

SEQ ID NO: 417609 - DNA, 201 bp, Homo sapiens
tttttcaataccttgctttttaactttacaatttgtaacatgcttttaagtgtgttaatgagctcctttgattatcatgtttttttaatgtgagaaaaaayaggcatatgctgttcttcccaggtcttctggtgttcaaagttctatcaactaaacaacactggacttcttatcttttcagtggatgcttatgtggaggtg

SEQ ID NO: 417610 - DNA, 201 bp, Homo sapiens
tttacagacagaatataattgtcccaggagagaaaagggtaaaaacacattttccagaatttttagtttgatactgcactctgaaccattcacagagatcrggaacacaggaataagcagagttcagatttgcacgtttgagtcatggtatgagtacccgagacgatgtgagatgtagaagttttgagctcagcagaatga

SEQ ID NO: 417611 - DNA, 201 bp, Homo sapiens
tctctgctacctaggccaacactgattcttggcgatggggtctctgagaggaaacatccttagctacacgatcctgtgggtatgacaacagtggagtcagktggggctgtgattcaaaccccgccacagccatactttgaagcctgggtctgaaactgggccctcattgaagtatcttcaatgtgtagggcctgataggta

SEQ ID NO: 417612 - DNA, 201 bp, Homo sapiens
cagtacattcagccatggcatcaccagtaggggagatgaagttaaagcaaaatttgagagaatcccttctggtggaagggctctcagttaaagccccatcmataattgctttctgttcatgttgacctttattttagactaatggtttgtttattaattaaactgtgaaaactagttttacttgattaaagtgcacagcag

SEQ ID NO: 417613 - DNA, 201 bp, Homo sapiens
acgaattttgccaagaccaaataattcctaaactattgtctgctatgcttcctaaaagtcacttcaattatgtgggtacagtctcaagataaagacgaagwaccggaaagaggtaagcaacctccttatgacacatcctcacacctccatgtccttaggtttgaagcagacaccccaagaatgcttctgtttgaatggcaa

SEQ ID NO: 417614 - DNA, 201 bp, Homo sapiens
attcataaggttgtatttcttccactccccgatttctgtcttcctgttgtttgcagacttttgctgttctttagtttgagtgttttttttcttctttcacrtacagtgtacaatatccttttaaatcttatcctttgttacagtctctgaattcttcactaataactgtaggaagtatctctctctacctttctcttcctc

SEQ ID NO: 417615 - DNA, 201 bp, Homo sapiens
tttaaaagatgactttggtattaaaatttggtgttataaatcattgtgtccttgtgatgatgcaggtaaaaaaaattgcattcatatagtagttacagttyggaaaaggccttctcttatattttctcattagggttttaccatgaccttatcagatagacagggcaggcatgttatccttgagagaacaaagtatggcac

SEQ ID NO: 417616 - DNA, 201 bp, Homo sapiens
aagttagaatcaccaaaaaaaagttagaatcaaaagcttcacttctatcatgcacaactcttgttcgaggataatggctatcaaagagtggaacagactgkaaagttcccttctacctcctcccaaggttcactccttgcaaatgtgcaaatggcaacaattctaaaaggcaataagaagaagcttatgcaggtaccgtga

SEQ ID NO: 417617 - DNA, 201 bp, Homo sapiens
tgtgcttaggatggtggtgtcatacttcctcgaggccagcagtgagtttggaaaataaaatcctgaatggtcccaacctttgatgactctctatcaaagcrgagagttgtagtttctttgccttctaggatgggagcatttggcacctgcatgtgtttcgttgttgtgcataggaaaggggaaattctgggagaactggga

SEQ ID NO: 417618 - DNA, 201 bp, Homo sapiens
ctcaaggacaagaagactccatcactgtgtcctccctcccatccgctggactccagaaaaatgcacctccatatggctcctttcaagttagcccccaaccmctcccaggtgtactggcccccaggtaacatggaggaatgacagataatgaaagacacacctggggcttgggagagggatttcagagccatggctggacct

SEQ ID NO: 417619 - DNA, 201 bp, Homo sapiens
tatttattataagcatcttttgtgatcagataactccataatttattagggttaaaatgttcccactattgattagtcctcattttgaatgataggtgagrgtggctaaaataaattcatacattaaaagtatatgatgcttgtaagtgataataattccagtgaatacaaggcagtgtatttgtgcacataagatacaca

SEQ ID NO: 417620 - DNA, 201 bp, Homo sapiens
atgatccatgtgaaattggagtagtctctttcagtcttgatgtttatgttgtcactacccagctctgccaaccatctatgacccagcagcctcttgagacmctgtctgtcctttggaatgagtctgccattgtatcaatgccacctattagcatttcttttttgtttgtttgtttttaagacagtttcactcttgttggcc

SEQ ID NO: 417621 - DNA, 201 bp, Homo sapiens
caggatgggcggacgggttcttcttcattgcttcattaattctcacacctttttctgtgaagtcatactcttcccatttttgcagatgagaaaactttaaygcaagagttttcataacttgctctcatgcaaattcattcaaataagtatataagcagaagtatttaaactaaataaaatctaagaattttgcttcatctt

SEQ ID NO: 417622 - DNA, 201 bp, Homo sapiens
ttctttttcagcctccatttcttaccagcctgctgctcttgcaacacctgtcctcaggttctatagctccagtttggtggtctccttctacttgttatcaytcactctcttttatggtagctctcacttggggttcactattttatcttctgggggactgtgataccacttggccaatccatgacaaggtccatgaacaaa

SEQ ID NO: 417623 - DNA, 201 bp, Homo sapiens
atggctagcttgggcttcctcacaacatggaagtttcagggtagtcacacttcttagatgacagctgtctttcctcagacaagcattccaagaagtctaartggaaggaagttcaaagcttatgacccagccttggaagtcactcagcaccactgttgaagactttcgttctgttggtccaaaacaggtcatacagccagc

SEQ ID NO: 417624 - DNA, 201 bp, Homo sapiens
gcagccagagaacttgtttccctggttgctaccctgtgattttggacacatttaatctgtttcagcttccatttactcatctgtaagatggggatgatgartgccttgcagatttgctggaattaaatgaaaagcatcaaaatctggctcataatagcactcaaagattatttatatgccattgtaggaagtaggttctca

SEQ ID NO: 417625 - DNA, 201 bp, Homo sapiens
tcttccttagtcgtacatatgggctcccagcattgcacaacacttatccttaaaagttacatgcaatttatccccttcctggcatggtcagacttcccttytctctcctccctcctcttttcctcccatccccctttcccttgttgtgttagttgcctattaccgtgtgacaaatcccccaaaacatagtggtttaaaaca

SEQ ID NO: 417626 - DNA, 201 bp, Homo sapiens
cttgaacccaggaggtggaggttgcagtgagccaagattaagattatgcctgagtgacagagcgagactccatcgaaaaaaaaaaaaaaaagttctccccrgtgtgtttttaggaagtggcatggaagtccacccatggaagcccagaggaagggagagtggatgttccctccccacagccagtcccgtagctagttagga

SEQ ID NO: 417627 - DNA, 201 bp, Homo sapiens
gtcttctggtatttgccacctgcttctgagcatgggtctcaagcctcgaaatggcctcacctcagcgtcctcaacatatgtgttcaccattcttatttttsccccgttcttattgactgtagtggttcctctgaaaaaaagtcgctccacccagcctggcatctttttctcacttctgtccagtctgcacagggacgcaag

SEQ ID NO: 417628 - DNA, 201 bp, Homo sapiens
tctgattaaataaaaagatgcaactcaatgtgcatgtctgagtgtgtgtccacgcattttaagtgtttttccagtgcccataatatgtcttatcaacataytgattttctgtccatattctcgcagttcttctccaggggataggagtatgttgctagaggggatcttaatagttggcttgatgtttaagccgccgggcga

SEQ ID NO: 417629 - DNA, 201 bp, Homo sapiens
aggtttgctttaatgatcttgaaggtttgctttaatagtctttcgcagtagtcctgggcactgacttttgctaaggcatgacgtgggggaattcaaacttytatgcagtcagccttgccctcttggagtttatgatattatcagggacaatatacaaatatataacatatatacatatgtcctaagtgctagctgagtaaa

SEQ ID NO: 417630 - DNA, 201 bp, Homo sapiens
atttctcgccatgtcagcagcatcatctcccagggggagggaccaccctgattcctgcttctctatcactcattggcttgacgctcttttagcacatgctrgtagacggcaagcatgtttcttgtggctgctgtcacaaattaccacaaacctagtggcttacaacaatccacggttattctctcacagctgtgtaaagca

SEQ ID NO: 417631 - DNA, 201 bp, Homo sapiens
tgtatcaaaaacacacattaaccaaggtacatttctcgccatgtcagcagcatcatctcccagggggagggaccaccctgattcctgcttctctatcactmattggcttgacgctcttttagcacatgctggtagacggcaagcatgtttcttgtggctgctgtcacaaattaccacaaacctagtggcttacaacaatcc

SEQ ID NO: 417632 - DNA, 201 bp, Homo sapiens
ggtaaagaacaaaagattcccctcaaaaacaaaacaatacaaagctaggtcaatccttgcttggtgcagttaggtaccttgccccgtgaccacacctgatwttaataagggatgcgtaagtgtatcaaaaacacacattaaccaaggtacatttctcgccatgtcagcagcatcatctcccagggggagggaccaccctga

SEQ ID NO: 417633 - DNA, 201 bp, Homo sapiens
ttcccttaaagaatatcttgccgctgtcttgggatttgacattcaatgaatcaggagatgattcttgaagtttcatatccgttaagttcctcattaccatrtatgtatgtatgtatgcttgatactagtaatatcatcaatcttaccaggaacgtggtgtccccaggaaggtcatacattgccacagaatctggccaaatg

SEQ ID NO: 417634 - DNA, 201 bp, Homo sapiens
tttagccctgaaaatttagatgccttggccttcccaaactccaatctctgtcttctaaactcaatgagattgttggaccctatttggtagccctctccctrggctgccacgtaaacatataagtatccttccatttgtaaaatacatagcatagtgtgttagtttcctaaatccgccacaagtggatgactttaaacaaca

SEQ ID NO: 417635 - DNA, 201 bp, Homo sapiens
atggaccattcccgagacttgtaggcctcgagtttcccagtgattggttgatacttctgccttctgattggttgggtgagttggctggtgcagggatgctratgagcccaggattgtggatttattcccccaaaagtttaaattagtttcccagagagggggaaaccccagtttgaccacatttattattttatttgctgc

SEQ ID NO: 417636 - DNA, 201 bp, Homo sapiens
tgtttaatttcgaaatatttggggatttactgatttctagtttaattccgttgtaatgagagaacactgtatgatatcaatcatttttaattttggtcttrttttagggccataatatggttgatcttggtggatgcttcctgtgcccttcaaaagaatatgtgttctgttgttattgggtagagtgttcaataaatggcg

SEQ ID NO: 417637 - DNA, 201 bp, Homo sapiens
ctgcccaccctcttggctcacatcaatggcaagttataattggactacaaggaccaatatattgtgtagtctagaggggaaaatgccaaaagaaaaactcygttggatcaagcgtatgtgtcctgcgttcatttctaggtctgtaaacaaacacagctgttgagtgaaggatccgtcttcagaaatggtgaaaaaacagcc

SEQ ID NO: 417638 - DNA, 201 bp, Homo sapiens
tctttggtcacttcaaaagtcagatcaacctctctttatcatatggtatttagtatcctatattaactgtatcttattttcttgccccattttcccttcaytcctatttccacatatgttcaatgtttattccataaaatggtatttctataagttgtctcagatctattttcagaacgaggcaggagcaaaacgaattac

SEQ ID NO: 417639 - DNA, 201 bp, Homo sapiens
tggagaaagttctcccgtgttttcagcctccactgtctgcagccaaccccaggggaggaatagtatggaagagaactcaaagaaatgaaagcacaacatayccctttactttgaaacaagaggcctgtaagtattcatgtaaaaagtcatggtaaaattctgtgttcttacagaatgatgatcctcttattttcaaagttg

SEQ ID NO: 417640 - DNA, 201 bp, Homo sapiens
cagcacagcttttctcaaactttgtgcaacaaccacttgtttttcaaattttttagtttttgtggacccatacttttgggtccacgaaaattcattacaartgcattcgtagaaaaatgacatggaaaaaaacccaaaatatgttcaaaatcaagcctcaacttttaatcattagattccatttgtagaaagttgtcagtc

SEQ ID NO: 417641 - DNA, 201 bp, Homo sapiens
cagccagctgaagtccgttttgcaatgacggtatcctgggagtctggaggagaaaccttttaacgactgtgagatgtagccacagcccataaaacatggcygtgcggcaggcgcccagctctccacctgacctgtaaactcctatgcgcctttgcatccccacactctgctttgcagatactcttatgaattctgcaagtc

SEQ ID NO: 417642 - DNA, 201 bp, Homo sapiens
taataccatgtgtatatagcacccacataaggtaattgctgtcattatccccactttgcagatgaggaaactgaggcagagaagttacataacgtttttcstagattatccagtaagtgcgtggtggagcggacattaagcccaggcatattgaccccacagcctgtgttgaggtttcatggtcgtatttgctggcctctc

SEQ ID NO: 417643 - DNA, 201 bp, Homo sapiens
atgtgcagccagctgaagtccgttttgcaatgacggtatcctgggagtctggaggagaaaccttttaacgactgtgagatgtagccacagcccataaaacrtggccgtgcggcaggcgcccagctctccacctgacctgtaaactcctatgcgcctttgcatccccacactctgctttgcagatactcttatgaattctgc

SEQ ID NO: 417644 - DNA, 201 bp, Homo sapiens
ttgatggattaaagatgaagttcattcattcatcacaggtcgtctttggtaatcatctcaatgagacagtatgttattatggaaagctctttgaatccaaractaggtcctgttttttcacttgctagcttgagatcttgaccacatatgacggtagccttgtgtctgagtctcaggttccccagctgtaaggtggagacc

SEQ ID NO: 417645 - DNA, 201 bp, Homo sapiens
catattgattttctgtccatattctcgcagttcttctccaggggataggagtatgttgctagaggggatcttaatagttggcttgatgtttaagccgccgkgcgacgcagatgtgcagccagctgaagtccgttttgcaatgacggtatcctgggagtctggaggagaaaccttttaacgactgtgagatgtagccacagc

SEQ ID NO: 417646 - DNA, 201 bp, Homo sapiens
gtaaatgacttttaactgtgcctactgtttatacttgggaaagacgacaatagagttcccttctcactttaagtggccatggaggcaggagaaactgttcrctcctcctctgagaaatctaaccatttgaacttgatgtttcactggcctcgtaagtatttgatggattaaagatgaagttcattcattcatcacaggtcg

SEQ ID NO: 417647 - DNA, 201 bp, Homo sapiens
tctggcatgagcctcactggattaagatcaaggtgccggcagggccgtgttccttctggaggctctaggggagaatccatttcctcgctgtttccagttcytagtaaccgcttgcattccttggcttgtgataccctccttcaagttcagatttctctccgttactcccacttccatcaccacatttccttctctgactct

SEQ ID NO: 417648 - DNA, 201 bp, Homo sapiens
gggagaaaaaaaaaaagactgctcaaggagccatcagaccttcttgttcctcagcctatgttctgttcttggtaaggcacagggtagaagagaatgttatrgagaggaattaaagttataaagaatcatatacactcaaaagaatgctaaaacattttatgctggcgggaagagccagtgggtggtgggcaggagacgctg

SEQ ID NO: 417649 - DNA, 201 bp, Homo sapiens
atgaccagaagcttaagtctttgaagtatagtgtgttttatcattttcatttggaaatctttttaatgaatcccgacaaatgttgacatttgattcagtartgaaatggcatagtcctggaaacaagatcgggacccaatgttgatccatttccaggatggaggagagtggtttctttagaaaaacattacctatggactg

SEQ ID NO: 417650 - DNA, 201 bp, Homo sapiens
cgctgtccccagcgggcgtgtatttgcggactccctgagcacgttccgcgctttttttcacttctgcccagctctggccaggttaactcaactgcagcagragagtccagcccgagtgtggccatcctgggaagagggctcttcagtacgattttcccctctaaactgccgccttttgccccctaacttggagtgcagttt

SEQ ID NO: 417651 - DNA, 201 bp, Homo sapiens
ttgttcccttgatttttccttgtttggttttatttcctggcaagactgctaattttctatttatgaaattctggacattaagaaaaaagttctagatactrttatctccttccagactagattcaatgttcttctgtaaggcagacaaaatatggccaaatcacctttttctttttgttccaggttaggcagggtttaagg

SEQ ID NO: 417652 - DNA, 201 bp, Homo sapiens
atttccatcagatttttaaatctcaggtaaagatttaatatttcatcattaagaatgatgattgctctaaatatttttgtagataactcttcagtagataraggaaattcttctctatttctagtattctaagagttttttaacattaggaatgggcatggatttatcaaatgtttttttttaattttgggacaatcatat

SEQ ID NO: 417653 - DNA, 201 bp, Homo sapiens
gtcttgcatcatgaagcagctttctgtaactttttcacaaaccaatccttcactttctgcttcccatcttatatcaaaaatgaactattctagggaatgatttttttttttttttaagacagtatctttttctgtcacccaggctggagtgcagtggcgagatctcggctcactgcaacctctccgtctcctgggttcaat

SEQ ID NO: 417654 - DNA, 201 bp, Homo sapiens
agggtaaaaacacattttccagaatttttagtttgatactgcactctgaaccattcacagagatcgggaacacaggaataagcagagttcagatttgcacrtttgagtcatggtatgagtacccgagacgatgtgagatgtagaagttttgagctcagcagaatgagctaaactacagtaggagattgttgagaccacagg

SEQ ID NO: 417655 - DNA, 201 bp, Homo sapiens
gttgcaaaatagttgacctccttgaaaaattaaaaacagagtcagggttttaaatgctgagtcacacactcagctggggtggcagaagttgtgtgtcagcyttctgatattaaagacagttaggaagcctgacccagggagggtcagggaagattcttgcaagatgggcttttgctgtgaactctgcacaaacatgttcct

SEQ ID NO: 417656 - DNA, 201 bp, Homo sapiens
agcttcctgtatcatgggccccacttgcctgtcccacactgtgagaggaaacccatttacatctcatgtccaaagccatttttttcctacaaatagttttgtgtgtgtgtgtgtgtattgaggggttataaaggaaagcagaatattttatcatggtttttgcttcagtggctttaggacaaattagaactcaactctggt

SEQ ID NO: 417657 - DNA, 201 bp, Homo sapiens
cttgtgaagaaatgtatttgtctaatctgtgtttaagtgaaatttgtagtagttgatggattaactccatttaacaagggtttgtgttgcaaaatagttgrcctccttgaaaaattaaaaacagagtcagggttttaaatgctgagtcacacactcagctggggtggcagaagttgtgtgtcagccttctgatattaaaga

SEQ ID NO: 417658 - DNA, 201 bp, Homo sapiens
atacatttcttacacatacagtatatgtaaagaaatacccagatattagatgacataaaattttcagacacatgtcaaaatataaacaaaattaaacatayacacattaaccctctggtatatttgttgcaaatatgatagacaataaatatggcaaagacctattcttatataaaaagcccatataaatcaagaagaaaa

SEQ ID NO: 417659 - DNA, 201 bp, Homo sapiens
ataccactggcttattgtcgatgaaacaggcagaagaatcttcctgctgtatcccagacattcactatcgggattcacaccctgttgtatcattgaaaaaygcgcagacttcagctggatgaggtgctcatgcctgcaatcccagcactttgagaggccgaggccagagggttgcttgaggccaggagttcgagaccagtc

SEQ ID NO: 417660 - DNA, 201 bp, Homo sapiens
gtctggcaattatatggcagctacaaggataaaaatgaagggaagtgaacatatgggggagggaactccatgcttccagactccgtaagggatttgtcagmtttggttttataaaccaagtccaggttcccacttttggtcttgtgagtctattgatttcccaagaatttccaaaggcttaagaatgactttggtttttcc

SEQ ID NO: 417661 - DNA, 201 bp, Homo sapiens
acagattcctaaagttggatcttattttcttggttaattgtatgtattgatggggaaaattttttaaagtcatattcaaatagatttctttgattcgctgragaataagaattggacatttgctccaggccaattgttcatcttatcgataaatacaaaatgatgtcactcaagttgtgggataaccccccaacccaccct

SEQ ID NO: 417662 - DNA, 201 bp, Homo sapiens
cctgcctcagcctccagagtagcacaggccaccacacccggctgatttttgcatttttagtagagatggggtttcaccatgttggccagactggtctcgawctcctgacctagtgatccgcccaccttggcctcccaaagtgctgggatcacaggcctgagcccacgcgcccggccgggaccttgtttaacatgcacattt

SEQ ID NO: 417663 - DNA, 201 bp, Homo sapiens
tttctagaaccttacattcaattctcttccctatatttgtggttagagtcacacttcactttcagatggaatgagtgtcagtgtttccagtattttccagrtgaggaaactgagatgggaaaaagggaaaaggtaggcgtttaacaaaggcatttcataccactggcttattgtcgatgaaacaggcagaagaatcttcct

SEQ ID NO: 417664 - DNA, 201 bp, Homo sapiens
agggtcattctcttacgtaatactctccttatgattgtggtcggggaagagaatggtgccccacaggaatcttagacctcctgttccatctccatcctttygatatacaaagggcagcagttctcaaagtgtggtccatggaccagcagcatcagcatctcctgggacctcgttgttttttgtttgtttgtttttgttttg

SEQ ID NO: 417665 - DNA, 201 bp, Homo sapiens
aagaaagttcagagtacttcatgatattgttgttttggtagaggaaaaattggaaaatccacatatgaggcaatgggttctattttacattgtaataaaakgaatgctttgaactgtgcttctgttttctcatttttagattttttatctcctcacatcttcaaatctgtgagcatttgccaagattcttccttagtcgta

SEQ ID NO: 417666 - DNA, 201 bp, Homo sapiens
atataaaatgctaaatgagaggaaaatgtgcaggaaacaataagggatttgttccagctggatctgacacactaaattggagcattataagagatggaaaygtctagagtgggatgagtgacccgtttagtagtaagcccaaatgtcaagctaaggaattctgatctctcaaggattatcccacactgtaaattgcaggca

SEQ ID NO: 417667 - DNA, 201 bp, Homo sapiens
gcgtgagagtttaaaaggttgtgggtggcaatcagaggctcgtggatgacactaaggaagccgtgcatcttttctaagaaggataaaggaaaagaaagttsagagtacttcatgatattgttgttttggtagaggaaaaattggaaaatccacatatgaggcaatgggttctattttacattgtaataaaaggaatgcttt

SEQ ID NO: 417668 - DNA, 201 bp, Homo sapiens
ggctccttcccatgagcatttatacacgcttgagtctgtctgacagaaacctcccttggccccttcaccctaaagcacatgtgttctctcccctctcctcmgacaaaatccaaaagtatggtctacactcatacttcccttccttctcttctgctccccttgactcccttgcctctggtttaccccaccagagggtggagg

SEQ ID NO: 417669 - DNA, 201 bp, Homo sapiens
ttacattttaaatcttaaaccagtgacttttattccttaaggcttttgttcctatgtgttggccaaaggtctaggacaggtgagaaatttccactgggatrgtctgaggcagaaaggagagaaggaagtgagttttataaagcttcgtttgttcagtatgtcttccctattttatttagtattaaaaagacttttagaaat

SEQ ID NO: 417670 - DNA, 201 bp, Homo sapiens
aatgcccatacttttaatacatctctatgaagtagggctgaagaaggagaggagttactggtcaccattgcctgcacagcggccatgcccacctatgatayatgagccattcacccgctgacaggcagacgaccctccacacaggctgccttgctcttaaccataaccaggcctacgttttccatgtgagcctgcctgtac

SEQ ID NO: 417671 - DNA, 201 bp, Homo sapiens
gacttgctatgtacaaagtagcctcatcggtttgaatgcttaggaatttttctagggaacaaaacattatcaaagacagcaaaattaagggaaactgagtragattattaaaatagatcatattaatgccaaaatctcttgtacaaagagaccacttattcatatatttattcactgagcaaatattcattgttacctatt

SEQ ID NO: 417672 - DNA, 201 bp, Homo sapiens
ctttatcaacacttgtcagaaaatgcccatacttttaatacatctctatgaagtagggctgaagaaggagaggagttactggtcaccattgcctgcacagyggccatgcccacctatgatacatgagccattcacccgctgacaggcagacgaccctccacacaggctgccttgctcttaaccataaccaggcctacgttt

SEQ ID NO: 417673 - DNA, 201 bp, Homo sapiens
agattattaaaatagatcatattaatgccaaaatctcttgtacaaagagaccacttattcatatatttattcactgagcaaatattcattgttacctattmtgcacagctagagaatgttagctcaaagttttcaaaccatttttttaaaacaaagatgtttatatatcctctacagattcctaaagttggatcttatttt

SEQ ID NO: 417674 - DNA, 201 bp, Homo sapiens
aaagcacaagggttctagtttctctaaatctttatcaacacttgtcagaaaatgcccatacttttaatacatctctatgaagtagggctgaagaaggagargagttactggtcaccattgcctgcacagcggccatgcccacctatgatacatgagccattcacccgctgacaggcagacgaccctccacacaggctgcct

SEQ ID NO: 417675 - DNA, 201 bp, Homo sapiens
cttagatctttcttccttggatattacaaagtggaagcttatgaagtgtgaaaattaaccaaaggatcttagaatccttcagattattttgagtcattcaytatacttaataattgcattcattgtattttactaaaactatgtgtatgaagcatgaaaatacatttgttcttgaaagaagggaacactcaaagtatatgg

SEQ ID NO: 417676 - DNA, 201 bp, Homo sapiens
aagaaacatagtgcatatagggttggcactattcacggtttcaggcatccattggggcccttggaaggtatccccctcggataagaggggaaaattgtatracttgaaaccacacaatgccataggaaatgagaacatcgccagtctcacttacgaactcacacataaaaattccaaatagtaaatatatgaaagcaaccc

SEQ ID NO: 417677 - DNA, 201 bp, Homo sapiens
agtgcagtagttcccccttatccacggtttccgtatccacagtttcggtttccacagtttgctcttgaggtctgaaaacagttgagtatagtatagtaagwtattttgaaaaagagagagagaccatcttcatataacttttattatagtatattgttgtatttgttttattatcattaatcttactatgcctaatttata

SEQ ID NO: 417678 - DNA, 201 bp, Homo sapiens
ccaaatattgtatgttctcacttataagtgggagctaagctatgaggatgcaaagtcaaagaatgacacaatggactttgaggactcgggggaagactgasgggggcttaggcataaaagaccacatattgggttcagtgtacactgcttgggcgatgggtgcaccaaaatctccgaacccaccactaaaaaacttaccca

SEQ ID NO: 417679 - DNA, 201 bp, Homo sapiens
aatgatagtataataaataatagtaaatatatgacaatttaccattgaaaatgacagcacaaaccaaacaaaaagggagcaatttgaattttttttttttwaaatcattgaggtggaaaaactagggtgtggtgacatgcacctggtgacatgtagtcctagctacttgggaggctgaggtaggatcacttgagcccagga

SEQ ID NO: 417680 - DNA, 201 bp, Homo sapiens
ggttcagaaagtcagatgcatctgcagagatgtcccccagctgtgagtgcctcctcacgtgtttgccttctctcttatgacccatctgttcagagcatgcsccaagtgtggtcccatcccagactcatgcagcacagcttttctcaaactttgtgcaacaaccacttgtttttcaaattttttagtttttgtggacccata

SEQ ID NO: 417681 - DNA, 201 bp, Homo sapiens
ttttgtatttttagtagaaatggggtttcaccatggtggccaggctggtctcgaactcctgacctcaaatgatccacctacctcagcctcccaaagtgctrgcattacaggtctgagccactgcacctggccaaccttggatttcttaaaaggaaggggttgtatcttgattaaggtgtgagtggtcaaatgtcaatgcag

SEQ ID NO: 417682 - DNA, 201 bp, Homo sapiens
tttccttcccactgtcttctctgcccttgtggtctgacttccatccccatccatctgctgaaagtgtttcgttgaaggcagctaatgactgtcctgagtcytcatcctcctttccaaaagccttgatcatgttgacgatgcttttttccctactgggctattttttagcgcttctaaaaaatcctctccttagtttctaca

SEQ ID NO: 417683 - DNA, 201 bp, Homo sapiens
tattattttaacatagaattccaagtgcatttctcttcttgtaagattgagaaggacacataatattctgtaatagactcagggtgatcaattaatagcayagagaaattccagtgcagctggggcattaccaagtgcagccctggagccaacaggggtggatggaaggatggaatggccggaacacaagacgcagacatg

SEQ ID NO: 417684 - DNA, 201 bp, Homo sapiens
ttgcagcttcaatctccagggatcaagcagtcctcccaccttagcctcccaaatagccgagaccacaggcacacaccactatgtccagctaattttatatyttgtagagacagggtctgtgttgcccaggctgatctcaaactcatgggttcaaacagtcttcccaccttagcctccaatagtgctgggattacaggcatg

SEQ ID NO: 417685 - DNA, 201 bp, Homo sapiens
taataaaaataggcagacttcttttctaattttggaagcaagtgtctgggggtagttttgcgttgtggtgaccctgtcagcattttgtttctaaagactgwaatttagaagatttgatcctgccggaacacagcacaaagatgcttccctgtgtttctgttttaaatttgggcaatttgggtagggcacaaatccaagaac

SEQ ID NO: 417686 - DNA, 201 bp, Homo sapiens
tgtaggagctcagcagagcctgtgtggaacgtgcacctgcaacaggaggagcaagggcaggaagatgctagaggacagagaaaggggatcagccagaggcstgtgtgctgggagctgcagcatgtacccctgatggcccccaggaagggagctatggcccctccaccaccaccctcagaacaggactctcagatgtgaaag

SEQ ID NO: 417687 - DNA, 201 bp, Homo sapiens
tcctgtgctagggaatgaaatcatcactcccaacacacaggaagtgctgtgcaaagtcccatctttcatcgacaccttggctcttcttgcttttctcttaygggctttgtacatccttaagaatggaatttgctgaagatcctcatggcttgttttcttggatcagagaaccatggggtcaaatcttcatagggtcaagcc

SEQ ID NO: 417688 - DNA, 201 bp, Homo sapiens
tttcttggctctgtgtgacctgctgagcggggacacccggctgagctggcagggcctgcggggtcagcccagggcagccgagtggcccctctgcagaagcyctggtgaggagacgactccctgcccacctctctccctctccctccccacctctctccctctccctccttctcacctgctttctgtggtgtccctgacatt

SEQ ID NO: 417689 - DNA, 201 bp, Homo sapiens
tttagggcagagccttctaacaccaactcttgatttgttgagattgtttgaccctgttgttatgcatgcacatacctgtcatcgtaggatgatcccacgtrgctgcaggggtgaaggaggtatccagtggatgttagagtccctttctgtcttgctttccctttttttttttctcttcttttcctcccattaataaaattg

SEQ ID NO: 417690 - DNA, 201 bp, Homo sapiens
tcccaccccagtctcccaaattgctgggattataggaatgagccagtgtacctgaccttcaagtatattttttgaggtggtatgatagactagtgaaattraaacaggaactgtgaaattataatttatttgttccttttcctaaatacctttgtcagtctgcatgtgaattaaagtaattatttactttatatcagagta

SEQ ID NO: 417691 - DNA, 201 bp, Homo sapiens
gcttctatgtgttgacaacaaatccatcagaaatctttcttttttctttctttgtttttaagtctaggagtttaaaaatcttttttcctccgcatagtttsactgaggtgtctgtcaccatagtacctagacaatccctcaggcagagatatgagtgattaaatttctccctggcttgtgccctgtttgatccatgctagg

SEQ ID NO: 417692 - DNA, 201 bp, Homo sapiens
taatttttatttttcaacttttttttttttttttttttagatacaagatctcgctctgtcacccaggctggagtacagcgattatagcttactgcagcctygaactcctggcttcaagtaatcctcccaccccagtctcccaaattgctgggattataggaatgagccagtgtacctgaccttcaagtatattttttgagg

SEQ ID NO: 417693 - DNA, 201 bp, Homo sapiens
tagtgtgaagagaaaaccttttgcgggtaagtagaatccaagcagcaagccatgccacctgccaatgaagcaattctatttcatcttaatccatgtagcartaggaaaggggtatttcatcatcagaggctagaatggggtaaaatctgattgccatgactctgaacataggaaggacagttcatttgaacaaagttattg

SEQ ID NO: 417694 - DNA, 201 bp, Homo sapiens
ctcactgcaacctctccgtctcctgggttcaatcaattctcctgtgtcagcctccagagtagctgggattacaggtctccgccaccacacctggctaatattttttttttgtatttttagtggagctggggtttcaccatgttggccaggctagtctcaaactcctgacatcaagtgatctgcctgccttggccacccaaa

SEQ ID NO: 417695 - DNA, 201 bp, Homo sapiens
agtagagatggggtttcaccacattggccaggctagtctcagaactcctgacctcaggtgatctgcctaccttggcctcccaaagtgctgggattacaggygtgagccactacacctggcctctttcttaattttatctaagaaagcagaatttcacatcttaatttttatttttcaacttttttttttttttttttttag

SEQ ID NO: 417696 - DNA, 201 bp, Homo sapiens
aaccctaaactcttgccttgaacctgctttgagttttaagtaatgaacacatgagactaaacaaatcagattttaaaagcttgagtgaaataaaagaattwaaaaaaaagaagtgaattttaaagactaatttctttcttcttcttttttttttttttttttttttttggagactgaatctcactctgttgcccaggctgg

SEQ ID NO: 417697 - DNA, 201 bp, Homo sapiens
aatgcaaccaaccacgcgattgtgcagaccttggtgagctctcggagactttgttttgtaagtgggagtaagccaagaccaggtgtcatttctaaggtacyttctccccttctgttttggaacaggttcaccttatgaaccccgagtatgtccccaaaccgtgctgtgcgccaactaagctaaatgccatctcggttcttt

SEQ ID NO: 417698 - DNA, 201 bp, Homo sapiens
cccaccctattctgctcccttacagaggaaacctcttaaaaatggggaagagggccgggcgcagtggctcacacctgtaatcccagcactttgggaggccsaggacggtggatcacttgaggtcaggagttcaagaccggcctggccaacatggcaaaaccctgtctctactaaaaatacaaaaattagccaggcgtggga

SEQ ID NO: 417699 - DNA, 201 bp, Homo sapiens
cttgtttatatcttcaatgtccagcacagtgtctgctcaggacagccattgaattatctcctgaatggttagatggtataaggaaggcttcccttaaagartatcttgccgctgtcttgggatttgacattcaatgaatcaggagatgattcttgaagtttcatatccgttaagttcctcattaccatgtatgtatgtatg

SEQ ID NO: 417700 - DNA, 201 bp, Homo sapiens
gcactttgggaggccgaggacggtggatcacttgaggtcaggagttcaagaccggcctggccaacatggcaaaaccctgtctctactaaaaatacaaaaaytagccaggcgtgggagcacacctgtaatcccagctacttgggaggctgaagcaggagaatcgcttgaacccgggaggcagagatttcagtgagccaggac

SEQ ID NO: 417701 - DNA, 201 bp, Homo sapiens
tgctgagataagactagtttcagatatgctgcctgcatcatttccagactgctctccctacgtctctgcaccctacctggtaatctgtgagtgttctttcrtaattatacaatgtatccacagcttcatcttcatagatcaggaatgcccatttccttgcaggttccctgtctattcctgaacttcagggcagtgagaaaa

SEQ ID NO: 417702 - DNA, 201 bp, Homo sapiens
caggttggaccctcattgctaaaggctcttaattccctggaacacagttgagaaaccccaggctagataattcccaagacgattctttttaaattttttgktaatgcagcttaatttgacacattgacgtataaggaacagcttaaagtgtacagttcgataaacttagacataggtaggcatggctgcaaccatcatggc

SEQ ID NO: 417703 - DNA, 201 bp, Homo sapiens
tgaagcaacctaacaatttctgccttttaattggtgtgtttagaatatttacatttaatgtgattattgatgtgtctgggtgtaaatctaccatcttgctmtttgttttctatttgtcccatctgttctttgttcccttcccccctttttctgccttcttttggattgtgtattttttgtgattttattttatttccacta

SEQ ID NO: 417704 - DNA, 201 bp, Homo sapiens
tatttaaactaaataaaatctaagaattttgcttcatcttgggtaacatgaaggattttcatctcctcctcatgggccagccagtggtctgttcactaccygatccccgtagtaagccgtgggtaattggtaatccacctatgaagtcaaacggggaaactggtgaggtaagcccgtggcacttagtcaagtaacaatagt

SEQ ID NO: 417705 - DNA, 201 bp, Homo sapiens
tgcttacccatgtgccatggctctttagaagaacatttggggccaaatgacaggggacttgtcctatgcagagaggcatggagcagcattctttattatcwttattattattattatttttgtagagacagggcctctctgtcacccaggctggaatgcagtggtgcgattataggtcactgcaaccttgaactcctgggc

SEQ ID NO: 417706 - DNA, 201 bp, Homo sapiens
aattgtgactgcatctggccccatcatcagtaagccaaatgctaatgggtataaagtaggtactgagggctgaatttggaactcagccctctccctttctytcccattcatatttcttgaactgtctggcatttgaggagtcttgactcatatagcttgaattgctgcgctcattggaaacattactgttttaccattgtg

SEQ ID NO: 417707 - DNA, 201 bp, Homo sapiens
tttatttttccccttcctgtgttttgaagccctgttcctgggaaatccacatttaggactgttatgtctctggatgaacttgattattctctttgtccttrataatagtctttgttcagtagtcatctttgtctgaaattaatatgaccactctagctttcttttcatttgtgtgcacacggcataatgttctaacctttt

SEQ ID NO: 417708 - DNA, 201 bp, Homo sapiens
tgtatgtataattacataatttacattttaaatcttaaaccagtgacttttattccttaaggcttttgttcctatgtgttggccaaaggtctaggacaggwgagaaatttccactgggatggtctgaggcagaaaggagagaaggaagtgagttttataaagcttcgtttgttcagtatgtcttccctattttatttagta

SEQ ID NO: 417709 - DNA, 201 bp, Homo sapiens
tgcaccatctggtgccatgtagcactgttgggcgtctgcagagcattttggtcacagggtcttctttgcctcccgcctcttcatatgtagatgttactacsccacaagcagagggaggttggtcaccaaatccggaaacatgggcaaacccacaataaatgggttattgatactacattccagtatacagtaagatactct

SEQ ID NO: 417710 - DNA, 201 bp, Homo sapiens
gttgctcagaagggaccaggagggctggttgccccagaaaaggaaagatattctccaagaacagtcctgggagaagcattttgttgtgtttttgcaaggaygtggggatccaagttttgtctattaaaggaaaggaatggccctgttctgtttgtgtgttcagagcgcacggctgtgctcagagatgttcgtgcaccctgc

SEQ ID NO: 417711 - DNA, 201 bp, Homo sapiens
agacaggagaatcacttgaacccaggaggcggaggttgcagtgggccgagattgcgtcactacattccagcctaggtggcaagagcaaaactgtctcaagaaaaaaagagagagagagaatattgagggagcaccaaggaaggtatggttaagttcagggtacatgacattcaggctgagcgtggaaagagaatttggatt

SEQ ID NO: 417712 - DNA, 201 bp, Homo sapiens
gaggaggttgtgtgatcttttagtttatctcaaggatatcaaaggggaggggaagccctaactgaatatctagctaaataggagataccattcagtctatytgtagtgtattttaaagcctgtttcatgtgcaaatgtgaactacacagaggtaatctgataatcccaaaagggtaatctgataattccaaaagggtaatc

SEQ ID NO: 417713 - DNA, 201 bp, Homo sapiens
agaatcacttgaacccaggaggcggaggttgcagtgggccgagattgcgtcactacattccagcctaggtggcaagagcaaaactgtctcaagaaaaaaagagagagagagaatattgagggagcaccaaggaaggtatggttaagttcagggtacatgacattcaggctgagcgtggaaagagaatttggatttcccttg

SEQ ID NO: 417714 - DNA, 201 bp, Homo sapiens
agactttctgactggcccagatctcccggcgatctttccagggccactttgagaaaaggcagtgagtagcaggggtctccgtccggcttggcacgttctcyttgaggccattgtgagtcctctaagaagggactctgtctctgtcaacccacctttgaccacagacctttactgatcctttctgattgataaacaatagag

SEQ ID NO: 417715 - DNA, 201 bp, Homo sapiens
ggcaacaattctaaaaggcaataagaagaagcttatgcaggtaccgtgagatgcctaagtcattcccgatcattgccaaccctgggagggcactggggccrggagactcagtctaggaagtggcagagagtatagaaggtgcttagagcacagagggtcttagagctaagtttttaaaggaaatctttgtctatttgtagg

SEQ ID NO: 417716 - DNA, 201 bp, Homo sapiens
ctccacttaaaacccatgttcaaatatctgtaatgttcatttggagaagagaggaaggatttgggctttttaatactaattgtacctgaaggtttccctgyggaagcagtttattaaatgggactgaaagccgcgctgctaaaggcaattaacatctgatacattctcaaagctcagaaatctttggcgagaggaatgttt

SEQ ID NO: 417717 - DNA, 201 bp, Homo sapiens
actaggcgtgtaccaccatgcctggctagttgttttaattttttgtagagatggggtctcattatattgcccagactagtctcaaactcctgggctcaagygatcctcccacctcagcctcttgagtagctggactactaggcgtgtaccaccatgcctggctagttgttttaattttttgtagagatggggtctcattat

SEQ ID NO: 417718 - DNA, 201 bp, Homo sapiens
gattgaggatattaacctcatctataaaacaccttcacagcaacacctagattagtgtttgattacataactggggaccgtacccttgctcagttgacacrtaaaactgaccctcacagttctccctctgggtggatattcccacaccacacatcttctaaacagtattttactatattgaagtgggctgtgtactcacct

SEQ ID NO: 417719 - DNA, 201 bp, Homo sapiens
cattattctaagtgaagtgactcaggaatggaaaaccaaatattgtatgttctcacttataagtgggagctaagctatgaggatgcaaagtcaaagaatgwcacaatggactttgaggactcgggggaagactgaggggggcttaggcataaaagaccacatattgggttcagtgtacactgcttgggcgatgggtgcacc

SEQ ID NO: 417720 - DNA, 201 bp, Homo sapiens
atatttgagaaatacctcctgtcgtactagttggctggtcctatgattattgacctctttctttgctgtaatacctgctgttttcagtgcattggcttttytgggcagtgggcaagaagaacccatcaggctgcaacaatagtctgcatcattaagcttgagtaacacatgatgcctttgcgctttatttatttttagaag

SEQ ID NO: 417721 - DNA, 201 bp, Homo sapiens
agaatatgaatacaaatacttagaaatatttgatgaaccctggagggtaaagtcttttgtttcaccttggtcaaaagtgaattggaaagtttagctcagtstttgtattacaattcaaggttatatgcttgcaacatgaaagtcaaaaggccgctgtcgttacaacccttggaagtccagccagaaatgtccttgttgcct

SEQ ID NO: 417722 - DNA, 201 bp, Homo sapiens
tggtagttgctatgtccgcctttcaactggttgctatggggttgagccccagttcgggcaaatgtatgttcccggagaaaagcattttcagtcggcaattyctgacccaccctttgaaatgacttgattcagatactgtttatgaagcactttccgttctgaaatggggcctaagttcagggtagtgttcttttctgctgt

SEQ ID NO: 417723 - DNA, 201 bp, Homo sapiens
atccgcccaaagtgctgagattagaggcgtgagccaccgtgcccggccaggaatgctgagtctgaaggaatgaatacaggctgagagttgttcttagtcamgtggaggatattgtgcctgttgttcctctgcagtggaaatcaggtgtgggaggatcttttgttctctctttaagctggcctatctgtgttttgactggag

SEQ ID NO: 417724 - DNA, 201 bp, Homo sapiens
ctaggaacccacagacagatgaactacgacggcatctgagccgggcagaatgaataaaaagaaacacacaagtaggcacaaaacactgtagcaaatgcagygtaccagaagacaatggcattgtcaatgggaccacagaacccagatcacccgggaaggaatgctttgtttgtttgtttgtttttgagacggagtcttgct

SEQ ID NO: 417725 - DNA, 201 bp, Homo sapiens
cctggtgacatgtagtcctagctacttgggaggctgaggtaggatcacttgagcccaggagttcgagaccagcctgggcaaaatagcgaggtgccaacccmaaaaaaataagaacaaataaacaaaactcactaatagattatttaaactgcacattaaacagtgaaggagagaactggtaaatgtgtaaatagaagatat

SEQ ID NO: 417726 - DNA, 201 bp, Homo sapiens
tgctctgcctaccttctgggactgttctgaaaaattcagatgggattacgtgcatgaaaatgctttgtaaactcttcagacattaggcagagtttataacrtctttaggagtgagaggaatgtgtcccacatgttattttccaaacatgaaagataaagacttcaaattctggaagtattgcagagtagatcatctgcagg

SEQ ID NO: 417727 - DNA, 201 bp, Homo sapiens
tcataaaactgagtagcacagggaagccacttcactgcttttggcctcagattcctgttgatttgatggtggtcataatatttgctctgcctaccttctgrgactgttctgaaaaattcagatgggattacgtgcatgaaaatgctttgtaaactcttcagacattaggcagagtttataacgtctttaggagtgagagga

SEQ ID NO: 417728 - DNA, 201 bp, Homo sapiens
ccaccagacacttgtgactcttgaacactttcaacgtgactgatgtgacaggaaccaaattttacattttaatttatttaaatttaaatagctccccgtgsctgtagcttctatattggacagtatagttctagaaagtaaaagcaacaagagttgatgattaattgggcaatttagggtggcagggtagacagagctaga

SEQ ID NO: 417729 - DNA, 201 bp, Homo sapiens
agggcagtggtagtgaagggagtgggacccactgggtttgagacacttctagaatgatgctgtccagtagaactctctgagatgatggaagcatccaacgrtgtgctctccaatacaggagccaccagacacttgtgactcttgaacactttcaacgtgactgatgtgacaggaaccaaattttacattttaatttattta

SEQ ID NO: 417730 - DNA, 201 bp, Homo sapiens
caccacgcccggctaatttttttgtatttttagtagagaccgggtttcaccgtgttctccaggatgatctccatctcatgacctcgtgatctgcctgcctyggcctcccaaagtgctgggattacaggcgtgagccaccgcgcccggactaattttctaacctttttaacttttaacttatctgtgtctttagtctttata

SEQ ID NO: 417731 - DNA, 201 bp, Homo sapiens
atagctttctactcagtggaataattttctacctccttaaaacttattggtccttggtcatccttctagagcaggagttggaacatttttcttaaagggcsaaatggtaaatattttcagctttgcaggtgtgatctttgtctcagctactcaactctgtcatggcagtgtggaagcaatacttcaacaaacagacatggc

SEQ ID NO: 417732 - DNA, 201 bp, Homo sapiens
cccatgaagacagaggtgccactttaacgacctctatgtggccctcacccttgtcattctaggagagaagggaaattaaagtagtgaattattccctctamaaaacaagtttcctttgggaagagtctgtagcctgagctcaggaaagctgggaaatacatgtggagcatgccgctttgtccagtcccctgccatgctggt

SEQ ID NO: 417733 - DNA, 201 bp, Homo sapiens
tatgtcaccatatgtgtggggctggagtcttttgccaagtggttatgtgtcaggcacagccctgagtgcagacgggacaccgtgacattgcctggttgatkcattgtgaaggcatcactaccaggtttgacttgacatttaactttcttaaagtatggttcatggataatgagcatcagaatcaatggaggggcttactcc

SEQ ID NO: 417734 - DNA, 201 bp, Homo sapiens
caactgttgttttatcttatgaatattgagactcttataaatgaacatgtttctatattctttggtcacttcaaaagtcagatcaacctctctttatcatrtggtatttagtatcctatattaactgtatcttattttcttgccccattttcccttcattcctatttccacatatgttcaatgtttattccataaaatggt

SEQ ID NO: 417735 - DNA, 201 bp, Homo sapiens
cttgggggctatgccagtttggaggaccacaaataccccgtgaataagctcagttcctacagtcagcttctgactggggcggagatgtttcccattattargcttaccgaggtgaatgatcaagattcattgccagtgtccagataatcatcatgtcctgagaaatatttccaattccttagtcgtgcaatttcagaatgt

SEQ ID NO: 417736 - DNA, 201 bp, Homo sapiens
acaagtttctgtggaataaagagatgcatgctttgatttgcattaaaggagtccacgtccacccccgagccgcaggcctggtgggcagagacggcccttaygacaagcagcccttcatggtggctttcttcaaagtgagtgaggtccacgtgcgcaccaccaggtcagcctccagccggcgccgacaacagagtcgtaatc

SEQ ID NO: 417737 - DNA, 201 bp, Homo sapiens
aaatgaagtagaacccttgggggctatgccagtttggaggaccacaaataccccgtgaataagctcagttcctacagtcagcttctgactggggcggagaygtttcccattattaagcttaccgaggtgaatgatcaagattcattgccagtgtccagataatcatcatgtcctgagaaatatttccaattccttagtcgt

SEQ ID NO: 417738 - DNA, 201 bp, Homo sapiens
cttatcaaagtttttaaagtcctagtagaaatgcatttgtaactggaattatctgtggttctaaatacgtacctcatgttattatggagttcaacataggttttttttttttttttttgctttttagaaggaggtcattttaatgctatataatttgttgtgtgtgccagaaagccataacttcaggaaggtgcttttagt

SEQ ID NO: 417739 - DNA, 201 bp, Homo sapiens
aagtatcccttaactgttgtagctacaggaacaagtttctgtggaataaagagatgcatgctttgatttgcattaaaggagtccacgtccacccccgagcygcaggcctggtgggcagagacggcccttacgacaagcagcccttcatggtggctttcttcaaagtgagtgaggtccacgtgcgcaccaccaggtcagcct

SEQ ID NO: 417740 - DNA, 201 bp, Homo sapiens
agtttaggcagcgcttactgggtttctgaggtctagaaagcacttatatatgatggaccctctggcacttgagcagctcatgcttatgagagaaacctacsaggctgaagcattatgtcaatgcaggggaaaatgaagtagaacccttgggggctatgccagtttggaggaccacaaataccccgtgaataagctcagttc

SEQ ID NO: 417741 - DNA, 201 bp, Homo sapiens
acttaggaaactaggaagtatcccttaactgttgtagctacaggaacaagtttctgtggaataaagagatgcatgctttgatttgcattaaaggagtccaygtccacccccgagccgcaggcctggtgggcagagacggcccttacgacaagcagcccttcatggtggctttcttcaaagtgagtgaggtccacgtgcgca

SEQ ID NO: 417742 - DNA, 201 bp, Homo sapiens
aagatcttcctgttccatacctgtcatactatttcagacatcattctcttatgctaagagcaggaaaccatcaaaaagaaaactggaacagtttaggcagygcttactgggtttctgaggtctagaaagcacttatatatgatggaccctctggcacttgagcagctcatgcttatgagagaaacctacgaggctgaagca

SEQ ID NO: 417743 - DNA, 201 bp, Homo sapiens
gaacacatgagactaaacaaatcagattttaaaagcttgagtgaaataaaagaatttaaaaaaaagaagtgaattttaaagactaatttctttcttcttcttttttttttttttttttttttttggagactgaatctcactctgttgcccaggctggagtgcggtggcacaatctcaactcactgcggcctctgcctccca

SEQ ID NO: 417744 - DNA, 201 bp, Homo sapiens
tctttttcagacaaggtcttgctctgttgcccagactggagtgcagcggtacaataatggctcactgtagcctcaacatcccgggctcaagcgatcctctygcctcagcctccccagtagctgagagtacaggcatgcactaccttgactagctaatttttttttttttgtagagatggggtttctccatgttgcccaggc

SEQ ID NO: 417745 - DNA, 201 bp, Homo sapiens
cacattggccaggctagtctcagaactcctgacctcaggtgatctgcctaccttggcctcccaaagtgctgggattacaggtgtgagccactacacctggyctctttcttaattttatctaagaaagcagaatttcacatcttaatttttatttttcaacttttttttttttttttttttagatacaagatctcgctctgt

SEQ ID NO: 417746 - DNA, 201 bp, Homo sapiens
aaatttagactgtttaaccaagaggggcaattaggtgacaaatttgtgaattgcacccaagagatgaaaacttgtggaaaaagtactaattccagtaactmaaatctgaaaggttacgatttaaatagacatttaaatagacttaacccgatcctcctggaactctttccctcattcctccttacaattaaaaacacacct

SEQ ID NO: 417747 - DNA, 201 bp, Homo sapiens
ccaaagtgctgggattacaggtgtgagccactacacctggcctctttcttaattttatctaagaaagcagaatttcacatcttaatttttatttttcaacttttttttttttttttttttagatacaagatctcgctctgtcacccaggctggagtacagcgattatagcttactgcagcctcgaactcctggcttcaagt

SEQ ID NO: 417748 - DNA, 201 bp, Homo sapiens
tttatttgtttctttgagacagagtcttactctgtcacccaggctggagtgcagtggtgcagtctcagctctctgcaaccttcacctcccgggttccagcrattctccctgcctcagcctcccaagtagctgggattacagacgcctgccaccacacccagctaatttttgtatttttagtagagatggggtttcaccatg

SEQ ID NO: 417749 - DNA, 201 bp, Homo sapiens
acaacagatgctaagagagatatggttgctatacagatgaacctttctttccaaggagggagacaaaagcaaatcaacctgggaagaaaaacacttgaagytgtgatgggtgctaggaaggaagcctgcagaggcttgaatgggaaaatagtagactcgggatggggttggccagggcaggtcccttcctcccagggaaga

SEQ ID NO: 417750 - DNA, 201 bp, Homo sapiens
acaaggaatgtgtcttactccccttggatttcttttcttttctttttttgagacggagtctgactctgttgcccaggctggagtgtagtggtgtgatctcmgctcactgcagtggcgtgatctcagctcactgcaacctccactttctgagctcgagcaattctcctgcctcagcctcccgagtagctgggattacaggcg

SEQ ID NO: 417751 - DNA, 201 bp, Homo sapiens
tcattactcaaaatacctcctagaagctgaggactccagacctctaccgagtgctgtggcacctaaacactgatgaacttggagatatttttggatgtgcmgcaactgcctctatgtgtgcagaatagcagggtgactaagagcaagaacttctgaataaaaaatatctgggcttgaatcctggctctgccactgataagc

SEQ ID NO: 417752 - DNA, 201 bp, Homo sapiens
agcatagtccccatgtctgtaacctttcatggggagaaacacaagggcagacaattttcattcatccccactcttgagattttgaaagaggcatgtgcaasggcagccagaaccacaaggaaggaccctggcctggtctgagatggtcagtgtgggtttttgaaggacagagtcaagtcctaagaagaaggaattggcctg

SEQ ID NO: 417753 - DNA, 201 bp, Homo sapiens
cttttctttttttgagacggagtctgactctgttgcccaggctggagtgtagtggtgtgatctcagctcactgcagtggcgtgatctcagctcactgcaayctccactttctgagctcgagcaattctcctgcctcagcctcccgagtagctgggattacaggcgcccgccaccatgtctggctaatttttgtatttttag

SEQ ID NO: 417754 - DNA, 201 bp, Homo sapiens
atagccaataacagctcattatgcctgggatccctctgcctctctcttctgttaccagctagagaaaactatgtgcttttaaagagctgctgagattcaaytaggcccacatgggcaatctcccttctgattgtactcaaagtcaactgattagtaaccttaattatatctgcagaatccctattgccacgtaacttaatc

SEQ ID NO: 417755 - DNA, 201 bp, Homo sapiens
tctgctgctttcatactgcatggcattttcagagctgccagctgcctattccccagcacaggatccacaggcctatctgggagttctgttgctctcattcrcaagctctgtccatgggtaaggctcgtactcagaggcctgtggcactgatgctcttcactcttgctccttatggccccttgacttggagattctttttgt

SEQ ID NO: 417756 - DNA, 201 bp, Homo sapiens
aagaatcaaataccttcagacacttaggattggcccagtaaggtgtaaatcaaatggatatggaatcgtataatttttatttttattttttatttatttatttatttttttaaatgatagtttgtttgttttttttttgagacggagtctcgctctgtcacccaggctggggtgcagtggcgcgatctcggtgcactgcaa

SEQ ID NO: 417757 - DNA, 201 bp, Homo sapiens
atcaaataccttcagacacttaggattggcccagtaaggtgtaaatcaaatggatatggaatcgtataatttttatttttattttttatttatttatttatttttttaaatgatagtttgtttgttttttttttgagacggagtctcgctctgtcacccaggctggggtgcagtggcgcgatctcggtgcactgcaagctc

SEQ ID NO: 417758 - DNA, 201 bp, Homo sapiens
gtaggagaaggaggcacttttgttttcaactccaatttggtctgaagctattaaaggaataaatggaggtcgtgcaacatgttgattttagactcttcccrtgtctgctgctagaaggaacgtgaggagcagcttagtattttgttgtgtcttgcagacttcttttgccttaaaaaaaagtctgtttatggagggagagga

SEQ ID NO: 417759 - DNA, 201 bp, Homo sapiens
actacctgggggtgaggtttggtggaagaaggcaactaaggaaagcttcctggattcaatcttaaaggaagatttaaaatattgctgaattactgcaataraccgaatgtttgtttccacgcccctgcaaattcatatcttgaaacctaacccccaaggtgatggtattaggaggtggggcctttgggaggtgattaagcc

SEQ ID NO: 417760 - DNA, 201 bp, Homo sapiens
accatgtactaagccttctatgggatatatgaaggtgaacatgacatggaccctgcctttgagaggcttgcagcccagcaggttaaggtagacacgcaaayagctgatcgttttggtataaggtaggggtttgatgctgaagatcttcatgggaccttatagaggtctagagttgagggtactaaaactacctgggggtga

SEQ ID NO: 417761 - DNA, 201 bp, Homo sapiens
aagaaagagcatgtgcaggggaaatgccctttatgaaatcatcagatctcatgagacttattcactatcacaagaacagcacgggaaaacccacccccackattcaactgtctcccaccaggtacctcccacaacacatggggattatgggagctacagttcaagatgagatttgggtggggacacagccaaaccatatca

SEQ ID NO: 417762 - DNA, 201 bp, Homo sapiens
tgtgaagaaatacccaaggctggataatttacaaagaaaaagaggtttaatggactcacagttccacatgactggggaggtctcacaatcatgatggaagrcagaggtacaccttatatggcggcaatcaagaaagagcatgtgcaggggaaatgccctttatgaaatcatcagatctcatgagacttattcactatcaca

SEQ ID NO: 417763 - DNA, 201 bp, Homo sapiens
catagccttggggtgagggtgtttagctaatccccttgtgtttggggtgggccgtaaatgagctctgatggaccatcctcagcccctccagaatgacctckgaggaatcaatggctgagaaggagagatggagagtgtattagtccattttcaaattgctgtgaagaaatacccaaggctggataatttacaaagaaaaag

SEQ ID NO: 417764 - DNA, 201 bp, Homo sapiens
tgtccaagaaaggcaggagtcagggggaccctgagctcagaagaattcaagaagtcatagtcatgttgtggttggctgaagatagatctagactttctgaytggcccagatctcccggcgatctttccagggccactttgagaaaaggcagtgagtagcaggggtctccgtccggcttggcacgttctccttgaggccatt

SEQ ID NO: 417765 - DNA, 201 bp, Homo sapiens
gccagtctaaggagtttggactttattttgtaggcaatgaggaactatttacaactttttagtaagactgtggaatgactgatgtgtgctttgggagataytcctggctgcagtgtggaagaggcctgaaatgggagacgaactggggcatttttgcaattgtctaggtaacatcccccctcccgtttaatctgtatttac

SEQ ID NO: 417766 - DNA, 201 bp, Homo sapiens
tcttctttgggaagcagtgtctccattttgtgttccgacttaaatcaaccatctattttaccagtaacttggatgtggagcttgaggatccaccgcccagygtgatgtgacattttgcttcttgtcatcctggtgtttctcggaagcattgctcacagcatgggtgttcctgtattcaccactagaaacagtcagggttgg

SEQ ID NO: 417767 - DNA, 201 bp, Homo sapiens
gttaagttcagggtacatgacattcaggctgagcgtggaaagagaatttggatttcccttggtaggtatagaggcaaaggcattcccgccggaggaatgcrtcaggggcagtgttgattcgatggtgctgcgggagccctgagaggtccgaggtgcctgaatccgagcgtgagtggctactggtgctggcacagtactcgg

SEQ ID NO: 417768 - DNA, 201 bp, Homo sapiens
tcttcagtgttagacatgacagagttaatttggttgtccagtgtttattggtccctttcaaggcactgtggtgagtactggctgcagtagggagggggcargatgaggatacaaatgacaggaagatgtggcagctggcttgagggaaggaggagatgcacagacagctggcccaaacagagcatgatggtatctatgata

SEQ ID NO: 417769 - DNA, 201 bp, Homo sapiens
ccttgtctttccaaggcactgagattacaggcgtgagccaccatgctcagccttgaataaaaggtttttaaactcagggagtgtcttcagtgttagacatsacagagttaatttggttgtccagtgtttattggtccctttcaaggcactgtggtgagtactggctgcagtagggagggggcaggatgaggatacaaatga

SEQ ID NO: 417770 - DNA, 201 bp, Homo sapiens
cccagaatttaggaccataactctcttcatctttcctttctgaggttcccttcctttctgggatgccccagatctgttctctgattctccgggcagaaagrctgttggtttcctgttggcattcctgctggccagcctggtgcagaccaggccctccctttaagccagaagtcatgaaattgggaaatacatacagtgctg

SEQ ID NO: 417771 - DNA, 201 bp, Homo sapiens
catctctgatttcttgttcacctagaggactttgttttcagggcaggataaatgcttgtttattctcatgcatgcatgctctccctccctctctcattgarcgtgatgttttcgtggccccttggtgcttgagacctggctcataggaagctgaactcagaatcaaaacttctcctgaggtgccacctagcatcactaacc

SEQ ID NO: 417772 - DNA, 201 bp, Homo sapiens
ccgagtagctgggactacaggtgccggccaccacacccggctaattttttgtatttttaggagagacggggtttcaccgcggtctcgatctcctgacctcrtgatccacccgccttggcctcccaaagtgctgggattacaagcatgagtcacagcgcctggcggaatagtataatttttaaagatgttttatgcttattg

SEQ ID NO: 417773 - DNA, 201 bp, Homo sapiens
ttaatgtgtcttgacaatcgaaatatctgtgccctttttttccatttggccggcttctgttagaatcatttatcttgtgcctgtaggatgcaatctaactrgggcactgctattctcctctcagtgttggatgacatgagatgctcttttctgaagccaatggattgggcatctctgatttcttgttcacctagaggactt

SEQ ID NO: 417774 - DNA, 201 bp, Homo sapiens
attgaccccacagcctgtgttgaggtttcatggtcgtatttgctggcctctcagcagcattctactgaagacttaggcagggcatggaggggtgttacacrgggtggtgcagggcaggctgtatagcagaaacccaaaactgcgcatcagccattcctttccttagaagtccttttaggtcggatgcggtggctcatgcct

SEQ ID NO: 417775 - DNA, 201 bp, Homo sapiens
tgtgggatttggtgaatcaccttcaacactgacttctctgattcctatcctattaaaatgttttattcatctttgacacatccctcctccccccaagtgcytagcatggtgcctttccttcatcgatacccaataagtgcacattgaataaatgtcagtttctcaaaaataaaactggtgtatgccgtctccttccattct

SEQ ID NO: 417776 - DNA, 201 bp, Homo sapiens
attattattattattatttttgtagagacagggcctctctgtcacccaggctggaatgcagtggtgcgattataggtcactgcaaccttgaactcctgggytcaagtgatcctcccacctcagcctcttgagtagctggactactaggcgtgtaccaccatgcctggctagttgttttaattttttgtagagatggggtct

SEQ ID NO: 417777 - DNA, 201 bp, Homo sapiens
cagaaacccaaaactgcgcatcagccattcctttccttagaagtccttttaggtcggatgcggtggctcatgcctgtaatcccagcactttgggaggccgmggcgggtggatcacctgaggtcaggagtttgagaccagcctggctaacatggtgaaaccctgtctctactaaaaatacaaaaattagccaggcgtgatgg

SEQ ID NO: 417778 - DNA, 201 bp, Homo sapiens
gatcctcccacctcagcctcttgagtagctggactactaggcgtgtaccaccatgcctggctagttgttttaattttttgtagagatggggtctcattatrttgcccagactagtctcaaactcctgggctcaagtgatcctcccacctcagcctcttgagtagctggactactaggcgtgtaccaccatgcctggctagt

SEQ ID NO: 417779 - DNA, 201 bp, Homo sapiens
ctgaggcagagagaattgcttgaacctgggaggtggaggttgcagtgagccgagattgtgcgattgcactccagcctgggcgacagagcaagcctgcctcaaaaaaaaaaaccaaaaaaacaaaaaaaaacaaacccaaaaaaacccttttagctttcatgcttcaacctcttagggtcatccttgggaaccccacactcc

SEQ ID NO: 417780 - DNA, 201 bp, Homo sapiens
gaagggggctgaacttactcttttatcaaaaacctactcctgagttcactgacctactcccacaataatggcattaatccattcatgaaggcagatccctygtgacctaatcacctcttaaaggtcccgcctctcaacagtgttgcgttggggattaagtctccaacacatgaactttgggggacaccttcaaaccatagc

SEQ ID NO: 417781 - DNA, 201 bp, Homo sapiens
tgtttgtagatttgagaagggaggtgggagaggacttaggtgaatattaaaacaaacacataaaccaaatgaagacctctatctttccggcatcactaataaaaaaaaaaaagggagaaaaagctgaaagtaaagcataaaaccccagtaaacacatcagaactaccaaattagtcctctgcacaaacacacctttatatt

SEQ ID NO: 417782 - DNA, 201 bp, Homo sapiens
agggaaagcacgtacacgcgtctttggtctctaagctccatctgcaataaggaaagatttcctgatagtgaagttttctctggatttttttttccttctcygtgacttgctgtggtaaaggacagttgtgctcagtggcttccagaaaagctggacgtcccaccatgatggcacatctgggcacaccacacctctcctctc

SEQ ID NO: 417783 - DNA, 201 bp, Homo sapiens
tagttgctgttattcctattttagagataaggagactgaggttttaaagaagttcagtgccttgcccgaagtcacacagccagcaatggcagagtccacatgtgttgtgtctgactccaaatcccgtctcttggccacaagaggattctgcctctttctaactgagcacatatggggagctgcttcctagacattgtttct

SEQ ID NO: 417784 - DNA, 201 bp, Homo sapiens
tattagattggatgaaatatggtaattaatttttaccaggtactacagtaatcaatataattgcattttcccctcttgaaatcagatctctgagcataggmgcacatggtccccctttcagtatcccaaggtaagcacactttttgacatgcaaagttggtgccctccaatgaatataaaatgctaaatgagaggaaaatg

SEQ ID NO: 417785 - DNA, 201 bp, Homo sapiens
agttgctgttattcctattttagagataaggagactgaggttttaaagaagttcagtgccttgcccgaagtcacacagccagcaatggcagagtccacatgtgttgtgtctgactccaaatcccgtctcttggccacaagaggattctgcctctttctaactgagcacatatggggagctgcttcctagacattgtttctg

SEQ ID NO: 417786 - DNA, 201 bp, Homo sapiens
gttgctgttattcctattttagagataaggagactgaggttttaaagaagttcagtgccttgcccgaagtcacacagccagcaatggcagagtccacatgtgttgtgtctgactccaaatcccgtctcttggccacaagaggattctgcctctttctaactgagcacatatggggagctgcttcctagacattgtttctgt

SEQ ID NO: 417787 - DNA, 201 bp, Homo sapiens
ttgctgttattcctattttagagataaggagactgaggttttaaagaagttcagtgccttgcccgaagtcacacagccagcaatggcagagtccacatgtgttgtgtctgactccaaatcccgtctcttggccacaagaggattctgcctctttctaactgagcacatatggggagctgcttcctagacattgtttctgtg

SEQ ID NO: 417788 - DNA, 201 bp, Homo sapiens
gtctaggaagtggcagagagtatagaaggtgcttagagcacagagggtcttagagctaagtttttaaaggaaatctttgtctatttgtaggacagttccayattcttttagaatcaagacaaaggctgaaaagagaccaaagtcccacccagattaaatggggccttatgagatcctgaaatctcctggagcaaccaaaaa

SEQ ID NO: 417789 - DNA, 201 bp, Homo sapiens
tgctgttattcctattttagagataaggagactgaggttttaaagaagttcagtgccttgcccgaagtcacacagccagcaatggcagagtccacatgtgttgtgtctgactccaaatcccgtctcttggccacaagaggattctgcctctttctaactgagcacatatggggagctgcttcctagacattgtttctgtgg

SEQ ID NO: 417790 - DNA, 201 bp, Homo sapiens
tttcaacatgttgcccaggctggtctcaaactcctgagctcaagcaatcctcctgccttggcctcccaaagtgctgggattacaggcatgagccactgcgcccagctaacaactcttttttcaatctgtacctcttaacgacttcctagtccacacagtacagtgcatcgtgttgctgtcctttatttgccctaacactat

SEQ ID NO: 417791 - DNA, 201 bp, Homo sapiens
aatgtattctattggctattgatggtttctctgattctaggaaacacatacttctgctgatcctgacaaccagaaaaaacaaaaacaaaaacaaaaaaaamcaagtgatttaaacaaagcaagtacaaagtcattacagagatttcttttttttttagtatggactattcttagttatctttttcttttcttgggttggat

SEQ ID NO: 417792 - DNA, 201 bp, Homo sapiens
tgcgaccactggtggccagcttggggacatccaggtagtccaatccttcctttcaggttgttggaagaattcagttttgcagtcataggaccgaggtgccycttttcttgctgactgtcagccagggctgctctcagatcctagaagctgcctgtatttctcaccaagtggccctttccatcttcatagccaataacagct

SEQ ID NO: 417793 - DNA, 201 bp, Homo sapiens
ccagcacactctgctctgtgattttgcctatttacctggtgaaactgcccactgccacattctcaattctgttttttaaaccccagttcaaatgccatctygttaagaaaggctttctgaaatttgcttacccatgtgccatggctctttagaagaacatttggggccaaatgacaggggacttgtcctatgcagagaggc

SEQ ID NO: 417794 - DNA, 201 bp, Homo sapiens
tcttggcaactgtgattgacctttaccctatgtctcactttccacattgattttgggaaataataataaaaataggcagacttcttttctaattttggaakcaagtgtctgggggtagttttgcgttgtggtgaccctgtcagcattttgtttctaaagactgaaatttagaagatttgatcctgccggaacacagcacaa

SEQ ID NO: 417795 - DNA, 201 bp, Homo sapiens
ttaattccctggaacacagttgagaaaccccaggctagataattcccaagacgattctttttaaattttttggtaatgcagcttaatttgacacattgacrtataaggaacagcttaaagtgtacagttcgataaacttagacataggtaggcatggctgcaaccatcatggcagggaagatggtgaacacattctgagct

SEQ ID NO: 417796 - DNA, 201 bp, Homo sapiens
gccagccagtggtctgttcactacccgatccccgtagtaagccgtgggtaattggtaatccacctatgaagtcaaacggggaaactggtgaggtaagcccrtggcacttagtcaagtaacaatagttgtcactctctcttgtttaatcttatagtggagtacgacaaggagttctcccctcgtcagcgacaccacaaagag

SEQ ID NO: 417797 - DNA, 201 bp, Homo sapiens
cttttggctgaaacccccttgtgtcagacccaggcctctctgcccccacacccactcctgaaccttctcctgttgtcctcatagatcaggggagggacccyaggaggctgcgtttccagctgctctgctcttctgtggctccagctctctctggtccccatcttatgctagggaccccttggctctcctccctccttcata

SEQ ID NO: 417798 - DNA, 201 bp, Homo sapiens
gatcagcatttttcaaaaagttactacttttccaaaatgttctgcaagaaaaggccgtagaagcactttctattctattcctctctttgaggtttacaaayctttctcctgttaatgccctgacaaggccagaagtaaagaagcctgctaacttggttcagcagagtttgaactgacttttactctctaaccccttttggc

SEQ ID NO: 417799 - DNA, 201 bp, Homo sapiens
ggggtatttcatcatcagaggctagaatggggtaaaatctgattgccatgactctgaacataggaaggacagttcatttgaacaaagttattgcgtaccartgttggattctctatatagggatactagagaattacagatttcctaattgctgtcaatgccatgttaactgccacattacctgactcatctattaaagaa

SEQ ID NO: 417800 - DNA, 201 bp, Homo sapiens
gttaccctatcccttgcttgcttcccaagtcaaaatttctttttcttccaggcgtctggggtcaggttagttcttcttgattgttggagataaatttgctratgttcttcatcaactccaatgacttagttcagtatttataatctattttctgtgattccaaaactaaacatttggggtagcaacgaatataccattctc

SEQ ID NO: 417801 - DNA, 201 bp, Homo sapiens
gtcctgaatggctgtggagaccaagcttttattttggaaagatacagaacacccatggtgttcaccatgagcttgtgacttaaaaaagaatctcctgcatrctctcaaagcatcatgcagattttggtttttatccataatacatccctgtttattgtaatgtaagaataatgtttgtaattatctcctagtgattaaaat

SEQ ID NO: 417802 - DNA, 201 bp, Homo sapiens
aggtcacagagctgctgaagtggtcctgaatggctgtggagaccaagcttttattttggaaagatacagaacacccatggtgttcaccatgagcttgtgayttaaaaaagaatctcctgcatgctctcaaagcatcatgcagattttggtttttatccataatacatccctgtttattgtaatgtaagaataatgtttgta

SEQ ID NO: 417803 - DNA, 201 bp, Homo sapiens
cagcctgatataactttaagtatagtttcacaccacatgtaataaatgtgaccctttagagatattagaaactgatgatgaatgtttagttacaagaatagttcagaccctcaggtatgggtattctttgcacaactctggaatatatttcttgaatcactggaagaagatggagtccttggaaacatgttgtcaggggct

SEQ ID NO: 417804 - DNA, 201 bp, Homo sapiens
tattttgatactggcttgagaacacacacaaggctgggtgcagtggctcacgcccgtaaccctcacactttgggatgcggaagcaggcggatctctttagyccgggagtttgagaccagcctgggcatcatggtgaaactccatctctaccaaaaaaaatacagaaattacccaggcatagtggcacacttctgtagtccc

SEQ ID NO: 417805 - DNA, 201 bp, Homo sapiens; identical to SEQ ID NO: 106095

SEQ ID NO: 417806 - DNA, 201 bp, Homo sapiens
caggagaatgtgtaaacaagaataaagtggaagcaggttggtgtagatcttagtctcagtgttcctggagtgagagaagaggtgcaaggggcccaaagtcwggttgccatttcaggcgaactgcctgggaaggaggaatggtgcagagtcggcaatggtgtgacttcattctacaggaggttggttagcagtggacagttc

SEQ ID NO: 417807 - DNA, 201 bp, Homo sapiens; identical to SEQ ID NO: 106098

SEQ ID NO: 417808 - DNA, 201 bp, Homo sapiens
ccaggtgagtgagcaacgaatagggcatcaagtgtttcagactcccccctggtattagctgagttgacagataggtgtcatccggtcaccctgggctcctycctccacaggcattcttcagcattgcggcagctcctgaactcgatgatgaccgtggacccgcatcagcgtcctcacattcctctcctcctcagtcagctg

SEQ ID NO: 417809 - DNA, 201 bp, Homo sapiens; identical to SEQ ID NO: 106100

SEQ ID NO: 417810 - DNA, 201 bp, Homo sapiens
tgctgagataccgcgggccgttacgccggcgcggactgatgatgtcagcactgcttccggtcggtggcgcttctctctggcccgagccaggtcagtccggsagtgcagatggcccatcccgggctctgggctcctagaccggggtgggccctgccaggagtgggcctgagcctcgcacgtcctctgaaactacgctatgct

SEQ ID NO: 417811 - DNA, 201 bp, Homo sapiens; identical to SEQ ID NO: 106132

SEQ ID NO: 417812 - DNA, 201 bp, Homo sapiens; identical to SEQ ID NO: 106107

SEQ ID NO: 417813 - DNA, 201 bp, Homo sapiens; identical to SEQ ID NO: 106109

SEQ ID NO: 417814 - DNA, 201 bp, Homo sapiens
tgagataccgcgggccgttacgccggcgcggactgatgatgtcagcactgcttccggtcggtggcgcttctctctggcccgagccaggtcagtccggcagkgcagatggcccatcccgggctctgggctcctagaccggggtgggccctgccaggagtgggcctgagcctcgcacgtcctctgaaactacgctatgctctg

SEQ ID NO: 417815 - DNA, 201 bp, Homo sapiens; identical to SEQ ID NO: 106111

SEQ ID NO: 417816 - DNA, 201 bp, Homo sapiens
gttcccatccctcattggaatcaccacccattccatccaggacttctcttacacttgggggtagcggggtcaggacaatcatctcagtcctgcatcttttyttctgctttcttccctccaagagcaaaacctgggcaaggggacttactgagtgggggtgggtgggggttgggaaaagggaaactggtgggatatggaaca

SEQ ID NO: 417817 - DNA, 201 bp, Homo sapiens
tggctctgagcaggactgttgagctcacatagtgttctgactccaaatctgggagcaggagaatgtgtaaacaagaataaagtggaagcaggttggtgtaratcttagtctcagtgttcctggagtgagagaagaggtgcaaggggcccaaagtcaggttgccatttcaggcgaactgcctgggaaggaggaatggtgcag

SEQ ID NO: 417818 - DNA, 201 bp, Homo sapiens
acaataatacattgttagacttctatagtaacagccatgaaagcaagactcaaagcatcttgtgacaatattgttattattacctataaaacagatagtgktattttttaatgatagatatgtgccaaatattttacatttcgtaagtctctagtgaaccctgacaggtgggcaattttctccccatttgcagatgagaaa

SEQ ID NO: 417819 - DNA, 201 bp, Homo sapiens
tcccacgtttgcaagctccgattcctggaacccctggcttgagcttgttgcttttccaagcctgtctcctgtgttgggagccctgcctccagcagccctgygaggcggcctggagcctcggtgaccacaacaggcagcgcagtcttcttctaaccacctctcctcctcctcccttgtcccgatgccagatttctcctcctc

SEQ ID NO: 417820 - DNA, 201 bp, Homo sapiens
cttgtgacaatattgttattattacctataaaacagatagtggtattttttaatgatagatatgtgccaaatattttacatttcgtaagtctctagtgaaycctgacaggtgggcaattttctccccatttgcagatgagaaaactgaggcacagttaatagcccagagtcacataacacatggcagagctggactcctag

SEQ ID NO: 417821 - DNA, 201 bp, Homo sapiens
ccagcagacccctgcctcatgccccttggacagcgacctctctgaggatgaggacctgcagctggccatggcctacagcctgtcagagatggaggcagctsggaagaaacccgcaggtgggcgggaggcacagcaccgacggcaggggcggcccaaggcccagcaccaagatccaggcttgggggggacccaggagggtgc

SEQ ID NO: 417822 - DNA, 201 bp, Homo sapiens
cctctcgctgcctcatcctctgaacaccgggcccaacctgatctgatccagatcttgactggggggtctgactcactgtgggaagagaagaggggagtatsctgagttgtaggaactgctttccaactccaagctccctccacaagtttccctcccaggccccccacaccccagtgtggacttgggatttgctgtgctcag

SEQ ID NO: 417823 - DNA, 201 bp, Homo sapiens
ctccttccctgggcactccggtaagttctgccccttcccacgtttgcaagctccgattcctggaacccctggcttgagcttgttgcttttccaagcctgtytcctgtgttgggagccctgcctccagcagccctgcgaggcggcctggagcctcggtgaccacaacaggcagcgcagtcttcttctaaccacctctcctcc

SEQ ID NO: 417824 - DNA, 201 bp, Homo sapiens
ccctgcctccagcagccctgcgaggcggcctggagcctcggtgaccacaacaggcagcgcagtcttcttctaaccacctctcctcctcctcccttgtcccratgccagatttctcctcctcatctttctccttcagtcctggggctggtgcttttcgctctgtttctacatctaccacctttgtccaaggacgccgcatca

SEQ ID NO: 417825 - DNA, 201 bp, Homo sapiens
tgtcaccccgcccctgctctctccccagatgtgttctgagctggatgccgggttccagaatcgctgcacagttccaacaggacagcgccttcccccatgcrctgggaggggaccctccatttctccccctcacccatgctgagtgtagagccggggcctgggtggcgggtgggggccgggtgggaggtggcagtagtctta

SEQ ID NO: 417826 - DNA, 201 bp, Homo sapiens
cccctgggtcccctgctgtgcctgctttcccccgccaagtgtcagagtgtcagtctctggacaatcctttgaacgtcctagcctgggaggggagcccatcycagagggagggtgaaatgatctggtctctttttgcagagcacaagcgggagatttacgaccgctatggccgggaagggctgacagggacaggtaggtgga

SEQ ID NO: 417827 - DNA, 201 bp, Homo sapiens
ggcccaggaatggaggtggggcagggaggagaggggcagggcagattcttgcaatggaggctctctcaggctcctggctgtgccttaggtgaggtcccccggctcagggcaggatgcatgccctaagctctctcctcatcctgcctttccaggaactggcccatctcgggcagaagctggcagtggtgggcctggcttcac

SEQ ID NO: 417828 - DNA, 201 bp, Homo sapiens
acccgggggtgaaaggacagtgataggctaatgggaaaacaggtcgttcggttcctgggtgggaagtgcctgcatttgtcccccgactctctcctctgcayccactttctgcaggtatcggcgcaaggctctccagtggcacccagacaaaaacccagataataaagagtttgctgagaagaaatttaaggaggtggccga

SEQ ID NO: 417829 - DNA, 201 bp, Homo sapiens
agattcttgcaatggaggctctctcaggctcctggctgtgccttaggtgaggtcccccggctcagggcaggatgcatgccctaagctctctcctcatcctrcctttccaggaactggcccatctcgggcagaagctggcagtggtgggcctggcttcaccttcaccttccgcagccccgaggaggtcttccgggaattctt

SEQ ID NO: 417830 - DNA, 201 bp, Homo sapiens
ggctcctgggcctgggcgtcgagatagctcttggccccggcctgcgggggcagataaggctgccggagggagcctagtcaccggccgcaagcagagcccgstgtgctccgcttccaactgggagcgccttccgccacccggggagggggactgctgcagccacagggtggggctcttggttctttccgcctgactccttct

SEQ ID NO: 417831 - DNA, 201 bp, Homo sapiens
cgagatcctagacgtgccgcgaagtgcgtccgctgatgacatcaagaaggcgtaagtgcctccgtatgcaacagaagacctctcaccctccacccgccacsaccatggggcacttcagagtgacacctgtaggtgtctgagggaaccaggtcgttagaaagcactggggtgcttcttccgagtgacacctgcagggaggaa

SEQ ID NO: 417832 - DNA, 201 bp, Homo sapiens
tccagcccggtctgtcccatgtgcaggtgatggggggtacgataagcagcaatgagggcccaggaagacctcagtctcctgggggcccatcctaaaagatrgcaagggcagcaaagtatttccatcctgctcctacaatttagaaaccttcttttttagtgtcaaaatatagcgttgaggggagctggacgctagggtctt

SEQ ID NO: 417833 - DNA, 201 bp, Homo sapiens
tcatctcccagtcaccaggaacacacctcagactcagattgtaaggactggatagacgtaaagagggcattttcagggagcagacccccttgggcgaggcyagcagctgctccatcccgctgaacctgctccttgaggaagcctaggaaggctgtgctctcacgtggtggctgccagccagggttggtgatggcaaagtgc

SEQ ID NO: 417834 - DNA, 201 bp, Homo sapiens; identical to SEQ ID NO: 106118

SEQ ID NO: 417835 - DNA, 201 bp, Homo sapiens
tggggtggggaagagacaaggtacggaaggtggggttgttgcctcgacccctttgccctatattagaagtgagattcaggggttgtgagcttaagagacasttcctgatttgtcaatgacagataaggataactgatgcccaggaatacacccacacctcccaatacgtcttagactatgggctaactgcccaacttccca

SEQ ID NO: 417836 - DNA, 201 bp, Homo sapiens; identical to SEQ ID NO: 106086

SEQ ID NO: 417837 - DNA, 201 bp, Homo sapiens
aagctgctgagggctgccgtgccctcccatcttggccccgatttactcacccagagcctgtcatggtgctgtgagcccggcctgtgggcgcctgcccgggwtgcagcggggagaaggagcgcagggcagaggcgacttcagccctgtgcctggagccctgcaggtctctgggcagtggagggccccggcaggatgagccag

SEQ ID NO: 417838 - DNA, 201 bp, Homo sapiens
cagcatgcagtgcagcagcccaaagcctcgggcgaggcatcgcccttcatcccccttcagggcacagcgagatgcgggccagagctcttttgctgggacgyacacagccaaggtcaccctccagcccggtctgtcccatgtgcaggtgatggggggtacgataagcagcaatgagggcccaggaagacctcagtctcctgg

SEQ ID NO: 417839 - DNA, 201 bp, Homo sapiens
ggagaccacagtatactgtcaatctttcccagggcactggtgcccccccagacccaggaggggctgcactgcatgctgagccagttacttgtgttgtgccttttttttttttttttttgagatggagtctcgctctgtcgcccaggctggattgcagtggcgtgatctcggctcactgcaagctccgcctcccaggttcac

SEQ ID NO: 417840 - DNA, 201 bp, Homo sapiens
aggttttcaatatggtgccaaggtgctgtgggataggaacagagatgtcagagccctgggagaacacaagccccttgctctctccatgttcttccatcaaytctccctatggctgtcatatccaagaactcacacttgctcccctcggcgacgtgcaccaacaggtcctcctcccctgggggtgaatcactataggaggcc

SEQ ID NO: 417841 - DNA, 201 bp, Homo sapiens
acaaaaaatagctgggcatcgtggcaggtgcctgtaatcccagctacgtgggagactgaggcaggagaatctcttgaacccaggaggtggaggttgcagtrtgttgagatcgcccctggactctagcagcaacagagacagactccatctcaaacaaaaaaaaaggaggctcacccttagaaaggcttctacaaattaaca

SEQ ID NO: 417842 - DNA, 201 bp, Homo sapiens
gggcagccctctggggacttgcaggggtaggtgtaaaggtggcagtactggggctgggctggggaccagtttctagcaccacactctgagccaagggggtyctggggatgaggctagagtcccgtgtgccctcggttcctaggccccaaattcctctcctggggctgtggcaagcccagtgttggcacctcccttggccag

SEQ ID NO: 417843 - DNA, 201 bp, Homo sapiens; identical to SEQ ID NO: 106096

SEQ ID NO: 417844 - DNA, 201 bp, Homo sapiens
ctggaagaaccacccttccctgcagcctctgtttcctcctatacccccactggatacctgtgatgccaccgtagcgcctctggaagcccccatgcagggcrgtggtctcaggagctccaggccggggtgctgcacagggatagctagcagagcgagggatagactggggggcccgggcgccctctcccccttcatcagggg

SEQ ID NO: 417845 - DNA, 201 bp, Homo sapiens
agggaaggttgcaggggttgagggtccaggcccaacctccccactccacagttggcacaggttctccctgcttggcagcttctatcgtgggcagccctctsgggacttgcaggggtaggtgtaaaggtggcagtactggggctgggctggggaccagtttctagcaccacactctgagccaagggggtcctggggatgagg

SEQ ID NO: 417846 - DNA, 201 bp, Homo sapiens
cagagagtaggagcagtcccagcatgcagtgcagcagcccaaagcctcgggcgaggcatcgcccttcatcccccttcagggcacagcgagatgcgggccaragctcttttgctgggacgtacacagccaaggtcaccctccagcccggtctgtcccatgtgcaggtgatggggggtacgataagcagcaatgagggcccag

SEQ ID NO: 417847 - DNA, 201 bp, Homo sapiens
tggcacaggttctccctgcttggcagcttctatcgtgggcagccctctggggacttgcaggggtaggtgtaaaggtggcagtactggggctgggctggggrccagtttctagcaccacactctgagccaagggggtcctggggatgaggctagagtcccgtgtgccctcggttcctaggccccaaattcctctcctggggc

SEQ ID NO: 417848 - DNA, 201 bp, Homo sapiens
caacaagaagtctggtcaaactccctttttattaagggttatcaagctgtacacggtccctaccctgctccgctccgagttcgggcagcgcaattcaccaytctcccaaagccggaccacagctgggtgaggggtgggacagagagtaggagcagtcccagcatgcagtgcagcagcccaaagcctcgggcgaggcatcgc

SEQ ID NO: 417849 - DNA, 201 bp, Homo sapiens
actgcgccatcaccaccgccccctgtccaccttgaccacctgccaataaggaggaagaagagaccctgattcagttccagctgctgcccatgggctgcccygcctactgccaaaaggagaaagtacccttgggctttgtccactaccagcctccttggctcagaggcagaggagtagtgacacaagaaaggcagtaagctc

SEQ ID NO: 417850 - DNA, 201 bp, Homo sapiens; identical to SEQ ID NO: 106133

SEQ ID NO: 417851 - DNA, 201 bp, Homo sapiens
gagacccacacaagctgctgagggctgccgtgccctcccatcttggccccgatttactcacccagagcctgtcatggtgctgtgagcccggcctgtgggcrcctgcccgggttgcagcggggagaaggagcgcagggcagaggcgacttcagccctgtgcctggagccctgcaggtctctgggcagtggagggccccggca

SEQ ID NO: 417852 - DNA, 201 bp, Homo sapiens; identical to SEQ ID NO: 17087

SEQ ID NO: 417853 - DNA, 201 bp, Homo sapiens
cagtggcacatactgaagagacagcaggaagccttccaccccatgcccggtccctcaactcccagctcctgaagtccactctgcccatcatctcccagtcmccaggaacacacctcagactcagattgtaaggactggatagacgtaaagagggcattttcagggagcagacccccttgggcgaggctagcagctgctcca

SEQ ID NO: 417854 - DNA, 201 bp, Homo sapiens
tacccttggagaacggagaccacagtatactgtcaatctttcccagggcactggtgcccccccagacccaggaggggctgcactgcatgctgagccagttmcttgtgttgtgccttttttttttttttttttgagatggagtctcgctctgtcgcccaggctggattgcagtggcgtgatctcggctcactgcaagctccg

SEQ ID NO: 417855 - DNA, 201 bp, Homo sapiens
gggttgagggtccaggcccaacctccccactccacagttggcacaggttctccctgcttggcagcttctatcgtgggcagccctctggggacttgcagggrtaggtgtaaaggtggcagtactggggctgggctggggaccagtttctagcaccacactctgagccaagggggtcctggggatgaggctagagtcccgtgt

SEQ ID NO: 417856 - DNA, 201 bp, Homo sapiens
ttttcactcttgttgcccaggctggagtgcaatggcatgatcttggctcactacaacctccgcctcccaggttcaagcaattctcctgcctcagcctcccragtagctgggattacaggctcccaccaccatgcccagctaattttttgtatttttagtagagatggagtttcatcatgttggccaggctggtcttgaacc

SEQ ID NO: 417857 - DNA, 201 bp, Homo sapiens
aaaaattagctggacatggtggtgcatgcctgtagtcccagctactcaggaggctgaggcaggagaactgcttgaacctgggaggcagaggttgcagtgarccgagatcatgccactgcactccagcctggcgacagagtgagactctgtctcaaaaaaaaaaaaaaaaaaaaaaaaaaaaaaaaaaaaaagaaagatgca

SEQ ID NO: 417858 - DNA, 201 bp, Homo sapiens
ctgcctcagcctgccagagtgctaggattataggggtgagccaccttgccagttccacacccaaacttttttttttttttgagatggagttttgccctgtygcccagggtggagtgcaatggtgtgatcttggctcactgcaacctccacctcccggggtccaaatgattctcctgcctcagccttttgagtagctgggat

SEQ ID NO: 417859 - DNA, 201 bp, Homo sapiens
agtcttgaactcctgggctgctttggcccctcaaagtactgggattacagcatgagccaccatgcccagccatcttttttttttttttttttttttttttkttgttgagacagagctttgctcttgttgcccaggctggagtgcaatgacacagtctcagctcattgcaacctccaactcccaggttcaagcagttctcct

SEQ ID NO: 417860 - DNA, 201 bp, Homo sapiens
ttgatcctctcaaaaaagaaaaaaaggggaaaaaatgacatggtctccgtctttaaacatactagaatatagttgggtagaaacagtgtacagcagtttayctccaggctcggggaaggggatcacagagaggccaggccacctgtgtctgtatgggctgaacttgttgcagagagagcacttgaagggggctttgaagga

SEQ ID NO: 417861 - DNA, 201 bp, Homo sapiens
tctgagcccttgcccatgttgcccctaatggtggtaatgccctttgcacatcttatcttctgaagttcttgctcagctgccccttctctctaccttcttgrgtgccctagacttcctggtcatctgcaggcctgtaacacctacactgacactcggtcacacctctaagtcctgttatccactgaagggggtttaaacaca

SEQ ID NO: 417862 - DNA, 201 bp, Homo sapiens
ttgttaagggcttttaccagtgctcctaacagaccagaccatgtgaatttgttggataccaagcccgtggtgatttgcagccaacatcctttcagctcaastgtctgtttctaatccattacccttcagacttgttttaggcctttccacagtgagggaggtcaggacactttagttaaaacttgagacccctaacattag

SEQ ID NO: 417863 - DNA, 201 bp, Homo sapiens
gtataacttaatatagattttctggtatttataaatataataaaataataagcccacactggacctctagaaccttctcccagcttctttgtggatatttscacctaggtggctatatataattttgtttgtttgtatgtttgtttttttgagactgagtctcattctgtcacccaggctggagtgcagtggcgtgatctc

SEQ ID NO: 417864 - DNA, 201 bp, Homo sapiens
aaaaaaattattacaaagttttcacttggaactggactacagtacagtctacttgtagttttcaattctcattctgacagacgtacttaggatgtatgtgrtgattgtggttcagtgtcacaatgcatttttcttttcttcatgaaggtgaatgaaggcaaggaggagcctggaagacctgcaggggaggtctccacggga

SEQ ID NO: 417865 - DNA, 201 bp, Homo sapiens
gctctgcttcaaaagttctctgtgcttatttttatacatgggtggtttttttccttaatggaatttccattcataagttcatattcattttcaggattgtrgttaaagaaaaaaatttactgggcagaaagtgctaaaaattaatacagcatctcatcagttttagatcccaagcttggcttaaggccatcttgaatagat

SEQ ID NO: 417866 - DNA, 201 bp, Homo sapiens
gtgaatagctgcttaactctaggctggacaacacagcaagacctcatctctaaaaaatcttttttaaaaaatcaactgggctgagcacagtggctcacgcytataatccagcactttgggaggctgaggcgggtggatcacttgaggtcgggagttcaagaccagactggccaacgtggcaaaaccccatctctactaaat

SEQ ID NO: 417867 - DNA, 201 bp, Homo sapiens
ccagaggaaggtcttcagcactcagactttagatatagattaaaagaagttaatcacttatgtctttagatgaatgcacgcttacacatggacatatggcktagaaggtatataagctctggaaaactttgtaattttgagttggtctggtgataatttccaggccttctccctgtagccagttgcagaagtaaataccgt

SEQ ID NO: 417868 - DNA, 201 bp, Homo sapiens
gtaattgtgcaggtcattgacttttggtatgtgcatatcctcttgtagccaatatcccaatcgagataaagaacattttcttctgaaggtggtgtgtgctaaaaaaaaataacattttcatctttctagaaagttctctgtgcccctgtacaataaatcttcctccctccacccctaccctcaggcagccattcatctgat

SEQ ID NO: 417869 - DNA, 201 bp, Homo sapiens
gaggcggccggcaagtactcggcggcaatcgcgctcctggagccagcaggtaggtgcgccgcgccccgccgcttcctgggcccctcgcgctgcggttcacmcgacctccggggcccccgtgggagaggcgctgccgcctcctgaatgacaggcgccggcatcgctgcattcctcccaggtgactaagagcgccgtgccacc

SEQ ID NO: 417870 - DNA, 201 bp, Homo sapiens
tttgttggataccaagcccgtggtgatttgcagccaacatcctttcagctcaactgtctgtttctaatccattacccttcagacttgttttaggcctttcyacagtgagggaggtcaggacactttagttaaaacttgagacccctaacattagagctgctgcaaaagagtggatttgtgttgtccttatctgagatcctc

SEQ ID NO: 417871 - DNA, 201 bp, Homo sapiens
tctccagcacctgttgtttcctgactttttaatgattgccattctaactggtgtgagatggtatctcattgtggttttgatttgcatttctctgatggccagtgatgatgagcattttttcgtatgtctgttggctgcataaatgtcttcttttgaaaagtgtctgttcatatcctttgcccactttttgatggggttgtt

SEQ ID NO: 417872 - DNA, 201 bp, Homo sapiens
attattgtctttatttgaagattatgtataatctcaggaaatgtatatgggttcaaattgacaaggggtggttgaaatggttaatactgagtgtcaacttsattggattgaaggatacaaagtattgatcctgggtgtgtctgtcagggtgttgccaaaggagattaacatttgagtcagtgggctggggaaggcagatcc

SEQ ID NO: 417873 - DNA, 201 bp, Homo sapiens
tgactttttaatgattgccattctaactggtgtgagatggtatctcattgtggttttgatttgcatttctctgatggccagtgatgatgagcattttttcrtatgtctgttggctgcataaatgtcttcttttgaaaagtgtctgttcatatcctttgcccactttttgatggggttgtttttttcttgtaaatttgtttg

SEQ ID NO: 417874 - DNA, 201 bp, Homo sapiens
tccatgcatgtatgtgttccaggaatgttaatgagatggtattgtaaaagagttgcatggataaaacttggcctagaaaagtttggtctgcactataaaasattttacttattttcctacatagaacatgtatattctacaatctgctttttattagttgtaaatattttcttatgtaccagaaccaaataagtatattta

SEQ ID NO: 417875 - DNA, 201 bp, Homo sapiens
ccccgcacctggcttccatttgtatatcttaacccaatactttccattgcatttacagtaaaacctgataatcttatattaaatatgtctcataaaatatkattttattcttttaggaaaaatattctaaaagaccaactaaaaagaaaactccaagggattacgcggaatgggataagtatgttttacatgtctttatat

SEQ ID NO: 417876 - DNA, 201 bp, Homo sapiens
tttagtgtcaattaggcaggattggttgctttttacacccaggggaacattgcgaattcgcgtgtgtgtgcgtccgtacatgtgtatatttaaattgattraataatattctgtcctattaaaaaacctataatttaatcatcttcaataaatagtgctgtataaacatgtttatttgtaattttttttcttttttttttg

SEQ ID NO: 417877 - DNA, 201 bp, Homo sapiens
tataaaacagtgttgcagatagactgtggactccagctagcaaatgacagtgttaacaggtaattaatctgaggcagctacctaaaatctagttgttttayactgtttttcccttcccctccttcaagaacatgtcaaaatatagatgtgttatcagttacttttatcacctgaatgattgccttcttttattccattaca

SEQ ID NO: 417878 - DNA, 201 bp, Homo sapiens
aaggggtttcaccatgctgcaggccaggctggtcttgaattcctgacctcaagtgatccacctggtttggcctcccaaagtgctgggattacagggatgarccactgtgcctggcccaaaagttcttatcaccagataagtggtatcaggagtcaaacactgagaaagaaaaacaggcaaaatttaaaataagaggagaaa

SEQ ID NO: 417879 - DNA, 201 bp, Homo sapiens
agactgattatttgtgagcattatggctattgtttgcctttctctcattctgttctggtgcagaacctgccctctgtctttagcagtgggaatgtggctaytttgggccactgttagtgcttggttaggatgggcccatgacccaagctagccaatcagtccttccttggaatttctctaactgaagatggagagaagagt

SEQ ID NO: 417880 - DNA, 201 bp, Homo sapiens
ccatcctggctaacacggtgaaaccccgtctctactaaaaataccaaaaaaaattagctggatgtggtggcatgagcctgtagtcccagctacttgggagrctgaggcaggagaatcgcttgaacccgggaggcagaggttgcagtgagccgagattgtgccactgcactccagcatgggcaacagagcaagactctgtct

SEQ ID NO: 417881 - DNA, 201 bp, Homo sapiens
acacaattaagtaattgccaaagttttttgtgatggttctaagaatttctatagcaagctgtcctaaccaagtgtgtctgaaagaggtgaggccgtgggarttctacagagactggaagcctgaggtgtgggcgggatgggaggtctgacatagtttgtgccaccaggttcccaaaagcgaccatggctgctttggcttgt

SEQ ID NO: 417882 - DNA, 201 bp, Homo sapiens
cggcaagtactcggcggcaatcgcgctcctggagccagcaggtaggtgcgccgcgccccgccgcttcctgggcccctcgcgctgcggttcacccgacctcsggggcccccgtgggagaggcgctgccgcctcctgaatgacaggcgccggcatcgctgcattcctcccaggtgactaagagcgccgtgccacctgacctca

SEQ ID NO: 417883 - DNA, 201 bp, Homo sapiens
ccgcgacttccccgacgcggggcgctgagaagcagtgagtgcctgtgtgtacctgccggccgggaatataggacttgtcgcatctcagcccttccctcccrgagcgggggcgagaggtcgaggcggggaggcgaaggggcggtgggccgcgagggagagggagcgatggggtggacgtccttcaaggccggggaacacgcg

SEQ ID NO: 417884 - DNA, 201 bp, Homo sapiens
caggaaaattgcttgaacctgggaggcagatgttgcagtgagcagagatgccaccactgcagtccagcctgggcaacagacaagagactctgtaaactttwctcatatatatatatatatatatatatatatatatatatatatatatatatatgaaactatgtatcattgttaactatagtcatcctacagtgctataga

SEQ ID NO: 417885 - DNA, 201 bp, Homo sapiens
tcctgaggaatgaatgttcatatttatagaaaataacatcacaaggaaaaaccagaacatattggaaaatagtacttcctgaaataattttttaagctcarttttattaaggtgtaatacaatgaagttcatacattgtaattgtgcaggtcattgacttttggtatgtgcatatcctcttgtagccaatatcccaatcga

SEQ ID NO: 417886 - DNA, 201 bp, Homo sapiens
ttattcttggatttaatcctagaactgtactaaccagttctaaaaccttgatagaggcctcagatttcacccctaaccataatgtgaaactagattgcttytaagattccttccagctccaaaataatgatttattctctagttttctgaggaatattgttagttatagtaggttcattttaagatagaggaaggtttggt

SEQ ID NO: 417887 - DNA, 201 bp, Homo sapiens
gccgggaatataggacttgtcgcatctcagcccttccctcccagagcgggggcgagaggtcgaggcggggaggcgaaggggcggtgggccgcgagggagarggagcgatggggtggacgtccttcaaggccggggaacacgcggggctttccaggccgcgggggacggtggcgggtgtcggggcgcggtggcaacgctgga

SEQ ID NO: 417888 - DNA, 201 bp, Homo sapiens
gatagagggagatggtcagatcctgaggggcttggtaggccatgctgaggaggctggacttaattctgaaggtgatggagcctccagagcagggtaaatgrtggtgtaatggatcagatttggggacctcatggaaggttgataagaggggcccaggatgaggaggaaggtaagtgagagatcaccaaggtgagaagcagg

SEQ ID NO: 417889 - DNA, 201 bp, Homo sapiens
tcagagtttcttcagtttcattttgcttaagaaattatttttgggctgggcacgagtggctcatgcctgtaatcccagcactttgggaggccgaggcaggyggatcacctgaggtcaggagttcgagaccaccctggccaacatggtgaaaccctgtctctactaaaaatacaaacaatcagccaggtgtggtggtgcatg

SEQ ID NO: 417890 - DNA, 201 bp, Homo sapiens
cacttatataatgcttttgagattcatctgtgttgttgcatgtgtccatagtttgctcctctgagttgctaagtagtatggaattgtatgaatatcccacmgtttgtttacccacttacctttgataagacccgcagtggatgcctaaaacctagataatactgagccctaaatatactatgttttgactgccaaaatgtt

SEQ ID NO: 417891 - DNA, 201 bp, Homo sapiens
ttttcagctgcttcttccttcctctctgctggtaatataagttttgcttgaaaattcttttttctgaaacttctttttcttctgcaattctgggtggttayacattaatttaaatttttttttacattaaagcataagattcaattattataaccaaagatcactatggaaatttaagtttaagaaactgtagggaaatta

SEQ ID NO: 417892 - DNA, 201 bp, Homo sapiens
cattcctgtgtgtcttctttcacttatataatgcttttgagattcatctgtgttgttgcatgtgtccatagtttgctcctctgagttgctaagtagtatgraattgtatgaatatcccacagtttgtttacccacttacctttgataagacccgcagtggatgcctaaaacctagataatactgagccctaaatatactat

SEQ ID NO: 417893 - DNA, 201 bp, Homo sapiens
tacagttcagtagtgttaagcatattcacatggttgtgcaaccactcttcagaactttttcatcctgcaaaacaaatgctatactcattaaacaacaactycccattttccccactcccctgtcccctagcaaccaccattctattgctgttcctataagtttgactactttagatacctaattttaatttcaatttttaa

SEQ ID NO: 417894 - DNA, 201 bp, Homo sapiens
caatttttctttttcctatagtgttgtaggcaatgtttttctctgagccatgtggagtggtatagaaggtaccttcctaggtaggattaggggtgaactcygtggccattgaagagtgtttctctttgtaatgagcatggtagcatttgctacctgactgagcagactgactcagttatacacttaggggatctgtattca

SEQ ID NO: 417895 - DNA, 201 bp, Homo sapiens
tacatataaacatcaaaacaagctccgggaagctacagaagatttgagtaaagtactagatgttgagcctgataatgatttggccaaggtaagtatagaaygtgatttctcacctaattctgtagttggctgtttctgtatttattttaaagtggtatcaatcttgccaaacaaattatgttgaagatcaggtcacagctt

SEQ ID NO: 417896 - DNA, 201 bp, Homo sapiens
tatcaccagataagtggtatcaggagtcaaacactgagaaagaaaaacaggcaaaatttaaaataagaggagaaaattttacctatgaaaataatttttaratgtattttgggaaaaactaccatttgattttaaatgtcttacctctgaggagcattggttgttttccaggggtgtgtttggagagtggccatttggagt

SEQ ID NO: 417897 - DNA, 201 bp, Homo sapiens
tgtagacaggaatagacagcagatttctaagagtatcggaaaaacagcaagttaaagaaagcagcccttgctcatgctttcctggaaagttaaatacttgwtatattaactgtttatagcatgagttgaaagaataaatccaccatcttcaatgtggacagtctggtgcagatgttagttaggttatatagaaaggaggct

SEQ ID NO: 417898 - DNA, 201 bp, Homo sapiens
aattcttttttctgaaacttctttttcttctgcaattctgggtggttatacattaatttaaatttttttttacattaaagcataagattcaattattatamccaaagatcactatggaaatttaagtttaagaaactgtagggaaattatgtgcattacatttgtctatatataaatataaaagtttttcacacaaaaagt

SEQ ID NO: 417899 - DNA, 201 bp, Homo sapiens
gttatagatccacctcctcgttgtactctttctccccttctcactactgcacttgattagtcaaaaaaaaaaaaaaaagattctcagagaaatgttaaaaygatgttcagaatgaaattcatttgattaggtaagagatggctctatcatttcatgtgtttttaatcacattttattgaaatcataaaatctcaggggttg

SEQ ID NO: 417900 - DNA, 201 bp, Homo sapiens
ctatggttagtttggagagttccacctaggtctactgccagcatgagacgcaggctaattaatatccaggagggtatttttcttgccttctctacattttytaggagaaggtaaagtagctgtgaaagcagccattaggatgggctgtgatggctcacgcctgcaaccccagcactttgggaggctgaagcaggtggatca

SEQ ID NO: 417901 - DNA, 201 bp, Homo sapiens
gtgatgaaaattggttactttggagttcctttttttcttcttttaatcattccatagattaacgggtaaaaatggagactatgcgggttaaggaaagagamtgggaagcagcccttgagatctccacagaacctcagggttccatggaacccagcctgcaaaccgctggtctagatgatcctaaataaggtgctaactcta

SEQ ID NO: 417902 - DNA, 201 bp, Homo sapiens
ctgccgcctcctgaatgacaggcgccggcatcgctgcattcctcccaggtgactaagagcgccgtgccacctgacctcagtgagcagcacctgggaatgcsggcatgttcccggccaggcacgtttgcctccgtccccgccgggttttcccttggtggctgttgcgggtagcagctccgtggagttctgcatgatcagtct

SEQ ID NO: 417903 - DNA, 201 bp, Homo sapiens
atggaagaggtggaggagatgaaaggagaggcaggtgcacttggtgtaactttatagaaatcaatcataatttctgtctgacttttgctttttcatttccytaaaaatgttactatatggtaccaatccttcttccaccgtttgctttagttttagtccccgtatcacagagggtagatgttgtgaaagaagtcaaaaaca

SEQ ID NO: 417904 - DNA, 201 bp, Homo sapiens
gcgcggacaagcggagcccacggcgggcctctgcggcggcggcggcgggcggcggcgccaccgggcatccgggcggcgggcagggcgcggagaaccctgcsggcctgaagagccagggcaacgagctgttccgaagcgggcagttcgccgaggcggccggcaagtactcggcggcaatcgcgctcctggagccagcaggta

SEQ ID NO: 417905 - DNA, 201 bp, Homo sapiens
ttctattcctagttttctgagttttttttttttttaaatcatgaaagcatgttggattttgtcatgccttttcagcatcaattgtgggatcatgtatgcarttctttactttttctgttaatgaggtgtgttggcattgattgattttctaatgctgaactacctttgtattcctgggataaatcccacttggccatggtg

SEQ ID NO: 417906 - DNA, 201 bp, Homo sapiens
agacttctcgaactcctgacctcaggtgatccacccacctcggcctcccaaagtgctgggattacaggtgtgagccaccatgcctggcctatttgtaattwttttgcacctccctgattatttcctcaggataaattattataattcaaattgcttggtcagatgtggttgctcacaccacctgtaatcccagcactttgg

SEQ ID NO: 417907 - DNA, 201 bp, Homo sapiens
atcagtatttttttttggtcttagtaacacaggatataactcatatgtgctgcttaaatatatgtggtgataagagggtatttacatagatatcataaaaycagtactagtagctgggtgcggtggctgatgcctgtaatcctagcactttgggaggccaaggcgggtggatcacttgaggtcaggagttcgagaccagcc

SEQ ID NO: 417908 - DNA, 201 bp, Homo sapiens
ccttgtcaagaatcaactggccaggccgggcgcggtggctcatgcctgtaatcccagcactttgggaggccgaggcgggcggatcacgaggtcaggagatygagaccatcctggctaacacggtgaaaccccgtctctactaaaaatacaaaaaattagccgggcgtggtagcgggcgcctgtagccccagctactcggga

SEQ ID NO: 417909 - DNA, 201 bp, Homo sapiens
tcacttcaggccaggagtttgagaccagcctgggcaacataggtagagctgtctctacaaaaatataaaaattagctggacgtggtggcatgtgtctgtartcccagccattcaggaggctgagacaggaggatcgctttatcctgagagaccgaggctgccgtgagctgtgatggtgtcattgcactccggcctgggtga

SEQ ID NO: 417910 - DNA, 201 bp, Homo sapiens
acgaggtcaggagattgagaccatcctggctaacacggtgaaaccccgtctctactaaaaatacaaaaaattagccgggcgtggtagcgggcgcctgtagycccagctactcgggaggctgaggcaggagaatggcgtgaacccgggaggcggagcttgcagtgagccgagatcgcgccactgcactccagcctgggcgac

SEQ ID NO: 417911 - DNA, 201 bp, Homo sapiens
aaagttctctgtgcttatttttatacatgggtggtttttttccttaatggaatttccattcataagttcatattcattttcaggattgtggttaaagaaawaaatttactgggcagaaagtgctaaaaattaatacagcatctcatcagttttagatcccaagcttggcttaaggccatcttgaatagataaatggcacct

SEQ ID NO: 417912 - DNA, 201 bp, Homo sapiens
tatttatatttttctggggttaaaaacaattttaaaacatctaaaaacaatgttgaggtatatgtattctgtaacttagaatgctgctttttaaactttcwgccttctcattttattggcttgagctcaaaaatatggtaattaatctaccagtcaaaaatagcactttatgtccagactttttggctttgttttcaggat

SEQ ID NO: 417913 - DNA, 201 bp, Homo sapiens
atcccagaacttcaggaggctgaggtgagaggattgcttgatcccacggtttgagactagactgggcaacatagtgagacctcatctctatattttaaatmaacagcgtatgtagcatgatttcatttgtgtaaaactgtacatctctgtgggtatatatgcatagaaacatctagaaagatgattatcaaaatgttaata

SEQ ID NO: 417914 - DNA, 201 bp, Homo sapiens
tgagagaggttttgaagattaggtgagataagctatggcacatggtaatttagctccataaatgttaactgttattactaatgtcacttaaaacctacccrgtacagtaattgagggattaaatgaagtaatatatgtaaagtacttagaatggtgcctagcacacattaagaactatatatttgttgctattattattat

SEQ ID NO: 417915 - DNA, 201 bp, Homo sapiens
gggaggcagagcttgcagtgagccgagatagcaccactgcagtctggcctgggtgaaagagcaagactctgtctcaaaaaaaaaaaaaaatactgtcttakggagaatgcccttttccttctgaagtgctgcgggaaggcaccagcgtcatttatagcgtgcagcaggaatgggcagattgttgctcaggtaccgtcttta

SEQ ID NO: 417916 - DNA, 201 bp, Homo sapiens
cagccgcgggtcagacctcagagtgatcttaaaggaaacctttgacatggtggcgccgggaggaacccagaacccacgccaactccgcggagcaaccccamttcctccatggtgccggggaccacaccgccccactcacccttatccagtttttaaagtgtgtgatgaaaattggttactttggagttcctttttttcttc

SEQ ID NO: 417917 - DNA, 201 bp, Homo sapiens
ctcatggccaggcacagtggctcacgcctgtaatcccagcattttggcaggccaaggtgggtggattgcttgaggtcagtttgagaccgtcctggccaacwtgatgaaagctagtctctactaaaaatacaaaaattagctgggcctggtggcatacccttgtagtctcagctactcgggaggctgaagcaggaaaattgc

SEQ ID NO: 417918 - DNA, 201 bp, Homo sapiens
gtcagacctcagagtgatcttaaaggaaacctttgacatggtggcgccgggaggaacccagaacccacgccaactccgcggagcaaccccaattcctccayggtgccggggaccacaccgccccactcacccttatccagtttttaaagtgtgtgatgaaaattggttactttggagttcctttttttcttcttttaatca

SEQ ID NO: 417919 - DNA, 201 bp, Homo sapiens
gcaaatgaggaccacccaggtgcactgaatggccaccttttccagattgtagatccactctggctgcagtgcagtcagcgtgcatgtcccgccaggacccycgtgctgccctgtgacccccgccccatgctgagggagccacacagtgtccatgtgaccctaacacatgcctccccgccggccctctttttttttggttag

SEQ ID NO: 417920 - DNA, 201 bp, Homo sapiens
atcatggctcactacagctatgatcactctttattattttcttccttctgcttgtttttatgttcatttgcttctctttttcttttcttctttttgagatrgagtctcgccatttcgcccaggctggattcaagctcctgggccaaagattctcccacctcaggctcccgagtaaatgggactataggcacaccaccgcac

SEQ ID NO: 417921 - DNA, 201 bp, Homo sapiens
atttttgtattggtgtttgaacaaaaagtgttcaagcaccatttaataaaatattatctttaaatttcttggtaccattgtcaaaaatcagttgaccaaakctgggtgtggtggcgcatgcctacagtcccagtttctctggaggctgagacaaggggatcacttgagcccaggagttttaggctatcatgcactattacc

SEQ ID NO: 417922 - DNA, 201 bp, Homo sapiens
gtaatgtccaaggaaagggagaagtatgttagctgctgtggctgctataacaaagcgccatagactgggtggcctgaacaacagaaatctattctggaggygggaagtctcagcttgcggtgttaataggggtggtctcttcagaggcctatgtctctggcttacagttgctgtcctctccctgggtctccatgtggcctt

SEQ ID NO: 417923 - DNA, 201 bp, Homo sapiens
taagagagtaaatctagttcctgactccgtcaggccagaagaagtccctttattgatttttctttttttttttctgagacggagtctcgctctatcgcccrggctagagcgcagtagcacaatcttggctcactgcaatctctgcctctccagttcaagtgattctcccgcctcagcctcccgagaagctgggattacagg

SEQ ID NO: 417924 - DNA, 201 bp, Homo sapiens
cttcagtttcgagacttggactagctctccttgctcctcaagcttgcagacagcctattgtgggaccttgtgattgtgaaagttaatactgaataagcttrtatatatatatatctcctattagttctgtccctctagagaaacctgactagtatagattttagtacccggagtggttccagaggaacagactattaagga

SEQ ID NO: 417925 - DNA, 201 bp, Homo sapiens
cctatttttcttatccattccatttgtatatctttattttatttttatttttttgagacagtttctctttgtcacccaggctggagtgtagttgctcgatytctgctcactgcaacctccacctcccaggttcaagcaattctcatgcttcaacctccaagtacctgggattaaaggtgtgcgccaccatgcccagctaat

SEQ ID NO: 417926 - DNA, 201 bp, Homo sapiens
tttcctctccctctcctctccttctttttttcgtttctttcttttttttcaatggtccttactctggattcatttattttgaaatggtgggcaactgcaayggtagcttatgccagatcttaatctctggcacatatcaagcaattcagctttttcttgtaatatcatgtgttctctctgcttcttgggagcacttccagc

SEQ ID NO: 417927 - DNA, 201 bp, Homo sapiens
gacctcgtgatccacccgcctcggcctcccaaagtgctgggattacaggcgtgagccaccgcgcccggcccagtttattgatatgggtaaagcttgctagwatctgtgcctaagtttaaaaagaaggccttgaggcacttgaatttttttgccagttttacatatttaaatttgaagtgaataatacttatattctctttg

SEQ ID NO: 417928 - DNA, 201 bp, Homo sapiens
tgcagcacccttatggtgtccttgcacagctttgttccatcatctcattctccaagctgtagccagagggactgtctaaaacatggcaaatgtgtcagccyctattaaaaacccttcatcggacttccattaagctcagtttataaagctcaacttccttccatgacttacagtgcccttcgtgatctggcctgcctgctc

SEQ ID NO: 417929 - DNA, 201 bp, Homo sapiens
agggttgctagttcacatgtgcagccttattggagactctgcctcttgtcatatagtcacctgagccctgttagcattgtttgcttaattctctccatctstaaggtggttctggcctctgttactgtctttagaatcccagtagagaaaagatggcatgtcaagatggataacatgacagaattattacttgtatcttat

SEQ ID NO: 417930 - DNA, 201 bp, Homo sapiens
ggataatggtggaaagaacatagagttggatcaggctgaatttattgatttgggcccatgaagtagggactctgcttttaatgttgcagcttggagagttaaaaaaaaaaaggttataatagattatttgcttggttagctgaattatggattaaaagatggcccactgtgagccagctggaaatgcctgatctcctttgg

SEQ ID NO: 417931 - DNA, 201 bp, Homo sapiens
agaccctgagaaacttccgatagccaagcctaataatgcctatgaatttggtcagattataaatgctctcagtaccaggaaggataaagaagcctgtgcayatcttttagccatcactgcaccaaaagatttgccgatgtttttaagtaacaaacttgaaggggatacattccttctcctcattcagtctctgaaaaataa

SEQ ID NO: 417932 - DNA, 201 bp, Homo sapiens
gattagttctaggaatgtttttgtagattcattggattttctacctgcaggatcatgccatctgtgaaaaataagagatgtgcttcttttccagtctgccwtttatttatttatttatttatttatttatttttttatttttttattttttacttgctttattgaactggctagaacctccagttcagcagaagtggtaag

SEQ ID NO: 417933 - DNA, 201 bp, Homo sapiens
aaaagaaatatatgtgtgtgtgtgtgtgtgtgtgtgtgtgtatgtgtgtgtgtatgtatgtgtatatatatgtgtgtatacacatatatacctcgcagatkctagagaaccagttttttggtttactttattctatttatatttttctggggttaaaaacaattttaaaacatctaaaaacaatgttgaggtatatgtatt

SEQ ID NO: 417934 - DNA, 201 bp, Homo sapiens
caccactatactccagtctgggcaacagagcaagaccctgtctctaaaaacaaagtgcaaattagggcttgaggtattaaatatttagtataatataacartatctaataatttagatattatgtgtttctcaaatatctgcttgtgacagaaaatagcccttaagggggatacttgtcaaaggacaaaattacaacaaat

SEQ ID NO: 417935 - DNA, 201 bp, Homo sapiens
ttgtgttttttgtagagacaggctctcatgatgttgcccaggctggtctcgaacctctggcctcaagccatgctgtcacctcggtctcccaaagtgctgasattacaggggtgagccaccatgcctggcttcaaaaaatgtgtttggtatttgatatttgatgttaacttacatcaacggttttttttaaagtgatctata

SEQ ID NO: 417936 - DNA, 201 bp, Homo sapiens
actgtagaaaaaggaggctctcttgttagtatccatctcaacctttagttttctccatgacatcaatgacagtctgtaattatctattcatttgtttacakgtttttaattgcttcccctcataggacgtaagcttccataaatgtaaaacttaagtctgtctttctttgtcttttccgtggtcctcttagctcctggcac

SEQ ID NO: 417937 - DNA, 201 bp, Homo sapiens
caaacaaaaatttaggaaacctgcttcttttatgatgggatataagcaaacctgcccaatctctgctccatagggaagcatcacctttattacactggagrgccaacacacctgccctctccgctgcagatgaatactatttctgtttgccaaggttgttctcagtacaaacatccttagagatgtccagaaagaaggtgg

SEQ ID NO: 417938 - DNA, 201 bp, Homo sapiens
agattcagtggtcatgtcttgttaggtgccctttctttccctcaacttcttcagtgtattgtgtgactcatggaagattaaatgttgactctagccaattygaagagtaaacaacctggaaggattttatggaacaaaagtattataataactaccatttgcatagtcctttataggtttaagccacttatttgttcattt

SEQ ID NO: 417939 - DNA, 201 bp, Homo sapiens
tttgagcccgggaggtcaaggctgcagtgagctgtgattgcaccactgtactccagccggggcagcagagggaaaccctgtctcagaaacaacaacaccamcaacaacaaaacaaaacaaacaaaaaagccacagaccacagactgggagaaaatatttgaaaatcgtatatccaacaaaggatgatatatctatttttca

SEQ ID NO: 417940 - DNA, 201 bp, Homo sapiens
taatttaacacttgaaacaatattttaagagaatctagactagataaagggttatcttcataatataaaacatcgaaagttatgtcaactttgaggggaargatttgcctcctcacatgacaagggacataaaaacttttccctccgtcagctgggcgcggtggctcacacctataatcccagcattttgggaggccgagg

SEQ ID NO: 417941 - DNA, 201 bp, Homo sapiens
aggcatttatacaacaattgtataaagtctaaaaattaaattttgttgtcatagtttcaatgtcaaataattttttaaaacttttatgaattggatcttayaccctaaaacttctcttcctaaaaaaaattattacaaagttttcacttggaactggactacagtacagtctacttgtagttttcaattctcattctgaca

SEQ ID NO: 417942 - DNA, 201 bp, Homo sapiens
ccaagaaattttatgaatagcctaattcagtgataatatattgaacttggaattgttttttaaaatttaatttggaaatgaaatttatttatatttttctrgaaatgtaagagtgaacagacctaagaaagaatgggaaaggactgattttccttaaaataaaaggaacagatgtctccatttaactctctaaggaaggaa

SEQ ID NO: 417943 - DNA, 201 bp, Homo sapiens
accctgtctctactccaaatacaaaaattagctgggtgtgatggcatgcacctgtaaccccagttactcaggaggctgaggcaggagagtggcttaaaccygggaggcggaggttgtggtgagccaagatggtgccattgcactccagcctgggcaatagagcgagactccatctcaaaaaaaaaaaaaagaaaaagaaaa

SEQ ID NO: 417944 - DNA, 201 bp, Homo sapiens
acaacataaatataatcatgtgctcataatggtatttcaatcaacaatggagcacatatatgacagtgatcccataagattatatactgtaactttactgkgtttttactgtaaaggtactatactcttactgtaccttttctgtgtttagatacacaaataccattgtgttacagttgcccacagtattcagtacagtaa

SEQ ID NO: 417945 - DNA, 201 bp, Homo sapiens
gccattagtaacatatgagagttctagatgcttctcgtccttgccagcatttggtattgatttttttcccctttttacccattctattaggtgtatagtgktttctcatcagttttaatttgcattttcctgatgagaatctttttatgtgctcatttaccatctctatattactttttgtgaagtgtctcttcaaattat

SEQ ID NO: 417946 - DNA, 201 bp, Homo sapiens
gtgtatagtggtttctcatcagttttaatttgcattttcctgatgagaatctttttatgtgctcatttaccatctctatattactttttgtgaagtgtctsttcaaattattccaccaattttcaaaaattgggttgttgttttcctactgttaagtcctgagaattctttttataatcttgatgcaaagtcttaaaattt

SEQ ID NO: 417947 - DNA, 201 bp, Homo sapiens
taagtttaaaaactaggtgcctaatttgtgacttttttgctaaattcacttttaaaatgacttaaaaatcacttacgctttatttttctttcaaatctttytctcctaatcttttaaaataaggaaaggtgcctccgtgttgggtattataattgtattcaagtttttgcaactccattcaaaaaagtacgtattttgtaa

SEQ ID NO: 417948 - DNA, 201 bp, Homo sapiens
aagaccctatttccaaataaggtctcattcacaggtaccggggttaggacttcatcatattgtttttgggagacacaattcaacccataacatcatcttagcattgagaacattgtctttatgagtaggaaatcgagttcaagcatcaaatgatactttttgagcctgtaaggactgcatagtactcatttatgtagttta

SEQ ID NO: 417949 - DNA, 201 bp, Homo sapiens
agaaaacttctaggtcaaatggacaaaagactaatttgaattataaaaacagagaatcatggcttttcaattaatttccagacttgagccagtttgcagamccagaaccccttgaatgaagtggagtctgggtccccttgaggaaggaccccactacagtaccaacaatttatgcagtgaatctttctcccatccttcccc

SEQ ID NO: 417950 - DNA, 201 bp, Homo sapiens
tgtgtgtgtatgtgtgtgtgtatgtatgtgtatatatatgtgtgtatacacatatatacctcgcagattctagagaaccagttttttggtttactttattytatttatatttttctggggttaaaaacaattttaaaacatctaaaaacaatgttgaggtatatgtattctgtaacttagaatgctgctttttaaactttc

SEQ ID NO: 417951 - DNA, 201 bp, Homo sapiens
gtggcacatgcctatagttctagttctatctattcaggagactgaggtaagaggattgcttgagccctagtggtcaaggctgcagtgagccatgatgacaycactatactccagtctgggcaacagagcaagaccctgtctctaaaaacaaagtgcaaattagggcttgaggtattaaatatttagtataatataacaata

SEQ ID NO: 417952 - DNA, 201 bp, Homo sapiens
acctaacccagctaatttttgtattttttttttagtagaaacagggttttgccatgttggccaggctagtcttgaactcctggcctcaagtggtctgccarccttggcctcccaaagttctgggattacatacaggcttgagccaccgtgcctggccagttctctgctttttcttatctttgctactctcacagtcttgaa

SEQ ID NO: 417953 - DNA, 201 bp, Homo sapiens
agcttgaggaaaatttttcagcaaaatcttccctaatattctatttcagggtttatataccaggattgggaaagtaccatttgaccctattgtgtcagatttttttttttttttttttttttttgagacaggatcttgctctgttgcgcaggctggggtgcagtggtgcaattttggctcactgctgcctcgacctcctgg

SEQ ID NO: 417954 - DNA, 201 bp, Homo sapiens
agctgcctctacctagaaaaatattaaatcataaataatatcgcatccctggagggactgcagagattagtgccaccatcaaggacttaaaagatgtaggratagggctggctgggcatggtggttcatgcctgtaatcccagcactttgggaggccgaggcgggcagatcacgaggtcaagagatcgagaccatcctggg

SEQ ID NO: 417955 - DNA, 201 bp, Homo sapiens
tcataaataatatcgcatccctggagggactgcagagattagtgccaccatcaaggacttaaaagatgtagggatagggctggctgggcatggtggttcaygcctgtaatcccagcactttgggaggccgaggcgggcagatcacgaggtcaagagatcgagaccatcctgggcaacatggtgaaaccccgtctctactaa

SEQ ID NO: 417956 - DNA, 201 bp, Homo sapiens
atatgggttcaaattgacaaggggtggttgaaatggttaatactgagtgtcaacttcattggattgaaggatacaaagtattgatcctgggtgtgtctgtsagggtgttgccaaaggagattaacatttgagtcagtgggctggggaaggcagatccacccttaatctggtgggcacactctaatcagctgccagcgaata

SEQ ID NO: 417957 - DNA, 201 bp, Homo sapiens
aaaattgtagaaaatgagaatggtaattcaaggtaagttttaaaatcagaccttaccttcccatgtggtcccagccctgctggaaagatacataggcagargtgacaaccgttctcttggtagtcacagggaacctgtctgatcccagcctgcctagaagaaagggacatacatccataatctgtgatggggtgagatgag

SEQ ID NO: 417958 - DNA, 201 bp, Homo sapiens
aactatgtatcattgttaactatagtcatcctacagtgctatagaacactagaacatgtgcctcctatctagctgtaattttatatcctttaacaaatctstgcctgtccccctcttccccctaccctttccatcctctggtgtgctctgaggaaccctgtcttatacagcttcgtacccctcgaagcataatagtcaccc

SEQ ID NO: 417959 - DNA, 201 bp, Homo sapiens
tgtggtgattgtggttcagtgtcacaatgcatttttcttttcttcatgaaggtgaatgaaggcaaggaggagcctggaagacctgcaggggaggtctccaygggatgccttgcttctgagaagggaggcaaaagcagcaggtcaccagaagaccctgagaaacttccgatagccaagcctaataatgcctatgaatttggt

SEQ ID NO: 417960 - DNA, 201 bp, Homo sapiens
ggttttttgtttttttttttttttgcttcttttagatgatgttgacactaattagcaagggccaaaaggagctaattgaacagctgtttgaggacctttcrgacacaccaaacaaccattttactttagaagatatacaggccctaaaaaggcagtatgagctttaaatcaagataattgttagatttcttccatgcatgt

SEQ ID NO: 417961 - DNA, 201 bp, Homo sapiens
gagagtggaagtcagggatttccaggagttcaaacaatcaacaaaatcataaaggtgaataattttgattatgtgaaaatgaaaaacgtgtatgttaggcrccataaaaaaaactaaaagacaaatgacaaactaggaaagatggcaaagggttgataaccttataatatgaaaagtttctacaaaacaataagaaaaaga

SEQ ID NO: 417962 - DNA, 201 bp, Homo sapiens
tgtactaagactgtgccttgaaaatataacaatgaacaagcattgctgaaggagcaatggggtggatggactagtggtacagtagttcttaaagtatggtytaggaagcccttgaagtcccagagattcttccagggggtccagaaagttagtgctattttgaaaataatactaatgctttgtccttgtcactgtgttggt

SEQ ID NO: 417963 - DNA, 201 bp, Homo sapiens
ttcatttccactgctaccgccctaattcgtgctcttttcatatcactcctagactactggagaagcctgataactaattccaatccactgcggcatcagartaactttcctgaaacattattttgttcagattgtttccaacaggcctttaatggctcagtattggcttcgaaataactgtaaacttctctgtcactacac

SEQ ID NO: 417964 - DNA, 201 bp, Homo sapiens
aaactgtcattattcagacttaggattttggcaaaaattttgttggaagtgaatgaaggaggcctgtcgctttaagaaaaacaactcacagtatttgttgstagtaagaaaatctgacctttcaagtgcaaattaggtccaggcacaggcgggcagtggctcatgcctgtaattccagcactttgggaggccaaggcgggt

SEQ ID NO: 417965 - DNA, 201 bp, Homo sapiens
aacattgtctttatgagtaggaaatcgagttcaagcatcaaatgatactttttgagcctgtaaggactgcatagtactcatttatgtagtttatatagttyttagtattgctattagcaaacctgagcctaatgagaatgaagatatgtaatagtttaaaaacaaatcagtacctactttattattataaattctgctata

SEQ ID NO: 417966 - DNA, 201 bp, Homo sapiens
ctttgagaccatcctggacaacatagcaaggcctcatctgtataaaaaattttaaacattagccaggcatggtggctggctctcacctgtagtcccagctrctctggaagctaaggggaggattgcctgccccagaggttgaggctgcagtgagctatgatggcaccattgcactccaccctgggcaatagagcaagaccc

SEQ ID NO: 417967 - DNA, 201 bp, Homo sapiens
tatttttcttatccattccatttgtatatctttattttatttttatttttttgagacagtttctctttgtcacccaggctggagtgtagttgctcgatctytgctcactgcaacctccacctcccaggttcaagcaattctcatgcttcaacctccaagtacctgggattaaaggtgtgcgccaccatgcccagctaattt

SEQ ID NO: 417968 - DNA, 201 bp, Homo sapiens
tttttatttttttgagacagtttctctttgtcacccaggctggagtgtagttgctcgatctctgctcactgcaacctccacctcccaggttcaagcaattytcatgcttcaacctccaagtacctgggattaaaggtgtgcgccaccatgcccagctaatttttgtatttttagtagagacggggtttcaccatgttggcc

SEQ ID NO: 417969 - DNA, 201 bp, Homo sapiens
tagtagagacggggtttcaccatgttggccaggcgggtctggaactcctggcctcaagtgagctgtccacctcagcctcccaaagtgctgggattacaggsgtgagtccccgcacctggcttccatttgtatatcttaacccaatactttccattgcatttacagtaaaacctgataatcttatattaaatatgtctcata

SEQ ID NO: 417970 - DNA, 201 bp, Homo sapiens
ttattttcttttgtttattttatgatctttctgctttcttctgcttctgttaaaataagcattcttagatttaaacttgaaaaattctgttaaattatacrtttacatatagcagataacatttatttctaggtctaactgagaaagaaaaggattttcttgccactcgtgaaaaggagaaaggaaatgaagctttcaact

SEQ ID NO: 417971 - DNA, 201 bp, Homo sapiens
tgtatccccaaggcccaacaaagtacctggttcatagtagatgttcaataaatatgtatatgaacttctgaagttcttaacagcctatgaaaagtagactragtttttaaaatgttgttacagataaactgttcttatagaatcactaatgctaccttagcactaaactctgtacaatcttttttccacctttggaaataa

SEQ ID NO: 417972 - DNA, 201 bp, Homo sapiens
ataaataatttaattttcattttaaattaataatttgaataacttaattctaaattaaatttgtccaaaactgactctttctgccaaaaacctgcactctmttttgattccctgtccctctgactgaccaccttgtcatggttcaggcctgaaatatgcaaatcagactctattctccttttctgttatcaagaaggagtc

SEQ ID NO: 417973 - DNA, 201 bp, Homo sapiens
ggcgtagaaggtatataagctctggaaaactttgtaattttgagttggtctggtgataatttccaggccttctccctgtagccagttgcagaagtaaatamcgtcttcctcctcggttcatctgcatctcgttattgggccacaaaactagcaggccaaccctcagtttggtccaggaacacctaggtgggacaggcacaa

SEQ ID NO: 417974 - DNA, 201 bp, Homo sapiens
agatatcctgagtcaaacacgaaaagactttgtcactccaagcagatgagcttcacgttcatgtcagttccccttgctcccaagtcccacaggggtgacayagagtggcccagatggatgttgcacactcaatggatttatgtgatggctgacaaatcaaaaatttaggaaaccagctgagtgcagtggctcacgtctgta

SEQ ID NO: 417975 - DNA, 201 bp, Homo sapiens
aaaaaaaaaaaaaaaaaaaaaaaaaaaaaagaaagatgcaggggtggtgagtcccatcacattcccattcaacttccccatttggcctgtgcagaagaccratggatcttggagcataacagtggattattgtaagcttaaccaagtggtgactccaattgcagctgctgtaccagatatggtttcattgcttgagcaaat

SEQ ID NO: 417976 - DNA, 201 bp, Homo sapiens
tcaacattttaggtttaggtttagggcctggcttagtatttcctttttgtaatggttatgtttatttatttttgagacagggccttgctctgatgcctcarctgtagtgtggtgggaacatggctcactgcagcctccacctcctaggctcaagcaatcctgccatctcagcctcctgtgtagctgagaccacaggtgcac

SEQ ID NO: 417977 - DNA, 201 bp, Homo sapiens
cccatcacattcccattcaacttccccatttggcctgtgcagaagaccgatggatcttggagcataacagtggattattgtaagcttaaccaagtggtgaytccaattgcagctgctgtaccagatatggtttcattgcttgagcaaattaacacatctcctggtacctggtatgcagccactgacttggcaaatgtcttt

SEQ ID NO: 417978 - DNA, 201 bp, Homo sapiens
aagcaatctgccgtcagctggcaaggttaccaatatacctttactgtcctacctcaggggtatatcaactctgcggctttgtgtcatagtcttattcggaragaccttgattgctttttgctttggcaagatatcacactggtacattatattgatgacgttatgctgactggacctagcgagcaagaagtagcaaacaca

SEQ ID NO: 417979 - DNA, 201 bp, Homo sapiens
tctatctccttacagagacgcaatcagaggaaagtgagcatctaccctcccttgcagtgctgttggtgttgctacttaaaaatgaaagctaagaaaattaragtcactcacaaacagaagaataaatatagatcagtatttctcttgtgctagaactggcaggatcaggagagtggaagtcagggatttccaggagttcaa

SEQ ID NO: 417980 - DNA, 201 bp, Homo sapiens
ttttggagcaaggccctgccatcttctgcagataactgctttcctcttgagacagctcttggcctgttactgggctttggtggaaactgaacatttgactrtgggtcatcaagtcaccatgcaacctgaactgcctatcatgaactgagtgctttctgacccatctagccataaggtaggttgtgcacagcagccttccat

SEQ ID NO: 417981 - DNA, 201 bp, Homo sapiens
ggccagtgatgatgagcattttttcgtatgtctgttggctgcataaatgtcttcttttgaaaagtgtctgttcatatcctttgcccactttttgatggggktgtttttttcttgtaaatttgtttgagttctttgtagattctggatattagccccttgtcagatgagtagattgcaaaaattgtctcccattttgtaggt

SEQ ID NO: 417982 - DNA, 201 bp, Homo sapiens
gctttcttctgcttctgttaaaataagcattcttagatttaaacttgaaaaattctgttaaattatacatttacatatagcagataacatttatttctagstctaactgagaaagaaaaggattttcttgccactcgtgaaaaggagaaaggaaatgaagctttcaactcaggagattatgaagaagcagtgatgtattat

SEQ ID NO: 417983 - DNA, 201 bp, Homo sapiens
catatagcagataacatttatttctaggtctaactgagaaagaaaaggattttcttgccactcgtgaaaaggagaaaggaaatgaagctttcaactcaggrgattatgaagaagcagtgatgtattataccaggtgagcagatgtttgttggggtttaaacttgccttttaaaaaatgataatgttttaattgttgaaaca

SEQ ID NO: 417984 - DNA, 201 bp, Homo sapiens
cgaaagagcatttttcaaaacaaatggtatgtaatatttttgtcttctttagggctctggaacttcatccattctctatgaaacctcttctgaggcgggcratggcctatgaaactctagagcagtatgggaaagcttatgtggattataaaacagtgttgcagatagactgtggactccagctagcaaatgacagtgtta

SEQ ID NO: 417985 - DNA, 201 bp, Homo sapiens
agcctcctgcatagctgggattacaggtgcctgccaccacgcccggctaatttttgtacttttagtagagagtccatttcgccatgttggccaggctgttytcgaacacctgacctcaagtgatccacctgccttggcctcccaaagtgctgggaatacaggcctgagccacagtgcccaacctgataaaaatttaatata

SEQ ID NO: 417986 - DNA, 201 bp, Homo sapiens
catacctcctgtgtcctactagtatacatgtaaaagcgttttttgttttgttttgttttgagacaggggcttgctctgtcacccagggtggagtccagtgkcgcaatcacggttcactgcagtctcgacctcctaagctcaagcaatactcctgcctcagcctactgagtagctggaaccacaggtgcacaccaccatgcc

SEQ ID NO: 417987 - DNA, 201 bp, Homo sapiens
cggatgtgtacatatttgagagttcagtactgcagtatctattcagtgaagtataaacgaaagagcatttttcaaaacaaatggtatgtaatatttttgtsttctttagggctctggaacttcatccattctctatgaaacctcttctgaggcgggcgatggcctatgaaactctagagcagtatgggaaagcttatgtgg

SEQ ID NO: 417988 - DNA, 201 bp, Homo sapiens
gtactttttaacggtgctgtgaaatgattaattgctttgttttaaatattgctaagacaccataaattaaatatttacacatcctttttatatttaaaaayagattcaacaattattaaagctattaatacctgaactcctaatcaaaatcaaagaaatttttagtttgaataaggcaatgggatggaaaatttgctgtgt

SEQ ID NO: 417989 - DNA, 201 bp, Homo sapiens
cagcattactctaaaacagtaatgtgggctgggtgtggtagctcacgcctgtaatcccagaacttcaggaggctgaggtgagaggattgcttgatcccacsgtttgagactagactgggcaacatagtgagacctcatctctatattttaaataaacagcgtatgtagcatgatttcatttgtgtaaaactgtacatctct

SEQ ID NO: 417990 - DNA, 201 bp, Homo sapiens
tgcggttgtatgcccagtgccataattgaatcaaatgttaagtttcaatggaaaccgcagtggtatagcaacagacatattgagctattttctgatttttsttagctgtctaaaacttacagatagccaatctttacctttcataatactgagttccattgcattatgccagagctctctgttacttgaagctgtgccagt

SEQ ID NO: 417991 - DNA, 201 bp, Homo sapiens
tgattatcaaaatgttaatagtagtatctgaatggcaagattttaggtgattttttctttattttttatacttgttacaccgctttttgtgtgtgtgtgtkttttttttacagtggacatctatgattacaatcaaaggccaccaaaaaaaagccttgtcttagttgtattcatttttcaacatctttatgtttttaacct

SEQ ID NO: 417992 - DNA, 201 bp, Homo sapiens
ccacaggctcactttgtaagagtggtattaatgtggaccctgcacacatactgcacagctcactacatccaccccactcccactcaggttactctaggctycttctatttatgaaagttattttctctgtcttcctacttacagaattatcagaaaagcttaattgatctcaataaagttatcctactagatccaagtatt

SEQ ID NO: 417993 - DNA, 201 bp, Homo sapiens
gttgtttccactttttggctattatgaataatgctgtcatgaacgctcatgtacagatttttgtttgaacagatgttttagattttcttgtgcattatttkggagtggaattgctggatgatatactaactctgtgtttaactttgaggaaatgcagactgttttccaaagtagctatcccattttacattcccacctgca

SEQ ID NO: 417994 - DNA, 201 bp, Homo sapiens
gctgtgattgcaccactgtactccagccggggcagcagagggaaaccctgtctcagaaacaacaacaccaccaacaacaaaacaaaacaaacaaaaaagcyacagaccacagactgggagaaaatatttgaaaatcgtatatccaacaaaggatgatatatctatttttcatcagagtcagcataaaatatttcagaattt

SEQ ID NO: 417995 - DNA, 201 bp, Homo sapiens
atatacagtgtgaggtaaatgtgtgtggtattacatatgtgtgtgtgtatatccatatatatatgttttttggtcatagttcctgatttatacaactcccrtagcccttgttacagacttttgtcataatgctggctatctgaggcttcaggaaacaatctctccagatctcctttcaccttccccaaggcaggactctaa

SEQ ID NO: 417996 - DNA, 201 bp, Homo sapiens
cttcctctgtaacccttgcagtatcctttgtaataagccattaaacatgttgtctggagttcagtgagctgctccagcaaattaattgaactcaaagagtrggggtcatgggaaccctaacttgaaacctgttggtgagaagttctggaggcccagacttgtaactggtgtctggagtaggagacagccttggggactaag

SEQ ID NO: 417997 - DNA, 201 bp, Homo sapiens
aggctgaggcaggagaattgtttgaacccaggctgcggagattgcggtgagctgagatcataccactgcactccagcctggacaacggagcaagattccawctcaaaaaaaaaaaattaaaataaaataaataaatcagtactagctatagaataagatccaaaaatgtggtgaaaactgctatgttgaatcctctcctcc

SEQ ID NO: 417998 - DNA, 201 bp, Homo sapiens
tctgagaagggaggcaaaagcagcaggtcaccagaagaccctgagaaacttccgatagccaagcctaataatgcctatgaatttggtcagattataaatgmtctcagtaccaggaaggataaagaagcctgtgcacatcttttagccatcactgcaccaaaagatttgccgatgtttttaagtaacaaacttgaaggggat

SEQ ID NO: 417999 - DNA, 201 bp, Homo sapiens
tgaggcaggagaattgtttgaacccaggctgcggagattgcggtgagctgagatcataccactgcactccagcctggacaacggagcaagattccatctcmaaaaaaaaaaattaaaataaaataaataaatcagtactagctatagaataagatccaaaaatgtggtgaaaactgctatgttgaatcctctcctcccaca

SEQ ID NO: 418000 - DNA, 201 bp, Homo sapiens; identical to SEQ ID NO: 17233

SEQ ID NO: 418001 - DNA, 201 bp, Homo sapiens; identical to SEQ ID NO: 17234

SEQ ID NO: 418002 - DNA, 201 bp, Homo sapiens
aagtatgtatcctaaagtcagggagtagagtcatttttgaaaccagattctgcctaactcactccagtgattttgtgctcaactattatgccgtccatggkgcttctttgaaggaagacccacatctgaaaggacctggtgctctgtagggactcaatgtatgttatatgtgttttattgactaaactccagcttcttatg

SEQ ID NO: 418003 - DNA, 201 bp, Homo sapiens
tgtagtcccagctactggggaggctgaggcaggataattgcttgaacgcggaggcctctgcaggtgagtcgagattgcaccactgcactccggcaccagcracagagtgagactctgtctcaaaaataaaaaaagaaaaaattgcagaagcattgtccttcttgtggatttaagagaacattaggattatttgggggcatg

SEQ ID NO: 418004 - DNA, 201 bp, Homo sapiens
ccaactggaaatagaaatttgggaagtcactaatgcaagcttgtgcaacccaaatttgtaaacttacttaaaacattatgagattgattgtatttttttttaagctcatcagctatcgttatatgtgtgccccaagacagttattccactgtggcccaggaaagccaaaagattggctacccctgcacagaagggtagtat

SEQ ID NO: 418005 - DNA, 201 bp, Homo sapiens
aaaaattagccgggtgtggtggcacgtgtctgtagtcccagctacttgggaggctgagacacaagaatcacttgagctctgggaatcacttgagccccagrggtggaggttgcagtaagccgagattgcaccactgcactccagcctgggtgacagagtgagactctatctcaaaaaaaaaaaaaaaaaaaaaaaaaaaag

SEQ ID NO: 418006 - DNA, 201 bp, Homo sapiens
agcaagttgtactttggggttagcagaatcctgacactgagatttgatccaatgctcacttctttctagatgttgattatagtcttttctccaattgctargcccctccccaactttaggcttatgttctttgtccttgcttctttatgtccgggtcccatggatgagtaaggtattttctttcctggtggaagtggaagt

SEQ ID NO: 418007 - DNA, 201 bp, Homo sapiens
aagtttgagaccagcctggcgaatatggtgaaaccccatctctactaaaaatacaaaaattagccgggtgtggtggcacgtgtctgtagtcccagctactygggaggctgagacacaagaatcacttgagctctgggaatcacttgagccccaggggtggaggttgcagtaagccgagattgcaccactgcactccagcct

SEQ ID NO: 418008 - DNA, 201 bp, Homo sapiens
tacttatctgggagccattctatagcttagcttatttaatcttttttaagacagagtctcactctttcacccaggctggagtgcagtggtgtgacctaggytcactacaacctccgccttccaggttcaagctattctcctgtctcagcctccctaggagctgggattacaggtgtgcactaccatgcctggctaattttt

SEQ ID NO: 418009 - DNA, 201 bp, Homo sapiens
tttctatttactgtagatccttgccagcacattacagaatatttttgttgaaccttcttgagaattcagagaaactgctgagtgaccactgaacgaaaagrtctaatcttaaggcttacgtgagtatttactactgtggacttcctcacaagatgtgaaaccttcagtgaactgctttaggacagattcagttctgtgatc

SEQ ID NO: 418010 - DNA, 201 bp, Homo sapiens
ccttcttgtggatttaagagaacattaggattatttgggggcatgaccatatgaactataattccatctctagatgaaaaacaaaattttttctttttccmtaatgtgagctctaccacatccagaataacccacttgcaccattttaattaacattgaaaattaaagccaaatcatacattagagacaggctctagtcgt

SEQ ID NO: 418011 - DNA, 201 bp, Homo sapiens
aagatgaccttacattcttcttgaatgggggaaatagacatcttcatgctcaacagtcttttagtcacaatcttcaggtcttcatacgactcactagttgytctcctgaccatttatcctagagaaatgaagatttacagtcacatacaaacaaatgtttgtagaagctttaacaatggccaaaaactggagacaccagat

SEQ ID NO: 418012 - DNA, 201 bp, Homo sapiens
acactcctaagagtagtgcctttcaggagagtcagactatcacatatctctccccgctacttttcccacctctccaagcaggcttcattatgtttacttargtttcacatccattcacaggggcacagactcagtcctcagtgaatcttgaaagattactggttcattattcacacttttattagtgcctgtaattctgtt

SEQ ID NO: 418013 - DNA, 201 bp, Homo sapiens
aatacttagacattaaataacacatttctttttttttttttttttttttaagacagagtctcactctgtcacccaggctggagtgcagtggcgcgatcttrgctcactgcaacctccacctcccaggttcaagctattctcctgcctcagcctcccgagtacctgggactacaggtgcacaccaccacacctggctaattt

SEQ ID NO: 418014 - DNA, 201 bp, Homo sapiens
ttccctttaaagccacagacactcctcaactcccttagatataagactatttattccctttctaccaagggtctcagcattaaatcaacatttccagtggygagagaagaaatacatctaataccccacatatgagtcattctgccgtttctcagtcgtttcatgtctgttctacaaacatgccattttaaaaatacagtt

SEQ ID NO: 418015 - DNA, 201 bp, Homo sapiens
gcatagtaataccagacataacaaacaggaaattcttttttctcttttcattaagcttaattccagaagaacatctactaagtaatatctgattaacagarttttaattattatatgaacttaactcagtgaactggccttttttgttttttgtacagacagggtcttgcattgttgcccaggctagtctcgaactccggg

SEQ ID NO: 418016 - DNA, 201 bp, Homo sapiens
cactatcctcccacctcagcctcccgagtagctgggactacaggtgcacgtcaccacacctaacttttatatatgtatattttagagacaaggtctcactrtgttgcccaggcttgtctcgaatgcctgggctcaagcaattctcccacctctgcctccaaaagtgctgggatttcaggcatgagtcagcacacccagcct

SEQ ID NO: 418017 - DNA, 201 bp, Homo sapiens
gtcctagcactttgggaggctaaggcaggaggatcacttgagcccaggagtttgaggccagcctgggcaacatagtgagaccccatatgttttaaaaaaaattctgaactaaaaaaaaaaaaacagcattaatgctagtattccatattatataaaataagtgtgaaatacccaaattacttttttttttcatttctgggt

SEQ ID NO: 418018 - DNA, 201 bp, Homo sapiens
aaaggtttaattgatacacagttccacatggctggggaggcttcaaggaacttagaatcatggtggaaggttatagggaagcaaggaacatcttacatggyggcaagagagaatgtgtaggggaaacgaccaattttaaaaccgtctgatcttatttatgagccctccctcactatcatgagaacagcatgggggtaacca

SEQ ID NO: 418019 - DNA, 201 bp, Homo sapiens
ttatagagacaataaaaatatcaggggttgggtagagagagggatgaataggcagagcccagaaaatttttagggcagtgaacctaatctgcctgatgctrtaatgatgaatacatgtcattgtaaatttgtctaaacccatagaatgtataacaccaagagtgaaccctaatgcaaactatggactctgggtgataatga

SEQ ID NO: 418020 - DNA, 201 bp, Homo sapiens
acttgaggctgggtaatttataaacaaaaggtttaattgatacacagttccacatggctggggaggcttcaaggaacttagaatcatggtggaaggttatrgggaagcaaggaacatcttacatggcggcaagagagaatgtgtaggggaaacgaccaattttaaaaccgtctgatcttatttatgagccctccctcacta

SEQ ID NO: 418021 - DNA, 201 bp, Homo sapiens
tgaccactttgtcaagctcatttcctcgtacaacagtgaatttggctacagcaacagggtggtggcccatatggcctccaaggagtaagactgctcgacarccagccccagtgagagcacaagaggaagaaagagaccttcagcttctgggcagtccctgccatgctcagtcccccaccacactgggaatctcccctcttc

SEQ ID NO: 418022 - DNA, 201 bp, Homo sapiens
ccagttcccaaaaagtccctcatctctttctgagaccacctcagccttgatttcattgtccatatcactatcagcattttggtcaaaaccattcagcaagkctctaggaagttccagactttcccatatcttctgagccccccaaactgttccaacctttgcctgttacccagttccaaagtcacttccattttttcaggt

SEQ ID NO: 418023 - DNA, 201 bp, Homo sapiens; identical to SEQ ID NO: 17236

SEQ ID NO: 418024 - DNA, 201 bp, Homo sapiens; identical to SEQ ID NO: 106387

SEQ ID NO: 418025 - DNA, 201 bp, Homo sapiens
atatgtacctgcttatgggaggagtcaacaaatgtttattatttctaaatattcctatttctcagacattaaaagatgttcaagaagtagtcatatgaacrtgatttgatttctttttaaatgtaatatcagttttattggtaccccatttttgctatacatttttagtttagttatattttttgtccaccttcagtgaat

SEQ ID NO: 418026 - DNA, 201 bp, Homo sapiens
catgtggatactatccaatttttggtttccaatggactcaaaattgatatttggtaagttctctgttgttttagaagtctagtcatttcttcccattaatytctcaactgataatcttatcttgggtctgttggttttgtttcctcattaatcagttgaaataagttcagaaagcattgaagacagtgtaatcctgttagg

SEQ ID NO: 418027 - DNA, 201 bp, Homo sapiens
ttaggattcccccaagacagcacaacttctgcaggccttataagggactataaatcaagttaatgaaaaatatttccccactcctccatataactctaatwcctttttactttgtaggtatgggataacaaaaacagtatagctatcacattttttaaaaaagatacatgcaaacacaccccccaaagacagtgtagatat

SEQ ID NO: 418028 - DNA, 201 bp, Homo sapiens; identical to SEQ ID NO: 17235

SEQ ID NO: 418029 - DNA, 201 bp, Homo sapiens
aggaactctagcagtctcttctcaagaaagcctcaatagagcccagagatctctccagtaatgggagaaggaaaatgcctgggcttctaacccccgaaccrgccaatctcaggtttacattgaacagggaagtgtatactttttaaccaatcatgaaattttacaatgcccaatgcacatcctgtgacactcaagaggatg

SEQ ID NO: 418030 - DNA, 201 bp, Homo sapiens; identical to SEQ ID NO: 17237

SEQ ID NO: 418031 - DNA, 201 bp, Homo sapiens
tgaacagataaactgtaatacatacagagaatgacatattatgcagtcctaaagagaaactatgaagccatgagaagatacagaaaacacgtattacgagrgaaagaagccaatctgaaacagctgcataccgtatgatttcagttatatgacattctggaaaaggcaaaattatagagacaataaaaatatcaggggttg

SEQ ID NO: 418032 - DNA, 201 bp, Homo sapiens
tgttggctgcttcctccagctggttctgcaatgagtacagaatttttagacatcacatccatttatcaccacatagagaagagaccgtctttcctgtgackccctcgtaggaaactttgatgcaaacaagctgtttcattggctgacatgatatcatgtaccccattctcaaaccaaccagtacccttacacaggttgact

SEQ ID NO: 418033 - DNA, 201 bp, Homo sapiens
cctcctgcctcagccttgaatatctgggacaacaggcacgcacgcaccaccatgcaaggtttatttttaaattttttttgtagagatggggtttcacactrtgttgcccaggctggtctggaatccttaggctcaagtgatcctcttgctccagattccctaaagtgctgggactataggtgtgagtcactgcacccagcc

SEQ ID NO: 418034 - DNA, 201 bp, Homo sapiens
tcttggcattgcttattatgtgagtggggtgctacccttcgtggaaaaccagcctgaactggtgcattaaaggagctcatggaagatgaggcaattaattkcctgtttcctggcttccaatgtttgttctcagtttctcagaatttttcttagcgcaaagcagtgagggcagtacatgttctttttgcatttttaattatt

SEQ ID NO: 418035 - DNA, 201 bp, Homo sapiens
caaaggattctcacagttctttatcaaaagggaaattgtatttcccattgtggaaataagttgggctttatagtcccaaacttcttagccttacctattayagatttaagaatttgcatattcggcattcatatagcaagcgtatattgagtgccttctatggccaggctctgttctaagcactgggggatgtgagagtga

SEQ ID NO: 418036 - DNA, 201 bp, Homo sapiens
aaaaggatttatgttcagctgaataagccgatattattctaaactatggaaatcaaatgacctgagttctattctagcattctaatgaatcatttgaatgragcctgaaaaatgaacattaacaagttactgggggccagtgactcacacttgtaatcccagcattttgggaggccgaggcgggtggatcacctgaggtcg

SEQ ID NO: 418037 - DNA, 201 bp, Homo sapiens
gccatctaatctctaggtcagtgtcctgtgctcctgagcctcagaaggcaagaaagaagggatacagacgtcagcgtccctgttgggtggggctgtttccrtcacgacttgtgtcatggagcatcatctcaaagctctgcagttaggaggcagagggacctgctaccacctgtcccctcctctccagtcctgccctgcagg

SEQ ID NO: 418038 - DNA, 201 bp, Homo sapiens
taattgaattggaattttaatccagcagatgtgaagaaaataaaatgttttaatggaaaataaaatacaattgataactttgttgttgtttctgtttggtmatttatttattagaggcaggaggccaaaaaggatgagaaatattgcttttctaaatgactcctttgtcttgatttcatttgtcttcatggaatctcactc

SEQ ID NO: 418039 - DNA, 201 bp, Homo sapiens
cccatgttagtcacaatgggcaggtgtctggtctctgggcagtttgcaaaaatagctccatgggaaactgatataggaacttgtcatcttcttttcccgtktctgaaagattctccagaatgctctgagtacacacatgtaaactgagctaactcacagattaccattttaataggagaggctgtgtgtagaggccagggc

SEQ ID NO: 418040 - DNA, 201 bp, Homo sapiens
aaaagtctggcagtccttcaaaaagctacacgtagagttaccatctgaccagcagtgccacttctaggaatataccaaagaaaattgaaacatatgtccasacaaaacttatatatgaatgttcatagcagcattattcataatagccaaaacattgataccacccagatatccatcagctgatgaaggaataaacatcat

SEQ ID NO: 418041 - DNA, 201 bp, Homo sapiens
ttttgattggtgtctagtacttagtgcttatcctgaaaaataattcttgataaattcacagatcatggatctcttgattcaagtctggaagtctgccttcrctatttatcacttaagatcacttgattgtttttccttgcttcagccttgtctagagtacgagcaagttgtactttggggttagcagaatcctgacactga

SEQ ID NO: 418042 - DNA, 201 bp, Homo sapiens
agatctatataagtgggtactaaaaatggaactgacaatgtagtataactgctatgatggcttctttatttttataaactttttttttttttttttttttwagcaatcatcaaggtgctacccctttagttctggcaaagcgcagaggagtaaataaagatgtcatccgattgctggaatctttggaagaacaggaggtga

SEQ ID NO: 418043 - DNA, 201 bp, Homo sapiens
tctggaacagtgcatactcctcttgagtgatcactgaaagctgacaaatagataatcaagaagtcagagatgtatttgcaagcccttgtttttctctcctstgtactttggattgacagaatggcataagcactttaacaatattgagttaactattatttgttaaagattttttcctctaagataacttgaaatttattt

SEQ ID NO: 418044 - DNA, 201 bp, Homo sapiens
agcactttaatacagtcctaaagaaatccaagagctttacttctggaacagtgcatactcctcttgagtgatcactgaaagctgacaaatagataatcaasaagtcagagatgtatttgcaagcccttgtttttctctcctgtgtactttggattgacagaatggcataagcactttaacaatattgagttaactattatt

SEQ ID NO: 418045 - DNA, 201 bp, Homo sapiens
gttgacataagaagctcttgttgccgcgatctaagtgactgcgtcatgtgaaaggataaatgactccatcttcaagtctctcaggcagtgccacagagcayagagtgaggagttttaagtgtcaggctacaccagccctcaaaaacctgacccccaaagttctgcttttaacaatgccagctagtctgcctctgaaccagt

SEQ ID NO: 418046 - DNA, 201 bp, Homo sapiens
cctcccgagtacctgggactacaggtgcacaccaccacacctggctaatttttgtatttttagtagagacggggtttcaccatgttggccaggctggtctygaactcctgacctcaggtgatccgcccaccttggcctcccaaagtgctgggattataggtgtgagccacagcacccagcccaaaatgttttcaaaagaca

SEQ ID NO: 418047 - DNA, 201 bp, Homo sapiens
gtgagtggggtgctacccttcgtggaaaaccagcctgaactggtgcattaaaggagctcatggaagatgaggcaattaattgcctgtttcctggcttccartgtttgttctcagtttctcagaatttttcttagcgcaaagcagtgagggcagtacatgttctttttgcatttttaattattgtaatccttttagataatg

SEQ ID NO: 418048 - DNA, 201 bp, Homo sapiens
tgggctcaacaggtaaagttaataggccagacttagttctagtagcatattatctggttgaccaccatgcagtttcagccttccacattatacgtgtgaargaaaaaggatgctgagcttccatagcctcttcccagtattctcggtaggttgtaaatagaataagcaagggcccacatcagctgtttacctagtagctga

SEQ ID NO: 418049 - DNA, 201 bp, Homo sapiens
aggtttcagtgagctgagatcgcatcactgtattccagcctgggcggcagagtgagattctgtctccaaaaaaaaaaaagaatttctgatgactagacgaktccacatgtacaacaggctgaggagtaaccttccattattagagaattacaattaaagaaggaattccttcattggtcagattattgaactaaattaata

SEQ ID NO: 418050 - DNA, 201 bp, Homo sapiens
acatctgaggaaattaaaaacacatagttgattttcagtcaaaataatatattaaattcatgtttgggcacctggcaataactgatgttaaaaaaaaaaaagcgccaaagtatagtcagaatagtaaataggataaccatctctatagagtacaagcacaaagtaatgagtgaggctgtagctgttttggaattggccaaa

SEQ ID NO: 418051 - DNA, 201 bp, Homo sapiens
gcctgtatgttgtgatataaccatgagtgctcttcccttagtgcttccaagtaccaaagtcagatgcagtttctctttgtggtagtcgtatttctcattgwtaaagttctgaaaaccagaatcagtgtttttatggtatttgcactaccttattttcaactagactagcctttatgcagaagagaaatgaacatattctgt

SEQ ID NO: 418052 - DNA, 201 bp, Homo sapiens
ggcctgtatgttgtgatataaccatgagtgctcttcccttagtgcttccaagtaccaaagtcagatgcagtttctctttgtggtagtcgtatttctcattkataaagttctgaaaaccagaatcagtgtttttatggtatttgcactaccttattttcaactagactagcctttatgcagaagagaaatgaacatattctg

SEQ ID NO: 418053 - DNA, 201 bp, Homo sapiens
accatagtgaaatgccacttcacacccactaggatagctgcaattaaaaagatagataataacaagtgctctggaggatgtggagaaattggaaccctcayacactgctgatgggaatggaaagtagagcagcttctttggaaaagtctggcagtccttcaaaaagctacacgtagagttaccatctgaccagcagtgcca

SEQ ID NO: 418054 - DNA, 201 bp, Homo sapiens
attcatttgcttttaagtgcaacttgaactttatataggaccttatgactgcagattacaattgagaagctattaacagaaagtactacatgtcatgtgcrcataatgttctgttagccacctgctgtattgacagtacaaaggagaaatagtaacaaatgaatctgaggggaggaagccggagcttgatgattttaagta

SEQ ID NO: 418055 - DNA, 201 bp, Homo sapiens
tgacccccaaagttctgcttttaacaatgccagctagtctgcctctgaaccagtcagtggacactgttcctcatggacactgttccttgggaaccagggcmctggtcagcaaccagcatgctttctggggcgtggttattcccatattgactgttcttgcactagactatgtggtttttcctctgccaggaaccagttctt

SEQ ID NO: 418056 - DNA, 201 bp, Homo sapiens
ccaatgcacatcctgtgacactcaagaggatgattttgattgagttccatgagtaaaaattcagatattggtagtcacaattgcaaaattctttcaaaagrtattcctctaatagaactactctcagaactaagagtcagtgagaattatggaagcttatattttctttctggttgagatttttttctgtttaggaagcat

SEQ ID NO: 418057 - DNA, 201 bp, Homo sapiens
agcccagagatctctccagtaatgggagaaggaaaatgcctgggcttctaacccccgaaccagccaatctcaggtttacattgaacagggaagtgtatackttttaaccaatcatgaaattttacaatgcccaatgcacatcctgtgacactcaagaggatgattttgattgagttccatgagtaaaaattcagatattgg

SEQ ID NO: 418058 - DNA, 201 bp, Homo sapiens
taggtgaacagataaactgtaatacatacagagaatgacatattatgcagtcctaaagagaaactatgaagccatgagaagatacagaaaacacgtattaygagggaaagaagccaatctgaaacagctgcataccgtatgatttcagttatatgacattctggaaaaggcaaaattatagagacaataaaaatatcaggg

SEQ ID NO: 418059 - DNA, 201 bp, Homo sapiens
tatatatgtgtgtgtgtgtgtgtgtgtgtgtgtgtgtgtgtgtatttggtcttttctaaatagtagccctgtggttttatgtttttggaattgctgtgttyttttaatgccctttttgctctttcttcttccacagtgccatggaaagccattcactcctcaatcccaacctgcagcaaggtgaaggagtcctctccagct

SEQ ID NO: 418060 - DNA, 201 bp, Homo sapiens
ggctcactgcaagctctgcctcccgggttcacgccattctcctgcctcagcctcctgagtagctgggattacaggggcgtgccaccacgcccagctaattktttgtattttttagcagagacggggtttcaccatgttagccaggatggtctcgatctcctgacctcgtgatccacccgcctcggcctcccaaagtgctgg

SEQ ID NO: 418061 - DNA, 201 bp, Homo sapiens
taagtgcaacttgaactttatataggaccttatgactgcagattacaattgagaagctattaacagaaagtactacatgtcatgtgcgcataatgttctgwtagccacctgctgtattgacagtacaaaggagaaatagtaacaaatgaatctgaggggaggaagccggagcttgatgattttaagtacaggtcacaaaaa

SEQ ID NO: 418062 - DNA, 201 bp, Homo sapiens
cttaggattcccccaagacagcacaacttctgcaggccttataagggactataaatcaagttaatgaaaaatatttccccactcctccatataactctaaytcctttttactttgtaggtatgggataacaaaaacagtatagctatcacattttttaaaaaagatacatgcaaacacaccccccaaagacagtgtagata

SEQ ID NO: 418063 - DNA, 201 bp, Homo sapiens
actatattggccaggctggtctcaaactcctgacctcaagtgatctgctgtggcctcccaaagtgctaggattacaggcatgagccaccacacccagcctrcgtaagtttaattaaaaaaacaaaaatattctgagtgtgactttgttgaaacagtttatataggcattttaactttggtggcagttttagtcctactatc

SEQ ID NO: 418064 - DNA, 201 bp, Homo sapiens
tatttaactgtcataattctgtagtgctattatagtgaaaaactcagttctataagctagctgtgttgtcacagttttatcatagttcataattatttcaygtgcaatcctatttggaggccctgttagacttttaacaatcccatccatatctgtaattctctgatggcaagaatggatggagcatttctgagttaacag

SEQ ID NO: 418065 - DNA, 201 bp, Homo sapiens
tttttcctctaagataacttgaaatttatttttatctttttatgaaataacattaagtactttaagcttctttaccatgaaaaacaaccaagaatgtgttyttgtttggtatatttttaggatctttattttgttaatagccagtttcttggcacccttttattagaaatatacttttagcattagtttgcctcagttgtg

SEQ ID NO: 418066 - DNA, 201 bp, Homo sapiens
aaactggtaaacagacattagaattaccaatgtaaactttatatctaaaaccaaaatcaattacaaaggatcattattttccaaagtagatacttttttttagtgctgttcagtttttctgaagcttatctttgttcacaaggattgttagcacttccaccaaatcagtgtttagaaaccttaaataatttaacgtctgac

SEQ ID NO: 418067 - DNA, 201 bp, Homo sapiens
ccatccatatctgtaattctctgatggcaagaatggatggagcatttctgagttaacagtgctggacagtatcgtactgggtgtcataaactctttatgartggtaatattatgtaaattgaaatctggccctcaaactatattgcagctttcagcagtatgtttgaaggcctcttttgttaatgattctgtaatgtatga

SEQ ID NO: 418068 - DNA, 201 bp, Homo sapiens
taaaagaaaattaggcatgacttttcatcaagtcagtgaatcacaagcttccatcaaaacctttttattgttgtttgggttgagacaatcacgctggttgrcataagaagctcttgttgccgcgatctaagtgactgcgtcatgtgaaaggataaatgactccatcttcaagtctctcaggcagtgccacagagcacagag

SEQ ID NO: 418069 - DNA, 201 bp, Homo sapiens
ttacattttggttagccaaaaacatcattgaatctatgtgataggaaaaatacaggacaaattcttttttaatgtgctaaggaattcagtaaaattatggyacatacatagaatacagtcatcccttagtatccagtttcttttaacagcatctgacaagaaaattgtctctctgtggtactctcctaagagcagtgtgcc

SEQ ID NO: 418070 - DNA, 201 bp, Homo sapiens
atttccaggtattgtttctacagtttaagaagacgttcactttgaatgaaatgattgtaaagagttatatggaatgtgtatgctagactaatgttctcccktatgtttgatgaagacatttgctaagctaattcattaaacaaaaaatcttatgaaacaaacttagtgactttttttttttttactcatgaaatgagtata

SEQ ID NO: 418071 - DNA, 201 bp, Homo sapiens
ttttgcattcttacactataacttaagtttgggtaattctctttgtagatcccctgatttgggggaaaggcagtcatatttaaccagctaacagttctatrtttcaccttattgaacaatccaaatttatttgttattttaggtaagttccaattttggatcagacagtggaggctgtggttatacaagaaaacacgtaga

SEQ ID NO: 418072 - DNA, 201 bp, Homo sapiens
gttagcagaatcctgacactgagatttgatccaatgctcacttctttctagatgttgattatagtcttttctccaattgctaggcccctccccaactttargcttatgttctttgtccttgcttctttatgtccgggtcccatggatgagtaaggtattttctttcctggtggaagtggaagtgatctgctttgagcctta

SEQ ID NO: 418073 - DNA, 201 bp, Homo sapiens
ttttttattttatttattttttttttttgagacagagtctcgctctgtcgcccaggctggagtgcagtggtgcaatcttggctcactgcaagctctgcctrccgggttcacgccattctcctgcctcagcctcctgagtagctgggattacaggggcgtgccaccacgcccagctaattttttgtattttttagcagagac

SEQ ID NO: 418074 - DNA, 201 bp, Homo sapiens
aaacaaacaattttagatatctgaacctaaaacccaaccatttcacattttaaaacaaggtattatttggtatagttttatttttttattttatttatttwttttttttgagacagagtctcgctctgtcgcccaggctggagtgcagtggtgcaatcttggctcactgcaagctctgcctcccgggttcacgccattctc

SEQ ID NO: 418075 - DNA, 201 bp, Homo sapiens
tacaggctggcagtgtggagccccctcacctgtggagcatgcaggcttccgatcagcagcacctgccacaggtttaccacttcgtgtagaagcccaggaayaatattcacctgccactgctgctgttttggtttctatgtttttatttcaaaaccaggcctcagtctttgacttgtgaaattgtttatgcatgtatcaaag

SEQ ID NO: 418076 - DNA, 201 bp, Homo sapiens
tttcagcaggacattactaaattttccactcgtggtcctatatacttactttttttcctttcttacacatcttcccagtggtagaagctttaatattcaarctccaaccctggcttgtcagaaagtcttccatagttaaccgtacttgactgcctccttcccaacccctcctttccccaccacttaccacactcagtttta

SEQ ID NO: 418077 - DNA, 201 bp, Homo sapiens
tctttgtattctgttctctgcattcatcattcaggaataccaccaataaatgtatttatatatcccttaatcacgatttctctttttttttttttttttttagtgtattatagttttaatttggggattttgtaatggattgcaattagctgctttttaaaacacagctttttttcaaacctaatgtattaggtatattga

SEQ ID NO: 418078 - DNA, 201 bp, Homo sapiens
ttctttgtattctgttctctgcattcatcattcaggaataccaccaataaatgtatttatatatcccttaatcacgatttctctttttttttttttttttttagtgtattatagttttaatttggggattttgtaatggattgcaattagctgctttttaaaacacagctttttttcaaacctaatgtattaggtatattg

SEQ ID NO: 418079 - DNA, 201 bp, Homo sapiens
ctctgcagaactgtgttatctatttgtggttttactcttttaggccttctcaaagttctaatcttatttttaaacttgctgtcaagtgttccaaaattacwgtggtgttgtagattcccactgaaaacatcatctcttattcagagaataaacatgttttaattattaaaaaaaaaaaagtttgggtgttaagcagactgg

SEQ ID NO: 418080 - DNA, 201 bp, Homo sapiens
gtaaatatcaaataagaatgaatctagaactagatttatccacttttttgactatatgttctcttttttcttttccctggaagtaaaaaaaaaaaaaaaaagaaaaacaagggttaattcaaaattcagctacactggatgtttggctcagctctgggttttacttttgagttaaactggacccatcctttttttcccctt

SEQ ID NO: 418081 - DNA, 201 bp, Homo sapiens
gagcatggtggcagacacctgtaattccagctacttgggaggctgaggcaggagaatcgcttgaactcgggagatggaggttgcagtgagccaagaccgcrccactgcactccagcctgggcaatagagcgagacaccatctcaaaaaaaaaaaaattgtgctataaacataacactctacaggtctttgttgagtataag

SEQ ID NO: 418082 - DNA, 201 bp, Homo sapiens
tggcatttcattttgaaaaaggtttatgatagcttttccatttttatgattcaatactgtgcaagcttgtccaacctgcagcccagaacagctttgaatgyagcccaacacaaattcataaacttttaaaaaacattctgagattttttttgcaattttttaaagcttatcagctatcattatgtattttatgtgtagccc

SEQ ID NO: 418083 - DNA, 201 bp, Homo sapiens
gacgcagaggctgcagtgagctgagatggagccactgcactccagcctggatgacagagcaagactctgtctcaaaaaaaaaaaaaaaaaaaaaaaaaaargaaatcatcatgtttgggcctggcccaagctggctaagcctagtctctggggttgggtctgagcatcagaagctgccaaggcctgagccaacagatcccg

SEQ ID NO: 418084 - DNA, 201 bp, Homo sapiens
gcttccagaagatgggctacgtacgcagagacagccatcggctcatggtgaccgccctgccccccgcctgccagctggtgcaggtggccctgggctgcttygccctccggctggagtgtgagatcctgggtgaggtgctggcccagctgggcaccagtgtgctgccagctgaggagctgctgcaggcacggcgtgccagcg

SEQ ID NO: 418085 - DNA, 201 bp, Homo sapiens
agctgagtaggcctggggacctggccacccctgaaagctctgcagcggccagcccgaggcgtattcgggcagagggggtaccagcctcagcctataggtcygtctcggagcccccaggctaccaggcacacagctgcctgtcccctggcgccctgcccaccctctgctgcgacacctgtcgccagctgcatgctgcccact

SEQ ID NO: 418086 - DNA, 201 bp, Homo sapiens
cgtgcacgtgctgaagggtgtgctctcagacgacctcctcctgaagagcttccagaagatgggctacgtacgcagagacagccatcggctcatggtgaccrccctgccccccgcctgccagctggtgcaggtggccctgggctgcttcgccctccggctggagtgtgagatcctgggtgaggtgctggcccagctgggcac

SEQ ID NO: 418087 - DNA, 201 bp, Homo sapiens
aggaaaggctcttcccaggatccagccaatccccgccaggtaatgccggtggccccaccccccaggggacgagcccgcgcacctgcttccccgcggccggstcgcctggggctgggtccctgtctcgtggggaggagcggcccaggcacaacgttccctgagcgcctgccatgagcccgcagccctcggcccagcggcgtc

SEQ ID NO: 418088 - DNA, 201 bp, Homo sapiens
tggtaatggtgcccctcccctccattccctgtgggtgcagcccacaggctggcgaggaggtgcctctgccctaccctcgggtctggcgagggagggggcarggtgcatccactgtgacagcccctctgggcccacaactccctgaccctggaagctgagcctgctttcctgaccctccgccccaccccctcctccccagaa

SEQ ID NO: 418089 - DNA, 201 bp, Homo sapiens
cagtgtgctgccagctgaggagctgctgcaggcacggcgtgccagcggggacgtggcctcctgtgtggcctggctgcagcagcggctggcccaggatgagragccgccacccctgcccccccgaggctcccctgctgcttacagggccccactggacttataccgggacttgcaggaagacgaggggtcggaggacgccag

SEQ ID NO: 418090 - DNA, 201 bp, Homo sapiens
tataccgggacttgcaggaagacgaggggtcggaggacgccagcctgtatggggagccgtcaccaggccctgactcgcccccggcggagctggcctacagrccaccactctgggagcagagtgccaaactgtggggcactgggggccgggcctgggagcccccagctgaggagctgccgcaggccagcagcccaccatatg

SEQ ID NO: 418091 - DNA, 201 bp, Homo sapiens
aaggcaggcggatcacttgaggtcaggagtttgagaccagcatggccaacatggtgaaaccctgtctctactaaaaatatgaaaattagccgggtgtggtsgtgggcgcctgtagtcccagctacccgggaggctgaggcaggggaacttgcttgaacctgggacgcagaggctgcagtgagctgagatggagccactgca

SEQ ID NO: 418092 - DNA, 201 bp, Homo sapiens
ttctgatttgtgagctaggttaatgtattcattgttttttccattaaatttaagaaattcggccaggtgcggtggctcacacctgtaatcccagcacttcrggaggccaaggtgggtggatcatgaggtcaagggatcaagaccttcctggtcaacatggtgaaaccccgtctctactaaatatacaaaaattagtggggc

SEQ ID NO: 418093 - DNA, 201 bp, Homo sapiens
ggctcttgggagacagctcccgtggtgcttctctttgctggggaggggtctgggcctctggttgccttgtccctgggggagtcctgggcacagcagggggwtggagagtccaggccaacccttgctggaggtgggactctctgtatatggaaggctccaagggcagcaggcctaagccggccagcaggagcctttccacat

SEQ ID NO: 418094 - DNA, 201 bp, Homo sapiens
gatgtggaggtgcacgagaggcgcaggaacgggcagtggctgacagctgggaaggccctgagcgtcactgctgctgggcggaagggcctgtggacagcccrcccaggcggcggggtcttggtgggtccagtggtaatggtgcccctcccctccattccctgtgggtgcagcccacaggctggcgaggaggtgcctctgccc

SEQ ID NO: 418095 - DNA, 201 bp, Homo sapiens
aggacttgggggtcctccacgtgtcccagggattctccacacgagtgtcctcaagggcctgttggtgacaccgagctccccccaccccaagctctgctggrgccaatctgcggggctctgccgggtgcacggctgacctggcttcggggacgccggccctccccttgggtgtcacagcagctgggcccacagacaggaaat

SEQ ID NO: 418096 - DNA, 201 bp, Homo sapiens
tggtcggaggcgccaggactttcattcatgagagaggacggacaggcccgcccttgaggcctcccagggggcggggcgggggaataaccggcttcagtgcsggacagccctggtttggacttagttctgctgcttcctggccgcgaggacttggccaaattagctaatctctgtcagcccctttcctcctgagacagcgac

SEQ ID NO: 418097 - DNA, 201 bp, Homo sapiens
cgccccgcccccagcgtcacggccgcggaccccgggcggagccgactcccggcggaagcgcgcggcgcgcggggaggcccgaactgatccgcggcggccgsagaccgctggggacagacaggtagcgccgtcacccgcgggatccgcagctccatctgccgggcgaaggggctctggtcgggagagggctcagcgggcgga

SEQ ID NO: 418098 - DNA, 201 bp, Homo sapiens
gtccagtggtaatggtgcccctcccctccattccctgtgggtgcagcccacaggctggcgaggaggtgcctctgccctaccctcgggtctggcgagggagrgggcagggtgcatccactgtgacagcccctctgggcccacaactccctgaccctggaagctgagcctgctttcctgaccctccgccccaccccctcctcc

SEQ ID NO: 418099 - DNA, 201 bp, Homo sapiens
ctcaagggcctgttggtgacaccgagctccccccaccccaagctctgctggagccaatctgcggggctctgccgggtgcacggctgacctggcttcggggrcgccggccctccccttgggtgtcacagcagctgggcccacagacaggaaatgacctgacctcaaaccagatgtggaggtgcacgagaggcgcaggaacgg

SEQ ID NO: 418100 - DNA, 201 bp, Homo sapiens
gttccagccagtgcctgaacctgtccctgagaaggaccctgtgccccaaggcccgtggctcctggcctgctccctgcagtacggagtacggggctcaggasttgggggtcctccacgtgtcccagggattctccacacgagtgtcctcaagggcctgttggtgacaccgagctccccccaccccaagctctgctggagcca

SEQ ID NO: 418101 - DNA, 201 bp, Homo sapiens
ccgcctcggcctcccaaagtgtggggagtataggcgtgagcccccgcgcccggccaaaaaatgcccgtcttaagaacaacaaaacagcctccttcaccctmgctatcctccagttacctcctcctcggctccggtttgcagccaaaggccttagtctaccctcactaatgccttttctcctccaagtcttgaacccttgag

SEQ ID NO: 418102 - DNA, 201 bp, Homo sapiens
ctactcagttgcagataacaaaaagctactctgactagcctaagctgaaaggggtgtttgttgactctgtgatattgtaaaatatatatctggtttgtatyccagtttggagcttcctggagggtggcgtgcccagggtgggtatggaagctcttcgctccttcccacatgctttgccctgtgcacctcttccttcatctg

SEQ ID NO: 418103 - DNA, 201 bp, Homo sapiens
cctcccaaagtgtggggagtataggcgtgagcccccgcgcccggccaaaaaatgcccgtcttaagaacaacaaaacagcctccttcaccctcgctatcctscagttacctcctcctcggctccggtttgcagccaaaggccttagtctaccctcactaatgccttttctcctccaagtcttgaacccttgagcctctagtc

SEQ ID NO: 418104 - DNA, 201 bp, Homo sapiens
ctcctgcctcagcctcctgagtagctgggacaataggcacctgccaccactccacctaatttttgtattttttgtagagaggggttttgccatgttgcccwggctggtcttgaactcctcagctcaagcgatccacccaccttggcctcccaaagtgctgggattacaggtgtgagcctctgcacctggcctccattgcat

SEQ ID NO: 418105 - DNA, 201 bp, Homo sapiens
ctctggcttctcctctgctgattctaacctaggcatcatctcacatttttgtttttattagagacacgttctctgttgctcagactggagaacagtggtgytattacagctcactgcagcctcaaactcttgggcttaagcagtcctcctaaccaaagcctccccaaatgctggaattacaggcatgagccaccgcaatcc

SEQ ID NO: 418106 - DNA, 201 bp, Homo sapiens
gtgatcctcctgcctcagcctcctgagtagctgggacaataggcacctgccaccactccacctaatttttgtattttttgtagagaggggttttgccatgwtgcccaggctggtcttgaactcctcagctcaagcgatccacccaccttggcctcccaaagtgctgggattacaggtgtgagcctctgcacctggcctcca

SEQ ID NO: 418107 - DNA, 201 bp, Homo sapiens
agaagatgccggcactcattgctaagtgaaagatgccagtctgaaaggttacgtgctgtgtattccaactgtaaacgaaaagcaaaactagagagtgaaargatgagcggtagccagggccttgggagagataggatgaaagggatggataggtggagcacagaggattttagggggtggaactcttctgcagggtaccat

SEQ ID NO: 418108 - DNA, 201 bp, Homo sapiens
tactaaaaatacaaaattagctgggcgtggtggcagacacctgtaatcccagctacttgggaggttgaggcaggagaatcgcttgaaccagggaggtggargtttcagtgagccaagatcacgccactgcactccagcctggcgacagaactagactccgccttaaaaaaaaaaaaaaaaaagattctgaatctttgggaa

SEQ ID NO: 418109 - DNA, 201 bp, Homo sapiens
gtatatatatatagttcttaacaagatacactaacagctcgtcgtttgcccaggaggctcaacctcccgcctcggcctcccaaagtgtggggagtataggygtgagcccccgcgcccggccaaaaaatgcccgtcttaagaacaacaaaacagcctccttcaccctcgctatcctccagttacctcctcctcggctccggt

SEQ ID NO: 418110 - DNA, 201 bp, Homo sapiens
aagttattctatgctccacttcttttgctgtgtgtctcttgtttaaatcattttatttattattattattattattattattattattattattattattatcttagatggggtctcactctgtggcccaggctggagtgcagtggcacaatctcgactcactgcaacctctgagtcttgggttcaagcgattctcctgcc

SEQ ID NO: 418111 - DNA, 201 bp, Homo sapiens
gtgcctgccatcatgcccagctaatttttgtatttttagtagagacagggtttcaccatgttggccaggctggtcttgaactcctgacctcaagtgattckcccaccttggtttcccagagtgtgggattacaggcatgatacaccacacccagccacccatatctgatttagatgatagatgagactctggactttagac

SEQ ID NO: 418112 - DNA, 201 bp, Homo sapiens
taagttattctatgctccacttcttttgctgtgtgtctcttgtttaaatcattttatttattattattattattattattattattattattattattattatcttagatggggtctcactctgtggcccaggctggagtgcagtggcacaatctcgactcactgcaacctctgagtcttgggttcaagcgattctcctgc

SEQ ID NO: 418113 - DNA, 201 bp, Homo sapiens
aaaaaaagaaaaaaaaaaaatacaaaattagacgggcgtggtggcgtgtgcctgtaatcccagctacttgggaggctgaggcaggagaatcgcttgaaccygggaggcgaagtttgcagtgagccgagatcacaccattacactccagcctgggcaacaagagcgaaactctgtctcaaaataaataaataaagtaaaaga

SEQ ID NO: 418114 - DNA, 201 bp, Homo sapiens
tgggcgtggcggctcacatctgtaatcccaacacttttcagagccaaggtgggcaaatcactttgggctcaggagttcaagaccagcctgggcaacatggygaaacctcatctctacaaaaattacctgggcgtggtggtacacacctgtagtcccagctactcaggaggctgagcctggagagagaattgcttgagcctg

SEQ ID NO: 418115 - DNA, 201 bp, Homo sapiens
ggtggggaatgactgctaatgagtataaggttttaaggagagttggtgaaaatgttctaaaattagatagtggtgatatttgcacaaccttgtgactaacrtaacactgaattgcacactttaaaaaagtgaattggggtgggtgcggtggctcacatttttaatcccagcacattttgggaggctgaagcaggaagattg

SEQ ID NO: 418116 - DNA, 201 bp, Homo sapiens
atatatgtgtatatatacgtatatatatgcatatatatgtatatatatgtgtatatatacgtatatatatacatatatatgtatatatatacatatatatrtatatatgtatatatatgtatatatatatatacacacacacacacacacacaaacacacacacacacatatatatgagtttattagggagaattgcctca

SEQ ID NO: 418117 - DNA, 201 bp, Homo sapiens
caagtgatctgcccaccttggcctccaaaagtgctgggattacaggtgtgagccaccgcacccggcccattaagctgttattttaaaaagtctgcctaaamctctgaactagacaaacatggggcatattccaagcaacttagccaagtttaaaagatcagtacagatttcagctgatgcttgcctcagggaagctagatt

SEQ ID NO: 418118 - DNA, 201 bp, Homo sapiens
gggtttcactgtgttagccaggattgtctcaatctcctgaccttgtgatccacctgcctcagcctccctaagtgctgggattacaggcgtgagccactgcrcccggcccttttgtatttttcttgagacggagctcttgttgcccaggctggagtgcagtggcacgatctcggctcactgcaacatccgcctgctgggttc

SEQ ID NO: 418119 - DNA, 201 bp, Homo sapiens
ctggggagcgtggaggcctggtgtgttagcgttctccagagggacagaactctgtgtgtgtatatatatatgtgtgtgtatatatatatgtatatatataygtatatatatatatacgtatatatatacacgtatatatatacacacatatatgtgtatatatatacatatatgcatatatatacgtatatatgtgtatat

SEQ ID NO: 418120 - DNA, 201 bp, Homo sapiens
atgagggccatagccgggcgcccttgcctgtaattccagcactttgggaaaccgaggcaggtggatcacgaggtcaggagttcaagaccagcctggccaasatggcgaaaccctgtctctactaaaaatacaaaaaattaggccgggcgcattggcttacgcctgtaatcccagcactttgggaggccgaggcaggcggat

SEQ ID NO: 418121 - DNA, 201 bp, Homo sapiens
tgtcatgaggcattaaaaagcccatgatggaaagaagatagccccagagaagggattccaaattcttcacaaattcttcaacagatgagtggattaaaaaygacatctatccatagaatggaatgttatttaaccataaaaaggaatgaagttactgatacatgctgtgacattgatgacctttggaaacatgctaagtga

SEQ ID NO: 418122 - DNA, 201 bp, Homo sapiens
gttttgccatgttggccaggctggtcttgaactcctgacctcaggtgatctgcccgcctcggcctcccaaagtgctgggattagaggcttaagccactgtrcctggccaagagaaacagactttatgaacaaccacatgagacagtgagacaggtgatgaggacctaaactaaaacaatgacaagtgtggtgggagagagg

SEQ ID NO: 418123 - DNA, 201 bp, Homo sapiens
accacacctggctaatttttgtatttttagtagagacagggttttgccatgttggccaggctggtcttgaactcctgacctcaggtgatctgcccgcctcrgcctcccaaagtgctgggattagaggcttaagccactgtgcctggccaagagaaacagactttatgaacaaccacatgagacagtgagacaggtgatgag

SEQ ID NO: 418124 - DNA, 201 bp, Homo sapiens
tacaggcgcacaccaccacacctggctaatttttgtatttttagtagagacagggttttgccatgttggccaggctggtcttgaactcctgacctcaggtratctgcccgcctcggcctcccaaagtgctgggattagaggcttaagccactgtgcctggccaagagaaacagactttatgaacaaccacatgagacagtg

SEQ ID NO: 418125 - DNA, 201 bp, Homo sapiens
tgcaggtgttcctgagtagctgggactacaggcgcacaccaccacacctggctaatttttgtatttttagtagagacagggttttgccatgttggccaggstggtcttgaactcctgacctcaggtgatctgcccgcctcggcctcccaaagtgctgggattagaggcttaagccactgtgcctggccaagagaaacagac

SEQ ID NO: 418126 - DNA, 201 bp, Homo sapiens
acactcttgattacttttggttgtctttttactcttgttctaattatctttttttttttttttttttgagacggagtctcactctgtcgccaggctggagwgcagtggcgtgatctcggcgcactgcaacctccatctcccgggttcaagcaattctcctgcctcagcttcctgagtagctgggactacaggtgcccacca

SEQ ID NO: 418127 - DNA, 201 bp, Homo sapiens
agtcccagctacttgggaggcaggagaaacacttgaacccgggaggcggaggttgcagtgagccaacatcgtgccattgcactccagcctcggtgacacakcgagactctgtctcattaaaaaagaaaaaaaaaagtgcagactacataaatctaaagagacagaaagtaaattaatatttgcctgggggtggggtggcca

SEQ ID NO: 418128 - DNA, 201 bp, Homo sapiens
gcgtatcacccaaggtcagacattcgagaccggcctggctaacatgtcgaaaccccgtctctactaagaatacagaaattagccgggcgtggtggtgggcrcctatagtcccagctacttgggaggcaggagaaacacttgaacccgggaggcggaggttgcagtgagccaacatcgtgccattgcactccagcctcggtg

SEQ ID NO: 418129 - DNA, 201 bp, Homo sapiens
gcgttctccagagggacagaactctgtgtgtgtatatatatatgtgtgtgtatatatatatgtatatatatacgtatatatatatatacgtatatatatayacgtatatatatacacacatatatgtgtatatatatacatatatgcatatatatacgtatatatgtgtatatatacgtatatatatgcatatatatgtat

SEQ ID NO: 418130 - DNA, 201 bp, Homo sapiens
gaggcaggtggatcacccgaggtcaggcgtatcacccaaggtcagacattcgagaccggcctggctaacatgtcgaaaccccgtctctactaagaatacaraaattagccgggcgtggtggtgggcgcctatagtcccagctacttgggaggcaggagaaacacttgaacccgggaggcggaggttgcagtgagccaacat

SEQ ID NO: 418131 - DNA, 201 bp, Homo sapiens
ggaggctgaggcaggtggatcacccgaggtcaggcgtatcacccaaggtcagacattcgagaccggcctggctaacatgtcgaaaccccgtctctactaaraatacagaaattagccgggcgtggtggtgggcgcctatagtcccagctacttgggaggcaggagaaacacttgaacccgggaggcggaggttgcagtgag

SEQ ID NO: 418132 - DNA, 201 bp, Homo sapiens
ccggactcggtaggtggcgacgggccgtggcctgagacctccggcgaaacgcgggagcgaagggctgagtcctccctccgcgccgcggctcccgacctccmtgaggcggcgctctaggggcggtgcgcacgcgctctgggcgggaggggggcggggctcgtgggggtgggggcgggagaggagggcggggccggggctcgg

SEQ ID NO: 418133 - DNA, 201 bp, Homo sapiens
ggctcacgcctgtaatcccagcactttgggaggctgaggcaggtggatcacccgaggtcaggcgtatcacccaaggtcagacattcgagaccggcctggcyaacatgtcgaaaccccgtctctactaagaatacagaaattagccgggcgtggtggtgggcgcctatagtcccagctacttgggaggcaggagaaacactt

SEQ ID NO: 418134 - DNA, 201 bp, Homo sapiens
ccatctgggctgccctcggtcctctgaacacagagtccctgaaaggcagcagaccctctagctatggccccactggggaaggagtcagcacctcttcctcyctccacctttttcactgctctgggcctccagccactgagaaaagagctccatagcagcagggactgggccaagacttcttgaccccagagtgaacaatgg

SEQ ID NO: 418135 - DNA, 201 bp, Homo sapiens
cagcattttgggaggccaaggcaggaggattggttgagctcaggaattcgacaccagcctgggcaacatagtgtgaccctgcctctgccaaaaataaaaaygacagagagagacaatagcatgtgttggcgcaaatgcagagtgggaatgcacattgcaggtgggaatgtaaaatggtcacccagttggaaacagcatgca

SEQ ID NO: 418136 - DNA, 201 bp, Homo sapiens
gtgaagaggaacagaggtgggggcctctaaaggggtttggaagctcttttgtgttttttcaggatgaactctcctcaatcatgcttgttcactggtagagragaaaggattcgctgacagtcggaggggagatggagttcagaacacaaatgaagactgtttttccctctttagggtgaaggcagaggtgacaggcattgc

SEQ ID NO: 418137 - DNA, 201 bp, Homo sapiens
aaaccagggaagccagcagtgcagctgtcagtctgaggcctaaggcctgagagcccctgagaggtgtaagtctcagagtctaaaggccaaagaacctggartctgatgtccaagggcaaggggagaggaggccaagtgtccggcgtgacacagaacagagccagcacgcggactcagcaagctgctggtcccccttcttcc

SEQ ID NO: 418138 - DNA, 201 bp, Homo sapiens
gagagagctggggtgtgaagtagtgaaaattagaaaagtgcctgctaagtccctgacgctactaatgagtggtgattgattgatgaaagcagagatttccrttcttgcctgagagcttctagtctgttggggaagaaaagatacaccaatagcagctggctagaaggccagtttcttctttttttatttttatttttattt

SEQ ID NO: 418139 - DNA, 201 bp, Homo sapiens
tggggatccaagccctcctgtatttcaggctttattttgggtaccaagatgcaaagacaatccattaagacagttcttggccgctcatggtgactcatgcytgtcatcccagcactttaaggaggctgaggcgggaggattgcctgcgcccaggagtttgagatcatcctgggcaacaaggcaagacctcatctctacaaa

SEQ ID NO: 418140 - DNA, 201 bp, Homo sapiens
tccttggtgtctgcattcaattaacacttcagtgcatcaagtgtggaccgtcaggaaatggcctctccctggcacctagtgggtgggggagagccctctcytgccctgctcctgcctgtccaactccctataacagtttcagccaggattcctgctttagcaggagagaataaccctttctatgccaagccacaccttccc

SEQ ID NO: 418141 - DNA, 201 bp, Homo sapiens
gcgtgaacctgggaggcggagcttgcagtgagctgagatcgcaccactgcactccagcctgggtgacagagcaagactctgtctcaaaaaaaaaaaaaaaaggcaatcaacgaagatcaaccccaagaggacccagatgttggtatcaactgacaagaattctaaaagagaatcaaaataattagttaaaataaatttttt

SEQ ID NO: 418142 - DNA, 201 bp, Homo sapiens
aaaaaagaacgaaaattttaaaatatatttttacaaaacaggaaaatatgatctgtgtttacaaaaaaaggcaatgaacgggcccggcgcagtggctcacrccggtaatcccagcactttgggaggccaaggcaggcggatcacgaggtcagcagatcgagaccatcctggctaacatggtgaaaccccgtctctgctaaa

SEQ ID NO: 418143 - DNA, 201 bp, Homo sapiens
tgggaggctgaggtgggtggatcacgaggtcaggagttcgagaccagcctgaccaacatggtgaaaccccatctctactaaaaatacaaaaattagctggrcgtggtggcgcacacctgtaatcccagctactcaggaagctgaggcaggagaattgcttcaacctgggaggaagaggttgcagtgagccgaggttacacc

SEQ ID NO: 418144 - DNA, 201 bp, Homo sapiens
aggcagagattgcagtgagccgagatcacaccactgcactccaagttgggcaacaaggctagaatctgtcccaaaaaagaaaaacaaagaaaacgtgcccmcacaaaaacctgtacacaacgctcatagcagcattattcataatagccaaaaaaatagacgtaacccaatgtccatcagttcatgaactgacatgtaaaa

SEQ ID NO: 418145 - DNA, 201 bp, Homo sapiens
caagtcttgaacccttgagcctctagtcaggctttggtctccaccactccactaaaaaggcttcttgtcaaagccaccagtgatctctaggtggccaaatkcattgttaagttaggtctcagtcctgttcagcatttgatgctgtggatcactgcccctccttgaaacactgttttcatttggcttgctgaacgttctctt

SEQ ID NO: 418146 - DNA, 201 bp, Homo sapiens
agcctcccaagtagctgggattatagacgcccgccaccacgccgggctaatttttgtatttttagtagagaaggagtttctctatgttggccaggctggtstcgatctcctgacctcaagtgatcctcctgcctcagcctcctaaagtgctgagattacaggcgtgagccaccacacccatccctgctgtggaaatactct

SEQ ID NO: 418147 - DNA, 201 bp, Homo sapiens
caaaaattttgtatatatatatagttcttaacaagatacactaacagctcgtcgtttgcccaggaggctcaacctcccgcctcggcctcccaaagtgtggkgagtataggcgtgagcccccgcgcccggccaaaaaatgcccgtcttaagaacaacaaaacagcctccttcaccctcgctatcctccagttacctcctcct

SEQ ID NO: 418148 - DNA, 201 bp, Homo sapiens
cttgaaccagggaggtggaagtttcagtgagccaagatcacgccactgcactccagcctggcgacagaactagactccgccttaaaaaaaaaaaaaaaaaagattctgaatctttgggaagccctctgggctggggatcgatttgggagtcagtaccatgtggttcatagttgacgcggtagcttgcagaagccaaggaaa

SEQ ID NO: 418149 - DNA, 201 bp, Homo sapiens
atttttgtatttttagtagaggtggggtttcatcatgttggccaggctggtcttgaactcctgatctcaagtgatctgcccactttggccttccaaagtgytgggattacaggcttaagccactgcaccaggccctttaaggccttttataatgcttttgcattagtcaaaggagaaaatcatcttgaactcctgaatttg

SEQ ID NO: 418150 - DNA, 201 bp, Homo sapiens
ttgtgatggattgggtgacactattatagaggctgagaagtcccgagatttgccatctgcaagctggaagcccaggaaagcaaaccctcaggaaactcacrgacacactctaaagtgtttcaccagctatctgggaatcccctagcccaatcagtttgacacataaagttaaccatcacatttccctagctttgtttttca

SEQ ID NO: 418151 - DNA, 201 bp, Homo sapiens
agttattctatgctccacttcttttgctgtgtgtctcttgtttaaatcattttatttattattattattattattattattattattattattattattatcttagatggggtctcactctgtggcccaggctggagtgcagtggcacaatctcgactcactgcaacctctgagtcttgggttcaagcgattctcctgcct

SEQ ID NO: 418152 - DNA, 201 bp, Homo sapiens
gaccggcctggctaacatgtcgaaaccccgtctctactaagaatacagaaattagccgggcgtggtggtgggcgcctatagtcccagctacttgggaggcmggagaaacacttgaacccgggaggcggaggttgcagtgagccaacatcgtgccattgcactccagcctcggtgacacagcgagactctgtctcattaaaa

SEQ ID NO: 418153 - DNA, 201 bp, Homo sapiens
caagtgatctgcccactttggccttccaaagtgctgggattacaggcttaagccactgcaccaggccctttaaggccttttataatgcttttgcattagtmaaaggagaaaatcatcttgaactcctgaatttggatttagaaaatgagggccatagccgggcgcccttgcctgtaattccagcactttgggaaaccgagg

SEQ ID NO: 418154 - DNA, 201 bp, Homo sapiens
gaggtggaagtttcagtgagccaagatcacgccactgcactccagcctggcgacagaactagactccgccttaaaaaaaaaaaaaaaaaagattctgaatmtttgggaagccctctgggctggggatcgatttgggagtcagtaccatgtggttcatagttgacgcggtagcttgcagaagccaaggaaagcctacgcttt

SEQ ID NO: 418155 - DNA, 201 bp, Homo sapiens
agacggtgaaactccgtctcttctaaaactacaaaaaattaaccaggcgtggtggcgggcgcctgtagtcccagctactcgggaggctgaggcaggagaawggcgtgaacccgggaggcggagcttgcagtgagccgagatcgtgccactacactccagcctgggcgacagagtgagactccatctcaaaaaaaaaaaaaa

SEQ ID NO: 418156 - DNA, 201 bp, Homo sapiens
ctgtaataactgttggtagccaaggaggccacaaagaagagaggatgtttgcgtggtaagagtgtgttgccattcgccagatacgtgccagaggcaagggrcatcaaggcagtgggcacagttagatggtccactttgaaagttcgtggctgatgggatccagggatagcaagagcttattgtgaaattacaaaatgaggt

SEQ ID NO: 418157 - DNA, 201 bp, Homo sapiens
cttcttcctttccaatgtggatgccttttatttcatcttattgcctcattgccctggcgagagcctccagaacaatgttgactagaaatgacaagggcccrtgctcatcttgttcctgacttaggggaaagcttttaatctttcgcctttaagtctgatgttcgttgtgggtttttcatagatgcccttcatcaggttgag

SEQ ID NO: 418158 - DNA, 201 bp, Homo sapiens
gataatatcacactttatgcattcgtgtagtttctctacctccttcccaactcttgtctcttttttattgtaggtgtgaagtggtgtcttcagtagttttgacttgcatttcccaatggctaatgatacggagcatcttgtcatgtgcttggtgatcatttatatgtcttctttggagaactgtctattcagatcattttt

SEQ ID NO: 418159 - DNA, 201 bp, Homo sapiens
cccaggaggctcaacctcccgcctcggcctcccaaagtgtggggagtataggcgtgagcccccgcgcccggccaaaaaatgcccgtcttaagaacaacaawacagcctccttcaccctcgctatcctccagttacctcctcctcggctccggtttgcagccaaaggccttagtctaccctcactaatgccttttctcctcc

SEQ ID NO: 418160 - DNA, 201 bp, Homo sapiens
atcttttccttccaccctattaatccaggcaaacaaaaacactcttttttttttggagacggagtctcactgtgtcacctaggctggagtgcggtggcgcratctcagctcactgcaagctccgcctcctgggttcaagcgattcttctgcctcagtctccctagtagctgggattacaggcacacaccaccatgtccggc

SEQ ID NO: 418161 - DNA, 201 bp, Homo sapiens
gagatggggtgaaaccccatcatgttggccaggctggtttcgaacttctgacctcaggtgatccacccacctcagcctcccaaagtgctgggattaaaggygtgagctaccgcccctggcccacctggctaatttttaaaattttcgtagagacgggatttcactgtgttgcctgggctggtctcgaactcctggcctcaa

SEQ ID NO: 418162 - DNA, 201 bp, Homo sapiens
ccagttatttccttaagaacatgactaaaaatgagattgttggaatcaaatcataagtccatgtaaaatgtagatggccaggtagaaagggcttcctggtytgcagtttgcagcccttctggcagtgaatgtaggggcccatctccccataccttcactcatactaggcattatcagtttataaaactataatgaaactgt

SEQ ID NO: 418163 - DNA, 201 bp, Homo sapiens
gctactcgggaggctgaggcaggagaatcacttgaacccgggaggcagaggttgcagtgagccaagatcatgccactgcactccagcctgggcaacagagyaatactctgtctcaaaataaataaataaataaaaataaatgcatagaataggaagggaaatgctttctgaatatgaaaaggtagatgctgctttgaaact

SEQ ID NO: 418164 - DNA, 201 bp, Homo sapiens
aataaaaataaatgcatagaataggaagggaaatgctttctgaatatgaaaaggtagatgctgctttgaaacttgctacccattttattgtcacctaaacrtcactgtgatcagtctagagggaaagtcatagtgtccttttttctgtaaagtatgtcacagccatatatacctatgaaatgtaagagagattttaagtta

SEQ ID NO: 418165 - DNA, 201 bp, Homo sapiens
acaagaggtatggtaggaatcacgtaactagtgaacaaactgattacttcaccataataactctcatgaagagttgcctatcttgggaggttggagtgagytgagatcatgccattgcactccagcctgggcagcaagagcggaactccatctcaaaaagaaaaaaaaaaaagagttgcctatcttgaacttaaaaaaaaa

SEQ ID NO: 418166 - DNA, 201 bp, Homo sapiens
atggtaggaatcacgtaactagtgaacaaactgattacttcaccataataactctcatgaagagttgcctatcttgggaggttggagtgagctgagatcaygccattgcactccagcctgggcagcaagagcggaactccatctcaaaaagaaaaaaaaaaaagagttgcctatcttgaacttaaaaaaaaaaaacaaaaa

SEQ ID NO: 418167 - DNA, 201 bp, Homo sapiens
ggatttaaagaaatcaggaactcaaatattgaggaactaggaaacagtttttgttatttgtattaaatcttgacttcctcttccacttaggctatgaagayaattgtagctaacacacagttgcttatttaaaaaaaaaaaaaatctgtgaggcatatgtgtgtatgtatcttctctatcttccaggattcttttttaagg

SEQ ID NO: 418168 - DNA, 201 bp, Homo sapiens
cccagaaccacccgtggatttcagagtaatggagaaggatcgagctaattgtcccttctacagtaaaacaggagcttgcagatttggagataggtaactawttttgttttatcatgtcagaatgaagtgattcaaaatgctgacgtttttgagttccccttttgggagaggcgcatgtttccatttcaaatgtccgtcatc

SEQ ID NO: 418169 - DNA, 201 bp, Homo sapiens
tgttttttgtttttttttttgagatggagtcttgctctgtcgcccaggctggagtgcagtggcatgaactcggctcactgcaacctccgcctcccgggttsaagcaattctcctgcctcagcctccagagtagttgggattacagacacgcaccaccgcgcccggccatcatgacttttctctgcttcttgagagcacttc

SEQ ID NO: 418170 - DNA, 201 bp, Homo sapiens
gatcgagctaattgtcccttctacagtaaaacaggagcttgcagatttggagataggtaactaattttgttttatcatgtcagaatgaagtgattcaaaaygctgacgtttttgagttccccttttgggagaggcgcatgtttccatttcaaatgtccgtcatcagacatctgctgccttcttgctgctgctctcgttttc

SEQ ID NO: 418171 - DNA, 201 bp, Homo sapiens
ttgcagatttggagataggtaactaattttgttttatcatgtcagaatgaagtgattcaaaatgctgacgtttttgagttccccttttgggagaggcgcakgtttccatttcaaatgtccgtcatcagacatctgctgccttcttgctgctgctctcgttttcccagctgatcatcctctgctttgaccatccctgttccc

SEQ ID NO: 418172 - DNA, 201 bp, Homo sapiens
agtagagctaatctacatattaggaagttactgtaaagcatatcatttgatttttggtttaaagggaagaagaatgccaagcagccctttctctgtttaayggacgatggtatgcaggacgacagctgcagtgtgaattctgccccgtgacccggtggaaaatggcgatttgtggtaaaagacaaagtgatgatttttttc

SEQ ID NO: 418173 - DNA, 201 bp, Homo sapiens
attaatagtagagctaatctacatattaggaagttactgtaaagcatatcatttgatttttggtttaaagggaagaagaatgccaagcagccctttctctstttaatggacgatggtatgcaggacgacagctgcagtgtgaattctgccccgtgacccggtggaaaatggcgatttgtggtaaaagacaaagtgatgatt

SEQ ID NO: 418174 - DNA, 201 bp, Homo sapiens
aaaacaggcagctagcccttgctttatagcaagttatgttcttctgaggttctgctgtatatgagttgacttctttagagaataatactttgttttgtttycacatttatttaggtcataagagaactgcttatgacatgtcagcaagaattagaggatttaaagaaatcaggaactcaaatattgaggaactaggaaaca

SEQ ID NO: 418175 - DNA, 201 bp, Homo sapiens
aaaaaaaaaaacaaaacttggcatgtgtaaagggatatctgtgaaagacaggatccaaatgaggagaggaaaagtgttttaatttctgttgtcagtgagtktgcccagactcaggtacagaccgttgggttcaaaacgggcttcagtggctgccagtttgggaaagttgcttaagctctgtgtgccttcgttctctcatct

SEQ ID NO: 418176 - DNA, 201 bp, Homo sapiens
agtaatatagaacagtttctcatatttaatttcccttttataaattcagtggaagaatgaatttgaggttctacacacctaattggcaggtagactttggmaatctaaccccctctttatattagaaatttgtgatattggatgtctgagacacttgccactttaaggtaataccactcattataattggtcatataaaaa

SEQ ID NO: 418177 - DNA, 201 bp, Homo sapiens
gaggaactaggaaacagtttttgttatttgtattaaatcttgacttcctcttccacttaggctatgaagacaattgtagctaacacacagttgcttatttaaaaaaaaaaaaaatctgtgaggcatatgtgtgtatgtatcttctctatcttccaggattcttttttaaggattgatttggtatgttttgctgctattcct

SEQ ID NO: 418178 - DNA, 201 bp, Homo sapiens
ggatatgaatagtaaaattcagatgtatttaatcagaaaccatatgtcatctgtcagctttactttattcataaaagtatccatgctgtgaggtttttttycttcttcttcttctttgaaaatatatccttctctatggttctctcctttttctttttgaatttaagcgttcacaccatttttcattttttaagaacagtg

SEQ ID NO: 418179 - DNA, 201 bp, Homo sapiens
caggagtttgagaccagcctgggcaacatggtaaaacctggtatctataaaaaaaaaaaagtaaaataaataaataatatatttatatatatttatataamaatattatataaataaataataagaataccagggacttgggtggccttagtttcaaaatgtcctcaggtgtctctagtgtgccctaggattgagagccac

SEQ ID NO: 418180 - DNA, 201 bp, Homo sapiens
tgcctattttctaactaggctctttgtctttttattattgagttgtaagagttcttggtatattctccatacaagtacctggtcacaaatatgatttgcaratattttctcccattttgtaggttcttttcacttcatgttcttttgaaatacaagttgtaaattttgatgaaatccaacttaactatttttttgtttgtt

SEQ ID NO: 418181 - DNA, 201 bp, Homo sapiens
aggttttccagctgcaggatccctcatgtaggatctatctctaacatttcctccaaatttaagacccgtggtagcctgattcttgattctcaccccccccycttttttttttgagacggagtctcgccctgtcaccaggctggagtgcagtggcatgatcacagctcaccgcaagctctgcctcccaggttcaagcgattc

SEQ ID NO: 418182 - DNA, 201 bp, Homo sapiens
ggttttccagctgcaggatccctcatgtaggatctatctctaacatttcctccaaatttaagacccgtggtagcctgattcttgattctcacccccccccyttttttttttgagacggagtctcgccctgtcaccaggctggagtgcagtggcatgatcacagctcaccgcaagctctgcctcccaggttcaagcgattct

SEQ ID NO: 418183 - DNA, 201 bp, Homo sapiens
tgctcatgcagagatgagtagtgtcacaaggtgttttaagtgaatactcatagtatttgagctcactgcaatagcagcaggaggtggctatgaaattattrcagtagtgcagtgtgtactacagttaatttttttcttccttctgtacctcattggatgcgttttttccttgttttgtactacagttaatttcatgcagtt

SEQ ID NO: 418184 - DNA, 201 bp, Homo sapiens
gccgatcgtgggcatggaggatgtggtggcaggaagaaaagagaagctgggccaagctaagtgagccaccgcggcagctccattccttcctggtgcgcgcyctggtgccctccccggacttgcacgggcggctgtggctcaggcaagcgaggagaggatcaggttggcggatggagaagaactgtctgggagtgggaggat

SEQ ID NO: 418185 - DNA, 201 bp, Homo sapiens
taatgattggtgtaaaaaacttcccaccaaagaaaaatgcactgtgaattacctttcagagacaactgagactccatgtaagttcacatttgcatgggtasttgaaccaaattgcatttaaggttttccagctgcaggatccctcatgtaggatctatctctaacatttcctccaaatttaagacccgtggtagcctgatt

SEQ ID NO: 418186 - DNA, 201 bp, Homo sapiens
ggatggaaaccttggcgactgcccctggtggcagtagtgataccagataaaggaaagtgaccaggagccaagagagacatggagctcatgtctcagtaccsttgtttgtaaagtcttgattgcctgttccaacttaaatgtttgcattattaaatgaaacaatgtttatctttgaggaaaatattttaatatactttgaaa

SEQ ID NO: 418187 - DNA, 201 bp, Homo sapiens
ccaaagtgctaggattacaggcgtgagccaccgcgcctggctgcgaacatttcttacaattttcataggcatatgaaattttaccatcacaactatcaaartataacagcagtgtggagattttcatcattcaagtgataagttgtgacatgaaattctgcgaaatttgcagttacaaaatccagcaccatccctttagac

SEQ ID NO: 418188 - DNA, 201 bp, Homo sapiens
cccccaggacccattagttgaattctaatagggtgaagcttcctgccttgtctgtgatttcatcagatctgagctggaatgcctttgttatgttaaggcasggaaattgtcccataatttgggaaaagacaggaatagaaccgtgattttttttcctgcaagttgcaaatgatgatgaaaagttggaacacccccccaaaa

SEQ ID NO: 418189 - DNA, 201 bp, Homo sapiens
actgtgttgcctgggctggtctcgaactcctggcctcaagcaatccttccacctcggcctcccaaagtgctgggattataggcatgagccaccacacctgrcctgaagccattgtttgactataaaacaatatatgggctgggcgcgtggtggctcatgcctgaaatcccagcactttggaaagccgaggcagatggatca

SEQ ID NO: 418190 - DNA, 201 bp, Homo sapiens
gcaaatgatgatgaaaagttggaacacccccccaaaaatgaagatattcctgacatttaaggctatacttctatcaaccgacttcaagatttttaaaaatyctttttattttttttttcctccttaaccttttgtttctggggcatatgccttcctgtcttcacattacttgtcagcacaagcaataactgctaaagtgga

SEQ ID NO: 418191 - DNA, 201 bp, Homo sapiens
caacagttcctagacttctatgaggatgtgttgcccgagttcaagaacgtggggaaagtgattcagttcaaggtgggcatgcgtgtggaggaggggactgktttgcttcaccctgcagtacttaatggcacaagagagctgggacacaggctcagctggggtcaggcacgctagcactctataaatgtgacttccctcttt

SEQ ID NO: 418192 - DNA, 201 bp, Homo sapiens
cttattagttgaaaactcatccactagaggcagaacaaagcatcagggataaaaggaaaagtagaataggttggagttattgaggcccttattgtacttcrtctctccccccttgaaattttcagctactttactttgttcatttaatctgttttattctaaatattatatattctaaatttgttttaacttctttctctt

SEQ ID NO: 418193 - DNA, 201 bp, Homo sapiens
tacatatgtaaatattctcattcagaagtggaaaacgttagtgttaaatctgggtagtgcatatataggctgattgatatcttctgtatttttatggatgygtgaaacatttcatatttgtgggagaaaacagacctggaccaacagggatcaggcacgctgccatgtgccaagtacgccttaaatagatgcaagagtcag

SEQ ID NO: 418194 - DNA, 201 bp, Homo sapiens
caagtacgccttaaatagatgcaagagtcagctagtatctctattttgcaatctttgattggtaactactttggggaatgttagcctggacaaacaacatktgatgaatggctggtttcttttcctgaattttttatgatagcattcttcattgctccctaggtcagctgcaatttggaacctcacctgaggggcaatgta

SEQ ID NO: 418195 - DNA, 201 bp, Homo sapiens
ggtacttcatgaatactgtagactatggaacactcctggtttttttttttgagacagagtctcactctctcgcccaggctggagtgcaatggcacgatctwggctcactgtaacctctgcctcccaggttcaagtgattcttctgcctcagcctcctgagtagctgggattacaggtacccactatcatgcccggctaatt

SEQ ID NO: 418196 - DNA, 201 bp, Homo sapiens
tccagatcggactggctcctcctttgggaagaactccgaaaggagggagaggatgggccaccacgacgactactacagcaggctgcggggaaggagaaacsctagtccagaccactcctacaaaagaaatggggaatccgagaggaaaagtagtcgtcacagggggaagaaatctcacaaacgcacatcaaagagtcggga

SEQ ID NO: 418197 - DNA, 201 bp, Homo sapiens
aaacttctgatttgttacctttcagagtgtcatttattagagcacgtttgaaatcgtgggaaccaaattatgacatcaatttatgtaagccccttttacawaatacacagtagaaaatagttctagcatatccaaatatcagaaatgtaccttcggaaaaggataaagtagcatcttcagaatatgcagtgataagtgctg

SEQ ID NO: 418198 - DNA, 201 bp, Homo sapiens
ttccagtaatgttagtttcgtggtaggttagttagatcatgtttggatatctggactcatgtttatgatgctttgatttatacaacaacaacaaactttaytgatgaacaaatacaaatggtattcatgacccctgtggactggacctgtttagagtccttacagtatgtttaagcaacatcacataccgttagcctccag

SEQ ID NO: 418199 - DNA, 201 bp, Homo sapiens
ggggaatttactgcttttaaaaaacgtttgagaaccccaaagatctcaaaattgttcgaatagattttatctgtgataagaatcttctgtattaaaagcayttagtgaatttgaagcattagtgtaatgtttataatcttaaagtttaaagaaaatatagactcctctatgtttaataggccttctcttttttttttgaga

SEQ ID NO: 418200 - DNA, 201 bp, Homo sapiens
gatctttcatttatttagtagctttgtgctccagttcttttccagcacatgaattctctgtatcaggtcccctgcatatagccatccagtccttcacttaraagctgcatgtgacaaacggtgcattcccttccttcctctgtaggtggcttccgtgtgcagtgtgacacaacttcactcactaagtttgttggtgcattg

SEQ ID NO: 418201 - DNA, 201 bp, Homo sapiens
agcctccacgatctttgttttttgtatcttaggccatcagttaatttcagtgcagattttaaacacctttatttgagcacttctttccagatgaggcaagwtcatgctaggtttttagggggcagaaaaattgtttggaacttgtcatttttttatagagaggaattaattcccattttaacagtagagtgttcctcaact

SEQ ID NO: 418202 - DNA, 201 bp, Homo sapiens
ctttttgttagaaagtttaagaaaaagatttttaccataattttatacattaaagattacatgtatttttttcctgaatttttgaccaaggatttgcagcrctcagtttaataaaacatttaaattccctaggactctcacagaaggaggaagaggaggacacttttattgaagaacaacaactagaagaagagaagctat

SEQ ID NO: 418203 - DNA, 201 bp, Homo sapiens
accataataactctcatgaagagttgcctatcttgggaggttggagtgagctgagatcatgccattgcactccagcctgggcagcaagagcggaactccayctcaaaaagaaaaaaaaaaaagagttgcctatcttgaacttaaaaaaaaaaaacaaaaaactgatcttattcagtttgccagtgttttaagtttttcatc

SEQ ID NO: 418204 - DNA, 201 bp, Homo sapiens
atgaattctgggaagctaatagagacatctacttgtctccagatcggactggctcctcctttgggaagaactccgaaaggagggagaggatgggccaccasgacgactactacagcaggctgcggggaaggagaaaccctagtccagaccactcctacaaaagaaatggggaatccgagaggaaaagtagtcgtcacaggg

SEQ ID NO: 418205 - DNA, 201 bp, Homo sapiens
ttacaaaacaggcagctagcccttgctttatagcaagttatgttcttctgaggttctgctgtatatgagttgacttctttagagaataatactttgttttktttccacatttatttaggtcataagagaactgcttatgacatgtcagcaagaattagaggatttaaagaaatcaggaactcaaatattgaggaactagga

SEQ ID NO: 418206 - DNA, 201 bp, Homo sapiens
tgtcgtccaggctggagtgcagtggcgcaatctcggctcactgcaagctccacctcccaggttcacaccattctcctgcctcagcctcctgagtagctggkactataggcgcccaccaccacgcctggctaattttttgtatttttggtagagatggggtttcactgtgctagccaggatggtctcaatctcctaaccttg

SEQ ID NO: 418207 - DNA, 201 bp, Homo sapiens
aggaggttaaagctgcggtgagctgtgattgcaccactgcacaccaggctgggtgacagagtgagaccctgtctcaaaaaaaaaaaaaaaaaaaaaaaaargggagagaaagaaagaagggagggagagagaagacctcagcagattattagttctaggacttttttttctagaattttcattaaaaatataattttggtt

SEQ ID NO: 418208 - DNA, 201 bp, Homo sapiens
agaacatctttccccagaaagagagatttaaagttgttcagtttaacaaagaaaaaatggtatttttaatttaaaaattagtctaagtatctgaaatacaratagtgtaggagaaatcttgagacaatttacaaatctctattagatctgcttttcccaagaggaaaacatagagtactgctgctttatgaaatcagagct

SEQ ID NO: 418209 - DNA, 201 bp, Homo sapiens
gcctttttgaagcagtctcattgtaggaagatattgaatattgtctcctctcttttgatagtcaggacagagtgacttggagaagtgcagatgaactcccrtggctttttcagcagcagggaagtaaacagaagctgcatgattgccttcttaatctctttgtgtctcaaaacctttataaaaggtaagaaacattataga

SEQ ID NO: 418210 - DNA, 201 bp, Homo sapiens
ttcaccgtgttagccaggatgttctcgatctcctgacctcatgatccacccgcctcagcctcccaaagtgctgggattacaggcgtgagccaccgcgcccrgccatttgaggcccattcttagtttactagttcagtcatgtttttgccagccataaaagtaggcaattatgagggtgctgtcactaaaaatagatttcat

SEQ ID NO: 418211 - DNA, 201 bp, Homo sapiens
cagagatatatgttaaatatttttcttcctttgacatttgcctgaagcctttttgaagcagtctcattgtaggaagatattgaatattgtctcctctcttytgatagtcaggacagagtgacttggagaagtgcagatgaactcccgtggctttttcagcagcagggaagtaaacagaagctgcatgattgccttcttaat

SEQ ID NO: 418212 - DNA, 201 bp, Homo sapiens
tgttaacatggaaattatacatttttaaatggaattttgtttgccatctattttcaaagtctcatgagtctagtccattattttgagccaagtttaagagkatttttgagatcttttttaggtttaaaaaataaagttttatgtgctttacaatttaatgcataatttattatatttatgctcactgttggctaatgaatg

SEQ ID NO: 418213 - DNA, 201 bp, Homo sapiens
tcacgccattctcttgcctcagcctcctgagtagctgggactacaggcgcccgccaccacgctcggctaattttgtttttgtatttttagtagagacaggrtttcaccgtgttagccaggatgttctcgatctcctgacctcatgatccacccgcctcagcctcccaaagtgctgggattacaggcgtgagccaccgcgcc

SEQ ID NO: 418214 - DNA, 201 bp, Homo sapiens
agaccctttctcaccctgcaaaactgagaactgatcactacaccagtctgttgagccactcagattttatttgaatagtgatactaacatttgtgagaacrtggcttacaggtgcctactgtccatgattgtcagaacttgatagatttgtctaattttcttcacactaatctgttccctattggaggttgcaaaagaaag

SEQ ID NO: 418215 - DNA, 201 bp, Homo sapiens
ggttcacgccattctcttgcctcagcctcctgagtagctgggactacaggcgcccgccaccacgctcggctaattttgtttttgtatttttagtagagacrggatttcaccgtgttagccaggatgttctcgatctcctgacctcatgatccacccgcctcagcctcccaaagtgctgggattacaggcgtgagccaccgc

SEQ ID NO: 418216 - DNA, 201 bp, Homo sapiens
attaaattattgttgtcattgtttgaattactgaatctattcaacaaaatgtattgcatgcctgccttcctgcgcggcctacactaaacattaacaaagtwaaaaggaataaaacaataggttcatgccctgaaatgcatagaatttggatgttagagagaagacacagaatgagaaaggaataggaagcatgaacattta

SEQ ID NO: 418217 - DNA, 201 bp, Homo sapiens
aataaacccaatgactctagcagccccataaaactaccactttcctttatcatgttttattgaatttgttattggttgcagtacaaaaaatagagttcacrttgtttttaatcgatctcaaaattttcacagatgttggcaatctgtaagaaattaaatctcttctcgattccaacagtgctgggagagcaggcaatttag

SEQ ID NO: 418218 - DNA, 201 bp, Homo sapiens
ctggtaaaccaattttcagtattatccacctgttttggttttatataaggttaaaaataatattcgatacaatcgggtcctcttggtgacttgattttggyttataaaaaagtaagaatagaaatatttcccccagctctgtaactacttcagtaactacgtgtaactacttcagtttgtgtgtgttcttatcttgtagtt

SEQ ID NO: 418219 - DNA, 201 bp, Homo sapiens
ttgattgccttcagtagggtttcattgctatccaccccttcccttttctttccctgtttttatatttattaaggatatatcttatcttattacttaatgaytgagtagtttttttatcttacttggtaatatgttatttgttgttacattattttttctaattcttatctttgatccataaaaccattttgttttttcttt

SEQ ID NO: 418220 - DNA, 201 bp, Homo sapiens
ctagtaacagtttatcaaataaatatgtcctaaatttaaaaacatttaagtgacatttctattatacagctataaaataggaataattataaattcttttytgcaaatctcttgttagatgtacagtgacttacgtgaaatagaactcagtatttcttctttttctccctaggcttgggaaacagtgagattggagtacct

SEQ ID NO: 418221 - DNA, 201 bp, Homo sapiens
ttttctttctagatttactgtctaaatttaacctttccaaagcattttgcttttttaattgtggaccaactctgactttaactgtgtatagatatatgtarggccttaagtttcaccagtttccctgtagcataacccattgtagacccttaagactttgcctagtggccgggtgaacagggaactacctggtcaatgagc

SEQ ID NO: 418222 - DNA, 201 bp, Homo sapiens
ataaaggaacaggtttgtgcttacagtattggattatggtcaaatggttaccaagccaggtctaaatcttaagtatctgactttctattatactgcttctsctatgattattcataagttaatctgtttattcccatcttttaggaggatattaacattttaaagtactaatcaaagtaggttagcttagtctagaataca

SEQ ID NO: 418223 - DNA, 201 bp, Homo sapiens
tcttacatgttttataacatatcagttaagccataactactatcagcaaaataatttgtctttatgagggacaggttagtttatatgagctttaaaaatcrtgatttaacttttaacaagtaactgagcagaacatttaaaaataattattttatactgaactggttacattgattcttgattctgaaataatatactagt

SEQ ID NO: 418224 - DNA, 201 bp, Homo sapiens
gtatgataaagcagaagaactttatgaaagagctttagatattcggagacgtgcattagctcctgatcacccttctttggcatatacggtgaagcatcttrccatcttgtataagaaaatggtaagtaagctttgacattcttacatgttttataacatatcagttaagccataactactatcagcaaaataatttgtctt

SEQ ID NO: 418225 - DNA, 201 bp, Homo sapiens
tagtttttaatgaattttagaatgtgttgccatgtggaaatatttgtatttgtaatcatcaagttaatttagtgtgatgcttaaaataatagttatctagrttaaatgggaaaaaaggaagattttttaggaccctcatatattgtttcagaatcaaggattgcacctacttagtgattgcttttcatttttcatgtttgc

SEQ ID NO: 418226 - DNA, 201 bp, Homo sapiens
tctgcccaagaagggtgctgacataatgaaggagggccaatcaagagcaaagaattcctcattttgaaacctttatctggaataaaggcctctcctggacwtgccatattttagctcctatgtttcattgtaagagatttctcctgtgattcagccatgaagggaggcgggtcaaattaaaggcattaaaaagaactcctg

SEQ ID NO: 418227 - DNA, 201 bp, Homo sapiens
aatgtgaagaaagccttcccctcaaatacacaataaaagttattttaatttttttaagttgctgataaaatctaaatgtagcatatttctttaatttaaartgctgtgtgcatttttatggacctgatgtttatgtgtttacctatggggttgataaatatctgcaaattaattatattctattatttcttgaagcacttt

SEQ ID NO: 418228 - DNA, 201 bp, Homo sapiens
agttgtttaaaagaattttcctattatatggtatccaaggatgtagacacattagaattataagaagacatgaggagcaaatcatgaagagcggattggtytttgttcaacaagagctggcagagtagttaagacaaggagttcaaaaattccatgaatcttggccaggcatggtggctcatgcctgtaatcccaccactt

SEQ ID NO: 418229 - DNA, 201 bp, Homo sapiens
cctctgtgaattttgaatttttatatattaggaaagtctctctcaggttttccccccatgttatccctaacagaagagggggatgaaagcatgcctccagsggggtgagaacatggaccagggaggggccttgagctggaagtctctatgaagtttcatgtgctatcttgaaaatttatgtgagttatatattctgcctga

SEQ ID NO: 418230 - DNA, 201 bp, Homo sapiens
attggtctttgttcaacaagagctggcagagtagttaagacaaggagttcaaaaattccatgaatcttggccaggcatggtggctcatgcctgtaatcccmccactttgggagggtgatgcaggaggatcacttgaggccaggagttggagaccagcctggccaacatggtgaaaccctgtctctactaaaaatacaaaaa

SEQ ID NO: 418231 - DNA, 201 bp, Homo sapiens
tgagtttctggggaaaacttgggaaataggaattcttggactttacactgaactcacttagtttcaaaaagatctcaggcagcctaggctaacctgattgycttgagcagattgggagactccaagtccccagacaaaacctgctgttatttggaccttttctcacccccagaaactgaggtgattcccaggacaggtgtt

SEQ ID NO: 418232 - DNA, 201 bp, Homo sapiens
atctttgtttttgtttttgagacagtgtctcactctctgttgcccaggctggagagcagaggcttgatctcggctcactgtaacttctgcctcccagactsaagcgatcctcccacctcagcctcttgagtagctgggactacaagagcacaccaccatgcctggcttatttttgtatttttagtataagcggggttttgc

SEQ ID NO: 418233 - DNA, 201 bp, Homo sapiens
ccacctgcttagcctcccaaagtgctgggattacagcatgtgagccactgtacccagcctgcctgtgatatttccactgtccttttccactgttagttgtrgcaacacatctggcctctgtgaacatcagtgatacaatgagtatgattcaagagtgtgagtaatttttcatacatttaataatgttcattgaaagtattt

SEQ ID NO: 418234 - DNA, 201 bp, Homo sapiens
tatttgtgtatctaaatacagaaaagttacagtaaaaatgtggtatgaaagttttaaaacggtatgcctgtatagggcagcttcattataattttataggmtcatcatcatgtatgcagtttgttgttgaccaaaacattgttatgtgcacatgactgtatatgtattaagagtttggactctgtaagccagtcagcctcc

SEQ ID NO: 418235 - DNA, 201 bp, Homo sapiens
aataagaaccgtgtctgactcatttttatgttccataatgcatagtaattgcttaacaaataatagatttcagcatgtttattgcactgaattaaattatrtatagtaaaataaacccaatgactctagcagccccataaaactaccactttcctttatcatgttttattgaatttgttattggttgcagtacaaaaaata

SEQ ID NO: 418236 - DNA, 201 bp, Homo sapiens
ctcctgagtagctggcactacaggcaccggccaccacgcccggctaattttttgtatttttagtagagatggggtttcaccatgttagccaggatggtctygatctcctgacttcgtgaaccgcccacctcgacctcccaaagtgctgggattacaggcatgagccaccgcgcctggcctacttcttgttttattgctcca

SEQ ID NO: 418237 - DNA, 201 bp, Homo sapiens
acaaataatagatttcagcatgtttattgcactgaattaaattatatatagtaaaataaacccaatgactctagcagccccataaaactaccactttcctktatcatgttttattgaatttgttattggttgcagtacaaaaaatagagttcacgttgtttttaatcgatctcaaaattttcacagatgttggcaatctgt

SEQ ID NO: 418238 - DNA, 201 bp, Homo sapiens
tgtgtgaccttggacaagttacttactttgcctcagtttactcttctataaaatggggataataatagtatctccctcctaaggttgttgtgaagataaaytagctaatatgtgttaaatatttagaatagttcctgtcacataagcagtataaaagtatttaccaccacttccttctgatattatggtttttctcattgt

SEQ ID NO: 418239 - DNA, 201 bp, Homo sapiens
cttttcatggattaatgcctatctaaacttgggcaagatctaagccccaggcggactttggcagtttatgaaaggggttgtgaagcaaattaattgaggtsgttcttggtccttgtgaggtactagaaagatgtttagcacatagaagtaaatctttaggaagttttggctaaaataattcctatcatctgcaatgccatg

SEQ ID NO: 418240 - DNA, 201 bp, Homo sapiens
taattaaaagttttaagctgttagacttgtttcataggtcatatgatcaacaccttaatttttagcttattttaatcagagtttggcaaatatagcccaarggccaaatctagccaggagtttgcttttgtaaataaagttttattggaacacagccacattcattcattcatatatatataaatttttttttcttttttt

SEQ ID NO: 418241 - DNA, 201 bp, Homo sapiens
acaatattatttcaggtatctttgaatatcaggaggtagatatatggatatgaatttttaattgtctctgttctcaagtcctgataaactttttaattataaaaatagttctattttagatatccattagtaatctgcctttagataagcattagagtatcactacttttatttcctcagtatagctttaccctattctat

SEQ ID NO: 418242 - DNA, 201 bp, Homo sapiens
cgttggaaatctcagaaaatgcttatggtgcggaccatccatatactgctcgtgaacttgaagcacttgcaactttgtaccagaaacaaaataagtaagattttttagatcagtaatacctgattttatgcagggggattacagttttagtgtacttatagggtaagctttgttttatcactgtgtacttttccttaccct

SEQ ID NO: 418243 - DNA, 201 bp, Homo sapiens
attccagggaagcctgctttcatttagcatagttacagagctttgtagactgtctttagactttgtgggtccattactggtcatcctgacaccaaagttgttttagtaagaagggtacattgctgctatttctgcccaactttcaggtgaagtgaagtagttagaaaaatctggaagggatttggcaagaaatgagctttt

SEQ ID NO: 418244 - DNA, 201 bp, Homo sapiens
ggggttcttctttaatgcctttaatttgaccagcctcacttcatggaaggagaaaaatcccgggagaaatctcctacaacgaagaatgggaactgaaatakggtgagtccgggagaggctggctgagtaggaatattccagataaaggtttaaaaatgaggaattctttgctcatgattggccctctttcattacatcagc

SEQ ID NO: 418245 - DNA, 201 bp, Homo sapiens
gattatgtctgttttagttgtttaaaagaattttcctattatatggtatccaaggatgtagacacattagaattataagaagacatgaggagcaaatcatraagagcggattggtctttgttcaacaagagctggcagagtagttaagacaaggagttcaaaaattccatgaatcttggccaggcatggtggctcatgcct

SEQ ID NO: 418246 - DNA, 201 bp, Homo sapiens
gttggagaccagcctggccaacatggtgaaaccctgtctctactaaaaatacaaaaaaaaattagctggacctggtggcgcatgcctgtaatcctagctaytcaggaggctgaggcatgagaatcgcttgaactcagcaagtggaggttgctatgagctgagattgtgccagttcattccaccctgggcaacagggtgaga

SEQ ID NO: 418247 - DNA, 201 bp, Homo sapiens
ctcaggaggctgaggcatgagaatcgcttgaactcagcaagtggaggttgctatgagctgagattgtgccagttcattccaccctgggcaacagggtgagmctctgtctcaaaaaaaaaaaaaaaaaaaaaaagaattccatgattcttttgagctctcaagagctactttagccttgccattcctcttgcttttcagcag

SEQ ID NO: 418248 - DNA, 201 bp, Homo sapiens
ctatgaaggaggagattttgaaaaagctgctgaattatacaaaagggcaatggaaataaaagaagcagaaacatcactcttgggtggaaaagctccttcaygccattcatcaagtggagacacgtttagcttaaaaacagctcattctcctaatgttttccttcagcaaggacaaaggtaatagcagcagttagaattctt

SEQ ID NO: 418249 - DNA, 201 bp, Homo sapiens
tggtctgcttgagtgaatacactggaaaaagaggggaaatgggcaaatatttacagcttctttttctgtatcccataaggtcattttgaattggtaagagkttatattctcattttaagagtttttgttttctctctcaaagctatgaaggaggagattttgaaaaagctgctgaattatacaaaagggcaatggaaataa

SEQ ID NO: 418250 - DNA, 201 bp, Homo sapiens
acccagtgtgcatgagcattatcattttttttaataagaaaaaacacgttgaagctttgccattatatgaaagagcattaaagatttatgaagatagcctrggtcggatgcatcctcgagttggagaaacactgaaaaatttagctgtgcttaggtaagaatttttttcactttccttatacagcctcttttattcgaagt

SEQ ID NO: 418251 - DNA, 201 bp, Homo sapiens
gactctagcagccccataaaactaccactttcctttatcatgttttattgaatttgttattggttgcagtacaaaaaatagagttcacgttgtttttaatygatctcaaaattttcacagatgttggcaatctgtaagaaattaaatctcttctcgattccaacagtgctgggagagcaggcaatttagataaaatccttc

SEQ ID NO: 418252 - DNA, 201 bp, Homo sapiens
acttttttttttaagagacagagtctcactctgtcacccaggctggagtgtggtagcttgttcatatctcactgaagcctcaaactcctggactcagagakcgagcagtcctcccacctcagtgtcttgagtagctgggactacaggcacaggccaccatgcctggctactttgttaaaatttttatagagatggggactt

SEQ ID NO: 418253 - DNA, 201 bp, Homo sapiens
tattttttagtttaccagccccatactacttaagatcgcctacagatgaataagcttacttttgtcattcaatttcttgatgaaaatacaaagtagatacyctgtgacagtttattttttattagtttcttctctttgaatttccatacttaaaataattttgggagtgaactcagtggttggctccatattgtgaaatgt

SEQ ID NO: 418254 - DNA, 201 bp, Homo sapiens
ttattggaacacagccacattcattcattcatatatatataaatttttttttcttttttttttgagacagagtcttgctctgtcgtccaggctggagtgcrgtggcgcaatctcggctcactgcaagctccacctcccaggttcacaccattctcctgcctcagcctcctgagtagctgggactataggcgcccaccacca

SEQ ID NO: 418255 - DNA, 201 bp, Homo sapiens
gaaatttttattctagtaacagtttatcaaataaatatgtcctaaatttaaaaacatttaagtgacatttctattatacagctataaaataggaataattrtaaattcttttttgcaaatctcttgttagatgtacagtgacttacgtgaaatagaactcagtatttcttctttttctccctaggcttgggaaacagtgag

SEQ ID NO: 418256 - DNA, 201 bp, Homo sapiens
aggattgcacctacttagtgattgcttttcatttttcatgtttgctgcagtacggatttgcccttttacgtagacgggctttacagttagaagagcttacrttaggtaaggacacacctgataatgctcggaccctcaatgaactgggtgttctctactatcttcaaaataacctggagtgagtaccatggggttaataat

SEQ ID NO: 418257 - DNA, 201 bp, Homo sapiens
aggatgagttaaattagttaaagatgatcagatgtcagctacttaaaggactagacttgctttgttttgtcaaaatttttttaattgaacagaactttttrttagaaaaacatccatgatagactaagatatcttagtgttttgtcatattttgttttatgaaagggtttttagagattcttaatgtcatgactatcattt

SEQ ID NO: 418258 - DNA, 201 bp, Homo sapiens
aggattagtgtcaggaggagacttttttttttaagagacagagtctcactctgtcacccaggctggagtgtggtagcttgttcatatctcactgaagcctyaaactcctggactcagagatcgagcagtcctcccacctcagtgtcttgagtagctgggactacaggcacaggccaccatgcctggctactttgttaaaat

SEQ ID NO: 418259 - DNA, 201 bp, Homo sapiens
tacagcctcttttattcgaagtagctttgtcttagaatagcacaaaatatgtattactgaatgttttttcttagagtggggaggggttgttttttgctgaytgacttcaagaagtactgaagtagtatccagaaatgaaatgaagcctgcatgatctattttgcagaggagcatatgtatgcatcatggcaaacagtgaag

SEQ ID NO: 418260 - DNA, 201 bp, Homo sapiens
ttaatgaattttagaatgtgttgccatgtggaaatatttgtatttgtaatcatcaagttaatttagtgtgatgcttaaaataatagttatctagattaaaygggaaaaaaggaagattttttaggaccctcatatattgtttcagaatcaaggattgcacctacttagtgattgcttttcatttttcatgtttgctgcagt

SEQ ID NO: 418261 - DNA, 201 bp, Homo sapiens
agacacaaaaatactgatactggtagaaaggagaagagtttgggtgttgttttactggtctgcttgagtgaatacactggaaaaagaggggaaatgggcawatatttacagcttctttttctgtatcccataaggtcattttgaattggtaagaggttatattctcattttaagagtttttgttttctctctcaaagctat

SEQ ID NO: 418262 - DNA, 201 bp, Homo sapiens
cccttctcttaatttcaattcctttcattttctggtagagacaaaggagacacgttttatctgtggattatccatggacccaaaactccggtgtccatcamggacttgggaaggcagacttcccttggtgtttaatcattgcagggatgcttttctgattattcacccacgtttcagaggtgtctgaccacgcagggatgt

SEQ ID NO: 418263 - DNA, 201 bp, Homo sapiens
tttcttccagtagtttcatagtttgtggtcttacatttaagtctttaatgtatccatttgatttttgtgcatagggaaagataaaagtctagtttaattgytctccataaggagatctagttttcccaacaccattaaggagactgtcccttccccgatatatattattgctgactttgtcaaaaatgagttcgctgtaaa

SEQ ID NO: 418264 - DNA, 201 bp, Homo sapiens
gaattctatttccagggcagccataatactatgttttaacagtgcaaggtttcacgcagtattaaaatctatttcaaccatgaggaggtgtgacttctctaaaaaaaaagggcggggggtggggagtggaacacaatgactccaaaatcagaagtcacttagccaaaaacactggtcctttggtgcagtgaaccgggtaca

SEQ ID NO: 418265 - DNA, 201 bp, Homo sapiens
aacattaaaactatttttgtggccccagcttggctgtggttctaaaatgaatgtcaccatttaccttagctattgatgccacacacctcaattaatgctaytcagacccagagaatgaaaggcaatggcagaaagggaattagcaaatatgatttctaacttaattcaaattgtttttcctggggaagtatttaaattttc

SEQ ID NO: 418266 - DNA, 201 bp, Homo sapiens
ttatacaaaatgtctacaaaagccaaatctatagggacagactgtaaattagtggttgcctagggctggagacttgggggaaaatgaggactgctaatgcrtacacagtttctttttgggaatgattagaatgatctaaattcactatggtaattgatgactgcacgactctgtggatatactgaaacaactgaattttat

SEQ ID NO: 418267 - DNA, 201 bp, Homo sapiens
tgccaactgccttacttttaatcaaactagaattgaatggcagataagaaaagtggtaaatgctagtgaacaatatcttaggagataacaactaacagccrgaaatgaaaactaaagcacaaagtccaatagctgacactgtaacctacattttgagtaaaatagtcatcatttacttacactttaatgtctctccagcat

SEQ ID NO: 418268 - DNA, 201 bp, Homo sapiens
ttactattttagcttttaggcagcaaaacagctcaatggaacttcatgtaagaaatatttttaatagaattcatcatctgaacaaaatgctgacaaaccartcatacaaatattgagttaaataattacttaaaaagctcacttatattctcatactgaaaatcatatatttttaccttgagaaggtatgtggggatattg

SEQ ID NO: 418269 - DNA, 201 bp, Homo sapiens
tcagctcttaccttatatgaaaatcaactcaaggtggatgaaagacttaaatataagacctgaaaccataaagattctataagataacataggaaaaaccmttctagacattggcttaggcaaagacttcatgaccaagaatccaaaagcaaatgcaacaaaaacaaagataaatagatgggacttaattaaactaaaaag

SEQ ID NO: 418270 - DNA, 201 bp, Homo sapiens
ttgtagtattaaagtccaatgaatataaaaaagagatggaagtcaaatttctaaatgaacattaaaagccaataaatgtatatatctttatggaaatagtsattatggaaaagaagagtttaacggtcttggaaagggattggcaaactttttcagtaaaaggccaggtagtaaatattgtcatctttgcatccataatgc

SEQ ID NO: 418271 - DNA, 201 bp, Homo sapiens
tatcaggagggccctgttacgtgaggctgtgcaccgagactattccaggaagaagaggggacacttggtgggcggggtgatttcgggcagtcaggtgggckacccgcgtaggcgtctgaaaggcccgcgtcgttagggagggcaggagtggcgtctctggttacggggtcgggcaaagggcagaggtcaccgtccaggttg

SEQ ID NO: 418272 - DNA, 201 bp, Homo sapiens
tgtccctgaacaccaaagtagtgtgacctcccttcagagatttctcttggggagagaggaaggggtgggaggagacataccttttctcccacccttgttcyagcatagcatattggaatctcagggtggagaaatgtgttatttgaaaagaaggaaaaaagctcatagctggttctgatatggactaaaaggacagactac

SEQ ID NO: 418273 - DNA, 201 bp, Homo sapiens
tttcttggttgcttgagaatttggattgctactgttttcttaaggcttcaaaaccaaaacactaaacatgtactaatagagcagtattaatagcacaaagrggaatgcaaacatgacttatgagaaaagttgtatggctggcccatagctattatctcctgcccctgcagcatgtgaaggtatcaatactgcatccatggc

SEQ ID NO: 418274 - DNA, 201 bp, Homo sapiens
aatatgccttccagcattttcctaatatgtatagttggccaagtactactaagtactatcagtcaaatactattagagctcctgatgtcattgtcaatgtaaaaaaaaaaaaatgacaagaaaaaatccaaaatatctcaagattatttctattgaatagcctcagtttgtttctaatctttccacagcccatgttcacat

SEQ ID NO: 418275 - DNA, 201 bp, Homo sapiens
gtggtgctcacaacactactgggtgtggcaggggtcatgctccccattttgcaggagagaaaacagaagcttagcaagtttagttaagatacctgccaatktcactccaaccccagtgccactagagcccggccccgtggacgagaccctgtggtcttgttgctgttagcctccttcacttggaactttttatttggcaag

SEQ ID NO: 418276 - DNA, 201 bp, Homo sapiens
aggaaataaaacgttactgtgttagccacagagactgggggttgcttgttataggtgttagactttcctgataaaaccaccatttcaaaatacattaaaaktgtgtgtgtgtgtgtgtgtgtgtgtgtatgtgtgtgtgtgtctagtcagtgtaaatgaagcaacagctgggcctgggggtgggctctgcctcctgcattt

SEQ ID NO: 418277 - DNA, 201 bp, Homo sapiens
tcaggaacacttaggagatcaactccttgaggcctctaaccttcccctcccctgagtctctctagggctttgaagtgttatttgcctggttgtaagttcastttcttccaccagatctcagcatccagaggccagagctcatggcttccacaggtgctcaggcccctgcatgctggcttttggacacagcttttggtcacc

SEQ ID NO: 418278 - DNA, 201 bp, Homo sapiens
cctgcactcactcaagtcacagttctgtggatataagaatccactcatgcaacaaatatgtgccaggcactgtgcaagccactatagtgctacccaaaccracatggctcctgccctcaagatgctctagtggccgttctctatgggtctctaggagcttaatagcttcacttctgccactttcataggcaagattcaggc

SEQ ID NO: 418279 - DNA, 201 bp, Homo sapiens
tgaatactcaataaattatattatttatgcataacaatggtattattattaataataataatcccctcccctctcctcctctccttcctttcttttcttcttttttttttttttttgagacagtgtcttgctgttacctcaaataagtggaatcataccatattttttctttcgagagataaattgcttcacctttcatct

SEQ ID NO: 418280 - DNA, 201 bp, Homo sapiens
aaaaattagccaggcatggtggcatgtgcctgtaatcccagctactggggcggctgaggcatgagaatcccttgaaccaggaggaggcggaggttgcaatrtgccaagatcacaccactgcactctagcctgggcgacagagcaagactccgtctaaaaaaaaaaaaaaaacatgctcccaacaactgtccacattctctt

SEQ ID NO: 418281 - DNA, 201 bp, Homo sapiens
gagatatctacacactctctattcccttctcttccacttacccttagcccacaacgatagcctactactgaccccacaagttcatgaagaccattcccacyaagggtaaccactaaacacaccaaatgcttctctgcccttttcttacttgatgtctaaacagtatttgacatgggtgaccacttgcctctcgaaactctc

SEQ ID NO: 418282 - DNA, 201 bp, Homo sapiens
caatcaaacttgaaaagctgaaatcaagaagcaattctttcagattgtgttggttttctgaagcccccatgacctctggaataatgaaaacaatgaatgawgttggggtaaactgtctttgaacgttagcatgtaaagtctttgtgtttactctctgtggagtccactgagtctgcaatcttgggctgttcacctcccaga

SEQ ID NO: 418283 - DNA, 201 bp, Homo sapiens
tttctccacaatatttttaatgttgccagagcttaatggataagccaaagatttttaaaaccttactaggatttgggtcagatacaagcaaaaaaggtaaytgtctcacatccccattataaaagcataaatcattattaaggaaaaaatatgttgcttaaaaaactgttttctctcacagatcacccattgatgattttt

SEQ ID NO: 418284 - DNA, 201 bp, Homo sapiens
cctataaactagataagattccatgtttaacctgaaagcctagctggaaagactagtatggaactaaacttgtatctttattggaaaacaaagctgaaacragacaatggtttagagcaaaaattgatgggtggttggcatttaaaaatttgaatgtaattgctagttctctggcctcaatcacactgacggattcctttt

SEQ ID NO: 418285 - DNA, 201 bp, Homo sapiens
tctcttccacttacccttagcccacaacgatagcctactactgaccccacaagttcatgaagaccattcccactaagggtaaccactaaacacaccaaatrcttctctgcccttttcttacttgatgtctaaacagtatttgacatgggtgaccacttgcctctcgaaactctcttttcttgatggtcttttcttgtctct

SEQ ID NO: 418286 - DNA, 201 bp, Homo sapiens
taacctgaaagcctagctggaaagactagtatggaactaaacttgtatctttattggaaaacaaagctgaaacgagacaatggtttagagcaaaaattgawgggtggttggcatttaaaaatttgaatgtaattgctagttctctggcctcaatcacactgacggattccttttggcaattatcttcactaggcttgcctg

SEQ ID NO: 418287 - DNA, 201 bp, Homo sapiens
accaaatgcttctctgcccttttcttacttgatgtctaaacagtatttgacatgggtgaccacttgcctctcgaaactctcttttcttgatggtcttttcytgtctctttggccacttccctttccgttttctttcttttttaaaaaattaaggacttcatgtctaaaataccaaaagcaatggcaacaaaagccaaaatt

SEQ ID NO: 418288 - DNA, 201 bp, Homo sapiens
cagcaaaatatacttttggttaatcctaaataccaatcacatcacaccaattcagtaagctttgtctacctccaagaattgtccttctatctgtcctacasgtggaggccagtttaattaccttaattgtgccccttgtcctcctccatagggaccagcccaggtctcctggataaaaatacaatccttgaatgccggtgg

SEQ ID NO: 418289 - DNA, 201 bp, Homo sapiens
aaagtcacatattacagtaaattactgttaactaatattaactacattttcatcttttagaatttattttctctgaattaaatctaacatagattactcaktttcaaaaattatcatggtttctagactggatgcagcagtaaagaagctggaagactgacaaagggtatcttaacatctatctaaataatctaaaacatg

SEQ ID NO: 418290 - DNA, 201 bp, Homo sapiens
ggcggctcatgcctgtaatcccagcactttgggagatcgaggcgggaggatcacctgaggtcaggagttcgagaccagcctggccaacatagtcaaacacygtatctacaaaaaatacaaaaattatttggtcatggtggcacatgcctgtagtcccagatacttgggaggctgaggcaggagaattgcttgaacctgggc

SEQ ID NO: 418291 - DNA, 201 bp, Homo sapiens
aaggcttgggaggttaagtaactgactcaaaagaactcatccagtaaatgacggacacaggactgaaccaggccatccgatttctgaacccacacattccrctgctgcgctacacactgcctcccaccacagaccagctgggcttcgacaatcagttcgttttgctggtgtgtataacatcaaaagatccaatcttaccac

SEQ ID NO: 418292 - DNA, 201 bp, Homo sapiens
gctgataaaaaccttgtgccagactttaatccaagagcccaacaagtttaaacaatagtgagtttttatttaagcacatatgaaacagacatgaataccayttaccacatccttaatacgtctccataacttaaagaaaaggtagaagatgtattcacttaaatcgtttaggtggctcttttaatggataggaagatttaa

SEQ ID NO: 418293 - DNA, 201 bp, Homo sapiens
attccttattaatattatatactcccccttttctcaatataatacagcattcccacccttggtctcactaaatgctctatgttactcatatattaagttaytgaaattccattacttctaacaatttgcatgtatgtctcaaaaaggtaggcaaacgcctctatttcttatgcaaactaccgctgtagatcaagaaagctc

SEQ ID NO: 418294 - DNA, 201 bp, Homo sapiens
aagctgttcattgcagtctaaaacacagtggattctgggatgtacagaagttaattagaaagaaatgcacctgcggcgggcccgcttcggccatctctccrgcccagtttccctcggcgtgcgactgtgtgctcagcccagcaccatgggcaagtgggacaaatgggtagcctatatgaacccaacagcaatggcgagatc

SEQ ID NO: 418295 - DNA, 201 bp, Homo sapiens
tgctggttgatgtttctggttcgtaagttgtctacttctgtggtcacccttgggcggagcttggtggctcatacttcaccgaagttcagggacacttgtgmaccgaatggtaggggcagctggaagctccatcactggggagtgcctagctttacatgcagcactccagactactctgccccagtctcagtggtataaaca

SEQ ID NO: 418296 - DNA, 201 bp, Homo sapiens
tcacaggtggcccttgtgctgaatgatctgacaaaagacaagacagaatcttgtttctgcagaagcaaggcctctgcttgtcattatgatatgcacacaayggacaatcctgatggttctttgatgcttcccttttttctagaattcatgccttaatgagaagtgatagaaacaagcggcttggccctcctgccttggctg

SEQ ID NO: 418297 - DNA, 201 bp, Homo sapiens
taatatttatttgggtttaaattatctcaaaaataacagcctttatccttagaagttctagaatcctatgtcaagttttttgtgaaataaacagctcctcygtacactacctcttctggagtctgtaatcaaggataattatactatggaataaaagccaaaagttaatacaattttaatagcagcttacagactccataa

SEQ ID NO: 418298 - DNA, 201 bp, Homo sapiens
ctaatttttgtatttttggtagagacggggtttcaccatgttggccaggctggtctggaactcctgacctcagctgatcctcccaccttggcctcccaaaktgctgggattacaggcatgagccactgctcccagcgcaaacggcatcatttaaaaataacccgttattaataaagatttagaaataaatacatttatgaa

SEQ ID NO: 418299 - DNA, 201 bp, Homo sapiens
ctactggacatctccacctagatgtctgaaaggcaattccaaatcaacactgccaaattattatagaaatcttgatcaacacctcagtgtgctcacccccrcccaaacctataccccactctaatccccattctcccatctaaatacaatagtccttccttatccatgggaaacatgttccaagacctgccagtggatgcc

SEQ ID NO: 418300 - DNA, 201 bp, Homo sapiens
atatttgtaaacataattctccacttttaattttgctcctttggtatctcatattcgatgtagaaaagccataatctatcccagcattttgggaggctgargtgggtggatcacctgaggtcaggagtttgagaccagcctgacgaacatggtaaaaccccgtctgtactaaaaatacaaaaattagcctggcttggtggt

SEQ ID NO: 418301 - DNA, 201 bp, Homo sapiens
actgtagcactctttgtaagagtacctcccccactccccaaaaagttaaaaacaatcttactatctagcaccattaattaaattatgacacattcatttawcagaatccagaatcctatacaatcttttttcccgcccaaaggatgtggtgagtccacaatacacagttaactcaaagaagccaattaagaaaattaccaa

SEQ ID NO: 418302 - DNA, 201 bp, Homo sapiens
tctgaaagaaaaataatgcaaagtacaaatgtgagccatatatataatttaagattatttaacattttctaatagtcacaatttaaaaggcaaaaaaagayaggtgaaaagctaataatacatcccaatatatctaaaatattagcatttccacatgcaatcaacataaaaatcattaatgagtttttttgtactaattct

SEQ ID NO: 418303 - DNA, 201 bp, Homo sapiens
atgaaatggctcattgatgtagctaagagaagctttagatcatctgactgagtataagaccagctgactggctgggcgcggtggctcacgcctgtaatccyagcactttgggaggctgaggtaggcagatcatctgaagtcaggagtttgagactagcctggccaacatggtgaaccctcatctctactaaaaatataaaa

SEQ ID NO: 418304 - DNA, 201 bp, Homo sapiens
aaactctttctcaaaaaaaaaaaaaaaaaagataataaggaaggaactatacatggataagtatgaccaaatgttattaaatactaagaatgactatctgsggtccattatactatgttctcttgttctatgtatgcttgaaaactctcaatcaaaaaattatttttaagtcccaactaactcaacatgaagacagcagtt

SEQ ID NO: 418305 - DNA, 201 bp, Homo sapiens
aaaagcaaatgcaacaaaaacaaagataaatagatgggacttaattaaactaaaaagcttctgcacagcaaaagaaactatcagcagagtaaacagacaayccacagagtgggagaaaatcttcacaatctatacatctgacaaacaactaatatccagaatctacaaagaactcaaacatatcagcaagaaaaaaaaaaa

SEQ ID NO: 418306 - DNA, 201 bp, Homo sapiens
gaaatgactagatgactctagttaaaatttttgaaggagggattaaattaatatttcaaaacccttactctgtagataaatgtattttaatttttcccctygtatacctttatttacctggggaaggagcttttagggttagggggtggtttgctatctctttagctagcagaatagtgtgcctttgatcctcacacatct

SEQ ID NO: 418307 - DNA, 201 bp, Homo sapiens
ctagatgactctagttaaaatttttgaaggagggattaaattaatatttcaaaacccttactctgtagataaatgtattttaatttttccccttgtatacytttatttacctggggaaggagcttttagggttagggggtggtttgctatctctttagctagcagaatagtgtgcctttgatcctcacacatctgttttgt

SEQ ID NO: 418308 - DNA, 201 bp, Homo sapiens
gtgcctttgatcctcacacatctgttttgtggacacagcagccatgcttcacaggaaggtcagagctggctaccagcagtcttgccctttactgagcttartgtcatccttggatgctgtcatatgctgctttgagtgaaccagagaaacagccatttgcagcatgagaaagacccaaaagctctgggatttacttccact

SEQ ID NO: 418309 - DNA, 201 bp, Homo sapiens
cagagcaaagccctgataacattgtttaagccctaaaactattcgcaccccaagctagttctacccctggtctttactgttatatgaatcaataaattccttttttttttttttttacctgtttgattgtattttctgtcacttgcatctcatcaagttctaactgctacaattcatcatgtgattgcctttcctgaagta

SEQ ID NO: 418310 - DNA, 201 bp, Homo sapiens
aaagcagtttggagatttctcaaagaacttaaaatagagctaccattcaaccctgcaatcccattactgtgtatatacccaaaagaatataaatcattctatgaaaaaaacacatatactcatatgttcattgcagcactattcacaatagcaaagacttggaatcatcctagatgcccatcaagagtgaatctgataaag

SEQ ID NO: 418311 - DNA, 201 bp, Homo sapiens
agaaagaatttatcctatccttcctaaaggaacctgtactcaggattaccaaatagttgatcaggaaaaactctttacacaagtattccaactaataaatgaagaagaaatgacagaatatcaccattttgcaacacttaacaaattaacggatctaagcaaagacgactgaaggttgccatattatatgcctctaatgaa

SEQ ID NO: 418312 - DNA, 201 bp, Homo sapiens
gaaagaatttatcctatccttcctaaaggaacctgtactcaggattaccaaatagttgatcaggaaaaactctttacacaagtattccaactaataaatgaagaagaaatgacagaatatcaccattttgcaacacttaacaaattaacggatctaagcaaagacgactgaaggttgccatattatatgcctctaatgaaa

SEQ ID NO: 418313 - DNA, 201 bp, Homo sapiens
gccttgccctttctctagctgctgctcttctcacctacagacagcttgtggctgccctgtctctactgcgatcagcccgggttggcctaagcagcaccagytgagagcagggctcagcctttatccaggcttcaggaaagaacccctgagttaattttcttcttcctacttggagaaacaggtatttttgtctttgatccc

SEQ ID NO: 418314 - DNA, 201 bp, Homo sapiens
atgcaggggttaaacaacattactgttttggcaaatagattccacctttctcttaactgactggcaaggaaaataagaacagcatataaagttagaattcktaaaataaaaatatgataatttgatgctgaagagataaatatgagattatgagccaacaaacatttttttcctttgacccttcaagaatatgagcagagg

SEQ ID NO: 418315 - DNA, 201 bp, Homo sapiens
cacaatgaaagatcatttaagcttagtgaccctttgctggcactgaatattttatagccatagggaactcctatccattctcccagatcaagatagtaacwttttcctgtctcagtcggcaccagaccccacagtagattctgatttccttctgactatgataatcacaaacaaacccacaggaataggcagtatggaaca

SEQ ID NO: 418316 - DNA, 201 bp, Homo sapiens
ggaactcagccacactcattcatttacatattgtctgtagctgctttcatgctatgaaagcagagttgagtagttgtgacagagaccatatggcacacaastctaaaattttactatcttgccctttagaggagcctgctggaccctgaactagagtgtatttttccctaagtcctgtctgctctctagagaagggaggtg

SEQ ID NO: 418317 - DNA, 201 bp, Homo sapiens
cacctgaggtcaggagtccaagaccagcctggtgaacatggtgaaaccctgtctctactaaaaatacaaaaaattagctgggcgtggtggcagatgcctgyaatcccagctactcgggaggctgaggcaggagaattgcttgaacccaggaggtggaagttgcagtgcgccgagatcacgccactgtactccagcctgggc

SEQ ID NO: 418318 - DNA, 201 bp, Homo sapiens
aaagaatttatcctatccttcctaaaggaacctgtactcaggattaccaaatagttgatcaggaaaaactctttacacaagtattccaactaataaatgaagaagaaatgacagaatatcaccattttgcaacacttaacaaattaacggatctaagcaaagacgactgaaggttgccatattatatgcctctaatgaaag

SEQ ID NO: 418319 - DNA, 201 bp, Homo sapiens
acaaggctgtaaaaactcgcttaagaataatttaaaaacctgttagccctatatctgttaaagaaattgcatttatagttaaaaaccttccctctcgctcrctctctctcttgctctctctctctctcctctcttctcctctcctctcctctctcttctctcctctctcctctctctctcgcctctctttctctctctctc

SEQ ID NO: 418320 - DNA, 201 bp, Homo sapiens
ccatggcaaaacacgttccagagtccaaataaccaacctacacatacaatttggaatgcaacttattagtggggggctgcctgcacttgaaaaaatgcatragcttaataaacagtcctggttaccttattgtggcaccaaagcacatgcctctgaggagcccattcaaagggcatcacatcagggaaggggccagggagt

SEQ ID NO: 418321 - DNA, 201 bp, Homo sapiens
agttgtgtcttctgcaattgtgagattcaaggacttctctttacttaggatatcctttaacatttttcaatagaatcttatacaaattggcaactcttttrctggccaacaattgtctcttcacagtaaaagacctgaggaaacaataatatcattcctaatgtactataatcttctgatcttttttatttcaattattta

SEQ ID NO: 418322 - DNA, 201 bp, Homo sapiens
catcaagtacattctatctctaaagcctaaaaactatggctagaccctcctagaaaaaatgatacatttaattcttagcataggattccaaaatgccatcaccaaaataagtgactcagcccagaatgttttaaaaattacaaaattaaaatattcaagaaaatgtgtttgccagttcatgtggcgtcaactgttattctc

SEQ ID NO: 418323 - DNA, 201 bp, Homo sapiens
gttcacaatggcactattcaaaatggcactattcataatactagtgtattagtctgttcccacactactaataaagacatgtccaagactgggtagtttayaaaagaaagaggtttaattgactcacagttcagcatggctggggaggcctcaaggaacttacaatcacagcagaaggggaaacaaacacatccttcttca

SEQ ID NO: 418324 - DNA, 201 bp, Homo sapiens
gagactccatctcaaaaagaaaaaaaaattagccaggcatggcggtgcatgcttgcagtccctgctgctcaggaggctgaagtgggaggaacacttgagcstgggaggtagaggctgcaatgagcctgatggcgccactgcactacagcctgggtgacagagcaacatcctgtctcaaaaaaaaaaaaaaaagaaaagaaa

SEQ ID NO: 418325 - DNA, 201 bp, Homo sapiens
taatgttcttagacaattgtgctcacattattaccacaacactttcctaacttcactgtttgaataggaaaaaagatgccttacatgctccaagcttaatrtatctccagggaagatatatcctgacaaatgtttactaaatcaggtcacggattaatcaaatagggagttcactgaaataataaaattaatatgcttgca

SEQ ID NO: 418326 - DNA, 201 bp, Homo sapiens
tacttgccctgtatatcttaaagggctgtgagaagaagcacatgcaggcgctttgccctggggagagttacatgtagaagggactctggatggaagcaggygctctgtgaccagcctgccagtctgcgaatctatgtggctggctgcactacgttttcctgccctcctctccccagctataggaagattgttttgtaggct

SEQ ID NO: 418327 - DNA, 201 bp, Homo sapiens
attttggccagaaactaatcagtctgcaggtccttcaaacttccactgctgcccaccgctgccttcctagaacccaatctattggccctggaccaccacasaagttcgttttctgttcctcacttgccttactgccaactaaagggtcaacacgactcctgaactcttcttcagccttagcttaggacactagtgcctagt

SEQ ID NO: 418328 - DNA, 201 bp, Homo sapiens
aaataacaccacacatctacaatcatctgatctttgacaaacctgacaaaaacaagcaatggggaaaagattccctattgcatagcgttgggaaaactggytatccttatgcagaaaactgaaattgaacccttccttacaccttatacaaaaatcaactcaagatggattaaagatttaatccatcaggacacaggcatg

SEQ ID NO: 418329 - DNA, 201 bp, Homo sapiens
ctagttttgattttctacagaattgggactaaaaaaccaatttattcttacacttgtggattaaatggtaactccacagtttaattttatctgaaaggggraaaaaaactgacatctagcagttaaacatgtctttgtcactagaggcctatgacacaaatctcgatgatattttatgagaacatgtatagcttttctcca

SEQ ID NO: 418330 - DNA, 201 bp, Homo sapiens
tggtatggttaattagttcaaataagaattctgctgagagctcctttcagtaccataaaactgtcaatgcaaataagaaaataaagttgttttgttcctasgacaaaaatattttttgaatgagcactgtaatgttgtctcgtggataatattctttttaatgatagtagctacatatgcatttaccaagaacactactaa

SEQ ID NO: 418331 - DNA, 201 bp, Homo sapiens
gatccacccacctcagcctcccaaagtgctgggattacaggcgtgagccaccctgcctggccatacttacttactttattagttaggctaggttaggcaawgctgcagtaacaaatgcccctctttccctatatcaatgggagagtgtcttattacaacaataaatcatggaaagtcagctacgtgcatgaatgaccatct

SEQ ID NO: 418332 - DNA, 201 bp, Homo sapiens
aattccacttgtcaaaaagatcaacactataaaaggaattttggtatggttaattagttcaaataagaattctgctgagagctcctttcagtaccataaarctgtcaatgcaaataagaaaataaagttgttttgttcctacgacaaaaatattttttgaatgagcactgtaatgttgtctcgtggataatattcttttta

SEQ ID NO: 418333 - DNA, 201 bp, Homo sapiens
tgtcacccctggaagataggcgacaaacagatgccccttcctctggatagaggaatgtgccgaaggaaagacacaagacttggccagaagagcagctgggygagtggagcactggtggggtttcagcctccgctcaccacctcatcagtcagtaacatcatcaccaccatcaagaacccggaagaaaaactaagcctcaga

SEQ ID NO: 418334 - DNA, 201 bp, Homo sapiens
tggtactctggcttgaaactgggagtttttccctccccatgtttttatatactttccattactgtgtcaatctggagaagaaaccccaaaagaaaagagtytaagaggctactgcaagagtcctgtttcatcactagagcttgcctgccttagggacagaagagttggtggggaaaaaaaaaaaaaagattacatcctgaa

SEQ ID NO: 418335 - DNA, 201 bp, Homo sapiens
gaggaacacttgagcctgggaggtagaggctgcaatgagcctgatggcgccactgcactacagcctgggtgacagagcaacatcctgtctcaaaaaaaaaraaaaaagaaaagaaaaaagaaaaagacttaagcagatgcttcacaaattaacttacccgaatggcagataagcataggaaaagatgtttaacatcactag

SEQ ID NO: 418336 - DNA, 201 bp, Homo sapiens
gctacttgggaggctgagtcaggagaatcgcttgaacctggaaggctgaagttgcagtgagctgagattgcaccactgcactccagcctgggcaacaaagygagactccatcttaaaaaaaagacggaatggctcagattctaaatgaaataactaaaaacactttttctcctattttctaaagaaaggctttcaagattc

SEQ ID NO: 418337 - DNA, 201 bp, Homo sapiens
gaacctgggaggcggaggttgctgtgagctgagatcgtgccactgcactccagcctgggcgacagagcgagaccccgtctcaaaaacaaaacaaacaaacaaacaaaaaaaaaaagaaaaaaatatatatgattgtttatagtaatgacagaaaaagctatattgttgtgtttatattataacatatatacatgtaatata

SEQ ID NO: 418338 - DNA, 201 bp, Homo sapiens
cctgggaggcggaggttgctgtgagctgagatcgtgccactgcactccagcctgggcgacagagcgagaccccgtctcaaaaacaaaacaaacaaacaaamaaaaaaaaaaagaaaaaaatatatatgattgtttatagtaatgacagaaaaagctatattgttgtgtttatattataacatatatacatgtaatatatat

SEQ ID NO: 418339 - DNA, 201 bp, Homo sapiens
actttgttccatcacgctatttgtcaccttttgaatgtatatatttgttaagtttatgtctttattgtctgtttttctcattagacttcattaagaaagamaagaagctgggtgtggtggctcatgcctgtaatcccaacactttgggaggctgaggcaggtggatcccttgagcccgaggtgttttgagaccagcctggg

SEQ ID NO: 418340 - DNA, 201 bp, Homo sapiens
cctcaggcaaatcacttaacctttgcagcctcagtttccttacctgcaaaacaagtataaaaatatttgcaaaattcattacagggttgtgaaaaacaagrtaaatcataaaatactatacaaatgtgagttattacattaattatgagtagaaggacatattaagaaatcaagtcagcaatgacactacaatgccaaatg

SEQ ID NO: 418341 - DNA, 201 bp, Homo sapiens
ggtaggcagatcatctgaagtcaggagtttgagactagcctggccaacatggtgaaccctcatctctactaaaaatataaaaattagccaggcctggtggygggtgtctgtaatcccagctactcaggaggctgaggcaggagaatcgcttgaacccgggaggaggttgcggtcagccgagatcgcgccactacattccag

SEQ ID NO: 418342 - DNA, 201 bp, Homo sapiens
acgcacatgcagtctggtctactggaaagaaagctaggctgggtgttaagagaacatttcccagtcagtggaagaggggtggcaggaccgggggcagcccrtttggcctttccggcatccaggtttctaatctgtggaagcagggccacgttctacctcagatgtgcacccgccgagcccacactgtgtcaggcactgtac

SEQ ID NO: 418343 - DNA, 201 bp, Homo sapiens
ctttctttggttctactcaactttctcaccagttcagtgggatagcaccactctcaaagacacctgaccaggcacagtggcttgggcctgtaatcctagcrctttgggaggctgaggcaggatgactgctccgggccaggagtttgagaccagcctgggcaacatagcgagatcccatctctaaaaaaattaaaaattagc

SEQ ID NO: 418344 - DNA, 201 bp, Homo sapiens
actgagaaagaaaaggacattaaaggactcagaaaaaagagaaagatatattctgaagataaacctttatcatctgagtccttgtcagaatcagagtatayggaggaggtacgagcaaaaaagaggaaaagcagtgaagaacgagaaaaagcaacagaaaaaaacaaaacagaaaaagaagcatgagaaaaacagtggaag

SEQ ID NO: 418345 - DNA, 201 bp, Homo sapiens
catacacatatacacaaaagcatagtttttcaactaggtgacttttaaaagtcaggcagccatcttttttttttttttttttttggagacagagtctctcrctctgtcacccaggctggagtgcagtggcacggtctcgtctcactgcaacctccacctcccaggttcaagcgattctcctgcttcagcctcccaaggagc

SEQ ID NO: 418346 - DNA, 201 bp, Homo sapiens
aagggtgagcactcatgcagatgtgcaagagaaaggaaagaaaagaaaggaaagaaagaaagaggaagggagggagggagggaaaggggaaatgaaggagraaaggagggaaggaagaaaggaaaaaaacaaattgtaggaaaggtacaataaaggaagaatttgcctagaggcagtgcctcagggcaccccttctggagg

SEQ ID NO: 418347 - DNA, 201 bp, Homo sapiens
gatttgtgaaatcctatgtatgtactcagaggccacaactgttagcaagctagaactgttcaggaacttacatgattatctgaaaaatatgagaaaagggygagcactcatgcagatgtgcaagagaaaggaaagaaaagaaaggaaagaaagaaagaggaagggagggagggagggaaaggggaaatgaaggaggaaagg

SEQ ID NO: 418348 - DNA, 201 bp, Homo sapiens
actcttcattatgcccaattctttgctgggcacagataagttattcattaaacattgaaactgaactaaaatgaattgctgcaacactctagttctacagsttatcggccattatcttgtatttcaaaaggtatacaagaagctgcagtcaataatcactgatccaagcactaagacacaatgttgattctgaaataattt

SEQ ID NO: 418349 - DNA, 201 bp, Homo sapiens
cagacagaggcacctggatgtcatgtagatatcattttcttttcttgatgactgccaatttcaatgtcctctgcctataggctggatatggtcactctgayggcttatttggaggaagtaattttaaataggttttttttttagaggaaatgattatttattacatttattgaaaaactacagaataagatggaaggtaat

SEQ ID NO: 418350 - DNA, 201 bp, Homo sapiens
aaactgtggcattgttctcttgctatgcagaacagtcagtaaatcagtcaagaacatttattaaaaacccacaacgcacagatgtgcatactggacacctrgggagttatacaggaagtagaaaacatagtacctgacctcaaggcagagacagtagagaaaagaccaacacaaatcatatagaagagcaataacatcaca

SEQ ID NO: 418351 - DNA, 201 bp, Homo sapiens
tccctcagacaggaatggaaagaaacaaaagcagaaaggggagaagtttagagggaaaagggactgcctggtgtcccagaggttttccttgggtctcagtggagagagagagagagagagaggaaaaaagggaaagagagagagaagcagcggtggtgaaaggagagacacctaggttaactgagggaaatccaagtgagg

SEQ ID NO: 418352 - DNA, 201 bp, Homo sapiens
tgtctttcatctccctgaagaattagcaaaggtttgctaatgatgaagtctctgcttttgtttacttgaaaatggatttatttcacttaaattagtcaatmatctttttgctaggtataggattttaaacagttgtttagtttatcacattaaatatatcactaaactgtattctctctttcattaatgctattaagaagt

SEQ ID NO: 418353 - DNA, 201 bp, Homo sapiens
ccctcagacaggaatggaaagaaacaaaagcagaaaggggagaagtttagagggaaaagggactgcctggtgtcccagaggttttccttgggtctcagtggagagagagagagagagagaggaaaaaagggaaagagagagagaagcagcggtggtgaaaggagagacacctaggttaactgagggaaatccaagtgagga

SEQ ID NO: 418354 - DNA, 201 bp, Homo sapiens
cctcagacaggaatggaaagaaacaaaagcagaaaggggagaagtttagagggaaaagggactgcctggtgtcccagaggttttccttgggtctcagtggagagagagagagagagagaggaaaaaagggaaagagagagagaagcagcggtggtgaaaggagagacacctaggttaactgagggaaatccaagtgaggag

SEQ ID NO: 418355 - DNA, 201 bp, Homo sapiens
tcagacaggaatggaaagaaacaaaagcagaaaggggagaagtttagagggaaaagggactgcctggtgtcccagaggttttccttgggtctcagtggagagagagagagagagagaggaaaaaagggaaagagagagagaagcagcggtggtgaaaggagagacacctaggttaactgagggaaatccaagtgaggagtt

SEQ ID NO: 418356 - DNA, 201 bp, Homo sapiens
tgttttatttatttttttttggttggtattggaaagctataactgacacatattacttttgtaatacgagagacagagatagagacagacatagagatggrgagagagagagagaggcactaaggtatataagaacacagtttgattgtgaagttgagcttttttaattcccaaagactatggaactctatgttattgatc

SEQ ID NO: 418357 - DNA, 201 bp, Homo sapiens
tgttaagactacattaaaaaacccaaggtctacaaaaggtttctttcaaatataaagacacagacaggataaagaaaggatgaaaaaaatatataccatgyaaaaaatacacagaagaaagctggtgtaacaattttaatatcaaatggagcagatttcaagtcaaagaatattgccagaaatagagtcatctcataatga

SEQ ID NO: 418358 - DNA, 201 bp, Homo sapiens
aattagctgggcgtggtggcagatgcctgtaatcccagctactcgggaggctgaggcaggagaattgcttgaacccaggaggtggaagttgcagtgcgccragatcacgccactgtactccagcctgggcaacaagagcgaaactctttctcaaaaaaaaaaaaaaaaaagataataaggaaggaactatacatggataag

SEQ ID NO: 418359 - DNA, 201 bp, Homo sapiens
gtatgcttgaaaactctcaatcaaaaaattatttttaagtcccaactaactcaacatgaagacagcagttgatctcttggagtctagagttttcaaaaccwaactgacagctctcttttttgggaaccaatgcgaaatcaggatgacagatgaaattctgtgtcccctctgtttttggcaactatttgctcagggaataca

SEQ ID NO: 418360 - DNA, 201 bp, Homo sapiens
ataccacacaataatgtactactttttaaaaaatggaacacaggacacggatccttggttattaccaaaatttcctccccttgctctccccattaaaaaayccacagaggccgggcatggtggctcatgcctgtaaactgagcactttgggaggccgaggtgggaggatcacttgaggtcaggagtttgagaccagcctgg

SEQ ID NO: 418361 - DNA, 201 bp, Homo sapiens
ggaaggacaggtactatggacacacagcaggaaggtacctcaggtaccaacaattgaagatgatgctaaagaacactctttggttgatggttttcaggccrttctgatcattgtaaatccaggctgcaaatttcctttaaagctgtcctggccaggcgcggtggctcacgcctgtaatcccagcactttgggaggccgagg

SEQ ID NO: 418362 - DNA, 201 bp, Homo sapiens
aattagccaggcattttttgcgggcacctgtaatctcagctactcgggaggctgaggcaggaaaatggcgtgaacccgggaggcggagcttgcagtgagcygagattgtaccactgcactccatccagcctgggtgacagagcgagactcagtctcaaaaaaaaaaaaagctgtcctgtggtagtgaattttcagcggaga

SEQ ID NO: 418363 - DNA, 201 bp, Homo sapiens
gacaataaactatcttgacacctgggggaaattatgtaaagattttatgttattattatctataagagagcaagacatttgaaaagtatagtaagagatgytgtccaaagaaacttaaagctgtaaaataaaaaaataaaggaaagatcaacacaagcacaaataagcacaaattgcagacacattcttaatagtattctt

SEQ ID NO: 418364 - DNA, 201 bp, Homo sapiens
acaaataagcacaaattgcagacacattcttaatagtattcttgtggactgcagaagtcagcacaccttcccaagggtatattttttatcccccaatgccratgtagcactggggaaaatgaaaacagaaattaattatcttactgtgaaaaaaaaatcccattgcatttaagctcagagaggttcctctctattcaagta

SEQ ID NO: 418365 - DNA, 201 bp, Homo sapiens
ttttaaataaagtgaatatctggggggaaattaccagtttcctttctagcaaacatgtaatgctaaatgggcttcaagcatttccaaatagtaaaagacawtgcaagaattcatccacaaaaaaattccagtaacgttaatcagtctaatgttcttctgggtgcagggaatgcaaaatcctcccctgttcctaagggcaga

SEQ ID NO: 418366 - DNA, 201 bp, Homo sapiens
tattcatcttcttcttcatcaagctctgattcttccagcagttcttctgattctgaagataagggtaagaaacacggaaaactgagaaagaaaaagaaccrttcacataaatcttctgaaaggtccatgtcagaaactgaatcagacagtaaggataatttaaaaaagaaaaagaagtcaaaagatgcaactgagaaagaa

SEQ ID NO: 418367 - DNA, 201 bp, Homo sapiens
agatctaaaaaaagacaaactctgtcataggttcggcagccataaccctgttgtgtcagctgtttgaatcatgtgtgaatgagtccatgcatgctagataycaggcaatatggtagagtagaaagatcacagactttggagttagacagactagtgagaatcatagcttcatcgcttactggctatgtcaacctggctgga

SEQ ID NO: 418368 - DNA, 201 bp, Homo sapiens
accttccaaattctactactcttaaatggtattaaaatgtaacaaaatatgagaataagtatgttttagacattaaaaaaattgcagtcggttcagtggartaaccaaggatttttatcagatcattcaaatttacaacggcacagctgaaaccaattctttctctggtattgagggaaaaagggacatgtattacccaag

SEQ ID NO: 418369 - DNA, 201 bp, Homo sapiens
tgtgtaagagctttttttttttttttttttttttacttgctggacaaaatcaatcagaccattccctggcttacaaccaatgaaatcttctagctacttgkggtaatatgatcctgattctcatgtcaatacagaatatgacagttatatattcttgaggaggacatatgtcttgggcaaaatgcacaaatacctttgtag

SEQ ID NO: 418370 - DNA, 201 bp, Homo sapiens
acatcattgataacacacaacagtacaaattagaaaattttgattggcatgggtaaatgtcttaccaacattaatgggctgtaagtattactgaaacatayttttatactcttcattatgcccaattctttgctgggcacagataagttattcattaaacattgaaactgaactaaaatgaattgctgcaacactctagtt

SEQ ID NO: 418371 - DNA, 201 bp, Homo sapiens
gtgcctgcatgcacatatatgacactaatttttcaaataaattgggctatgtccagatgtggaatctcactcatataatcccagtattttgggagtctgargcaggaggattacttcaggccaggaattcaagaccagcctcagcaacacagccagacctcatctctacaaaaaataaaagaaatattagctgggtatggt

SEQ ID NO: 418372 - DNA, 201 bp, Homo sapiens
tcaacctaacaagcttccacaagttactcagctaaattgtactatttactgtgaaggtaaaaatcttgttgtcatattagtcccatttttttctttctttyttttttttttttttgagataaaaatttggtagacttggaaaagggaggaggtttcagcaaatgttttaaaaaacatatgatttactcctaacctctcaca

SEQ ID NO: 418373 - DNA, 201 bp, Homo sapiens
ggcaggataatcgcttgaacccaggaggcagaggttgcagtgagtcaagatcgtaccactgcactccagtctgggccacaggagagagactccgtctcaaaaaaaaaaaaaaaaaaaaaaaaattccaaagttctgttttaggagaatggtaatgactatattgtgtatgtgagtgtgtttcaattcttttggtaaaagcc

SEQ ID NO: 418374 - DNA, 201 bp, Homo sapiens
tgaggtaggagaatggcgtgaacctgggagacggagcttgcagtgagccgagatcatgccactgcactccagcctgggcgacagagcaagactctgtctcaaaaaaaaaaaaaaatgttgaattccttgtgatccatgatgttacaatagatagtacaggctaacaggatatactaccactcttcttcactactgtttcaa

SEQ ID NO: 418375 - DNA, 201 bp, Homo sapiens
ttttcccttgccaccctatccaaaatagctacctcatcctgcactcccaccccaacccctactccctctcttccctgctttattttgtctttttttttttwaaaaaaaattttattggtgcatatttttctttttttaaaataaaatttttatttaccattactttcaatggcaaaaactgaaattacttctgtaccaacc

SEQ ID NO: 418376 - DNA, 201 bp, Homo sapiens
tgaaccatgctcttaacaatgtagtctacagaacacaggcacagattggtctcttctaacatgattactgcttttatttacatgttgttcaacagccatcrccaaaaaaagccatcatcagactagtatctcatctcaaggagtacctaccatctctctcattatatctagagatttttgaggcaggtagtctatagatcc

SEQ ID NO: 418377 - DNA, 201 bp, Homo sapiens
atatagtcccatgtgcctatttttgtttttgctacctgtgcttttgaggccacagacttaaaatctttgcctaaaccaatgtcctgtagcatttgctctaygttttcttctagtagttttatagcttcaggtcttatgtttagtcttcactccattttgagttgatttttgtatgtgacaagagataggggtctagtttcg

SEQ ID NO: 418378 - DNA, 201 bp, Homo sapiens
gtctaaagataaaccaacagaaattgaatctggatacatctttaagatgtgatcagaaatgactagatgactctagttaaaatttttgaaggagggattamattaatatttcaaaacccttactctgtagataaatgtattttaatttttccccttgtatacctttatttacctggggaaggagcttttagggttaggggg

SEQ ID NO: 418379 - DNA, 201 bp, Homo sapiens
agttttcattgtagaggtctttcacctccttgtttaaatttattcctaggtatatttttgaagtgattataaatgagattgtcttattcttttcctcagcyacttcattattggtgtatagaaacactatttattttgtatgttgattttgcattctgcaatgttactgaatttgcttaccacagctaagattttttggtg

SEQ ID NO: 418380 - DNA, 201 bp, Homo sapiens
gttgaaccatccttgcatctctgggataaatcccacttaatcatgctacattaccttttttgatgtgctgttgggtttgatttgctagtgttatgttggtratttttatgtctgtgttcatcactagcctgccatttcctttttttgttacattcttgtctggttttggtatcagggtaatgctggcctcatagaatgagt

SEQ ID NO: 418381 - DNA, 201 bp, Homo sapiens
agctaagacaatgcatatgtatacatatgtatatatacacacacatagctacatatatcttttatacacacgtgttaggtgtgtatgtatgcacatatacwtacagcacatatacaatatgtgcatatatacatgtatatatgtatttgtctttcaaatatatacttatactgttgtgattaaaaaatacaagtatattta

SEQ ID NO: 418382 - DNA, 201 bp, Homo sapiens
agagatgcaggaaaagcattgagttggataaagctgatgagtgatcatttacgaggaaaagtaataaactctgtttattacaaggaaaagtaataaactctgtttttaagcaagagaatgatagatcagatttgtgttttcagaagactactctgtctgtaatgtggcaactagactgaagtggggaaaaaggagatgcag

SEQ ID NO: 418383 - DNA, 201 bp, Homo sapiens
gagatgcaggaaaagcattgagttggataaagctgatgagtgatcatttacgaggaaaagtaataaactctgtttattacaaggaaaagtaataaactctgtttttaagcaagagaatgatagatcagatttgtgttttcagaagactactctgtctgtaatgtggcaactagactgaagtggggaaaaaggagatgcagg

SEQ ID NO: 418384 - DNA, 201 bp, Homo sapiens
attctcctgcctcagcctcccagctagtgatccccctgcctcggactcctagagtgctgggattatagacgtgagccattgcgcccagctgaaaaaaaatktttaaacatagttacacttcctccaaattaagaataattcccaggagtacctatccctggtcccactacctatggcttgggtatctggggcacatggtcc

SEQ ID NO: 418385 - DNA, 201 bp, Homo sapiens
gaagagccatcatgcagaggctcctggtcaaagacgaatgaatttaagcatcagtaacaataactgtaatgaattaaaacacaccacattattttaaaccyaggagttaatgatatattaacaaatcaagttgtcttcagaagatgtgaaagatctacacattattttgaaaactggaaaataaagaaaaagaaagaattt

SEQ ID NO: 418386 - DNA, 201 bp, Homo sapiens
ctcttgttcttggggcttacagggtttccgtgaagctctaaaggcttttgaaatttatcacacatacctggggatactgtcaaacaattatctgaaacagyagagtaatgtagtttagcacatgggatctagagtctattcctggatttaaacactagctctgtcatttaatcttgctgtgccagttttgttatttgtaaa

SEQ ID NO: 418387 - DNA, 201 bp, Homo sapiens
gttctgacctgcctctcaaccaacaaccaacttcactgtgagccacgtgtacacacacacacgtgtgtgtgtgtgtgtgtgtgtgtgtgtgtgtgtgtaaragctttttttttttttttttttttttacttgctggacaaaatcaatcagaccattccctggcttacaaccaatgaaatcttctagctacttgtggtaata

SEQ ID NO: 418388 - DNA, 201 bp, Homo sapiens
ttcatgttttaattaaaaaatatccatttatttcatacaaaaatgtcctcatgctgcaaaatgccactaagacataatagatgtgttttactgatcagtargccagttgaatatatgcttacaattctattccccatatatgtcatgtccctaagttttccccagtcatacaacccactgaacatctctcttgagagagcc

SEQ ID NO: 418389 - DNA, 201 bp, Homo sapiens
ccagcctggccaacatagtcaaacaccgtatctacaaaaaatacaaaaattatttggtcatggtggcacatgcctgtagtcccagatacttgggaggctgrggcaggagaattgcttgaacctgggcagcagggctggaatgagccgagatcaacaatgaagaggatagaaaggagtgtgcagtttgccacagttcctact

SEQ ID NO: 418390 - DNA, 201 bp, Homo sapiens
gtacaaattacatctctaaaaataacttcatctacgcaagtgagtcacttcaacctaacaagcttccacaagttactcagctaaattgtactatttactgkgaaggtaaaaatcttgttgtcatattagtcccatttttttctttctttcttttttttttttttgagataaaaatttggtagacttggaaaagggaggagg

SEQ ID NO: 418391 - DNA, 201 bp, Homo sapiens
aatccttgaatgccggtgggggcagcccaggggaggcctaggtagcctttccttctaaggtgtggtatagcccatcaagctcaggttaaaagactagggaytgaataaagaagttgaagttcatatacacagagcatttaaggacagatgaaaaaaatcagattggaaataaaagagaaaggaaagttccaaagggcttta

SEQ ID NO: 418392 - DNA, 201 bp, Homo sapiens
gctggctgtcttagcatactcaggaccatctatttatcaaaggactaaagaaaaaaactctccaggagcacaatatttattataggattatctcagtgactcgagaaaacatgagtaaggctaaattaaaccatgtttactattacgttctattacttaaatcctgacacaaaatcagcctaagagatctggaaggtctct

SEQ ID NO: 418393 - DNA, 201 bp, Homo sapiens
ggctgaaggaaacagtatatgaggggaagcaaccgaaaaatgatctaaaagggtatgctgtggagagctcttaacgtaagaaagaagaagaggccaggcgyggtggctcacgcctgtaatctcagcactttgggaggccgaggtgggtggatcacgaggtcaggagtttgagaccatcctggctaacatggtgaaaccccg

SEQ ID NO: 418394 - DNA, 201 bp, Homo sapiens
atagacagtgctagctttgggtatgagctgcaggttttcgaagccttcagcctaccttcctggcatgaaagaacttgagtatataaaggtaaatctcaggrgaggggacgtaataggccagggtttagtgaaagctctaatattactcaaagcgctccccaaagacctgccctccaaagacttgcgcccccaaagaccttt

SEQ ID NO: 418395 - DNA, 201 bp, Homo sapiens
ttcagcaaaaatataattaagttgcagtaaacatattactataaacataatttacatcctacaacatcaaaaaacattaaaatatccagtaattttcttacacctaccttgacagtatgttgtaagctatttaaatagcaaaaatttgcaggaaacatatcaccatgaagagtgtcaccatacaagcaaatgacaaggggg

SEQ ID NO: 418396 - DNA, 201 bp, Homo sapiens
ttgtaatagaaggaaaaaggaaactgccgaggtcaaacattacagggaaggggaaggggagactaagggcgggaggttaggatggttcctgtgacactgcstatcctaatggcacgttagcataggtcatccctgtaagtgcctagagggcagaatttggggatggttcacccttagtgcccttggtgctcaccctgtcag

SEQ ID NO: 418397 - DNA, 201 bp, Homo sapiens
tcagcaaaaatataattaagttgcagtaaacatattactataaacataatttacatcctacaacatcaaaaaacattaaaatatccagtaattttcttacacctaccttgacagtatgttgtaagctatttaaatagcaaaaatttgcaggaaacatatcaccatgaagagtgtcaccatacaagcaaatgacaagggggt

SEQ ID NO: 418398 - DNA, 201 bp, Homo sapiens
cagcaaaaatataattaagttgcagtaaacatattactataaacataatttacatcctacaacatcaaaaaacattaaaatatccagtaattttcttacacctaccttgacagtatgttgtaagctatttaaatagcaaaaatttgcaggaaacatatcaccatgaagagtgtcaccatacaagcaaatgacaagggggtt

SEQ ID NO: 418399 - DNA, 201 bp, Homo sapiens
gcaaaaatataattaagttgcagtaaacatattactataaacataatttacatcctacaacatcaaaaaacattaaaatatccagtaattttcttacacctaccttgacagtatgttgtaagctatttaaatagcaaaaatttgcaggaaacatatcaccatgaagagtgtcaccatacaagcaaatgacaagggggttag

SEQ ID NO: 418400 - DNA, 201 bp, Homo sapiens
ggaaccaacccaaatgtccaacaatgatagactggattaagaaaatgtggcacatatacaccatggaatactatgcagccataaaaaatgatgagttcatktcctttgtagggacatggatgaaactggaaatcatcattctcagtaaactatcgcaaggacaaaaaaccaaacaccgcatgttctcactcataggtggga

SEQ ID NO: 418401 - DNA, 201 bp, Homo sapiens
gagaattgcttgaacccgggaggcggagattgcagtgagccgagatggtgccactgcactccagcctggctgacagagtgagactctgtctcaaaaaaaawaataataataaaataaaataaaaataacaaaataaaaaaatatttgcaacaattcacatttggacctgtgagtttgtataagcctgcttcccctcatcct

SEQ ID NO: 418402 - DNA, 201 bp, Homo sapiens
attaagagtccctttcccattgtgaacaatgtagggaaagacaacgagtacagggagtaagaggacagactatggtttgaagctaatccagatttgaatcyaaattcaactacttaatgtttgactcttagaaatatttaagttccctggtcctcagatttctcatctataaagagaggccactaatgtctattttggact

SEQ ID NO: 418403 - DNA, 201 bp, Homo sapiens
aatgatggaattaagtggaaaatgctttcaatagggaagattctcagtatttatctccttaattccttaagtctatgcttaagattttatttaaaaaaaamctcaagtctgaactatgtatcgccaaggatacacctattaataagagaaaatacttctggttagatcataatggttcatttacataactattctcaattg

SEQ ID NO: 418404 - DNA, 201 bp, Homo sapiens
aatctagccctgaaccaacaggagcctggccagacctattaagagtccctttcccattgtgaacaatgtagggaaagacaacgagtacagggagtaagagracagactatggtttgaagctaatccagatttgaatccaaattcaactacttaatgtttgactcttagaaatatttaagttccctggtcctcagatttctc

SEQ ID NO: 418405 - DNA, 201 bp, Homo sapiens
ctacacagcaaaagaaagtatcgttggagtgaacaggcaacctacagaatgggagaaaatttttgaaatctacctatctgacaaagggctaatatccagartttacaaggaacttaaacatatttacaagaaaaaaaacaaacaaccctatcaaaaagtgggcaaaggatatgaacagacacttctcaaaagaaggcattt

SEQ ID NO: 418406 - DNA, 201 bp, Homo sapiens
ctaactcacaagcaaggaagttgctctccttggtgatcccaaacacttccccagtggctggcggggtaattggaacccaagcttgaacactcgattgttcttttttttttttttttttgagacagggtctcattctgtcgcctaggctggagtgcagtggcgcgatctcggctcactgcaagctccgcctcccgggttcac

SEQ ID NO: 418407 - DNA, 201 bp, Homo sapiens
tacacaaaagaatctgctcacaacggcaggaacgggcatacacatatacacaaaagcatagtttttcaactaggtgacttttaaaagtcaggcagccatcttttttttttttttttttttggagacagagtctctcgctctgtcacccaggctggagtgcagtggcacggtctcgtctcactgcaacctccacctcccagg

SEQ ID NO: 418408 - DNA, 201 bp, Homo sapiens
ggttattcacttgcagcactgtttatgatagccaaagactggctatcataaatcattcccctacaaagggtgatttaagaagctatgatacaacacataayagactaataggcattgtgaaaaaaaaaaaaaaaagaagagggagctacgtagtggtatgaaaagattgccaagatgcattgttaagtaaaaacactgaga

SEQ ID NO: 418409 - DNA, 201 bp, Homo sapiens
ttaacatcccaagctaccaatttcgactgccatcaactcatcgtcaaacagactaggtttctttttattaataaagagcatttattaataattaatatttkaaaaatcccttaatagaaggctgccaatatgcaatcttcattaaccagggaaggctgatatttccctacaagtatatgaaccttttctacctactaccct

SEQ ID NO: 418410 - DNA, 201 bp, Homo sapiens
ctatcaccaaagagaaaagcatcaaggtgattttgtaaagcgtatatcttataaaatgtgaacagacaaaaagtaaaaatttaaacaaatgattgctttaycactaaaaacaaactggactattgctgacctactgctgaacctggtctgagtgattcactagtcaaatgttaaagggaacagccttgctctagaagccaa

SEQ ID NO: 418411 - DNA, 201 bp, Homo sapiens
tttacaaggaacttaaacatatttacaagaaaaaaaacaaacaaccctatcaaaaagtgggcaaaggatatgaacagacacttctcaaaagaaggcatttrtttggccaacaaacatatgaaaaagagctcaacatcactggtcatcagagaaatgcaaatcaaaaccacagtgagataccatctcatgccagtcagaatg

SEQ ID NO: 418412 - DNA, 201 bp, Homo sapiens
gatggtgagcattttttcatgtgttttttggctgcataaatgtcttcttttgagaagtgtctgttcatatccttcgcccactttttgatggggttgtttgkttttttcttgtaaatttgagttctttgtagattctggatattagccctttgtcaaaagagtagattgcaaaaattttctcccattctgtaggttgcctgt

SEQ ID NO: 418413 - DNA, 201 bp, Homo sapiens
actgcagccttgacctcccaggctcaagcgatcctcccaccttagcccccttgtatgctggaatacaagtgcatgccaccatgcccagttaatttttatayatttttattttttgttgtagagacagggtctccttatgttgcacaggctgctctctaactcgtgggcccaagtgctccgcccaccttagccttccaaagt

SEQ ID NO: 418414 - DNA, 201 bp, Homo sapiens
aatgattttccattatctatcaaaactgtgaaacatgagatttatacaatcagcaaaagcaggtgacggcccctaaaaagacacactgcatgcacacacasacgcacacacacacacacacacatgcacagagaaagagagagagagagagagaaaaacgtgatgtttttgtttttatagaggccatactttgaaatttaa

SEQ ID NO: 418415 - DNA, 201 bp, Homo sapiens
ggaatcctttgtagtatagccagggtcctcactggaagcaaatgatgcttcctggcttctgccaacttctctactcataaaagtttttagagaaagaatcyggagtgtggagtttcccctactgccctaagtgtgctcttaatacatttgataagcttcctctgggcttacttaaagtatcaatttttgccaagacaatcc

SEQ ID NO: 418416 - DNA, 201 bp, Homo sapiens
gattttccattatctatcaaaactgtgaaacatgagatttatacaatcagcaaaagcaggtgacggcccctaaaaagacacactgcatgcacacacacacrcacacacacacacacacacatgcacagagaaagagagagagagagagagaaaaacgtgatgtttttgtttttatagaggccatactttgaaatttaacct

SEQ ID NO: 418417 - DNA, 201 bp, Homo sapiens
catgagatttatacaatcagcaaaagcaggtgacggcccctaaaaagacacactgcatgcacacacacacgcacacacacacacacacacatgcacagagaaagagagagagagagagagaaaaacgtgatgtttttgtttttatagaggccatactttgaaatttaaccttacttttattctttcttacctaaacacaaa

SEQ ID NO: 418418 - DNA, 201 bp, Homo sapiens
gagatttatacaatcagcaaaagcaggtgacggcccctaaaaagacacactgcatgcacacacacacgcacacacacacacacacacatgcacagagaaagagagagagagagagagaaaaacgtgatgtttttgtttttatagaggccatactttgaaatttaaccttacttttattctttcttacctaaacacaaatat

SEQ ID NO: 418419 - DNA, 201 bp, Homo sapiens
cattttgagttaaactttacatggaaatatatatatatatgtcaacaaatatatatatatgtcttttcaaggcatggattgaagtttcttttcttttctctttttttttttttttttttgagacagagtctcactctgttgctcaggctggagtgcagtggcacaatctcagctcagtgcaagctccgcctcccaggttca

SEQ ID NO: 418420 - DNA, 201 bp, Homo sapiens
cattctcctgcctcagcctcccgagtagctgggactacaggcgcccgccaccacgcccagctaattttttgtatttttagtagagacaaggtttcaccgtmttagccaggatggtcgctatctcctgacctcgtgatctgcccgcctcggcctctcaaagtgctgggattacaggcatgagccaccgcaccaggccttttc

SEQ ID NO: 418421 - DNA, 201 bp, Homo sapiens
gaagagacatcatttcacagtaatgcaggggttaaacaacattactgttttggcaaatagattccacctttctcttaactgactggcaaggaaaataagarcagcatataaagttagaattcttaaaataaaaatatgataatttgatgctgaagagataaatatgagattatgagccaacaaacatttttttcctttgac

SEQ ID NO: 418422 - DNA, 201 bp, Homo sapiens
ctgaggcaggcgaattgcttgaacctgggaggtggagattgctgtgagcccagatcgcaccactacactccagcctggcaacagagcaagactcagtctgaaaaaaaaaaaaaaaaaaaaaaaaaaaaaaaaggccaggtgcagtggctgaagcctgtaatcctagcactttgggaggccaaggtgggtggatcatgagga

SEQ ID NO: 418423 - DNA, 201 bp, Homo sapiens
gagacgatgggttttctaaatatccaatcatgtcatctgcaaacagaggtaatttgacttcctctcttcctgtttgaatactctttatttctttctcttgcctgattgccctggccagaacttccaatattatgttgaacagaagtggtgagagagtacatccttgtcttgtgctagttttcaaagggaatgctgccagct

SEQ ID NO: 418424 - DNA, 201 bp, Homo sapiens
aaaccactcagtgggtatatatggctatacaggcgctattacatagtatgtcgaaaatcaagtaagtgcttctgtgtttgtttgtttgctggccttaaacwcctgggctcaagtgatcctcctgcctcagcctcccaagtagctgagactacaagcatgaagtacacccacctaagtaagcaccattttaaaatggtatta

SEQ ID NO: 418425 - DNA, 201 bp, Homo sapiens
acttgggaatcttacccctaggcacaggactctggtgaactgctcccagatatgacgggaagaatcaaaggctgactattaaaaagtaaggtacagaaacrcagagagggatgaaggtagttttaaacaattacgcggataccaactactgccaaacacatgcacacacgtgtgcatgcactggataattgggaagcaatg

SEQ ID NO: 418426 - DNA, 201 bp, Homo sapiens
cgtaagcatttattgctatacactttcctcttagcactgcttttgctgtatctcataggttgtggtgtgctatgttttgatttttatttgtttcaagaaaytttgtgatttcctccttaatttcttccttgacccagtggttcttcaggagcatgttatttaatttccatgcatttgtacagcttctgaagttcttcttct

SEQ ID NO: 418427 - DNA, 201 bp, Homo sapiens
caaacaaacaaacaaacaaaaacccaatcattttctgggtttctttcaggatgtaaaacccttccagattattaccttttacctaactaaattctggcaatttttttttttttttcccggcggggatggagttttgctctgtcgcccaggctggagtatagtggtgcaatctcgactcacaacctctgcctcctgattcaa

SEQ ID NO: 418428 - DNA, 201 bp, Homo sapiens
acctcaggcaaatcacttaacctttgcagcctcagtttccttacctgcaaaacaagtataaaaatatttgcaaaattcattacagggttgtgaaaaacaadataaatcataaaatactatacaaatgtgagttattacattaattatgagtagaaggacatattaagaaatcaagtcagcaatgacactacaatgccaaat

SEQ ID NO: 418429 - DNA, 201 bp, Homo sapiens
ccagtggaattttcaagtgagaagaggtgatagtggtaacaggtttagacctcacacttatgaacaagtcaggattcttgctttgtagattttaatttggratagctttatattacagtgttgactaaagttaaaccgccttgatttgttatgattgtctaataaagaaacttctgatggtgtgctaaagaaatgaagttg

SEQ ID NO: 418430 - DNA, 201 bp, Homo sapiens
tttttatcaccaaggaatgtcgagttttatccaatgctttttctgcatctatttagagaatgatatggctactgtccttcactctgatgatggctatatcrtatcttttgatttgtgtatgttgaaccatccttgcatctctgggataaatcccacttaatcatgctacattaccttttttgatgtgctgttgggtttgat

SEQ ID NO: 418431 - DNA, 201 bp, Homo sapiens
acaaagcaaagagaaaaattaaaacaatacataatcacaccactccagagaaaaccactattaattttgatatacagatttcctttttaatttccagcacwtgcatgtatatattatttatataatcagaatcaagctgtatatattgtttttaaagtctgttttaataaattatcaccctcacttatcttttgtttgtaa

SEQ ID NO: 418432 - DNA, 201 bp, Homo sapiens
caagtgatcctcctgcctcagcctcccagggactacaggcacgccctactacgcctagctattgtttttgtttgtttgttttagtacagataagccttgtyatgttgcccaggctggtctcgaactcctggggtcaagtgatcctcccagcttggctgcccaaagtactgggattacaggtgtaagccaccccacctggcc

SEQ ID NO: 418433 - DNA, 201 bp, Homo sapiens
gacactgccatatcctactctcatagaaagtatatgctaataagagacaatgcaataataatataagaaagaaacagaaatatcataatgtcaaagagcaygacaatggacgagggcagacggcaggtggcaactttagggcaatcggggaaagcctctctgtggaaataaatttaaactgagactcaaatgataaagtgg

SEQ ID NO: 418434 - DNA, 201 bp, Homo sapiens
aatctatttctaaataacataatttatttacctgcatcttttacttttaaaaaatatccactaatttaaatactatttttagccaattctctaaaatagaygattcaaaacagccacaatagtaacaagggcccacacttccccagacagagtgcggggcgggcctgcggggaagcagggccagggtgcctcatggtccag

SEQ ID NO: 418435 - DNA, 201 bp, Homo sapiens
tatcctactctcatagaaagtatatgctaataagagacaatgcaataataatataagaaagaaacagaaatatcataatgtcaaagagcacgacaatggaygagggcagacggcaggtggcaactttagggcaatcggggaaagcctctctgtggaaataaatttaaactgagactcaaatgataaagtggagccaaacat

SEQ ID NO: 418436 - DNA, 201 bp, Homo sapiens
agcgatttttcccaaagtttaattcacttataataattttattttaatatggaaaactcacttctaaatgactttcacagttactattttagcttttaggyagcaaaacagctcaatggaacttcatgtaagaaatatttttaatagaattcatcatctgaacaaaatgctgacaaaccagtcatacaaatattgagttaa

SEQ ID NO: 418437 - DNA, 201 bp, Homo sapiens
acatggaatcagaggctcatggaagcatcaattcagacctggctgtattacatttgtgactaatctaatatttctactaaacacactttatagctgtaagkacggactctgtgagagtactgtattccactttttgtttctcacttttaaagggacatataaaaatggaaatgttgagacaatgacaactatgattaagca

SEQ ID NO: 418438 - DNA, 201 bp, Homo sapiens
tttgagtccttcttggactccatagcagacagagctcacagctctttccactgggctgctatggttctacgtgcacacctctattacaaaattcatcatgytgtccaagttagttacttctgtgcctgactctgccagtagactctactcttcttgagtgtcggacatcttcaatcttattccataacctcccatcctgac

SEQ ID NO: 418439 - DNA, 201 bp, Homo sapiens
aatgttatagcttaaaggcctcaggaaagcatctccacctgagtttattcttacatattctaacatggtagatttaaatcatcctttgaaataaaaacagccccctgcagaactaggcttatcacttattcacagtgccatgtaaataatccagttgtcaccccatgcaaacctgcccactctctggtgaggtgtcagtgc

SEQ ID NO: 418440 - DNA, 201 bp, Homo sapiens
taggtagcaaatgctaaaagttttaattttaagaaagggaccaaatgttatcaaagcatttccaactatcttgctctaatttattgttattctcatgcttdtattagtaattagttttaactcactattgaagaattactgtagaaaaacttcactgtagagagggaagggatgcttttttcttttcttttcttttctttt

SEQ ID NO: 418441 - DNA, 201 bp, Homo sapiens
aaaaagggacactctcccctcttccaaactgtatgattcccctcatcaggcaacaaggaactaatactcggggtttacaggaaccaggggatgggccagayatggagaaagagacgcctctggccttgggggctcgttcttgagggaatcagcgtgatggggatgagaagggcatctttggaacgggggccttctccatag

SEQ ID NO: 418442 - DNA, 201 bp, Homo sapiens
gatgcaggtgctgtgaggaccacactcggagcactggtgtgtgacctccatggtccggagccccctccaaggaactagtgggtagcatgtaagaccaaggmctttggaagctaacagatctgggtttgaatcctgttattgccacatactcattgttgacctctgacagttacttaacatctgtgtgccttaatatctcca

SEQ ID NO: 418443 - DNA, 201 bp, Homo sapiens
tcaaaaaggtaggcaaacgcctctatttcttatgcaaactaccgctgtagatcaagaaagctcctatatagtatccactgagttcttggtagcttctttastgttcagtttcttaccagatccccaaatagacatctccatataaaagcttaataattttttaattttttttttttttgagacagggtctcgttctgtcac

SEQ ID NO: 418444 - DNA, 201 bp, Homo sapiens
tctctcattctgcagtaataggggtaaaaactgcttcctaacatcagaattatgttagctatcgagagcaagaaaaaagttaaaagtgtgttcttatttargcaaatatcaataaatatgaacaacagaattcttgcaaaaatgatcatccattatatatcctttataacaaatgttcccaatctgttggcctcatggcat

SEQ ID NO: 418445 - DNA, 201 bp, Homo sapiens
tttacacacaatgggaatggaatcacaggttaacaattagaacagttaagagtatgtgagtaaggtacctaattatatctagacctttgctttcttttagrtttctctctatattaattatttaaaatattaatatctaaccttagagtttaagattattttactaaataattttatttccaaaaaggaaaatctccctcc

SEQ ID NO: 418446 - DNA, 201 bp, Homo sapiens
gcagtaataggggtaaaaactgcttcctaacatcagaattatgttagctatcgagagcaagaaaaaagttaaaagtgtgttcttatttaggcaaatatcartaaatatgaacaacagaattcttgcaaaaatgatcatccattatatatcctttataacaaatgttcccaatctgttggcctcatggcatcatgggggttt

SEQ ID NO: 418447 - DNA, 201 bp, Homo sapiens
ccctttttcctcaggccacaccttccacagggaatctgaagatcaggctaaagtccaaagtctctattatcgtcaaagttcccacctccaatttgtaagaygacaatcctagcagattgctaataggtaatcataaccttctccacccagtgcagctactatagaaaacatgacctcagaggtaaaccaaataatcatcat

SEQ ID NO: 418448 - DNA, 201 bp, Homo sapiens
gaagtctcctggctctctatttcttgctgaattacacacaaattcctcaggctggcattcaggttcccaagggtacctatttatctttgagctttatttcytctgtggcaacttggcagctttgcaaataactgtcctatcctttcctacctttgctagaatataggtaccatgaaaacatagattcgtgtctatattgtt

SEQ ID NO: 418449 - DNA, 201 bp, Homo sapiens
atgcctagttcacatgtcccttctgtctggaatgaccattctctcctttacctcctggaaaacttgtattctttcttcaatgtcttattcagatgtcaccytttctttgagtccttcttggactccatagcagacagagctcacagctctttccactgggctgctatggttctacgtgcacacctctattacaaaattcat

SEQ ID NO: 418450 - DNA, 201 bp, Homo sapiens
gtttgggacctaattgagcttagacttaagaccatattaatttcataggaagagcttcactgaagctcaaatggtgggctctggtatcagacatacattgyaaggaacttgggcaagttaatctccctgtgctttcttcatctgtaaagtaggggtaataatagtacttaaattattttttattttatttttatttttgag

SEQ ID NO: 418451 - DNA, 201 bp, Homo sapiens
ttttgtatttgactttgttgtagctgtctatttttgctgctatcaaagcttgtttatccatagcagcctgtctaccttgaatctgttgtctcatatatgcyaggagtgtaaaaataagctaactaagtttgccaaggcagtataaaacaaaatggctgactgcattttaaaaatggggtgtttggctcttcagacttcctt

SEQ ID NO: 418452 - DNA, 201 bp, Homo sapiens
atacaaattaaagcaagatatcgtaatgattggcaaaaatgataaatttgggtaatacaaagtattggcaaggatgtaggaggacaagcattggcaagtgytgctggtgggattctaaactggcgcagcctttccggaagggcaatctggcagtgctctaaggacgttcaccctggcaagctaagacaactgcgctgctta

SEQ ID NO: 418453 - DNA, 201 bp, Homo sapiens
ttggcaaggatgtaggaggacaagcattggcaagtgttgctggtgggattctaaactggcgcagcctttccggaagggcaatctggcagtgctctaaggaygttcaccctggcaagctaagacaactgcgctgcttattaccatgggaatggaaagaagagtgtggtggatgcctgctatggaaccccacatggcaatcag

SEQ ID NO: 418454 - DNA, 201 bp, Homo sapiens
tttctttttcatatttaaagatacactatggacaagttaaataatgccatttcctcccccagctgcatgtgctgaatgaacaaaagccccaactaaaatgktcccatcgcataaactagaacaacattactaagtccaacttgggtaagtccaatttacccagctgtttctgaagcaactagatgttggaattaaagcaga

SEQ ID NO: 418455 - DNA, 201 bp, Homo sapiens
gtgaagtgacttaccagcctcgggtcacctggctagagtgagaggtagaaaccagcgccagaacacagaagtcctgacttcactggctggcgctcttcccyagtctcacggtctttccaagagagaagcacagctctttccaagcagctttctaactgctcaggagagggtgatgtctacgaactggtcctccttcaagag

SEQ ID NO: 418456 - DNA, 201 bp, Homo sapiens
ttaaatttatactaatttagggcacaggaagcagtatataatatagtgaatcatgtttcaaatggaaagcaaacaaaagagtgtccaaatgtttcatcctrtatctatcagagtccatttctggtgctaaataaaataattaaagatctctgccctcagtttaccccaagtgcaaaatgaaaatagtacctcactcaacag

SEQ ID NO: 418457 - DNA, 201 bp, Homo sapiens
atcactaaggggtcattcatccagcaggcaaggaccatggatgccagatgtccaagaatgcactggaccatatcacaaaacaaaatgagtacaacatccaygttgagacatgtgtcctattactaaaataatttcctaaagggaggccgggcgcagtggctcacgcctgttatcccagcactttgggaggccgagacgggt

SEQ ID NO: 418458 - DNA, 201 bp, Homo sapiens
aaaaatgtaagtacatagagaataaatacataaggcaaatggggcaaaatgtaaacaattagggaatctgtgtaaaaggaataagacagttccttgttctrttcttgcaactttttctcttttaagtttaaatatcaacataaaaagttacacaaaaatccctgtaaactaccctttaaatttttatgtttatattagatc

SEQ ID NO: 418459 - DNA, 201 bp, Homo sapiens
ctgcgatgggcagatcctccagaccctactctcttctgctcctagtccaatttcaggtttaggttattcagaaaacttccttagtttcagtactcccttcrggggtcctgaacacttttaaatctgaactgaactgaaaagtcccatattagcttttcttaaaattcctagaaatggctgaaaattttatacatgagagtt

SEQ ID NO: 418460 - DNA, 201 bp, Homo sapiens
cagagtcactcaatagttgcagccactcaacattctacagtggccccactgatggtacatcctttcatattttattcaccactcatgtttccttgtctgtrattcatgttcatggttttttgctcactgtctatcagattttttgccattttcttaattttaaagagttctttattttggatatgaatcctgtgccaatta

SEQ ID NO: 418461 - DNA, 201 bp, Homo sapiens
ttggggaaaactgggagtaactgcaaagggtgtgggatatcttttctggggtgaggaaagtgttctaaaattgattgtggtgatggctgcacaactctgcraatatactgaaaaccactgaactgtacactttaaatgggtgagctgtacaggaattatagctcaataaaactactaacaaataaataaaagaataggctg

SEQ ID NO: 418462 - DNA, 201 bp, Homo sapiens
atttaaactgagactcaaatgataaagtggagccaaacatgtaaagaggtggagaaatgaccttctggcagagcgaatgtgaagtacaaaagccctgaggyggaaatgaggctgaagtgtttgaaacacagaaaggggccagtgtggccaaagtggtgggtatcggggaggtgggagaagaaagagtcaaatgtccaggaa

SEQ ID NO: 418463 - DNA, 201 bp, Homo sapiens
gcccactgacaatatatttctctatttatttaggtcttctttaatttatcttttatactttttggtatatgggttttgtacatcatttctcaaatgtatamctgagtacttcatatttttgatgctattttaaatggtgtttaatggcctatcctctgttcaacaaatattttctgtgcaactaccatgtgccaggatcca

SEQ ID NO: 418464 - DNA, 201 bp, Homo sapiens
atggaatcagaggctcatggaagcatcaattcagacctggctgtattacatttgtgactaatctaatatttctactaaacacactttatagctgtaaggamggactctgtgagagtactgtattccactttttgtttctcacttttaaagggacatataaaaatggaaatgttgagacaatgacaactatgattaagcact

SEQ ID NO: 418465 - DNA, 201 bp, Homo sapiens
agattgtaactgtgcaagagggagctatttatatgattttgaacgaagcttgaggcatattctggtgctttttaacttctatgttaggtgaaaaagctgcytacaaaagccttcctcccacccaaaatactagctgttagttggtgactgatcctcagaaatattaacatgaatcatatatgctcttttcacagtgcaaaa

SEQ ID NO: 418466 - DNA, 201 bp, Homo sapiens
gaaacaacaggataggaggaattagagacttagagttcagacttcaagatagtacaaagaaataaatgctagaacttgaagatggaagagatataggtagaaaaaaaagaaatatgcctgagagatgcaggaaaagcattgagttggataaagctgatgagtgatcatttacgaggaaaagtaataaactctgtttattac

SEQ ID NO: 418467 - DNA, 201 bp, Homo sapiens
aagcatttcaacagctacacagctagaatatctctagtatgtcattcagagcacatctgcaatcccagtcaatccttgtagaaaactggaatcatcaagayacaatacagaaagacatctagcaatatggctaactggataacctagagtcctcctgcaacaaaacactaagaggtgttgaataaattttttttatttttt

SEQ ID NO: 418468 - DNA, 201 bp, Homo sapiens
tcgcccaggctggagtgcaatggtgcgttcttggcttactgcaacctccacctctccgttcaagcgattctcctgcctcagcctcccagctagtgatcccyctgcctcggactcctagagtgctgggattatagacgtgagccattgcgcccagctgaaaaaaaatgtttaaacatagttacacttcctccaaattaagaa

SEQ ID NO: 418469 - DNA, 201 bp, Homo sapiens
acctctccgttcaagcgattctcctgcctcagcctcccagctagtgatccccctgcctcggactcctagagtgctgggattatagacgtgagccattgcgmccagctgaaaaaaaatgtttaaacatagttacacttcctccaaattaagaataattcccaggagtacctatccctggtcccactacctatggcttgggta

SEQ ID NO: 418470 - DNA, 201 bp, Homo sapiens
tccgttcaagcgattctcctgcctcagcctcccagctagtgatccccctgcctcggactcctagagtgctgggattatagacgtgagccattgcgcccagytgaaaaaaaatgtttaaacatagttacacttcctccaaattaagaataattcccaggagtacctatccctggtcccactacctatggcttgggtatctgg

SEQ ID NO: 418471 - DNA, 201 bp, Homo sapiens
aagaattagacaataaagaatgggttttttttggttaatgtttactttcaaatgtgtgcttgctcaaacttctaaatggaggttcagggggcagggagaaragtgtctgcatagggtggggagaatagtgtatttcaaattcgcagacttgtcggaagactgatagtaaatcagagcccttttcctcttctacatggtaac

SEQ ID NO: 418472 - DNA, 201 bp, Homo sapiens
gcctcagcctcccagctagtgatccccctgcctcggactcctagagtgctgggattatagacgtgagccattgcgcccagctgaaaaaaaatgtttaaacrtagttacacttcctccaaattaagaataattcccaggagtacctatccctggtcccactacctatggcttgggtatctggggcacatggtccacagcagg

SEQ ID NO: 418473 - DNA, 201 bp, Homo sapiens
actttaacggaccctgtgggggaggtaaataaactcaatgttctggtctaaggagcagcctgagcaaggtatggaagtgaaaaaaatacaagatgtgttcrggaaatcacaaaattctgcttggctggacaacaggatacacgtagagtccagcctagggtggaaaagtgaacaggactgtaacacggaatctgaatgcca

SEQ ID NO: 418474 - DNA, 201 bp, Homo sapiens
ttttaaaaaatggaacacaggacacggatccttggttattaccaaaatttcctccccttgctctccccattaaaaaatccacagaggccgggcatggtggytcatgcctgtaaactgagcactttgggaggccgaggtgggaggatcacttgaggtcaggagtttgagaccagcctggccaacatggcaaaaccctgtctc

SEQ ID NO: 418475 - DNA, 201 bp, Homo sapiens
gggaggtaaataaactcaatgttctggtctaaggagcagcctgagcaaggtatggaagtgaaaaaaatacaagatgtgttcgggaaatcacaaaattctgyttggctggacaacaggatacacgtagagtccagcctagggtggaaaagtgaacaggactgtaacacggaatctgaatgccagatggagagctgtgcattt

SEQ ID NO: 418476 - DNA, 201 bp, Homo sapiens
ccaaaaattctaataatcttaggtaaattaccatactcttcatccacattgcctggccttcctccctaaagttcagagtggacctgctttaggttttttayaggttttgtgaggacaggtgggggcaggggaggtgttgtcactagaacagattctaaatacaggtaaggcattaaaaagttctcctttttcctttccttt

SEQ ID NO: 418477 - DNA, 201 bp, Homo sapiens
ctaatctctcaagggcaacacaggcccaggctcaggcttccctggtatttagtcactggagctaaaggcaagggggagaaggaaggacaggtactatggayacacagcaggaaggtacctcaggtaccaacaattgaagatgatgctaaagaacactctttggttgatggttttcaggccgttctgatcattgtaaatcca

SEQ ID NO: 418478 - DNA, 201 bp, Homo sapiens
acagaatgccttaaacccagggtgacaattaattttaggtttctgctacagtgtattttcctttggcccttagtaggtatctctaaaaatgagcagaaaaygcaacttgtaaaaggcagtgaaagtcaggaaagagaggtaatatacaaagccaggagtcaggcaaggggaggctggagccaaatagctgaaaaatgtaag

SEQ ID NO: 418479 - DNA, 201 bp, Homo sapiens
ttctcagcaaggacattacaggactggaatttacttcaaaggacagtgacagttccacatggataaactgaaataggaaggaactagaagttaagagcccytcaggacccatggcaactggaagactgaactaggtaatgatagtaggcatgacaagactcagagacattgtggagagtgggtttttagtccaaaacaact

SEQ ID NO: 418480 - DNA, 201 bp, Homo sapiens
tacacatgaggaaactgaggctcagtgacacatgacttgccgaggtcacatgtttattaagcgtcagagccagagccctagaccaggccttcagatccctyggtgaaggcagagttgggcccacttagcacggtgcataaatccagcaccttgcctaccacctagggctcaagaatgtagaggttcaagagtgcagagata

SEQ ID NO: 418481 - DNA, 201 bp, Homo sapiens
gaccaatcaccaaaatatctatctacacacaaatattctgaagggttttcatattgaatgaacacaaaaatctaaaattttaaaatatcatgctccataawctgtttttttcaaggaataatatatgatgatattatagttaatgaatccttaaaagctctcaaaataatttcctttagctttaaaacacattaaattggt

SEQ ID NO: 418482 - DNA, 201 bp, Homo sapiens
aatacctaaaattgttgtaactttcctatttctaaatgagggtctaaatgtatgacaataggtttccaagctttgcacaactcgtgcacaattcacttttyaaaacaatggcattttagacagatgtcagccattcaaactttgctttgtctgaagactttcctgttaggccccatctatcctgctcactcggttgtgagg

SEQ ID NO: 418483 - DNA, 201 bp, Homo sapiens
aaaattatagtatcaccattttgcaacccccagtgaattaatggatctaggtactatgcaccaacagctactaccaccgcaataaacaagtgacaatcacrcaatatgtgccttcggataaaagaacacatcaccaccaataacactgccaaaggaattgaactcagatctaattaagcctttccatccagctgccaattg

SEQ ID NO: 418484 - DNA, 201 bp, Homo sapiens
atatgtcctggctttgccactcccagtggttgacttaactaccaatgcctcagtttcctcacctataaaatgacgggactgctatggaggaaatttgccaycaaaattacaaatgcatttccgttgacctggcaatcctaccactgggaactggtcctataaataatatcagcatacagaggaaacaatgcatttacaagg

SEQ ID NO: 418485 - DNA, 201 bp, Homo sapiens
catgagaaaattcatcttcagttttcagtaccacctgatagtttctaagaggtgcatagcagtgggcctagagatgaagccagatggaaatgatctagcawtgtgcaatgggcagtgccctgaggaaaacacccacaaggggtggatggcctcaattctcatctccatgacgatagatcacattaccttagagccttgggc

SEQ ID NO: 418486 - DNA, 201 bp, Homo sapiens
tatttcattagatcttgtacatacacaattacagtgtctgtaaacaaaggcagttgtacttcttcctttccaatcattatgtcttttatttattttttctygtcttatggcattgattacaaagttgaatagaaaagtcataagagtgtacatccttgcctttttcctgatttacttggtcataatgcattatgattacct

SEQ ID NO: 418487 - DNA, 201 bp, Homo sapiens
cttttacaatatcttttggtaagttactaggccaggcactgatttagagacttaggatacaatggtgaataaaagaggctgcctctcctcttagtgcttaygatttgtcacatcaaggcaggtacacacacacagatgaacatggcctgctagtggctacagaatccccacaagatatgtatcgagatgacagtgggtata

SEQ ID NO: 418488 - DNA, 201 bp, Homo sapiens
agactcctgatagagccaaatgttaagagtttggccaaacttgttcttcatttttttctttcctttatattaaaaagccacctaaacacaacagaagagcttttaagcaaaattaacaatggtctcctggtgacaactaaggccacaaacaaaaggtttcttcttatgcaagcggaatattagggcaccatgtaacaccta

SEQ ID NO: 418489 - DNA, 201 bp, Homo sapiens
actgaaatcccagaaagtggaaaagaggatggaggtactactgtaaatggcgcaaacatctacccagttacttaagccagaaaccaagtggtcatccttgwtttctctctgttggtatttaattttcttgatataatcatgaattttatgaaaactatgttcaacattgtcctgtctttccaagatattgtcactctagag

SEQ ID NO: 418490 - DNA, 201 bp, Homo sapiens
gaggatggaggtactactgtaaatggcgcaaacatctacccagttacttaagccagaaaccaagtggtcatccttgttttctctctgttggtatttaattktcttgatataatcatgaattttatgaaaactatgttcaacattgtcctgtctttccaagatattgtcactctagagaatcaagaaaaggaagtctgataa

SEQ ID NO: 418491 - DNA, 201 bp, Homo sapiens
acaaaaatctacttgacaattaaattatgaaaacatacatctatgcagctatcaagcaacacagactaacatggatcttaaggtatttgactttaaggcastaagtccttacacttaaaaccacaaaagtagaaccaatacatcatatctaaattatctggaaactcatagggctgggggagggagtacacgaattcttct

SEQ ID NO: 418492 - DNA, 201 bp, Homo sapiens
ctcacgcctgtaatcccagcactttgggaggccaaggtgggtagatcacctgaggtcaggagtttgacaccaacctagccaagatgatgaaaccccatctytactaaaaatacaaaaaattagccaggcatggtggcggacgctgtagctactcaggaggctgaggcagtagaatcgcttgaacccagaaggcagaggttg

SEQ ID NO: 418493 - DNA, 201 bp, Homo sapiens
actggatctgtacttagggctcaatgcctagtagccgatgaccatcctttaagactcagctcaaatcacacctcttctgtgaagtcttcccttccttaacwcagcaggagaaatttcccagtgactacaacattggctttggtattcaggtattgtactatttttataaccaaaataccagtatttctgttggtggagtag

SEQ ID NO: 418494 - DNA, 201 bp, Homo sapiens
aagagaaataaggcatagaacttccccaagactcaaaataaatttaagacagaacttaagggtcaaacaagtttaagaaacatgtaccagtgagatttgarttatcacagatttatatacatcttctttctaaatgtgtattttctgcctaaaaaggaagctagataaaaacactgagatatcactaacttaagtggctag

SEQ ID NO: 418495 - DNA, 201 bp, Homo sapiens
atttgaatttgggttctactggcataaagacatcacaatgtgttatggtaggaatatggtaggaatgaaataaaatctaagcagaagagatagtcaagaayaaggaaagtgacataagtaacaccttggtctcactgctaagaggtctgtctcataatgacactggtcatttcagtaattaggttatttcctcttcataaa

SEQ ID NO: 418496 - DNA, 201 bp, Homo sapiens
cctgggcaccaagaagacaagagtgtcatgaataaaaacaggctgtaaagaagaaacattagcttattgggggaatgatgagtttagtttcaggccctttraatttgaggtgtcaactgaacacacagatagacatgtctatctagtggttagagaagcagatctgtaagcagggagaaatgctgagattagaaatgggga

SEQ ID NO: 418497 - DNA, 201 bp, Homo sapiens
ttagcatcagaaataattcaaaatatgaaggaaatgtatctacctgggcaagtgagttgttctgatttttaaaaaacagcagcaaggtaatgttgatatcyaccacagtccccaaaaagcattgattacattattatttctccatggagatttgtctaacaaagtgtaattgaagccaatattaaaatttgaatactttct

SEQ ID NO: 418498 - DNA, 201 bp, Homo sapiens
catgacacacgagaaataaactgaatcatgtatggctaaaaatcttaaattttagagaggtcattagtctataagtcaagtaatatgttaaatattcattmctttgacaagcatttatcatctaaaatatataagtattcaaatatttctgtaactctgaacatcaagttaatatgaagttgaccacataggcaaatttta

SEQ ID NO: 418499 - DNA, 201 bp, Homo sapiens
gaacttcatctcttgtataaacaacctattttagctttttcacactcaattaatttcgctgtagtgtcatgattcagattccacagtagaactaaatttcyacatgcaatccatcaggatgaatgggctcagtgtgtgatattaaataatgccaataaaagtccaagtacttcagtcatagtcaattggttatagccttac

SEQ ID NO: 418500 - DNA, 201 bp, Homo sapiens
catctaacaagaggttaatatgtggaatatataaagaattcaagccactaaatagaagaaaataatccaattaaaaatgagtaaaagacctaaagagacayttttcaaaagacatataaatggtcaaccagtatatgaaaaaatgttcaacatcactaattatcaaggaaatgcaaatcaaaaccacaatgagatatcatc

SEQ ID NO: 418501 - DNA, 201 bp, Homo sapiens
aggccgggcgcggtggctcacacctgtaatcccagcactttgggaggccgaggtgggtggattacctgaggtcaggagttcaagaccagcctggccaacayggtaaaccccatctctactaaaaatacaaaaattagccaggcgtggtggcacatgcctgtaatcccagctacttgggaggctgaggcaggagaattgctt

SEQ ID NO: 418502 - DNA, 201 bp, Homo sapiens
tctgagaagctaacattacagatgattactgtaaccactaatggcagcatttggaaaacaggggatggttacagcatagtaggggacatttaaaaacgtayaagtatacattttcagggctctgtatctgcaccatttgaaactgcaaaaggctaaaatgggaggaaagataccgaatctgataaagctaaagaagactat

SEQ ID NO: 418503 - DNA, 201 bp, Homo sapiens
ggcatgggagccttctagagcaaatgaacgaggcgggcattgtggtatggatcatgcagtggcacatacctcagaggctacctagtctacagattaaaatktcaaacttgagttcaaccccaaagaatacatatatatctactgcctgcgcccggggaaaaatacttgagtccttttaaatgacaaaagtaatagaaaagc

SEQ ID NO: 418504 - DNA, 201 bp, Homo sapiens
tagagggttgggactttatgccaatgtgtaggtagaatggagaaggtgatacatgctcacaaatgatggcatgggagccttctagagcaaatgaacgaggygggcattgtggtatggatcatgcagtggcacatacctcagaggctacctagtctacagattaaaatttcaaacttgagttcaaccccaaagaatacatat

SEQ ID NO: 418505 - DNA, 201 bp, Homo sapiens
gagctgtgcatttacttcgcttggcaacagagaggcattgaagcttctcagcaaggacattacaggactggaatttacttcaaaggacagtgacagttccrcatggataaactgaaataggaaggaactagaagttaagagcccctcaggacccatggcaactggaagactgaactaggtaatgatagtaggcatgacaag

SEQ ID NO: 418506 - DNA, 201 bp, Homo sapiens
caattagagggttgggactttatgccaatgtgtaggtagaatggagaaggtgatacatgctcacaaatgatggcatgggagccttctagagcaaatgaackaggcgggcattgtggtatggatcatgcagtggcacatacctcagaggctacctagtctacagattaaaatttcaaacttgagttcaaccccaaagaatac

SEQ ID NO: 418507 - DNA, 201 bp, Homo sapiens
gcaacagagaggcattgaagcttctcagcaaggacattacaggactggaatttacttcaaaggacagtgacagttccacatggataaactgaaataggaargaactagaagttaagagcccctcaggacccatggcaactggaagactgaactaggtaatgatagtaggcatgacaagactcagagacattgtggagagtg

SEQ ID NO: 418508 - DNA, 201 bp, Homo sapiens
taaaatgtagggttccctcccaaaccttccctccgcccaccccagagtaaatcagtttcaaatgtatttatcacaaagaatacaaggctgtttaaggaagyagtcaatagggctttttaagtggtgagccaattagagggttgggactttatgccaatgtgtaggtagaatggagaaggtgatacatgctcacaaatgatg

SEQ ID NO: 418509 - DNA, 201 bp, Homo sapiens
tctcagaccccaatttatcctggcacttactaccccagactctggaagcctagccaaagttcccaaagtgatttcagacttcattgggttaaggccaacaycaccacttacaatcttaagcacaaaatacaaaaggccataaaacaccatatgcaagagcactttgtaatgttaaaaggctcataaactgtttaattaaaa

SEQ ID NO: 418510 - DNA, 201 bp, Homo sapiens
ctgatttttcttttatatttaatgttgttttatgtatcatacttaagaaatttttgctaagcccaaattcactaagattattttcctatgttctcttctaratgtttgtcatagtttgaatgtttgtgtctctcccaaaatcatatgttgaaatcctaaccctcaggtgatggtattaatggtattagtaagtagaacctt

SEQ ID NO: 418511 - DNA, 201 bp, Homo sapiens
atcatacatctatctgagacggaactgatattcagaacccaaaaagaaatcatacaatgaataccaaaaaaaaacttttttaatgggcaaaagacttgaayagacatttctccaaagaagatatataaatggccaagaagtacatgaaaagatgctcaagcctgtaatcccagcactttaagaggccaaagtgggaggact

SEQ ID NO: 418512 - DNA, 201 bp, Homo sapiens
gcagggtttcaccatgttagccaggatggtcttgatctcctgaccttgtgatccgcctgcctcggcctcccaaagtgctgggattacaggcgtgagccacygcgcccagcccactcaattgttcttgaaagggcacacctgagttaattttcctgacaaagatgtgctgaccttccagttactctttttttctttattttt

SEQ ID NO: 418513 - DNA, 201 bp, Homo sapiens
gtaatttcagtaaaatattaatgtatttaagatgctatattcccaataataagtgatacaataaataatacagtatgcctccaaagcttgctatgttcatmtgtattagtgtactttgcatttagttgctgtatttagtggtcaaaataattaatgtgctagagaaaaagtcaactgtaagccatagctgcttttgtatta

SEQ ID NO: 418514 - DNA, 201 bp, Homo sapiens
tggacaaagtaacaatgtcctctgattttttactgatccaactaactgaaaatttgagttatcttcagaatagtttttatttgtataaccatctaccatayttgttttaaaaaacagtatctccaattatctaacatgtagttaggaattacttatcaataacatactactgttgcccctctgagatagaattcttaagaa

SEQ ID NO: 418515 - DNA, 201 bp, Homo sapiens
gtgaaattatgacatttttgacgagagacccagccacgctaataaatgcatatgtattaaatactaatctttgctcttccaggagctgatcactcaccacrccctgaattctctagacacacaactaagctttggtactccacccgtttactgtgtagctttccaaccccgaggcctgcctgctggtctttagcttgcctt

SEQ ID NO: 418516 - DNA, 201 bp, Homo sapiens
ttaagccaagattgccagccaataagtgaaggaacagggggcttctgatgccatgtattaatatgccttttctattaatccacaagtcacaacttgccatrtttgttctgatccctcttactttgaggaaattaaggagatgagccacatttcatttatgctgacagcctctgaagcacctagcaaagggcctcacatgtg

SEQ ID NO: 418517 - DNA, 201 bp, Homo sapiens
taagtgaaggaacagggggcttctgatgccatgtattaatatgccttttctattaatccacaagtcacaacttgccatatttgttctgatccctcttactytgaggaaattaaggagatgagccacatttcatttatgctgacagcctctgaagcacctagcaaagggcctcacatgtggttgattctcattgggtttctg

SEQ ID NO: 418518 - DNA, 201 bp, Homo sapiens
gctttaagatataaaaagtaaaaattagcagaaggggagaaacagacgaatccaaaaccccacaggtgaaaatgttaatacctcctttcaataactgatayaatagacataaaaaaacagtaaagagctaaaagatttgaataacactaacaagtaatttaacttagttaatgtatatatagaacactataccccaaaact

SEQ ID NO: 418519 - DNA, 201 bp, Homo sapiens
ggggaaaaaaaagctaaaaggatattaatggacaactgggtatatataaatatggaccacacataagatgctactgtaaccatgttacatttcttgagtaygatcatggcattgagattctataggagaaaaatgttcttttcttgggagatatgtagtgaagtacttaggggtgaagtatgaaaatatttgcaacttact

SEQ ID NO: 418520 - DNA, 201 bp, Homo sapiens
aataggattagcgtccttataaaagaggcctgagggagctcgtctgccccttttcccttctgccatgcaaggacacagagaaggcatcatctatgaggaaygggccctcaccagacacaatctaccagagccatgatcctggactttctagccatcagaactgtgagcaataaacttctgctgtttataaattaccaagtc

SEQ ID NO: 418521 - DNA, 201 bp, Homo sapiens
ggaatatttatcaagatagatcacatgctggtctacaaaacaattctcaacaaattccaaaggcttgaaatcatacaggttatgatctctgaccaaaacckaattaatataaatcaataagatatttagaaaagtctttctaaacacttgaaattcaagaagcacaactataaataacccatggttcaagaagaaatcaca

SEQ ID NO: 418522 - DNA, 201 bp, Homo sapiens
ctattacatgcgttctaatgaaaagaaaattatttatcagtaataagtataaaaactgtaaacacataaatcaaggctacaagagagggaacaagcccccygtaacttgacacagactctacaatgatgacactgttcactgatttagcaaactatatatataaagtttaagtaaataatgaaaggtaaatttggatttga

SEQ ID NO: 418523 - DNA, 201 bp, Homo sapiens
cagggcagccataatactatgttttaacagtgcaaggtttcacgcagtattaaaatctatttcaaccatgaggaggtgtgacttctctaaaaaaaaagggsggggggtggggagtggaacacaatgactccaaaatcagaagtcacttagccaaaaacactggtcctttggtgcagtgaaccgggtacatggacagggagt

SEQ ID NO: 418524 - DNA, 201 bp, Homo sapiens
ggagggtaaaccgataccactttaaaaaagcttgtcaccttctcataaagttaatcacatatgtactcccactcccaagtatttacctgaagaaaggaaarcacatgtctacaaaaaggcttggtcatagcagctctattaataaaatcctcaacctggaaacaacacaagtatctacacatgggtgaatggattaataca

SEQ ID NO: 418525 - DNA, 201 bp, Homo sapiens
caaaaaataaaaaataaaaaaataaccaggcatggtggcaggcacctgtaatcccagctactcagaaggctgaggcaggagaatcgtttgaacctgggagrtggaggctgcagtgagccaagactgcaccactttgctccagcctgggtgacagagtgagactctgtatcaaaaaagaaaaaaaaaaaaaaaacagaaact

SEQ ID NO: 418526 - DNA, 201 bp, Homo sapiens
aacaacacaagtatctacacatgggtgaatggattaatacattatattcatataatagaatattactcagcagtaaaaaagaaatgccataacagatacattttttttttttttttgagatggagtctcgctctgtcacccaggctggagtgcagtggtgtgatcttggctcactgcaacctccgcctcctgggttcaaca

SEQ ID NO: 418527 - DNA, 201 bp, Homo sapiens
atatgataaacaaaaatataatccctagggaaaattaaaataattcagataacagaagaaaacattttttttgaatctctaaattttattctttgaaggawtttaaaggacctatattcataaaataagaacaagatgctgagaatgagaaacagtgcaagaaagagttcctagaaattaagatacctaattgtgactgta

SEQ ID NO: 418528 - DNA, 201 bp, Homo sapiens
atgccataacagatacattttttttttttttttgagatggagtctcgctctgtcacccaggctggagtgcagtggtgtgatcttggctcactgcaacctcygcctcctgggttcaacagattctcctgcctcagcctccggagtagctgggattataggcttgtgccagcatgccctgctaatttttgtatttttagtaga

SEQ ID NO: 418529 - DNA, 201 bp, Homo sapiens
cagtagatgagaaagtttagcaaattgctagagacagaaggcagatggaagtgtagtacttgacaagatagggcagaggaaagctttgacctgtaataatktgaggaagaggctactgatgaggaggaagccatctgtcctagtaaacccataaaagtttctagttatccagtgtaaggggaggcaagaatgagacacagg

SEQ ID NO: 418530 - DNA, 201 bp, Homo sapiens
ccaggcccacgatatctctctatgcccatggaggagatggtgggaatgcaagccttctcttggtaatttttacccagtgtggatggggctattggtctctmctgagcctctccctgtcaaatgcactgcatggggcttgggacttcctagaaagagccatagcagaaaccaaaaggagtacaagcctcagctagggcaaga

SEQ ID NO: 418531 - DNA, 201 bp, Homo sapiens
tggaagaaaggcgtgggcattcctgaggctttactttccccggaaaattactgcaccataatttgtgagtttatttcttccaactaagaaatagaggcaakaaagagggagtaacccgaagtgaagggctctaggatccagggaccaccagccagctcaagttggatttcagcagtcggggctgcctggggcgtgcaaaag

SEQ ID NO: 418532 - DNA, 201 bp, Homo sapiens
tgacctccaggactcaagtgatcctactgcctcagccacccaagtagttaggactataggtgtgtgctaccatgtcagcaattgttttttcattttttcayagagacagggtcttgctacattacccagactggtctcaaactcctggcctcaagggatcctcctgcctcggcctcccaaagtgctgggattataggcctg

SEQ ID NO: 418533 - DNA, 201 bp, Homo sapiens
tttaaagtccatcatgatattcttagattctactccaattttgggttggcactcctaacttcaaattataaacatactggctaggcatccttctggaaacytccctttatgacaatttataaacaataaacaatcttgggtgcaataatttaaacaataatgtctaaccaataataatatgaacttaaacattcatcacaa

SEQ ID NO: 418534 - DNA, 201 bp, Homo sapiens
cactgggtcccgaggcaagcctcatcagcttagtctttccttgtaaacttctaggggaaggggctacaacattgcaagctccttacacagaagggagcacrttttaaaggcaagcttttttctttttagaaagttctaaagtttcctgttctgtcctgggctttccctgccagggccaactgcgtgctgccaaggggaagc

SEQ ID NO: 418535 - DNA, 201 bp, Homo sapiens
gactagcacctcttttcaaggaggttgtgaggagaatggaaatgtgtatcaagtaccaagcccagggccccacacaaatgcaagtttcagtaggaggtggyaatgctgcaaaggtggtgggagtagttgggttattattggatcgtttccatctgcatagttttatacaaatggggtagggttagtgaacgctgcagagcc

SEQ ID NO: 418536 - DNA, 201 bp, Homo sapiens
gtataaggatcaagaaacactagcattacatcactgtgtgagtaagataaagcaaggcagaagagaaagagctgcatttgaatttggacatttgagaactkgtttaaatttggttctgcatttaccacctgtgggatcttaggcaagtcactaaacctctctgctatagaacggcaatcatgacttttatgttgcagtgtt

SEQ ID NO: 418537 - DNA, 201 bp, Homo sapiens
atttctcaaatgcaagcatttggcttacttaagatatactttagaatgatagaatgttgtaatagaaggaaaaaggaaactgccgaggtcaaacattacarggaaggggaaggggagactaagggcgggaggttaggatggttcctgtgacactgcgtatcctaatggcacgttagcataggtcatccctgtaagtgccta

SEQ ID NO: 418538 - DNA, 201 bp, Homo sapiens
cgcttagctcaggaactgagtggctgctactacgacagctttgtgttttagtggtgaggtgacagtgcgacatcaatgcaaataatttccttggttatacyaggaattggagagcctgacaaaatcagagctcggcagaagcatttgtagcaataaacagaagcttctgatttttacttaaaatttcaaaagctgtcctga

SEQ ID NO: 418539 - DNA, 201 bp, Homo sapiens
atccctcccccatccccccaccccacaacaggccccgatgtgtgatgttccccttcctgtgtccaagtgttctcattgttcaattcccacctatgagtgasaacatgcagtgtttggttttttgtccttgtgatagtttgctgagaaggacggtttccagcttcatccatgtccctacaaaggacatgaactcatcatttt

SEQ ID NO: 418540 - DNA, 201 bp, Homo sapiens
ttagcaaaaataaataaaaatgataaaaatgcaattaggccagggttagagtacacaaagctctgcttcctagtcccacatgcccacccaccttccagctrgtcctagattttggtactggttatatttccagggtcctgtatggttacttatggtcaagaactcactttctacatactctggtaaatgaatctgcatttt

SEQ ID NO: 418541 - DNA, 201 bp, Homo sapiens
agcatggagatacattttcatattgttgggaatcctgtaagttggtctaatctttcctgaatgcaacctaaaatatgtaacaagctctccttatcctttgrcccaataattctactctggggaattagttcaaagaaataatccaaaggaagaaagaaattagtgcaagatgttctcagcagccctattaaaaaataaaag

SEQ ID NO: 418542 - DNA, 201 bp, Homo sapiens
gagtgagatttttttcaatgtatatctttttaaacatttttgagtcatataaaaatattatctaactatttacattaattttagggtgggactagataatytgtaaagctcttccattcttaacattctataattatataacaatccacatttaacttgtaataatacaaatattcatcagcttctttgtctatttgaaaa

SEQ ID NO: 418543 - DNA, 201 bp, Homo sapiens
ggatacatctaaaacaccacttagctggaaatttatagcattaaacaccaatattaggaaaaaagaaagatctcaaatcaatgaccatgttaataaactaygaaaagaagagcaagtgaaagtaaaagaatatttaaaatctgaatggaaatcaataaaacagaaaacagaaatacaacagagaagatggatgaaaccaaa

SEQ ID NO: 418544 - DNA, 201 bp, Homo sapiens
tacagaaagataaaatcccaaacaacaggaagatgaagaggaagggaggagagtagttaatcagtagatgagaaagtttagcaaattgctagagacagaakgcagatggaagtgtagtacttgacaagatagggcagaggaaagctttgacctgtaataatgtgaggaagaggctactgatgaggaggaagccatctgtcc

SEQ ID NO: 418545 - DNA, 201 bp, Homo sapiens
actcaaaaggctccactgctgttcataaaccatgagagtgtttatgtcatgggcagagctccccaagtgaattatagccttttacgcactgtgtacgtacrgtattttcacaggacaaagaaacagggtgtggaaggaatgctacagttgaccctcctctctttccatcctttgtcttcaaccttctccaccaatctcaag

SEQ ID NO: 418546 - DNA, 201 bp, Homo sapiens
catgctactagaaagatgcctgtgaagtcacattatttttgtctcaagactgtggactgaccacacacactcatttcttctctaagaccccctccaatccygttaaatgatagtgaatacagaaagataaaatcccaaacaacaggaagatgaagaggaagggaggagagtagttaatcagtagatgagaaagtttagcaa

SEQ ID NO: 418547 - DNA, 201 bp, Homo sapiens
tttccatcctttgtcttcaaccttctccaccaatctcaagactatactgcaggacagttctttcacggtgtttatctggctttctgacacagcacagggtrgttactcagttcagctgaagaatggaaacttaaactatttcttcttgctagcacgagctgctggctttctcttttattacatttaaaatggatccatctt

SEQ ID NO: 418548 - DNA, 201 bp, Homo sapiens
ctctccagcacctgttgtttcctgactttttaatcattgccattctaactggtgtgagatgggataatacctgattttaaaatactgtattgcggccggayatggtggctcactcctgtaatcccagcactttgggaggcgaaggtgggtggatcacctgaggtcaggagttcaagaccagcctggctaatatggtgaagc

SEQ ID NO: 418549 - DNA, 201 bp, Homo sapiens
ttaagatttttttttttgactaaatccgaatgttaggtacgaaactctatttgaaccacaaatactgcttgcagtttggatgaaaggtgtggtgtatagaraggcaccaagaaatacaaagtgacttctccatcttcgaggagtttataatctagaggcaaatcacacgtgggtgaaaatgtcaccaatagaaggcatgat

SEQ ID NO: 418550 - DNA, 201 bp, Homo sapiens
atatggtgaaaccctgtctctactaaaaatacaaaaattagctgggtgttgtgacacgtgcctgtagtcccagctactcaggaggctgaggcaggagaatygcttgaacccaggaggcggaggttgcagtgagccgagaccgtgccactgcattctagcctgggggacagagcgagattctgtctcaaaaaaaaaaaaggc

SEQ ID NO: 418551 - DNA, 201 bp, Homo sapiens
tttttttgactaaatccgaatgttaggtacgaaactctatttgaaccacaaatactgcttgcagtttggatgaaaggtgtggtgtatagagaggcaccaagaaatacaaagtgacttctccatcttcgaggagtttataatctagaggcaaatcacacgtgggtgaaaatgtcaccaatagaaggcatgatgtgtaggtgc

SEQ ID NO: 418552 - DNA, 201 bp, Homo sapiens
tcttggaagactcagtgttaagatgttaattctctacaaactgatctacagattcccagcaggatttctgtaaacaattacaagctgattctaaaacttcyatggaaatgcaaaggacttagaatatccgaaacagctttgaaaaagaagttacaggacttatactaccttatttaaagacttcctataaagctacagtag

SEQ ID NO: 418553 - DNA, 201 bp, Homo sapiens
gttacttagaactccatgacagagacattatcttcaacatttgcatttaacaggtgagcaaaccagagactctaagaggtatattaacttgctcatgtcayagtcaggcaggggcaagactcaaatctagtcccatgattcaaacattcggctcctactatgccccacattgccttctcctactccagaggacactggcat

SEQ ID NO: 418554 - DNA, 201 bp, Homo sapiens
cagccaaccatgcagctttgggggaaagccgaatgcactgataaactatgctgcctctctgtgaactctggtgaggttcaagtagtggctgcatttctacyttcccaagcaaacatgcttatctgcccctaaatgctcatcttttcactagaagacaactctagtaaggtggtatctcaattcataagactttctagaaat

SEQ ID NO: 418555 - DNA, 201 bp, Homo sapiens
aaccattgcattctagcctgggcaacagatcaagactccgtctcaaaaaaaaaaaaaattagttatgatttgatatgagactaggaccaaatgcgttcttrtaagtcaaataagaaaaggtatgtgagtttttacatttacttaaaaagcctctgccgggcgtggtggctcatgcctgtaatcccagcactttgggagagg

SEQ ID NO: 418556 - DNA, 201 bp, Homo sapiens
gacaagatattttaaaatcttaaaatgccttttcttcactgaagccatctttagagttagttattgctttcatgttacctgtcatcttgacttcaacctgwtattttttgttctcaactctcaaattttaaaagtagcttcaagttaaggaaaggtcatttttccacagttgatttctctgaaaaacatccgtctcctgct

SEQ ID NO: 418557 - DNA, 201 bp, Homo sapiens
agcaactctgccactcaattagcaactcatgctgagtcctcaatttggacaaaagctctctaaagcttcatagttagaactggagatttgttgccttcttstctcaagaaagcacttaaaatctaagtacccactctaaaggtggtgtccttccatttcacaaaactacaagtggctttgggttattcaaattcctcaagt

SEQ ID NO: 418558 - DNA, 201 bp, Homo sapiens
gttcctcctttgtttttggaaaacagaaataaagtggcatcaggtacagaggacagtccttagacccaggcgtgtgacaatgccaaccttttacccttggwttccttaccttaaaaacaaggacaatacctgtcctaccaacttcatggggcttggggaagatcaaattaaataagatgataaatgggaaagtactttgaa

SEQ ID NO: 418559 - DNA, 201 bp, Homo sapiens
ttaaacaaggagcatgtaatccttcacagaaacaatacattgactcgcatgtggttggtgaccagattgctggatgctacagaaaacaattcttacttttrtagaagcaactctgccactcaattagcaactcatgctgagtcctcaatttggacaaaagctctctaaagcttcatagttagaactggagatttgttgcct

SEQ ID NO: 418560 - DNA, 201 bp, Homo sapiens
caaaactgttgtttaacttatgaatcaaaaagatataattaaggggggccaggcatggtagcacacgcctgtaatctcactattttgggaggctgaggcakgataatcatttgagcccaggagtttgcgatcagcctggacaacatagtgagaccccatctctacaaaaaaaatttaaaaattagccagatgcgggggtgc

SEQ ID NO: 418561 - DNA, 201 bp, Homo sapiens
ttgatgagaggcaggaatggctgtgtggcactgagagaggctgggaagatgggtgcacctggctgggctggggctgggaacgaggccaggtggtgggtgtkgggggctaaggaatgtgctgctgcctggggcctgggaacccagagaagagccccagccctgggtttatcttgtctccccatctgcacctgcctggtgtgc

SEQ ID NO: 418562 - DNA, 201 bp, Homo sapiens
aaagtgggccgcctgtcggatggtggtgagtcaccaccaagctcacagattaccctccactttttagtcatcgaaaggggaaaaaccaaagggtgaccctsaaagaggaagtgcccagggacccagcagagctgaacctggaatgtgggtccaggccccaagtcacaccccagctggaacagtgctccgaggtttgtgcgc

SEQ ID NO: 418563 - DNA, 201 bp, Homo sapiens
tgggaaccgctgatagatgcagaattaaaagggtaggacaggagtctttcaaagtttgcccatatggctggctcaaatacaatttccagcatgaattgagyggtggaaatcggatctgaccacaacactgcagcacccacagagttcatcacagtcttctccaggccattctgacaacactccctgccgagggtgggtgtc

SEQ ID NO: 418564 - DNA, 201 bp, Homo sapiens
tacataaccacaataccattattgtacccaacaaatttagcaattggtctctgaattcatctagtaccctgtccattttcaaaatttcctaattgtccccwaaatgtttatttttattttttaattcaaaagaattaaaataaatggtttttttttgttttttttttttttgagacagagtctcgctcttgttgcccaggc

SEQ ID NO: 418565 - DNA, 201 bp, Homo sapiens
tacttggtcataatgcattatgattacctttttaaaaataatattcagttctgttttctagtgtttttctaaagctttctgtatctatgtgctcattcacraggtataatggtttgtaattttctattcttgcaacatcctaacatcctagatagattttggtacaaagagttattcttacctcataacaactattgaggt

SEQ ID NO: 418566 - DNA, 201 bp, Homo sapiens
caacactggcttagagcagctcagaatttcctaaataaccaccctgtcctacaaaagtctcctcacctgggagaacagaataattgcagaagcccaagggccatcttcgtccacacctgtagctccagagcagtcacctttaagccctagggttaggcaagggatcctaagagcaagttttaagagaatcactggagttgt

SEQ ID NO: 418567 - DNA, 201 bp, Homo sapiens
aattagaaacagaagatgtgctggcgatttttaagagcactgtcgtgcttatgtgaagaatttttgaaattattaacttgaagggaaggaaaagtgcatcytaaataagttcttacattgttatttctgtctaagtacagttttacagtagttaaataaaagaatcataagactagaaaaatagataaggcccttgaaaac

SEQ ID NO: 418568 - DNA, 201 bp, Homo sapiens
ttacccttcattctgtaagagctgtcttctttccgtttttttaaaacccaaataaagaagttaattttgttgacttctaatacttcactaagtaaaatgaygctgggagtgcctgaatacacattctatcttttaaaataaatcacacaggtctggcaaagtgtcaaaaatgtagacagttaaggttacgttaagttcctc

SEQ ID NO: 418569 - DNA, 201 bp, Homo sapiens
tacaagtataaaaatcctgtatggttgccgctgtgtctctatcatccatgtgtacaacaggaactatcataaccctggagtgagaaggaaaagacagccaygctacccgtcaagcgcatcttactctgctgtgcatcacaagagagggcaggacacctttaaggtaaccaaattcatggttagaaccaagtgtataataac

SEQ ID NO: 418570 - DNA, 201 bp, Homo sapiens
gctgggcgcggtggctcacacctgtaatctcactttgggaggccgaagcgggtggatcatgaggtcaggagattgagaccatcctggctaacatggtgaamccctgcctctactaaaaatacaaaacaaaacaaaaaaaatagccaggcatggtggtgggcacctgtaggcccagctactcgggaggctgaggcaggagaa

SEQ ID NO: 418571 - DNA, 201 bp, Homo sapiens
ctattctggaagctaagatggaaggatcagttgagcccagcagttagaggctgcagtgagctatgaattaaacctctgtgatccagcctgcgcaacagagygagaccctatctcaaaaaagaaacatacttgaatttttataacaatcacagtaacaagaatgataataaataacattcatcaagagctctgtggtagtct

SEQ ID NO: 418572 - DNA, 201 bp, Homo sapiens
gatatatgattattctgtcagctgcttttaatgtttctaaacgctctcaatgctgtgtttgtttcatcaagaaccaaaactgatgcactttgggtagcacyggctagaaggttctggcacctttcctctcccctactttcccaggttaatcactgagttaagtgaccatgcaccccagctggtatataaaattatacaatg

SEQ ID NO: 418573 - DNA, 201 bp, Homo sapiens
atccctaacggagctcaacatctccaactctgttcctcctaaagtaaaccttgcctaagatgatggcatcatcagctacctagatgcctaaaaaagaaacytgggaatcatcctatttcttctctgtccctcatcttctacttgggatcaatcacagtttttccagttctacttccaatatgtttcttaaacatttttctt

SEQ ID NO: 418574 - DNA, 201 bp, Homo sapiens
tcactattttgggaggctgaggcaggataatcatttgagcccaggagtttgcgatcagcctggacaacatagtgagaccccatctctacaaaaaaaatttwaaaattagccagatgcgggggtgcatgcctgtagtcccagctactcaggaggctgagatgggaggatcacttgagcctaggaggtcaaggttacggtgag

SEQ ID NO: 418575 - DNA, 201 bp, Homo sapiens
ctcatgcctgtaatcccagcactttgggaggccgaggtgggtggatcacctgaggtcaggatttcgagaccagcctgaccaacatggtgaaaccccatctytaccaaaaatacaaaaattagccaggtgtgttgctgtgtgcctgtaatcccagctatttgggaggctgaggcaggagaatcgcttgagcccaggagacag

SEQ ID NO: 418576 - DNA, 201 bp, Homo sapiens
atgaacaaataacacaccatgcaaattctgaaaatacaggaattagtcaggatctaacagatgacttcattgaagaagtggcactgggactgggaattagmcaataaaactctaaaaaagttaaaaatacattaatatattcctttataaaaagtgaaaaaatatagcatatagactatataccaaaaaaattaaagaata

SEQ ID NO: 418577 - DNA, 201 bp, Homo sapiens
ccaggactttgggaagctgaggtgggaggttcactagaggccagaagtttgagacaagcctgggcaacatagtgagactctgtctttatggaaaaattttwaaaaaattagctggcatggtggtgtgtgtctatagtcccagctactctggaggctgaggtgggagggtcccttgagtccaggagtttgaggctgcaatga

SEQ ID NO: 418578 - DNA, 201 bp, Homo sapiens
gaagaagtgttacaaccacctaacaacaaaataagagtttcaagtcttatttttcattactccctgaaacttgccaggctataacagtgggagcaatgggsgcagaagttccttcctttcaaaatgcacatcaacagtgctttataatatgacacatacatgaaatcacagaaatgttaaatacaaagtagattttattta

SEQ ID NO: 418579 - DNA, 201 bp, Homo sapiens
tttttttttttttaattaacaggttctcaggacagatccaacccacagaaatgtctggatttattcagttaaaaaaaacaacaatgggctgggcatgggcrtggcggctcatgcctgtaatcccagcactttgggagatcgaggcgggaggatcacctgaggtcaggagttcgagaccagcctggccaacatagtcaaaca

SEQ ID NO: 418580 - DNA, 201 bp, Homo sapiens
ctcaatttttcctccaaaatgtcactcatatggatttttcctactgttaacagccccttccaggcccagatcacctagtccatacattcactcatccaccraataaatatttgaactttgccatagccactatgataggcattaaagatcaaacaaaaaaaaaaccctgctattaaaagctgacagactaaagaaactcaa

SEQ ID NO: 418581 - DNA, 201 bp, Homo sapiens
gagaactgggaggctgagaatcaagaggagaaaacctcaaggagaggagctgatgtctgcagctgctcctaccctggggacatttgcaaatttagggtacrggagggaggctgagaatccaggctatgcacagtcacaaaactgctgctgaggcttagaggaaccattggagcttttggcagagtgttgagagacctcaaa

SEQ ID NO: 418582 - DNA, 201 bp, Homo sapiens
tttggttttaccgatttatgtagtagccatcttgtttgttgagtgctaaatattctacgacgaaacactgtttctatagcgggcagatgaaagtctacctygcttagctcaggaactgagtggctgctactacgacagctttgtgttttagtggtgaggtgacagtgcgacatcaatgcaaataatttccttggttatact

SEQ ID NO: 418583 - DNA, 201 bp, Homo sapiens
aaggaagaagtacagttatcttcattttaataatttgttattgaacattttattaatatcaaacatttttattaattattgattaattttattaattctgyattcttaccaaggtgtaatacatgtacattgtattttatgatctgctgaagtcttttgtacttttgctttgaaagtaaattttaaaattatatattctca

SEQ ID NO: 418584 - DNA, 201 bp, Homo sapiens
gcaaaatccaaagataactttttttctcttttaaaaacataagactgtggctgggcgtggtggctcacgcctgtaatcctagcactttgggaagccatggmgggtagatcacgaggtcaggagatcaagaccatcctggctaacacggcaaaaccctgtctctactaaaaacacaaaaaattagccgggagtggtggcaca

SEQ ID NO: 418585 - DNA, 201 bp, Homo sapiens
aaatataatacaggctcaatacatgtttgtagtaggaattaactaacaaaaaggaataatatcacaggaaggcagacgtcagtacatacacaaatgggatmttaaaataatccttcctggtgactagaatgatccatgtggaagtagataagagttgaagacatcagtaaaatcatgtttcccttaatataggtacagatg

SEQ ID NO: 418586 - DNA, 201 bp, Homo sapiens
tgcctacatgaagtatattgggaacataaatcctaataatcaccaaaatgtataaaacaattctagctaaaacaccctctagatgatttataattttatamcctctttagctactggctccctttattatattttgtggccgtttactcctttccgcatctctatcttccacctgagatttttgtctttcatctccctgaa

SEQ ID NO: 418587 - DNA, 201 bp, Homo sapiens
agaatccactcatgcaacaaatatgtgccaggcactgtgcaagccactatagtgctacccaaaccgacatggctcctgccctcaagatgctctagtggccsttctctatgggtctctaggagcttaatagcttcacttctgccactttcataggcaagattcaggctgagttgcagaggtgctcatgagagatagaaaata

SEQ ID NO: 418588 - DNA, 201 bp, Homo sapiens
attcttaccatatgccagaccttatgctggacaattcactgacattatcccacgtagtaggcagaattctaacgtgacccccaagattctccaccttctgygtaatccccaggattgtgaatgtgatggatttcattctggtaaacaggttttgttatatggcacagatgactttaagacagggaggctttaaatctgtga

SEQ ID NO: 418589 - DNA, 201 bp, Homo sapiens
tggccagaacttccaatactatgttgaataggagtggtgagagagggcatccttgtcttgtgctggttttcaaggggaatgcttccagcttttgcctgttyggtatgatattggctgtgggtttgtcataaatggctcttattattttgaggtatgttccaccaatacctagtttattgagagtttttaacatgaaggaat

SEQ ID NO: 418590 - DNA, 201 bp, Homo sapiens
tggtattgcctagattttcttctagggtttttatagttttggttttatatttaagtctttaatccatcttgagttaatttttgtatgaggtgtaaggagasggtccagtttcaaatttctgcgtatggctagccagttttcccagcaccatttattgaatagggaatcctttccccactgcttgtttttgtcaggtttgtt

SEQ ID NO: 418591 - DNA, 201 bp, Homo sapiens
aaggcctgcacaactttgtaagcacagcactgacaaaaaccaaagtaatttcagtaaaatattaatgtatttaagatgctatattcccaataataagtgayacaataaataatacagtatgcctccaaagcttgctatgttcatctgtattagtgtactttgcatttagttgctgtatttagtggtcaaaataattaatgt

SEQ ID NO: 418592 - DNA, 201 bp, Homo sapiens
aagtctcatgtgatacaaggcaagtcccttctacctatgagcctataaaatcaaaagcaagttagttacttcctagataaaatgagggtacaggcattggrtaaatacacccaggtcatgctgatgcaagaggtggattcccatggtcttggacagctccacccctgtggctttgcagggtacagccgtcctcccagctgc

SEQ ID NO: 418593 - DNA, 201 bp, Homo sapiens
agatgggaggatcacttgagcctaggaggtcaaggttacggtgagctatgattgcaccactgcactccagcctgggtgacagagtgagaccctctctctcaaaaaaaaaaaaaaaaaaaaagataattaagggaattagagatgtattaggccaggtaatagaagtgaatcacaaatccatattactgggtcaaggcatag

SEQ ID NO: 418594 - DNA, 201 bp, Homo sapiens
ccttaaagagtgcatggtacagaaatatctttatacaaagtaaaaagagaaaattgagatgataaaactttctattaaaaatgttcaatgggctgggcgcrgtggctcacacctgtaatctcactttgggaggccgaagcgggtggatcatgaggtcaggagattgagaccatcctggctaacatggtgaaaccctgcctc

SEQ ID NO: 418595 - DNA, 201 bp, Homo sapiens
caaattccttaaaagacaaggctgtaaaaactcgcttaagaataatttaaaaacctgttagccctatatctgttaaagaaattgcatttatagttaaaaaccttccctctcgctcactctctctcttgctctctctctctctcctctcttctcctctcctctcctctctcttctctcctctctcctctctctctcgcctct

SEQ ID NO: 418596 - DNA, 201 bp, Homo sapiens
taaataccattttcatacattcaatgtacagtgttattttataagaagtaatttttatactaaacactactaattttccaatgaaaatattcctgtaaacttttaggccactgtttttatgccttgatccaaaacatgtcctaaatgctgcctattctctgaactctggggctcatattttatattatttgcatactattt

SEQ ID NO: 418597 - DNA, 201 bp, Homo sapiens
tgaggcagtagaatcgcttgaacccagaaggcagaggttgaggagccaagatcgcgccattgccctccagcctgggcaacaagagcgaaactctgtcacgaaaaaaaaaaaaaacactaggactagtggattcatttcaaatttgtcatcagatcccactatttgcacttaaatcttcaactaaacattcaggaatttgag

SEQ ID NO: 418598 - DNA, 201 bp, Homo sapiens
aatctggtcacaatttctatgttgttttcacgaaattcttcatctaaatcctgtagctctggcttagcatccagtttgctttcccataattctggaccctragaaaaaaaaacacatgtgaaatgtcaataaaagcatacttgttggtgacaatttctaaatagtcttttaaaaatttgttcttatgttattagacatccc

SEQ ID NO: 418599 - DNA, 201 bp, Homo sapiens
aatcgcttgaacccgggaggaggagctgcactccagcctgggaaacaaagcgagattccatctcaaaaaaaaaaagaagaagaagaagacactgagtagaytctttgttcatttaccacgaactgaaattaccatgagagcaaggactgtgcctgttgttcaccaatattccctgttactgtagatattagtactagtttg

SEQ ID NO: 418600 - DNA, 201 bp, Homo sapiens
gtacctttccccatcactgtatccccagtgaaaggaggcactacaggcttgttaaatgtttattcctgtcctttaactataagaactatctcaacagctcraatctgtaccttgaatcagagacagagcaagcaatcctagtcttttttttaaaaaatatttttaagcataaaaaagctaagactgtggtgatattcattc

SEQ ID NO: 418601 - DNA, 201 bp, Homo sapiens
tagaaagaatgcaaaatcagtaggagccactggtatgcactggatgtcaagaaacccatcactgcaaagccgagatcacgccactgcactccaacctgggsgacagagcgactctttctcataaaaaaaaaaaaaaaaaaaaaaaaaaggactcatcactgcaattgtagctgctgtactgtccacagagggcccagaatg

SEQ ID NO: 418602 - DNA, 201 bp, Homo sapiens
acagcagctggaagaggatcctgggattgtaccgagagtctgttagaatctggtccttgatttgacgaaggcgtttgttgtttgggtcacaggctagaaayaggaaaagtgttacctgcttactaaatgtgtagaaaatatctatgaaataagataaattattaaatattttccttcattttaaccatttaaaaagtaata

SEQ ID NO: 418603 - DNA, 201 bp, Homo sapiens
gaactgcttgaactcgggaggaggaggttgcggtgagcctgcaccattgtactccagcctgggcaacaagagtgaaactctgtctcaaaaaaaaagacttmaaagacataacatagtttttcaaatgggcaaatctaagctatagtctggaaattaatgacatatagtttcactggataataaaactatacacaggaggcc

SEQ ID NO: 418604 - DNA, 201 bp, Homo sapiens
taaatgtgtagaaaatatctatgaaataagataaattattaaatattttccttcattttaaccatttaaaaagtaataagcaaaatgtatatcaataaaaratggtgaaatatagtacatctatgccatggagtacaattaaactgttaaatgacagttgaatctgacatggagtgccatccttgaaagattgttgaatga

SEQ ID NO: 418605 - DNA, 201 bp, Homo sapiens
tatccccagtgaaaggaggcactacaggcttgttaaatgtttattcctgtcctttaactataagaactatctcaacagctcaaatctgtaccttgaatcaragacagagcaagcaatcctagtcttttttttaaaaaatatttttaagcataaaaaagctaagactgtggtgatattcattcaaatatttttacctctttg

SEQ ID NO: 418606 - DNA, 201 bp, Homo sapiens
atgggcacgtatcacatactcaacaaccatttcttgaatgaatgactaaaagaatgcatcttcttcccaatagctcaaattccatcttctccctgaaatayatgattctggcaaaattaataaccctctttcctttatcatcctggggtgtagctcaaaaggttttaaaaggttctacctgcttttactcttttgggaaag

SEQ ID NO: 418607 - DNA, 201 bp, Homo sapiens
gtgagcctgcaccattgtactccagcctgggcaacaagagtgaaactctgtctcaaaaaaaaagacttaaaagacataacatagtttttcaaatgggcaartctaagctatagtctggaaattaatgacatatagtttcactggataataaaactatacacaggaggcctgagatgaggtcagggtgcatgagggggcttt

SEQ ID NO: 418608 - DNA, 201 bp, Homo sapiens
agttgttttccatcttcattgagaagcacagtttctaaggtttgctgaatataaaccccttcattgagatcatctagatatctagaaataaaaccacagtrcaagttattaatttataatagaaactttaacatctttaaagaaggaaagatttttaaaagataaggcaggatgccaggcattctggccttccactagttc

SEQ ID NO: 418609 - DNA, 201 bp, Homo sapiens
gctccaccgtggagcagataaactggccaatcagcgccaggaactgctcggtgtaccgggaatggaactgcttcagcagagtgagcagtcccaggacaagyggtggccaatcaaccgggtcggtcggttttcggcagaccattcctgcaagggaacaagttgcaacaccatatgaagtacttgccttcagcaacattcatt

SEQ ID NO: 418610 - DNA, 201 bp, Homo sapiens
tgcgcatgtgaatgggcacgtatcacatactcaacaaccatttcttgaatgaatgactaaaagaatgcatcttcttcccaatagctcaaattccatcttckccctgaaatatatgattctggcaaaattaataaccctctttcctttatcatcctggggtgtagctcaaaaggttttaaaaggttctacctgcttttactc

SEQ ID NO: 418611 - DNA, 201 bp, Homo sapiens
ggaggtatgccctgacttgctttacagagaagggtgagcaaccatttcccatctctattagggcgataagaggaatttggtaatgtgaggtttaagttagrttttgtgacaagaagtcccacgtagtcctggttggtcttctgtaccttgtacactgctccaccgtggagcagataaactggccaatcagcgccaggaact

SEQ ID NO: 418612 - DNA, 201 bp, Homo sapiens
ggaggttgcggtgagcctgcaccattgtactccagcctgggcaacaagagtgaaactctgtctcaaaaaaaaagacttaaaagacataacatagtttttcraatgggcaaatctaagctatagtctggaaattaatgacatatagtttcactggataataaaactatacacaggaggcctgagatgaggtcagggtgcatg

SEQ ID NO: 418613 - DNA, 201 bp, Homo sapiens
gaaagtttacaattggaaaatagggtaagcgctttgttgttatgtatatctggaaagagaaaggtaagaaaaatagatggttaaatcacattgcacaataycacagaacaggtttccaaatgaaaatcttccattttacttcaatttgctctttggctttcctgaaatgtggatggttccattaatttgctgccttcagag

SEQ ID NO: 418614 - DNA, 201 bp, Homo sapiens
agaataaacccactgtctacagttcataaaaaggcattgtatttcaaaggcataaagactcgaatttcataaacataaatttaactaagaaaagatctcayatccgacataggcattctatacaaaaagctatttagttaaatgttaatctgttggtattgttactcattgcaaataataaatgttatacgtacccagatt

SEQ ID NO: 418615 - DNA, 201 bp, Homo sapiens
aagtgttcagtgtcacttcaataataaatgctcacattctaatgaattagctgttgtaccaaaggggacaaagccatattttcaaaactgggcttcataascaatatttttttcttcttctttacactgtgtatagtttttgtttttccaggtactctcagaaatataggaaaggccattcaaatctcatttttaaaaaca

SEQ ID NO: 418616 - DNA, 201 bp, Homo sapiens
agtgttcagtgtcacttcaataataaatgctcacattctaatgaattagctgttgtaccaaaggggacaaagccatattttcaaaactgggcttcataaccaatatttttttcttcttctttacactgtgtatagtttttgtttttccaggtactctcagaaatataggaaaggccattcaaatctcatttttaaaaacat

SEQ ID NO: 418617 - DNA, 201 bp, Homo sapiens
aaggtaaagaaagttcacaattcagactcctttttaaaattggagttatcattagggacagcataatccatacttctaataatctataatatatagaatayttgatatgtaatacatagattatataatttataatcattatgaaatatgtaattgttatatacctacaatatgctcacaagacataagaatcttactttt

SEQ ID NO: 418618 - DNA, 201 bp, Homo sapiens
ctcctcccttaaataaccttcttttagaaattgctgcacttgagcatgcactctttcactgacagtagcatatctgcttgccttgacaaataagaaacttraattacatttaaaaagtcatttatcttgaaaataaatcacattcaaatgaattcactgacaaatagtaacatttctatataggatgaatgacatatggat

SEQ ID NO: 418619 - DNA, 201 bp, Homo sapiens
atacttgatatgtaatacatagattatataatttataatcattatgaaatatgtaattgttatatacctacaatatgctcacaagacataagaatcttactttttttttttttttttttgagacatagtctcgctctgtcacccaggatggagtgtagtggcatgatcttcgctcactgcaaccttcgcctcccgagttca

SEQ ID NO: 418620 - DNA, 201 bp, Homo sapiens
ctcttggctaagaccagcactggatctaatgaagcaccagaggcccttcaaggaatgtctggatggattcccataccccaacctaaaaataccccaaagtctatgattcacaaagtgatctattaatgttcagttgttcatgtatcaaagatgtcttttttgaagctatatttttaaccttttggaataagtgctccaaat

SEQ ID NO: 418621 - DNA, 201 bp, Homo sapiens
tttttttttttgagacatagtctcgctctgtcacccaggatggagtgtagtggcatgatcttcgctcactgcaaccttcgcctcccgagttcaggcgattytcctgcctcagcctcctgagtacctggaattacaggcgcccaccaccgtgcctggctaatttttgtagttttagtagagacagggtttcaccatgttggc

SEQ ID NO: 418622 - DNA, 201 bp, Homo sapiens
ggaaactccacacattttcaaagatacgaaggatgaggaagtccaactgctgttttcactgtggaccacccataggaagtggaagcagacggtagctagarggactgtgaagtcatcttggctggaagagctgtgagacaggggctaccatgttacaaaggaaggctacagagaagtcttgtgtgcacagttttttaaaga

SEQ ID NO: 418623 - DNA, 201 bp, Homo sapiens
aggctataacctctaccatcttgagtacctttccccatcactgtatccccagtgaaaggaggcactacaggcttgttaaatgtttattcctgtcctttaastataagaactatctcaacagctcaaatctgtaccttgaatcagagacagagcaagcaatcctagtcttttttttaaaaaatatttttaagcataaaaaag

SEQ ID NO: 418624 - DNA, 201 bp, Homo sapiens
aagaaacgggtgtaactcagggttgggttttttttttttctgaaacaaacttaaaaaacatacttatttctcactaaaggacacgccatctcagacaaggrtagatggtcttttacaccgggctcttaggaggtaaacaggcatgaactctgatttctcgcttaagaaattcctcacttgccagcatcataataaatcttg

SEQ ID NO: 418625 - DNA, 201 bp, Homo sapiens
cacgaactgaaattaccatgagagcaaggactgtgcctgttgttcaccaatattccctgttactgtagatattagtactagtttgtagcagaggctcagtrattttttgaatgaataagtaaaaggacttaattcatgcctagggaataaaggacacaaaggactcacatttttagtacacagataaaacttaaaaaaaaa

SEQ ID NO: 418626 - DNA, 201 bp, Homo sapiens
atgtacatgtgtgttgtgtgtatactcgtgtatatatattttttcagagctctttggatttgaaaattgtgggtaaagaatgtgaacctgacattttacarattaaaaaataatttaaaaatattatgtcaatttaaagtaaaatatatctaacttttttcttggcaagctgttccttctacagagatctaataaacaggt

SEQ ID NO: 418627 - DNA, 201 bp, Homo sapiens
attttccaaatatataggtaagtgttcctgattgttaagtaagtgttcctgattgttaattcacgttaataggtataaagatctctttacacctattaacrttgctttttgaaattctctattgtgtaatattaatgttttctcaccagttgttttattggttggcaattgcctgggatatctttttttaaaatcccttca

SEQ ID NO: 418628 - DNA, 201 bp, Homo sapiens
ccattgcaaatgtgagacaacaagtcagaattggtctggtggtccccagaatatggcaggtgacacaggcctgtgatatttcatgactgttagtttttaayatgaaaaggcagaagtcagagggacacagcacctcgtatcgtgggcctagctgagcatagtccctcagcttgtctttgtccaggcgggtaggcacttcaa

SEQ ID NO: 418629 - DNA, 201 bp, Homo sapiens
tttgacaaagcatttctcctttaggcttcattttctcatgtctaaaatttggggcagaattcaatgatctagatgggcccttttggctagaaaagactatragactgagaaggtaacctccccttccctggcctccccattatttgcaagcaatagcagcagacattgataaggtaggcaggtgctagctatactgttgaa

SEQ ID NO: 418630 - DNA, 201 bp, Homo sapiens
ctgttaaatgacagttgaatctgacatggagtgccatccttgaaagattgttgaatgacaaaaagcaagctgcagaacagtgtttccaaattttgtgagcrttctgcggtttgtttatagcaactgtctaaaacgaatgggcagagcctccttgtactacttcatagctgggtggcttcctcacgtcctgtctgttcggag

SEQ ID NO: 418631 - DNA, 201 bp, Homo sapiens
tgcctgctatactgctggagatgagccctgaagaaaaaaaatcagagagatgaagtgtttcagtgtgtctttacaataaagaaataagaagtgtaacatayatttaattgtcagtatggagcatttattaggtgttctgttgggaaaggtattcttatactgggtgatctttagtaaagtgacatctaggaattcggggct

SEQ ID NO: 418632 - DNA, 201 bp, Homo sapiens
aagctcttctctttagctttttccataattacttaaccttacagagtttcatggttcccagagaaaacacgcttttgtagaaaagacaacaataaaaatgytatagaggaagattaccttaaaatagctgaaatcaaatatgatatctccatatttctgttgatcagctctgtcttttaacctgaacacagcaggaataaa

SEQ ID NO: 418633 - DNA, 201 bp, Homo sapiens
gtagagaatgactggtcttatagaaaactgcagcaggcaaacaggaaattaacaatatttatctttgtgccctttgtgctgaactcattccttggcactgrcaagtataaggagtgcataaataatactagggttacaagaggtgatgtctgtcctctctagctgcctgctatactgctggagatgagccctgaagaaaaa

SEQ ID NO: 418634 - DNA, 201 bp, Homo sapiens
tccgaagacagatttgattatccgtggcaaggaagcctgtaaattcagaccttccacccaaaaataacttaaaagagtaagaactgaagaaactggggtgygtagataataaacaatccaagcccacggatggctgtttcaaaccctggcacttacttattgagattctccagagcagctgccagatgtttagaatcaaac

SEQ ID NO: 418635 - DNA, 201 bp, Homo sapiens
gtattactgtgcaaggaaaagttcaattttcatatataaaagcacctctagccaaaaggcattttacaaagagccagttttcttgaacaaaaggaaaacgytaggctcctaaaaagcctaatcaagaacagatccagaaacggagataaacaaaatgaattttaaaatgataaactgaagtattaaaatatttttgattta

SEQ ID NO: 418636 - DNA, 201 bp, Homo sapiens
taatatgattcacagttggccaggaaccaccacttcctaatgtaggctgttctcatactaccaataaattgaaggcccctcataacgatagtttatgtgaytcaacagccgatatagaagcagaacaaaatctgctacatgcgaatataatccaactccctgcattttgttaaagcctctttgttttcatatatttcattt

SEQ ID NO: 418637 - DNA, 201 bp, Homo sapiens
tctgtgatacttgcttgttaaaccacactgatctctaacaggctgaatttcagataatttcatttcattttctgcatggatatggtctggcttgggaaagyagagagggaaaggggaaataatggacagtgggcaaaacagtcacatactaaagccctctgaagaccaccaaactaacccagaaggtctaagtaggatgaa

SEQ ID NO: 418638 - DNA, 201 bp, Homo sapiens
gccaggctccttatagagctaacgttccttcttgtttacatcaaaaggagtttttaggtgttaaaacgatttccaattcctgtaccaattggcattttctrattaacaaataacttttagtactattaatacattactggttaatttcgctgatgaactttgctttttgaatgggttaagaatgactgtacctggaaaaat

SEQ ID NO: 418639 - DNA, 201 bp, Homo sapiens
aattatttatagagtctaccctaactttctgagtccctcggatcaatcaatgccatttgataatggcaaagcaacaacataagagcaccctgaagccttcstaagagactacatggcgtcaagcccttcaaacactcattcacatgaactcacaggtttcacatctcacaggatggaatttgggataggggatggtccctg

SEQ ID NO: 418640 - DNA, 201 bp, Homo sapiens
aaagtacatgccaggctccttatagagctaacgttccttcttgtttacatcaaaaggagtttttaggtgttaaaacgatttccaattcctgtaccaattgrcattttctgattaacaaataacttttagtactattaatacattactggttaatttcgctgatgaactttgctttttgaatgggttaagaatgactgtacc

SEQ ID NO: 418641 - DNA, 201 bp, Homo sapiens
gactaggcctgcttttctgaacaccatgactgaaattccacaaaagttaactaagcagttgcttttcccatgtgtgactcacaatcagataggtcaatcayttgtttctgataaattacgaccctgtgcaatcaggtcagacaattgccaggcacaaacgcaaaagacaaatgtggctgaagataaaaccacagacctctg

SEQ ID NO: 418642 - DNA, 201 bp, Homo sapiens
ggaatacagcaaagtacatgccaggctccttatagagctaacgttccttcttgtttacatcaaaaggagtttttaggtgttaaaacgatttccaattcctrtaccaattggcattttctgattaacaaataacttttagtactattaatacattactggttaatttcgctgatgaactttgctttttgaatgggttaagaa

SEQ ID NO: 418643 - DNA, 201 bp, Homo sapiens
tttcaaaaggtaggaaaaagctcagcgagtgaaacatccagagacacaggttctaataatcacaatcaggaactttctaatgagaacaagacttagccagyggactgtgctgcctggagaggtagcacaagccccctcggtgagagtgttccagcagtggctgcatgactacctgtcaaggatgtcctagagctcattcat

SEQ ID NO: 418644 - DNA, 201 bp, Homo sapiens
ccaacgttgcgaaaccctgactctactaaaaaaatataaaaagtagccaggtgtggtgtgtacctgtaatcccagctacttgggaggctgaggcagggaaytgcttgaacctgggaggcggaggctgcagtgagctgagattgtgccactgcactccagcctgggagacagagcaagacttaatcttaaaaaaataaaaaa

SEQ ID NO: 418645 - DNA, 201 bp, Homo sapiens
ttttacaaagataatattgcataaagagtgacaataaaggttgttttttttttttagatggagtctcgctctgtcccccaggctggagtgcagtggcatgrtcttggctcactgcaacctccaccacccgggtgcaagcgattcttttgcctcagcctcctgagtagctgggattacaggcacccgccaccatgcccggct

SEQ ID NO: 418646 - DNA, 201 bp, Homo sapiens
aaatatttctggaatctttgaaattatgctctcgtggaaaaactgctaacaatttcagtctataaaaatattgaaattatttaccttcctaaaaggataaratcctgggctgaattaatgaatgaggtatgaatgaaggccaactctttcctagcaacagagaatctcactgttttttgcttacctttaggaaggtagctc

SEQ ID NO: 418647 - DNA, 201 bp, Homo sapiens
aatccagggttcttaattttttttgtgtgtctgatatggtttggctgtgcccccacccaaatttcatcttgaattgtagttcccataatccccatgtgtcrtgggagggacccagtgggaggtaattgaattatgggggtggttacctccatactgttctcgtaatagtggatgagttctcacgagatctgatggttttat

SEQ ID NO: 418648 - DNA, 201 bp, Homo sapiens
aaaaatacaaaaatattagatgggcgtggtagtacgtgcctgtaatcccagctacctgggaggctgaggcaggagaatcgcttgaacctgcgaggcagagrctgcagtgagctgagaccacgccatcgcgctccagcctgggcaataagaacaaaactccatctcaaaaataaataaataaataaataaaaataagaataa

SEQ ID NO: 418649 - DNA, 201 bp, Homo sapiens
cactgtctagggctgggcacaatggctcacgcctgtaatctcagccctttagttgccgaggcaggtggatcgcttgagcctaggagtttgaaaccagtctsggcaacatggcaaaaccctgttgctacaaaaaatacaaaaaaattagctgggcatggcggtgtgcacctatagtcccagctactcaggaggctgaggtgg

SEQ ID NO: 418650 - DNA, 201 bp, Homo sapiens
tactttgttgattttaaatccactgtctagggctgggcacaatggctcacgcctgtaatctcagccctttagttgccgaggcaggtggatcgcttgagccyaggagtttgaaaccagtctcggcaacatggcaaaaccctgttgctacaaaaaatacaaaaaaattagctgggcatggcggtgtgcacctatagtcccagc

SEQ ID NO: 418651 - DNA, 201 bp, Homo sapiens
acaatgaacccttactgaggtagaccatactttgttgattttaaatccactgtctagggctgggcacaatggctcacgcctgtaatctcagccctttagtwgccgaggcaggtggatcgcttgagcctaggagtttgaaaccagtctcggcaacatggcaaaaccctgttgctacaaaaaatacaaaaaaattagctgggc

SEQ ID NO: 418652 - DNA, 201 bp, Homo sapiens
gacaatgaacccttactgaggtagaccatactttgttgattttaaatccactgtctagggctgggcacaatggctcacgcctgtaatctcagccctttagktgccgaggcaggtggatcgcttgagcctaggagtttgaaaccagtctcggcaacatggcaaaaccctgttgctacaaaaaatacaaaaaaattagctggg

SEQ ID NO: 418653 - DNA, 201 bp, Homo sapiens
ttagctggatacaaagtttgaaggcagaggaaacactttgttatctattatgtaactacaaaaatattctgacgaatgacaaaaataaattagggttataktcctggagagaacagacatattgaaaggctttggtgtctcttgtttgtacagaatattctgacatacaatcatacataaagtattaaatgttcatgtata

SEQ ID NO: 418654 - DNA, 201 bp, Homo sapiens
taaaacgcgtttaccattgcaaatgtgagacaacaagtcagaattggtctggtggtccccagaatatggcaggtgacacaggcctgtgatatttcatgackgttagtttttaatatgaaaaggcagaagtcagagggacacagcacctcgtatcgtgggcctagctgagcatagtccctcagcttgtctttgtccaggcgg

SEQ ID NO: 418655 - DNA, 201 bp, Homo sapiens
aatcatgaaaaatattgctttgctcacacttcttcaaaaagttttagatttcaaggaaaaggtaggtttcctccaaggagctcttaccttcttgccgaatrggccttgaaaagtttatgtaaaacagattttaattcatagtgataatttttcagttgacctattttggctatgttgcttgggacaccaaaatagcaaccc

SEQ ID NO: 418656 - DNA, 201 bp, Homo sapiens
ttctaggattagaaaatgttccgctgcttattgtgtatatcacaaccatgtgttggaatttgtgtattattaagttcttttgatgcacttttaaaaacaaracaatgattctacaatgtcttgaaattttaatgtatataactgaagatgcctgggttatatgacaaaataaataaggcaaatgataaaaagcatttgaga

SEQ ID NO: 418657 - DNA, 201 bp, Homo sapiens
aaagaagtgctgcacacagtgcctgtctcagagttggtcctcaaggaaagtttgttgagtgaaaaacaaaaagcagagggcttcacaggcctgctgaatgrcacacctcttaggggtaggggtatacagtcctggatgagggaatgcattggttaattagtgttgatccagcatttacgaagaataagaaactgtgccagc

SEQ ID NO: 418658 - DNA, 201 bp, Homo sapiens
ttaagcaaaagtaaactaagtcatttggggcatatgccatgcttctttgtcttagggtactgactcttccttgggatcctaatcttcaatttacatatacyatataacaaaacctacaattacctatcttattctaacctataaaattcaccttttattaatcattgcattaaattatctaagtgattatcttccaaattc

SEQ ID NO: 418659 - DNA, 201 bp, Homo sapiens
gttgggattacaggcttgagccactgtgcccagccgctttgattcgttttttacattatagtggcaaaaatgaccaagcaaacatgacagcaaaggttatktagccaggctgaccctttaggatagcagagaaggaggcacaggacccagcatctcatggaaataacttttttttctttatcccagaaaagccacatttag

SEQ ID NO: 418660 - DNA, 201 bp, Homo sapiens
cttatgattacactgagtccactgggataatccagaaacatctccttaaaggtcagctaataggcaacctcaatccccctttttcatgtaatatatctacyggttcagggactagggcatgaacatctctgggtgtgggctggaaggcactattctgcctaccacagatctgcagttctattttttcatatgtctacattt

SEQ ID NO: 418661 - DNA, 201 bp, Homo sapiens
caggcttatgaaagcttagcaaaaaatacaccttagtatatcaaaaatgaatttccaaaccagctttttggaaaatttggtcattctgctttacttaaagsaagtcaaatgttaaacatcattaacctcatcaagttagttgaaatctgtggtatcaagaaacctcttaaaaatgtcacaaatgagaaaatgcaattttag

SEQ ID NO: 418662 - DNA, 201 bp, Homo sapiens
gtcacaaatgagaaaatgcaattttagaaagggattttagcaatgaaaaattaatgatctgatgttgctaagtataaaagtgccactttctctaatatatytctaggagatgtgccaacattgaaattattttgtgcattatttatggaattcaatttacttgaataaaacatgatgaagttttttgagtcaatattgttt

SEQ ID NO: 418663 - DNA, 201 bp, Homo sapiens
aacctataacaaagaaaaagaggtatgaaaaatcactgtctaatagtcctggaatgaacaaagataacaggaaaagaacttgtagctttaggacacctgtrtccacatattctggacagaaatgaggctctgtggtacaactgaaagcccactgttagacatattgggtaacagagtcagaagacaacagtttattctttc

SEQ ID NO: 418664 - DNA, 201 bp, Homo sapiens
tcttccccaaaccagagaagcctaaacaagtgatcctgaataacctaacctaggccttggcaattcagaacatggaggaagaatcctaacaggactcagtwtggagaaataatcctttccaggtggaaagcaagagtgatgttaacaacaaacacttctacaactagcactacaccacgaagcttctttcttcaaacacag

SEQ ID NO: 418665 - DNA, 201 bp, Homo sapiens
atatatacatacgatggaatgctacgcagccataaaaaagaatgaattaacagcatttgcagtgacccggatgagactggagattattcttacaagtgaartaactcaggaatggaaaaccaaacatcgtatattcctactgatatgtgggagctaagctatgaggacgcaaaggcataagaattatacaatggactttgg

SEQ ID NO: 418666 - DNA, 201 bp, Homo sapiens
cagaactgcttgaacccaggaggtggaggttgcagtgggccgagattacgctactgcacttcagcctgggtgacagagtgagactctgtttcagaaaaaawaaaagaatggctaaaatgaaaatgactgacgccaccaaataatggcgaggatgtggactacacatatactcactcttggtgagagtgtaactggcacaac

SEQ ID NO: 418667 - DNA, 201 bp, Homo sapiens
gagattgaagagctgcatccaagagtgcagaggaacagggctgcactttcttccccatggtagttactattcatggtcctgagtcactcctggaaaatcamtgtgagtagaccggatggagttcccctggcagggtgactaaggatggacacacctgtaattgctctaaacaaggaggtatgccctgacttgctttacaga

SEQ ID NO: 418668 - DNA, 201 bp, Homo sapiens
attgctttctaaaatctgtgcaagtatctagcagtgtctggtgtgtctctcactcgctctctctaatgaattcatttgttcagcagacatgtattgaatcmtgtgatcagtacctgtctgctgaatacacgaatccattagagagagtgagtgagagacagagataaacggagggacaatactgaggaaagaggctccgaa

SEQ ID NO: 418669 - DNA, 201 bp, Homo sapiens
gacatgtattgaatcatgtgatcagtacctgtctgctgaatacacgaatccattagagagagtgagtgagagacagagataaacggagggacaatactgaggaaagaggctccgaagacagatttgattatccgtggcaaggaagcctgtaaattcagaccttccacccaaaaataacttaaaagagtaagaactgaagaa

SEQ ID NO: 418670 - DNA, 201 bp, Homo sapiens
gctgaggtatgagaaacacttgaacccaggaggtagaggttgcagtgagccaagattgtgccactgcactccagcccaggcgacagagtgagactgtctcaaaaaaaaaagaaaaggagggtggccttctctaagaatgagcaaaagttacttagctaaatggagcttgtaatggtcaaaagtattaaatgacctcagatg

SEQ ID NO: 418671 - DNA, 201 bp, Homo sapiens
accaactctggccatgagaatatagtctttaagcaaaagtaaactaagtcatttggggcatatgccatgcttctttgtcttagggtactgactcttccttrggatcctaatcttcaatttacatatactatataacaaaacctacaattacctatcttattctaacctataaaattcaccttttattaatcattgcattaa

SEQ ID NO: 418672 - DNA, 201 bp, Homo sapiens
atgtaaatactaattacctgaaagaggagacattcagaatttgttaaattcctactcacttcaaggcaaagggttgaatactaaagttatagaaggcaatrcccactccatgtttaaattccattccaatgaaaaaccaagattttccaaatatataggtaagtgttcctgattgttaagtaagtgttcctgattgttaat

SEQ ID NO: 418673 - DNA, 201 bp, Homo sapiens
aattcttacacaacttagttgtaatctcagtagctaaagcaagagacattttaataaatgatttaatcttgagagtatccattttagaaaaagactagtgsgttcttcaggaagttttactgactcatttattccttcatgttataattataaaattctcaatacagttagagcaagtttacctaagtgatgttatgtccc

SEQ ID NO: 418674 - DNA, 201 bp, Homo sapiens
ctcgaatttcataaacataaatttaactaagaaaagatctcatatccgacataggcattctatacaaaaagctatttagttaaatgttaatctgttggtaytgttactcattgcaaataataaatgttatacgtacccagatttttgttgtattgaagttttggcaactgagcgatcaaaaatagaaagtttacaattgga

SEQ ID NO: 418675 - DNA, 201 bp, Homo sapiens
ttaaattgattttgaccaatatatagaaagggactcagcacctgttgggcactcagtttgcggtgacttggccaaagtcacataggtgataagtggtgaarccagattccaaacacacattggttccctccctcctacagcaagtattgtttgaggagatcatgctctgccttctgtgacaatcacaggcattgtcatgga

SEQ ID NO: 418676 - DNA, 201 bp, Homo sapiens
atggccctttaaattgattttgaccaatatatagaaagggactcagcacctgttgggcactcagtttgcggtgacttggccaaagtcacataggtgataaktggtgaagccagattccaaacacacattggttccctccctcctacagcaagtattgtttgaggagatcatgctctgccttctgtgacaatcacaggcatt

SEQ ID NO: 418677 - DNA, 201 bp, Homo sapiens
accgaggaggctcataacttccacataacttttaactgttttaaattctgttcaaagtctatgttctaaactcagatatggacctgccagttagaagatarttaaaagctcatttcgcttctctttaaagaatggtatttcgtatatatttgtgacttaaaagaaaaaaaagtgatactatgtttgatattcttgaatttc

SEQ ID NO: 418678 - DNA, 201 bp, Homo sapiens
gaaacaaagcgagattccatctcaaaaaaaaaaagaagaagaagaagacactgagtagactctttgttcatttaccacgaactgaaattaccatgagagcraggactgtgcctgttgttcaccaatattccctgttactgtagatattagtactagtttgtagcagaggctcagtaattttttgaatgaataagtaaaagg

SEQ ID NO: 418679 - DNA, 201 bp, Homo sapiens
ctccatactgttctcgtaatagtggatgagttctcacgagatctgatggttttataagaggcttttctccttttgattatatttctctttcctgttgccaygtgaagaaggacatgtttgcttccacttccaccatggttgtaagtttcctgaggcctccacagccatgctgaactgtgagtcaatcgaacctctttcctt

SEQ ID NO: 418680 - DNA, 201 bp, Homo sapiens
ggcaggagaactgcttgaactcgggaggaggaggttgcggtgagcctgcaccattgtactccagcctgggcaacaagagtgaaactctgtctcaaaaaaaragacttaaaagacataacatagtttttcaaatgggcaaatctaagctatagtctggaaattaatgacatatagtttcactggataataaaactatacaca

SEQ ID NO: 418681 - DNA, 201 bp, Homo sapiens
gttcccatcaggagtataaactcctcgagggcctaggtcatatgttcatctttgtttctccagcatctggaaatgtgcttggcatgtactgcatatttgasggtatcaaataaatacagcatctagcaatttttcatatgggattttactcatgtattcattcattcagcaactacagtgccaagcactgttccagagctg

SEQ ID NO: 418682 - DNA, 201 bp, Homo sapiens
gggatcatatacatgtatatgtacagagacacgcaagtatatcacacacatatattatacatatatacacatagttgcatgcatgtatatcacacacactmcacacacacacacacacacacacacacacacacacacacacacatacatacatgtttttctgcaatttgcttttttcattttccaccttggagattttcc

SEQ ID NO: 418683 - DNA, 201 bp, Homo sapiens
tggcatgaacttaactgtgcttgctgtgggaaccaggtcagtggagagagaaagaacaaaccaccatgattatttctttcctctggccacttaaggaatcyctcctggcttgcctatttcacttaactcctgaaccagatgagttgctgacaggagtacatggtggagaggaagaagaggcgggaggggcattgtgttaaa

SEQ ID NO: 418684 - DNA, 201 bp, Homo sapiens
aatatctcatgtaatttattgaatactatactgaaagtgaaaaacagtatgggtatcatatgaagttgaatcattttaagtttgagacgacctgtatttctttttttttttttttgctgcctctaacaatgaatgcttatatctctgtgtatatctcacttgttttaagtcaatatcaaccaaactgaacctacacttttt

SEQ ID NO: 418685 - DNA, 201 bp, Homo sapiens
aaaaataagaatacttgcatatgtaggaacaattaccaaatccacaaagttggtgctatgggtaatggaaatggaagcagggatccaggagaagaaaaaamtaaacaaacaaaagatgacaggagcttgcatgccccagtgatgatagtggtctgttaaaagacggatatgggccgggcgtggtggctcatgcctgtaatc

SEQ ID NO: 418686 - DNA, 201 bp, Homo sapiens
accaactacttggggggctgaggcatgagaatcacttgaacccgggaggtggaggttgcagtgagccaagattgcaccactgcactccagcctgggcaacagagagagagagactctgtctcaaaaaactcaactaaaataaaataaatgagtaaaatgaagaccgaaattggaatgtcaaacagccagatgatgtcactc

SEQ ID NO: 418687 - DNA, 201 bp, Homo sapiens
ccaactacttggggggctgaggcatgagaatcacttgaacccgggaggtggaggttgcagtgagccaagattgcaccactgcactccagcctgggcaacagagagagagagactctgtctcaaaaaactcaactaaaataaaataaatgagtaaaatgaagaccgaaattggaatgtcaaacagccagatgatgtcactcc

SEQ ID NO: 418688 - DNA, 201 bp, Homo sapiens
actacttgggaggctgaggcaagagaatcgcttgaacccgggaggaggagctgcactccagcctgggaaacaaagcgagattccatctcaaaaaaaaaaagaagaagaagaagacactgagtagactctttgttcatttaccacgaactgaaattaccatgagagcaaggactgtgcctgttgttcaccaatattccctgt

SEQ ID NO: 418689 - DNA, 201 bp, Homo sapiens
tttctcatgtctaaaatttggggcagaattcaatgatctagatgggcccttttggctagaaaagactatgagactgagaaggtaacctccccttccctggyctccccattatttgcaagcaatagcagcagacattgataaggtaggcaggtgctagctatactgttgaatcagaataaacatggaaatatcaagcttgat

SEQ ID NO: 418690 - DNA, 201 bp, Homo sapiens
agactatgagactgagaaggtaacctccccttccctggcctccccattatttgcaagcaatagcagcagacattgataaggtaggcaggtgctagctataytgttgaatcagaataaacatggaaatatcaagcttgataatctaagtccctgacatatttcttggacttgtatcagaatgggaaattgacactgtacatc

SEQ ID NO: 418691 - DNA, 201 bp, Homo sapiens
gaaattgacactgtacatcatattttcaatcttcacttgattttacttttgatgtctttaaattctaagctcagggagaaaaaaaccagaggtgcttgggkagaagaacctctgaggctgctgaactattattgagtgagcttaaaatctgcccaaaagaaatggttaatggaatatagattattttgagctgctcaaaaa

SEQ ID NO: 418692 - DNA, 201 bp, Homo sapiens
cagaagacaacagtttattctttcatgtttgacaaagcatttctcctttaggcttcattttctcatgtctaaaatttggggcagaattcaatgatctagaygggcccttttggctagaaaagactatgagactgagaaggtaacctccccttccctggcctccccattatttgcaagcaatagcagcagacattgataagg

SEQ ID NO: 418693 - DNA, 201 bp, Homo sapiens
acacctgtgtccacatattctggacagaaatgaggctctgtggtacaactgaaagcccactgttagacatattgggtaacagagtcagaagacaacagttyattctttcatgtttgacaaagcatttctcctttaggcttcattttctcatgtctaaaatttggggcagaattcaatgatctagatgggcccttttggcta

SEQ ID NO: 418694 - DNA, 201 bp, Homo sapiens
ccttgatgactgaacggcaaaccccagtgaaacccaaaactaatctcttacacggaggcagcaccttcccctttgtcatgagctttcaccagcgctatagyacttgattctcacagacctgagccaggcggggaaagtgtgatgattgcttagaaagggcagggaactgaatggaatgaaggctctggggtctgaacccag

SEQ ID NO: 418695 - DNA, 201 bp, Homo sapiens
gggaatcacctagcatcttagagtttctggtaagtaggttagaggtagtcctaagcatctctgtttttaagaatctccccggatgattctgatgtgaagcsaggatcattaaaagagtagagaatgactggtcttatagaaaactgcagcaggcaaacaggaaattaacaatatttatctttgtgccctttgtgctgaact

SEQ ID NO: 418696 - DNA, 201 bp, Homo sapiens
tttaagttaggttttgtgacaagaagtcccacgtagtcctggttggtcttctgtaccttgtacactgctccaccgtggagcagataaactggccaatcagygccaggaactgctcggtgtaccgggaatggaactgcttcagcagagtgagcagtcccaggacaagtggtggccaatcaaccgggtcggtcggttttcggc

SEQ ID NO: 418697 - DNA, 201 bp, Homo sapiens
atctgcaaaaccttcagtgaaaaggaaagcaggaaacgcaatgaacatctgttttacttttcttggctgacaaatattaggatgcctaatttgtctatatrgggggatgctgaaaaatgtaaaagagctgttttaataactgctggcaggcacagggctccattcctttaaacattaattgcttacagaatataaagctaa

SEQ ID NO: 418698 - DNA, 201 bp, Homo sapiens
taaaaatcctgaatggactctatggtgctcatttgttcttgaaaacacttcaaataaagcacactacttctgacaatttcttgataaagtttttatttcarattataaatttcagaaacgtgagccaagctattaaaaaatgcacaagtttctaggattagaaaatgttccgctgcttattgtgtatatcacaaccatgtg

SEQ ID NO: 418699 - DNA, 201 bp, Homo sapiens
aaaacctgaactctaaaatgaatatgaacattgcccaagagagcagagagctagacgcagccaaaactaaccttcagatctttattagcaacactaaagakggaatatcataggatacaataatgagaacataaagtctttttaacctgccagtttccaaggtttcaaataacctgtgcacacattccaaacacaccagta

SEQ ID NO: 418700 - DNA, 201 bp, Homo sapiens
agaaatatacttaatttaaaaatcctgaatggactctatggtgctcatttgttcttgaaaacacttcaaataaagcacactacttctgacaatttcttgawaaagtttttatttcaaattataaatttcagaaacgtgagccaagctattaaaaaatgcacaagtttctaggattagaaaatgttccgctgcttattgtgt

SEQ ID NO: 418701 - DNA, 201 bp, Homo sapiens
aattaaatgctgacaactaaactatgatatgccatcaatgataaaacccatccccagttacagaaatgttaaaatatgaaaagaattgtagtagctaggcrcagtggtgcatgcctataattaaagctacttgggaggctaaggcaggaggatcgcttgagcctgggagtttgagacacagcctgggcaacacagtaaaac

SEQ ID NO: 418702 - DNA, 201 bp, Homo sapiens
cagttacagaaatgttaaaatatgaaaagaattgtagtagctaggcgcagtggtgcatgcctataattaaagctacttgggaggctaaggcaggaggatckcttgagcctgggagtttgagacacagcctgggcaacacagtaaaaccccatccccctcactcccacgtcccaaaaaaaggtgcatctcagaattgatgta

SEQ ID NO: 418703 - DNA, 201 bp, Homo sapiens
gacatacttgcagattggattccaactggtggaattcttgaacctgtgttacagaaatatacttaatttaaaaatcctgaatggactctatggtgctcatytgttcttgaaaacacttcaaataaagcacactacttctgacaatttcttgataaagtttttatttcaaattataaatttcagaaacgtgagccaagctat

SEQ ID NO: 418704 - DNA, 201 bp, Homo sapiens
agtaaaaccccatccccctcactcccacgtcccaaaaaaaggtgcatctcagaattgatgtacatggtacatggtagctctgtcaggagacattgagtagrctgggcgtgggggctcacacctgtaatcccagcactttgggaggccaaggcaggaggaacatttgaggttaggaattcaagaccagcctggtcaacatgg

SEQ ID NO: 418705 - DNA, 201 bp, Homo sapiens
catacttgcagattggattccaactggtggaattcttgaacctgtgttacagaaatatacttaatttaaaaatcctgaatggactctatggtgctcatttrttcttgaaaacacttcaaataaagcacactacttctgacaatttcttgataaagtttttatttcaaattataaatttcagaaacgtgagccaagctatta

SEQ ID NO: 418706 - DNA, 201 bp, Homo sapiens
aaaagaagaagaagaagacactgagtagactctttgttcatttaccacgaactgaaattaccatgagagcaaggactgtgcctgttgttcaccaatattcyctgttactgtagatattagtactagtttgtagcagaggctcagtaattttttgaatgaataagtaaaaggacttaattcatgcctagggaataaaggaca

SEQ ID NO: 418707 - DNA, 201 bp, Homo sapiens
acagaaataagaaaatactgaaatcctcgaattcctgtagctgtggctttgaatttaactaaataatcttttataaattcagttcttcagagctttaaccrtgggcctaacactaggaattttccaaacgacaaaaatgcctggagcatgcgacatagtagaataaactttctacataaatagcttagtctacagcacttg

SEQ ID NO: 418708 - DNA, 201 bp, Homo sapiens
taaaaataatagtttttaaacaagaagctacactactaagcaattctacagtataattaacttcatcagaaatagatctgatagttaaaacaaaattaagygttaaaaaaatagtttgtcaccataaaattcagaatggttttttgggagcagttagaaatttcttatttataaaaaatttgaaatgatgccagaactttc

SEQ ID NO: 418709 - DNA, 201 bp, Homo sapiens
gattacctgcaaaagttctttgttttattatacaagtttaattgtttatttttatttatttatttattattatacaagtaattgtgtttattgttatttayttatttagtttttgagagacagggtctcactctgttgcccaggctagagtgcagtggggtgatcatggctcactacaaccttgaactcctgggttcaagt

SEQ ID NO: 418710 - DNA, 201 bp, Homo sapiens
ttgaactcctgggttcaagtgatcctcctgcctcagcctctcaagtagctagggctatgggcatgcgccactacacctggttaattttcttatttatttattttttttttttttgcagagatgggggccttgctatgttgcccaggctggtgtctcaaactcttggtgtcaagtgatcctccctccttggtctcccacact

SEQ ID NO: 418711 - DNA, 201 bp, Homo sapiens
atggaatttgggataggggatggtccctgaattaggaaatgtgctgtcatataaagattagaaaaaacacaggtccaattactgtgtctataggatagtcrgaaagtgactctatgaactgtgcaggatgggaagtaggacagaggaagcacaggttaaagaacccagctgaaatgtcagaaattcaaatgtatcatttct

SEQ ID NO: 418712 - DNA, 201 bp, Homo sapiens
ttaaatgtttattcctgtcctttaactataagaactatctcaacagctcaaatctgtaccttgaatcagagacagagcaagcaatcctagtcttttttttwaaaaatatttttaagcataaaaaagctaagactgtggtgatattcattcaaatatttttacctctttgagtataaactcaaattgtgcagtatctaacag

SEQ ID NO: 418713 - DNA, 201 bp, Homo sapiens
atggaaatagcatgagtaagcttggcaacctataacaaagaaaaagaggtatgaaaaatcactgtctaatagtcctggaatgaacaaagataacaggaaawgaacttgtagctttaggacacctgtgtccacatattctggacagaaatgaggctctgtggtacaactgaaagcccactgttagacatattgggtaacaga

SEQ ID NO: 418714 - DNA, 201 bp, Homo sapiens
aagttgttttccatcttcattgagaagcacagtttctaaggtttgctgaatataaaccccttcattgagatcatctagatatctagaaataaaaccacagygcaagttattaatttataatagaaactttaacatctttaaagaaggaaagatttttaaaagataaggcaggatgccaggcattctggccttccactagtt

SEQ ID NO: 418715 - DNA, 201 bp, Homo sapiens
acccagctgaaatgtcagaaattcaaatgtatcatttctttgagcaatttgtattgggtattttttttttctttttaccagagctttcctgaagacctctmatgaggtggtactcctttatgctgtcttgtttcctgtctacctggatagacagaaggaagctgtccattctgtttcaatagattccagagaacagactta

SEQ ID NO: 418716 - DNA, 201 bp, Homo sapiens
atgtaacatacaacaaaacatttgggttttacccaacagagggcattaatagtttctgacaatacagtttttgaaaaacccaagttaactgtgatggcagyggttcttaaactgtgctccctggaccagtagcttccgcatgacctgggaacttattagacatgcaaattactgggctccactccacactgacttagtcag

SEQ ID NO: 418717 - DNA, 201 bp, Homo sapiens
agaagaattgtcttgagccacacataaaatacactaacaccaaaaatagctgatgaccttaaaaaaaatcgcaaaaaaatctcataatgttttaagcaagyttacaaatttgtattggggcacattcaaagccattctgggccgcatgtggcctgcaggcctcaggctacacaagcttgctctagactcatgaagaggagg

SEQ ID NO: 418718 - DNA, 201 bp, Homo sapiens
cacagaagatgaagatgaggctgagtcactagaaaaccccagttggttttatgacaggataaagtgagggcttgagttgtttatacgcttgtgaatgcaasacttttggtaaagaagattaaaagctgagtcaatgtagtaaaatcctcaaattagaactggagtttatgtaaaaaataaactcaactaattaaaaacaga

SEQ ID NO: 418719 - DNA, 201 bp, Homo sapiens
attcacaaagtgatctattaatgttcagttgttcatgtatcaaagatgtcttttttgaagctatatttttaaccttttggaataagtgctccaaatttagyagctgctgtgagaagtcttacttacttccttttatttatcctaaatggaactttctcaagctctaggaatgccatttcacactagtattctcaaattggg

SEQ ID NO: 418720 - DNA, 201 bp, Homo sapiens
acaggaaaaaaaataaggatttcctgaactgatctcttggctaagaccagcactggatctaatgaagcaccagaggcccttcaaggaatgtctggatggaytcccataccccaacctaaaaataccccaaagtctatgattcacaaagtgatctattaatgttcagttgttcatgtatcaaagatgtcttttttgaagcta

SEQ ID NO: 418721 - DNA, 201 bp, Homo sapiens
gaattcctgtagctgtggctttgaatttaactaaataatcttttataaattcagttcttcagagctttaaccgtgggcctaacactaggaattttccaaaygacaaaaatgcctggagcatgcgacatagtagaataaactttctacataaatagcttagtctacagcacttggcagacaaatactaaaggctcaagtgca

SEQ ID NO: 418722 - DNA, 201 bp, Homo sapiens
atcttttataaattcagttcttcagagctttaaccgtgggcctaacactaggaattttccaaacgacaaaaatgcctggagcatgcgacatagtagaatamactttctacataaatagcttagtctacagcacttggcagacaaatactaaaggctcaagtgcatgctataaagtgtagaggtggtggtggcagtggagaa

SEQ ID NO: 418723 - DNA, 201 bp, Homo sapiens
aacgacaaaaatgcctggagcatgcgacatagtagaataaactttctacataaatagcttagtctacagcacttggcagacaaatactaaaggctcaagtrcatgctataaagtgtagaggtggtggtggcagtggagaagagttggaaaggaactgaaggatgaccctagttaccagggagaattttctggagaagcgag

SEQ ID NO: 418724 - DNA, 201 bp, Homo sapiens
agaatcatcataatttaaagacaatatttgttttgagatctctctgaaccaagcttgaaggttttctagtaatacagaaataagaaaatactgaaatcctygaattcctgtagctgtggctttgaatttaactaaataatcttttataaattcagttcttcagagctttaaccgtgggcctaacactaggaattttccaaa

SEQ ID NO: 418725 - DNA, 201 bp, Homo sapiens
aggtaggtttcctccaaggagctcttaccttcttgccgaatgggccttgaaaagtttatgtaaaacagattttaattcatagtgataatttttcagttgayctattttggctatgttgcttgggacaccaaaatagcaacccaatattgtgtatacctcttcatcataaaatcattcacttattcaatcagcatttcttaa

SEQ ID NO: 418726 - DNA, 201 bp, Homo sapiens
gaaattatttaccttcctaaaaggataaaatcctgggctgaattaatgaatgaggtatgaatgaaggccaactctttcctagcaacagagaatctcactgytttttgcttacctttaggaaggtagctctgagtttagtaaccatggatggatttacccttatgctttcttgcatgatggatgtgaaactgtaaaaagaaa

SEQ ID NO: 418727 - DNA, 201 bp, Homo sapiens
cgcttctctttaaagaatggtatttcgtatatatttgtgacttaaaagaaaaaaaagtgatactatgtttgatattcttgaatttcattttaaataatcaytattacttactagaagttgttttccatcttcattgagaagcacagtttctaaggtttgctgaatataaaccccttcattgagatcatctagatatctaga

SEQ ID NO: 418728 - DNA, 201 bp, Homo sapiens
gtattaagagacagaaagttaatgataaagataagttctttttcccacttttcacatataatacactaggatatgataataaataacaggattggaaactrtatgacttagttaaactaagtttattacaacacctcgtaagagcaggacattatagtaaaacttcaaaattcttaagatgaccagtgccacaggtaggaa

SEQ ID NO: 418729 - DNA, 201 bp, Homo sapiens
ctttttcccacttttcacatataatacactaggatatgataataaataacaggattggaaactatatgacttagttaaactaagtttattacaacacctcrtaagagcaggacattatagtaaaacttcaaaattcttaagatgaccagtgccacaggtaggaaaagacaactatatacagtataaactaaattaggaaat

SEQ ID NO: 418730 - DNA, 201 bp, Homo sapiens
tgtgttagggctttgacataatactttcaacttattttcaagttagtagctaatattaagtttagtcgaaaagctcttctctttagctttttccataattmcttaaccttacagagtttcatggttcccagagaaaacacgcttttgtagaaaagacaacaataaaaatgctatagaggaagattaccttaaaatagctga

SEQ ID NO: 418731 - DNA, 201 bp, Homo sapiens
aaaaagatatgatacagctcatctctgtgctagggagaaggaaccactgggcatgtgtggttccaatgtaccctgattatacaagctatctcctactattygatatattagcaaataatttcaaacgctataaagagagctcagagacaaatccctgtacatcattttgaggcatttgtccaattatttcccagaaatgga

SEQ ID NO: 418732 - DNA, 201 bp, Homo sapiens
aattgcttaaacccaggaggcggaggttgcagtgaaccgagatcgcaccactgcactccagcctgggtgacagagtgagacttcatctcaaaaaaaaaaaagggggagggggggaaggaaataggatagaaacaaaagatacagtgcacttctgagattagatttcgaaaagactaacttctggcttgggcaccctctgta

SEQ ID NO: 418733 - DNA, 201 bp, Homo sapiens
tcctttgtaaatttctgtgtccaaatttcctcttcatacaaagataccagtcatattggattagggcctatcctagtggcttcattttaacttaaccacckccttaaaaatcctgtctccaaatatagtcacattctgagctactgagtgttaggaattcaacatataaattttggggggacccaactcagctcataacag

SEQ ID NO: 418734 - DNA, 201 bp, Homo sapiens
ttgagccctggaggttgaggctgcagtgagccatgatcgtgccactgcactcttgcctgggtgacaatgagaccctctctcaaaaaaaaaaaaaaaaaaaattttctcacatgtcaagtataggagattcttgctattaagaatagttcatatctgaaaaatgctagagtgattacaaaatacagaaaaatgtttcataaa

SEQ ID NO: 418735 - DNA, 201 bp, Homo sapiens
aataatactagggttacaagaggtgatgtctgtcctctctagctgcctgctatactgctggagatgagccctgaagaaaaaaaatcagagagatgaagtgyttcagtgtgtctttacaataaagaaataagaagtgtaacatatatttaattgtcagtatggagcatttattaggtgttctgttgggaaaggtattcttat

SEQ ID NO: 418736 - DNA, 201 bp, Homo sapiens
atatcataggatacaataatgagaacataaagtctttttaacctgccagtttccaaggtttcaaataacctgtgcacacattccaaacacaccagtatttsctcttcagtaattaccatttttctccactctggttaggggtttcactcctgaaaagacatcagcaagctcagtcatccgctccgaaccctctttcttgta

SEQ ID NO: 418737 - DNA, 201 bp, Homo sapiens
tcggtaatcatgaaaaatattgctttgctcacacttcttcaaaaagttttagatttcaaggaaaaggtaggtttcctccaaggagctcttaccttcttgcmgaatgggccttgaaaagtttatgtaaaacagattttaattcatagtgataatttttcagttgacctattttggctatgttgcttgggacaccaaaatagc

SEQ ID NO: 418738 - DNA, 201 bp, Homo sapiens
gatacaataatgagaacataaagtctttttaacctgccagtttccaaggtttcaaataacctgtgcacacattccaaacacaccagtatttcctcttcagyaattaccatttttctccactctggttaggggtttcactcctgaaaagacatcagcaagctcagtcatccgctccgaaccctctttcttgtaatgctccca

SEQ ID NO: 418739 - DNA, 201 bp, Homo sapiens
ctcctgagtacctggaattacaggcgcccaccaccgtgcctggctaatttttgtagttttagtagagacagggtttcaccatgttggccaggctggtatcraactcctgacctcagatgatctgcctgccttggcctcccaaaagtgttgggattacaggcgttagccactgtgcccggctgaatcgtatactttcttatc

SEQ ID NO: 418740 - DNA, 201 bp, Homo sapiens
taaattattcatggtgttatagttgaacaattacaaaattttcatacgtaaaagaaaagatatccttggagcaaggtgaataatagaagaggagactcccrtgggcggacgactccttgaaacagcccctttctgcttgtggtgccccctagactagcgtctcatttcttggcactgctaacatttgaggggatgcagtac

SEQ ID NO: 418741 - DNA, 201 bp, Homo sapiens
tagaggtggtggtggcagtggagaagagttggaaaggaactgaaggatgaccctagttaccagggagaattttctggagaagcgaggaaaagtaaagatcrgatcatcggagagatgaagaagggaattgtatccagatgaaaggcagacacaggcagaggcttcagggcaagaatgacaagagcatatcttggagggcaa

SEQ ID NO: 418742 - DNA, 201 bp, Homo sapiens
gtattttcaggagcccaccccatagggtaaatgtgagcttctctatacggtttccatgggcgtttacaacacgatccctgctatctatccagactcatctycctctgtttacatgattcaatacctagcaggtcccatactttcccatccctgcacacttttttttttttttttttgcgacagacttttcactcttgtagc

SEQ ID NO: 418743 - DNA, 201 bp, Homo sapiens
tctgtgactttttttctttctcctgtccgatcataatcctgattccgatcccaggaatcagggccctgggaactttttttttttcccccaaatgcaaaggrttttgacatcagtatgtcacaggtgaaggcattaaggcgcggcgagcagcaatgacttgcccaaactcacagcccatggcataactagaatgcaaatcca

SEQ ID NO: 418744 - DNA, 201 bp, Homo sapiens
aactttaaaaagcaacttgattctcatccaaggcctctctccctgctaaaccactctgcatcgtgaagtaggtcctgattctgagagtctttatgtggagyaatataaacggccaccccttttgtgcattacctgagtctgctgtatgaagcatcagccatcggatggcaacattgcagtctctcaggcagttcagaagct

SEQ ID NO: 418745 - DNA, 201 bp, Homo sapiens
tttttaaaaaatatttttaagcataaaaaagctaagactgtggtgatattcattcaaatatttttacctctttgagtataaactcaaattgtgcagtatcyaacagcagctggaagaggatcctgggattgtaccgagagtctgttagaatctggtccttgatttgacgaaggcgtttgttgtttgggtcacaggctagaa

SEQ ID NO: 418746 - DNA, 201 bp, Homo sapiens
tcataaaaaggagaagaaaaagttttgattacaaatgtatcttgaaatttgtgaaaatgagctttatatattaggctgtgataagtgccgtgaagaaaaarcataataaaggatggggcatatgctagtttccatagagcacctcgggcagaagtcagaaggaaatgagagagcaagcagtatggatatctgggtatggtc

SEQ ID NO: 418747 - DNA, 201 bp, Homo sapiens
ggagtaattaaagagggaagtgaaatcagtctgttaaactgtcttaataggtcttaatagatttaattcccacctggttgtaaatatcatcagatctcagkcgaccaatgaccatactgatgaaggattcgttgataggcactctctggaaatagctctcgggatagttggatggtcttttggcacctggttggctagaat

SEQ ID NO: 418748 - DNA, 201 bp, Homo sapiens
gccaggcatggtggcaaaaacctgtaatcccagctactcgggaggctgaggcaggagaattgcttaaacccaggaggcggaggttgcagtgaaccgagatygcaccactgcactccagcctgggtgacagagtgagacttcatctcaaaaaaaaaaaagggggagggggggaaggaaataggatagaaacaaaagatacag

SEQ ID NO: 418749 - DNA, 201 bp, Homo sapiens
tcccagtccagccttcagataagaccatagctccttgttcccagcctgactgcaatgttctaaaagccccagagccaaaggcagccagctatgccctaccytccggaccatagatgctataaagcttattgtcttaagccactgggttctggcatagtttattatgcagcaatagataatgatcctaataatggcatccca

SEQ ID NO: 418750 - DNA, 201 bp, Homo sapiens
tgttcggcaatagtaaaacaaatattatgggtctttattacctaggtaaatcacctttctaaaattctatatataaactttaaatttttaatgcaaaagcmtatgagttatatttaatatacttttactgaaatgaactcactgcttgtaatctgttttgccccatgaagggcacttgtgttttctatttctaataatgca

SEQ ID NO: 418751 - DNA, 201 bp, Homo sapiens
agttttctcaatacaggctatattattattggcatgaaatccagagatcccactatattttcttattttcttttacaagtgccggtaacttcatttttaayaatttggcgtggaactgtgattttcagtttgggaagtaatcctaatcaaaagacatgctttcaagaataaggcatgacatccttacaccaattaccctga

SEQ ID NO: 418752 - DNA, 201 bp, Homo sapiens
ttcagtttgccctcataatgttgtctgcatcataaggtcaacagcacactctaactttttctgcctataaatgtcttcttttctactcggacaaagtattmctaaaagactggcaaaggggagtgagggaggtggggagaggagggaagacagtattataatgcaagcagcaataaggtggaaataaatgcatttcctctg

SEQ ID NO: 418753 - DNA, 201 bp, Homo sapiens
cacaaagcacatatcaccttgagctaccacaagcaaaaaggagagaaattgttataagggcagacatagccatgtcacatgaaacctgcaggcaggtatgyggccaggccacaggaagcggctggggctgggaaccggaatgccttcgctctttctccccttgatgtgttggcccaccttttctctccctccaggctactc

SEQ ID NO: 418754 - DNA, 201 bp, Homo sapiens
ctgtaatcccagatacttggaaggctgaggtatgagaaacacttgaacccaggaggtagaggttgcagtgagccaagattgtgccactgcactccagcccrggcgacagagtgagactgtctcaaaaaaaaaagaaaaggagggtggccttctctaagaatgagcaaaagttacttagctaaatggagcttgtaatggtca

SEQ ID NO: 418755 - DNA, 201 bp, Homo sapiens
gatgcacaaagcacatatcaccttgagctaccacaagcaaaaaggagagaaattgttataagggcagacatagccatgtcacatgaaacctgcaggcaggwatgtggccaggccacaggaagcggctggggctgggaaccggaatgccttcgctctttctccccttgatgtgttggcccaccttttctctccctccaggct

SEQ ID NO: 418756 - DNA, 201 bp, Homo sapiens
agatcgttcaatcagggaaatccagactgtggagcaactgaaggtgaaaggccctatgttcttcaacagatgaattaaagggaaagaaaggaaggagggcygggcgtggtgactcacgcctgtaatcccagctctttggaaagctgaggcaggcggatcacccaaggtcaggagttccagaccaacctgaccaacatggag

SEQ ID NO: 418757 - DNA, 201 bp, Homo sapiens
gttcatcccctcacgtactagaaatctttggatgcacaaagcacatatcaccttgagctaccacaagcaaaaaggagagaaattgttataagggcagacayagccatgtcacatgaaacctgcaggcaggtatgtggccaggccacaggaagcggctggggctgggaaccggaatgccttcgctctttctccccttgatgt

SEQ ID NO: 418758 - DNA, 201 bp, Homo sapiens
gatcacccaaggtcaggagttccagaccaacctgaccaacatggagaaaccccgtctctactaaaaatacaaaattagtcgggcgtggtggcacatgcctrttgtcccagttactcaggaggctgaggcaggagaactgcttgaactcgggaggaggaggttgcggtgagcctgcaccattgtactccagcctgggcaaca

SEQ ID NO: 418759 - DNA, 201 bp, Homo sapiens
ataagaatcttactttttttttttttttttttgagacatagtctcgctctgtcacccaggatggagtgtagtggcatgatcttcgctcactgcaaccttcrcctcccgagttcaggcgattctcctgcctcagcctcctgagtacctggaattacaggcgcccaccaccgtgcctggctaatttttgtagttttagtagag

SEQ ID NO: 418760 - DNA, 201 bp, Homo sapiens
agagggcattaatagtttctgacaatacagtttttgaaaaacccaagttaactgtgatggcagtggttcttaaactgtgctccctggaccagtagcttccrcatgacctgggaacttattagacatgcaaattactgggctccactccacactgacttagtcagacaccctgggggtgcggcccagcaatctgtgttacaa

SEQ ID NO: 418761 - DNA, 201 bp, Homo sapiens
gctgagtcctcatcttctgccttttaaatgttggtgttccccaggggttcatcccctcacgtactagaaatctttggatgcacaaagcacatatcaccttsagctaccacaagcaaaaaggagagaaattgttataagggcagacatagccatgtcacatgaaacctgcaggcaggtatgtggccaggccacaggaagcgg

SEQ ID NO: 418762 - DNA, 201 bp, Homo sapiens
ataatccatacttctaataatctataatatatagaatacttgatatgtaatacatagattatataatttataatcattatgaaatatgtaattgttatatwcctacaatatgctcacaagacataagaatcttactttttttttttttttttttgagacatagtctcgctctgtcacccaggatggagtgtagtggcatga

SEQ ID NO: 418763 - DNA, 201 bp, Homo sapiens
ttgggattataggcatgagccactgtaccgccttaattctgtttattaattcactccttcataacatttaaattctacaaagtcttgggcagagaagaaamgggtgtaactcagggttgggttttttttttttctgaaacaaacttaaaaaacatacttatttctcactaaaggacacgccatctcagacaagggtagatg

SEQ ID NO: 418764 - DNA, 201 bp, Homo sapiens
ccaattgaaaatctgtgcgttagacactaaaattaaaaagttggttaaggtggctcctgttttcaagaccttacttcctgaagaatcacagttctgtatasataaacacaacaaatgatttgtggatatgtgctgttgcttgatttgtttttgtttctatgtaaacatgggagagaattcactttcaacctgactctgaat

SEQ ID NO: 418765 - DNA, 201 bp, Homo sapiens
ccatgtcacatgaaacctgcaggcaggtatgtggccaggccacaggaagcggctggggctgggaaccggaatgccttcgctctttctccccttgatgtgtyggcccaccttttctctccctccaggctactcgccatatacatggcagaatgaggctgcccacaaactcccaattttgcatgttgtggataaactccaatc

SEQ ID NO: 418766 - DNA, 201 bp, Homo sapiens
acagtttattctttcatgtttgacaaagcatttctcctttaggcttcattttctcatgtctaaaatttggggcagaattcaatgatctagatgggcccttytggctagaaaagactatgagactgagaaggtaacctccccttccctggcctccccattatttgcaagcaatagcagcagacattgataaggtaggcaggt

SEQ ID NO: 418767 - DNA, 201 bp, Homo sapiens
accttagtatatcaaaaatgaatttccaaaccagctttttggaaaatttggtcattctgctttacttaaaggaagtcaaatgttaaacatcattaacctcrtcaagttagttgaaatctgtggtatcaagaaacctcttaaaaatgtcacaaatgagaaaatgcaattttagaaagggattttagcaatgaaaaattaatg

SEQ ID NO: 418768 - DNA, 201 bp, Homo sapiens
gtgtatactcgtgtatatatattttttcagagctctttggatttgaaaattgtgggtaaagaatgtgaacctgacattttacaaattaaaaaataatttamaaatattatgtcaatttaaagtaaaatatatctaacttttttcttggcaagctgttccttctacagagatctaataaacaggtctgtgatttttccgggt

SEQ ID NO: 418769 - DNA, 201 bp, Homo sapiens
tgggatgatctgcaaaaccttcagtgaaaaggaaagcaggaaacgcaatgaacatctgttttacttttcttggctgacaaatattaggatgcctaatttgyctatatagggggatgctgaaaaatgtaaaagagctgttttaataactgctggcaggcacagggctccattcctttaaacattaattgcttacagaatata

SEQ ID NO: 418770 - DNA, 201 bp, Homo sapiens
atcccagctgctcgggaggctgagagaggagaatcagttgaaccagggaggctgaggttgcagtgagctgagatcacacaccactgcactccagcctgggygacaagagtaaaactccatctcaaaaaaaaaaaaaaaaaaaaaaaaaaaaacaagatgccagcctagaaataaatgaccacccccctggtaaattacgta

SEQ ID NO: 418771 - DNA, 201 bp, Homo sapiens
gagaggagaatcagttgaaccagggaggctgaggttgcagtgagctgagatcacacaccactgcactccagcctgggcgacaagagtaaaactccatctcaaaaaaaaaaaaaaaaaaaaaaaaaaaaacaagatgccagcctagaaataaatgaccacccccctggtaaattacgtagctagttttggtctccttatttc

SEQ ID NO: 418772 - DNA, 201 bp, Homo sapiens
agaggagaatcagttgaaccagggaggctgaggttgcagtgagctgagatcacacaccactgcactccagcctgggcgacaagagtaaaactccatctcaaaaaaaaaaaaaaaaaaaaaaaaaaaaacaagatgccagcctagaaataaatgaccacccccctggtaaattacgtagctagttttggtctccttatttcc

SEQ ID NO: 418773 - DNA, 201 bp, Homo sapiens
tttaaaattccattgttcaactgtgttttatcctggataggattaaagcagtctttaaaggtaatctgttgttggctttaatgttttatagtacagtctgrtgacacttggctcactagtccacattttttgtatatttggtatatagattttttccttggtagtcacttgtttttaacttctttttatattttacttccc

SEQ ID NO: 418774 - DNA, 201 bp, Homo sapiens
tatttatgtgaagaaaatgagtggtatccttgtgagagaaaagtacaagaatgagactggggcaaactgcttttccagaaataaagaggccctgatggtgwcacttttggtagatccaagcttttcatgaatattgaagctctggatgccttgttcagtagtttcataagcaaaaatccaaaagtgtagaaagagttttaa

SEQ ID NO: 418775 - DNA, 201 bp, Homo sapiens
tggcgcaatcttggctcactgcagcctcggccttccaggttcaaatgattctcctgcctcagcctcctgagcacctgggattacaggcatgcaccaccaarcccgactgatttttgtattttttagtatagacggggtttcaccatgttggccagctagtgtcgaattcctcacttcaagtgatctgcctgcctcggcccc

SEQ ID NO: 418776 - DNA, 201 bp, Homo sapiens
aatcttaggaagaatgttataggcaatccagaatgttggataattaaatcagttatttgcattttgatgtgtaatatagtgaacacatttagacaaaaaamaagctaccccataagaccagtttttattttctttgattcatgtcttcaggattttctgttaactcagaattattatagcattcattattgttttgtgaaa

SEQ ID NO: 418777 - DNA, 201 bp, Homo sapiens
cccacctcagcctctcaagtagctgggactacaggtgtgtgccactacacttggctaattttcatattttttgtagagacggggtttcaccatgttgcccrggctggtcttgaactcctcctgagttaaagcagtctgcttgtctctgtctgccagagtgctggcattataggcatgagccaccacccccttcttccactt

SEQ ID NO: 418778 - DNA, 201 bp, Homo sapiens
atgtatagtttttatattcagtattttaaaattgtagtttttatgttgtttcggtcagttgtgttatgtttggaggttttagtgaatatatagttatgcarccatcactacaaccagtttttggtgtgtttttttttttgagatggagtgttgcagtctcaccggggctggagtgcagtggcacgatctcagcttactgca

SEQ ID NO: 418779 - DNA, 201 bp, Homo sapiens
tactaaaaactacccaaaaaatatattcaaagataaatagaagaaatacttatgcatttgaaaaaatcgatgcattccacagttcctctgaatcaaaggtaaaaaaaaaaaacagtgtagaaaatactttgaacagtagtggaatttttagtattttgatagctttctttagaaatttaattgattttcttcatctgtaat

SEQ ID NO: 418780 - DNA, 201 bp, Homo sapiens
acttcctcctggactcaattttataaattctcgattagttggtgaggccaataaggatactttttctcgtctaatttggtttctgggaaagcttcgttcargtcctcagtggtcatctgatcaaatggaattaagttcttcatcttctccatctgtttctcatattctacaatcctggcctttgagagagacacccactca

SEQ ID NO: 418781 - DNA, 201 bp, Homo sapiens
ttcactccaagacgttctttttctgttgagttttaggttttgatgatttgtctttgttaagataaaattccttaatgactttagaagcaatataatatttktcttgtaattttattcaacttttaattatatctgggtggatcatattctctctggaacattgactccagaatgacacgagttatgctggaatacaatttg

SEQ ID NO: 418782 - DNA, 201 bp, Homo sapiens
ctagttttccacagtaattttgtaagttgcttggtattttttaatgacttatttttatatgtaaatgtgatttgtataacttccaacaggaaaccttgtcsaatgcgtgattttagaaaatttagcaaaaacttttcaaagggatatttatgtgaagaaaatgagtggtatccttgtgagagaaaagtacaagaatgagac

SEQ ID NO: 418783 - DNA, 201 bp, Homo sapiens
aggatttcaggaaactagcaatggccttttggttctggggtatgatctctgcaaaagctactcagtcagtggtttttagagcaagttttcgcccagccatyttgggattcttcaccgaccctggctgcccacggtccactgcagccgcctttaacttcttgaaggttgttcatcttaaaatttctttcagagtttttctgt

SEQ ID NO: 418784 - DNA, 201 bp, Homo sapiens
ttttggtaagagtaatcaaacacaatattaatgtggaacatggatagtcacattaagtgagagaaataaaagataaaaatagtctcccatcagtgctcagrtgaagttttgccattatatattaggattaagctttgccaccaacatagttatagaactttgagttttcagagattttaggatttcagaatttctataaga

SEQ ID NO: 418785 - DNA, 201 bp, Homo sapiens
aacagtgaggctttgctttagggaaaatagtggtagtatttatggtcgatgataaagttcctagattttaagcaaaaattttagaaagcttgtatcagctrctgtaagtatataatgaaatctgtcattatttgattatctgcataactgagtcagtatttccaaatgatcaatgcatagtattataaaaatcatacatgg

SEQ ID NO: 418786 - DNA, 201 bp, Homo sapiens
gataattttggattcaaagtttttaaggtaacctgggatgcaaattttgctaactggattaatacaaatttaagtttttaaaattccattgttcaactgtkttttatcctggataggattaaagcagtctttaaaggtaatctgttgttggctttaatgttttatagtacagtctggtgacacttggctcactagtccaca

SEQ ID NO: 418787 - DNA, 201 bp, Homo sapiens
gtgcaggtttgttacataggtaaaggtgtaccatggggtttgctgcacagatcttgcatcggtacctggcacatagttaacactcaactattagctgctgytgtttgccaatgataatggtttcctcttcagctgtcattaaactgtttattgttaaactgttaatttattcttaagaacctttgacattcctgactctta

SEQ ID NO: 418788 - DNA, 201 bp, Homo sapiens
gttcttcagatgctctggttattctaacagcctagttaaccacccagactttggttctcattgcctttatccatttgtttggtgtatatactaatgttcamcgatgcacacataatgcatgtgatgttttttggataccgtcttatcacttgtagaattgccatgataggcattttttggagctactttaagtacttgctg

SEQ ID NO: 418789 - DNA, 201 bp, Homo sapiens
tgtatgccagggcttggccagatacgtaaatatttaggctctgttgtaactactttgctgttacagcacagaagaaaccacagacaatacacaaatgagtrgatatggctgtgtttgagtaaaacttgatgtaacaaaacaggtgataggttggatttcttttcagacctgtgctctatcctggatcgggctcaaagtcat

SEQ ID NO: 418790 - DNA, 201 bp, Homo sapiens
aaagctaccccataagaccagtttttattttctttgattcatgtcttcaggattttctgttaactcagaattattatagcattcattattgttttgtgaaratactagttaataatctccggttaatgaaataattatcttagataaatttactgaacttaatgtagaatatgttttttgtttcgttttgtttttgagaca

SEQ ID NO: 418791 - DNA, 201 bp, Homo sapiens
ggccgcgcgtggccgggcgccggctgaggggagcgggtggggtgcggcgaggcgcgggccgggcgcggcggtcaggggccccggcggcggcagcccctcgrcgcgcggcaggtggcgcgagggccaggcgccgggcccgcgagcgcgctgccttgcgggccggcgaggaggagcagccgccgccgccgcgggagaacagcg

SEQ ID NO: 418792 - DNA, 201 bp, Homo sapiens
agtgggggtctacaacaagaagtgtatattttcaaacaattttttaatgatttaacaatttttgtaaatcattttcaggcttctgcagctgtagattctcmctgtgaatcccttgcttgctcatgcataagtgtatttgcaataccaaatatacaggtttagtatttttgcctgttagtgattgtttcacatgtgtaacgt

SEQ ID NO: 418793 - DNA, 201 bp, Homo sapiens
ggtcattattattgtacaaaataagcgctttgattaacacagctatatagtttttttaatttttaaaaaacctgtggagacggtgatcttgtctttaaaayatgatagtcctttcagtataatgtcttagattaaagacgttgcctttaatatctgttgggaaggaaatgtccagacttttcaaatctcttattatatgtt

SEQ ID NO: 418794 - DNA, 201 bp, Homo sapiens
ctgaaattttataatgataagccttggtatggattgtttctttctggatatattttgtttttatttctactatttcatcatactaaacattctaagtagaygttttcagtctgggaactcatattcttcagttctgcctctgattcaagaccattttcaggttgtctgtacgttccccactttaggaataaatatttggtc

SEQ ID NO: 418795 - DNA, 201 bp, Homo sapiens
tgtaagtcatctgagtgttcagtatttcccctttccctcattccatctttttgtagacaaggaatctggaaaccaagaattaagtgatttatctcaaaatrtacgactttttaaatagagcttcttaaattcaaagttaatgttactttctacagcttgttgtctccttagaaaatagtacaaggtaatacgtaatcaagt

SEQ ID NO: 418796 - DNA, 201 bp, Homo sapiens
tggggtatgatctctgcaaaagctactcagtcagtggtttttagagcaagttttcgcccagccatgttgggattcttcaccgaccctggctgcccacggtscactgcagccgcctttaacttcttgaaggttgttcatcttaaaatttctttcagagtttttctgttgattatagtttttgtttttcttccaaaatctctt

SEQ ID NO: 418797 - DNA, 201 bp, Homo sapiens
ctgtacaatttgttcaaggaatttttgtagaaaaatacgatcctacgatagaagattcttatagaaaggtatatattactttggaaggccttttgcttttkattttaatataaatacttattttagctttataattattgaatgttttatacaaaggatggaggcagagttaatttataaaattagtgggaaaagtttaca

SEQ ID NO: 418798 - DNA, 201 bp, Homo sapiens
tttacactttctggcattgcatagttaccagtttaagaggatcataaacacccatactctcacatattcacagaattttttgtaatttgacacataaactktaaagcagaccatccatttcaagtagtagccccatgttactttcagtcccctacctagcaagactgattactctcaagctcccttctttttaacctagaa

SEQ ID NO: 418799 - DNA, 201 bp, Homo sapiens
atgttattgaaagctaattgttcttagttactatatgttaggattaaattgagtaattttgcacaaaaggtttttagcaaagacatgaaaagttaaccagkataaaactgttagcagttcagaatatccaaatgagtgatataaatgagtgcttattagagtcaaaggaagaagtgaaacccttaggatctagtagttaga

SEQ ID NO: 418800 - DNA, 201 bp, Homo sapiens
tagtattggctgtggttttttttttcattgatggtgtaactccctgtgtgaactcagtttacaattacattaaagattgaatgtactcttttctttagaartataatggtttcttaatttttttttcagactgtacaatttgttcaaggaatttttgtagaaaaatacgatcctacgatagaagattcttatagaaaggta

SEQ ID NO: 418801 - DNA, 201 bp, Homo sapiens
tgcgcagtatatttatcctctggcacgggaaccttcagggcattaaacttcttaaagtcatccaccaaaccggccttggccacgttggccttgtagtaagmccagtcgataaccggtggattctcaggtaaagcagccaacctggaggtgagggtctcattccaggatttcaggaaactagcaatggccttttggttctgg

SEQ ID NO: 418802 - DNA, 201 bp, Homo sapiens
taatcctaaatctacagtcttgtggttctgcaacctcaggtaagtaatctgaatcacaaatcctttatctctttttatttatttatttatcttctatctgkctgtctgtctgtctctgtctattttgagacaagtctcactctgttgcccaggctggagtgcagtggtgcagtcacaactcacctcagcctcctgagtagc

SEQ ID NO: 418803 - DNA, 201 bp, Homo sapiens
tttttgaattgttggtctctccttttttaaaaaatcacttaactattttgcttatctcttgactcggctgagaaatctattaaactggttcttctgcattygtcagattgttgataaattgttaccctctattctgtattctaccatacatgatcaaatactgaactgaaaaggtaactatagaaataaagctggaaaagc

SEQ ID NO: 418804 - DNA, 201 bp, Homo sapiens
tttgtgaaataagaaaggcatacgtctcttagaaaaatcacctctgataaatgtatagtttttatattcagtattttaaaattgtagtttttatgttgttkcggtcagttgtgttatgtttggaggttttagtgaatatatagttatgcaaccatcactacaaccagtttttggtgtgtttttttttttgagatggagtgt

SEQ ID NO: 418805 - DNA, 201 bp, Homo sapiens
tttactgcaggttttttttttctttttctttttaaagaataaacacataaaatgaacatgaaggaaacagttttttgggttttggatttgttttttttttkttttgtttgttttttttttccagactgtttggctgtcacccaggctggaatgcagccacggtctcagctcactgcaacctccgcctcccaggttcaattc

SEQ ID NO: 418806 - DNA, 201 bp, Homo sapiens
gcaggttttttttttctttttctttttaaagaataaacacataaaatgaacatgaaggaaacagttttttgggttttggatttgtttttttttttttttgtttgttttttttttccagactgtttggctgtcacccaggctggaatgcagccacggtctcagctcactgcaacctccgcctcccaggttcaattcttgggc

SEQ ID NO: 418807 - DNA, 201 bp, Homo sapiens
tttttttctttttctttttaaagaataaacacataaaatgaacatgaaggaaacagttttttgggttttggatttgtttttttttttttttgtttgttttktttttccagactgtttggctgtcacccaggctggaatgcagccacggtctcagctcactgcaacctccgcctcccaggttcaattcttgggcctcagtct

SEQ ID NO: 418808 - DNA, 201 bp, Homo sapiens
cctatttggaaagatctgatagaaactaataaggtgatcttgagcctatattattatttttttttttacctgtttttgaattgttggtctctccttttttaaaaaatcacttaactattttgcttatctcttgactcggctgagaaatctattaaactggttcttctgcatttgtcagattgttgataaattgttaccctc

SEQ ID NO: 418809 - DNA, 201 bp, Homo sapiens
ttttcctgaatgttttatttctgtgaaaagcacaggaatacacaactttacttagaattctttttttttttttcctttaataaggtactaggttttgacargcttgcatcatgcgtgagtataagctagtcgttcttggctcaggaggcgttggaaagtctgctttggtaagtcattcttactttacctaagcctttcact

SEQ ID NO: 418810 - DNA, 201 bp, Homo sapiens
agctagtcgttcttggctcaggaggcgttggaaagtctgctttggtaagtcattcttactttacctaagcctttcactccaagacgttctttttctgttgmgttttaggttttgatgatttgtctttgttaagataaaattccttaatgactttagaagcaatataatatttgtcttgtaattttattcaacttttaatta

SEQ ID NO: 418811 - DNA, 201 bp, Homo sapiens
tgccatgttggccaggctggtcttgaacttctgaccagcctggtccagctggtccagtgatccaaccgcctcggcctcccaaagtgctgggattacaggcrtgagccaccacgcctggcctgaaatttatcttttgttgacgagtatgtgcaaggtgttgtgtcagtgactctgaagaattactacatttctttccttatt

SEQ ID NO: 418812 - DNA, 201 bp, Homo sapiens
tctaattggattttggttttgcaggcagcatctcatatatgtcgagtacttaacaatttaaagctctgacttgtaaatttatttttcagctctcttttttygtaattagaatactgtttggacttgctcaacaagaccttatcttaacaaaaagtaacttatagaaaagggagacattcatttaacttcaagcccatatta

SEQ ID NO: 418813 - DNA, 201 bp, Homo sapiens
gtagacgttttcagtctgggaactcatattcttcagttctgcctctgattcaagaccattttcaggttgtctgtacgttccccactttaggaataaatatytggtcttctgcttcctctaccaacatattatatttaccatttatgtatgccagggcttggccagatacgtaaatatttaggctctgttgtaactactttg

SEQ ID NO: 418814 - DNA, 201 bp, Homo sapiens
gcaaagaaaaagtagtgtgggaaaatgggatggtctagatcatgctgatggagccctacagaactacagcatttgagtcatagctaatagattaacttggyagatacagttggggtgctttatacatgatgatgtattttaaaagctgcctttagtaacttttggggacaggatatttctgttccacttgagtatattttt

SEQ ID NO: 418815 - DNA, 201 bp, Homo sapiens
gggcttgagcctgacagcgaaaaagtttgcctgaaacggggcttgcttgctccatttgttgcgggaagtggcaggaggaaggcagcggagagagccccacytagtctggcagcagccaccgtgtagagaaaaactgttaaaggggcctttcccttcgtcagcaagaggaaatctctttctcttagagggagagaaaatcca

SEQ ID NO: 418816 - DNA, 201 bp, Homo sapiens
ttttagttcagccatctgtaaacaggagtactgtaccatggctctggaagctagtgtttttctgtgttcatagattattttgcaatggtattgaaaggtastaattgccatttgaggtcttaagttctttgtaaatctcataagcacagtggaagcagtagctacaaagaatagatgaatttatccatttgcagtaaaaac

SEQ ID NO: 418817 - DNA, 201 bp, Homo sapiens
atcaaatttctgtctgttcctccttgcctacagagaagcaatccaggttccttagttttgtatttaagcccctttctggactgacaggaagcctgttttcrttagtttttttgtttgtttgattgtttttgagacaaggtctctgtctgtcacccaggctgcagtgcagtggtacagtcacagctcactgcaacctcaacc

SEQ ID NO: 418818 - DNA, 201 bp, Homo sapiens
cccaggggactggtgtggaaagggcagaggtgacagtgaccgtagcatggtggtggttgggggtcagtgacaggcgtcataggtgtttttccaaatagtcktgtaagaaagttggggcttcatgagaagtgtgtttttgaccacattggtattgatgttaaatccaacccatcacccagtgcttactgaatgtctctggtc

SEQ ID NO: 418819 - DNA, 201 bp, Homo sapiens
cgtctggcctgactttctccttgtgccaagaattccttcaccttttctctttagcctttggccccaggaaaatgggaaagtaagatattttactcctggcyaatgcctgatttttagaagccttcctcactccctggcaaggcacattttcctgttacctcagagtaaagagactcggttctggggttctgcatagtgatg

SEQ ID NO: 418820 - DNA, 201 bp, Homo sapiens
catttagctggatttgtctttggtttgaagaggctaatacgtgaaagatttgttcacagttggatgtccccttttctgaaccatgaagtaatattgtgaawggagttgaatgctgaggttagggtgccggaaagattcagggtccttcggtaccctcacatggcttggctttggtagaacaagaaactaagctctgatttg

SEQ ID NO: 418821 - DNA, 201 bp, Homo sapiens
gcaagaagtgtgttctttcttggagaggttagctcctaaaagtgaatgctgaatgagtggatgaattgatctactctttggactaggggaagatgttgaakaattttttatcgaaaattttattgatatgtaataattgtacatatgtatggggtacatgtgctattttgatacatgcctgtaaggtgtaatgatcatagt

SEQ ID NO: 418822 - DNA, 201 bp, Homo sapiens
aagggacaggggaggactctttgtagatagttcttatgattaaaaaataacttcctatgtgttgtagtgatgattaagctgacagaatgctaaagacaccmttaatgattacttgtagcaaagtacttccccacatttagctggatttgtctttggtttgaagaggctaatacgtgaaagatttgttcacagttggatgtc

SEQ ID NO: 418823 - DNA, 201 bp, Homo sapiens
attattttcttttagtcattcaagtatttgagtgcctatatgtgccagatggtgttctaggtgttagaaataaagcagtgaacaagaccaataaaaatctcctgtctttttgaagcttatctttagggagacagatgagaaaccataagcataattgctaagtgaatcatcagctaggttggcaattgatagctgggatgg

SEQ ID NO: 418824 - DNA, 201 bp, Homo sapiens
tggcctccatctcctgacctcatgatccacccacctcagcctcccaaagtgctgggattacaggtgtgagccaccgcgcccggctgagatttcatttttarctcagacgtcaatcaacgtagccatatacagatttgaaaagcttttctttatctctgttaatggagaaaaagaatgactgctttcttgtcaaaatgaaag

SEQ ID NO: 418825 - DNA, 201 bp, Homo sapiens
atttgaaaagcttttctttatctctgttaatggagaaaaagaatgactgctttcttgtcaaaatgaaagtgttcagttttaaacttaaccagttcctgccrttttgaaatgttcactcatttcttactttttttttttttttttttttgacacagagtctcgctctcacccaggttggagtgcagcagtgctatctcggct

SEQ ID NO: 418826 - DNA, 201 bp, Homo sapiens
taatggagaaaaagaatgactgctttcttgtcaaaatgaaagtgttcagttttaaacttaaccagttcctgccattttgaaatgttcactcatttcttactttttttttttttttttttttgacacagagtctcgctctcacccaggttggagtgcagcagtgctatctcggctcactgcaacctctgcctcccgggttca

SEQ ID NO: 418827 - DNA, 201 bp, Homo sapiens
gtttggcggtgcttgctgtcagggaacagatgtcaaatcaagtacttggagatgcgctcacattatcttttctctctgatctgctaaatgtcactgcatgygtctgcgatgcccaacactggctgtacgttataatcacctggggagcttggatgcttcttgatgccatactccaccctctaagactcttgattaatcttg

SEQ ID NO: 418828 - DNA, 201 bp, Homo sapiens
caccatactcagctaatttttgtatttttagtagagataggtttcaccgtgtttggccaggctggtcttgaactcatgatctcaggtgatccacctgcttyggcctcccaaagtgctgggtttacagccgtgagccactgtgcccagccaccatttcttactttttggcaaaggaagtagacatattggagggttgacctg

SEQ ID NO: 418829 - DNA, 201 bp, Homo sapiens
tttgtgtaatagctgtggaaagggcacttcctctccgctgttctgatgctgagctggattcctagcaggaggggtctggggcaggcgggcgtccattgcgygaggcaacctggctggcagggctggccgcgtggggccctggtttggctgctgttgctgccctctgctgcttcataatgaaattgcctgtgttcaacctga

SEQ ID NO: 418830 - DNA, 201 bp, Homo sapiens
aggggcatcaggaggggcaggggcactgtcctcgctggacccatgacagacgtcagttggttgttggtaggttgagtgtagacagattgcagaggtcctcrgggatgccagatggaggaatttagatgtgatgcagtcctgtgcttctcaagaagccttcccagatgctccggacacgattagctgctccatcctctccgc

SEQ ID NO: 418831 - DNA, 201 bp, Homo sapiens
gcaactgtccatgtcatcttggaagatctttctgagttgggacagctgagaaacttcatgccatttgacagttttcttgaggtcatgagcaaattaaccartcaaggaagtaaataagtaagttttggtggaacaaatttgtatgttattggtgtgcctttttttttttaataccataggtgtgttcctgatgaaaagggt

SEQ ID NO: 418832 - DNA, 201 bp, Homo sapiens
ggaagtgagctgggggctgcctgtccctcacccctattccaggtgggtgcagtgctgtgtgccctctttttgcccctgccctcctccactgcctgggctcsagcacgtgttcgtgatgtttatggggttgaatcaagtggatgagaaaagacgctcgtgcaccagatggtggccctgggtggaccctggacctccacacac

SEQ ID NO: 418833 - DNA, 201 bp, Homo sapiens
aagtgggaggctgccaagcatagaatgtaccctctgccaagggagctcagagtccatgtccctgggatgcacgggatgggaaggaaggcaagtctgaagcrtcaagtttacaagagtgtgcacagcacaggaaaccagttgaaattgaagatggcaacagagaacggaaaagattgaaggagggaatttggaaagctgagc

SEQ ID NO: 418834 - DNA, 201 bp, Homo sapiens
cagaggtgtgcagtgggatggtgaccagctcttgttgatgaggcctctgtgggagggcctgtggatgcagaatgcacagtggtgggggtcggagggatgcygccagaacactcaccggctcagcttctgcctcagcttcttggttttagaatttgacttcttttcaaagtgaatggggagctgttctacttagtctgttag

SEQ ID NO: 418835 - DNA, 201 bp, Homo sapiens
tggggaggggaggggagagaagggaatttttgacttcaggctcaacttgatccagggatgcatacagtggcctcagggccaggtgcctgcttctgagtttygctggctggctggctgactggcacactttctcttcattttttggcttggcttcccttggtgggtgttagctcttcatctctatgtccccctggcaactct

SEQ ID NO: 418836 - DNA, 201 bp, Homo sapiens
agtagacagagggagaaaactccgagctggaagcctccatgatggaagaggccatctcacctcaggggaggaggcattttggagcactggtcaggcaagaktggaaggtagttaggagccgaagcgcaaaagcatccgggaaaagcaagcaggtgatttagccgattgtgggttcccgaagggaaagttcaccagctgggt

SEQ ID NO: 418837 - DNA, 201 bp, Homo sapiens
tggcagcaaagcagaagctgcctttgctctgccggtgaggaggagagctccctgccagcctctgccgccccaggcatgctgctgccctcttcccacagacygcatgtccttgaagctgggctccgtagagtggtccaccaggtcaccctgctggccacctccatttgtcatccctgggcacattctagacagcatcttggg

SEQ ID NO: 418838 - DNA, 201 bp, Homo sapiens
aacccatggatggctgtcactgacatttgtctcttctcattatcattagtgtctgggaggcaaaacacttgtttagaagctgtatctgccttattattacytactttgaaggagcaggtaaaaagtcattagggagctcactctcagagatccaggaatggtccctgccttttaaggtatgctgtttggaccaggtggctg

SEQ ID NO: 418839 - DNA, 201 bp, Homo sapiens
gccccacctgggtgattgtggggtcactgaactgtcgtgggatctcaggagaaacctcttcagagagtctgcatccacagggagaagtgtattcacacttmccacaggctggggagctgtctcacctatccttagtcagggcgagccttccattgtgaggtgctttatagtttgcacagctctatccaacttgttacttaa

SEQ ID NO: 418840 - DNA, 201 bp, Homo sapiens
ggggtaaatgtctcaaacggggcaacacagctgtcgagactagcattagacttgggggacacaaatgtcacataaaatgtgtacttttaaaccgaaggtgragaaagatgagggcaaacagactactgtagccagtttcttcatgtaaatgtggtgttaaattacccattgttgttcctctaagtgcatacttcattaata

SEQ ID NO: 418841 - DNA, 201 bp, Homo sapiens
agttgaaaaacattgtctgtccctttaaggagctgatatttcttttgagacgaactaatagaagagggaaataaaaatagcaatcctgggtttttgataarcctgtggcagagttcccattctgagcatcccaggagaagcaaggaccccttttaaactctgtcagaacctgttcctcttgggttcattgtcacattactg

SEQ ID NO: 418842 - DNA, 201 bp, Homo sapiens
ggggtctggacatcctgagtgatcattctcatctaccactcctctatctgggccattctcattcattcagtagctcatggattgtctctctatctgggccrttctctttcattcagtagctcatggattgtctgtctatctgggccattctcattcattcagtagctgatggattgtctaatatgtgctgaggagagaggg

SEQ ID NO: 418843 - DNA, 201 bp, Homo sapiens
cctgccccagacattctagccttctggactgattccatttggaagagaaggtgtgggaaatatagattcttagtaaaaggtggacccatgtagggaatttrtggatatctacaagcattagaaagtgaatcctgcatcttcattttttaaattatttgactatttttcattcaaaagttataaatgtttacaataacaaat

SEQ ID NO: 418844 - DNA, 201 bp, Homo sapiens
gtggatggtagagaaggcgacatttcagtccggtccagaaggaacacaggagtttgtcagaggcagggagggctcagaaggaggcaggagaatggacatcrtaatggcaaagggtgagccattgggtcatcctttggctaggacataagaggaagtcagaaggccccaggtacaagctgagccttctctgtcctgctgagg

SEQ ID NO: 418845 - DNA, 201 bp, Homo sapiens
gactcggattcgcccctatacggtccgtgtggtgggtcattcatacatgctcataaacatctgccctcgcctgctctgtccaggggtattttagtgacgcytggaacacgtttgactccctcatcgtaatcggcagcattatagacgtggccctcagcgaagcagacgtgagtatgcacctggcgtggccgccacctgtgt

SEQ ID NO: 418846 - DNA, 201 bp, Homo sapiens
taagctaaaacaagaaggattcagaaaatggagactcaccaagaagtgtctaatatctgagacgatggttcctggtggccttggggacatttggaaggctstttggttatttgcttaagccctatgaaattgccatttttgtaggtcaaaaagggttgaacactggcgatttcataaggttcaatgtaatatttcccacct

SEQ ID NO: 418847 - DNA, 201 bp, Homo sapiens
catgtttgcctgtatcggggtccagttgttcaaggtagaggaactgcctccaagcataaaactcaggtggatttctttaaggagaagcctgcatttacttractgcctgtctattttatacccaggggaagttctatcgctgtacggatgaagccaaaagtaaccctgaagaatgcaggtgagcgtcctgagagtggagta

SEQ ID NO: 418848 - DNA, 201 bp, Homo sapiens
cagagggtgcagggaccgcagcactcactcttctttgtgacaggcctgaggcagcttccctggggtccccagcctgcctcctccacggctgctatggccgkgggcgctgagcacgtgcagctgctgcctgatgctcctggacagggaaggatagattttgggcatagttactaggtgtcactgtctccttttttcagcctg

SEQ ID NO: 418849 - DNA, 201 bp, Homo sapiens
cctccagccttgtacgtccagagcatcattagggcctgtgcccattctgtccctcccacttctcttggtctccctccacgtcctgaggggatagaaagackgagtctgcataacctccgcatcttcctgcctgggagggcggctagggtggtgcctgcagcctctggaacctctccattctgtgtgcccctcaacctcatg

SEQ ID NO: 418850 - DNA, 201 bp, Homo sapiens
ggagatgctccttctgcctgggggagtagagaaatgcttcccagaggttatggaaggaaattggatttgtggaggtgactgacagatctgtgccccttgtrtcagtgtctctagctgcgacagacacatgggtcagcaggcgacccttgttttccctgagagcagcaaaggccctggtgaggatgtgtccagcactacagg

SEQ ID NO: 418851 - DNA, 201 bp, Homo sapiens
cgtcagggttctgccttcctgtatttgaggctttgtgtacttggtagttggagatgatggacgttgcatttgtgtgggctgaagagaattaaggaagaaasgaggcagggaagtttctccgaggaggcacattttgaacccgctgttaacgattatggcagtggccctttggaggcagctgcctctcttgctgactgtcat

SEQ ID NO: 418852 - DNA, 201 bp, Homo sapiens
aagggcttatcctgggccctgtctcaacatagcagggaccacagtgaggaaggcagctgtgagggcgccaggggagatgcagagtatctgtgacgggcccrgagggatctaccaggggtgtcttctggtgggtcttgcactgcctgcaaaggctgataagccactttcagtttgttgtgatcttcaaaaagcggaccccct

SEQ ID NO: 418853 - DNA, 201 bp, Homo sapiens
tgagcctgtataggagagcagttgctttcaagttatgttaaaaactcctgggcgggagcattcaaaaattactcatagataacaaatccagctacctgcaygtgcatgaaagcagggaactagagccactttcagacagtgacttcagcttaggaaacaaaaggttactttaaagtaatgctgttttacttatgtttaacc

SEQ ID NO: 418854 - DNA, 201 bp, Homo sapiens
tctaaattgcatttgcagcagtttttattttgggctgttaccatctggtggaacgtggcgggcagtctgaacagcagccagtcaggatttaccccatatcmccaccaaaggatctcagtcctttatccattcaattttcatgctgattcatttgattcactaagtagaattgataaatgcctacattgttcacctatgtgt

SEQ ID NO: 418855 - DNA, 201 bp, Homo sapiens
tcttcattttgcacagcaccactgttgtaactcctaaaacttacgcatcacggcagatgtgtgattctttcattctttagatctgtagttttcccttatayagaagttagtgtcttctcttccaatgtatttaaacctttaatgaatatttcatcaaatgaacttcatgtcttgtatttcattattaatgttgtttatgag

SEQ ID NO: 418856 - DNA, 201 bp, Homo sapiens
gacatctaaagacacctaaatcctggggctgagagtatggctctatttcttattgaggtcagttttcactggctgactgattcccttaccatgaagcacarggttgatgggtactcttaattgtgtgaaaagtgggaagtgggaatagttgcaaagggagttggaagtaggcagttttgaatcctggcttgcctgctgcat

SEQ ID NO: 418857 - DNA, 201 bp, Homo sapiens
aatctaggcaaggatgaaaggatgagatccttaaccaagaagctgcaggttgggatagcaggggaggccaggtgagatattgagatcagctgttgtcctarcagtttgactctttatttcaggcttgttctaaaaagggtttatggtaacttagatacatacatatgtatcctgttttttgtttttgttttttaaatacat

SEQ ID NO: 418858 - DNA, 201 bp, Homo sapiens
cccaggctcattcattactctaattgccaatgtaagatgtgcagactgatatgagttctattaagcacatcaattttcatgtggccaaacaggtgtttcayaagggatttaatgccctctccctagacttcagcaacagatgttaggtaattttttttaatgttcactttccctatttggcttctcgaggcaaacattgtg

SEQ ID NO: 418859 - DNA, 201 bp, Homo sapiens
ccatcactgacattaattgccattgtcaaccacggtgtctctttcactgcatacttttcccacagatgcgctcttattctctctggggccctttgtgcctygggtcagagtggaaactggaatccagcaatgcatttgactgagatgtctgtgacttgcttcaaatctagaagagttggataggaaggaccaagaacgtac

SEQ ID NO: 418860 - DNA, 201 bp, Homo sapiens
gggtcgtgagtgggagggtgtctcagcaagcccagcctgaatgtgcacgatggcctcaatcgacccagccacttgaaaaagcagccgctgctctcggttcytgctgttcttgcttggtcagctcttccctggggtctctgcgccctcacagagcctccctgtgaagcctgtccttggagactttgctcaccaggtcataga

SEQ ID NO: 418861 - DNA, 201 bp, Homo sapiens
cggttcttgctgttcttgcttggtcagctcttccctggggtctctgcgccctcacagagcctccctgtgaagcctgtccttggagactttgctcaccaggycatagacaattgttgttttccaactggaagagatcatctgatttagtctgttcatttcacacatgagaaacgaagaccaaaccccgtaccgtggcacctg

SEQ ID NO: 418862 - DNA, 201 bp, Homo sapiens
ctgtgtccctgcagcctgtcccttcccttcccacctgtcctcataccttgtgcttcagccatgtggactgctcttcgccctgaacagcttgccttcgtgcrggctcctcttctggatggaacaccctgcctggagcagggagggccatgatgagggagcaggtggctgtgctgagcctttccctgacatgcactcatggat

SEQ ID NO: 418863 - DNA, 201 bp, Homo sapiens
tagacaagccgagacagattaggaaccatgttttacatgctactcagagtctttggcttatacctgggtggcccctacaccactccaggactatcttagcytaggtttagaaggaacagaacacttctccaggccagaccacctgagacagccttctcacacagtaacactgagtggcttctgacagggaggcctggagag

SEQ ID NO: 418864 - DNA, 201 bp, Homo sapiens
agatggccttgtgtaacagtgacctgctgattcatggtgcaacctctgctctacccagacagctacaggggctggggaaagaggcatatgcgggttggcargtggaccatgaatccgactgaagacagtgatcttcctgcctctcatcacgtatcctaaaggtagctgagggaatcacaggctcagtcacacagcccattg

SEQ ID NO: 418865 - DNA, 201 bp, Homo sapiens
ctcttcaggaatgatcgtctgcatctacttcatcatcctcttcatttgtggtaactgtatccttcaagccgaccaggctttgttgttgccgtcgttatctsgttttgtttttcttcctctgcatttctctgtggtgatggtggtggtagtagttgtggcagggaggtaaatgcctttaccttattagctcaatatctgctt

SEQ ID NO: 418866 - DNA, 201 bp, Homo sapiens
ggtgagaaaatttaaaatgcagtcttagcaattttcaagtatgcaatacattgttgtaactatagccactatgttgtacaatagatctcctgaacttactytttctagcttttgtatactttgaaattttttatatgttgatcaacatctccccaatcttcctgacccccacctctggtaatcatcattcttctctctgct

SEQ ID NO: 418867 - DNA, 201 bp, Homo sapiens
tctacccagacagctacaggggctggggaaagaggcatatgcgggttggcaggtggaccatgaatccgactgaagacagtgatcttcctgcctctcatcaygtatcctaaaggtagctgagggaatcacaggctcagtcacacagcccattggcatctcaggtggtaggatttgcaaatgaagctttctcacttccaacca

SEQ ID NO: 418868 - DNA, 201 bp, Homo sapiens
ttaatgtttaagtctttgatccattttgagctgatttttgtatatggggtgagagaagggtctgatttcattcctctgcatgtggatgtccagttttaccrtaccccttattgaagagactgtcctttccccactctgtattcttggcacctctgtcaaagatcagttgaccataaatgcctggatttatttcttggcttt

SEQ ID NO: 418869 - DNA, 201 bp, Homo sapiens
cccactccggaagccagggccaccggcagctgcacttgggcttcccctaaaaagcaaaatgggagcagaaactccaggccagagggagagtggagctggaraaagagagccgcagagaggcagggtgagggctattctttcagacctgttgccttatttccactaggggcctctgaggccttttagtgaaggcttgggaaa

SEQ ID NO: 418870 - DNA, 201 bp, Homo sapiens
ggggtgagagaagggtctgatttcattcctctgcatgtggatgtccagttttaccgtaccccttattgaagagactgtcctttccccactctgtattcttsgcacctctgtcaaagatcagttgaccataaatgcctggatttatttcttggctttctgttaaagaggtaattttttaaaatttaaatttctattgtgaat

SEQ ID NO: 418871 - DNA, 201 bp, Homo sapiens
gattccgctaaggagggagcatttgaagggaaccttgaaggacaagcaggatcctgaggcaacgcagatggggcggtagggtgtcccgggctctggcaagsgttctcaccttccgctggcttggatttcctgatgtttctgtcctgagcggtacagcctgtttgctctgtttgcagatatcgtagctgaagaggacccagc

SEQ ID NO: 418872 - DNA, 201 bp, Homo sapiens
actgtaattccttaagcaaactcctggcccaactagcatttccattctgaattcctctatgtactgtctttgagtcttatggagacgataatcttggtgaraaaagggaccagccatattcactgcaggatctcccgtggatgcatagcatggtgccagaggcatggtaccccaactcagcacacactcactaataattca

SEQ ID NO: 418873 - DNA, 201 bp, Homo sapiens
ggtgcgtttttggccctgtatcacagagctctatgcttattcatctaaagagggaagttcatgtccatggggcaggcacccttggtggataaagcagggayggcaaagacatggaggtgggaaggtggctggcatgtgtgggagggagcaggttggcccatgacttggagtgaagcactctgacagaggagaggtgggaaa

SEQ ID NO: 418874 - DNA, 201 bp, Homo sapiens
gaatctaggcaaggatgaaaggatgagatccttaaccaagaagctgcaggttgggatagcaggggaggccaggtgagatattgagatcagctgttgtcctrgcagtttgactctttatttcaggcttgttctaaaaagggtttatggtaacttagatacatacatatgtatcctgttttttgtttttgttttttaaataca

SEQ ID NO: 418875 - DNA, 201 bp, Homo sapiens
tatttgcttaagccctatgaaattgccatttttgtaggtcaaaaagggttgaacactggcgatttcataaggttcaatgtaatatttcccacctctacctstcttatactgtacttacctgagccttctccaaccttttttgttttaaaataaatagtgagctgtatatattttgctatttttactttggggaactaaact

SEQ ID NO: 418876 - DNA, 201 bp, Homo sapiens
ttgttttccaaggggttatataaatttatactccctccaataatttatagatgctaaaatttttccaatctaatggttctaaaatgatatatcattctgayttgaatatgtatttctgtgatgactaatgagattgagcatcttttaatatagccatttagttttccctttttgtgaagtgtccgttgagtcttatgtcca

SEQ ID NO: 418877 - DNA, 201 bp, Homo sapiens
tatggtaacttagatacatacatatgtatcctgttttttgtttttgttttttaaatacatatgctaggatcataaaacctcatgctgtaatagcctctacmtgtctagatctatagctttattcctttcggtttttttcttctctgctttctagtagcacctatgagtgccttacatatgtctgatgctacagttaaagac

SEQ ID NO: 418878 - DNA, 201 bp, Homo sapiens
agcttgtgggtagatagatggtgtttgtttttcattgaggtgaaattcacgtaacatcaactgttttcagtatacagttccttagcatatagtatccatgrcattgttgtgcaaccaacatctctatctagttgcaaactttttgtcatcccaaaagaatggctagatggcttttgtggtggagaatctataaatgacggg

SEQ ID NO: 418879 - DNA, 201 bp, Homo sapiens
tttgcctgtttggaagtttggtttaaggaggagaccattatttctagctataaagaattaggttgttaggttgaataattgtaaagcctgtgcccgagccrccagttggcgatgcaggtggttgaggggagatgtgggtggtatataagaagcaaaggactctcagcccctgatgtgccccgcgtggtcttcttagggagg

SEQ ID NO: 418880 - DNA, 201 bp, Homo sapiens
tctttggacatgccaacagtgtattcatacttgaaacctgtgatcactgtaataaagcctaaattggtttcttcttttaaaatgtatccaaaataagctgsccctttttgattttggtttgaagaaattatcctgtggctcaaccccgttggtttacatttctgacttcttaatgcacacttgttaatgaagttatacttt

SEQ ID NO: 418881 - DNA, 201 bp, Homo sapiens
ccttccatccatcttcatcattaaaaccaaccttctctccagcccctctacagagggaaccagagagaagctgcatcaggccttttttaatttcctcttgygcatctcctacatgccatgttcactttgggttgactcagcatttgctcgtcatccattgttgctacatccgagtgacccacgagtttccacgaggggcaa

SEQ ID NO: 418882 - DNA, 201 bp, Homo sapiens
acagtgtattcatacttgaaacctgtgatcactgtaataaagcctaaattggtttcttcttttaaaatgtatccaaaataagctggccctttttgattttkgtttgaagaaattatcctgtggctcaaccccgttggtttacatttctgacttcttaatgcacacttgttaatgaagttatactttcctcaagattttgca

SEQ ID NO: 418883 - DNA, 201 bp, Homo sapiens
caaagccggaaatgggtggtatggaggaagaaacagaatagctgaagatgggatgaaggaggaactgcctgaactgatcagtgagctccacagccccctcygtgtgtgtgtgtgtgtgtttgagagagtaagagagagctcatgctcatgagtgtgtgagttaggggaaaggtggaggtgggcattgttgacacaggcctt

SEQ ID NO: 418884 - DNA, 201 bp, Homo sapiens
tttaagatatgcacaaacaacacacagctaagtcattaccaggtttcacgtatggggtttactgagtcttaagttgaagggtcaaatggcatgaatgatayagcggcaggttgtgggttaaaagactctttttgtgttgcaataatgttgagggtttctcctaaacgtttttcattttattgtttatagagtttcatttta

SEQ ID NO: 418885 - DNA, 201 bp, Homo sapiens
atgttgtctcctgatggccaggaggccagctgtgcacatgctatgctctcatgccccagccagcctctggtccctctccctcctccacctgggccctgctscaggctcctagagtgtggatgtggctttcaggaacctctggtaccagccagggtccttgcatgcgaggaatgtagaaacctaggaaagcccaaagctctg

SEQ ID NO: 418886 - DNA, 201 bp, Homo sapiens
cactgagcctgatcttttcaaatatttttggaaaaggataagtgtgatatttcttctggaaatattttggaaaaggatcctgtgatagggagtaagtggckggagaaggtaggctgccagggccctggtcagagtgcgtttcctctgcccagatttaggggctggatcaagggctgtttccaggaccaaatgaggtctcca

SEQ ID NO: 418887 - DNA, 201 bp, Homo sapiens
gtgcacgggaagacaccttccatagcctggccaagaaactccattacacagaagtggtcccacagaattcataagtccaaaaccagaaacagtttggaaartgaataccctctgaagagagagactgggcttgaaacagaggtcctcgcattattgtgacacagcccccaggcgactcctctacctccaacagctcacccc

SEQ ID NO: 418888 - DNA, 201 bp, Homo sapiens
atctaggttctagtcctggttcctccaaaggctgattccagggccttgagggcatcctctctcaggaaccctgtgccccttttatataggaggggctgggrccaggtggcctttcagtttttccagcttagatattgagaacttcctttgattttcaggatatagaacctgctaggactttttctttggcctcaaaatttt

SEQ ID NO: 418889 - DNA, 201 bp, Homo sapiens
gtcgggctgaagaacaaggttgtcaaggctgcagaaggaggaatattctgaggagatggccacatgggacctcagcctcctctcaggagagcctttgtctyatgggaggagctttgtaacagggtccctcatggcagagttctccactgagtcaggtacaccttctagcaggactcgtcagtatctctgttaggggacaca

SEQ ID NO: 418890 - DNA, 201 bp, Homo sapiens
ccttcccattagacttttatacatagatcatcagatttggggctcacaaattccttttgtctgctgatagatgggccagggagggtagcagtcagtgaggrtaaaatgggagagaggcactgtgatcatagggcggggagagaggtggagagttggttagaaaccacggcggttgggtgggggaatcttacattattaaga

SEQ ID NO: 418891 - DNA, 201 bp, Homo sapiens
cggagtactaaagtggtcacaagctttacccccaagagacacagcacactgaagatttggtagcaagcagccgtgggagagccatggggcacatttacacrtccaaagtggtttaccatgagacagccagagcctctattctgcctcatgcatcacctttaaagtcatcagcagagttctgattccccaaccatacacgtt

SEQ ID NO: 418892 - DNA, 201 bp, Homo sapiens
agtctgacatagaagagactagaggccctgcccttaaatctccacacactttagaaatccagacacaaatttattttgaaagactaaggataatttgtagwttcctctatctcaccccatctctatctccttcccctgaaaaagagtggggaagtctatgtagaattgccttttggaactagaatagtatttcaaaagatc

SEQ ID NO: 418893 - DNA, 201 bp, Homo sapiens
ctccactccaagtggctgggactggcagatgtggggtgctcaggaagccccttttagccctggtgatagaactgagtcagatgcttgtcttgggtggcttygctagtgtgctgtgaggtgtggcctggctcctcatgagcctgatgatgagatcaggaatgagctgtggatctgtggatacatgtcaggcttgcttcactc

SEQ ID NO: 418894 - DNA, 201 bp, Homo sapiens
atctactcggaggtatatttacatgaaaattctggaacatacccttctgtgagccagagatggcctataatggaagcgaaaatacaataaaccagcagcasggcagatctccctggactgctcagcacttcaagtgctgtgcaggtggtgggtgtaaacacttagcttccgggcaccaggatgtggccaaggtctgtccac

SEQ ID NO: 418895 - DNA, 201 bp, Homo sapiens
tcttcttctttcttggtccaataactggacctcgccttttctctctatttcttaaaatggattggagtttaggatgacaggttttaatctattccacaacrgcagcgagaggcagtgtgaggcacaagaagagagaagtggggccttaggagggatgcaaggctttgcaagctccctgcctgtgttgagtgatgtgcccag

SEQ ID NO: 418896 - DNA, 201 bp, Homo sapiens
ggaccttgcatcattagacaagccgagacagattaggaaccatgttttacatgctactcagagtctttggcttatacctgggtggcccctacaccactccrggactatcttagcttaggtttagaaggaacagaacacttctccaggccagaccacctgagacagccttctcacacagtaacactgagtggcttctgacag

SEQ ID NO: 418897 - DNA, 201 bp, Homo sapiens
tgggaggctgaggtgagcagattgtgagtccagaagtgagcagattgcttgagtccaggagttcaagaccagcctgggcaacatggcaaaacccctgtctytactaaaaaaaaaaaaaaaaaaaaaaaaaaaaaattagccggcgtggtggcacatgactgtagttccagctacctgggagactgaggtgggaggatggct

SEQ ID NO: 418898 - DNA, 201 bp, Homo sapiens
ctcttacctggctgcatcaagcctctgttcaccttttgacagcagcttgggagctctgtgaggacagggttctggctttgctgagaaggatgcaggtgctyggggatagatggatagacagatggacaagtattcatgccacagcactaataagaggattcttaaaataggaaaggaaagtaccaagtctaatgaaggatt

SEQ ID NO: 418899 - DNA, 201 bp, Homo sapiens
tgctatgtgcctcagtctttccagctgtacatggagttactgatgtgcaccctcgtccccgcaatggttctgtgagggcacaggcaggagaccccacagcyagctatgccctgagcctgtggtggctgctgctggtgccctcacctgtaccgtgtctgctctgagtctgactggtgacactggtgaacgtcccacacccaa

SEQ ID NO: 418900 - DNA, 201 bp, Homo sapiens
tattaactagtttagagactactgatttagagcctctcctgttggtgaaatttcactgtttaaagaagacacatcaggttttagaattagatttcagcctytgtttctctagtggcttgagttctcgtgggcggggtagggggagggagtggggggacatccgtccatatacagggtagtttctggacgttgttttctaaa

SEQ ID NO: 418901 - DNA, 201 bp, Homo sapiens
taaataaaagtcagagaggaaaaacaagctttgtttgggaggtgtactgtctgttctctgccttgtttttctgctctgaagtatagtgtgctgtcttgacstaggtatgtaactgctatgaatattgatggcagcaaaagcttttttttttctctctggcctagtaaataaagcagcaaggataaaaagggatgaattgta

SEQ ID NO: 418902 - DNA, 201 bp, Homo sapiens
ggtgtgaaagcagcttaaatgggtaaaatgctgcccttttatgtcagtaattagccccttggtcttttttcacgataatgcaaaattgtacttctctgtaggcttacacaaattctgaattattgaaatataaattaatggtgaatctttctaaagctcttttcagaatttttatctggtgggagtgaaattaaaacatcc

SEQ ID NO: 418903 - DNA, 201 bp, Homo sapiens
actggtctgaagtctagagggggcatgagtatagaggttggagatgagctaggctttctaaattaaattataaacacactgatgctggctaactctcaaamcacacacacacacacacacacacacacacacacaattcgttcactagactgttataatggtgttctgaggagcaaagggagctttggagggcaagtgttt

SEQ ID NO: 418904 - DNA, 201 bp, Homo sapiens
aatcctaatccctcactgcaaggccctgaatcctaattccactccatctctccatgatgccagtgccacatctgggacctacgcagaagagtcatacctgccagcacagctatggtgattgtgcttgggaagaagttgaagttgcagaaggaaggtggtagagagggactgaaagagccaaccaggccagagctcgacagg

SEQ ID NO: 418905 - DNA, 201 bp, Homo sapiens
ttatgtctaaaaaatgcacataccttaattaaaaatactttattactaaaaatgctaatgatcatctgagccttcagcaggtcataatctttttggtggtraggggctttgccttgatgttgatggctgctgaccgatcacagtagtggttgccgaagaaggctggggtggccgtggcaatttcttaaaacaaggaagttt

SEQ ID NO: 418906 - DNA, 201 bp, Homo sapiens
tagtgccaatgttaagttaaaaaaagtaaaaagtaataaaaccttcatagcagtaaggtactctgctatttaacatcccttgagcaaagctattaattttyttttttttttttttttttttttgctgacttgcgggagaaactctggcatactactgttccattttaaataatgaaacaagtgtctggataatgtcacgta

SEQ ID NO: 418907 - DNA, 201 bp, Homo sapiens
tgcatgccacgtctttattatccttgctgctagctcctctggtacagcagcactgtgacagtttggaatttgagcctgggcactctcccctgagtgcatcrgtgacgtaaaggcaggcaggcaggagcaatcacagcctcccgtcgcctgtgtgtcccaagtgagccccctccccaaagggatgtagggaagccagtccat

SEQ ID NO: 418908 - DNA, 201 bp, Homo sapiens
tcagggaatttgaacatatggcaataacatgaagaataatgattgaggagaaaatgaatactgcctctgtggcctgtgggggaataacaagtggtctaacwtatatatatatttggagcctcagaaggagaggagagaaagaggagacagaaaaaaaattttgaagaaacagctccagattttccaaatgtgatgaaaaat

SEQ ID NO: 418909 - DNA, 201 bp, Homo sapiens
tactcttagttctatgatttctgtgacatttattggcttaaatgtttgatttttctccatatttaccagtttttgaagttttttttttttttttttttttwtttgacagagtctcgttctatctcccaggctggagtgcagtggggtgatcttggctcactgcaacctctgcctccacagttcaagcgtttctcgtgcctt

SEQ ID NO: 418910 - DNA, 201 bp, Homo sapiens
caaagtaaccacgacagctttttcccccaaagagcaaataacaggacagcctgtctatggtatgtgttgtgtgcagactttgggggctgtggctgtgtgcktgtgtgcgtgcgagcttctggccagtgaaaaatccaagaactcacatagcattgtgtctgcttccttggctaatgaggtttttactaaactagtgcagtg

SEQ ID NO: 418911 - DNA, 201 bp, Homo sapiens
ttatatttagattggttaataaattcagccaacttgacctaattgatatttataaaatactgtgttcaataattgcggaatacacattcttttcagagcaygtggaacattcaccgacatagaccatatcttggccatgaaagtctcattacctctcgattgaaattttacaaagtatctttgttctaatggcagtagatt

SEQ ID NO: 418912 - DNA, 201 bp, Homo sapiens
ggatatgtggtatatagtaaagatttcaaatatagtaattattattatatactatttagtattatatgcaacttatatatgatcttttaaaaaaagtcttrtatctttgcctttctatttaaatttcctttaaaaaaaattgacaccaaagaaataatagtgtcacattgtttgcaccttactttttcacatacaatttta

SEQ ID NO: 418913 - DNA, 201 bp, Homo sapiens
tggataagtgggttttgtgagctagagccactggagaggtggctggaaaagaaaccctgaagtcagttatttgggaagggaagcagatgctgtctttaccrgcagtcttcatcatcctgctcctcgagggccttagtttcagttgcaggaagctgctgcgcgatgttggcttctggctttagtcctctacttcccagtgct

SEQ ID NO: 418914 - DNA, 201 bp, Homo sapiens
tctactaatctagaaaaagaagaccaaataagtccaaggtaagtagaaaaaagaataacagaagtaaataaaatagaaaacacaaattataaagttatttrgaaagcgtaataaaaattgataaatctctaacaaaactaatcaaaaaaggaaaaagagcaaattaccagttttataaatgaaagaggagataccacagat

SEQ ID NO: 418915 - DNA, 201 bp, Homo sapiens
agcgaaactccgactacatgtaccctaaaacttaaagtataataataataaaattaaaaaaaaaaaaaagaacagcagcagtaaaaaataaataaagaaakaaataaataaataaatgaagaagtcaatcggtaccataagaaaggacaaaaaccaaaacaaacccaaagcaaaaccaaaaactccccacaaaccagcctc

SEQ ID NO: 418916 - DNA, 201 bp, Homo sapiens
aagaagaaaacataccttggctttgcagattgtatccttctggagagctgaattttccagagtgctaaagctgaattgtatccattgtaagcaacaaagcttttttttttttttttttttttaaattatctttaaagaatccattttaaaaggaaattctctgaaaatacattacacatttaactaccttcagaagcagcc

SEQ ID NO: 418917 - DNA, 201 bp, Homo sapiens
gggtcggatccacaacgaagagcttaaatgtgagcccacatgttaatatgcccctttgtgatgtaactctcttgagcttccttggttccctgatgtcctcyttttgctgtcctccagctagaaagcgaggaatttagttcctctgttctcctgcattactttacgtgactgtgtccaaggccaagcgcttgaaggtcaggg

SEQ ID NO: 418918 - DNA, 201 bp, Homo sapiens
actcagtataaccttaaacccagtgtgagtttctcccatgataatatttcccattctttagtattactataaatcatcccagcacaaaaccttagctgtcwtcctttctatttgaagctacagacctctggcagaaagggtaggaatggcacgtagacttccagggctggtggacccatccagcctgccatgaaaacagtt

SEQ ID NO: 418919 - DNA, 201 bp, Homo sapiens
tttgcagattgtatccttctggagagctgaattttccagagtgctaaagctgaattgtatccattgtaagcaacaaagctttttttttttttttttttttwaaattatctttaaagaatccattttaaaaggaaattctctgaaaatacattacacatttaactaccttcagaagcagccggctgagaacttaacccgaca

SEQ ID NO: 418920 - DNA, 201 bp, Homo sapiens
atgcccatcctcgtgaaatgccctcggagggtgtcatttgcattagtgtgaaacttcatttcttttcattttaccaaaagaaaagtccagaatttagctckccatcgaagctcccttcctttgaaaagctgatcaacttttagctttatcagacttctagtagagtagaaatcttcttctttcttggtccaataactggac

SEQ ID NO: 418921 - DNA, 201 bp, Homo sapiens
gagaggactgctagcatgtctcaagtcatgactaaactgggatttgtatccaggcctgtccagcaccaaagctgttgctcttcacactctaggatggcacraatctcctttttttctgttttatcttgtctctgtacaaaaaagccatgtcaataatggtataggtcattgaaagccttatactttaagactgctgcgctc

SEQ ID NO: 418922 - DNA, 201 bp, Homo sapiens
ccctgcctcctgtttcctcatcctttatctccttcctttatgcttcactttgtcccagaatgttttgagttgactcatactactgcttactacatagcaarggaaacaggcagggtatcggagcagagacgaagccatcacaaatgaactcactccaaccatccctaactagttgtatgacctgcagtgagggatttcact

SEQ ID NO: 418923 - DNA, 201 bp, Homo sapiens
aaatacagaaagtaaccaggcgtggtcgtgggcgcctgtagtcccagctacttgggaggctgaggcaggagaatcacttgaacccgggaggcagaggttgmagtgagctgagattgcaccactgcactccagcctgggtgacagcctgggtgagggcgagactctgtctcaaaaaaaaaaaaaaaaaaaagtgcttatctt

SEQ ID NO: 418924 - DNA, 201 bp, Homo sapiens
tgctgttgtcttgcccacgtctactctctactaataagttaagaggcacatacaagaaggcccatctggttggtgcttctagcagagaagctgattcatgyttaattttgaccacatctctaggtttgtggttactgctcagaatcaggatagcatctgggtatctcgaagctgctgtctccagtggaggctttggactga

SEQ ID NO: 418925 - DNA, 201 bp, Homo sapiens
catcccatcttgccttcctcatctgggccttttcttggccaaggggaggccctggggaaggggctggcaagtagaatgaagatgtccatgctgggcttgcyggctggcccctgcctcctgtttcctcatcctttatctccttcctttatgcttcactttgtcccagaatgttttgagttgactcatactactgcttactac

SEQ ID NO: 418926 - DNA, 201 bp, Homo sapiens
catgtttaatgcaaccctgtttgctttggttcgaacggctcttaagatcaagaccgaaggtgagcattccctgccagcaagacaagatggcaggaaaggaragagacatcacatcccatcttgccttcctcatctgggccttttcttggccaaggggaggccctggggaaggggctggcaagtagaatgaagatgtccatg

SEQ ID NO: 418927 - DNA, 201 bp, Homo sapiens
acatgatggtctaactaggcaaggtctgaaggacattccctgagttgggaatagtaatggatcccgtcggttgagaacctaagtcccaggccctgtgcctrgcccattgtcttttacttcctttaaccctcacaacagctttaaaaacatgcttggagccgggcacggtggctcacacctgtaatcccaacattttgggag

SEQ ID NO: 418928 - DNA, 201 bp, Homo sapiens
ttgtggctggcataaggtttattcatttgggagttagtagggctacttaggccacctgaaaaattgtaggatgtacgtttatgcatggaggcatgcacttraacacgaccaggaagacagaaacttagcaaaaacgtcaaggccttttgcacagccagtggggaacatcctaagatgtatgatttcaaattttttgggatt

SEQ ID NO: 418929 - DNA, 201 bp, Homo sapiens
ctgtaataatctggaataataagatcgtaggcactctttcttgccctcacatgtggatctgccttctccttttaaacagccatgtaacgttccctttctcrcctactttgaatttttatattcttgctgctctaaggttttttttttggagcaaggaaagcaatttaaaacataaaatttactttcaaaagaagagtagag

SEQ ID NO: 418930 - DNA, 201 bp, Homo sapiens
aagcctaggaagatgagaaagacaaagctgcttagtagagagctccaggggaggcccaggctcagatgaatgtggagaggttagaatgcaccaggaaaaaytgcatgtcatggcagaagaattatgctttatcataacaaagtgaaattcacttgaaactaactatttccagatgccaagactgaagagagaagcaagtag

SEQ ID NO: 418931 - DNA, 201 bp, Homo sapiens
agtgtcggggtctgtacaaatcgtattgttgccttttacaaaactgctgtactgtatgttctctttgagggcttttatatgcaattgaatgagggctgaarttttcattagaatgcactcacactctgactgtacgtcctgatgaaaacccacttttggataattagaaccgtcaaggcttcattttctgtcaacagaatt

SEQ ID NO: 418932 - DNA, 201 bp, Homo sapiens
ttcttcctcactgtcgatattctttcacggtaacacgtggaatagaaaggaagcatgtggccactcatgggtcttctcaggctgtggcgggccgtcacggrgacagccggctggtgctgagccaagtgccttttctctcccaggcgctcccgtatgtggccctcctcatagccatgctgttcttcatctatgcggtcattg

SEQ ID NO: 418933 - DNA, 201 bp, Homo sapiens
ctttgggcaagagttccatgattttgatactgtacctttggatccaccatgggttgcaactgtctttggttttgtttgtttgacttgaaccaccctctgaagtaagtaagtgaattacagagcaggtccagctggctgctctgccccttgggtatccatagttacggttttctctgtggcccacccagggtgttttttgca

SEQ ID NO: 418934 - DNA, 201 bp, Homo sapiens
ctctcaacagtaagctaaagctgacattggcagtctcattcaacgaatgtgaaataaccagaaaagacattccaaggcgttctggaatcaaacagatggayggagcaaacatgttaaaaacagtaaatcacaacttgaacttcagctaatcataattgcatttctctttccttatttaattttgaaacatcttcctaagta

SEQ ID NO: 418935 - DNA, 201 bp, Homo sapiens
ccaggcccgagcagcaggcggaggaggagccgccatcagctcttgactgggggacattcttggagctgtcctctaagtcaggcctgcaggtgacttccagrgatagcgttggtgttccaaacggcaattgagaagactgtcttaatatttttactctcaacagtaagctaaagctgacattggcagtctcattcaacgaat

SEQ ID NO: 418936 - DNA, 201 bp, Homo sapiens
aaaagggaggatgttggcagccagctagaaagtggagctgaaatccccttataatttgaggatctagctcggcagctatttgcatgccctctgtctttagytggctattttctgtgctaatggacaggagttaaaatgaggtaactgtctagaaagattttggagagagcagccaaatgctagggtaggatttgaggggtt

SEQ ID NO: 418937 - DNA, 201 bp, Homo sapiens
gtaaatgtggtgttaaattacccattgttgttcctctaagtgcatacttcattaatacctgcaggggaaaaaatgacctctatttacagccaagcatctckgagccgacgcctgcctgcccaccagcctcctgtggtttacccaccaaaattttactagaggttgaatcggcttgtagaagctgtgtgatagcgctgcggc

SEQ ID NO: 418938 - DNA, 201 bp, Homo sapiens
tatgcatgtgtgtgtgtgtgtgtatgcacatctgttatttatattcataaaacgtcttttcataaagaggaaggaggaaggagatgatattggctgagccaggggcatggcttctgtatgcaggagggccctcaggttaggtgaagcattcatttttgctattatttcctaaattgcaacttctagtcagattagttgaga

SEQ ID NO: 418939 - DNA, 201 bp, Homo sapiens
ttccttcctggggccaaaatctgctattattcggcctgaaagccttgatgactctgtgtgtgtgtgtgtgtgtgtgtgtgtgtgtgtgtgtgtgtgtgtgkatggatgcttgtgtgtgtgtatggggaatatgtgattaatgtgtgttggctgctgttgtctctgatttggctactgttgtttctgatttaaatctaagta

SEQ ID NO: 418940 - DNA, 201 bp, Homo sapiens
attaattgttataaaacgatagcaaaatgagctggattgggtgggcttttggtagtccccatttgtagatttcagccgctgagcttgtccttatttgcagaaaaaaaaaaaaaagggaaggacctaggcccagtccctgtcctaggagcactaaccttcagcaaagcactgagaggtttggcagctgcaactggggctctg

SEQ ID NO: 418941 - DNA, 201 bp, Homo sapiens
ctagtgcactatgagaccgagcaggtatttgttaaatacttaatggctttctggaacatcagggctgacaagattctgagttataatctaatgttctcagytgaagtgcaggagaatgaaggcctatggagagaagcaggcccagggtcctagggctggatgtagctgagctagaactcagaaatgtgctgttgtcttgcc

SEQ ID NO: 418942 - DNA, 201 bp, Homo sapiens
ttttagctttcccaggcaggaaccgttgccccagcagacatgatgaagtagaggcaggagccagatcgtgaggtgcttaaaaaaagaaaagagaaaaagaygggcgggggggcttcccactatcacaaatggggattaaacctgcaactccgtgggaggtacccaaagctggaggataaaaaaggtacactccttcatgga

SEQ ID NO: 418943 - DNA, 201 bp, Homo sapiens
aaggtgggacaagaagctagggcaagggtattctagtcaagggaaaacccacagaaaggaggtacagtaggaaggagcagaggatgctggaggaactgaaygaagctagggtgacaggaactgggagagctggagatgaagtcagatgaaaggaaagagactggccggcagaatccaggtcacgtaggacctttagactat

SEQ ID NO: 418944 - DNA, 201 bp, Homo sapiens
atccaaaataagtcagaaaaggaagaaaaaggaacaaagaacatatagtaccaacaacgagatggtagacaaacccagtaatatcaataattgcattggaygaaaatgtacacaacattttagttaaaagatagaaattgtcagactaaataaaaatttaagatgctataaagacatggattaaaaataaaaaatggatga

SEQ ID NO: 418945 - DNA, 201 bp, Homo sapiens
gttggcacctaaatacagcttgagagtacatgaagcaaaagttgttaaaattaagtggagaaattgataaatctagaaacatagatgaaaatttgtatcattccttctcaataattactaggttaaaaacagcaaatatagataatatctagattatatttagattggttaataaattcagccaacttgacctaattgata

SEQ ID NO: 418946 - DNA, 201 bp, Homo sapiens
ttggcacctaaatacagcttgagagtacatgaagcaaaagttgttaaaattaagtggagaaattgataaatctagaaacatagatgaaaatttgtatcattccttctcaataattactaggttaaaaacagcaaatatagataatatctagattatatttagattggttaataaattcagccaacttgacctaattgatat

SEQ ID NO: 418947 - DNA, 201 bp, Homo sapiens
tttggtttttgtaatttttaaaagtatgatatattttagcatatttactgtgttctgctgaagttactgaccctcagatcatcccccttgtggtagtgtgwaccttctcacattggtccctgtgtctgtttggcatgacctagtagtctctgatagctttctctctttctggtacaacaagatgttttggattcatcttac

SEQ ID NO: 418948 - DNA, 201 bp, Homo sapiens
tggcacctaaatacagcttgagagtacatgaagcaaaagttgttaaaattaagtggagaaattgataaatctagaaacatagatgaaaatttgtatcattccttctcaataattactaggttaaaaacagcaaatatagataatatctagattatatttagattggttaataaattcagccaacttgacctaattgatatt

SEQ ID NO: 418949 - DNA, 201 bp, Homo sapiens
tgggatttaaacggttcttcctcactgtcgatattctttcacggtaacacgtggaatagaaaggaagcatgtggccactcatgggtcttctcaggctgtgscgggccgtcacggggacagccggctggtgctgagccaagtgccttttctctcccaggcgctcccgtatgtggccctcctcatagccatgctgttcttcat

SEQ ID NO: 418950 - DNA, 201 bp, Homo sapiens
tctttgggcaagagttccatgattttgatactgtacctttggatccaccatgggttgcaactgtctttggttttgtttgtttgacttgaaccaccctctgaagtaagtaagtgaattacagagcaggtccagctggctgctctgccccttgggtatccatagttacggttttctctgtggcccacccagggtgttttttgc

SEQ ID NO: 418951 - DNA, 201 bp, Homo sapiens
agggagggccaggctggcaggcacaggtcaacagctggcacaggtctgaaggtggctgagcacctgtgagccactgactttctgacaagctctctcggatrgtagagaaagcgggtgctttaagcatgtgttcccagaattaagcctaacactctgggcaccctgtgcaggtagacgtgttggtcacatgtgatgaggtaa

SEQ ID NO: 418952 - DNA, 201 bp, Homo sapiens
ttctttgggcaagagttccatgattttgatactgtacctttggatccaccatgggttgcaactgtctttggttttgtttgtttgacttgaaccaccctctgaagtaagtaagtgaattacagagcaggtccagctggctgctctgccccttgggtatccatagttacggttttctctgtggcccacccagggtgttttttg

SEQ ID NO: 418953 - DNA, 201 bp, Homo sapiens
ttttctctttcattttctacaggggcaatcggagctgtagagcctctggttggtaacacccattgtagaatagtggggtgtgggcctcagagagactgagrttatcgctggccccattgtttactggccatgtggtctggagtgctttgctgcatctccctgggcttggcttcctcatctgcgaggtgggggtaataggtg

SEQ ID NO: 418954 - DNA, 201 bp, Homo sapiens
tccctattagtctttaactcagcatactgttttccttcaaactggtggtcaaaacatcatcattctctcagagctggagcagtaccttcctccatgcaccrtgcataagcatcttggaatgcttccctaatgaagtcgtgaacaatggaagggcttatcctgggccctgtctcaacatagcagggaccacagtgaggaagg

SEQ ID NO: 418955 - DNA, 201 bp, Homo sapiens
ttcatttaaagtaccaaaacttgggaacaaactgctataaaaatagataattcagaggtaatgttatctcactttttaaagaaattcttaaagattcaatytgccacagataagaaagtcatgttccagagcagcagttcataaaagcagagaaactgtgcaaacaaaaatcgtaaacatttggcaatctaggaagaaaat

SEQ ID NO: 418956 - DNA, 201 bp, Homo sapiens
ccagaagtagaagaaatagagccaattctcatttattcagcgaaaatcctctggggttaaaattttaagtttgaaagaacttgacactacagaaatttttytaaaatattttgagtcactataaacctatcatctttccacaagatataccagatgactatttgcagtcttttctttgggcaagagttccatgattttgat

SEQ ID NO: 418957 - DNA, 201 bp, Homo sapiens
caacaaaacacgaaatcgctgatgcctgtgacctcaccatcgacgagatggagagtgcagccagcaccctgcttaatgggaacgtgcgtccccgagccaayggggatgtgggccccctctcacaccggcaggactatgagctacaggactttggtcctggctacagcgacgaagagccagaccctgggagggatgaggagg

SEQ ID NO: 418958 - DNA, 201 bp, Homo sapiens
actgtccacgcgaaggccacgtttctgtcctgagtgaggtagtgaagagagagacaaggtattggcgtatttcctgtggggcctgatagggagggaggtgwgaggggcacgagcagtctgagtgtcttgcaggagaccctgaggatgggtgcccctttgtctttccagatattgccaacaaagtcctcttggctctgttca

SEQ ID NO: 418959 - DNA, 201 bp, Homo sapiens
gtgaatcctgcatcttcattttttaaattatttgactatttttcattcaaaagttataaatgtttacaataacaaatgaagctgtccaaaggtatataaasagaaatttcaaacttggccctcacccacccctggggtaaccagtgttaccctcccagtaagcatttgtccctagtagatgggattttcacaggtaaaagg

SEQ ID NO: 418960 - DNA, 201 bp, Homo sapiens
gagaatggcaggtgggtccacctcagaaccaaatgacttcccaggctcagatgtgctgaactcgtggatcctgagagagggaaagtgtgtgtatgtgtgcstgtgtgtgtgtgtgtgtgcgtgtgtgtgcgtgtgtgtgtgcacgtgcacgcacgtgtatgcacaagcatacccacatgtgcatatgtgtacacacatgca

SEQ ID NO: 418961 - DNA, 201 bp, Homo sapiens
cccaacagcctctctctgacaccttttcctcataaggctacaacagtgctgtgtctgttggctagtctagatacaaatcagaaaccaccacctgggccagygcactatcactgggttatcctgcacctggaagggtcacagagttcgggatgtttgggcatacaccatgtctcatttgtcacctctgattctccaggctgg

SEQ ID NO: 418962 - DNA, 201 bp, Homo sapiens
tgtttcttaccccactgcttgttggtttttggtccatttcagtaacatccatcacctcctagtatgtattctgtgtgtgtgtgtgtgtgtgtgtgtgtgtrtgtatgtatgtgtggtgtgtctgtctctgtatgttgtctcctgatggccaggaggccagctgtgcacatgctatgctctcatgccccagccagcctctgg

SEQ ID NO: 418963 - DNA, 201 bp, Homo sapiens
agaaaacatggaatgctggagagacccaaatcagcatttcttgggtcaatcacatgggattacttgcctaaaggaaacagaagagaaagcaggaaggatcygtagctgagagatctgtagcatttccaagactgagagaggtgtggggcctgcagccctgcagtgcccccgggatgcctggtggtggtggtgagtgccagg

SEQ ID NO: 418964 - DNA, 201 bp, Homo sapiens
tatttatcacaaaataactaaccttctttaaatttttatatatataaaaaacatctatatatatacacacatacagtgtgtgtgtgtgtgtgtgtgtgtgkatatatatatatatatatatatatatatatgcatactggctttgcatttttatttaagtacatgtggacttagacgttgagatggttgtttttgactgtt

SEQ ID NO: 418965 - DNA, 201 bp, Homo sapiens
ctgggcacggagtggagtgaggcaaggcccctgccctccctggggtgggggttggggggcaggtaagcaccagtcattacagattctgcatcctggggccragggacaggagcacagccagaccctggaggaggtggagctgctgaaccacaggggagctggtcctccactgtttcttccaaagactcatacggacctgca

SEQ ID NO: 418966 - DNA, 201 bp, Homo sapiens
ttatttatcacaaaataactaaccttctttaaatttttatatatataaaaaacatctatatatatacacacatacagtgtgtgtgtgtgtgtgtgtgtgtrtatatatatatatatatatatatatatatatgcatactggctttgcatttttatttaagtacatgtggacttagacgttgagatggttgtttttgactgt

SEQ ID NO: 418967 - DNA, 201 bp, Homo sapiens
ttcgtattacacactgtaataatctggaataataagatcgtaggcactctttcttgccctcacatgtggatctgccttctccttttaaacagccatgtaaygttccctttctcacctactttgaatttttatattcttgctgctctaaggttttttttttggagcaaggaaagcaatttaaaacataaaatttactttcaa

SEQ ID NO: 418968 - DNA, 201 bp, Homo sapiens
ttctgagcatcccaggagaagcaaggaccccttttaaactctgtcagaacctgttcctcttgggttcattgtcacattactgaatttcagtttttctgtgrtatgctgaaaccccttattttctgtgaactttgtagaatttccctttggtctcaggaggtagcccttgatgctagagaggcttcagaactgagctctacc

SEQ ID NO: 418969 - DNA, 201 bp, Homo sapiens
cctgggcaacaaagcgagacctcatctctaaaaaaacataacaaaacaaaaacaatgtgcctggaatggaggtctgaccctaagatctccattgagattartgaaaaaaaggagaagactgtttgaacagtgaagtttcacggtttaaaaaacaaaacatcatctgcgtgttaacatttatatttcatgactaaacctttg

SEQ ID NO: 418970 - DNA, 201 bp, Homo sapiens
atacataagttgtgcacatttcagaaggataactgtagagccgtctctctcgtgcacactgcctggtcccctgaacacaggcaagcagaggtgcacatgcrggcacacttagcatgcacactcacaccccacactccagccagagagggaagagtggaaccttcctgtgcacagccttagtgagaatgatgtggaaaatga

SEQ ID NO: 418971 - DNA, 201 bp, Homo sapiens
tcaggtaaaggagggatgtaagtcagaaagaagtaaagtgattctatgatttttggggcagagaaatggtagtgcttttttcttttttcttttttttttttaaaatcctgaaagcatagaagcatttgcagatctctgggaatcttaccaggagttatgaaacaaaagtcagcatacttgagcctctgtgattcagcagca

SEQ ID NO: 418972 - DNA, 201 bp, Homo sapiens
actgcactctagcctgagtgacagagcgagaagctgggggaaaaaaaaccacatttccattgttccttatttatatatggccaccgtattagacgacataygggttgtttccatgattgcagccagtcctgttgggcagcactggctatacccactggcattctgtccactcctgacccagtggtgccctagacacccagc

SEQ ID NO: 418973 - DNA, 201 bp, Homo sapiens
aggagcaggtaaaaagtcattagggagctcactctcagagatccaggaatggtccctgccttttaaggtatgctgtttggaccaggtggctgacagtctcmctcatcttctttttctgaccccacagtaaggttgtgtagtcccccatttcatatgtgaaccctttcccaggagccagctcagctgggcactgggttgtgg

SEQ ID NO: 418974 - DNA, 201 bp, Homo sapiens
tagggagaggcccgcaggagggtcttaggccagactgtggccaggagtgtcttccctgaccaacaggccccttactgtcttgcaggtctgatacataagtygtgcacatttcagaaggataactgtagagccgtctctctcgtgcacactgcctggtcccctgaacacaggcaagcagaggtgcacatgcgggcacactta

SEQ ID NO: 418975 - DNA, 201 bp, Homo sapiens
gagattgttgaggcactagttcttcagggaaggcctcatgggtgtgtgttctgtgcagttgcccagggccccatgctcagcttaatgctatggtattgtcytcttgaaattcttaatacttttgaaacaaggggtcctgcattttcattttgcactggacttgcaaatcaaagcatgcttgggggatgatgtactttagaa

SEQ ID NO: 418976 - DNA, 201 bp, Homo sapiens
cagttcattgctctatccaaggaagaaccccatcaagtcatgggtgcccagccgaaagtctttaaggggtcgagtgagggcgtggaggaggcagccttcawctttcctgaaaggcacagagatgggatggtgaggatgaatctgtgaaatgatgatgattcctgggtttctggaggcggaggtctacaaggagggtggtgc

SEQ ID NO: 418977 - DNA, 201 bp, Homo sapiens
cccagcagaggtgagggagagggagctgacagcttcattcttgatgctcactttatgccaggctctgggcatttggacaagtaacagttcattgctctatycaaggaagaaccccatcaagtcatgggtgcccagccgaaagtctttaaggggtcgagtgagggcgtggaggaggcagccttcaactttcctgaaaggcac

SEQ ID NO: 418978 - DNA, 201 bp, Homo sapiens
aaatgtggtgttaaattacccattgttgttcctctaagtgcatacttcattaatacctgcaggggaaaaaatgacctctatttacagccaagcatctctgrgccgacgcctgcctgcccaccagcctcctgtggtttacccaccaaaattttactagaggttgaatcggcttgtagaagctgtgtgatagcgctgcggctc

SEQ ID NO: 418979 - DNA, 201 bp, Homo sapiens
ggcacctaaatacagcttgagagtacatgaagcaaaagttgttaaaattaagtggagaaattgataaatctagaaacatagatgaaaatttgtatcattccttctcaataattactaggttaaaaacagcaaatatagataatatctagattatatttagattggttaataaattcagccaacttgacctaattgatattt

SEQ ID NO: 418980 - DNA, 201 bp, Homo sapiens
cccaaatgtttggaaattaaataacctataactcaaaaaataataaaaattagaaaatactttgaaactgataaaatccaactgggaaattgtatgatccrttgaatgcagtgcttggagggacatttatagctatatcagtaaggaagaaaggtttaaactcagtagttctacatttccatctactaatctagaaaaaga

SEQ ID NO: 418981 - DNA, 201 bp, Homo sapiens
actgaatggaataacaaattcagaaattcctttatatgttcaattgctttttgataaaggtgctagataattcagtggagaaaggatactctttttagttaaaaaaaaaaaaataagctggagaaactgggtatctgcaaaaagtgtgatgctcaggtcataccagacacaaacattaaacttgaaatcgatcatagatct

SEQ ID NO: 418982 - DNA, 201 bp, Homo sapiens
gcgggtggatcccttgaggccagaagtttgagactgccctggccagcatagagaaaccctgtctactaaaaatattaaaaaattagctggacatggtggcrcacacctgtaattccagctgcttgggaggctgaggcacaagaattgcttgaacccaggaggtggagggcatgccactgcactccagcctgggcagccgag

SEQ ID NO: 418983 - DNA, 201 bp, Homo sapiens
ccagaccctgtctcaaaactaaaagtaaaaatagaaatgtgattgtcaaatgtttttcttcaacatattttactgtgtaaacaagggacccccattttctygtcctttttgcccaccagcggttcccatgcatttcttggcagctgtgtttcatgactgctgctggagaatgctgtcccaggccagctgtcttccccccac

SEQ ID NO: 418984 - DNA, 201 bp, Homo sapiens
cggagtctgcataacctccgcatcttcctgcctgggagggcggctagggtggtgcctgcagcctctggaacctctccattctgtgtgcccctcaacctcayggacatactggcgtttcaggacctggccctgctttctctgtccccgtctctctctgcccactggtttctgtgacccacgcccttcccaccccattctgcc

SEQ ID NO: 418985 - DNA, 201 bp, Homo sapiens
gaaaaatggaacaaatacaatgcttttgatgaactatgagctgagccagtgccaatgattaaaaattttttaaattgtgaaacatcacacattgctgttattttttttttttttttttacaaaattcctagtttccttgaacagaaactgaacctttatgctttccaagaagttatatttaaacaaaaaagttctttgaat

SEQ ID NO: 418986 - DNA, 201 bp, Homo sapiens
tgtctggggccctcagccctttggtgtggctcccagggacgcctgagttatttccagaagtggcgtggtgggtagagtgtgagggccggcctcgcctcccygcccctctcccctgtgtggcttttcctttctgtaattcaactgattgcttttccttccaaattgctggcttaagctttatcttatctaattttatctcct

SEQ ID NO: 418987 - DNA, 201 bp, Homo sapiens
ctggggaagttgctgcatcccagggcaactgtgctgaaatcagttgtcttatttcaaaacttgtgcctgtgccctgagaccctcagcaggcatccttcttycttcatatggcagcccttcagatactggggaccagcctctcttctccatccctcctcctgccccgcccagcccgtccttcttccctgaacaggtggacaa

SEQ ID NO: 418988 - DNA, 201 bp, Homo sapiens
gctcacaaagaaagtgtctggggccctcagccctttggtgtggctcccagggacgcctgagttatttccagaagtggcgtggtgggtagagtgtgagggcmggcctcgcctccccgcccctctcccctgtgtggcttttcctttctgtaattcaactgattgcttttccttccaaattgctggcttaagctttatcttatc

SEQ ID NO: 418989 - DNA, 201 bp, Homo sapiens
atgagacttgagcttggtcttgaaaggtgcactggattcaaagatgggagaaggctgcccaggtggatggaattctgtagacaaaagctcacagggttgcrgaattgagaagagtgtggccagagtataaggtgtgcatttataggatgggtgaataaggctggaatagcacttgggagaaggctggaaggccttgagtgg

SEQ ID NO: 418990 - DNA, 201 bp, Homo sapiens
attacttactttgaaggagcaggtaaaaagtcattagggagctcactctcagagatccaggaatggtccctgccttttaaggtatgctgtttggaccaggyggctgacagtctcactcatcttctttttctgaccccacagtaaggttgtgtagtcccccatttcatatgtgaaccctttcccaggagccagctcagctgg

SEQ ID NO: 418991 - DNA, 201 bp, Homo sapiens
agctttctggaccctgacatgtagtccggcctcctgaggctaaggggctgtctcctgtagggttcccagctgaagaatgtgacatcttagggtgggaaggractgccaagtttgtcttgtccaagccctgaggtgacactggaattccgcttattgaaaactgattagtagccccttgtggccatgtttggaaagctacct

SEQ ID NO: 418992 - DNA, 201 bp, Homo sapiens
ttgatgccttaattgttgttggtagcgtcgttgatattgctataactgaagtgaatgtaagtagcaaactttgtgtcctatatcatggttgttttcattamgtctgacatagaagagactagaggccctgcccttaaatctccacacactttagaaatccagacacaaatttattttgaaagactaaggataatttgtagt

SEQ ID NO: 418993 - DNA, 201 bp, Homo sapiens
ctgtatctgccttattattacttactttgaaggagcaggtaaaaagtcattagggagctcactctcagagatccaggaatggtccctgccttttaaggtaygctgtttggaccaggtggctgacagtctcactcatcttctttttctgaccccacagtaaggttgtgtagtcccccatttcatatgtgaaccctttcccag

SEQ ID NO: 418994 - DNA, 201 bp, Homo sapiens
ggttctggcctcagaattcagttgtaggagaacacatcatcataggccaagaggagagagcagggagaggggccctctgttaggagccgtgtcatttcttrtatcttatcttctggttacaaaggcaatatggtgcctttggtgggagaagggtgggggaactgagtcatgccacttgacggtgattttattaaacaagag

SEQ ID NO: 418995 - DNA, 201 bp, Homo sapiens
cccatggatggctgtcactgacatttgtctcttctcattatcattagtgtctgggaggcaaaacacttgtttagaagctgtatctgccttattattacttrctttgaaggagcaggtaaaaagtcattagggagctcactctcagagatccaggaatggtccctgccttttaaggtatgctgtttggaccaggtggctgac

SEQ ID NO: 418996 - DNA, 201 bp, Homo sapiens
ttctctttgtgggatgttacccatctggcgttttgtccaggctgcattctaggccatgttgtttgctgcggttactggccttctccagtgagccatacttygttcccatcttagtcctttaaagtgttttgatcttgattctaccctgaaaatatactaatttatactcctagctacttgggctggaaaaagtaaggagaa

SEQ ID NO: 418997 - DNA, 201 bp, Homo sapiens
tgggctccatcctgtccttttgacattgaggtttcccagagccctctcctggtccccttcttgcctggtaagatgcatacatgccagagcgtcagtggccrcctctgtggcatgcagacctgcactgcccttctctctcctgagcttctatgcctccctgccttcaaaatgatctccctgcctctggcctcagcccttcta

SEQ ID NO: 418998 - DNA, 201 bp, Homo sapiens
actgtctgtccctggggctagggccctgttctaagcacaccctcagcccatttgagtcatcactgctgagcgttaggtttcccgatacatatgagactttrtaattatgaaatccatcgccagacctggtggtatgaaatcagagagtgcttacgccacctgccatggtcatgacccactagtgatggctcagaatcttag

SEQ ID NO: 418999 - DNA, 201 bp, Homo sapiens
gaagttttggtcgtgaaataaaataggcctgtgtgctcagcttgtgggtagatagatggtgtttgtttttcattgaggtgaaattcacgtaacatcaactrttttcagtatacagttccttagcatatagtatccatggcattgttgtgcaaccaacatctctatctagttgcaaactttttgtcatcccaaaagaatggc

SEQ ID NO: 419000 - DNA, 201 bp, Homo sapiens
actgggtttctgttttcctgagtcatttatggggtggggaccctttgggcccatgtgccaggcagcactgcacctgtagcatttcttctttttttttttttctttgaaacggagtcttgctctgttgcccaggctagagtgcagtggtgtgatctcggctcactacaacctctgcctcctggggtcaagcaattcccctgc

SEQ ID NO: 419001 - DNA, 201 bp, Homo sapiens
aaacagtttggaaagtgaataccctctgaagagagagactgggcttgaaacagaggtcctcgcattattgtgacacagcccccaggcgactcctctacctmcaacagctcacccctgtgactcttcgctggcatacgccaggcctactccttgctctgcagtgcctgtgactagctgcgtggcctatgcgtgtgtccactc

SEQ ID NO: 419002 - DNA, 201 bp, Homo sapiens
gtgtgtgtgtttgtgtgtgtgtgtgtgtgtgtgtgtatgtatgtatgtatgtatatgtatatatatatacatatacatatacatatatatatgtgtgtgtrtatatatatatatatatatatatatatatatgttgagggaatgcatttattttcacctaaagctacaaagcactcctgccctcactagcttggaagttct

SEQ ID NO: 419003 - DNA, 201 bp, Homo sapiens
tgacccgtggtcaggatcacgttagcatcttctgagtgggtatgaaaatcgcggatttttaatagatgtctgtttccagaggtaatcccaggatcaggtggcctcagggctatactgtaaaactgaatcccatttatgacagccctggttgttttgttctttctctgttcatcgagttgataaatgcttactgagtggcta

SEQ ID NO: 419004 - DNA, 201 bp, Homo sapiens
aggcccagggtcctagggctggatgtagctgagctagaactcagaaatgtgctgttgtcttgcccacgtctactctctactaataagttaagaggcacatrcaagaaggcccatctggttggtgcttctagcagagaagctgattcatgcttaattttgaccacatctctaggtttgtggttactgctcagaatcaggata

SEQ ID NO: 419005 - DNA, 201 bp, Homo sapiens
ctaattttaacagtgccggtgacatcccttatcttttagctttcccaggcaggaaccgttgccccagcagacatgatgaagtagaggcaggagccagatcrtgaggtgcttaaaaaaagaaaagagaaaaagatgggcgggggggcttcccactatcacaaatggggattaaacctgcaactccgtgggaggtacccaaag

SEQ ID NO: 419006 - DNA, 201 bp, Homo sapiens
cccctaaacctgccctggattgaatgtagtcagttccacaccagggacgcatactgtcacaggaagtccctatgtagagttggcccaggggccagtgcccsccagagagaggagtgggggctgagcctgggatggggccacataaccctcccctgcctgagccgcctcctgtagatgagtggctcctcaagcctccggccc

SEQ ID NO: 419007 - DNA, 201 bp, Homo sapiens
ctccagtactcagagtggaggttctttgaaatctgaccatatactaagctgcttctgtgccaggtgatacttattgaagccaggcagagaacagctagtaraatgctgtaagtggttggaaatctctccatgctgggaggtatatggttctgctcagctgtagtggaaggacctaattgaatacattgggtactgagactt

SEQ ID NO: 419008 - DNA, 201 bp, Homo sapiens
ttcctaataaaatgttgggaaaatctgcatatgaaaatcactgtggctgcagtaatatgaatagattggatggatacacaaatggatgtagagagaccaayttaaggctcatataatctgcttccagccacaacatactagtgctaccagactggacctttcaccataaacaactacaaaagactgggcaaaaaataggaa

SEQ ID NO: 419009 - DNA, 201 bp, Homo sapiens
gtagcagctgggtgctgtggcttgcacctgtaatccgagcaattcagaagggtgaggtggaagggttgcttgaggccgggagtttgaaaccagcctgggcracatagcgaggctttgtctctggtacaaaaaaaaaaaaaaaaaaaaaaaaaaaaacagaagtctttttagctgggcaatgtggtgtgtgcctatagtccc

SEQ ID NO: 419010 - DNA, 201 bp, Homo sapiens
ctttttaaaagaagccttattgagattgagatataattcacacaccctatacttaactaatttaaatcatacaattcagtgttttttactatattcactgktaagcaaccatcatcaaaatcaactttagaacattttcatcacccaaagaaaccccatacctattagctgtcaccccattttccattctattccccctcc

SEQ ID NO: 419011 - DNA, 201 bp, Homo sapiens
ctggtgcgtctgagcaagaatatgggattgcagggtgtgcctgtttttcacaactcataaagccatcagaagaacacagatcacattttttgcctctccaraagttcttcatgaaatttttattaaatttgttggcacttagaatgcaccaaaaatcctctggaaaaaaaaatttccaaatttaacattttaaaatgtagg

SEQ ID NO: 419012 - DNA, 201 bp, Homo sapiens
tgctctgtgggatgagaatgcaggtcaaggtcaggggagagttcagagaggcacttgccaacctgaaggtgtggagatgctgccgtgcatgggcaggaagrggagtggtggggcagagaagtcagggtgtggggtgggggcatggttccaggaagcttcctattttgtcttgtcagcagtagataggaactggattgaatc

SEQ ID NO: 419013 - DNA, 201 bp, Homo sapiens
gtgggttttcatgggttttagtgaatcttaattttacttctgtagactgtccttttacaggtttttacttttgttttgttttgttttgttttgttttgtttgaaaagcagggctctggtactctagttttgctgtgtgagtataacacttgggacggtcacttactaccagcttcccgggatgcagaggtgtgtggcgttg

SEQ ID NO: 419014 - DNA, 201 bp, Homo sapiens
agtgggttttcatgggttttagtgaatcttaattttacttctgtagactgtccttttacaggtttttacttttgttttgttttgttttgttttgttttgtttgaaaagcagggctctggtactctagttttgctgtgtgagtataacacttgggacggtcacttactaccagcttcccgggatgcagaggtgtgtggcgtt

SEQ ID NO: 419015 - DNA, 201 bp, Homo sapiens
tagtgggttttcatgggttttagtgaatcttaattttacttctgtagactgtccttttacaggtttttacttttgttttgttttgttttgttttgttttgtttgaaaagcagggctctggtactctagttttgctgtgtgagtataacacttgggacggtcacttactaccagcttcccgggatgcagaggtgtgtggcgt

SEQ ID NO: 419016 - DNA, 201 bp, Homo sapiens
ttagtgggttttcatgggttttagtgaatcttaattttacttctgtagactgtccttttacaggtttttacttttgttttgttttgttttgttttgttttgtttgaaaagcagggctctggtactctagttttgctgtgtgagtataacacttgggacggtcacttactaccagcttcccgggatgcagaggtgtgtggcg

SEQ ID NO: 419017 - DNA, 201 bp, Homo sapiens
attagtgggttttcatgggttttagtgaatcttaattttacttctgtagactgtccttttacaggtttttacttttgttttgttttgttttgttttgttttgtttgaaaagcagggctctggtactctagttttgctgtgtgagtataacacttgggacggtcacttactaccagcttcccgggatgcagaggtgtgtggc

SEQ ID NO: 419018 - DNA, 201 bp, Homo sapiens
gagctgagatcaagccactgcactccagcctggcaatagagcgagactccatctcaaaaacaaacaaacacttaagtcttaataataaggttattttttttcactcaaagaattatctatttgtgtaattaaaaaacagtgttttagaaattccatgggataacagatggatttgttcagtgcaaactggactgtgaaagg

SEQ ID NO: 419019 - DNA, 201 bp, Homo sapiens
gtagcttcttgtgtgtctgtgtgtgttaatggagtttttttttttaaggtttttccatgattagagtcgtattttttgtttgtttttgtccagttttttttgtttgtttgtttctgcatgaaataatgaaaaagtaaatcaaggtttgtaattggtttcttctgacttaggaaagaagaaaattattctatgagagtacca

SEQ ID NO: 419020 - DNA, 201 bp, Homo sapiens
tgctctgtgtgtatgtgtgtgtgtgtgtgtgtgtgtgtgtgtgtgtgtgtgtgtgagagatttgcctccaaattcacaagcctgacacatttggctgagaygaatgtcgtccttcagcatgagagtagatggataaatgtctacaccttggtgaaaatgctagttgtgcttacctgagaagcagcagatttccctggttta

SEQ ID NO: 419021 - DNA, 201 bp, Homo sapiens
aacataattttgaggctgcctgcttaggacccacacatagactcatttgctctgtgtgtatgtgtgtgtgtgtgtgtgtgtgtgtgtgtgtgtgtgtgtgwgagagatttgcctccaaattcacaagcctgacacatttggctgagacgaatgtcgtccttcagcatgagagtagatggataaatgtctacaccttggtga

SEQ ID NO: 419022 - DNA, 201 bp, Homo sapiens
tggtgaacataattttgaggctgcctgcttaggacccacacatagactcatttgctctgtgtgtatgtgtgtgtgtgtgtgtgtgtgtgtgtgtgtgtgtgtgtgtgagagatttgcctccaaattcacaagcctgacacatttggctgagacgaatgtcgtccttcagcatgagagtagatggataaatgtctacacctt

SEQ ID NO: 419023 - DNA, 201 bp, Homo sapiens
tttttatttttatttttattttttttgagatggagtcttgctccgttgcccaggctggagtgcaatggtgcaatctcagcccgccgcaacctctgtctgastgggattctttctaattgtgggcagagggtggcacttggtgaggattccagtttcttatctgaagtattagtgtcactgggtgtgcaagcatctgttcag

SEQ ID NO: 419024 - DNA, 201 bp, Homo sapiens
ggggacactgggattttgcctcaagaccctggctcaaataactggtgtgctccataggtaccttcctctcattctgactcagttgctgagttctggtctcwtcctgatcttcaccctcacctaccccagcattcttgaactacctctctgtgtgtctggcctgctgctgtcctgttggtctttctaaagcagctgcctttt

SEQ ID NO: 419025 - DNA, 201 bp, Homo sapiens
ataagatgattaatagatggatagggggatgcagagataggtgataaagaaaatgtagcagctgggtgctgtggcttgcacctgtaatccgagcaattcaraagggtgaggtggaagggttgcttgaggccgggagtttgaaaccagcctgggcgacatagcgaggctttgtctctggtacaaaaaaaaaaaaaaaaaaaa

SEQ ID NO: 419026 - DNA, 201 bp, Homo sapiens
agaaagaggagacagaaaaaaaattttgaagaaacagctccagattttccaaatgtgatgaaaaatgaaactcacaagaagctcagcaaagcctgagcaarataaacatgaaaaaagccacatcaaggcacatcataattgtaatcaaattgttaaaaaccaaagataaggagaaaaccttaaaacagagaaaagaaaatc

SEQ ID NO: 419027 - DNA, 201 bp, Homo sapiens
gaagagtatacgtgggtttgtttcctagagcctacagagttctctatggctgagctttgatccttcagagcgcgcctcaagcccattgtgtaagagatgcwctcaccatgctgtggtttttatcggccaacgacatatgcccggtgtctgggtggctgctctggagaatacacgttgcactggtagttattcaatggttat

SEQ ID NO: 419028 - DNA, 201 bp, Homo sapiens
atagctgtggaaagggcacttcctctccgctgttctgatgctgagctggattcctagcaggaggggtctggggcaggcgggcgtccattgcgtgaggcaasctggctggcagggctggccgcgtggggccctggtttggctgctgttgctgccctctgctgcttcataatgaaattgcctgtgttcaacctgaaggggtca

SEQ ID NO: 419029 - DNA, 201 bp, Homo sapiens
aagtttaattttgatgaaacgcaaaccaagcggagcacctttgacaatttccctcaagcacttctcacagtgttccaggtgagtcctccctccattccccraaaagcacttcgtgagcagcagctaaaactcctctgccttcttgtctgctcacactcaggaagacaaaaggactccatttttgttcatctctgccctaat

SEQ ID NO: 419030 - DNA, 201 bp, Homo sapiens
tggctggtgcaaaccagtgtgctgactgggagtgggcagggtcaggcctctcttctctccctccctgcttcttgccaggctcaggaaggggccaggacttyagcacctgaggatcagaagactgagggagggtttctagagctaactgtttgctgaatgcaagttcagagtttataaatagacattcatgtgagtctcaga

SEQ ID NO: 419031 - DNA, 201 bp, Homo sapiens
atatataattgcaaatgacctctaatgaaaacaatcataaaaaataaagaaggagggcttatactgctgatttcaaaatttactgtaaagctgtaataaayacaatgtttgacataaagatagatgactagaataactgaatggaataacaaattcagaaattcctttatatgttcaattgctttttgataaaggtgctag

SEQ ID NO: 419032 - DNA, 201 bp, Homo sapiens
tgtagagggcttggcctattgaaattatgacagttcaggaagggtgcatctcttcctggatttgatgcaagaaaagaatcgaatcaattcagtcctttcaractaattaataatagctggccaagataggtctgtgttagtgaaaagcccaagttatatttttaaaatgttttattatatatataatgacataagctactg

SEQ ID NO: 419033 - DNA, 201 bp, Homo sapiens
tttttttttaaaatcaattatccttattttctgttatttgtccccgtccctccccacccccctgctgaagcgagaataagggcagggaccgcggctcctayctcttggtgatccccttccccattccgcccccgccccaacgcccagcacagtgccctgcacacagtagtcgctcaataaatgttcgtggatgatgatgat

SEQ ID NO: 419034 - DNA, 201 bp, Homo sapiens
atgtggatctgccttctccttttaaacagccatgtaacgttccctttctcacctactttgaatttttatattcttgctgctctaaggttttttttttggakcaaggaaagcaatttaaaacataaaatttactttcaaaagaagagtagagataattaaccagcccttgccacctaactcaatataatcccctagtaactc

SEQ ID NO: 419035 - DNA, 201 bp, Homo sapiens
atggtgaacataattttgaggctgcctgcttaggacccacacatagactcatttgctctgtgtgtatgtgtgtgtgtgtgtgtgtgtgtgtgtgtgtgtgtgtgtgtgagagatttgcctccaaattcacaagcctgacacatttggctgagacgaatgtcgtccttcagcatgagagtagatggataaatgtctacacct

SEQ ID NO: 419036 - DNA, 201 bp, Homo sapiens
tgaaggttgatctgagattttgctatacctgttaatggtgaacataattttgaggctgcctgcttaggacccacacatagactcatttgctctgtgtgtatgtgtgtgtgtgtgtgtgtgtgtgtgtgtgtgtgtgtgtgtgagagatttgcctccaaattcacaagcctgacacatttggctgagacgaatgtcgtcctt

SEQ ID NO: 419037 - DNA, 201 bp, Homo sapiens
ctgaaggttgatctgagattttgctatacctgttaatggtgaacataattttgaggctgcctgcttaggacccacacatagactcatttgctctgtgtgtatgtgtgtgtgtgtgtgtgtgtgtgtgtgtgtgtgtgtgtgtgagagatttgcctccaaattcacaagcctgacacatttggctgagacgaatgtcgtcct

SEQ ID NO: 419038 - DNA, 201 bp, Homo sapiens
tggatcttagagatgatactgtcctacaactcatcttacagatctggtagccaagcataggggaaaagaggcacttgtcccattgtcacctgatgataagmaccaggctttcctgacatttcttccatcatttttgacctcatcagcctccatcactgaaggttgatctgagattttgctatacctgttaatggtgaacat

SEQ ID NO: 419039 - DNA, 201 bp, Homo sapiens
aggattgcataagcccaggagttcgaggctgcagtcagcgatattgcgccattacactccagcctgggtaacagagtgcgatctctgtctcttaaaaaatmaaaataaataaaaatagacttcagggatgcaaagatttgggggcacttgcctttgaaagtgagaatgggctcgtgtgggaaagttatatttccagatatg

SEQ ID NO: 419040 - DNA, 201 bp, Homo sapiens
catcattcttcccacaagcatgaccgggagcctcagagaaggtccagtgtgaaaaggtaaccttgacaatgtgtttggacttgctcatgtggtgtctgccygtgttgcgtctagtcccaaggagcaaggcgggtctgtgctctgtgctctggggcatggaggaggttccccgtaggcatttgtgtcaggatctgtgagtgc

SEQ ID NO: 419041 - DNA, 201 bp, Homo sapiens
tgtctttttccaaaataatgtgcccttaccaagatagcattgcagttttctttttgtttgaactgtaccttataaagaagcagctgaaccaactcaaaaaatgtacttgattcggcatgaatattcttagactggaaggcagacttttaaaatacttttccccaaatgatttttttaaatttaaaccgtttagaaattcca

SEQ ID NO: 419042 - DNA, 201 bp, Homo sapiens
aaaactgctacaatggactatgcactctacagcacgtggacctctactttatagaggtctctccaccatgagaccatcagctccatgggtgcagcaggaayagggtctgtttctgccctctgttgtgtggctgcacccagcacagtgcttgtcccatacatgagcatgccattacttccttcttgaatgaaagaacataga

SEQ ID NO: 419043 - DNA, 201 bp, Homo sapiens
atcagacaccagtaaaagttgacctcaacagaattttaggggtataaatttagggggtacaaataccgttctgtgacatggacatattacatagcggtgargtctgggcttttagtgtaaccatcacccgaaaagtgtacattatacccagtaagtaatttctcatccctcatgcctcttccaccctcccacccttctgtg

SEQ ID NO: 419044 - DNA, 201 bp, Homo sapiens
tgtgctgctgctgttttcatcagacaccagtaaaagttgacctcaacagaattttaggggtataaatttagggggtacaaataccgttctgtgacatggayatattacatagcggtgaagtctgggcttttagtgtaaccatcacccgaaaagtgtacattatacccagtaagtaatttctcatccctcatgcctcttcca

SEQ ID NO: 419045 - DNA, 201 bp, Homo sapiens
gcactcacactctgactgtacgtcctgatgaaaacccacttttggataattagaaccgtcaaggcttcattttctgtcaacagaattaggccgactgtcargttaccttggcagggattccctgcaatcaaaaagatagatgataggtagcaattttggtccaaaatttttaatagtatacagacaacctgttaatttttt

SEQ ID NO: 419046 - DNA, 201 bp, Homo sapiens
caacgtggtgatctataggattggagtgtcggggtctgtacaaatcgtattgttgccttttacaaaactgctgtactgtatgttctctttgagggcttttrtatgcaattgaatgagggctgaagttttcattagaatgcactcacactctgactgtacgtcctgatgaaaacccacttttggataattagaaccgtcaag

SEQ ID NO: 419047 - DNA, 201 bp, Homo sapiens
ttttaggagaactcccttttgctgggcttctcaggtatgaggtcccttttccatatggtcctgaaactttatcaattccagtttagaagtagcgacctgargaaatggaataattcttctgtccatggtgaggggaggatggggggaaggtgctcattttgcctttgaacttgataagagcagagaacagtcaggtttgtg

SEQ ID NO: 419048 - DNA, 201 bp, Homo sapiens
cccattctgtccctcccacttctcttggtctccctccacgtcctgaggggatagaaagacggagtctgcataacctccgcatcttcctgcctgggagggcrgctagggtggtgcctgcagcctctggaacctctccattctgtgtgcccctcaacctcatggacatactggcgtttcaggacctggccctgctttctctgt

SEQ ID NO: 419049 - DNA, 201 bp, Homo sapiens
tgttttacagcacttagcgggccttaagaatgagagaaacagtctgcaaattaaatcacaatgcagatgccatcttctcactgctactgtggggtttagcyctacagatcagaggatggctgagtatagtaggcattttctttttgtcacgtactgatgtcacaatactttgtgttcttttatgtggtctaattgcttcaa

SEQ ID NO: 419050 - DNA, 201 bp, Homo sapiens
cgagtgagcgggcataggtacttctctacactgagaagcactgagcacttggtgagcatccggaaacatctgctgctgttagtgtgggctgagctctgtcygctgtgggctacagaaggccctactgcctgtcctgcatttttctcttatgtatgggctttcagtaaacatgtttggattgaaatacacatttgaggaggc

SEQ ID NO: 419051 - DNA, 201 bp, Homo sapiens
gtatagggcatctatgaggcaaagaccatatctcactcacatccgggtcttgaggtcctgacattgagagtgtgccctggaaagagcaccgaaggttagtragggcagctgcgtctgagcactggtgctgatgctggtgggatggactacagagtctgtccccactacctttggaagagctacccaattaaaactgagttg

SEQ ID NO: 419052 - DNA, 201 bp, Homo sapiens
gccacgcctcgcatgcctcccgagcaagcactcctctgggggatatggcagggaatggggcaacggggaatctggacagtaagcaaggaagggcatcctcrtagctctgagcgtggcatttcatgtagctgtatgaagggcatgggggaagaaggcatgggggcatgggatgagcctggctaagaacaggactggtctgaa

SEQ ID NO: 419053 - DNA, 201 bp, Homo sapiens
tccacaccctatgtccatgtgtacacattatttagcttctgcttatcagtgagaatatgcagtatttgactttcctaaacataatatttttgaaggttctsctagaccgctaaccagcctcagggtggggcctccctcttaggaccattgccctgtgcttttctgttcagaaactataaagttctgaagtattgatggaaa

SEQ ID NO: 419054 - DNA, 201 bp, Homo sapiens
aaaattgtaagtaacaacaattacctgcagactgtagcccagagataaccactgttaatcttgtgggatgtttctttttgtacctctcctaggcaggtacwttcacatcacacacacacaaagacacggtattacttcagtcacataaccattatttttgtatcaaatttacccaagtagataacccattccaggaaaaga

SEQ ID NO: 419055 - DNA, 201 bp, Homo sapiens
gtggttactgctcagaatcaggatagcatctgggtatctcgaagctgctgtctccagtggaggctttggactgatctcacaaagttatgctgatttctacrtcagcctacatctggggtccttctcctggttatcattgtttgtactgtatgcacagataccacgcccttacttaataatccagccttggtggaagtatat

SEQ ID NO: 419056 - DNA, 201 bp, Homo sapiens
gctcgccgccaggtagttaggtgtgtcttttacaatgtttagcacagcgaatagagaaagtgcctggcagatgcttggccatctcctctgcatctcccatmgtaccaagtatcttgccttgtgcacagtaggtgcttgtctgtggggcaaatagatacatttgcagttgaagtaatcctgtttctctgcctgaagtaagag

SEQ ID NO: 419057 - DNA, 201 bp, Homo sapiens
ttttaagtgtacaatttggtgatttttagtaaatttaaaaagctatatgtaactcttaccacaatccagttttataacattttcataaatgcctccccccmcaaattctcttgaacctgtgtgagatgatttccagatgtttcactgaagaaatatggaagtgtttgattatggagtgctgctccagatccttcctgaatg

SEQ ID NO: 419058 - DNA, 201 bp, Homo sapiens
ggtccccttcttgcctggtaagatgcatacatgccagagcgtcagtggccgcctctgtggcatgcagacctgcactgcccttctctctcctgagcttctaygcctccctgccttcaaaatgatctccctgcctctggcctcagcccttctacctactccctttgtaagcccaaagctgaccagaccactcttgcagtgata

SEQ ID NO: 419059 - DNA, 201 bp, Homo sapiens
tgctctgttgcccaggctggaatgcagtggcatgaacttggctcactgcaacctctgcctcccaggttcaagcaattctcttgcctcagcctcctgagtarctgggactgcaccaccatgcccagctaattctttttattttagtagagatggggtttcaccatgttgaccaggctggtctcaaactcctgacctcatgat

SEQ ID NO: 419060 - DNA, 201 bp, Homo sapiens
agcacttgccctctttcccctcctgttgtctcagagaagcaggtggtgaggaagaccgcccaggctgcagcagagccccgggccatcgccttgggtgtggygggtgggaaggctcctcgtaccccacgccacgcttcctcctgtgccagggctatccctcctgcacacctccccaccccccgcccccccgccccccggccc

SEQ ID NO: 419061 - DNA, 201 bp, Homo sapiens
cagggcaccaggcccacccaactgaaggcatggcggcggggtgcaggggaaagttaaaggtgatgacgatcatcacacctgtgtcgttacctcagccatcrgtctagcatatcagtcactgggcccaacatatccatttttaaaccctttcccccaaatacactgcgtcctggttcctgtttagctgttctgaaatacggt

SEQ ID NO: 419062 - DNA, 201 bp, Homo sapiens
cacttagggtatctggaaggtgacagtgggaagtgtcgtggggttctggcaggacttgtgttcttgcactgaagtgctgtgcgctccccacagtatgcagsgccagggcttctgactcggatcagttgccctatgggctgccttcactcctcctcctgagaacaggcgaacgtttaaaagtagtaagttctctttgggagg

SEQ ID NO: 419063 - DNA, 201 bp, Homo sapiens
aggagccatagaaatgccttgtaaacgataggtgtgctctcgacagaggcccctgcaaggggtaggaggtttctgggaggaggctgctggctgtgtcttarggccccagaattcagactgatctcccgggcctggtgccctgtgaagctgggagctgtggattgtcttgttaacctctgtgtgagcctctgttggaagagc

SEQ ID NO: 419064 - DNA, 201 bp, Homo sapiens
gcaactgaaccaggaggccccacagtgcgcactgggcacgagagaccaggactggctgtctcgttcctctctgctgggcagtgcctagccaaggactcagyccggtctcttgtgtgcagccccagtgtgcctgggagtcctcccctggctaggccctgggctttccaatagcggaatgaggggcatgtggagttttgccag

SEQ ID NO: 419065 - DNA, 201 bp, Homo sapiens
agcgtggcatttcatgtagctgtatgaagggcatgggggaagaaggcatgggggcatgggatgagcctggctaagaacaggactggtctgaagtctagagsgggcatgagtatagaggttggagatgagctaggctttctaaattaaattataaacacactgatgctggctaactctcaaaacacacacacacacacacac

SEQ ID NO: 419066 - DNA, 201 bp, Homo sapiens
caaactggtggtcaaaacatcatcattctctcagagctggagcagtaccttcctccatgcaccgtgcataagcatcttggaatgcttccctaatgaagtcrtgaacaatggaagggcttatcctgggccctgtctcaacatagcagggaccacagtgaggaaggcagctgtgagggcgccaggggagatgcagagtatctg

SEQ ID NO: 419067 - DNA, 201 bp, Homo sapiens
gctttatagccaaggaaggtcaaacggacccactgttggcctgggaaattcagtaagcgcatttctgtgcgggcacaggggtgatgagacacatattcttktaccacaggagaagaagctgtggtttccctcacctcagagtgaacagtgttattggacaagaatttgaagtgcagggttcctcttgactcttactcttag

SEQ ID NO: 419068 - DNA, 201 bp, Homo sapiens
agcaggtccagctggctgctctgccccttgggtatccatagttacggttttctctgtggcccacccagggtgttttttgcatcgctggtgcagaaatgcayaggtggatgagatatagctgctcttgtcctctggggactggtggtgctgcttaagaaataaggggtgctggggacagaggagcaacgtggtgatctatag

SEQ ID NO: 419069 - DNA, 201 bp, Homo sapiens
taaatggaaagatctgctgctctatcttcacagaatggttcaaaccaaacccaacctggcaccatttttagcagaattgtctcaaaggcttggtgcttttrtgcaccaggctatttttataagggcctcttgggaagttcctgtgtgactttacattctaaattatcatcaccagcactggcattggcaactgcaggagac

SEQ ID NO: 419070 - DNA, 201 bp, Homo sapiens
gcgccttggatgttttgctctcagcaaggcctgttgctgggtacaggggaaacccagagctggagaggatgtggagtgctgcctcctagggagagacaggmctgtcacactaaatgcagccctggggagcagagctgcagggcacacatagagggcaggcaccgccgacgagggatcgaggacagggctggagggagcatt

SEQ ID NO: 419071 - DNA, 201 bp, Homo sapiens
aggtggttttgctttgctgccccgcagctcagaccttggacaggaagaacatttccctcctccacctgtgttctcagctgcagggggattccctcctcctycagagagtgttgtgcagagcacatgagatggtggggatccctggagcattttagaaatggaaaagcaccacatacaggagagggaccgctgctctccttt

SEQ ID NO: 419072 - DNA, 201 bp, Homo sapiens
cattttagttttttttggtaacttaatcattcaatagaatatctatgaaattccaactaaatggtgtctaaaattttaagcagcagtctacaggcaaagcrccaacatttcttttctaaaaattatttatgataacatctagcattttaaaatcaaccagaaactaggcttgattctgtttaatattttataagattggac

SEQ ID NO: 419073 - DNA, 201 bp, Homo sapiens
gatgccctggctggtgcaaaccagtgtgctgactgggagtgggcagggtcaggcctctcttctctccctccctgcttcttgccaggctcaggaaggggccrggactttagcacctgaggatcagaagactgagggagggtttctagagctaactgtttgctgaatgcaagttcagagtttataaatagacattcatgtgag

SEQ ID NO: 419074 - DNA, 201 bp, Homo sapiens
gtgggcattttgctgatggttaaggactatccatttctggaatttctgaggaatgaagcatatttttgaacaggactctaatcagtaaccaaaaatagccrtgacacatcggcttctgagtctgccaactgcatatactataaagagcaccactgggaggtgcccagggccctctgcctcactccaactgtcacagcccca

SEQ ID NO: 419075 - DNA, 201 bp, Homo sapiens
ctcaaagcctggcgcttgtatcctgaagatgaatggcctggcccagtcccgactagagacatgcatctcttatctccactgctacagcgtaggtccagggyggggctctgggcacttgtgcatgcttgctgtggcgctgtgagggctggcagatggctggtgtgtctgatggagctagcttagggacacaggcagcaaaag

SEQ ID NO: 419076 - DNA, 201 bp, Homo sapiens
catgcacatgccaggtctggggctgtctctgtgcatctgattagcaggcagtagaaatgtgggtgttgccagtgttacggtgtctgcatcctccctggggktgtgagatcaccccacgtgccttccactccaaccctgctcctctgttacctcttgagaggaggatggcgcagggcccgggctcctgactttgtccataat

SEQ ID NO: 419077 - DNA, 201 bp, Homo sapiens
gtatattccactccacatgtattgacctgagttgaattgtgggcggaatgcccattttgttgggggccaagggaggatgggtcttcctgtgtcatgttatsaagtgaagtcgggagccatgtgggcccaagttgggtgcaagaaagtggagaagtcagaggaagtgccatccttcctttggagagaggattgacatcacca

SEQ ID NO: 419078 - DNA, 201 bp, Homo sapiens
ctggtgcttgtctgtggttgcatgttgttttctttatagcacatgccactgtatcagaggtgcttagggagctgcttatgctctgtcttccccaactagartagacattccagtgtgtggtgtttcttcctgtgccctcagcacccacaacagtgcctgacacattggaggtacttggtagatctttctggatgaattcca

SEQ ID NO: 419079 - DNA, 201 bp, Homo sapiens
tcttgtgagtttctgtggttacttggcctcctttcctggaggacagcacaggcaggggaactataggtgtgatccacctatagatcccccgtatgtgtgayaaagaggaaaggcagtgataaggcctggacccagtcctcactcctgcttgtgtatacactgcagggcctcaggaaagacagctaaaagctctgagcctca

SEQ ID NO: 419080 - DNA, 201 bp, Homo sapiens
tccagagagtgtttgcaaaatgctttatgtatcatttagagcattaaggccaactgataaagaaagccctttggccatttggtgtgattattttgggggtratatgaagaacattccagacaaaggagaggcttcagtgaaaaaccaaaactcacatggctggagcagggattttctttttggtggaggaattaatgtttg

SEQ ID NO: 419081 - DNA, 201 bp, Homo sapiens
tctcacaacgcaaagtgcttacaatctactcggaggtatatttacatgaaaattctggaacatacccttctgtgagccagagatggcctataatggaagcraaaatacaataaaccagcagcagggcagatctccctggactgctcagcacttcaagtgctgtgcaggtggtgggtgtaaacacttagcttccgggcacca

SEQ ID NO: 419082 - DNA, 201 bp, Homo sapiens
gatgcagcacctgaaggtgtctgcaagaagaatggccttcagctaagcaggaaatagtgtcatggacataagaaaaaacatctttaaagactgacataggratatagctctggagaggttaccaaaaggagataaatgatttctgtccccagaaaagaaaacacccctccttggttctgccttgctgaatgcaggcttggg

SEQ ID NO: 419083 - DNA, 201 bp, Homo sapiens
atcagcatgagacatgactccagagattaaaaagccacaaagacttagtcttttcagaagtttgctcttttgaaaataatgactaatgttcctacatgatyaatattagaactatgagatagcaaactgttaaagatggaaatgaccctcaagattgtggagttcacaccaccattttagagacaggaaagtgaagcctgg

SEQ ID NO: 419084 - DNA, 201 bp, Homo sapiens
tataaaaatggtacaaaattcacatttcagttaccataagtaaagttttattggaacacagccccactcatccatttacgtattatctatgggtattttcmtgctacaatggcagaaatgagtagttgcctaagatatttgctgtctggtcctttacagaaaaagtttgccaatctttggtctagatggtgaggaatttta

SEQ ID NO: 419085 - DNA, 201 bp, Homo sapiens
tcaacatattttactgtgtaaacaagggacccccattttctcgtcctttttgcccaccagcggttcccatgcatttcttggcagctgtgtttcatgactgytgctggagaatgctgtcccaggccagctgtcttccccccacagacattacctgcaaaggagcaggtcttatttatggggtgctgtattcctaatccctcc

SEQ ID NO: 419086 - DNA, 201 bp, Homo sapiens
tgattgtcaaatgtttttcttcaacatattttactgtgtaaacaagggacccccattttctcgtcctttttgcccaccagcggttcccatgcatttcttgkcagctgtgtttcatgactgctgctggagaatgctgtcccaggccagctgtcttccccccacagacattacctgcaaaggagcaggtcttatttatggggt

SEQ ID NO: 419087 - DNA, 201 bp, Homo sapiens
catagcccatgggtcatacaaggccaggtggcagcccctatgtggatggcgaatcataatttgctaacccctactctaggaggtagcctgatgtttgcatkgtaaatttggttggaaattaacttttatcttctccctccttcccatgttatgcctttcctggatagaacccgctattatgaaacttacattaggtatgtg

SEQ ID NO: 419088 - DNA, 201 bp, Homo sapiens
cccacaccccgctcagttcctggtttggcagcactcatggacttatctccatcacatttggtcctaacctcaccaggctgctaaaatgacacactgtgacygctgggctccctcttgctccgtccctctttgatgcctgtttgttccttgaatgatgaaatgacccagcaacatactgtccctaacccatggatggctgtc

SEQ ID NO: 419089 - DNA, 201 bp, Homo sapiens
cttctagaaattcatacagtctgcatagcaactagttcttgctcctcatggatccaaggagatcctggggtcaggcgtttttaccactccaggatgctgakccagctctagacagaaaccaaggtagcagaacagagtctaaaatatgtttcagactctcaaagaaatcccttgagccagactcatgttccctgccctgaa

SEQ ID NO: 419090 - DNA, 201 bp, Homo sapiens
aagtgaggtaagacaaaattcttactggtaggtgagaaggcatttcaagagggaacggttaaagaaagttgagaaatctgaccttaaggacttattttatrtaagggagcttgatggagaaactgggcctcctaagagagtatatttagagggaaatggcccaaggtcatgggagatgagatgacccagcctctgccaacc

SEQ ID NO: 419091 - DNA, 201 bp, Homo sapiens
ggtttaccatgagacagccagagcctctattctgcctcatgcatcacctttaaagtcatcagcagagttctgattccccaaccatacacgttggaggttgwttctgaacaaagcaaaaataagcccagctcaactatgaggttggttggagctgtcactacagtgcagaaaatgagctgttcagaattacaaaccaagaaa

SEQ ID NO: 419092 - DNA, 201 bp, Homo sapiens
tgcaggagaccagttttgagcatccccagaccagtgggacccagccctgatggatctggccagactgcagccaccatcccctcctcctccctgaaccactkctgggcatctgttctaccccatgcttgtctcagggatggtcatcatgcctatctgtccttgccacagctgcccacatgctaagaggtgttgtggaggaag

SEQ ID NO: 419093 - DNA, 201 bp, Homo sapiens
tgctcactggttgataatgatcttcttcttccactcgtaacactataattccttggtgctctagttgttcttacccagcttactgggtaagaactttctgygtattggcttcacaagctcagcagaacttcagcatcaggtaaaatagcaaaaaaatagagttcttaactctaaaaaatgttgtgcatggtaccttcatgc

SEQ ID NO: 419094 - DNA, 201 bp, Homo sapiens
  misc_feature (1)...(201): n = A,T,C or G
aaacatttcctccttttccaaattcatcttaatttcctttgagattttggtttgcttccctctcacctttacttctttgaacaatatttgtctggactganggaaaaggttgcaaagtaagaacatcgaaggtacttgagaaatgcaacatggaacctctctgtggaacatttcccagatacctgggccatgtcttccctt

SEQ ID NO: 419095 - DNA, 201 bp, Homo sapiens
tttccatggttaatatttaattcctcagccctgaacacatgcagctaaatgaagtcactcctttcccataaatactagatgaagcagatgcaggtgaggcygggtgatggccctcgcccttgtgagttccactgccttcctcgggcctcggcctttgtctactgcctacttggccaagcaagcaagcacatgaatcccacc

SEQ ID NO: 419096 - DNA, 201 bp, Homo sapiens
tgttggtgagttctcagcctgcacacaggctacaggccagggtatcctgatgaccacggtggccgggtcggtgtgcgtgtcagtctgctccgtcgtggtcygagtgtgctggtggttgcagtgtgttgtgtcactcactcgttccatggctttttagcagaaccagtggcctgaggactgcttggtctgcttgtgcctctg

SEQ ID NO: 419097 - DNA, 201 bp, Homo sapiens
gtccctggcttgctggtgggcacctttttctgagcaccaggttgttagagattttagggttaagacacacctgcagatctgtgcctccaggactctgttgrgacaaccaagcctcatgctgttgcttcccatttctggagcctggcaagccctacctatcagatttatgaaacacgcactccgatatgaagagaaaaagtg

SEQ ID NO: 419098 - DNA, 201 bp, Homo sapiens
tactatactgtagtctgttaagtgtccaatagcattatgtctaaaaaatgcacataccttaattaaaaatactttattactaaaaatgctaatgatcatcygagccttcagcaggtcataatctttttggtggtgaggggctttgccttgatgttgatggctgctgaccgatcacagtagtggttgccgaagaaggctggg

SEQ ID NO: 419099 - DNA, 201 bp, Homo sapiens
tggcaggcagaagcatctgaccttcatccttgagggaggcaacaaggagctgtgagacattctgagtaggatgccaccagggggaagtctgggtctgcagygacctggagcagagagggaagcaagctctgatgaaatgctctggccgcagctcctgtggctgcccagggaatgggtgtgtgcagacaggcctgcataaga

SEQ ID NO: 419100 - DNA, 201 bp, Homo sapiens
gtggtgctatacccagccacaggattcactttgatcccttagcttcctttcttggaaatgtctagggggatagaatgtcctcctcgagggggactgtgttycctacaggccatgggtgcagagactcgcctgcagtggagatgcctggctccttggcactcccttagcccagctgaggccctgagggcccttttcaccctc

SEQ ID NO: 419101 - DNA, 201 bp, Homo sapiens
ggaagtcttgggggttgggtctggcctctctctgggatgttagtagcatctggagcatctggttagagtagaaagtccacaaacctgagccctagattttwggaatctattttgcaccagtgaccagataaaaggcaccaaaacttattcttgtctcccttgctttcagtcccaggtgcttagatactattgtttcttttg

SEQ ID NO: 419102 - DNA, 201 bp, Homo sapiens
cttatgtttaaccaattctagttgacacacttattcagaatggccttactgccaattagtggagcatgttagtgaagtttgtaataaagtcctaatttccrtgactaatgaagctttacttgtgttcaacacaatccctgctctcagttatgaagttataaaaaaatgtgtttatgctgttgctgccgctgcccgtctgtc

SEQ ID NO: 419103 - DNA, 201 bp, Homo sapiens
agaagttttggtcgtgaaataaaataggcctgtgtgctcagcttgtgggtagatagatggtgtttgtttttcattgaggtgaaattcacgtaacatcaacygttttcagtatacagttccttagcatatagtatccatggcattgttgtgcaaccaacatctctatctagttgcaaactttttgtcatcccaaaagaatgg

SEQ ID NO: 419104 - DNA, 201 bp, Homo sapiens
cagggtcaggcctctcttctctccctccctgcttcttgccaggctcaggaaggggccaggactttagcacctgaggatcagaagactgagggagggtttcyagagctaactgtttgctgaatgcaagttcagagtttataaatagacattcatgtgagtctcagactcagcgatgtgcctatgaagtgatcagatgtaaga

SEQ ID NO: 419105 - DNA, 201 bp, Homo sapiens
caggggtgtggggcagaggctccagtagagcatcaggtgtggccttgctttcttgctggcctgtgagcacttctgttcaggtgctgagcatagaatctccyctgtatgagcacacatgcacacacctgccctctaagctaaagagaagtggaaaggacctgccctcctaggaagaccaaaaacctctgcttggaacagccc

SEQ ID NO: 419106 - DNA, 201 bp, Homo sapiens
ttcaacggttaaggtgacttgtgtcactgatctgatttccttcttttacattaactatcaaaaatctcagacttattaataaagacatgtcttcacaggayacatctttacaatggtcttatttttattttattttcctcgctctttttttttcattttaccttattcttctgtcctaaatatttaaagtttcagctgatt

SEQ ID NO: 419107 - DNA, 201 bp, Homo sapiens
ttggtgattagagtcaaatgagtagagcttttaatacttagtgccaatgttaagttaaaaaaagtaaaaagtaataaaaccttcatagcagtaaggtactytgctatttaacatcccttgagcaaagctattaattttcttttttttttttttttttttttgctgacttgcgggagaaactctggcatactactgttccat

SEQ ID NO: 419108 - DNA, 201 bp, Homo sapiens
tgtcagggtgtccctgtagactccaccagtgattgtcagggagaggtctggcccagcaatttgctcacccaaggaagaggagtgtcagagcaaggccaggycagccacgcagagccagcgctgaaagtgtgtcagcctctgaggtccagcacaggcttgaattgggggtccctggagtgagcatgtgaggtcagagcagcg

SEQ ID NO: 419109 - DNA, 201 bp, Homo sapiens
tggtaagacctcagacttgcttagctgcagctcttcaccctcttacggacctgcagctgagcagctaagcgtgattggaaatgtcattcagctacgatgaytggtattctttaaaatgaccactgacttcaagcaagaacttcacaccactggcattgatgctacattcaggaccattctttctcatttctagacagtgat

SEQ ID NO: 419110 - DNA, 201 bp, Homo sapiens
ctcccttggggaccaagatctccaaaccagtgggcttaaagttgctgagacaggaatgaaatattctgtgcattgtttattagcgagaggagccaccctcrctttcaccctttgaattctggacccacatattgtagctgtgagagaggctgcaccatatatgggtttctggtccaaagcatatgctgcattctatgaaac

SEQ ID NO: 419111 - DNA, 201 bp, Homo sapiens
aggtgctcatcccgtgtttaaattcggtggaaccactgctttatagcctggtggaagaatccccatttcctcccttggggaccaagatctccaaaccagtrggcttaaagttgctgagacaggaatgaaatattctgtgcattgtttattagcgagaggagccaccctcactttcaccctttgaattctggacccacatat

SEQ ID NO: 419112 - DNA, 201 bp, Homo sapiens
gcctagattgggtagaagcaacccggttgccctgtgctaatcataagcaatcacaacagacagtagattaacccaccctttcctgcctgttggtttggtgrcataatgggaccaaagtgtccaggtgctcatcccgtgtttaaattcggtggaaccactgctttatagcctggtggaagaatccccatttcctcccttggg

SEQ ID NO: 419113 - DNA, 201 bp, Homo sapiens
agggaccccagaaagggctagcaggactctgctgatgggataatagatggtattgtcaccaatgaggatagagttgcctggactgaaaattcaaagaccargtcagtctgttatttgagtgggcccagcaaggttttttaaaaaaaaccctgagtttagagagagcagtgtgagatgcagaacaacgggcaggagtgctgg

SEQ ID NO: 419114 - DNA, 201 bp, Homo sapiens
gccatgcctggcacgtgtcatcagacttggaggaattgcttaagatggatgcgtcattaaagaccattaggaacaataaggggcctctgtggaaaagtgaygtaggtccatagagcctgggagccctgaattcaagcccccactggaaaggcttaattgaaacaaggtaggctctaccagggcctcagaggggccagaacc

SEQ ID NO: 419115 - DNA, 201 bp, Homo sapiens
gctagaatttggtaaaagacaggtgtttaataaatcttttcctagacatccatgggttggtactagtgtggtggggtagagaaagctttggcgtgttttargttggccaaatgaatcagttaattgatgttattaaagccaggtgggacaatagtaggttagaccgcctggttttgattgaccctgaatgaggaatcacag

SEQ ID NO: 419116 - DNA, 201 bp, Homo sapiens
aggatgaatttcttctgttcaaagacaccattggaatctttgttgtacccttgtgcttttctgggcctgatttggcaacctcaggaggaaagcatgctgcrttttgcaaatgtgtgcaaataacaaacatgcctgttatgtcctaggcagactcatcacacgcattggggcagttggcaaaatgcagtcatgcagcctgga

SEQ ID NO: 419117 - DNA, 201 bp, Homo sapiens
cctcctccaccagactctgagagccttgagggcaaggacagtgttgtctcttatcactactcaaggactggtgcagagtgttcatttggtgaatatctgtraaattctcatttttaggagaactcccttttgctgggcttctcaggtatgaggtcccttttccatatggtcctgaaactttatcaattccagtttagaagt

SEQ ID NO: 419118 - DNA, 201 bp, Homo sapiens
tgttaagtaggtatgcaagttgctggcccatcagagagctgtaaggtgctggaatgacagagccatttgttttcccttgtgacatggtctgttttataacrtggtgggtgagatcaagggagaagagtgggccccttcatagtttttcaaagtccttttttccttttttagaaaagttcaaagaggacattgactttctac

SEQ ID NO: 419119 - DNA, 201 bp, Homo sapiens
ctagtagatgggattttcacaggtaaaagggagaagggacagcaagcggggtggtgcaggcactcacaagggaagtcacagatcctgctggggagaatgasgttggaggaaggtaaagtgggggcctcaggcaggtgagccttgaacttgctaaggcacagaatcctcgacagttattattcatttaaagtaccaaaactt

SEQ ID NO: 419120 - DNA, 201 bp, Homo sapiens
caatagagaatccaggactgcagggcacagaaggaatggaaggtgtcagtgggagagggggacttctggcagagtataagccagaaagccttcccaaagcyttggggcacatgggtggaagagcaaaacagagaagtgactcttacctggctgcatcaagcctctgttcaccttttgacagcagcttgggagctctgtgag

SEQ ID NO: 419121 - DNA, 201 bp, Homo sapiens
tcttattctctctggggccctttgtgcctcgggtcagagtggaaactggaatccagcaatgcatttgactgagatgtctgtgacttgcttcaaatctagargagttggataggaaggaccaagaacgtacttcaagtgcacatgtccattgagaggcctggggacccgaggccggccctacgttgtagaagatggccgagc

SEQ ID NO: 419122 - DNA, 201 bp, Homo sapiens
atatcttatttaacagtggaacttttttgctgtcttctttagaggtggaaaacagttctttccaaagacaagcttaatgactgctgtgccaacacacaaarctacaagatacatttaagcatcagtttagcaccagaaatgcagtttacagaagatttgcatgaaaatcttaaaaacaggttgaaaatgtcctaggctcag

SEQ ID NO: 419123 - DNA, 201 bp, Homo sapiens
atggaagagaaggaaaaggagattcaggattcagacacagaaaaacctgacaaacgattcacaaacacttttctccacccacagaaacccaaatacttagwctgtgccttgtggcaggggcagtagggtggctggagagagctgtcacatgcactcacttgcccagctccatggattgtttacttggcagccatagctgtc

SEQ ID NO: 419124 - DNA, 201 bp, Homo sapiens
tgaactttgacattgggcagtcccctccctaggccttagtttttccctctgtctagtgagggagtttgactagatgatccttaaggttccttttcagtctrtctcacatccaggcttaatattaatgaaaagctttgaaatacctctttgaattttattactatgtgttctaagtaaaggaggcatggttaggaattatat

SEQ ID NO: 419125 - DNA, 201 bp, Homo sapiens
tgcatagcatggtgccagaggcatggtaccccaactcagcacacactcactaataattcatcgctaaagttcactttggcctatgtgaaatttattattgktgatgtccaacattacactaaaattataagaatttatgtacaatctctgtacaggatctgtagggagcacacagtttttcattatgaaagaggcttcgtt

SEQ ID NO: 419126 - DNA, 201 bp, Homo sapiens
cgttgctcatctcagctcctgtgctgttgaacaaaaggtgttagacacacacccattccctacttggggtattcacaaatgtcagacctcaaagtctcttmtgagtaaattactgcctttgcttcatttaaaggtgcccttgtgaccttaaagaattcagccacctttcaaaatagagctgtatttctactcccacctcac

SEQ ID NO: 419127 - DNA, 201 bp, Homo sapiens
ccagtaaatcaaggttgctctgaactgaacttagggtctcaaccagctgcagaccagttacatcttagcaagcagggctttgagtggtgcagtgggcagartgtgtggctctgacctatcaggtgtgatcccctcctactgtgcactgtttcctgtctggcacagacacaggcaaagcacttttgctgaaaggacagaaag

SEQ ID NO: 419128 - DNA, 201 bp, Homo sapiens
ggctatactgtaaaactgaatcccatttatgacagccctggttgttttgttctttctctgttcatcgagttgataaatgcttactgagtggctatcatgtrtcagacactgaggattcaggaatgaagaagacaggtccctgccttcatggggctcacagtctggcaggaagacaggagtatgagatgcattatcacatgg

SEQ ID NO: 419129 - DNA, 201 bp, Homo sapiens
acctccgcccctccgccccctcgccctcccaaccaccaccttccctctctgcctgctactcccctcttactttcccattgatatttttgttgttgtttaascaaattattattatttttttaaattttagcctcaagagtcttcataattttttaagggaacactagaggtactgcaaaaccagaaggatataaatgttga

SEQ ID NO: 419130 - DNA, 201 bp, Homo sapiens
gagaataagggctgcttctcctttctgtgggtgcagctaagaaaaagcccattccccaaagagcccgtggcttgtgtcagctagttgaccttgaaaaaatktctttttcacattcattttgctgcattcattttgtttgcactcacaggttgcagataatccagatctaaggtgggtttggtttccttgggtaggttggtt

SEQ ID NO: 419131 - DNA, 201 bp, Homo sapiens
tgattaatattagaactatgagatagcaaactgttaaagatggaaatgaccctcaagattgtggagttcacaccaccattttagagacaggaaagtgaagsctggagagaggtgatccattgcccaggagactcagaaaacaggaccaggcctgtgggttccccacatcatactgccctcaactcctggtcccctcagtca

SEQ ID NO: 419132 - DNA, 201 bp, Homo sapiens
ccaagacctttcctgaaaatcacttatcaagacagtttcctgtaagaaaaagccatatcccagctgattttccttcctggggccaaaatctgctattattyggcctgaaagccttgatgactctgtgtgtgtgtgtgtgtgtgtgtgtgtgtgtgtgtgtgtgtgtgtgtatggatgcttgtgtgtgtgtatggggaatat

SEQ ID NO: 419133 - DNA, 201 bp, Homo sapiens
aattcagaaatctctaaaattgaagtgggttttttattaatccatttggtaaaatgtgacctgaattgatgtgagaacttttatttttttaaagctgagarctgtattttttatagctgtattgaagtatagtttacatatcaaaaaattcacctgttttaagtgtacaatttggtgatttttagtaaatttaaaaagcta

SEQ ID NO: 419134 - DNA, 201 bp, Homo sapiens
aaagctgagagcaattctaaatgtctatggttttttctttatctcttgttgttatacatccatatctgattcaacaataaaacatgtaacattgcttatcyagtacttccaatggattcagcctggtgttttggaagaaacaactctttcttttgcactcgtatctcattatttgagacagtacttaattaatttaggtag

SEQ ID NO: 419135 - DNA, 201 bp, Homo sapiens
ctcatttttaccacagtgagtaagcccctggtctctacctttaaggaacttagagtttgataggcttagtggttctcaactggcattaccctctcttgagrgtatttagaaatctgtggagcagctgcaattgtcacaaatattgagggatgctgttggaatttagtgtgtgggattttatcacaatgaagaattatccca

SEQ ID NO: 419136 - DNA, 201 bp, Homo sapiens
aattatgtgcatggagtcattaatcttctgtgtaaatatctcaaacgctgtgtcttaattatagactccatacttaaaatattttaaagcttctattcatrtatttacttagaaaggtatgatccgtgtttctatggtgtcggcacactcagtgggaaaatggtgtccatacattggagacgttcgtatgaaagagtagtt

SEQ ID NO: 419137 - DNA, 201 bp, Homo sapiens
agtctctgtcataacttcttaactctgctgtcatagtgtaaaagcaaccacgaacaatacataactagtaaagatagctatggtccaattaaactattgawtgacactgaaatttgaatttcttatacttttcatgtgtcatgaattattatttttttgatttcttacaaccgtttagtaggtagtgggccagatttcgcc

SEQ ID NO: 419138 - DNA, 201 bp, Homo sapiens
ctgaagtcagttatttgggaagggaagcagatgctgtctttaccagcagtcttcatcatcctgctcctcgagggccttagtttcagttgcaggaagctgcygcgcgatgttggcttctggctttagtcctctacttcccagtgctgcctgaagacctggtgccaagggtgcccagtggtcccctttggaggaactccagga

SEQ ID NO: 419139 - DNA, 201 bp, Homo sapiens
ctgggattacaggcatgagccaccatgcccagctgtctttctgttctctaagtgtgttttgcagagcaaaagttttaaattttgatgacatccagttactyggtttttccttttatgagttatacttttgatgtcgtatctaagaaatcttcgcccaactacagatcataaagattttctccagtttttttcctagaagtt

SEQ ID NO: 419140 - DNA, 201 bp, Homo sapiens
gatataagttttttaaaaattagtctaaattgaagtccttcagtggaagccagtttcttcattgttgataaagaccatacaggcaaaatcccaagcagtckctattttcacgtgggtatttttgggaacagcttgcatgttctgatttttcttttgtatatggtaagatccaagaaatgcttggctctgaaaagggacttg

SEQ ID NO: 419141 - DNA, 201 bp, Homo sapiens
ctctcctcctgttcctcacgcatttcaagcacaaatccctaccattcatcaaaggcatttgctggtggtggcaggggaaatgtcacagcactgctgccacyactgccaggtatctttttaaaatgtaatgtgtgtgtatgggtatgtgtgtgtgtatgacttccaccatttctacgggaatgttttttgattagaaaaaga

SEQ ID NO: 419142 - DNA, 201 bp, Homo sapiens
agtgacaaatattcagggcccttaagtgcattgctcagtaatataatctaggaaagaaacaaaacctgtttaaaagccttgtagatcttcagaattcactstcactggggctcccaagcccataaagctgcaatgtgtcttgggaacatcagcagtattgtttctgctatgcaccgtgatgtgtgactcaaaatgattaac

SEQ ID NO: 419143 - DNA, 201 bp, Homo sapiens
gggagcatttgaagggaaccttgaaggacaagcaggatcctgaggcaacgcagatggggcggtagggtgtcccgggctctggcaagggttctcaccttccrctggcttggatttcctgatgtttctgtcctgagcggtacagcctgtttgctctgtttgcagatatcgtagctgaagaggacccagctccatgtgcgttct

SEQ ID NO: 419144 - DNA, 201 bp, Homo sapiens
acacttctcctaagtcagaggtgtgcagtgggatggtgaccagctcttgttgatgaggcctctgtgggagggcctgtggatgcagaatgcacagtggtggsggtcggagggatgccgccagaacactcaccggctcagcttctgcctcagcttcttggttttagaatttgacttcttttcaaagtgaatggggagctgttc

SEQ ID NO: 419145 - DNA, 201 bp, Homo sapiens
gctataactgaagtgaatgtaagtagcaaactttgtgtcctatatcatggttgttttcattaagtctgacatagaagagactagaggccctgcccttaaayctccacacactttagaaatccagacacaaatttattttgaaagactaaggataatttgtagtttcctctatctcaccccatctctatctccttcccctga

SEQ ID NO: 419146 - DNA, 201 bp, Homo sapiens
gctctggcaacagtgggaagtccagattgtttctattgtgcgtgctgatgtaattctttttctgcaagccctctgtggtttatcactttgccttcatgcamccttcttataaagcaattacagaatcacgggaaaataggcagtagcagtgtgaatcagtgccttttggaatggagaactgatacaaactgggcttcagtt

SEQ ID NO: 419147 - DNA, 201 bp, Homo sapiens
atgcttggttgtaaaataagctggtgctaatgggagaacagcaggtccctaactgggctgccctgagctctctccgaagtttatggctagacatctgccascttaatcatctcacaacgcaaagtgcttacaatctactcggaggtatatttacatgaaaattctggaacatacccttctgtgagccagagatggcctata

SEQ ID NO: 419148 - DNA, 201 bp, Homo sapiens
tgtaaaacggatgtacctcgattgggcttttgcccttgtcatggaactgagcccgaaggaggttcttagaggagcggggtgaggatttcaggagaggtgaytcccaggggagcttcaggccaggactgtcatagtagagcagtaatttatgggcttctgacagcttgaaaaggtcatggtgttcttctttacttataaatg

SEQ ID NO: 419149 - DNA, 201 bp, Homo sapiens
aatctactcggaggtatatttacatgaaaattctggaacatacccttctgtgagccagagatggcctataatggaagcgaaaatacaataaaccagcagcwgggcagatctccctggactgctcagcacttcaagtgctgtgcaggtggtgggtgtaaacacttagcttccgggcaccaggatgtggccaaggtctgtcca

SEQ ID NO: 419150 - DNA, 201 bp, Homo sapiens
gccgtggatggcgtatcagacttgaagcagaatagggagaggcccgcaggagggtcttaggccagactgtggccaggagtgtcttccctgaccaacaggcyccttactgtcttgcaggtctgatacataagttgtgcacatttcagaaggataactgtagagccgtctctctcgtgcacactgcctggtcccctgaacaca

SEQ ID NO: 419151 - DNA, 201 bp, Homo sapiens
atacttttctggtgaataatagaactgaaggtccacttttctttgagatgtatttaagaaaacagattatataattcattttcctgcagatacatgacatsccaagccctcttactgttgctcagggatgtgattctggattgagttgtgattttttcagagttcagagaatcatttggtgaatttacctagagctgagtt

SEQ ID NO: 419152 - DNA, 201 bp, Homo sapiens
aactttcatggtttggggaaaatctaaaacaaaataggaaaaaaaatgcccaatataccagcacatttactgagccagttctcagtgtgagctatgttcaraatagatgagaattcagtctccctttccaccccgatttcctgtgtaatgtgtcctggcaaacaagataagagacctccaaagtaaaaacatgaggcaaac

SEQ ID NO: 419153 - DNA, 201 bp, Homo sapiens
cctgttttgaaagactgtgttttgaaattttgatttacaaaactgctttcatcaccattgaactacctcaaggcacaagttcaaaatggaagatactcaaktaaaagctgtaaagcaaacagcagcagttagagtggcatacggtaaatatgcgtccaggtcaagagccctcactggagaggcagctggaagtgctttcac

SEQ ID NO: 419154 - DNA, 201 bp, Homo sapiens
ctcaaccccgttggtttacatttctgacttcttaatgcacacttgttaatgaagttatactttcctcaagattttgcaaagagcccaggtttcttttcctytggagacaaaaaatggtaaatcatccatgattctgcttctagatgacaacttttggagctttcctccacaaaggggccttctgcaggaactacttcaatt

SEQ ID NO: 419155 - DNA, 201 bp, Homo sapiens
cctccctaaggaaacctgtcagtctgaagtcttcccagctttcagagcatagcaagttcttaccatagcctggagaatatgtgatctgccagtgcctgctsccccttcacctcttactgacatcccccttctctctgcaagagtgactgccttgctgttcttcagaatgccaggcaccctttcaccccaagcatttgctct

SEQ ID NO: 419156 - DNA, 201 bp, Homo sapiens
ttatatagcatctatgtgctaccccagggtagagttatttgtgtttaattctatgtctcctagaatataattttttgagggaaaacattttacataaaccrtcttcatattgctccaaagcaccaaaccttatgatttccacatggtagatgtttaagagattttgtcagatggatgaagaaatgcataaatgaatgatga

SEQ ID NO: 419157 - DNA, 201 bp, Homo sapiens
accttaatgttacataataccaacatcatacttaacaaggctcaagtcagtctcaacctcccccttcccctcccacctccctcattcctggagaacctccytttggaatgcttagttttgttggggacactgggattttgcctcaagaccctggctcaaataactggtgtgctccataggtaccttcctctcattctgact

SEQ ID NO: 419158 - DNA, 201 bp, Homo sapiens
aatctgaccatatactaagctgcttctgtgccaggtgatacttattgaagccaggcagagaacagctagtagaatgctgtaagtggttggaaatctctccrtgctgggaggtatatggttctgctcagctgtagtggaaggacctaattgaatacattgggtactgagacttcagaaacgccaggctttagggttggagct

SEQ ID NO: 419159 - DNA, 201 bp, Homo sapiens
ctgggcaaaaaataggaagcaactattttcagaaaatggaaataggatatacaggattgcaatccctacgagaagggaaacacatgaggtaaactccgcarttgtcctggctttctgcctggagacagttttagaattatggcagagagggagagcccagcagagaacgatggtctatttgctgaggggtcaaagaacagt

SEQ ID NO: 419160 - DNA, 201 bp, Homo sapiens
tataatctgcttccagccacaacatactagtgctaccagactggacctttcaccataaacaactacaaaagactgggcaaaaaataggaagcaactatttycagaaaatggaaataggatatacaggattgcaatccctacgagaagggaaacacatgaggtaaactccgcaattgtcctggctttctgcctggagacagt

SEQ ID NO: 419161 - DNA, 201 bp, Homo sapiens
gtgttcattgtataattgtttctacttttatggatgtttgaaattcttcctaataaaatgttgggaaaatctgcatatgaaaatcactgtggctgcagtartatgaatagattggatggatacacaaatggatgtagagagaccaacttaaggctcatataatctgcttccagccacaacatactagtgctaccagactgg

SEQ ID NO: 419162 - DNA, 201 bp, Homo sapiens
tatcagacttgaagcagaatagggagaggcccgcaggagggtcttaggccagactgtggccaggagtgtcttccctgaccaacaggccccttactgtcttrcaggtctgatacataagttgtgcacatttcagaaggataactgtagagccgtctctctcgtgcacactgcctggtcccctgaacacaggcaagcagaggt

SEQ ID NO: 419163 - DNA, 201 bp, Homo sapiens
cctgggcaacagagcaagaccctgttgcttaaataaataaataaataaataaacaaataaatattcaagaattctcaggtctggatgtagggttagatgcmagttagatataagtgaaatagccggtttacttaccaatagacaggaaagtagtcttttgtgattcccttctccactaaatacaaatcagtgctactcagg

SEQ ID NO: 419164 - DNA, 201 bp, Homo sapiens
gcaataatgttgagggtttctcctaaacgtttttcattttattgtttatagagtttcattttattgatgaaatgcaaacatttccagttagatgataccarcatattttcgcatggctccattgggagctgaagcatcgtctgtaatttatgttgagaatgcagcctggaaaattaagttgtgttcataatcttaatagag

SEQ ID NO: 419165 - DNA, 201 bp, Homo sapiens
gagccaccgtgccaagcctcctggattcttttatatcttgcttctttcattcaacatgagattcatttgttttcattttctttgcaatatgatactccatyggatgagtagaccacaatctatccattctgctattgatgtacagtcaagttgtttctagttttgtgctgttaaagaattgctgctaaccttgtatctgtc

SEQ ID NO: 419166 - DNA, 201 bp, Homo sapiens
ttgttagctctttgaggaattgatacactgctttccacaatggatgaactagttcacactcccaccaacagtgtataagcattcccttttctctgcaaccycgtcagcatctgttattttttgactttttaagagtagccattttaactggtgtgaaatggtatctcgtggttttgatttgcacttctctaacgatcagta

SEQ ID NO: 419167 - DNA, 201 bp, Homo sapiens
acagtgactggtttgttttttggtttttgtaatttttaaaagtatgatatattttagcatatttactgtgttctgctgaagttactgaccctcagatcatyccccttgtggtagtgtgaaccttctcacattggtccctgtgtctgtttggcatgacctagtagtctctgatagctttctctctttctggtacaacaagat

SEQ ID NO: 419168 - DNA, 201 bp, Homo sapiens
ctttctaaattaaattataaacacactgatgctggctaactctcaaaacacacacacacacacacacacacacacacacacaattcgttcactagactgtyataatggtgttctgaggagcaaagggagctttggagggcaagtgtttagaaatgacaggaaccacaacagccctgtccttggaaggaagccctgttatat

SEQ ID NO: 419169 - DNA, 201 bp, Homo sapiens
ggttacttgttagaggttttacatccccatagtattgtttaatatgttcctctctcctctgaatttcctgtgaatttggtagttggacctacaggctcatracattcaagttttgttttattttattactattttttagctaggctacttcactggtgacattgagtccttccaagaggaggcacttagtatctgattgtc

SEQ ID NO: 419170 - DNA, 201 bp, Homo sapiens
gctggatcctggtgctgttggtaccatggtacctgaagtgcacaggctggtagccacacctgacattaacaagtgagtggtaacctctctgccgctggctyacagctactgtttccatagaaatggctgtcgggatcagtggaaacgaggtaagtgaaagttttcgctgatccttgtttccatcaagctgacgtctgtttc

SEQ ID NO: 419171 - DNA, 201 bp, Homo sapiens
tgttctccacccctcactacaagattgtattggctattctaggtcctttgcatttctatctaaattttagaattaacttgtcaagttctataaaacagccytctggggttttgattgagatgacgtcgaatctataggtcaatttggggagaaggatagcttaagaacattgagtcttctaatcactgagtgtgatgtatc

SEQ ID NO: 419172 - DNA, 201 bp, Homo sapiens
taagttcttccatttttgttctccacccctcactacaagattgtattggctattctaggtcctttgcatttctatctaaattttagaattaacttgtcaakttctataaaacagccctctggggttttgattgagatgacgtcgaatctataggtcaatttggggagaaggatagcttaagaacattgagtcttctaatca

SEQ ID NO: 419173 - DNA, 201 bp, Homo sapiens
ccatctccgttgtgaagattctgagggtcttaagggtcctgcgtcccctcagggccatcaacagagcaaaaggacttaaggttttgattcctctcctccckgctgggctggcttgggttggggttggctgtaattactggctcttctgggcagagctgagctgaggcctgatggatttttaaagtgagttataaggacctt

SEQ ID NO: 419174 - DNA, 201 bp, Homo sapiens
aataataataacatctattacaaaatctgcagacagccagagatgtcctgaagtctcagttactgcaggtcactataaatagtatgaccttgcacctgcargacaagcctgggattcatctcattctgtgtgaactgttgagggcaggcctggcctcagtttcctctctcagtcagggaagataaacagatgagtttcttg

SEQ ID NO: 419175 - DNA, 201 bp, Homo sapiens
tctttatgctatctctgtactgttattattactgatgctttgttttaagtctaaacattggattatataagttcttccatttttgttctccacccctcacyacaagattgtattggctattctaggtcctttgcatttctatctaaattttagaattaacttgtcaagttctataaaacagccctctggggttttgattga

SEQ ID NO: 419176 - DNA, 201 bp, Homo sapiens
taaaatgcaaaatgttcttcagaataaaactgtgtaataatttttatacttgggagtgctccttgcacagagctgtcatttgccagtgagagcctccgacrgggcaggtactgtgccagggcagctctgaaattatggatattcttatcctcctggttccttcggtgccaatggtaacctaataccagccgcagggagcgc

SEQ ID NO: 419177 - DNA, 201 bp, Homo sapiens
actccgatatgaagagaaaaagtgctttccccatggtgcgtgttagtgtcaatataaagaggaaggcactgggcctgtcttgatttgtcctcacagattarggtttttgttagagagggtttagttgctctagatgccccaatagaagaaagacctctgtgtcatttcattccatcataaaaaaaggacacaagggcagtg

SEQ ID NO: 419178 - DNA, 201 bp, Homo sapiens
tagctgaggtttaagtcgttgatcttggaaaaggtaaagacttctcagggaggttgggctgctgtgtatgacagctagaccctcagttcttggtctgttarcatgtggcccatttcttcctatccatgcccctccataaagctttgtgcgctggtagtatttacagtactggatgataattatggcattaattatttgaga

SEQ ID NO: 419179 - DNA, 201 bp, Homo sapiens
agaccaggactggctgtctcgttcctctctgctgggcagtgcctagccaaggactcagcccggtctcttgtgtgcagccccagtgtgcctgggagtcctcycctggctaggccctgggctttccaatagcggaatgaggggcatgtggagttttgccagggctgagaaaggaggccctgtgatccgagaaaagcagcggtc

SEQ ID NO: 419180 - DNA, 201 bp, Homo sapiens
gttctgttctccaaattgcacctattcctttggctccaaggcctctggacacaatggtttgacaccaacattgtgcagggcactgagagagaccctatccyggcccgcaggcacaccacacacacagacacacacacggtgctgttgccagaagccggaacagtccagtgctgcctgaggcaggtgcgcgctgggagaagc

SEQ ID NO: 419181 - DNA, 201 bp, Homo sapiens
gtctgcgtgctcgtgttcatggttttgtgggagaggatacaagaaaagggtctgctgtgtcagaaaggatgcacattttaggaacgtgagtattctgcctrcccatagtgtgcaggtgtctgtgctgcccatgcccttgcttactccagcattcctgctgctgtctcacactgcttcgcacaaccctcccctagagcacag

SEQ ID NO: 419182 - DNA, 201 bp, Homo sapiens
agaatccaggactgcagggcacagaaggaatggaaggtgtcagtgggagagggggacttctggcagagtataagccagaaagccttcccaaagccttgggscacatgggtggaagagcaaaacagagaagtgactcttacctggctgcatcaagcctctgttcaccttttgacagcagcttgggagctctgtgaggacagg

SEQ ID NO: 419183 - DNA, 201 bp, Homo sapiens
aagagagtatatttagagggaaatggcccaaggtcatgggagatgagatgacccagcctctgccaacccagagggaggtgggaagtagacagagggagaaractccgagctggaagcctccatgatggaagaggccatctcacctcaggggaggaggcattttggagcactggtcaggcaagagtggaaggtagttaggag

SEQ ID NO: 419184 - DNA, 201 bp, Homo sapiens
ctgtggggcctgatagggagggaggtgtgaggggcacgagcagtctgagtgtcttgcaggagaccctgaggatgggtgcccctttgtctttccagatattsccaacaaagtcctcttggctctgttcacctgcgagatgctggtaaaaatgtacagcttgggcctccaagcatatttcgtctctcttttcaaccggtttga

SEQ ID NO: 419185 - DNA, 201 bp, Homo sapiens
aatcaggtttggtccatttaaattcatactagtaatagccagacaatctctgatttcttctacttgaatggtggctcaagaggcaaaacacaccaatagakagtagttgtattacttgtgaatattttctaagtggagacatatcctctgggaataggcattcttatacatttttcatgactgagattagatttttctctc

SEQ ID NO: 419186 - DNA, 201 bp, Homo sapiens
aagtcattgttattatatatttgacaatgtttttttgcacaaattgaggggaacggcatttctattacatagtggttaagcacaccagctttagaatcagrcaaccaagtcttgaatgtttgttctaccttttccagttgtgagatttggggcaagttacttacctctttgagccttactttcctcatctgtgaaatggag

SEQ ID NO: 419187 - DNA, 201 bp, Homo sapiens
tttactgaaatatattttggggggaaataatttttttaaaaaatattttttcatcaaaacaaaacttagatccctgatggaggagactggaaatgacacaygaaattataaaagaaaacccgagacttctctgcgatttttaactgtcagtgcgggctgtgctcaaacccctagaggctgcacatgacctcctctctactc

SEQ ID NO: 419188 - DNA, 201 bp, Homo sapiens
ccaaggttagctgtgcacctgtcagcctctgtgagtgccatgggctgggcttgggaggtgctgcctcgtgtgggcggggaggagaagtcgcctctgagtcrtgaagagagatcagctcagcaccacatggatcccacgctaactgtgcagggatactaaagtgaagatccagtgaaagggtgaatctcaaagcatcctgtc

SEQ ID NO: 419189 - DNA, 201 bp, Homo sapiens
ctgcaggaactacttcaatttgctggatatgctggtggttggggtgtctctggtgtcatttgggattcagtaagtattctggggtgtgtgcccagaattgytgggctgaatggtttatgtaagggattttaacataattgataaaggctgggcatcattttcatgattatatttagttatataggtttatttaatttgctc

SEQ ID NO: 419190 - DNA, 201 bp, Homo sapiens
atcccatgtctgttggagcattcttctactccagtgtggatttgcctttctgatggctttgactggagaactgtattgggtagttcatcaaaataagaagscttgagttcatatagtgaaaaataagatcaccttttccctttgttcattggcttgatttattaggattgtattctcaaacctttcctgctattaaaggaa

SEQ ID NO: 419191 - DNA, 201 bp, Homo sapiens
tgtatgctgagttagtgaaaggctttaatcgcatttttggaaacactgccttttccagagcagaaagcagagtgcgtttatccatctcggcttcctttctscatcttcccctaaacctgccctggattgaatgtagtcagttccacaccagggacgcatactgtcacaggaagtccctatgtagagttggcccaggggcca

SEQ ID NO: 419192 - DNA, 201 bp, Homo sapiens
ggtccatagagcctgggagccctgaattcaagcccccactggaaaggcttaattgaaacaaggtaggctctaccagggcctcagaggggccagaaccagcrctttgtggggaagtgggctctccggacagcacttaccttttgacgaatgtagtcctgtggagcctctcttagacaggctctttggacatgccaacagtgt

SEQ ID NO: 419193 - DNA, 201 bp, Homo sapiens
ttggattttcaaatcttctgagaagcaatgaaatgacacaggggcaggccactagggtgctttggaggttctgcgtggcctggagcagtggggagaggctygggagagtggaactgtgccctcccactcgtgctacccacacagcagcctcctccctcactctctccttcatgtatgtgtgtttgaggttctgcttagcac

SEQ ID NO: 419194 - DNA, 201 bp, Homo sapiens
ttttttagttgttaaatgaatatagttacccttgggctttggggaaaattagacacaggattatttaaaaggaaaaaaatgattgttactttttaatttckgtagaattgcttcaccgacttaaatcttctgagtcattcttcattttgaaggtattttagagaatggaaaataagctaaaacaagaaggattcagaaaat

SEQ ID NO: 419195 - DNA, 201 bp, Homo sapiens
ccattttccattctattccccctccctagccccagccctaggcaattgctaatctgctttctgtctgtggatttacctattctgaatatttcatataaackggatcatacaatatgtgtcctttttgcctggcttagcataatgttttcaaggttgattcatactatcgtgtgtatcactacttcattcctttttatggta

SEQ ID NO: 419196 - DNA, 201 bp, Homo sapiens
ccattggggaatttttgtgtgtgcaattcaggcaaaatgtattttgcatcggactactgtggaacttgggctctttacaaaatcttatataaaatgaaacytcaattaatatggtcagggaatgaggtggttagttttttgaggttggtttttttatttttttattttttggttcatgaaacagcataaagccaaccaaca

SEQ ID NO: 419197 - DNA, 201 bp, Homo sapiens
tactttttaaaagaagccttattgagattgagatataattcacacaccctatacttaactaatttaaatcatacaattcagtgttttttactatattcacygttaagcaaccatcatcaaaatcaactttagaacattttcatcacccaaagaaaccccatacctattagctgtcaccccattttccattctattccccct

SEQ ID NO: 419198 - DNA, 201 bp, Homo sapiens
gaatacccagagatacccagagtctccactgggaatacttctgctccccaaatgtgatatcagagtaatatcaagtagaatgtggagtacacccacctatygaggcacaaactgccctctcccatgaccctttctctgtagaaagtattacttatactgtaaatagcagtcaaatttcaagtaacatcagttctctacatc

SEQ ID NO: 419199 - DNA, 201 bp, Homo sapiens
agggctagcaggactctgctgatgggataatagatggtattgtcaccaatgaggatagagttgcctggactgaaaattcaaagaccaggtcagtctgttawttgagtgggcccagcaaggttttttaaaaaaaaccctgagtttagagagagcagtgtgagatgcagaacaacgggcaggagtgctggagaccaccaatgc

SEQ ID NO: 419200 - DNA, 201 bp, Homo sapiens
ggaaccttgtgtagtatgatttatactaatcatagtatgtgtgtatgattgtataaggtgaaaaacaagataatgcatcttctatgattaagttgccttayttatcaagtaagaggtaactgtaccccgttggtcttaaatagctgatatgtggtttggtacttaatactgtctattggaggaattgaaatagaataccca

SEQ ID NO: 419201 - DNA, 201 bp, Homo sapiens
ctcactcctgcttgtgtatacactgcagggcctcaggaaagacagctaaaagctctgagcctcagtttttagtaagcaaaatggaagccacatgggtaggyacccagcttacccggagcttgctgggagggtcagcgaaggtaatggaggcagggccctcggtgactcaagagtggtgccagcagcaggaagggggtcact

SEQ ID NO: 419202 - DNA, 201 bp, Homo sapiens
cattccagcctctgcgacaagagcaaaactctgtctcaaaaaaacatacaaacaaaaatacaagcaagtcaagggttttctattagttagttttgtaactyagagatggtgcccgctgactgtgtctgtgttgtaaggaaacttgcacctaaattggctcttgcctcagcagccccaccttagctgtgcagcttactcggc

SEQ ID NO: 419203 - DNA, 201 bp, Homo sapiens
tgctgccctgtctccccttccttctgccgtgcacacacctgctcacacaggcaccatgtgtacacatcccttcctctgcactggaggaagcacctttgcartatttccagctcatgggatggtgtgaaagggatatgctcattctcctttgaacccttctcaccggatctccatcatgaggggactctctctgcctccctt

SEQ ID NO: 419204 - DNA, 201 bp, Homo sapiens
gccctgtttgctctagcttcctttggccaggtctgccagggagactgtgtctgaatgtgcagcatgagcttgtccgggaataggggaatggggttcctcargccacaccctttcacctctaaacccagtcagctcacagctggagccagtctcccaggggggtcatctagatcaaagctaagtgtggagaataagggctgc

SEQ ID NO: 419205 - DNA, 201 bp, Homo sapiens
ggccccagatagccaatattaagtttgagtaacttcatgaagcagagtgcaccaggcagagccacttggacccttaagcatgttaacttagcggtttacartattacttttcattggtagaattaggaatatacaaagagttattaattggctgggcgtggtggcttatacgtataatcccagcattttgggaggccaaga

SEQ ID NO: 419206 - DNA, 201 bp, Homo sapiens
aggagttcaagactagcctgggcaacataatgagacctaatctgtacaaaaaataaaaaaaattagctgagcgtggtgtcacatacctgcagtcccagctrctcaggagactgagggaggaggatcgcttgggcccaggaggtcaaagctgcagcaagcaatgtttgcaccactgcactccagcctcagtgatacagtgag

SEQ ID NO: 419207 - DNA, 201 bp, Homo sapiens
taaattcacattcactcactattcctgctattacctccagtctgcaattgaagctatccagtgacattttaagttttattgtatctttattttcaaaattkttgtttttgctatcattccatttattttaagagtatttagccttacttcttggagcatggttaaaataggtactttaaattatttgtttgataattctgg

SEQ ID NO: 419208 - DNA, 201 bp, Homo sapiens
ctgtttccggtttgtaagtgccagagagcttgtgttttagctgggtaaatctgaatggaatcattaacttagaacttcatcttaaatactctgcaggaacrgtcagtgaattcagggagcctgcttctccgcctctttgctccctgctgctgatatttaggtcctcctttccctccctgctcaggtttacactcacccctg

SEQ ID NO: 419209 - DNA, 201 bp, Homo sapiens
gtgaggtttgactgtgccactacattccagcctgggcaacagagcaagaccctgttgcttaaataaataaataaataaataaacaaataaatattcaagarttctcaggtctggatgtagggttagatgccagttagatataagtgaaatagccggtttacttaccaatagacaggaaagtagtcttttgtgattcccttc

SEQ ID NO: 419210 - DNA, 201 bp, Homo sapiens
ctcttcagttctttcaaaaccatagatcatagttgtcatgaagatcagtggccaagaccaactcgcctttgcagataagggtgctacggtcagaagctccyggtgagcagctttcctggtggtcagacttcttgctgctggcccacttgcctccacggctccgaggagaagcagggaccccagaaagggctagcaggactc

SEQ ID NO: 419211 - DNA, 201 bp, Homo sapiens
gaccaactcgcctttgcagataagggtgctacggtcagaagctcccggtgagcagctttcctggtggtcagacttcttgctgctggcccacttgcctccayggctccgaggagaagcagggaccccagaaagggctagcaggactctgctgatgggataatagatggtattgtcaccaatgaggatagagttgcctggact

SEQ ID NO: 419212 - DNA, 201 bp, Homo sapiens
acctggctatcaccacccccaccccagagtccttcccaggctccccctgccccacccccacaggttgtgctcccctggctgagcacaccacatttaccccygtcatgtgccacactgggttgggattgcccatctctccaccagactgtgagctccttgaaggccagagaagccctggtaccaaagtgctacagcagacct

SEQ ID NO: 419213 - DNA, 201 bp, Homo sapiens
ctggtctcaaactcctgacctcaagtgatctgcccacttctgcctcccaaagtgctgggattagaggtgtgagccactgtgcctggccaacacagaaactstcggctgatgttagctcacctcaaggccaaaatcacaaagaagagtcacgcccctctgccctctccgcagcacgtggtccagtgcgtcttcgtggccatc

SEQ ID NO: 419214 - DNA, 201 bp, Homo sapiens
aatttgtcattgggtggatggtagagaaggcgacatttcagtccggtccagaaggaacacaggagtttgtcagaggcagggagggctcagaaggaggcagragaatggacatcgtaatggcaaagggtgagccattgggtcatcctttggctaggacataagaggaagtcagaaggccccaggtacaagctgagccttctc

SEQ ID NO: 419215 - DNA, 201 bp, Homo sapiens
gggtttcaccatgttagctaggatggcctccatctcctgacctcatgatccacccacctcagcctcccaaagtgctgggattacaggtgtgagccaccgcrcccggctgagatttcatttttaactcagacgtcaatcaacgtagccatatacagatttgaaaagcttttctttatctctgttaatggagaaaaagaatga

SEQ ID NO: 419216 - DNA, 201 bp, Homo sapiens
ttctccaaattgcacctattcctttggctccaaggcctctggacacaatggtttgacaccaacattgtgcagggcactgagagagaccctatcctggccckcaggcacaccacacacacagacacacacacggtgctgttgccagaagccggaacagtccagtgctgcctgaggcaggtgcgcgctgggagaagccaggag

SEQ ID NO: 419217 - DNA, 201 bp, Homo sapiens
tttcttttgtatatggtaagatccaagaaatgcttggctctgaaaagggacttggattgagaagggttcaatgggagcaagaccgttctcagagccgaagyttgtctctcttgccccaccttctgacttagagatttggaatctccagtggactgtattcatctccagccttcccctccaggcctcaactgtcattccaag

SEQ ID NO: 419218 - DNA, 201 bp, Homo sapiens
tattccttcacatcgattctcagaattttcctgttgccaagcaagtgtaaaacctgggagtagatgattaaaggagagggaacttcaggctcctagaagcraaagtttccgcttactttcctgagaaggtttaaatatcatctaggatgatataattattatttttattattaatatgacaatcacgtggttaatactttg

SEQ ID NO: 419219 - DNA, 201 bp, Homo sapiens
aaatgataaggtgctcacaaggaacagggtaatgactcacaagtactataagaggaagacgtttatttactagctagtttctaggttttaaatcatctggsactgagtggaatgccaggggaaataaatggctcctggaaaggtttctagaattgcagaagtagttcttggctgtcagagaacaactctttataattcatt

SEQ ID NO: 419220 - DNA, 201 bp, Homo sapiens
tgcggccagccagcccagcagcgtgcacatgagctgctgaggccaccaaggccgtgggaccagttagctcgcctttttcccatggtcacaggcagaatgtrtcactcaaattccaggtgatggggagggaaagtgcaggtgggtcagggcagtcccagcttctgctgggagactggtccaggaggccccccggtgttagcg

SEQ ID NO: 419221 - DNA, 201 bp, Homo sapiens
tcacaagtttgtcctttttatggctgtatagtagtccattgtatggatataccacaatttgtttatccctgtacctgctgttggacattagagtctaaacrttggaaacattgttttggctatgaaaaataaccaggttttggctattacaaataaagtggctatgaacattttatataggtgtttgtgtacacacatata

SEQ ID NO: 419222 - DNA, 201 bp, Homo sapiens
atggtggcggaggccggagacgctggctttgctgtgtgtctttgctactgctctgtgaccacctgccgagtctgcggccagccagcccagcagcgtgcacwtgagctgctgaggccaccaaggccgtgggaccagttagctcgcctttttcccatggtcacaggcagaatgtgtcactcaaattccaggtgatggggaggg

SEQ ID NO: 419223 - DNA, 201 bp, Homo sapiens
tctctctcttttttttggagacgaagtcttgctctgtcacccagactggagttgcaacctccacctcccaggttcaagtgattcccccacctcagtctccygagtagctgggactacaggcgcacaccgccacacccaactaatttttgtatttttggtagagatggggtttcatcatgttggccaggctggtctcgaact

SEQ ID NO: 419224 - DNA, 201 bp, Homo sapiens
ttaggcagttagttgtgtttactgatatttcaccagaaaaccaatatgataaagaattgactagtttgaccacttatgttttctttattggaattgtgcartcagccctgacccgtggtcaggatcacgttagcatcttctgagtgggtatgaaaatcgcggatttttaatagatgtctgtttccagaggtaatcccagga

SEQ ID NO: 419225 - DNA, 201 bp, Homo sapiens
aaaaaatattcacaaagcttactgccatggaatttagaagagctaactgctgggggttagttttgcatggcccattggtgtctcaagaaaaccaaaacaaygatagaaacctggccatggggattggaacgggtgtcgtcttttcctttccatgtgttccttgtaggaggtaaaaatattgaaaatcatcctaattgatca

SEQ ID NO: 419226 - DNA, 201 bp, Homo sapiens
gagtttccccgggtcctctatcagtagcatctctgttttgatgacgacgtcgcaagcaagaatgatctggtagcctaggcttcctcagaggaagtggcccrggcacggcaagccaaccatagctggctgtacccactgggaaatgtgagaacatgccggtttgtgtttgcaggaagattttcctttgagttgtcagggtgt

SEQ ID NO: 419227 - DNA, 201 bp, Homo sapiens
aaaggatcagaggttgtcggatgtgctgtttctagtgctggttggcagccgtggcctgctgatttcttctctagtacttgaagttgttaaaaatgtccagsaatgtttgactgtttacacttatcttggaattgtttagtccctgctaaagagaatccagactgttctgtaagacataattttgtgtgcatgtgtgtatgg

SEQ ID NO: 419228 - DNA, 201 bp, Homo sapiens
atatgagactttgtaattatgaaatccatcgccagacctggtggtatgaaatcagagagtgcttacgccacctgccatggtcatgacccactagtgatggmtcagaatcttagttggggtgctgtggccactcacacagacattcacagtccctactgggagatggtctttaaagccacttagggcagtttcttacccttg

SEQ ID NO: 419229 - DNA, 201 bp, Homo sapiens
ttttctttttctgctgtcctatggttgactctttaggccacagcaacatcctggacttgaatctgcagagaagtattccctggtgcttgtctgtggttgcmtgttgttttctttatagcacatgccactgtatcagaggtgcttagggagctgcttatgctctgtcttccccaactagagtagacattccagtgtgtggtg

SEQ ID NO: 419230 - DNA, 201 bp, Homo sapiens
aaatcattcttctctatgctgtatgttgttttcctctggctattttcaagatttttttcattgtctttagtttttagcaatttgtttatgatctttctagrtattgatttctttgagataatcctgctggcagtctgctgagcttcttgcagtggtaagtttaggtcttttgctaaatataggaagttttcagccagtatt

SEQ ID NO: 419231 - DNA, 201 bp, Homo sapiens
ggctgtaatcagaccacccgatgttttatggactcggtgtcttggcaatccagaggcacgccagtgggggcagtttctgctttgtctgctcattaaacttyggacaccttttctttgttgctgggccagtcattcccacaatctgattggccagagttgatgctgtttgaaatgggcaaattttatacttactctgaaaaa

SEQ ID NO: 419232 - DNA, 201 bp, Homo sapiens
catatgagactttgtaattatgaaatccatcgccagacctggtggtatgaaatcagagagtgcttacgccacctgccatggtcatgacccactagtgatgkctcagaatcttagttggggtgctgtggccactcacacagacattcacagtccctactgggagatggtctttaaagccacttagggcagtttcttaccctt

SEQ ID NO: 419233 - DNA, 201 bp, Homo sapiens
gagttgcttgaaccggggaggtggaggttgcagtgagctgagatcaagccactgcactccagcctggcaatagagcgagactccatctcaaaaacaaacaracacttaagtcttaataataaggttattttttttcactcaaagaattatctatttgtgtaattaaaaaacagtgttttagaaattccatgggataacaga

SEQ ID NO: 419234 - DNA, 201 bp, Homo sapiens
cttcctgcttggtccataaaaggctgcccctcctttgaaacgctgcgtccatgcggtggtagatgtgccgttgttcatatgaccagtcccttgctgacaarcattgagttctgtctggtcttagcccacatacacagggctccagtaggtgaccctgaacacgcatcagagggcacatgtgttggctgtagatctgtggga

SEQ ID NO: 419235 - DNA, 201 bp, Homo sapiens
catttctgaagaaatccagagaccaaagggaatgatctggacaattctctcccacttggtcattttcaggtatatataatctgctgtaagccatagtattkttgtttgaattatacttaaattttggctgctgatcagtgattcttttttaaaaaaaaatttctttcagagaaactggtgtctttttttttttttttggta

SEQ ID NO: 419236 - DNA, 201 bp, Homo sapiens
acacacacagacacacacacggtgctgttgccagaagccggaacagtccagtgctgcctgaggcaggtgcgcgctgggagaagccaggagcacccgggcarggttgccggccacaggcagaggtgcagctgcagcaggaattatctgccgcctgcccaggttctcagatcctctctcccaactgcaggtccgactcaggag

SEQ ID NO: 419237 - DNA, 201 bp, Homo sapiens
gaccgtgcccctctggagcaccacgttcccagtgtgtaacctgctgcctggcacatggttgtgcctggcagatcttttttgaatgagtgaagtgccaggtrccatgagaaaaccctagctggtaaagatcaaacctgagttagttctaaattcacatacggattttttttgcatgacgaaatctattctctttttcctgac

SEQ ID NO: 419238 - DNA, 201 bp, Homo sapiens
ttctgaaagtgttgcatgttctactttccattgggtttgacctctccatgataacccttcagaactctgaagagagcaatagaatctccatcacctttttycgtcttttccgagtgatgcgattggtgaagcttctcagcaggggggaaggcatccggacattgctgtggacttttattaagtcctttcaggtaagagcca

SEQ ID NO: 419239 - DNA, 201 bp, Homo sapiens
atgtccttgaagctgggctccgtagagtggtccaccaggtcaccctgctggccacctccatttgtcatccctgggcacattctagacagcatcttgggccrgggccttgccccacctgggtgattgtggggtcactgaactgtcgtgggatctcaggagaaacctcttcagagagtctgcatccacagggagaagtgtatt

SEQ ID NO: 419240 - DNA, 201 bp, Homo sapiens
tgcattcatcatcagtgtccagtactcttgaccagcccagcgttctcctctaacacagtagaatacgtggacatgcatgtgctgtgtggacgcagttttcygagctctgtgttgttagcatgtaactcttcctttcatatcatgctttttaagatgaaaaggccctagaatcacatcttcagttcttacctctgtcacctt

SEQ ID NO: 419241 - DNA, 201 bp, Homo sapiens
gagtcgtattttttgtttgtttttgtccagttttttttgtttgtttgtttctgcatgaaataatgaaaaagtaaatcaaggtttgtaattggtttcttctsacttaggaaagaagaaaattattctatgagagtaccagcaatgtaacatgagtctataattttactcacttggtcttaacttttgacacccttgcctcag

SEQ ID NO: 419242 - DNA, 201 bp, Homo sapiens
tttgtccccgtccctccccacccccctgctgaagcgagaataagggcagggaccgcggctcctacctcttggtgatccccttccccattccgcccccgccycaacgcccagcacagtgccctgcacacagtagtcgctcaataaatgttcgtggatgatgatgatgatgatgatgaaaaaaatgcagcatcaacggcagca

SEQ ID NO: 419243 - DNA, 201 bp, Homo sapiens
ttaagccttacgtcattttgacaaaggctttacttgattgagtattgacggcttttccaaaataaaatccagctcttaattgagatttgtggctgggcatrgtagctcatgcttgtaatcccagcactttgggacacttagcagggaggattgctggaggccaggagttcaaaaccagaatgggcaacatagtgagattcc

SEQ ID NO: 419244 - DNA, 201 bp, Homo sapiens
tcagacacagctggaaaggggggggctgaaaagatgtcaccagcattctatccctgccctgcaccctcgggtttctgagccagagtctgactgacctctastaggtcagcctcacgttgcctatgtgtacatcttcctcagctcattttgaggagggcatgtggggacgtgcatttctttctttttttcaaattttatttt

SEQ ID NO: 419245 - DNA, 201 bp, Homo sapiens
aactgtctgacaaatgtgaaaagtacccaatacagggtgacagcatgcccagcagtagagacacttgggtgttaaataccagtggcggtggggacacgccycaacagaccccaacagcttctcaccaaagaaagttcctaaaggaatggaagaggttctagaattctggaggtggggtgtacagggagggaccatgtgcac

SEQ ID NO: 419246 - DNA, 201 bp, Homo sapiens
ttacactgaatctatatctcaatgtagggagaattgacattttaatatcaagtcttctgtccatgaacatgtatatttctcataatttatttagatttgayttaatttttttcaataatgttttgtggttttcagtttcaaatgttttgcataattttctaaatgcatccctatatcatttgtttctgatgttattgtaaa

SEQ ID NO: 419247 - DNA, 201 bp, Homo sapiens
ttagttttttggggaacccccatacagttttccatagtgctgtattaatttatatgcccactaacagtgtgtgagggttcccctttctccatatccttacyagcatctgttattccctgtatttttgataaaagtcattttaactggggtgaggtggtatctcatggttttgatttgcatttctctgatgattagtgatgc

SEQ ID NO: 419248 - DNA, 201 bp, Homo sapiens
tcatactaaataggctcctttaatccacactcctctctgagaaccaatccactttaccaagatctacccctcttggggctgtgctccctggttaagaacarctggtttagtagcaagggagaaggcaggagatgatttaaaacagaccctgggattctaaaagtcctgggattttataattcctgggattctaaaattagc

SEQ ID NO: 419249 - DNA, 201 bp, Homo sapiens
cttactcaagctttgcttcctgtcatatgtactaaggttttcaatgtgaaaatatgaaattacattctcatactaaataggctcctttaatccacactccyctctgagaaccaatccactttaccaagatctacccctcttggggctgtgctccctggttaagaacagctggtttagtagcaagggagaaggcaggagatg

SEQ ID NO: 419250 - DNA, 201 bp, Homo sapiens
gaaaaacttcagaacatcagattattttttatctaaaatatgtatgaaattggagtcaaagaacagaagaaaggttttaaaaaagaaaaggaagaattatratgtcttcatttgaatcaaattcctactcactacagtttccaactacagtctgtatctcaatccactggatttttccattccaacagtgacctattgctt

SEQ ID NO: 419251 - DNA, 201 bp, Homo sapiens
ctgtttctctttcctgaatcagaggcccagaggcattcatatagttgctttctggtaaaaccttgctgatctggtatttgggctgtcattagactgtagtrcaaaaagacgaggtgaattttgggactccagatttcagagtgtataatatctcttgtagttaatattcacaacccatgagataggaacagacagggaaac

SEQ ID NO: 419252 - DNA, 201 bp, Homo sapiens
tgctgaatctgtttctctttcctgaatcagaggcccagaggcattcatatagttgctttctggtaaaaccttgctgatctggtatttgggctgtcattagrctgtagtgcaaaaagacgaggtgaattttgggactccagatttcagagtgtataatatctcttgtagttaatattcacaacccatgagataggaacagac

SEQ ID NO: 419253 - DNA, 201 bp, Homo sapiens
gagttcaagaccagcatggccaacatggtgaaaccccctgtctactaaaaatgcaaatattatctgggtgtggtggcgcatgcctgtaatcccggctacaygggaggctgaggcaagagaatcgcttgaacctgggaggcaggggttgcagtgagccaaaaccatgccactgcactccaacctgggtgacagagtgagact

SEQ ID NO: 419254 - DNA, 201 bp, Homo sapiens
tttgtagcactttgctgcctggtaaattctgtatggtgattgagatgctgcaagagatgtgtataataagcgaagtggctctctgcactgattgcatgagsagatccacgtcccatatggtggatataggaactgcatatgtgtgcaagtgtagttttgcatctgcacgtgaatctatgaatatctagattttctaaccca

SEQ ID NO: 419255 - DNA, 201 bp, Homo sapiens
cagatggcaccagggccagcttggtaaaaccagaaacaaggggcctgagtttggccctttgtcagggcctctgtccttgggaactggtggttccacctggrccccaacataagcctcagcttttcatttggccagcatgtatcatgaagttacttcttatttcaccctttgggggactctcagctgctcagagcttttgtg

SEQ ID NO: 419256 - DNA, 201 bp, Homo sapiens
ttcttttttttttttttttttttttgctgacttgcgggagaaactctggcatactactgttccattttaaataatgaaacaagtgtctggataatgtcacrtatctggcataaaatgaaataagctagaaaatgcagagaagcaggtgttccaccaaaatcctgttgcaggaagaagacatcagtagttttagtgaaagga

SEQ ID NO: 419257 - DNA, 201 bp, Homo sapiens
aaatataaaatcatgaacattccagaaagaaaacaggagaaagtctttgtgatcttgagttatgcaaaggtttcttaagatacaacacccagtatactttytgtaacagaaaacaaacagataaattggtctttgtcaaaattaaacttctgttcttcaaaagaaaagaaaaaggttagcttcagacttggagaaaaatat

SEQ ID NO: 419258 - DNA, 201 bp, Homo sapiens
acctctccttattcactagaagagtgtgaaaacttagtttcctctctgctccacccacggctttctagcagtcactgtaggcccaaggaaacccaccaccrtcttggtgcactgtaaccagggttgaggtgtctgtcctaattttgaaagcctgccttcagacatttatatgttcagacaaactaatcaggctgaaatttc

SEQ ID NO: 419259 - DNA, 201 bp, Homo sapiens
acatttgtaaaagaggaaggagtcaaagtttttagacttgctgattggtatgttttccacagctcatggagttgcatgggttggaactggaaaggttctaygagtcatttagcccgtgagcagcacctgtgaggtctgtggcagtcagatgggcatggctgctgggatggatactagaggaaaggtcagaggctctgccta

SEQ ID NO: 419260 - DNA, 201 bp, Homo sapiens
tttgtatgttattggtgtgcctttttttttttaataccataggtgtgttcctgatgaaaagggtgtgaataaatggaatttaaaatagttttccaatgaayggaatctttcacatgttaatatatcagggtcttctgcagtgacagctttgcctgaatttcatttttcacattagcttaaaaatattttaaagtaaaacat

SEQ ID NO: 419261 - DNA, 201 bp, Homo sapiens
ttggggatactgcaagcaaacatttaataggtgacggttcctcaaagggtcaggcttatgggaatcatcctaaaatttgtgtttttaaaaatgtttctgartataaagtgttctcttcagaaacataaaatttattttcaaatacacatttgcctattgcataaaaatatataatagtgataatatatagcaaagtgcttt

SEQ ID NO: 419262 - DNA, 201 bp, Homo sapiens
cagtgtctaaacatgcttcctctcctcaagcccaaatcaaatcagtgtcaagtggtcaaaccaggcaggtggtctggtgtgtcctagatgtgcagaacagrgtcctgaagaatggctaagatgttgatgggtaaagtaagaagagcaggtaaggagaagttagaatttgaaagggagaatcctctgtgctttcgtgttgct

SEQ ID NO: 419263 - DNA, 201 bp, Homo sapiens
gagctgggggctgcctgtccctcacccctattccaggtgggtgcagtgctgtgtgccctctttttgcccctgccctcctccactgcctgggctccagcacrtgttcgtgatgtttatggggttgaatcaagtggatgagaaaagacgctcgtgcaccagatggtggccctgggtggaccctggacctccacacactagtgg

SEQ ID NO: 419264 - DNA, 201 bp, Homo sapiens
ctggcagtttgatgtttatcatttcctgtcattgaggaatgtgtttttctaggacagtatgaaggctttcaggatctttagagggaagctctaaaatgtgmttctctctccattaggttggctcatcagtcagattctgatttgaaaatgaagggtgcttggcagtaagaatagtggaagtaaattttcaatattatacat

SEQ ID NO: 419265 - DNA, 201 bp, Homo sapiens
cctctttctgtgtaggtggatgatttgtgaagcagggttggtagaggtgcctggcagcatctctgggtggaagcagggaggcctgagatgcctcagtcccrtgaactcccattggatgtcaggaaagctgccatccgctgctcccaaagagggtctgaatggtgtcccaaaccattcattcattcattcattcattcattc

SEQ ID NO: 419266 - DNA, 201 bp, Homo sapiens
taactgactgggctctggctgactgtgcctgtacattggtttggggtttattttaagcagaaggtgcagtcagagagcaccaattgcaatttggctgtgtytctgcacctccagaggcaccgttcacacaccgttcatggcgtccctggaggtgagcagcctggcattggcgtgaggacactgtttcttccctcttgaagc

SEQ ID NO: 419267 - DNA, 201 bp, Homo sapiens
cccatagaaaatatgtaatttatctgtttcaatcagattgtttttaaaatgaagctttagaattgaaatgctgcaactgtaccgatatcagcatgagacaygactccagagattaaaaagccacaaagacttagtcttttcagaagtttgctcttttgaaaataatgactaatgttcctacatgattaatattagaactat

SEQ ID NO: 419268 - DNA, 201 bp, Homo sapiens
caataactcagctaaagacagagaaaatacaaaccaagaatgatggccaaagctgattcagaggtatggaagatggctcacactagatgcgtctgtgcaaygatgaaagtggccagggcaaaatgacactggattggtcgctttgcttccagggagctccaggagagcttttctgagatgatggagttaacatgtgtgggc

SEQ ID NO: 419269 - DNA, 201 bp, Homo sapiens
atctcagtgcaccacactgtaagcctaagggtctgccctggagctcttcccagagatcccaatgcctggaatagattgcaaaatataggccttgagcttcyccagattttcagcaggcaaattgcagtgccagcatcctctcacaggtcacaggctttcctaatgcttggtttttcccagactcactgaaagtagttttta

SEQ ID NO: 419270 - DNA, 201 bp, Homo sapiens
ggcccggctgcccatgctgcaaaggccttggaaactctaattacagtctgggacatgcagggctgctgtctgccaccatcctctcacccccagtggcaccsaggccccccgccaccaatctcagtgcaccacactgtaagcctaagggtctgccctggagctcttcccagagatcccaatgcctggaatagattgcaaaat

SEQ ID NO: 419271 - DNA, 201 bp, Homo sapiens
tggtgtttgggaactggctccctcttcttatacactttctagacttcctctctcctggctcctattacctacatcttggccatatttccatagacaagaaytggcagaggagagacaaggtgggagatattcatgcctcccattccaggatgtccagtgaccatgaaggcagtcatggaagccattgcctaaagtttcaga

SEQ ID NO: 419272 - DNA, 201 bp, Homo sapiens
ccgtcgagatggttttgaaagtcatcgcatttaagcctaaggtgagttgcagaacccacttttcaaaggttgttgctgagtcaccctagagaagtacccgyttcctgttagtcttgtgttactgaattatgctaaagtgttctggccgctaactgggttaccacctgagaacattaaaatctgattagagcatgtgtgtat

SEQ ID NO: 419273 - DNA, 201 bp, Homo sapiens
aagatgttcaatgatgccatggacattctgaacatggtcttcaccggggtgttcaccgtcgagatggttttgaaagtcatcgcatttaagcctaaggtgarttgcagaacccacttttcaaaggttgttgctgagtcaccctagagaagtacccgcttcctgttagtcttgtgttactgaattatgctaaagtgttctggc

SEQ ID NO: 419274 - DNA, 201 bp, Homo sapiens
ttttctgatgagtctgggctataggttggccagagttctgttctggctgacagttgtcacggtaggagtttaagatagttcttttgttgaagaaattatcygtacagcatgatggtaggtaacatttccatggagcctggcattggtgctcaattctgtaaacatttaccatgggcctcctgtggccagctagtggttgag

SEQ ID NO: 419275 - DNA, 201 bp, Homo sapiens
acatcaattattcctctggatattagttgcttcagctctaaaatggggacacaaaatgttttctgcctgaaggctgagaactggaccatgtgacttttggmattccttcaagttctagatttcatgagagagaaaatcgacctgaaaatgcattaaatgtttaaaaacatagggaagaaagaaatatacaattatttaatg

SEQ ID NO: 419276 - DNA, 201 bp, Homo sapiens
tggatttagatgggcctacccaatccttacaagagggaggcaagagttagccggagaaggagctgcagtgatggaagcgcagaagtcaagagtgatgtaaycacgagccaaggaatgtgggcagccttagaagctggaaaaggcaaggaaacaggttcagccctagagcctccagaggagcacagtcctgctgacatccta

SEQ ID NO: 419277 - DNA, 201 bp, Homo sapiens
ccaactcaccagagtctaccgactctagacccactgttgtcctgggcccctgcctgactcttttacccactccaggatgaccctggtttctactgacacckgcctgacctaactcggtttgtctagaatgcagttgaagttgcagcaagggagatgaggaagggtaagaattggtgaaaaaaattacaaaggtttttcatg

SEQ ID NO: 419278 - DNA, 201 bp, Homo sapiens
atggcattgttgtgcaaccaacatctctatctagttgcaaactttttgtcatcccaaaagaatggctagatggcttttgtggtggagaatctataaatgaygggagttgggggaaccctgaaataacaattatgaaatgccccaaatagcttccatgacagccatgtggatgatttccccaaatcagaatttggaactcaa

SEQ ID NO: 419279 - DNA, 201 bp, Homo sapiens
ctgcaccccattctctgggacattctacatgcagagcacttggactcagttctccagtgcaggctgctggctggacccctggcttccctcctgagggtggygggcaggggctcacttcttgtgccctcccctccttgcagagctgggggaatgcaagggaaaccccctggttgttggtagtaaaaccagccagcatgtggg

SEQ ID NO: 419280 - DNA, 201 bp, Homo sapiens
aaatcacaaagaagagtcacgcccctctgccctctccgcagcacgtggtccagtgcgtcttcgtggccatccggaccatcggcaacatcatgatcgtcacyaccctcctgcagttcatgtttgcctgtatcggggtccagttgttcaaggtagaggaactgcctccaagcataaaactcaggtggatttctttaaggagaa

SEQ ID NO: 419281 - DNA, 201 bp, Homo sapiens
ctcctgtgacgccctgaggcctctggggagctactgcttcctgtgctgcaccccattctctgggacattctacatgcagagcacttggactcagttctccwgtgcaggctgctggctggacccctggcttccctcctgagggtggtgggcaggggctcacttcttgtgccctcccctccttgcagagctgggggaatgcaa

SEQ ID NO: 419282 - DNA, 201 bp, Homo sapiens
cccctaggaaggcagccacaactcagccactgctcagttgtccagcctcaccccctacccttacctttgaaaagaatgagaagctttaggctgcttggagktggaaggaaatgctaaaataaattcctgagtgtgcaaaaaagtctgtcctgtggagaacagaggagtgaggctctgaggccaaagacatctgtgaatgag

SEQ ID NO: 419283 - DNA, 201 bp, Homo sapiens
agctttgcctatgcacaccagcacagtcgacccagttctgccaccaggatcggccctggtcacctgactctggggaaagtctgtttaaggagattcagacmgcagggacgtgaagccaacaactaagggaacagaggggacacactgtactcttttctttgaagtggcctctggccccatgggaatgctgagctgagaggt

SEQ ID NO: 419284 - DNA, 201 bp, Homo sapiens
ctttaggaagccgaggcaggaggatcacttgaagccaggagtttgagactagcctgggcaacaaagtgagaccctgtgtctaccaaaaattgtaaacaaasaagcaaacaaaaaaatcaggtgtggtggtgcatgcctatagtccccagctacttgggaggctgaggcaagaggattgcataagcccaggagttcgaggct

SEQ ID NO: 419285 - DNA, 201 bp, Homo sapiens
tacatgtttcaaattgcttctctgtcttttagtctctggctactttgcccaggactatgccaaagctagtagtggcagctttaagaatgaaattagctggrtgcagtggctcacacctgtaattccagcactttaggaagccgaggcaggaggatcacttgaagccaggagtttgagactagcctgggcaacaaagtgaga

SEQ ID NO: 419286 - DNA, 201 bp, Homo sapiens
ggacgtgcatttctttctttttttcaaattttattttattttaagttccgggatacatgtgcaggatgtgcaggtttgttacataggtaaatgcatgccayggtggtttgccgcacctatcaacccatcacctaggtattaagccctgcatgcattagctatttatcctgatgctcttcctcccacatttctttttttttg

SEQ ID NO: 419287 - DNA, 201 bp, Homo sapiens
aagcagcggcttttccctgcaggatccgcgtaggctgccacaagctcatcaaccaccacatcttcaccaacctcatccttgtcttcatcatgctgagcagygctgccctggccgcagaggaccccatccgcagccactccttccggaacacggtaagtccccagggtggggctcgctctgggatagccctggcctctctcg

SEQ ID NO: 419288 - DNA, 201 bp, Homo sapiens
atgacaaatgaggtctgtggtcactttcttcactgttgcagtgctgtgcccagcactgagtgtgagggatgtcatggagagaatgctgaatttggagtccrgtggcctggctttgagtccctgctctgtaactttacttcgttgtgaccctcactttcttcattggtcataaagcaggaggtaaaaatttaaatgagatct

SEQ ID NO: 419289 - DNA, 201 bp, Homo sapiens
ctactggaattttgagtgggcattcctccatctccctaactagatggataagcttcttgagtcaggaatctttttgtattcacatctctcaatagagtacrggatcttgcacatagttggcccttggtaaatgaaaggtcattattttctttttctgctgtcctatggttgactctttaggccacagcaacatcctggact

SEQ ID NO: 419290 - DNA, 201 bp, Homo sapiens
aagtgtcagagcagataatttaggctaaaagaaacaaagttaaatgatttggtgggggcttgatttctctggattgacccccctggactattggctgtttscttcacttccagactgtctggtaagatttttctacagaggtaccttcttattaatgaattcttcccatcacacccactctgtttgaatttctgaattacc

SEQ ID NO: 419291 - DNA, 201 bp, Homo sapiens
gctggtaaaaatgtacagcttgggcctccaagcatatttcgtctctcttttcaaccggtttgattgcttcgtggtgtgtggtggaatcactgagacgatcytggtggaactggaaatcatgtctcccctggggatctctgtgtttcggtgtgtgcgcctcttaagaatcttcaaagtgaccaggtaaggaaatgtgggtcc

SEQ ID NO: 419292 - DNA, 201 bp, Homo sapiens
ggagagagaaaatgtggagtgcagaggatgctgcctggaggtgagactttaaccacatgattattctcagttatggagcaatggctttgttccaggcattrtctccaatagtcacaatcacaccatagggctgatgttttttctatcccactgaggtgtaaacagaggccccaagaggttgcatctggaggtgcgtgagca

SEQ ID NO: 419293 - DNA, 201 bp, Homo sapiens
gactttaaccacatgattattctcagttatggagcaatggctttgttccaggcattgtctccaatagtcacaatcacaccatagggctgatgttttttctrtcccactgaggtgtaaacagaggccccaagaggttgcatctggaggtgcgtgagcaaaatttggagagaagtaccaagtgggcacttcacaacaggtgaa

SEQ ID NO: 419294 - DNA, 201 bp, Homo sapiens
tgttatcttctctgagacagcatcctcaccccagccagagccagccctgtcctctgctcatgcatccgttgggggcctactatgcaccatcgttaccaacwctactccatgtctgcctctctgtttgttggtgagcagctgcttgaggtctcaggctgagtcttctgcttctggctctgtggtacctcacatgatgcctgg

SEQ ID NO: 419295 - DNA, 201 bp, Homo sapiens
ctctgcttggccatgcaggtaaaaatggagacagccgtggggatcaggtccgggcattccgcacagccccgtgccccaaatgctgagggtggaatgctgcscctcacaggaggggtttgatttttctgatgagtctgggctataggttggccagagttctgttctggctgacagttgtcacggtaggagtttaagatagtt

SEQ ID NO: 419296 - DNA, 201 bp, Homo sapiens
gaatattcaaagtcctccatgaagcactggcccctgtatatttctgcctcatttcctgccattccctccctgctatttcttcgtccccaccccatccccargtgttggcatgctagacctttccctgcccatgcgcctctgtctagataccctgcttcctctttgttatccttgaaggcctgtgggaaatgttatcttctc

SEQ ID NO: 419297 - DNA, 201 bp, Homo sapiens
tttcaccatcgtccacggccccttcccgggagctgtagggtgagctctttcagagcagatgaccacggggtcctccttccctgcaagtgctcagaaccccrtttctgcccttttctgctgttgcagcgtcagtgtgttgaatacgccttgaaagcacgtcccttgcggagatacatccccaaaaacccctaccagtacaag

SEQ ID NO: 419298 - DNA, 201 bp, Homo sapiens
  misc_feature (1)...(201): n = A,T,C or G
ctctatgcaatctttatcagatctttgtggaccaaaaagaaaggacatttgtaagtgattaattggggtgattgcagtggggtcaaatttggcacctaatncatggccagatgttattatctactgtgacttgtccatatctacatacataaacatttcctccttttccaaattcatcttaatttcctttgagattttggt

SEQ ID NO: 419299 - DNA, 201 bp, Homo sapiens
tcctctacaaggatggggatgttgacagtcctgtggtccgtgaacggatctggcaaaacagtgatttcaacttcgacaacgtcctctctgctatgatggcrctcttcacagtctccacgtttgagggctggcctgcgtaagtacagggagcacacagtcttctggagaggcacctgcgtgcccagggctgagccctccctc

SEQ ID NO: 419300 - DNA, 201 bp, Homo sapiens
tagtagggtaagtctcttttactttggggaaatgttgatttggaaaatgggaggtggaggttggggggggtggtggtaacaaaacagtctttttagggaaygtggttgctcttttatgccagctgttgcaccagaacctctcaggagttcttttaaggctggtgatgctgctgtcagtctctgggcagatactagtttgaa

SEQ ID NO: 419301 - DNA, 201 bp, Homo sapiens
actggtgtccaggggtggctaaagattatcgacttctagagttgtgtttttcaactttttttttaaatcttagtgagcagtaataaatacattgtaactcycaagcacacataaatgtcatctgaaacacgtttgaaaaatatatgcgatttatttgttttttgagatggagtcttgtgctgtcacccagggtgcagtgca

SEQ ID NO: 419302 - DNA, 201 bp, Homo sapiens
gttgttttatttgtttttaatacattttaattatggaagtaatatttgcctacataaaaaattcatgtaatttcaaagtatataaagtaagaaaaaaattmtctcttccttctccttaaagagaggcagacttagaagtttggggcctctacttccccacctcactgcacataatacatgacacagaccgcatgcatatag

SEQ ID NO: 419303 - DNA, 201 bp, Homo sapiens
ataaacttgcaacctggttccacccattctcctctcttcttctccagatagtcgtagagatcgctgcctcccaaaatagccccatttgattccttaggacmggcaggaaactcgctgcccgaccctgcctgagtctccgtttccttagctggagagactgtccttgctctagaaaccaaccaccggaaattcacctccatc

SEQ ID NO: 419304 - DNA, 201 bp, Homo sapiens
gcacaagttcaaaatggaagatactcaattaaaagctgtaaagcaaacagcagcagttagagtggcatacggtaaatatgcgtccaggtcaagagccctcwctggagaggcagctggaagtgctttcactgggaagtgggagggctgactcaggggctggccctagggtcagtggctggacactgtctccattggggtggc

SEQ ID NO: 419305 - DNA, 201 bp, Homo sapiens
cattcagtgacagcaggtgctgagtgcaaaccgtgtgccaggcatttcccaccatcagtatcaatcctcaattccagaaagttggtactgttgtgaccatygagaggatgaggagaccgttgcttggagactttcagtgccttgcctagggccacacgatggaaaagagcagaaccaggaattggactgctcttcaccatc

SEQ ID NO: 419306 - DNA, 201 bp, Homo sapiens
ggcactgcccctgcctgcccggggactctgccaccctggggcttggtggagcaggttgccctagctgcctctcttttgcatgtgctacctagttgcctctkactgcaatgtttgctttgggggtggacagaaaaccaggacgttatagctggttgcaagcataaggcatagcaatttgctggtcctgttttgaaagactgt

SEQ ID NO: 419307 - DNA, 201 bp, Homo sapiens
atgtctcaatgtcctagaatcctccagcctttggtttttaagaggtacccctgtgcgagagctcgtggaggcccttctgtgtaacattcacaacacaaccrccacattcagtgacagcaggtgctgagtgcaaaccgtgtgccaggcatttcccaccatcagtatcaatcctcaattccagaaagttggtactgttgtgac

SEQ ID NO: 419308 - DNA, 201 bp, Homo sapiens
gatggaaaacaaatctgttaactaggtcactttcgagatagggcagcacagctttcaggctcttgaagtccatttctagtttggcggtgcttgctgtcagrgaacagatgtcaaatcaagtacttggagatgcgctcacattatcttttctctctgatctgctaaatgtcactgcatgcgtctgcgatgcccaacactggc

SEQ ID NO: 419309 - DNA, 201 bp, Homo sapiens
aaatagcatctattcagctggttaagctttcgtggcccttcatgttcagatgtctcaaggtgatatgagtgtgcctcaatttatagggagtgactatggayggtgaactatattgacatataaaggcagctttaaaatacagactacagaaatcaagtggcttgacaattcccttagaacatatgtttatgaagtatagag

SEQ ID NO: 419310 - DNA, 201 bp, Homo sapiens
ttaggggtataaatttagggggtacaaataccgttctgtgacatggacatattacatagcggtgaagtctgggcttttagtgtaaccatcacccgaaaagygtacattatacccagtaagtaatttctcatccctcatgcctcttccaccctcccacccttctgtgtctccaatgcctattattccatccacaccctatgt

SEQ ID NO: 419311 - DNA, 201 bp, Homo sapiens
agcagaatcacaagttgtagaaagtagtaatttccagacatttgagatctgattcaccaacattactgtaattaaagaaaaacctatatttgtttgctccrttttgtctcactaggatgttttataaataataaacctagacatttagaaaatagcatctattcagctggttaagctttcgtggcccttcatgttcagatg

SEQ ID NO: 419312 - DNA, 201 bp, Homo sapiens
atgatggacgttgcatttgtgtgggctgaagagaattaaggaagaaacgaggcagggaagtttctccgaggaggcacattttgaacccgctgttaacgatwatggcagtggccctttggaggcagctgcctctcttgctgactgtcatgacccaaccatggcaattttcactgagactgcaccttctgtttgtgatgtttt

SEQ ID NO: 419313 - DNA, 201 bp, Homo sapiens
gcttagaccgagtggggattttgaactcagactgcttgactccatatttactgtgctctccagcttagggcaaactggtagccgggaagtcatccagctcratttcagcttgcctcctcctgatttcctggatgtctggtttttaaaaagttaatagcaaactagtatagtgttggctccacagacgtgcttttcagaacc

SEQ ID NO: 419314 - DNA, 201 bp, Homo sapiens
ctatggctatcccactcctgacctatgcccaggccccctcttccctctgggggtggatcccacttgtacgggcaactcagtgcagtaccctggaaaatggyagacctggggtatctctggtctctgccactgtctcccagtgtgtgtggaggggctgtatgcttgaggcattattttactgtggcttacctccttggtgtt

SEQ ID NO: 419315 - DNA, 201 bp, Homo sapiens
cttccaaactcctgttaatgttgaaatgttgactttctttaatgaatcacaaatgttcttaatgacatccagaatggtgaattcctcccagaggttttcartttactttgcccagatctgtaagaggaattgctatctatgggagctggagacttatgaaatatatttattaaatcataaggcttttcagagtcaaaatta

SEQ ID NO: 419316 - DNA, 201 bp, Homo sapiens
atagagctttgtagctgtcaaggaaaatagagtaaacacactacttccttttgatcttcagtttttcgcagtatgctcctagatcatacttctcttgattyagtgatagccttataaattattgccactttctttgaacccttattggtataagtcggtgataaatgcttgagaaactgggccttgatgaagtactggtat

SEQ ID NO: 419317 - DNA, 201 bp, Homo sapiens
ataaatgaattcagacagatcttttctgtgtgattgaatgaaaaaatatgtataacctgatggtgtcaacgcagaatcgtaggcttttagggctggaaggmgtcagagattatgtgatgagctgccccttcccattttgtcatcagtgacactgagacctggagaaatcaagtaacttctccagagtcacacacatagcta

SEQ ID NO: 419318 - DNA, 201 bp, Homo sapiens
ctgatgagggttttaaataaagacagaaatcttggctgtggaggccatgatgggatttagctgacttgagagcaccaagtctcctcctcctctgaggagaraacctctctgatcacagacctcagcagcccagaccctctggaggagacagcactgttgaggtttccctggggcctcctgtggctgccagccattttcttc

SEQ ID NO: 419319 - DNA, 201 bp, Homo sapiens
tgacaggctcctgctcatcacgtgagttgccctggattcctcgatgacgttgcaatggtgtcttctcaacaaaacctcattgaggtcttgagacaggggcrcaggccaggcacatctaagtgttcgaggtcttctttgttgaattccacagcattatgtgtgcctccaggatgtgcctggcacatggttggcctggggtgt

SEQ ID NO: 419320 - DNA, 201 bp, Homo sapiens
ctttcatccagtcaaacccgtttccctctacctctccagcctgcttggtgatattttcagctgttagaaatgacattgataggtgactgcttctgatatcrtcatgccataaatgaattcagacagatcttttctgtgtgattgaatgaaaaaatatgtataacctgatggtgtcaacgcagaatcgtaggcttttagggc

SEQ ID NO: 419321 - DNA, 201 bp, Homo sapiens
cttggagatgcctgcaccgctcttttccccttcacttgcaaactgtaactcagatgctgacctgccccatctcccctaaacccaacatgttatttgtaaaygagaggaggtatggcccctttttctcagcagagtgtctttctttgctagtttagctgtgtcccccagggagctgagtgaggccttcttacaggccagtgg

SEQ ID NO: 419322 - DNA, 201 bp, Homo sapiens
ggtttaacaaaggctgttctgcgggtcccagagaagaccctgtaatgtaaaaggagaatctggtaggtaattggaaccaacaaatatacttaatgttatakcccagtgatggtgatctcagaactcacggttggttgtacgaatgctggttcctggtctctgtagaattgcttccttatggctgcacattccatcaagtgg

SEQ ID NO: 419323 - DNA, 201 bp, Homo sapiens
taaaaaaaaaaaaactagctttgtagcactttgctgcctggtaaattctgtatggtgattgagatgctgcaagagatgtgtataataagcgaagtggctcwctgcactgattgcatgagcagatccacgtcccatatggtggatataggaactgcatatgtgtgcaagtgtagttttgcatctgcacgtgaatctatgaat

SEQ ID NO: 419324 - DNA, 201 bp, Homo sapiens
acatggctcctacatgtgctattcatatgaagccatatgcttagcccatcaggggctgggaggaaaccggctcaccattctaggcaggtgttaaggggcaygtgagtcagtgacagctgctttgctgtcacccatcgacaccccacactgtgacactaagcaccctagagcaccttctgcaggaggcaaggcctgagaact

SEQ ID NO: 419325 - DNA, 201 bp, Homo sapiens
ttggccaacttagatgctagacctttcacctcacctcctcaaatccctttggtccttttcatcacttctgtgcaggacatcccagccctggatggatccasctagtggtcctggccctgcctggccatccagcctcagctcatgccactgcccctgcatccactactgttctgcttcatgagctgccttctgttgctctaa

SEQ ID NO: 419326 - DNA, 201 bp, Homo sapiens
ccatgtggggctctgggacagaattttccaggcggaaggaagatacagaggcttcaaggcagaaagaaacatcattgtggagtaatggcaggtggctgatyccactctctgcatgcagaaaagagcagcagccttcttgaagccttcttacctttctcacgttagtacaattccacacccttgtgtgtatgtggcagccac

SEQ ID NO: 419327 - DNA, 201 bp, Homo sapiens
gatttgtgatcagagcatcagaaataaagtcccttgagacttgcagattgaggaaaaaatgacaggagtcacccagatatgaaaatcagatcttgaattcstctattgatcaggcattaggcatggtgggagttcagtccgtttcagctttaatgtcctgttgttttgctattgatttctttcctcaggtttcaattggta

SEQ ID NO: 419328 - DNA, 201 bp, Homo sapiens
accatgtggagatggcgtgccccttggtattagtaggaggggacagactctgaccctctaccaggggtaaagccccaaatctaaagatctagaaacattarcaccttcatttcaaggtctgatatgtaagaggatggacattcctaagatttattgtgggcagagtagcatgctcacccctgatggtgacagtatccgtag

SEQ ID NO: 419329 - DNA, 201 bp, Homo sapiens
tatagggcatctatgaggcaaagaccatatctcactcacatccgggtcttgaggtcctgacattgagagtgtgccctggaaagagcaccgaaggttagtgwgggcagctgcgtctgagcactggtgctgatgctggtgggatggactacagagtctgtccccactacctttggaagagctacccaattaaaactgagttgg

SEQ ID NO: 419330 - DNA, 201 bp, Homo sapiens
gtggctgggttggcccgaacggaggcatcaccaactttgataactttgcctttgccatgcttactgtgtttcagtgcatcaccatggagggctggacagaygtgctctactgggtaagtaccctggggagagagtttatggagtgttctttgcttggataagtgggttttgtgagctagagccactggagaggtggctgga

SEQ ID NO: 419331 - DNA, 201 bp, Homo sapiens
tcccgggctctggcaagggttctcaccttccgctggcttggatttcctgatgtttctgtcctgagcggtacagcctgtttgctctgtttgcagatatcgtrgctgaagaggacccagctccatgtgcgttctcagggaatggacgccagtgtactgccaatggcacggaatgtaggagtggctgggttggcccgaacggag

SEQ ID NO: 419332 - DNA, 201 bp, Homo sapiens
aagtatgatcagtagagaagattaaatttcaggtcattggtgatatctactcttgaggtagttttgtaaatttacatgagacatttagaatttcctgcttytgtaatttcataggtataattatccatttccacagttgatggactatgtggaatgctatgcagcagttaaaagaatgagatgcaccttctgacacagagg

SEQ ID NO: 419333 - DNA, 201 bp, Homo sapiens
aggttttgttttcattattctgtatctactgatcagcatatccacttgcttgcacaggctacacctataatgtccacaacttccagttgcctcttatgtamcaatagaacaagaacataaagatacagaggaaagctgagagcaattctaaatgtctatggttttttctttatctcttgttgttatacatccatatctgat

SEQ ID NO: 419334 - DNA, 201 bp, Homo sapiens
tttcaccccatgctggcccacaaagaagacagaggttgatgacatagcatgcaacttcagaaagttcaccactttgagccccgatgtataaatggtagcasttggtactaactctgccagtgcgttcaaaagtcatcataaggacaatgtgatatttatttaaatacatattgcattgctgactgacagtgtatttgcagt

SEQ ID NO: 419335 - DNA, 201 bp, Homo sapiens
tggggtgactttctggggagctctaatcagtcatgtgtttctgctagcagcagcatcccctcctcattcctcatgtggcatacattgcaggtcttcctggygcagatgctttctttgctcacacacattccctcccttctttcgtttttctccccccagcacacaatgctgctgctgccacacaccatttcaccccatgct

SEQ ID NO: 419336 - DNA, 201 bp, Homo sapiens
aaaacctggctggtggaccagaggccataatttgccaacccctggtttagtgaaaagaacaagtttcgagttgtcaccgatggttgaatttagcccaagayggtagctttgcttgtctgattaccttcatgccaacccacattttctctggctgacactaaccaggacagaagcctaggctggtcttccattttctcttaa

SEQ ID NO: 419337 - DNA, 201 bp, Homo sapiens
tgtgggctctgcgactctgacccccatagtcttgctttggaagacactgtcttctgtcctgtccaagtgtgtggctccattgctgtgctcatgtgactatwctcagtgctgtgtgtcctgcccacaagactgttgtgcagtagggcagtggctcaggatgcaggtccccaaggatgtcctgatatgtgcttgtcctctttg

SEQ ID NO: 419338 - DNA, 201 bp, Homo sapiens
cttagacaagaaaacaaacgagcgtggttgtgtggcagtaaagctttatttacgaaaacctggctggtggaccagaggccataatttgccaacccctggtytagtgaaaagaacaagtttcgagttgtcaccgatggttgaatttagcccaagatggtagctttgcttgtctgattaccttcatgccaacccacattttct

SEQ ID NO: 419339 - DNA, 201 bp, Homo sapiens
gacccaaagtaagaataccttgtttgtatgtaaccatctgaatttagtattctaagttcggaatcaaaacatgcaaacagatttgtactaggatacttttytggtgaataatagaactgaaggtccacttttctttgagatgtatttaagaaaacagattatataattcattttcctgcagatacatgacatgccaagccc

SEQ ID NO: 419340 - DNA, 201 bp, Homo sapiens
ggtttctgtcacggctactcaggtctgctgccacagagcaaaagcagccttagacaagaaaacaaacgagcgtggttgtgtggcagtaaagctttatttaygaaaacctggctggtggaccagaggccataatttgccaacccctggtttagtgaaaagaacaagtttcgagttgtcaccgatggttgaatttagcccaag

SEQ ID NO: 419341 - DNA, 201 bp, Homo sapiens
aaaactatagaaaaaggtatacttaagagtgtcactccaaccttgattcctttggcctaattcattcccatcccttgttttctgctctttcttttagatamacctgagagaaatatgctccttttatttcccagtttttcgtgtgtaaagggtagcacactttattgctttttttttttttttcatccaggcacttcttat

SEQ ID NO: 419342 - DNA, 201 bp, Homo sapiens
tgtgggccgtgtggtttctgtcacggctactcaggtctgctgccacagagcaaaagcagccttagacaagaaaacaaacgagcgtggttgtgtggcagtaragctttatttacgaaaacctggctggtggaccagaggccataatttgccaacccctggtttagtgaaaagaacaagtttcgagttgtcaccgatggttga

SEQ ID NO: 419343 - DNA, 201 bp, Homo sapiens
gtagcctggttttgatcctcatcctcctggtgtctaccttctccttcctctgctcctgcttttccttccaggcatcgtgttgaggtgcttagggtagattyagcagctgcatggccttgtgtgcccacgtgctgtgagcctcagtgtctatacaagagggtgatagcagcccctgcctccccatagtcactcaccagcggg

SEQ ID NO: 419344 - DNA, 201 bp, Homo sapiens
ctctaagtagcagtttcttttgtgcctgcaattctgaattgcagtgtgtccctccagacaaagctgagcgccatatgtgactgtgcctgtttgtgttttcraaagcctcagcggtcactgccatttcagtgcctgcaagtcttgacaggaagcagtggtaaaagactgtcagaacctgtttgtaaaaatgtttgtgtttgc

SEQ ID NO: 419345 - DNA, 201 bp, Homo sapiens
tcagctcagagagcaggaggaccctgcctcaccctcagtggagccctggcacagtgctgtgagactatcttcccctctttgttgctgtttggggagttcgrttttacttcttgtctttccccacagttagtctagggagcaactagaacatttcatacactaatagttggcagggggccagaaatgctaactgatgacccc

SEQ ID NO: 419346 - DNA, 201 bp, Homo sapiens
gagccaggggtccaggagatcaggatgtcagggcctgtaaatcctggggcatgtgagtgtctggtggcctctctgcagaacatgaggcgtgtgcccagccygtgggggctccactggggctccttagatggaggctggctgggtctggggcaaggggttctctccctggagtggtgcttactgagtgggagtgagggacag

SEQ ID NO: 419347 - DNA, 201 bp, Homo sapiens
aatgccatggcacttaaagtattttgcagaaactattattttaacttattttcacagtggctatgggttttttatagtcttgtaggaactttggttaaatrcagagtaaaaactgaagctgctatgggaataatgagggatcaggtccttcaaggtcttaaaaaaaatctctaagtagcagtttcttttgtgcctgcaatt

SEQ ID NO: 419348 - DNA, 201 bp, Homo sapiens
cgcatgcctcatctcattcttacccttttacaggtgaggcaatggagatgtacagaagtcaggtcacaaacgcggggttaaacttagatctggccaacctstgcacctgctctcagccactatcccaacccagctgaaggacagaatcagctcagagagcaggaggaccctgcctcaccctcagtggagccctggcacagt

SEQ ID NO: 419349 - DNA, 201 bp, Homo sapiens
ttttatcataacccacactactataccttagatacacacataagcacaagtgtcagatgcagaccctgtgccttttatttgtgttgtctttctgtgctttygctgttctctctgtggttatttgtcaaagtatgagggtaacttcttgtggaaggacagatgttaagtattctttaaggccattgtaagctccccatcttc

SEQ ID NO: 419350 - DNA, 201 bp, Homo sapiens
aaaacattaatccacagtgaacccatcattccttcgaatttctgctttaaaataaatcttggtttaagttgcctgctggcagttttgggcctctgagtctyggagacccttgctgtgtctgaaggattttaagtcagtgggtgagagtacaccacctgctgagaggtgtactgtccccagaggcccacctgtccttaaatc

SEQ ID NO: 419351 - DNA, 201 bp, Homo sapiens
cttcctcagcctgaaaaaaaaactatagctgacaacatacttattggtgaaagactcaatcttttcttcttaagattaggaacaaagtaaccatttttctrtcttcttttattcaatgttttattgaaagtctgaaggtaagacaaagagataaaaggcagaaagattggaaagaaagaaaaaactatttctatttacaga

SEQ ID NO: 419352 - DNA, 201 bp, Homo sapiens
aggttcttcaggctagaagaaaataataccagatagaaacgttaaatgtccgctttaaaaacgaggagcatggccgggcacggtggcttacacctctaatyccagcactttgggaggctgaggcaggcagatcacctgaggtggggagtttgagactagcctgaccaacatggagaaaccccgtctctactaaaaatacaa

SEQ ID NO: 419353 - DNA, 201 bp, Homo sapiens
ggacccccactgcttgggggagcaggagtatttcagtagtgaggaatgctacgaggatgacagctcgcccacctggagcaggtgagctgctctggctcctktggagagcgggaggccgccctgccctggtgctcggcccactccggaagccagggccaccggcagctgcacttgggcttcccctaaaaagcaaaatgggag

SEQ ID NO: 419354 - DNA, 201 bp, Homo sapiens
agtccatctctactgaggatccctgtctggggaagttgctgcatcccagggcaactgtgctgaaatcagttgtcttatttcaaaacttgtgcctgtgcccygagaccctcagcaggcatccttcttccttcatatggcagcccttcagatactggggaccagcctctcttctccatccctcctcctgccccgcccagcccg

SEQ ID NO: 419355 - DNA, 201 bp, Homo sapiens
tggcctttgtgaaatggatgtgaaaatcctcctcctgcctcttccactgaggttgtgagcagcccagggggcagtgaatgtaaagacatttggaggactcyaggaacaatctaaataaatgaggggcttttttctgttattgttagagaaggggacatggcagagactcaggctgttttgccaaaacccaggtcgctttcc

SEQ ID NO: 419356 - DNA, 201 bp, Homo sapiens
cagatgcagctttggggaggaatccatgccctatgctggaccaccagggtgacttttcctctctgaagtgattttaagtcagtctcccctcctcccaagaygtctttgtcatcctaggttacaattgatgactatagagaagaggatgaagacaaggacccctatccgccttgcgatgtgccaggtatggtggcggaggcc

SEQ ID NO: 419357 - DNA, 201 bp, Homo sapiens
ccatccggaccatcggcaacatcatgatcgtcaccaccctcctgcagttcatgtttgcctgtatcggggtccagttgttcaaggtagaggaactgcctccragcataaaactcaggtggatttctttaaggagaagcctgcatttacttaactgcctgtctattttatacccaggggaagttctatcgctgtacggatgaa

SEQ ID NO: 419358 - DNA, 201 bp, Homo sapiens
gttggcagtgagaatctcagcactgccacctttcatctgtggtcagatcttacgctggtgggaatctcatcattcccgcaaactaaacatgctcaccagayggggacacttctcagcaccccccacccctgcaacacacactcagtccatgttctgaaggagcaggagggttttgattcatgtaagcaggtagatgttgtt

SEQ ID NO: 419359 - DNA, 201 bp, Homo sapiens
tgttttcagcagggagccctgtcttctctaatacctgggtaacaggaagcagtcacccaactctcctttatgtacagaatgaagaattttatcataacccrcactactataccttagatacacacataagcacaagtgtcagatgcagaccctgtgccttttatttgtgttgtctttctgtgcttttgctgttctctctgt

SEQ ID NO: 419360 - DNA, 201 bp, Homo sapiens
gaggccgaggtgggcagatcacctgaggtcaggagttcgagaccagcctggccaacatggtgaaaccccatctctactaaaaatacaaaaattagcccagygtggtggtaggcatctgtaatcccagctactcaggaggcagaggctgaggtaggagaatcgcttgaacctgggaggcggaggttgtggtggccctgagat

SEQ ID NO: 419361 - DNA, 201 bp, Homo sapiens
gccagttcccctgggtgagatcccagagagagctcaagcctagccaccctgtggggcccacttaacttgcaggaagctcatgggtctctgccaggtcaaarggtagcatggcgactgtcctagcacaggcgagcggagcagcggttcaggactgtagccaaagctgagagttccctggggtctgaggtgctagtttatcca

SEQ ID NO: 419362 - DNA, 201 bp, Homo sapiens
gatctggaaatagctgagaactgtgattgagacccaagttttgcccccaaagctagctttatatatggttgtagcagtcaggacctaccagatggaggggrcctgtgggatagggataacaggtgccgtgtgcattggcacacaggagggcaagaggggagagagggaaaggctgcgaggggaaatggagagagaaaggag

SEQ ID NO: 419363 - DNA, 201 bp, Homo sapiens
tggtttggctcatgtgattaagtgatctgtttcgttcagagagagtgatggcagaaaagagagcccatggttttgaagaatacctcttttttttttttttkgggggagatggagtcttgctcttggagtacaatggcgcgatctcagctcactgcaacttccgcctcctgggttcaagagattctcctgcctcagcctccc

SEQ ID NO: 419364 - DNA, 201 bp, Homo sapiens
tcatgtggtccaactttctgccttcagaggaggagtgtgtgtggggtgcacatctgagaaaatttacagactaggctggggtggggataaaggagagtctyatctgtaggtctgctgctttgggtttctttagattagcttagaagctggaaactggccaacgaaatgcacagaattgctggaattctggagaagagtttg

SEQ ID NO: 419365 - DNA, 201 bp, Homo sapiens
gagagatgctaagaaatccaaagcattccagtgacagcgaacattgcattgatagaatagggatgtaagaaggctgattaattgccacatttgataaaggsttggagaggggatgaagggggaagaacgtgtgtgtgtgcatgcacgctaaggagtaccacgatagtttgtgtgtttcttccattgttttcagccctggat

SEQ ID NO: 419366 - DNA, 201 bp, Homo sapiens
ctagtgaggtcttgcgtgataacgaagacaacacaagcctgagccctcctggctagtgaggttggctctgcctgcctttgcccatcccaccaccttctccygtgctgagcctttcccagccagacagtgttttgaggggcctttactacccctctccctgccagccccagcctagctgtaatcacccatctggaaggcgtg

SEQ ID NO: 419367 - DNA, 201 bp, Homo sapiens
ttggtttggctcatgtgattaagtgatctgtttcgttcagagagagtgatggcagaaaagagagcccatggttttgaagaatacctctttttttttttttkggggggagatggagtcttgctcttggagtacaatggcgcgatctcagctcactgcaacttccgcctcctgggttcaagagattctcctgcctcagcctcc

SEQ ID NO: 419368 - DNA, 201 bp, Homo sapiens
agcctgggtctgtgctcgtacatcctcagctgctgtattctcaaagctctatgctttgtcgtttttgtttttgttttctcttcctgaaattaattacccartgctgagtggaacaatgggatacagaggcttcagagaaattggtttagttttcctcttgaatctgcttttggacaagtctcatttgagctcaggtggtcc

SEQ ID NO: 419369 - DNA, 201 bp, Homo sapiens
gaaacatagatgaaaatttgtatcattccttctcaataattactaggttaaaaacagcaaatatagataatatctagattatatttagattggttaataamttcagccaacttgacctaattgatatttataaaatactgtgttcaataattgcggaatacacattcttttcagagcacgtggaacattcaccgacataga

SEQ ID NO: 419370 - DNA, 201 bp, Homo sapiens
gagaggctttgagggatgcgctctggctaagagaagcaagcccagggaaggagcgtgagacagcacacatactggtcccagaggtcactcagtttggcatyatgtctcctgtacaggtcccgagggatggctgagcgcaaggccaggtggttctttatgttatcattattgggagcttaggcgtccatctgtgacttccta

SEQ ID NO: 419371 - DNA, 201 bp, Homo sapiens
cggtgtgtgcgcctcttaagaatcttcaaagtgaccaggtaaggaaatgtgggtcccactgcaaatgttttatgaacatgaggcggcaaccagtcacatcyccgggcaggtgatgttctgctctgtcctgcatgggtgttctgagctgacaccctcatcttgacttataggcactggacttccctgagcaacttagtggca

SEQ ID NO: 419372 - DNA, 201 bp, Homo sapiens
caagccctcggaaccagaatcttaacactttttgtctttctttcagtcaagccatctcaaaatccaaactcaggtcagtatcttctttctgtttcttcgtyagcctgtgtgttgcctttgtatgttctcacttctgaattttacgtagtattgctctggacttgagttttcctctgtggattataacattgatactgaatt

SEQ ID NO: 419373 - DNA, 201 bp, Homo sapiens
ctctggccttgcccctgctggcctgctgtggtaaccaggggtgctaagtccaggctgtatgcatggcttttatgatatctcagctgaaatgatggggagtrtgtgctcaagccctcggaaccagaatcttaacactttttgtctttctttcagtcaagccatctcaaaatccaaactcaggtcagtatcttctttctgttt

SEQ ID NO: 419374 - DNA, 201 bp, Homo sapiens
ggtaactgtctagaaagattttggagagagcagccaaatgctagggtaggatttgaggggttctcatgtgctttttcattttgcagcagatgtcccttctmtagagtgagttatggtgtctctcacatagctggggttgtgtgtgtgcattttcttttgaagttctctagtctgagaacgaggagggagctcggtaagcca

SEQ ID NO: 419375 - DNA, 201 bp, Homo sapiens
cgcctgtgtgtcccaagtgagccccctccccaaagggatgtagggaagccagtccatctgcaaggtatctggagtggagtgacaggaagcagaggatccastattattggaatagattacatggtatgtgcttgtcacttccgtttaaaggtaaatacaaatctgtctttggcttagaattctagcctcctgacctggggg

SEQ ID NO: 419376 - DNA, 201 bp, Homo sapiens
ccaaggttaccttgctactcagtgacaaagctgactgtgacttcgaactcagacataaacccaagaggaagagagggtcaaaacagatgcatcttcatttyttccagaggatgaatttcttctgttcaaagacaccattggaatctttgttgtacccttgtgcttttctgggcctgatttggcaacctcaggaggaaagca

SEQ ID NO: 419377 - DNA, 201 bp, Homo sapiens
ccatctgtagtgccatggcggatgctgtgtacaagagctgaaatggtggttcctgttaactttgagagctttggacaaaaatgccagatacatccttctasatagcaatatcaggcgagcctttgagtggggaggggaagttataaaccactgtagagaatcacagagtgaaccgaggacagagattggatcaacactcca

SEQ ID NO: 419378 - DNA, 201 bp, Homo sapiens
tctctgttaatttggagaacaaagaatcaataagtagaaggagattgggaaattagtgatcggggacggtgcagagttcataaataatttaaaatatacaragttctggcttttcaacagagattttaataaaagatgaacaaggtcatcttcttccttctgatgaaagttacccatctgtagtgccatggcggatgctgt

SEQ ID NO: 419379 - DNA, 201 bp, Homo sapiens
tcacccaggctgcagtgcaatggctcgatctccgctcactgcaagctctctgcctcccgggttcaagccattctcctgcctcagcctcctgcatagctggsactacaggcgctcgccaacacgtttggctaattttttgtatttttactagggacggggtttcaccgtgttaaccaggatggtctggatctgacctcgtga

SEQ ID NO: 419380 - DNA, 201 bp, Homo sapiens
ttgatacctgggtgatgaaataatctgtacaagtttacctgtaacaaatctgcactcgtacccctgaacttaaaaaaaggtagaaacagcatagatgtccrtcgggagaatggataaacaaattatgatatattcatacaatggaatgctactcagcaagaaaaaggcatgaactgtgatagagggaggtaacataattat

SEQ ID NO: 419381 - DNA, 201 bp, Homo sapiens
taacccaggaacagaaaaccaaatactgcatgttctcacttataagtgggagctaaatgatgagaacacatggacacagagggcaacaacacacactgggkccttttggaggttggagggtagggggcgggagaggatcaggaaaaacaactaatgtgtactaggcttgatacctgggtgatgaaataatctgtacaagtt

SEQ ID NO: 419382 - DNA, 201 bp, Homo sapiens
aaatttaacagatatttttaatagaagatataatggccaagaggctcataaaaagatgttcaacattattgttttcagaaaaatgcaagttaaaaccatargacatgctactacacacctaccaaagtgactaaaatgaaaaagctaataaaactaatgttggtgaggatgtagaacaactggagactcttaacgcatcat

SEQ ID NO: 419383 - DNA, 201 bp, Homo sapiens
agatatacctggatttgcataacagaaaggactattttggggtgacttatgacagatctgctatgtgaaagcctccaggaacttttagcatcagttgagayctgggggaaacagagaggaaggagcgtgcaggcactgaggccagaggaagaagggatgtgcctgtcctcagtggctagccatgacactgccagaggagca

SEQ ID NO: 419384 - DNA, 201 bp, Homo sapiens
gatcatagcttattgcagccttgaattcctgggctcaagtaatcctcctgcctcagcctgcccagtagctaggactacaggcacaccaacacacctggctrtatattttttctgtttttgtagagatggggtctcacagtgttgcccagactggtctcaaactcttgcgctcaaaggatttcccctcttggcttcccaaag

SEQ ID NO: 419385 - DNA, 201 bp, Homo sapiens
gtagactggacattgcagaaaaagttggtgagggcttagtgatctctaaaacaacaataagcaatctggtgtatatgaaattggagtcacaggagaataamgagattgaggaagaaaaattttaagataaataaagctgaacatgttgcaagtattgaaaactaagttaacagatccaaaaggcccaacaaacctcaagca

SEQ ID NO: 419386 - DNA, 201 bp, Homo sapiens
gacatggtctcttccaaccagaaatgtataaactcgctgcagtgcctaggacacatgcgtctttattgaacaaatagttattgaatgtccgcttggtgccyggccctgtgctaagcattggtaatatggtggcaaaatagaaaagatacctcttaggcttctggccatgggcacagacagttaacaaggataatcaagtta

SEQ ID NO: 419387 - DNA, 201 bp, Homo sapiens
ggaaaagatggacataataaaagaataggtaaatctcagtaggtaaatagaaacagtacaatatctgaaaaaagtagactggacattgcagaaaaagttgrtgagggcttagtgatctctaaaacaacaataagcaatctggtgtatatgaaattggagtcacaggagaataaagagattgaggaagaaaaattttaagat

SEQ ID NO: 419388 - DNA, 201 bp, Homo sapiens
ttgtgttcaagtctgtttcatgagccagtgtaacctccctccatgcagaaacaacgctgtaaagtattagcataacagtaggtccattgggcagaaaccayaccaataaaacgggcacaccccacagtggctctgatttccacacccttcccaaccccgcactcccaagccttgcccagggctttccatggactgagcctc

SEQ ID NO: 419389 - DNA, 201 bp, Homo sapiens
cagagttctctatggctgagctttgatccttcagagcgcgcctcaagcccattgtgtaagagatgcactcaccatgctgtggtttttatcggccaacgacrtatgcccggtgtctgggtggctgctctggagaatacacgttgcactggtagttattcaatggttatttgagccgcgaagtagattaaatggagggcgagg

SEQ ID NO: 419390 - DNA, 201 bp, Homo sapiens
aactaagctctgatttggctttaaatgagagtgctaaatttcctttttctaataaagaacctagctaaacatttatatatacttttgaacactgaactttyttgttgcagagttaacagctgttgggggtagctgacagctggatcctggtgctgttggtaccatggtacctgaagtgcacaggctggtagccacacctga

SEQ ID NO: 419391 - DNA, 201 bp, Homo sapiens
gtcctgctgctttttagtgggagatagtatttcagaactaaattttgggttcagaggtacatatccataaacaaacagctttttatagtaaaaacacatasagaaaatgcatacagtacaacaccaatgtagcctcaaaaaagaacacagcagagcaccgcaggggatccctttctgaacacagtcttctcccacttccct

SEQ ID NO: 419392 - DNA, 201 bp, Homo sapiens
aaataatgcaattctttcggaaagaaaattgggaatgtcattagtaagaagagaaagggatttgattaaaactaaaatgcaggaagagtatacgtgggttygtttcctagagcctacagagttctctatggctgagctttgatccttcagagcgcgcctcaagcccattgtgtaagagatgcactcaccatgctgtggttt

SEQ ID NO: 419393 - DNA, 201 bp, Homo sapiens
aggcgtgcagtgtgccccgcatgctctctgaagcccgtcttctccccacagctagcatgcccaccagcgagactgagtctgtgaacacagagaacgtcagyggtgaaggcgagaaccgaggctgctgtggaagtctctggtgagtgtggggagcacttgccctctttcccctcctgttgtctcagagaagcaggtggtgag

SEQ ID NO: 419394 - DNA, 201 bp, Homo sapiens
cagctcgcccacctggagcaggtgagctgctctggctcctgtggagagcgggaggccgccctgccctggtgctcggcccactccggaagccagggccaccrgcagctgcacttgggcttcccctaaaaagcaaaatgggagcagaaactccaggccagagggagagtggagctggagaaagagagccgcagagaggcaggg

SEQ ID NO: 419395 - DNA, 201 bp, Homo sapiens
ctgtattcccctacgttgtttctttaaatacagatgcatgcttcagaatagtgggctatgtctgtctatgtaaaccttccccctgcgagctgaggaccccrctcctccctcgctccacctcacatctctcttggaacgccaccttcatcacaaccagccagactcccacattgatgcccatcctcgtgaaatgccctcgga

SEQ ID NO: 419396 - DNA, 201 bp, Homo sapiens
acagctcgcccacctggagcaggtgagctgctctggctcctgtggagagcgggaggccgccctgccctggtgctcggcccactccggaagccagggccacyggcagctgcacttgggcttcccctaaaaagcaaaatgggagcagaaactccaggccagagggagagtggagctggagaaagagagccgcagagaggcagg

SEQ ID NO: 419397 - DNA, 201 bp, Homo sapiens
gaatgctacgaggatgacagctcgcccacctggagcaggtgagctgctctggctcctgtggagagcgggaggccgccctgccctggtgctcggcccactcyggaagccagggccaccggcagctgcacttgggcttcccctaaaaagcaaaatgggagcagaaactccaggccagagggagagtggagctggagaaagaga

SEQ ID NO: 419398 - DNA, 201 bp, Homo sapiens
ggtcttcttcaggtagagccagggcgttttctgggccccacagagaagacacagagccctggaatatagaggaaggctgtggcatggcaggccaccagagrctctccctggggtccctggagtcattagccagacaacagcgtgtccactttttgtgtgcagcctgggaaagggatacacttgcatggtgtgagaggcagc

SEQ ID NO: 419399 - DNA, 201 bp, Homo sapiens
acactcccccaaatgtggactagccatttctgggccacaaggtaagtgcttccctccccgatgcctaccccatagagccctgcacctgccactacccacgyggcagggctgccaggacggagaggagcgagcgctaccctcgcaccccagcccctccaggcagcatcctccaagcaggcacccaccttccccacagccctg

SEQ ID NO: 419400 - DNA, 201 bp, Homo sapiens
tccccgatgcctaccccatagagccctgcacctgccactacccacgcggcagggctgccaggacggagaggagcgagcgctaccctcgcaccccagcccckccaggcagcatcctccaagcaggcacccaccttccccacagccctgggctccagggttctggctgcccagtgaatgaacagctttccatctgaacgcaag

SEQ ID NO: 419401 - DNA, 201 bp, Homo sapiens
aggagtcccctgcccagaagatgaggctggttagatggtttagttccatttcccagtgccctctgcttgtagggaactgcttattgttctgggagcctaaytgggaccagaacttgataacttttctggagggaggaacatagtctgtcatcgatggttgatgtcctaatttacagccagcaggttagctaggtaccatga

SEQ ID NO: 419402 - DNA, 201 bp, Homo sapiens
ggaggaacatagtctgtcatcgatggttgatgtcctaatttacagccagcaggttagctaggtaccatgagaatcttgcattttctgtgagaggcatggcrgccacttggatgcagggtcatttatactttttctgaacccccaagacttcccaattagacaatttcagcactttctctagtggctggaaatagtgttttg

SEQ ID NO: 419403 - DNA, 201 bp, Homo sapiens
cttcgtggctgggttaatgcctttccaccacccgtctttggagagatcagtttttgctgaattaacacttggagctctggcggccccagggctctgtgtgsacggcggcttggccagcctggagctgggccaggtcctcatgcacagcacctgcctcctgccacttcaaggggtctctcggggagatgaagaaatgagggg

SEQ ID NO: 419404 - DNA, 201 bp, Homo sapiens
gcgactcctctacctccaacagctcacccctgtgactcttcgctggcatacgccaggcctactccttgctctgcagtgcctgtgactagctgcgtggcctrtgcgtgtgtccactccctgctcccagcagccacatctgttaaaggattaggcctgggtggtctccacagtcccttctagctctggtctcttcagttcttt

SEQ ID NO: 419405 - DNA, 201 bp, Homo sapiens
gtgggtttccatggaggcaggtgcaggacactgatggtatgtctccctggtgggttgaggggaaagaatggttggtgtcacagtaggagttttgcacgtarttgaggcagtttgacttatgcctcttgaacctctattccctcctctgggccttgcttccagatgctgcctccctcccccagcacacctgcctggaatgtt

SEQ ID NO: 419406 - DNA, 201 bp, Homo sapiens
aactgagctccagtccggctctaatctgaaacagttatagccatcgattcctctagcagagaaagcagaggcgggagctgaagcctggctcgctgctgatyacatctgaggtattggaatatgccatgagaaagttataggtagaatgagaaggtcctggtggcttggcctggcccagtccagacaggcgatttaggctga

SEQ ID NO: 419407 - DNA, 201 bp, Homo sapiens
aggcctgaaggagggttggtgaagcagatggctcagcagatgacggttgctagggtcatggaagagtgaggtttcctgatgggagccctggacctgtctgycctcccgtcaccttgttgggcaccttctcccctgctgcatgcacctctgttccaacacagagggaaacaagcccaggtggggctctgtctcaggtgctga

SEQ ID NO: 419408 - DNA, 201 bp, Homo sapiens
gaggaaatgcactatgccttccctgtttttgttttgtgtgtgttttgagatgcagacctaaaaatattctgctgtataatcggttatccaatcagccatgygaataatcactgtgccagagcctataggaaatgaggcaggagcctgaaactcagaagcatgccagctttgccttgcctttttttctttttttttttaaat

SEQ ID NO: 419409 - DNA, 201 bp, Homo sapiens
ctgaaacagttatagccatcgattcctctagcagagaaagcagaggcgggagctgaagcctggctcgctgctgatcacatctgaggtattggaatatgccwtgagaaagttataggtagaatgagaaggtcctggtggcttggcctggcccagtccagacaggcgatttaggctgaccctgccaagaatagcccctgagaa

SEQ ID NO: 419410 - DNA, 201 bp, Homo sapiens
aacattgtggagagaaggctagaaaaggaatgaggaagaggttgacattcccagtctgtgtcttcctgtcccctctttctctgctctccctcacagaggcwcacacgcacattctgtctctctgccatccaaacagatgcagctgctctggagtcaaccagacttaacgaggagacaactcttctgctttcttccgtcttc

SEQ ID NO: 419411 - DNA, 201 bp, Homo sapiens
aagctttgaacttttttttttttttgtggggggggatttggcagtgtgttaatttggtgggcctttctaaaagccaacgtatattcctttgacctcttcayatagtattctgaaactcatggcattcaactttgtgtcttgctttcacttgggtggtcacatggccagatgaatttttactctgcttgactctttaaatac

SEQ ID NO: 419412 - DNA, 201 bp, Homo sapiens
tgtttttttttttttttttttttgaggctctgttgcccaggctggagtgctgtggtgcaatttcggctcactgcaagctccgcctctggggttcatacctytctcctgcctcagcctcctgagtagctgggactacagacgagcgccaacatgcctggctaatatttttgtatttttagtagagatggggtttcaccgtgt

SEQ ID NO: 419413 - DNA, 201 bp, Homo sapiens
attggcctcaaggtttcccagcagcggcggcgaaaaagagtacatcctgacacacagggtttttatcctttcgacaaagggaagcagccacgctcattcasagcagcactttctaggaagcacatccaaggaggaatctccagcgcaggtccttgtgtaaggtacattgttggagcacaatgagccatgtcttcgccgtgc

SEQ ID NO: 419414 - DNA, 201 bp, Homo sapiens
ctttctaggaagcacatccaaggaggaatctccagcgcaggtccttgtgtaaggtacattgttggagcacaatgagccatgtcttcgccgtgcttttgtcrgggtcagaaatgccgcgcaagcagatggtccctgcattcatgtttttcaggggtcagggtacgacattaaactgtggtataatgaaaatggaagtacttc

SEQ ID NO: 419415 - DNA, 201 bp, Homo sapiens
tgctgttggatctcacacttgctctatcaatctgtatctgtaaccaggagacagaaatcacgtagtaatttgaataactaaagttcaatataagaaattaytaaccatagtggaattggagtaatgaaggattggctagtaagaagtagaactctaaagaagataggaatagataataagatacagctaggtgtgctggcg

SEQ ID NO: 419416 - DNA, 201 bp, Homo sapiens
cccggccatgcatcacgattttcaaaggccagcttcctgactgttccttgaactccttgagataggtatttactgtgcttgtgacatgcaaactgcaaatrattcttgcctcataatggataggcctgtaacccagccagccctctaggcaagcaaatgttatttcctagttttaagtgtgagcttaatatgtgaattaat

SEQ ID NO: 419417 - DNA, 201 bp, Homo sapiens
agtagatgattaaaggagagggaacttcaggctcctagaagcaaaagtttccgcttactttcctgagaaggtttaaatatcatctaggatgatataattaytatttttattattaatatgacaatcacgtggttaatactttgacagtataattgcactctccataaattacacagcatctttattctggtggggatctca

SEQ ID NO: 419418 - DNA, 201 bp, Homo sapiens
tcaccacgtccttctctgaggactgaggccaggatgagccgggtttcagggagacttaccacattcctggggcagggcagcctttggaaacatggtggacrtgttctgtgacagtttcccctgtggcactgtatccagaactcactcgaccttcctgatttgatacagcaggaggtcagtggccaggaagctcctttgttc

SEQ ID NO: 419419 - DNA, 201 bp, Homo sapiens
tccctggagcattttagaaatggaaaagcaccacatacaggagagggaccgctgctctcctttcccagcccccagcccggccattcgatctggaaacctatgctccacagcacagttggcccctgggtggtgcgtggagggaaggctttctgatgaggcagccgtgtgtgtcccatgtaggcaactgaaccaggaggcccc

SEQ ID NO: 419420 - DNA, 201 bp, Homo sapiens
gcgggccgaacacagccccctacgcgagctgcctgatccagctcctttccccctgagcctgggctgggcctcagaatcttcgccatagcgcttccagcccrctaccagtatttgcagatgaaacttgaggcatccttgctaaggggagccacacgggcagagcccatgggccaagctttcctgaagacatcgtaaggtctg

SEQ ID NO: 419421 - DNA, 201 bp, Homo sapiens
tggagccctgcaccagcctctcctcatgatggaaggcaccattgcattaacactcactggcttttttctagatgatttgggctgtggcagctggcgggggrgctgggggggaccagcagtgcagaatgtgctgggcactgtctgccgtgggggagccctgtgcggtttggttttgtttgcttcttgctggtatccttcagg

SEQ ID NO: 419422 - DNA, 201 bp, Homo sapiens
cccctcagtggagagcatgctttgggatgcccatcagttaggtgaaaatggcatttcattgtacttttaaaagatactgttcttatcaggagtgaggttgracgtcttttcctatgactcagagccatcagtagtgccttttctgtgaattactttatcttttcaaatcatttgcccatttttgtttggttgtgatccata

SEQ ID NO: 419423 - DNA, 201 bp, Homo sapiens
cctcatctcattcttacccttttacaggtgaggcaatggagatgtacagaagtcaggtcacaaacgcggggttaaacttagatctggccaacctctgcacstgctctcagccactatcccaacccagctgaaggacagaatcagctcagagagcaggaggaccctgcctcaccctcagtggagccctggcacagtgctgtg

SEQ ID NO: 419424 - DNA, 201 bp, Homo sapiens
atagaaacctggccatggggattggaacgggtgtcgtcttttcctttccatgtgttccttgtaggaggtaaaaatattgaaaatcatcctaattgatcatytttgaaaaaaccatgtggacatttacatatccaaagatgtagcacccagagttttagttgtaatagaggttgtagcaaggcagggtcgtgctgagtctga

SEQ ID NO: 419425 - DNA, 201 bp, Homo sapiens
cagttgcggacagttgctgttatgccatctcttttactgagcacctgctcgctcatttacagaccatgctgtgcagaggcttgtgtctccccacccgttaraaatgtctaactgggctctggctgactgcgtgcttagataccagctctgtgcaacatggcatgttaggcactgtggaggaaacagtgtctaaacatgctt

SEQ ID NO: 419426 - DNA, 201 bp, Homo sapiens
actccagagcaaagagaaccagctgttttcctataagtgctgggaagtggtagtttcccctgaatgtacttcggtatttaaacccagcatgaactgggtgrtgtgttcacacccacagcttgttgggcttccctgattcttcattctgaagcaatttcatgaattagcaactgatacctccttgggaaaagccaaaggaaa

SEQ ID NO: 419427 - DNA, 201 bp, Homo sapiens
agagagcaccaattgcaatttggctgtgtttctgcacctccagaggcaccgttcacacaccgttcatggcgtccctggaggtgagcagcctggcattggcstgaggacactgtttcttccctcttgaagcctctgtgtcttcatttgtaaaataaagatattgcgctttatctcttgggttccttccagaaatgaagttct

SEQ ID NO: 419428 - DNA, 201 bp, Homo sapiens
ggagggctgaagatagagaatcgctcttgtcagttactacttttgtgactcttgagaaattctctgtgtgtacattcaaaacttccccctccacacacctyccccccacaccaacagactaaatgacaggtaccatagtggggacatttttctggctcctggtacagtgcctgtcatttagaagtggtgttcacgtgtttc

SEQ ID NO: 419429 - DNA, 201 bp, Homo sapiens
gtgctgaccccacaagttgagcctgagaatgtcttggatttctttttatccctctaccatcgaaatcatcaacttttttggccctctctgcctctggtttrtttatttatttatttatttatttatttatttatttatttatttatgttttagagattgggtctcattctgtcacccaggctggaatgcagtggcacgatc

SEQ ID NO: 419430 - DNA, 201 bp, Homo sapiens
cctgtggggcctgatagggagggaggtgtgaggggcacgagcagtctgagtgtcttgcaggagaccctgaggatgggtgcccctttgtctttccagatatkgccaacaaagtcctcttggctctgttcacctgcgagatgctggtaaaaatgtacagcttgggcctccaagcatatttcgtctctcttttcaaccggtttg

SEQ ID NO: 419431 - DNA, 201 bp, Homo sapiens
tgaccccacaagttgagcctgagaatgtcttggatttctttttatccctctaccatcgaaatcatcaacttttttggccctctctgcctctggtttgtttrtttatttatttatttatttatttatttatttatttatttatgttttagagattgggtctcattctgtcacccaggctggaatgcagtggcacgatcttgg

SEQ ID NO: 419432 - DNA, 201 bp, Homo sapiens
cccacaagttgagcctgagaatgtcttggatttctttttatccctctaccatcgaaatcatcaacttttttggccctctctgcctctggtttgtttatttrtttatttatttatttatttatttatttatttatttatgttttagagattgggtctcattctgtcacccaggctggaatgcagtggcacgatcttggctca

SEQ ID NO: 419433 - DNA, 201 bp, Homo sapiens
caagttgagcctgagaatgtcttggatttctttttatccctctaccatcgaaatcatcaacttttttggccctctctgcctctggtttgtttatttatttrtttatttatttatttatttatttatttatttatgttttagagattgggtctcattctgtcacccaggctggaatgcagtggcacgatcttggctcactgc

SEQ ID NO: 419434 - DNA, 201 bp, Homo sapiens
ctcactgcagtctcgacctcctaggctcaagcgattctcccacctcagcctcctgagtagctgggactacaggcatgtgccaccatgcccagctaattttygtattttttatagagacaaggcttcaccgtgttgcccaggctggtctcgaactcataagctgaagtgatccacccgcactggcctctcaaagtgctggga

SEQ ID NO: 419435 - DNA, 201 bp, Homo sapiens
ccaccatgcccagctaattttcgtattttttatagagacaaggcttcaccgtgttgcccaggctggtctcgaactcataagctgaagtgatccacccgcaytggcctctcaaagtgctgggattacaggcgtgagccacagtgcccagccttctggatttattttgaacctctccacttatttctctttgtctctgctacc

SEQ ID NO: 419436 - DNA, 201 bp, Homo sapiens
actttgctgcctggtaaattctgtatggtgattgagatgctgcaagagatgtgtataataagcgaagtggctctctgcactgattgcatgagcagatccaygtcccatatggtggatataggaactgcatatgtgtgcaagtgtagttttgcatctgcacgtgaatctatgaatatctagattttctaacccacttaaggg

SEQ ID NO: 419437 - DNA, 201 bp, Homo sapiens
ccatttcccagggctgagtttgttagaatgcaaatgaaagctcacagaagtttagaaattgtttttcacggtataagagttgctggtaaagacagctaacrtgtagattttgagcctaaatccaagtccaaaggggagtaaccaggattccaatcatgagttgttaaaaggaaattagtaataaagtagttctgaaatcag

SEQ ID NO: 419438 - DNA, 201 bp, Homo sapiens
ttgctctgctcattcacccatagtgatggagagatttgatttcatctggatgctcgtgttccactgacagtgagtactgctcagccagtgctcgccgccaggtagttaggtgtgtcttttacaatgtttagcacagcgaatagagaaagtgcctggcagatgcttggccatctcctctgcatctcccatagtaccaagtat

SEQ ID NO: 419439 - DNA, 201 bp, Homo sapiens
aggatctgtgagtgccccccaggtcactgctgcctctgacactctccacgtgatggacctaaaggataagggccacgtgccatcctacatcctgtgtgggstgccgagggaccttaaaacagcagcagccacaaaatccacctctcaattgtgctcacatactgtgcgacaggggttggtgaattgtttctctaaagggtc

SEQ ID NO: 419440 - DNA, 201 bp, Homo sapiens
aacttggcctcagaatcttatttgtgatgtttgttcagggaataaaatagctttgatgtggatataaatttgcatgtgtgctgacttgcaatagagtggattttttttttaattgctacctctaggatcctaaggctgactttatgtggaggagacatttccaatgtccgtcttcctgcctggtccctacctgaccctcct

SEQ ID NO: 419441 - DNA, 201 bp, Homo sapiens
gcagctgccttggcattttgttaagtaggtatgcaagttgctggcccatcagagagctgtaaggtgctggaatgacagagccatttgttttcccttgtgacatggtctgttttataacgtggtgggtgagatcaagggagaagagtgggccccttcatagtttttcaaagtccttttttccttttttagaaaagttcaaag

SEQ ID NO: 419442 - DNA, 201 bp, Homo sapiens
caatagaccaagttcccaaaagtgtatctgcacttgaggctttcctgaagaatgaaaagcttaattcgtgccttttctttatgctacttgttcttttgtcttttttttttttttttaaggaaaagatgtgtcaatttcagttgcctaattcatttttaatatgggtcagagctgccatattcacacgctttgtctcatcac

SEQ ID NO: 419443 - DNA, 201 bp, Homo sapiens
tagggagtgactatggacggtgaactatattgacatataaaggcagctttaaaatacagactacagaaatcaagtggcttgacaattcccttagaacatawgtttatgaagtatagagctcaaatgtaatgatttcagttggttacagagtattaatgaattttgaattgaggcaattgtgatcaagcttgttgccttttc

SEQ ID NO: 419444 - DNA, 201 bp, Homo sapiens
gccgagggaccttaaaacagcagcagccacaaaatccacctctcaattgtgctcacatactgtgcgacaggggttggtgaattgtttctctaaagggtcastgagtcaatattttaggctttgagaaccatacagtcttgcaccttctcagctctgccgttgcagtgtgaaatatgtaagtgaatgggtgtgtggctgtgc

SEQ ID NO: 419445 - DNA, 201 bp, Homo sapiens
gtaatttttttaaagacttctagctacattacaaaataataaaccaaaaaaaccgtttttcacactcaagctcttccaagaaaactttttgattgattttmtgaggtttctttgaaatagactctaaaattcttttctctttggtactttttgatggcaggccagttcataatcctagttataatagatttacacaagaag

SEQ ID NO: 419446 - DNA, 201 bp, Homo sapiens
aaggggctgggggacaaacccatggcaagggcactagctgaaggaattcatgcagaggagaggagagggcttttccactgacgtttccttgcctctattckgtgtgtgtgtgtgtgtgtgtgtgtgtgtgtgtgtgtgtgtgtgcattcctccttggaagatgagagcttctggtctcaaggggccatgccctgtttctca

SEQ ID NO: 419447 - DNA, 201 bp, Homo sapiens
gagtttggagacgggagatgctccttctgcctgggggagtagagaaatgcttcccagaggttatggaaggaaattggatttgtggaggtgactgacagatmtgtgccccttgtgtcagtgtctctagctgcgacagacacatgggtcagcaggcgacccttgttttccctgagagcagcaaaggccctggtgaggatgtgt

SEQ ID NO: 419448 - DNA, 201 bp, Homo sapiens
atcccaggttcctcaggccatgcttttccactagccaattcagtcccttcagcaagtgtttgtcgagcacttactagatagcaggtactgctcttggcacttagagatatttggtgaaaaggtcagcctggagcttccattctactcaggagacaaatgagtaaatacaggaggtgatttagagagcacctgcctcctgta

SEQ ID NO: 419449 - DNA, 201 bp, Homo sapiens
ttattattttcttttagtcattcaagtatttgagtgcctatatgtgccagatggtgttctaggtgttagaaataaagcagtgaacaagaccaataaaaatctcctgtctttttgaagcttatctttagggagacagatgagaaaccataagcataattgctaagtgaatcatcagctaggttggcaattgatagctgggat

SEQ ID NO: 419450 - DNA, 201 bp, Homo sapiens
tattattttcttttagtcattcaagtatttgagtgcctatatgtgccagatggtgttctaggtgttagaaataaagcagtgaacaagaccaataaaaatctcctgtctttttgaagcttatctttagggagacagatgagaaaccataagcataattgctaagtgaatcatcagctaggttggcaattgatagctgggatg

SEQ ID NO: 419451 - DNA, 201 bp, Homo sapiens
gttggagcacaatgagccatgtcttcgccgtgcttttgtcggggtcagaaatgccgcgcaagcagatggtccctgcattcatgtttttcaggggtcagggyacgacattaaactgtggtataatgaaaatggaagtacttctcatttctataaaaacgctgctttttgattatataaattagtataggatgaaagctggga

SEQ ID NO: 419452 - DNA, 201 bp, Homo sapiens
gcaggagaatcgcttgaacccaggaggcagaggtcgtagtgaactgagattgcaccactgcactccaacctgggcaacagagtgagaatctcatctccagaaaaaaaaaaaaaaagaaaaccaaagcaaagccttgtcctgttgtgcttggtttgaaactgccattccctttagtttctgcttactgctacttctacacaa

SEQ ID NO: 419453 - DNA, 201 bp, Homo sapiens
tatcttcatgagagccacttttttagctcctacatataagtgagaatgtgatatttgtcattctgtgcttggcttatttcagttaacataatgaccctggktccatccaagtggctgcaagtgacagggtttcattctttttatggcagcataatattccattgtgtatatatgccacactttcattatctcttcatccat

SEQ ID NO: 419454 - DNA, 201 bp, Homo sapiens
tatcatttaggtattgggaaattgaaaaggaagaatacctattacttaggtattgggaaattgaaaatgaagaatggaagaaagagggagggaagagactrttgtgtttctatggagaacaacattggggcccttgactttagatttcagtggggacctacaaaaaggaaaaatggaaagggaattctgaagtcttaaggt

SEQ ID NO: 419455 - DNA, 201 bp, Homo sapiens
ggaattaagcttgctgatcaactgactttaagataggaaaattaccctggaagtgggcaagcccagggttatcacatggacccttaaaatcagaaagggagggcataagccaatcagagagacatggtagaaggagaggtcagacttaaagagtgagaactcaacctgctgactttgaagacagggaaaggaggccatgag

SEQ ID NO: 419456 - DNA, 201 bp, Homo sapiens
aggcagagcttgcagtgagccgagattgcgccactgcactccagcctggatgacagagcaagactctacctcaaaaaaaaaaaaaaaaaaaaaaacttcargttattaaatagatataggactactcagattttctgtttctcttcatctgagctttggtagcttgtatcttggaaggaattttccaatttcatctaaggc

SEQ ID NO: 419457 - DNA, 201 bp, Homo sapiens
gtaattctggagccacatctgactctgtgacttgggatgagacactccagccctcagcatctgcttcatattccttatttatataattggcacggccatctgtgtgtgtgtgtgtgtgtgtatggattcaaatattttaaaaaggatgtgagaactctttggaaaccataatacatgctgtgagtgtaaggtgtttttgag

SEQ ID NO: 419458 - DNA, 201 bp, Homo sapiens
gtaacctctgttaaattctttaccttctaagcctcagtttcctcatctgtgaagcactgaaagtagtattttcagtttcataaaccctagggtttaggggygttatgacaattaagtgacgcattgcctgtaaagtacttagcataatgactggctcctaggcaatgctcaacaaacatgaggtatgacattgtaattatc

SEQ ID NO: 419459 - DNA, 201 bp, Homo sapiens
agtgggtggggtggaggtagtgaggggaggcaggaggaggtaggtagtttagtgtttaggctaagagcacaggtcttggagtgacagatttgctacttccrtgtaacctctgttaaattctttaccttctaagcctcagtttcctcatctgtgaagcactgaaagtagtattttcagtttcataaaccctagggtttaggg

SEQ ID NO: 419460 - DNA, 201 bp, Homo sapiens
atactcactgttgatagcagaagcatccagctcccatacctctgtgtagggcttgtgtttccagagtcactgtgtgctctcctctccactgtctcccccarttctctccaaagccctccgatgtcagtgggtggggtggaggtagtgaggggaggcaggaggaggtaggtagtttagtgtttaggctaagagcacaggtct

SEQ ID NO: 419461 - DNA, 201 bp, Homo sapiens
taattctggagccacatctgactctgtgacttgggatgagacactccagccctcagcatctgcttcatattccttatttatataattggcacggccatctgtgtgtgtgtgtgtgtgtgtatggattcaaatattttaaaaaggatgtgagaactctttggaaaccataatacatgctgtgagtgtaaggtgtttttgagg

SEQ ID NO: 419462 - DNA, 201 bp, Homo sapiens
tgggccttgcttccagatgctgcctccctcccccagcacacctgcctggaatgttctctctcctcctctctgcttttccaagtcctgccgatcccctgagktctagccctctatgttgtcagcaggaccaaccattcatagcggctgttgtctcacgatactcactgttgatagcagaagcatccagctcccatacctctg

SEQ ID NO: 419463 - DNA, 201 bp, Homo sapiens
gctacttccatgtaacctctgttaaattctttaccttctaagcctcagtttcctcatctgtgaagcactgaaagtagtattttcagtttcataaaccctagggtttaggggtgttatgacaattaagtgacgcattgcctgtaaagtacttagcataatgactggctcctaggcaatgctcaacaaacatgaggtatgaca

SEQ ID NO: 419464 - DNA, 201 bp, Homo sapiens
aatacaggttggaataaatatgctcaagtggaggatgcaagttgcagtagcatgaagggaagataattatgatttatcaccctttgttacacagtgctattttgtttatcttctttaaaattccattaaaacccaccacaggagcctttgcaatgtagctgatttatcaaattcagaagaatacttccagcgtctctgact

SEQ ID NO: 419465 - DNA, 201 bp, Homo sapiens
atacaggttggaataaatatgctcaagtggaggatgcaagttgcagtagcatgaagggaagataattatgatttatcaccctttgttacacagtgctattttgtttatcttctttaaaattccattaaaacccaccacaggagcctttgcaatgtagctgatttatcaaattcagaagaatacttccagcgtctctgactc

SEQ ID NO: 419466 - DNA, 201 bp, Homo sapiens
tacaggttggaataaatatgctcaagtggaggatgcaagttgcagtagcatgaagggaagataattatgatttatcaccctttgttacacagtgctattttgtttatcttctttaaaattccattaaaacccaccacaggagcctttgcaatgtagctgatttatcaaattcagaagaatacttccagcgtctctgactca

SEQ ID NO: 419467 - DNA, 201 bp, Homo sapiens
acaggttggaataaatatgctcaagtggaggatgcaagttgcagtagcatgaagggaagataattatgatttatcaccctttgttacacagtgctattttgtttatcttctttaaaattccattaaaacccaccacaggagcctttgcaatgtagctgatttatcaaattcagaagaatacttccagcgtctctgactcat

SEQ ID NO: 419468 - DNA, 201 bp, Homo sapiens
aataaacccaggacagaattgaaggcaggctgagcctgtataggagagcagttgctttcaagttatgttaaaaactcctgggcgggagcattcaaaaattmctcatagataacaaatccagctacctgcacgtgcatgaaagcagggaactagagccactttcagacagtgacttcagcttaggaaacaaaaggttacttt

SEQ ID NO: 419469 - DNA, 201 bp, Homo sapiens
gctgcgaggggaaatggagagagaaaggaggctcttaggaaaatccctggaggagggaagacttctaacctgagccgaggccctgagccagttcctctgattttttttttaaagtcaaacatggataaagtcacactcaggtgtcactgtgaggggaaaggtggagaaaagtgactgtggtttcagtttcagctttagcca

SEQ ID NO: 419470 - DNA, 201 bp, Homo sapiens
ccagtcagttctctttatcggaaaaggtactagacacctgtagttgagcatgtgctgagatctggtgttttgttaattgcagtatttgatgatactggcaraagtcactaagagaatcctcaaaacatcttgttagaaatgggaagaatattccttgactggcaaattttttttctgttcttaaaattaagcttataaatg

SEQ ID NO: 419471 - DNA, 201 bp, Homo sapiens
taggagaatcgcttgaacctgggaggcggaggttgtggtggccctgagatcacaccattgcattccagcctgggtgacagagcgagactccatctcaaaawaaataaataaataaaataaaataaaatgaggtattcagttcttgttttcagcagggagccctgtcttctctaatacctgggtaacaggaagcagtcaccc

SEQ ID NO: 419472 - DNA, 201 bp, Homo sapiens
gcagtttttattttgggctgttaccatctggtggaacgtggcgggcagtctgaacagcagccagtcaggatttaccccatatcaccaccaaaggatctcaktcctttatccattcaattttcatgctgattcatttgattcactaagtagaattgataaatgcctacattgttcacctatgtgttgatttttggctctttg

SEQ ID NO: 419473 - DNA, 201 bp, Homo sapiens
agcctgggtgacagagcgagactccatctcaaaaaaaataaataaataaaataaaataaaatgaggtattcagttcttgttttcagcagggagccctgtcttctctaatacctgggtaacaggaagcagtcacccaactctcctttatgtacagaatgaagaattttatcataacccacactactataccttagatacaca

SEQ ID NO: 419474 - DNA, 201 bp, Homo sapiens
ttggggcaagagctatgtggtgtttctccctgaagccctcagagggttgtcctcctcggatttcaagggacccgctctgtgaggcacactggagtctcagrggcaagctctttttcactgactcactcaccagtgtttgctgagtgtgtctcatgccttctttcttgcttgcccctggaacatgcacaggactcagaccca

SEQ ID NO: 419475 - DNA, 201 bp, Homo sapiens
tgtgaggcacactggagtctcaggggcaagctctttttcactgactcactcaccagtgtttgctgagtgtgtctcatgccttctttcttgcttgcccctgsaacatgcacaggactcagacccagccctgcttgtggcctggggctggtagatctcatgcaggtaatcacggctgaggatgagctctgctttgtgtgagtt

SEQ ID NO: 419476 - DNA, 201 bp, Homo sapiens
aaggtgagaaccgcgactgtgggtagggagatcctccagacatcagcaattcccatgtagtgtgagaccaccgtggagggctcctttgtgtgtctggcacygtgggaagttcttagggggacaaatgaggtatcattttctggcccctcaaagtactttcatctttccaggaatgtgtaattatgtgcccaaatgagtgga

SEQ ID NO: 419477 - DNA, 201 bp, Homo sapiens
tttgttaaaggagtgaatgtgttaggtctccatatacagtggagattctagtaattcgctgtctcaggtcctgtctcaactctccctactagtattagggygccctagcctttcagagatggtctttgtcttggaactcttactaaatctatttgataaaatatgattgtttctctagaactctgttgaattgataccagg

SEQ ID NO: 419478 - DNA, 201 bp, Homo sapiens
cttgcttccagatgctgcctccctcccccagcacacctgcctggaatgttctctctcctcctctctgcttttccaagtcctgccgatcccctgaggtctasccctctatgttgtcagcaggaccaaccattcatagcggctgttgtctcacgatactcactgttgatagcagaagcatccagctcccatacctctgtgtag

SEQ ID NO: 419479 - DNA, 201 bp, Homo sapiens
tttaggtgctcactctagagaggactgtgataagcataaagcataataatgtaaaccctaacttacaagtttctttaaaagttgactcttaagggtattayacttgctcatattttaaatatttaaaaacaattaaaatttttttccttcatattcaccattggcttttcaagcatgcacagaagtggtgtgcagatcgtt

SEQ ID NO: 419480 - DNA, 201 bp, Homo sapiens
ttgtttttacagacaggcatgacagagtgtcctgccccctggaggagtgagggatgttctccttatcagaaggaattgttaggatcagacccatctatttstctattgctctgttctgcttcacttgtgaaaatcttatggcagtgagatggtatccacttgtacctggagaccaaaactggaccaacataaagaaaaaaa

SEQ ID NO: 419481 - DNA, 201 bp, Homo sapiens
gaggctttggactgatctcacaaagttatgctgatttctacatcagcctacatctggggtccttctcctggttatcattgtttgtactgtatgcacagatmccacgcccttacttaataatccagccttggtggaagtatattctcctgtgtttttgttggaatataccaaccctgtattgccctgccctgcctttcgagc

SEQ ID NO: 419482 - DNA, 201 bp, Homo sapiens
gtgtcttactgagccagttgttcattccccagcaaacatttcatgtttacagtcctcaactaggctatactgtggaagattcagcagatgtgcaagcccarcctttcaggatctgagtcgagagagagaggggacattatatagagaaattatagctcagtttataaagtggccagtgacccaggagagcggcagagcaca

SEQ ID NO: 419483 - DNA, 201 bp, Homo sapiens
caggcagggatttgaaaagaggggcattagagcttgacttggaaagggggactgggatgtgaacatttggagattgcaggagaaagcattcctggcagagsaacaagtagtagatgagaagggtcacaggtggatccctaggtgggggtagctaaggattctcaggatctggttgctcaatagcagcaagttgagttctgc

SEQ ID NO: 419484 - DNA, 201 bp, Homo sapiens
tttattttcctcgctctttttttttcattttaccttattcttctgtcctaaatatttaaagtttcagctgattttaaagtaaaagatgctcaatgggaaargctcacacaaatcagagctacctaaaagtagagttggaaagtcccaaggatctttttctctgaggcaagcctctttgcttctgggtgcttgccctgcaga

SEQ ID NO: 419485 - DNA, 201 bp, Homo sapiens
attttaaagtaaaagatgctcaatgggaaaagctcacacaaatcagagctacctaaaagtagagttggaaagtcccaaggatctttttctctgaggcaagsctctttgcttctgggtgcttgccctgcagactggcttatgaagaggtcaccatcttttcagattccaggggcctgtaatgttcataccactgcagtattc

SEQ ID NO: 419486 - DNA, 201 bp, Homo sapiens
cacaggtcttggagtgacagatttgctacttccatgtaacctctgttaaattctttaccttctaagcctcagtttcctcatctgtgaagcactgaaagtartattttcagtttcataaaccctagggtttaggggtgttatgacaattaagtgacgcattgcctgtaaagtacttagcataatgactggctcctaggcaat

SEQ ID NO: 419487 - DNA, 201 bp, Homo sapiens
ctttcttgccctcacatgtggatctgccttctccttttaaacagccatgtaacgttccctttctcacctactttgaatttttatattcttgctgctctaargttttttttttggagcaaggaaagcaatttaaaacataaaatttactttcaaaagaagagtagagataattaaccagcccttgccacctaactcaatata

SEQ ID NO: 419488 - DNA, 201 bp, Homo sapiens
agctatggaaagtagaggtgatgctactaaatacaaattcaacataggcttacaaatatcttagaggagcttttctggctttgaactgtaaacgtcaacgkagctatattcatgataattatatcttgattgtatcttcttagggaaaggattgtcaatggtcctagctcaaaggaaattgaacaaagaagttaagatagc

SEQ ID NO: 419489 - DNA, 201 bp, Homo sapiens
gtttgcaccttactctgtactttctaattaaaagggggacccctcagaggtgattccgattctggactcccactggtgtagtgtggcaggttgagtttgcygccccgggcacatcccctcatggtcagagggatgaagaggagggggtgaatgtcaggttccagaaaagcctgctctaaagtcatttcctggtcatgctga

SEQ ID NO: 419490 - DNA, 201 bp, Homo sapiens
ttcttgccctcacatgtggatctgccttctccttttaaacagccatgtaacgttccctttctcacctactttgaatttttatattcttgctgctctaaggttttttttttggagcaaggaaagcaatttaaaacataaaatttactttcaaaagaagagtagagataattaaccagcccttgccacctaactcaatataat

SEQ ID NO: 419491 - DNA, 201 bp, Homo sapiens
ggaaatgtcttcttgtcccactaaacgctcctgcagaaatacccagcttctgcttggattgagaactgtcactttctgacacttcttccttatattgtatygatacaaggtttcgggcagtttctgctttttgtgatagctgtgctgttggatctcacacttgctctatcaatctgtatctgtaaccaggagacagaaatc

SEQ ID NO: 419492 - DNA, 201 bp, Homo sapiens
atgagcaaaatattaagtgcaaggtacagtctaacgcatatcactctgcagtatgtggtaagtgccaaatgaacaggataaatttaagtactgtaatttcraagaacgagtcattagcaaaggctaaaaatggtcaaggaaggcttcctggaaaaagtgagcttggagctgggcattgacagatgagtcacactgtgcctc

SEQ ID NO: 419493 - DNA, 201 bp, Homo sapiens
cagaatgaaagcatcctttaacattgagatgaggttgtggtgaaggggaggagttagcagtctgtcactggggtgactttctggggagctctaatcagtcwtgtgtttctgctagcagcagcatcccctcctcattcctcatgtggcatacattgcaggtcttcctggcgcagatgctttctttgctcacacacattccct

SEQ ID NO: 419494 - DNA, 201 bp, Homo sapiens
ctgctgacttgctcattcatttccattgcagggctgcagttgggtcatgcctggttttttggcctcccaatgtctcttaattaacttaatattacttggtratactaaagcaatgatgaattatgtgcatggagtcattaatcttctgtgtaaatatctcaaacgctgtgtcttaattatagactccatacttaaaatatt

SEQ ID NO: 419495 - DNA, 201 bp, Homo sapiens
tagcattagacttgggggacacaaatgtcacataaaatgtgtacttttaaaccgaaggtgaagaaagatgagggcaaacagactactgtagccagtttctkcatgtaaatgtggtgttaaattacccattgttgttcctctaagtgcatacttcattaatacctgcaggggaaaaaatgacctctatttacagccaagcat

SEQ ID NO: 419496 - DNA, 201 bp, Homo sapiens
catacattggagacgttcgtatgaaagagtagtttctctgatgagatgagtgctgcctgttctccactgacccacagacattcttagccttagcaatgaakggagttggggtaagattgggcctggggatctgggccctctttcaccttctgactgttctgtctatagcaaaccatagagagtttttctggacagtccagg

SEQ ID NO: 419497 - DNA, 201 bp, Homo sapiens
cacacctcccccccacaccaacagactaaatgacaggtaccatagtggggacatttttctggctcctggtacagtgcctgtcatttagaagtggtgttcaygtgtttcctgagcctattttattttgacctcttgccctaggcattttaatgagtgaatttcatgacctccatttctctaaggtattggtaacttttcggg

SEQ ID NO: 419498 - DNA, 201 bp, Homo sapiens
gggaagaattgtgcacctccttcagggtcatcagtgagttaggtacattgtgagtatactaacttagtatttagcagttactctgcaccgggcaccatgcygttcctgggtggtggctggtggctggggcagggcagtgagtgttacatagactagacacagcagtaatagccaatgttccatgagaacttgccatggggt

SEQ ID NO: 419499 - DNA, 201 bp, Homo sapiens
ccatgacagaatgacaggcagttattgtcattctgattttgtggacgaaagaatcttctcttgcagaaagacaaggtgaggtgttggggtgagaccttggsttcaggcctttaattccagtctatttttcctctctggcaacatgctgccatccacgcctccactcccaggcctgcccctctgaaagtggtgggtttgtgg

SEQ ID NO: 419500 - DNA, 201 bp, Homo sapiens
cagttactctgcaccgggcaccatgctgttcctgggtggtggctggtggctggggcagggcagtgagtgttacatagactagacacagcagtaatagccartgttccatgagaacttgccatggggtttgccacacgaagacactggctcttgtttacataggctgcctcatttgcacttaccaacaaacctgggtagctt

SEQ ID NO: 419501 - DNA, 201 bp, Homo sapiens
gaatgcaggtcaaggtcaggggagagttcagagaggcacttgccaacctgaaggtgtggagatgctgccgtgcatgggcaggaaggggagtggtggggcaragaagtcagggtgtggggtgggggcatggttccaggaagcttcctattttgtcttgtcagcagtagataggaactggattgaatcgggattatgctcact

SEQ ID NO: 419502 - DNA, 201 bp, Homo sapiens
aggactcctgtgttggggacttccatgggtagaagtcctaacacctttctgagggctggtgcgtctgagcaagaatatgggattgcagggtgtgcctgttkttcacaactcataaagccatcagaagaacacagatcacattttttgcctctccagaagttcttcatgaaatttttattaaatttgttggcacttagaatg

SEQ ID NO: 419503 - DNA, 201 bp, Homo sapiens
atgttagctaggatggcctccatctcctgacctcatgatccacccacctcagcctcccaaagtgctgggattacaggtgtgagccaccgcgcccggctgaratttcatttttaactcagacgtcaatcaacgtagccatatacagatttgaaaagcttttctttatctctgttaatggagaaaaagaatgactgctttctt

SEQ ID NO: 419504 - DNA, 201 bp, Homo sapiens
ttatagagacaaggcttcaccgtgttgcccaggctggtctcgaactcataagctgaagtgatccacccgcactggcctctcaaagtgctgggattacaggygtgagccacagtgcccagccttctggatttattttgaacctctccacttatttctctttgtctctgctaccacctccctgatctaaaccaccaccatcct

SEQ ID NO: 419505 - DNA, 201 bp, Homo sapiens
tttcagcttcaggacacgtctaccttaatgttacataataccaacatcatacttaacaaggctcaagtcagtctcaacctcccccttcccctcccacctcyctcattcctggagaacctccctttggaatgcttagttttgttggggacactgggattttgcctcaagaccctggctcaaataactggtgtgctccatagg

SEQ ID NO: 419506 - DNA, 201 bp, Homo sapiens
tgatcatttgttgtttgacttcctgctttcccactagagatacgagtacatggcaagagatttctgaattcccacaccacaggtgtggccatggtgcacarcattgcaaggtccagggtcagtcgtcattttgctggtaaggaaggcataaactaacagcccagtagacaaatagcagtgtcccttcatgcggttgttact

SEQ ID NO: 419507 - DNA, 201 bp, Homo sapiens
cccctggtggagaggcttcttgactgagagggcccttacctttcttcaagcctgggctctgtgcctccatggggagggagtgtgttccgtgatctcagatrccctggctggtgcaaaccagtgtgctgactgggagtgggcagggtcaggcctctcttctctccctccctgcttcttgccaggctcaggaaggggccagga

SEQ ID NO: 419508 - DNA, 201 bp, Homo sapiens
aaagacatacaccaattggtttaatgtattcgggtagattttctactagtcgtgtccgtttaaaaaaatcaccagtcagttctctttatcggaaaaggtaytagacacctgtagttgagcatgtgctgagatctggtgttttgttaattgcagtatttgatgatactggcaaaagtcactaagagaatcctcaaaacatct

SEQ ID NO: 419509 - DNA, 201 bp, Homo sapiens
tttcttcctgtcacagccagaaaaccacacaaggagagggtttcagtgaggcccacatggtcctcctcaccaaataaacagtcctggattcaccacatgcrcatgccaggtctggggctgtctctgtgcatctgattagcaggcagtagaaatgtgggtgttgccagtgttacggtgtctgcatcctccctgggggtgtga

SEQ ID NO: 419510 - DNA, 201 bp, Homo sapiens
ttgggacagctgagaaacttcatgccatttgacagttttcttgaggtcatgagcaaattaaccaatcaaggaagtaaataagtaagttttggtggaacaartttgtatgttattggtgtgcctttttttttttaataccataggtgtgttcctgatgaaaagggtgtgaataaatggaatttaaaatagttttccaatgaa

SEQ ID NO: 419511 - DNA, 201 bp, Homo sapiens
gcctccaaattcacaagcctgacacatttggctgagacgaatgtcgtccttcagcatgagagtagatggataaatgtctacaccttggtgaaaatgctagytgtgcttacctgagaagcagcagatttccctggtttactgtgtgtggcattgcccatgataacatctggcccagtgcaagatcttaaagagaagcaccat

SEQ ID NO: 419512 - DNA, 201 bp, Homo sapiens
tcccagggccttttgtagacacaaatcaccttttggaggacaggcctttttgcagcatttaccctggtcactagtaggcaaggtaagataggatgtctctrattgttttcatttgctgtgtcagaagtgatacccacagtggcgtatctataacatgtttattttagggggatgtttcaagtcgccgtgtggcgcgatgct

SEQ ID NO: 419513 - DNA, 201 bp, Homo sapiens
aggatttcctaatgagagctgtaggcaagacgtgtttcagggtagagccttatcccagggccttttgtagacacaaatcaccttttggaggacaggccttyttgcagcatttaccctggtcactagtaggcaaggtaagataggatgtctctaattgttttcatttgctgtgtcagaagtgatacccacagtggcgtatct

SEQ ID NO: 419514 - DNA, 201 bp, Homo sapiens
gctggatggagaaccccctgcagtggctgtggaattgaggagctggagcaggaggacggtgggaggcggccactgtggttggggacctgggggacctgggrcagagcagcccaggacagcctctctggcagtgcggggcaggagctcactcatgttctcaacccagacaccatctgcatccctgatggttccaaatcccct

SEQ ID NO: 419515 - DNA, 201 bp, Homo sapiens
atgacataatattttagtattgattaagggtgacagtaggttgctgacagaagagaatgctaaaggaaataatttgatctaagggatcagggttgtaaaakgtaaatatcagcatgtttgatagatttaataaaaggtgtagctgggcagagtagaaacaggtaattttttaagtttttatcaatagggttgatagaggat

SEQ ID NO: 419516 - DNA, 201 bp, Homo sapiens
ttttgctgacttgcacttttcttggctgtccagggttttattaaccgtctttaagacatctatcacctccttcctcttcattttccaatgggcagattttyccaggaaggagagttgcagcactgatgcctgcagtcgctgctccagaaagattgctgtattttcattgacatgccgtgcattaccataattggcttttct

SEQ ID NO: 419517 - DNA, 201 bp, Homo sapiens
gttcatgtaactactccttattgttgaagatttagaccgtggcaagttttatgtgtgtaaaaggacatcttgtataagggacatctttgtgcatgaagctktttctgcatttcatattaacttcttaggctaacttcaaaaaataaaatgattgggctaaagagcatcaatgttttaacatttctctccctttactctttt

SEQ ID NO: 419518 - DNA, 201 bp, Homo sapiens
agacagcctccatgatcatttgtccttgagatacactaagcaccattgttatgacatcacttaggtggaagtaaaggttaaatcggaagtagttcagggtytttttcttgctatagaataattgtagtctttgccatgcagtctttgctttttgctacagacttagattaaagaaaaatattcttgaactctttctttaga

SEQ ID NO: 419519 - DNA, 201 bp, Homo sapiens
ttaaattttctttcacctaccacctgcagactgcaattgatggtgcctgagtcaagaactgtagttgtgggctcctatagatcacctgcaggagctgggcrctgagtcctggcggggactccctgggactgtgttcagtgcaatttgtagccttacaaatgtcagatcttgttacgcccctggcagtattgacataaagaa

SEQ ID NO: 419520 - DNA, 201 bp, Homo sapiens
ctgcaaaggggtagatatgtaaacttggggtagccttgtgtcctgggggctaggctgacaaatatctttttaaagatcatctaactgctggggaggctgtstctttgaagatgatttacttcttctaactgggtttcatttttctctcctagcttatgttcctgaggaagaattgaaggcagcagaaatagatgaagagca

SEQ ID NO: 419521 - DNA, 201 bp, Homo sapiens
aggagttttgttacattttaaaatccagtgttaatatttactactagagaacccttccggaagcatgaaaacctaaagacttaggcttgcgggcaaggtcsttctgcatttaaaacactgtgctccatgtagggctaaagtgctagttgacagcaactcaaacaaaatattaatttttttgcgtgtgtgcctattttcttg

SEQ ID NO: 419522 - DNA, 201 bp, Homo sapiens
tttacattttaacttcactggagaaatatattgttaaatttatgtacttagaaaaacctaacagtgtggcttactgagaattggaataaacaggcctcctsttaccatttttaatggttattgtcaggcaaggaaaagaggatcatttcttgagagatttttgagctcagttatgctttggtacttccttcattaaatcac

SEQ ID NO: 419523 - DNA, 201 bp, Homo sapiens
tatagacatatttggaatggaggagatccacatgggatccttccgttcatttgttctgtagagcacctgctcggagtattctgtggtacacctccctgccycccagcactgcggtacttgatatctcatgatgggtgtgagggtgatgatgaagataataatacatttattcctccgttcttcctcttgggaattcacggc

SEQ ID NO: 419524 - DNA, 201 bp, Homo sapiens
gaggcagatcagagaggtcctgggtgcagatacctggagcacagcctaggatgcagctggggcatggctggcacctttctgtggggttctgaggccagtcrgggacaagaggggtactgcaggcttacccgggctggcccattttaactcttcgtggacttttgtatcacccctgggtaaggttgtcattcacaccgtaaa

SEQ ID NO: 419525 - DNA, 201 bp, Homo sapiens
gacaagccccacttagccaagggcaggagccacacctgcacctgtacactgtgggggccgggctggggggagccgttccaccctagcagcctgcacccacrtcagttcttattgttttcttggttcctctcggaaaagcctataaaaagtaaatggtaaattactccgggacaaggctcaagttcacaatggacaaagaac

SEQ ID NO: 419526 - DNA, 201 bp, Homo sapiens
tgtctgttttctcctgccttgctttattgttacctgggaaggtcctggcatcgagaaaagccaaatccgggcaaataatatgaccataaacaacacctcakcattactgtgctgtgcacaaatctccttgaactgcctccaaactttgagaatatatacatatgtatatagattaatatatatgtatatattttaaaattc

SEQ ID NO: 419527 - DNA, 201 bp, Homo sapiens
agttaattggcccacattaatggagagttgaagtgaaagaaaatagaaaaccacaaatttctaaaagaaatttttcccctcatttggaatccattttataygtttattggaagctaatgtttcagttaactatgacatatagatatacgtttacttgcctaattatacttgctgttaacaatacatcatgtgtttgcctgt

SEQ ID NO: 419528 - DNA, 201 bp, Homo sapiens
cctccagtaggtgggggggtgacctccccatctcacccctgctgtaggtgagtggggtgacctcctggctggccctgccaggctcttccctgtccccagtygcaagggtactctcccagcctccacgctccacgcccacaccctcgccccacttgcccagccccggcaggagcttctccccgcagagtccccagtgttttc

SEQ ID NO: 419529 - DNA, 201 bp, Homo sapiens
ggcccagggtccggggtgcctgcagcgtgctgggccagccaggcggtagagggtcggctcagccagtgcccatggcagcacctgcatgaggtccccgcttsctggaaactgagcccgggaacggccttggcccggggaaagcagggctgagtgcatctcccctctgagagcgtgaggtgctagcagagctcgcgggccggg

SEQ ID NO: 419530 - DNA, 201 bp, Homo sapiens
tcccagcagtcctccctgaaaacgtctgtgctccttgtcgtgttccctcaggccctggctctgatgatgtcatcatgaatgatgatatttaatgagacacscctctcaggtcagatgaatgcattttaatagggattttctgcaaaatatctgaaccccaaataccccaagttgttgatggaactgtagtccagctagttg

SEQ ID NO: 419531 - DNA, 201 bp, Homo sapiens
tttgtcacttttgaacatccattcgtctttcacagccagctctcacttacgtgtgctaatgaggaaaagagagcttgggtagacagtttcctgacctcatkgctgtcatttgtgtccaccacctcctccgtcaggcctccaaagagctcttcacaaggaacagcatttctgcctggtgtgggtttccccacctctctcttc

SEQ ID NO: 419532 - DNA, 201 bp, Homo sapiens
tctacaaccatgtgatccattgcacccatctttagcacccctgagttggaggaagtcgccgtcatgaagcaacagctgtcctttttttttttctttcttavaaaagctggttgtacttagagaatttgcttttggtaaaatttgagtttatttctacttatgaaattggaaataagctgaaatcaacaacttctgggccct

SEQ ID NO: 419533 - DNA, 201 bp, Homo sapiens
gcagcttcagcaaaggcttgcactcagggttgtcgggagcacagcgtctgctggaagggagaatgtcacggaccaggagtggagcgaggtcatctggggaygttggaaggctctggccacagctggtcatcagtgcggggggccagtttggatgcggggcctgaggaccaggaggctttgaggatggcgctgcttttctgc

SEQ ID NO: 419534 - DNA, 201 bp, Homo sapiens
ctacttatgaaattggaaataagctgaaatcaacaacttctgggccctcctgccattttcatgtcaaggcacatggagacatgtcagtgcacgtgggacgyggaagctgcacaaggggtgttcttgggtgtggacgtgcatggtgggcgcacaggcctctaggaaatgcttcctcggttctgggcaccttcaatcatggat

SEQ ID NO: 419535 - DNA, 201 bp, Homo sapiens
gttgtcgggagcacagcgtctgctggaagggagaatgtcacggaccaggagtggagcgaggtcatctggggacgttggaaggctctggccacagctggtcmtcagtgcggggggccagtttggatgcggggcctgaggaccaggaggctttgaggatggcgctgcttttctgcctcggatactctcgtttggggttattcg

SEQ ID NO: 419536 - DNA, 201 bp, Homo sapiens
agcctccctctgaaggctccagaggagaatccttcctcccctcttccagctcctggtagctcctggcagtcctgggtgtccttggcttgtggtgcatcacwccagtctctgccttctccgtgtgtcctctcctctgttgtaaggtcaccagtctttggacttaggacccatcctgatctagtatgacctcaccccagctta

SEQ ID NO: 419537 - DNA, 201 bp, Homo sapiens
acacgcggctgccggcctccagcatcaaaaagcagcccgactctcccgcggggtccacgacttctgaagaaaagaaagagccagagaaggagaagccgccygtggctggcgacgcggagaagatcaaggaggagagtgaggacagcttggagaaatttgagcccagcaccctgtacccgtacctgcgtgaggaggacctgg

SEQ ID NO: 419538 - DNA, 201 bp, Homo sapiens
gggcttttgtaattaaacagcttttattgtgataaaatatttataatgtataagtgaccattttaaccattttaagtgcacagtttcatggcgttaagaamgttcatattgatgtgcagccatcaccaccctccatctccagaactttctcgtcttcccagatggaaactctgtccccatcccctccttctcctggcacac

SEQ ID NO: 419539 - DNA, 201 bp, Homo sapiens
gtacacatgtgattatgcgtgtgcctgtgagtgctggctgctgctagaatctgaagccctgcatttgcgggttttgaggctctcacactgctccctgctgyccctggcatcctccctttgggcggccaagatgttttctgtccctcccagcagtcctccctgaaaacgtctgtgctccttgtcgtgttccctcaggccctg

SEQ ID NO: 419540 - DNA, 201 bp, Homo sapiens
aggaatggccgcagaggtggccctgagtgagtcagccaaggatcagaaagcagcgaacccgtacgtcacgcccaataaccgctatggctaccagaatggcrccagctacacctggcagtttgaggcccgcaaggcgcagatcctcaagtgcatggagtgtggcagctcccacgacacgctgcagcagctcaccgcccacat

SEQ ID NO: 419541 - DNA, 201 bp, Homo sapiens
accaaaaaaagcattattcaagatcctcctaccccaatgtagcttactgtgaacattcttatctgaattctttcagggtctttttctttcttgtttttttwttgctctacagatatttttcaaacaaagatgggatgatggtagtatttattggcttgctttttcactcactaaatggtgaacagctttttacacaattct

SEQ ID NO: 419542 - DNA, 201 bp, Homo sapiens
aatgtagcttactgtgaacattcttatctgaattctttcagggtctttttctttcttgtttttttattgctctacagatatttttcaaacaaagatgggakgatggtagtatttattggcttgctttttcactcactaaatggtgaacagctttttacacaattctttatacattttcattattctttctttagggttttt

SEQ ID NO: 419543 - DNA, 201 bp, Homo sapiens
tttgagaaatgcaataatttcttaaatgcaatgatttctcagtgatgtggcgcattcctgtgctggaaaaagcatgtgtgaacccatgggctgtcacctaractgatatgacagtggcccctgttggctggtggaggaggcgctggcctggttacagagcctgccttctggcaggtagaccaggccggctttctccagtgc

SEQ ID NO: 419544 - DNA, 201 bp, Homo sapiens
tttcccccccttactcgaatctcatgaattcccacctaaaaggcaataaagtacttatatttactgaaatacacttttctaggattgcttaacaatacacygtcttttttcttgtcggatttgggaatcagtttacaaaagtgttctttggaaagaaccgagccttctagcctgaggaaactcttaattaaagcaaatggt

SEQ ID NO: 419545 - DNA, 201 bp, Homo sapiens
atggcagcacctgcatgaggtccccgcttcctggaaactgagcccgggaacggccttggcccggggaaagcagggctgagtgcatctcccctctgagagcrtgaggtgctagcagagctcgcgggccgggcctttaccgtccggatgggtctgggatgaaggccacaggtcacccagagcgggactgggtcaacagtggct

SEQ ID NO: 419546 - DNA, 201 bp, Homo sapiens
ccccgcttcctggaaactgagcccgggaacggccttggcccggggaaagcagggctgagtgcatctcccctctgagagcgtgaggtgctagcagagctcgygggccgggcctttaccgtccggatgggtctgggatgaaggccacaggtcacccagagcgggactgggtcaacagtggcttgatgtcctggcacagacgag

SEQ ID NO: 419547 - DNA, 201 bp, Homo sapiens
gccactaccgtgacgacaacagggacaaggactccgagaagaccaagaggtggtccaagcccaggaagcgctccctgatggagatggaggggaaggaggaygcccagaaggtgctgaagtgcatgtactgtggacactcctttgagtccttgcaggacctcagcgtccacatgatcaaaaccaagcattaccagaaagtgc

SEQ ID NO: 419548 - DNA, 201 bp, Homo sapiens
gaggaagggccggcagtccaactggaacccgcagcaccttctcatcctgcaggcccagttcgcctcgagcttgcgggagaccacagagggcaagtacatcrtgtcggacttgggcccgcaggagagggtgcacatctcgaagtttactgggctctccatgaccaccatcagccactggctggccaatgtgaagtaccagtt

SEQ ID NO: 419549 - DNA, 201 bp, Homo sapiens
gggctgcacgcttagaaccggggctgcacacggggctgtggacgtcacagcctcgtcatcagagggggcatctggactcctagcagagcgggaagagaggmattcccggcctgtggagcagtgctcctggaggcggcctcgacctgctcctaggacccatctgccggctgctgctcctctgtctgggagactctctcacct

SEQ ID NO: 419550 - DNA, 201 bp, Homo sapiens
tgtcggatttgggaatcagtttacaaaagtgttctttggaaagaaccgagccttctagcctgaggaaactcttaattaaagcaaatggtatcaacattgtrttactgcacagagacctgcactgctcaccttttttggtgtcctgagcctagaccgcagaggtccccatccccgggtgagtgatcgatgctgtcccgttgg

SEQ ID NO: 419551 - DNA, 201 bp, Homo sapiens
  misc_feature (1)...(201): n = A,T,C or G
tagcctgaggaaactcttaattaaagcaaatggtatcaacattgtattactgcacagagacctgcactgctcaccttttttggtgtcctgagcctagaccncagaggtccccatccccgggtgagtgatcgatgctgtcccgttggacaaggtttactagaagggtgacagaccacagcccatgatacacatgtggtgtgg

SEQ ID NO: 419552 - DNA, 201 bp, Homo sapiens
ggcctccagcatcaaaaagcagcccgactctcccgcggggtccacgacttctgaagaaaagaaagagccagagaaggagaagccgcctgtggctggcgacrcggagaagatcaaggaggagagtgaggacagcttggagaaatttgagcccagcaccctgtacccgtacctgcgtgaggaggacctggacgacagccccaa

SEQ ID NO: 419553 - DNA, 201 bp, Homo sapiens
cgcttcaggacctggcgcccccctgctcccctgagccagcaggaatggccgcagaggtggccctgagtgagtcagccaaggatcagaaagcagcgaacccrtacgtcacgcccaataaccgctatggctaccagaatggcgccagctacacctggcagtttgaggcccgcaaggcgcagatcctcaagtgcatggagtgtg

SEQ ID NO: 419554 - DNA, 201 bp, Homo sapiens
ctgtgtccccttgttttaagtactatatctataaaatacaatttaaataatatagctttctacccaccccctgtgcccattactttccttttttcaatgamtacttttttctgttctcctaaagaaactttagaatcatttttgtcacaccttgggtaatttgactgaaatggtatttaataagttaattctggaatactc

SEQ ID NO: 419555 - DNA, 201 bp, Homo sapiens
ataaattattcataatcatggtgcttaacaaaagatgccaagttctcaatggatgcccactctatgtaccataacagaaaaaaagttgtgttttcttgtastaagtgttgttctgattagtcttagtgttaaatcttggttagcacttggctttgacttccacaaatacaatgctctgaatcaaataagtgccaggggagc

SEQ ID NO: 419556 - DNA, 201 bp, Homo sapiens
aaaaactatagcaaaataataaataatatgaaaagcacagcactgtgggccttttcttagaaatggaatagctctttgccctttctggttatcactgatcrctcacaggttttatttctagttgttagagaactttaattttattcagcatgctttaaatagtgtggcaaaagcatgtagattttctgtagatttttccag

SEQ ID NO: 419557 - DNA, 201 bp, Homo sapiens
tggttatcactgatcactcacaggttttatttctagttgttagagaactttaattttattcagcatgctttaaatagtgtggcaaaagcatgtagattttmtgtagatttttccagtgcttaaacatttttataaaattctgtttaaaagggtaaactcccaattatccagaaaacccagcctccaaaaatgactccccag

SEQ ID NO: 419558 - DNA, 201 bp, Homo sapiens
ctcaagatgtaccagccccgggcgtgtttgcggggacatgcctctttgcaatgagtgtagtagttaaccccatgcacaggagttatttagaccacactctsctatttttgtaggatcttttaaaaaattactttgcttttgtcagtgtgttcttctatttctttttactggtaaagtcaattactgaagaaaaataatttc

SEQ ID NO: 419559 - DNA, 201 bp, Homo sapiens
tcggtgtggctttcttcaaggcttctggttctatcttgtttacaacgtaatttctcatttcatagttacatagtgtattcagttcttaaatgactgataaraggaagtcacagtgcacttctaagagctgctgtcatcatttgaatgctgtaggacctttggctgaaatgaaaagacttgctattgggtatttgaaatcaa

SEQ ID NO: 419560 - DNA, 201 bp, Homo sapiens
cacttctaagagctgctgtcatcatttgaatgctgtaggacctttggctgaaatgaaaagacttgctattgggtatttgaaatcaaatgagagttttgacrtcgggggtgcgtgttaatttccatataggataaccttacaaatcaacttaaagtgtaatgaacaagcaaataagtagctacaactcatatggcgtttggc

SEQ ID NO: 419561 - DNA, 201 bp, Homo sapiens
tcatggacatctccgacatggtgaaaaacctcacaggccgcctgacgcccaagtcctccacgccctccacagtttcagagaagtccgatgctgatggcagyagctttgaggaggcgttggacgagctgtcaccggtccacaagaggaagggccggcagtccaactggaacccgcagcaccttctcatcctgcaggcccagt

SEQ ID NO: 419562 - DNA, 201 bp, Homo sapiens
ccagcaccagccacagcagtaccaccagtaccagcagcagctccgggtacgactggcaccaggctgcactggccaagacgctgcagcagacgtcctcgtaygggctgcttcctgagcccagcctgttcagcaccgtgcagctctaccgccagaacaacaagctctacggctccgtcttcacgggcgccagcaagttccggt

SEQ ID NO: 419563 - DNA, 201 bp, Homo sapiens
acaaaagcaaatgcagcgttcactctgggatggcagcagggcacttctctgtttccaagtgccacacagtctctggtggccatgcctccccttatgtagtycctcttctcagcgtctttcctcttcctgtgccttttgaaatctgtttagattcagggaggctccattcttctccttgagaagcattaccaccctctcttc

SEQ ID NO: 419564 - DNA, 201 bp, Homo sapiens
caacagacttgtattactcacagttctgggcttgggaggtgggagatcaaggcagcagcagatctgggagctggtgaggagggcctgcctcctgtgtgtaygtagatggtgtcatctcactgtgtcgtcatgtggtagaaggggcaagccagctctctggagccttttaaaaaataagggcactcatgctgttcttgaggg

SEQ ID NO: 419565 - DNA, 201 bp, Homo sapiens
aaacacacatgctcctgacagctccgccactatcagggcaacttttctctctcgctcccccttttgctgctccattttaattttgtctcagaagttttacrgctgcagcatcccttaactcagctcacctactaatccattgctaaacctggggtgggtcagctgccgtgcgtttttgagcacaggtttgaaaatagccca

SEQ ID NO: 419566 - DNA, 201 bp, Homo sapiens
acagtcaggcatctaagatgcttttcagctataattgtgtctttgctcaaggctactgtagttatactacattctattccattgtccatcaattccacccrtttcaaggagctgaagctgatgctaaccatagaatagtccagaatatcctttatgttttttctctttgctataaatgcagcgttattttatagactggag

SEQ ID NO: 419567 - DNA, 201 bp, Homo sapiens
tgtccatcaattccacccatttcaaggagctgaagctgatgctaaccatagaatagtccagaatatcctttatgttttttctctttgctataaatgcagcrttattttatagactggagatactgcttcataagatcacatagtgccactcatttataagatgatagtacaataatcagaagtatgtgttaaaaatatatt

SEQ ID NO: 419568 - DNA, 201 bp, Homo sapiens
atatcctttatgttttttctctttgctataaatgcagcgttattttatagactggagatactgcttcataagatcacatagtgccactcatttataagatkatagtacaataatcagaagtatgtgttaaaaatatatttagctggctgtcctctttaagtccctgctttttgatatgattatttttccaaaaagaaattg

SEQ ID NO: 419569 - DNA, 201 bp, Homo sapiens
gagcagggaggagggcctgggtgggaaggaggaagtgttggggtcaggatggtattggcttggggagcttctggaaaggcatggtccactgggccgggacscactcctgtttctgcctgtgcattttcactccagccaaacgccagactcaccgaggaggagggccaggggaaaggttaattgtgccctgtgccgcctgat

SEQ ID NO: 419570 - DNA, 201 bp, Homo sapiens
tctatccaatacatactcattttgagtacttgcttatttcttgacagttcaaggacaaagtaaaagcagctaagaaggtccttaaggtaatggagctcacrgtgtagcaggagtattttgaagactgaagtggttatcaatattaacttcatatgaaatattttattatgcatcctgtggatgtaaaaatttcattgagca

SEQ ID NO: 419571 - DNA, 201 bp, Homo sapiens
ctcacccctatagtaggtgggggatgcgtgacctcctccctacctcacccctgcagtaggtgtgttgtgtgggggtgacttcctcctcctcaactcacccrtgcagtaggtgggggacgtatgacctcctccctgcctcactcctgcagtaggtaggggtgagggtatgacttcctcctcctcacctcacccctgcagtag

SEQ ID NO: 419572 - DNA, 201 bp, Homo sapiens
gtccagttccgcgatgtacccggaggagcaggacctgagtgttgacaaacaactctaaggactactaccccgccaagtaggaaaaggaaaggagagatggraaagggtggaggatttgggacagtaggtaagagaactgtatctcttaagagacttgctgtctaactctgccatagagaccttccaaaaatgctttgactc

SEQ ID NO: 419573 - DNA, 201 bp, Homo sapiens
gagtgatcgatgctgtcccgttggacaaggtttactagaagggtgacagaccacagcccatgatacacatgtggtgtgggaggagacttgcagcccggtgmtagggcctcaccctgtcctcacacttagctgtcgaagtcaactcatctgttctagagttctctttccaagttaggaatagatcaaacagtagctctttga

SEQ ID NO: 419574 - DNA, 201 bp, Homo sapiens
attgagcccggataatatgatctagctgccttccttctccgctcgcttcctgtaaagaatgtatggaagtcagttatgtggcgtgattctaacatctgtcytaccccataatggtaatttgtataagtaatggaaacaggttaaatacttccattccaatgttgccagcagggatgaaaatgaacatttcaatgaaatcat

SEQ ID NO: 419575 - DNA, 201 bp, Homo sapiens
ccaaccactcagctgttatgtatttttatttcttcaatgctgaagaccctcatggttatagttgctgtgacttagacatgctgttttaagtgaaagggagrgacaggcctgaaataaaaagttattaaaaatcagtcttttcaggtgtatgcagaatagatctgtaccagagaatgtcgctggctgggagcacaccgggcc

SEQ ID NO: 419576 - DNA, 201 bp, Homo sapiens
atgtgtgagctattttttgtggctgcttttgaaagcatattggtgatggagttgaaccaagacagtcgcccagggtggtgcccaccagtgaggcttacgtktcaacagagagcagggaggagggcctgggtgggaaggaggaagtgttggggtcaggatggtattggcttggggagcttctggaaaggcatggtccactgg

SEQ ID NO: 419577 - DNA, 201 bp, Homo sapiens
ggtgatggctggcagcatgtagtcagagaacgagccagtacttaatctgcgttacgtttctttacactcatttcagccatttgaagaggtatgccatgcayaagtctcctctctggatttctaaatgtttctcattggggcgagccctaccctggctgatgaaagtccttttttcgtttcagggggtcagatagtaccaag

SEQ ID NO: 419578 - DNA, 201 bp, Homo sapiens
gagggggcatagaccgattcatctccactccctttggtgatgggagccctaatgagaatgctcggatgtatagtttatcagatagaagaggaagagcacgyaggtctgagagatgagaatcctgcagaactgcgccggcacgcgaggcgccttggtctcctttgcagacctttagctaataacgtgctcttttcattctaa

SEQ ID NO: 419579 - DNA, 201 bp, Homo sapiens
aggcagccgatcagaagaaataggagaaaatatccttagactaggaattgtttatactaaatttttgaaaatgcaagtaatgactagcataagggccctgygtatcacctcgttaagtgggcatccctccagcctctccttcggatagatcaaggaggaatactgtgaagaatgcttgaggcttgaacccagactaggact

SEQ ID NO: 419580 - DNA, 201 bp, Homo sapiens
tcaaaaatagattccatactagaaggttctgtgtaagtttaattacagggtttattatctctactttgattccaaacctgtgggattcttgtgttcattaratgagccattgtttagctcttcccccctcactcataaaaagcattaacgtggattcctagcaaaataaggctgtttgctttcatctggaattacttccat

SEQ ID NO: 419581 - DNA, 201 bp, Homo sapiens
tcctgtttctgcctgtgcattttcactccagccaaacgccagactcaccgaggaggagggccaggggaaaggttaattgtgccctgtgccgcctgatcatrtatagtaaatgctatcaacagaaagttcctgatcaatggcgcctgctttctaggcatgctttagctgtggtggtggagaggcctgggcaggggtttgcca

SEQ ID NO: 419582 - DNA, 201 bp, Homo sapiens
aggctgccctgttctgctgggagtgtgtgtgctggagtctctgtgcttatactctgtgtatgtgtgtctgtgtgtttgtgtttgtgggtgtgtggtggggsagggttggaaggggaggggggctggtcagttttattcattcattcattcactaagagatttaggcgccgcctgcgtatgctttctgaatatttaagttta

SEQ ID NO: 419583 - DNA, 201 bp, Homo sapiens
ataaaactaaaacattaaggtgaaatcacaactgtgatgttcttttcacttcatatttcctaggaaggcctattcgctaagccgcttgtttaaccttttcrtgttttccaggctctcgtttctggatttgcttttgttgttcatccaccacactgctgcagcagtaagcagttttcttagatgatagacatttttttcttt

SEQ ID NO: 419584 - DNA, 201 bp, Homo sapiens
gtgtgtttgtgtttgtgggtgtgtggtgggggagggttggaaggggaggggggctggtcagttttattcattcattcattcactaagagatttaggcgccrcctgcgtatgctttctgaatatttaagtttaattttgttaattattatttattcatacagggggatgaaaatagtaagaaacagttttgaatgaagaccg

SEQ ID NO: 419585 - DNA, 201 bp, Homo sapiens
cttgctagctgcgattttaaaaggtgtgttctagtatatggtaaatataggtcaagtacttacatgcttataaattccagtttaaagcaggcacgaaggcrtggatctataggagcgagtgatgggcacaggctgactcgagttttagaaaatttggttataaaaaatatcctcagtttttagttaaaagtaaagtgcatc

SEQ ID NO: 419586 - DNA, 201 bp, Homo sapiens
tcagagcattactgtaagtccttcaaccttcacagaattaaccctccccacctcagcccgctgcaacagctccgaggtcctgcctgggaaggttctgagacccaaaggagtgattgttccaagcccaggaacacacaagcccccggctctgtagggacaccccatggagtcccggctttccgtgcagaaagcatgacccag

SEQ ID NO: 419587 - DNA, 201 bp, Homo sapiens
gaatcatggcatctatagtgttggccgaggtcaaatcattacactaaatgtattgtaaccattattaatgcacagggtctcctgccatctttgtgatgtargactgccgtttcctgattaaaagctgtttggtgatgagaaattcagcagctcctgtccgtcctggagtgactgacaggcacccagagctgccgtccctgc

SEQ ID NO: 419588 - DNA, 201 bp, Homo sapiens
ggattgtgggttccctgcgcacctactccctgcggccgccctgggccctctccttaactccttcttttcctttccctgctgtctttctttccatccacttmcttatctcttgctgccatcttctctggcaattttcagcgatactttagctttagaagtgttcctcgtaaagtttttgcacagttttaaaagttataatat

SEQ ID NO: 419589 - DNA, 201 bp, Homo sapiens
tgcgtctcatttatgaattagactgaagccttctttctttcatttatttatttatttatttatttatttatttatttttgagacggggtttcactcttgtygcccaggctggagtgcagtggcgtgatctcgcctctctgcaacctccgcctcctgggttcaagcgattctcctgcctcagcctcccgagtagctgggatt

SEQ ID NO: 419590 - DNA, 201 bp, Homo sapiens
cccgctggcgatgctgtacaagatcagcaacagcatgctggacaagccggtgtaccccgccacccctgtgaagcaggccgatgccatcgaccgctactatyatgaaaacagcgaccagcccattgacttaaccaagtccaagaacaagccgctggtgtccagcgtggctgattcggtggcatcacctctgcgggagagcgc

SEQ ID NO: 419591 - DNA, 201 bp, Homo sapiens
cgatgctgtacaagatcagcaacagcatgctggacaagccggtgtaccccgccacccctgtgaagcaggccgatgccatcgaccgctactattatgaaaayagcgaccagcccattgacttaaccaagtccaagaacaagccgctggtgtccagcgtggctgattcggtggcatcacctctgcgggagagcgcactcatgg

SEQ ID NO: 419592 - DNA, 201 bp, Homo sapiens
ttcttcagaggtttggcatatggaataagaaccagagatgggattcaaggagatggaacgctgctcattgcttccagagcgtaaacagtggtggggctgcrccagtgggtcctgaaacacatcacgggcaataggcttcgagtgtctcgaattaggaggagacattaggaggagagaggataaaggagagggaaggagttc

SEQ ID NO: 419593 - DNA, 201 bp, Homo sapiens
cagcttccttaagaagaagtgggttcgaagggggttattaacaatataaatcgcccttcctgtcagtcaaatgctcagaaatgcaggacatgatactggcygttttggtgacagaatataaatcaccaaagattaaattattagataatttggaaacttaacagtttgcattttgcacttccaattgttttgctgacttgc

SEQ ID NO: 419594 - DNA, 201 bp, Homo sapiens
tgaggaggacagggggaacgaaattcctaaagaacctggacacagggcatcctgttttcttttgcaacgattgtgcctctcagttcagaactgcttctacrtacataagtcatttggagacacacttgggcttcagcctgaaggatctctccaagctgccactcaatcagattcaagaacagcagaatgtttcgaaagtcc

SEQ ID NO: 419595 - DNA, 201 bp, Homo sapiens
gggattacaggcacccaccaccacacccggctaatttttgtatttttagtagagacagggtttcaccatgttggccaggctggtctctaactcctgacttsggtgatcctcccgctttggcctcccaaagtgctgggattgatgataggtgtgttccactatgcctggcccactctgcgattttagatcttcacagggctt

SEQ ID NO: 419596 - DNA, 201 bp, Homo sapiens
atctaataagtcataataaacatagttctggaggatgggatagtggcgatgctctgggaataataactgctttgctagggcttctgcatggttatttgaargggtttttttttccccccattaaattttgcatcttttgtatatgagatggtcttcattattgtgtttttatggtatttggttggataccaactcaaatta

SEQ ID NO: 419597 - DNA, 201 bp, Homo sapiens
actcaccatggaaacacacatgctcctgacagctccgccactatcagggcaacttttctctctcgctcccccttttgctgctccattttaattttgtctcrgaagttttacagctgcagcatcccttaactcagctcacctactaatccattgctaaacctggggtgggtcagctgccgtgcgtttttgagcacaggtttg

SEQ ID NO: 419598 - DNA, 201 bp, Homo sapiens
gtttttctcttgccagtgactgcaagtatttgtaggagaggctgagtgtccttgctcacatcaagctcaagggtgagagatgtttttggaaacagtcctcrttctgaataactcaccatgcgtctcatttatgaattagactgaagccttctttctttcatttatttatttatttatttatttatttatttatttttgaga

SEQ ID NO: 419599 - DNA, 201 bp, Homo sapiens
ggacacgcagcttcagcaaaggcttgcactcagggttgtcgggagcacagcgtctgctggaagggagaatgtcacggaccaggagtggagcgaggtcatcyggggacgttggaaggctctggccacagctggtcatcagtgcggggggccagtttggatgcggggcctgaggaccaggaggctttgaggatggcgctgctt

SEQ ID NO: 419600 - DNA, 201 bp, Homo sapiens
ctcttgccagtgactgcaagtatttgtaggagaggctgagtgtccttgctcacatcaagctcaagggtgagagatgtttttggaaacagtcctcattctgmataactcaccatgcgtctcatttatgaattagactgaagccttctttctttcatttatttatttatttatttatttatttatttatttttgagacggggt

SEQ ID NO: 419601 - DNA, 201 bp, Homo sapiens
aatattatatggaaaaattggaaaaacacagaaaaataaacaaaccaaaaaaagcattattcaagatcctcctaccccaatgtagcttactgtgaacattyttatctgaattctttcagggtctttttctttcttgtttttttattgctctacagatatttttcaaacaaagatgggatgatggtagtatttattggcttg

SEQ ID NO: 419602 - DNA, 201 bp, Homo sapiens
aaataatagagtaaatcaactctctccaagctcttagggtaaaaatattagaaggagtgttttatgtttaaacatgagcgactctttagctgttgcagtayagaatagaatctgaataagtttgagtatcacattcagtaatgtgcacgtgttcaagtctttatacgtgctttttctggggaagcacttaaagcagagatt

SEQ ID NO: 419603 - DNA, 201 bp, Homo sapiens
gggatgatggtagtatttattggcttgctttttcactcactaaatggtgaacagctttttacacaattctttatacattttcattattctttctttagggttttttttttttttttttgacattgcttggtcaagctttggcacctactgcaaacctgttttcaaaatatatccatctatctttccatttctagtgcatga

SEQ ID NO: 419604 - DNA, 201 bp, Homo sapiens
ggatgatggtagtatttattggcttgctttttcactcactaaatggtgaacagctttttacacaattctttatacattttcattattctttctttagggttttttttttttttttttgacattgcttggtcaagctttggcacctactgcaaacctgttttcaaaatatatccatctatctttccatttctagtgcatgaa

SEQ ID NO: 419605 - DNA, 201 bp, Homo sapiens
gatgatggtagtatttattggcttgctttttcactcactaaatggtgaacagctttttacacaattctttatacattttcattattctttctttagggttttttttttttttttttgacattgcttggtcaagctttggcacctactgcaaacctgttttcaaaatatatccatctatctttccatttctagtgcatgaaa

SEQ ID NO: 419606 - DNA, 201 bp, Homo sapiens
tttgacattgtgtcagctggtcctcctccccagcgggggcgcccgtgagctcctctgatgcttctggttggtcccccacttagttatgtgcctgtgactgmgtggacactccctgcacgagggtttcctcttctcctgtaccataaggtacttcaacaaaaggatcccattgcacaatgttgcaaccattacaagacacaa

SEQ ID NO: 419607 - DNA, 201 bp, Homo sapiens
aagagacggagatcaaagaggcgcagagctaccagaactccccagtcagctctgcgactaaccaggacgccggctacgggtcgcccttcagtgagagcagygaccagctagcccatttcaaaggctcttcctctcgagaagagaaggaggatccgcagtgtcccgacagcgtctcgtacccccaggacagcctggcacaga

SEQ ID NO: 419608 - DNA, 201 bp, Homo sapiens
aggaacagggcttatggaaaaaatagagctggggccaggccgctcaaactccatgtagcttggaaacagtataaaaaaatacatgatacatttctaatacmtaaagcaatattatggtaagtatggggttttatattaggaaaaagcttgttggaaggggatgaggttgcttgactagctagatcggagcaggaaggagca

SEQ ID NO: 419609 - DNA, 201 bp, Homo sapiens
ctatgccctcgaggtgcgtccgcgctgcagtgcgtgtcagaactccctttccaagcctgagtgtggacgggccacaccgcgttcatccctccaactgtcastggaccttttggtgccttccagcttttggctgcagtcaatgaggctgctctgggccttggtgaacaaccgtggcttttgccgtctggcagccccatgcgg

SEQ ID NO: 419610 - DNA, 201 bp, Homo sapiens
caggccgcctgacgcccaagtcctccacgccctccacagtttcagagaagtccgatgctgatggcagcagctttgaggaggcgttggacgagctgtcaccrgtccacaagaggaagggccggcagtccaactggaacccgcagcaccttctcatcctgcaggcccagttcgcctcgagcttgcgggagaccacagagggca

SEQ ID NO: 419611 - DNA, 201 bp, Homo sapiens
attacaagacaaataagaacaaaggagggtgtggaaaattacttgactggaaactcacagatactcttccaacgctgtattttacccaagttccctatgcragctgcatgggatggattatagaagtaagtgccatcagtggatgggaggtgaaccacttgatttataatatttaaataagccagttaaaaaaaacctgtc

SEQ ID NO: 419612 - DNA, 201 bp, Homo sapiens
ccggctacgggtcgcccttcagtgagagcagcgaccagctagcccatttcaaaggctcttcctctcgagaagagaaggaggatccgcagtgtcccgacagygtctcgtacccccaggacagcctggcacagatcaaagctgtgtatgcaaacttgttctccgagtcctgctggtccagcttagctctggatttaaagaagt

SEQ ID NO: 419613 - DNA, 201 bp, Homo sapiens
tgggatccagagtccggagtgggctgggggtctgctcctgcagtcccggcatgtttctgggattagaagagctatgctatctctcccctgtaaaagcgatyggtagccttgttgtgagcttgcagttcagatggcaccataggactggctagctggggcctggctctcctgtgccatctgggtggctacttgctgcatcgc

SEQ ID NO: 419614 - DNA, 201 bp, Homo sapiens
attgccacgacttccctcctccccctccccaaaaaatcagcgagcaaaccatgcgagttacagtgagactgctctgtgcccattcatttccctcctgccayttgctggttttctgatctggtttatttaggtttgacatcagccaaatggtgtagcgcgatgtctctgacagatattcttactgatttaaagggaggcaca

SEQ ID NO: 419615 - DNA, 201 bp, Homo sapiens
attcttactgatttaaagggaggcacaactcaggaaagatggatcttctgagacaggatttcagagtggctgtttttcccttttccaccccattttcctcyctttatgattccagttgatgtgttgttcctattcacagtcaaatcattagagccttcagaacttgggaagaactgtgtttgattgacgacagtgaggctt

SEQ ID NO: 419616 - DNA, 201 bp, Homo sapiens
cacccacacatgcatgcgcgtgaaggccggcggcgcctcctcctgggctgctggtgcttgctggttcatacggttccttgcggtctgtagggtgctgtgcrtgtccccccgatggcaggacacactgtacacgctcacactgtcacattctgcaccatcgtgctaggctcaggaagggtgggggagtgatggcaaagctgt

SEQ ID NO: 419617 - DNA, 201 bp, Homo sapiens
tgcaggtcttggggatgactagcttggtttctggagtaagagaacatttccaccatgtgttaacatgcactccagtagtcagcaaacagccacgtgctctytcaggtgcatagaagtgtcacttgctttttgctgttctcactttattttaacttcttttaattttttaagattctcatataatgtcctctttttcttcct

SEQ ID NO: 419618 - DNA, 201 bp, Homo sapiens
tacttacaggtaataacttatatcttctaaccaatcattttccccctaacatagctggggatattttacaagccaattgtcgcattaaaaactgtaactctttttgattttatatgtgatacaatatctaataatactcccaggaaaatgccagttgtattttttagtacctgtgtgattttcttgattgctaaaatatac

SEQ ID NO: 419619 - DNA, 201 bp, Homo sapiens
acttacaggtaataacttatatcttctaaccaatcattttccccctaacatagctggggatattttacaagccaattgtcgcattaaaaactgtaactctttttgattttatatgtgatacaatatctaataatactcccaggaaaatgccagttgtattttttagtacctgtgtgattttcttgattgctaaaatatacg

SEQ ID NO: 419620 - DNA, 201 bp, Homo sapiens
catttctcaatccatgggacgcgcgtccctttttcctggctgtggatctcggccaggaggagcatggtggggtgtatgggcttcccccgggagtgaaactrtatcacttccgctcacgtttcattggccacatctcctcccacggagacagagaagtccagttccgcgatgtacccggaggagcaggacctgagtgttgac

SEQ ID NO: 419621 - DNA, 201 bp, Homo sapiens
tttaaacctgagaaaatagtatttattctctataaaatacgcttgcattaagcatatatctggcctcaagagtggtcctgttataacaaaagcaaatgcarcgttcactctgggatggcagcagggcacttctctgtttccaagtgccacacagtctctggtggccatgcctccccttatgtagtccctcttctcagcgtc

SEQ ID NO: 419622 - DNA, 201 bp, Homo sapiens
tacatttgcattgctgtgtagccatcaccaccccatccattcccagaactttttcatcttctcaaactaaactgaaactcggtacccattgaacagtaccyctcgttcccagcccccctggctcccagcagccaccgttctaccttctgtctctgtgatgaagcctgagtcgacgtggctggaaacagattccgacagggc

SEQ ID NO: 419623 - DNA, 201 bp, Homo sapiens
caattgttttgctgacttgcacttttcttggctgtccagggttttattaaccgtctttaagacatctatcacctccttcctcttcattttccaatgggcarattttcccaggaaggagagttgcagcactgatgcctgcagtcgctgctccagaaagattgctgtattttcattgacatgccgtgcattaccataattggc

SEQ ID NO: 419624 - DNA, 201 bp, Homo sapiens
ttctaagggattctgagcagagtgcaaatcattcggggtcattcatagttcatgtacccacagatggcaaaggttttgaaagacttcagtttaaacttgtaaaaaaaaaaaaaaaaaagatcctcactttttttttttttaaaggaagggaaaataccccaaaacaaaacatagatttttcttattggaacgctttcatgt

SEQ ID NO: 419625 - DNA, 201 bp, Homo sapiens
atctccagaactttctcgtcttcccagatggaaactctgtccccatcccctccttctcctggcacacgccaccactctgctttctttttctatgaatgtgrcaactctagggccctcacgtgaggtgagccatgcagtacatgtcctcttgtgtctggctgccttcaccgagcactatgccctcgaggtgcgtccgcgctg

SEQ ID NO: 419626 - DNA, 201 bp, Homo sapiens
ttcttattggaacgctttcatgttctttcaacctaatagatgttttacacactacggtgcttgtgcattattaaaagagacataaatttatgttttatgaygtctgtcttctttaattattacctttgatgtctattggtgactaaagagagcttaacaggatttctttctcttcttaaatttcgcatcgtgaaacccagc

SEQ ID NO: 419627 - DNA, 201 bp, Homo sapiens
acatgttccaagtgtcctgtgttttgaagtgagatttcaaaaatagattccatactagaaggttctgtgtaagtttaattacagggtttattatctctacyttgattccaaacctgtgggattcttgtgttcattagatgagccattgtttagctcttcccccctcactcataaaaagcattaacgtggattcctagcaaa

SEQ ID NO: 419628 - DNA, 201 bp, Homo sapiens
ccaaagtgtttttattataacatcctgactgtttttttcttaaagctgcatgttggcctgcctcactgttccatccgtaactgatgagtttttcttgagartatcttagtgtcaaataattgattgtttggtagccaggaagttggtggatgacagatgtagaatagcaatacttcacagtgatgagagaggaagggaaaa

SEQ ID NO: 419629 - DNA, 201 bp, Homo sapiens
acatatgtttgcagtgtacaaatgtcttgcatattcaaagcaaataagtcctgatgggggaggaaaaagtatttggatgtagccgttatgtttaattttcytcacacagtcagtagatagtctgtgtctgcaaaggattggtcctttcttgctccccactcacccaactctgtggttctagaaccttctattaattcccat

SEQ ID NO: 419630 - DNA, 201 bp, Homo sapiens
acgttgatattatacagtccccatagcctgtagtgcagtattaactcaatttgctggtgcaggtgacaaatggactttgctacctgactaatcatgtcacmgagacaatgctgcttaatgacctccgtaatcctggctttgaactgtgcaatcaagccaagacagaaaaccaaccactcagctgttatgtatttttatttc

SEQ ID NO: 419631 - DNA, 201 bp, Homo sapiens
ccaactggaacccgcagcaccttctcatcctgcaggcccagttcgcctcgagcttgcgggagaccacagagggcaagtacatcatgtcggacttgggcccrcaggagagggtgcacatctcgaagtttactgggctctccatgaccaccatcagccactggctggccaatgtgaagtaccagttgaggaggacagggggaa

SEQ ID NO: 419632 - DNA, 201 bp, Homo sapiens
acctggcgcccccctgctcccctgagccagcaggaatggccgcagaggtggccctgagtgagtcagccaaggatcagaaagcagcgaacccgtacgtcacrcccaataaccgctatggctaccagaatggcgccagctacacctggcagtttgaggcccgcaaggcgcagatcctcaagtgcatggagtgtggcagctccc

SEQ ID NO: 419633 - DNA, 201 bp, Homo sapiens
ctgtcacattctgcaccatcgtgctaggctcaggaagggtgggggagtgatggcaaagctgttttgacacaaaaagaaatagcaaaaatgatgatctggartctttgttttatttgatggggaaaaatgtcatttatttctatacgtaattgtaaaagaagaatttcatactgcagttaccattttcaagcttactcattc

SEQ ID NO: 419634 - DNA, 201 bp, Homo sapiens
cagtacttaatctgcgttacgtttctttacactcatttcagccatttgaagaggtatgccatgcacaagtctcctctctggatttctaaatgtttctcatyggggcgagccctaccctggctgatgaaagtccttttttcgtttcagggggtcagatagtaccaagttggaacctggtgttggctaatattgggtttgtag

SEQ ID NO: 419635 - DNA, 201 bp, Homo sapiens
actttattttaacttcttttaattttttaagattctcatataatgtcctctttttcttcctgacaccactgaaaatcaaagtttttcatcttttacatacrgtttaagctctgatttgtgctacttgttaagtacattgttgacaaactctagacaaaagattaacacctaaagtgcttattgggaacagcaagagggtct

SEQ ID NO: 419636 - DNA, 201 bp, Homo sapiens
tcttgaacatatctccttgagtgagattaaagtcccagtcctttgtttttttaagagactggatctggctctgtcgtccaggctggaatgcagcggcacartcatcgctcactgcagccttgaactcctgtgctcaaggaatcctcccacatcagcctcccatgtagctgggaccgcagatgtgtcctaccacactcagct

SEQ ID NO: 419637 - DNA, 201 bp, Homo sapiens
gatgaggaagggccacactctgcctgggtctgctctctgtgcatttttttgtttcccagcgtattctaactttcatcaaaaccacctgctctctccataaygaaggtgacgttactttatgagtgatcaattataactttggaagaaagtctgtttcgtaagattctacaatgaatcgaagctgtacattcatcacttagg

SEQ ID NO: 419638 - DNA, 201 bp, Homo sapiens
ctcatcgtgtgccaaaacaaaaaacaaaaaacccacacataattctgcccatgtttcagaatcttggctaggacaaggcagagaaagtgagagtttaaccwattaataagagcaagtgcttgaactaatacaactttctgtgagaaaatgtttttaaggattattgattatctgaggatattttgtaagttactaatttag

SEQ ID NO: 419639 - DNA, 201 bp, Homo sapiens
gcgagccctaccctggctgatgaaagtccttttttcgtttcagggggtcagatagtaccaagttggaacctggtgttggctaatattgggtttgtagaccyggagtcatcagactgcttcagggtaggatttatctttccccagacgtgggggtaaaaactgaaatcggctgatgttttgagtgcaggtcattgggtatgc

SEQ ID NO: 419640 - DNA, 201 bp, Homo sapiens
tttaaaaacggcatcttgtaaagcaattatgagaattcactgataatagtaaaaataaacctaattattaagataaagaattttattttctgtcatgatartgttgatataacttttgattcagacaccaaatattgttactaataggatttaagtaaagtcaggtgtcatgttaccctctgtttggtttccagtcaagta

SEQ ID NO: 419641 - DNA, 201 bp, Homo sapiens
acccaaaggagtgattgttccaagcccaggaacacacaagcccccggctctgtagggacaccccatggagtcccggctttccgtgcagaaagcatgacccwggtgcccctgcatctccccactttctagcaggctttaaggattcaagccctgagtaatactcagtgagacaaggtcagaggcataaagaaccagcagcaa

SEQ ID NO: 419642 - DNA, 201 bp, Homo sapiens
aatagataatcattgattgtgtgaattcacatttgcaaagaacacttgcgataatcattttcttttaggaagacaacaacttgacaacctgtaagggattytgaatcgaataatagaactagtttgtcccctctcccctcctccaagggttttttttttctactttctgttttttattttatagaccaaatggagcacttg

SEQ ID NO: 419643 - DNA, 201 bp, Homo sapiens
cacacccggctaatttttgtatttttagtagagacagggtttcaccatgttggccaggctggtctctaactcctgacttgggtgatcctcccgctttggcstcccaaagtgctgggattgatgataggtgtgttccactatgcctggcccactctgcgattttagatcttcacagggcttcaaaaattatccctaggaagg

SEQ ID NO: 419644 - DNA, 201 bp, Homo sapiens
ctaactcctgacttgggtgatcctcccgctttggcctcccaaagtgctgggattgatgataggtgtgttccactatgcctggcccactctgcgattttagrtcttcacagggcttcaaaaattatccctaggaaggaaaataagtgcatgtgatgccttatttatttatttttgagacagaatctcgctttgtcacccagg

SEQ ID NO: 419645 - DNA, 201 bp, Homo sapiens
agtcacattgtgaggttctgggaggatatgaattttagaggacactattcaacccatgagagataccaaaggacaaaattacattatgtcctgtcatttgkgcagcagcctttattgaggactggaggtagagaagtaacccactctgaatcacagatgtgctcaggatactttgtcaagaaaacagccattaatttggtt

SEQ ID NO: 419646 - DNA, 201 bp, Homo sapiens
ccctctaactgccacgggcaactgtgactcatgatggaactcccaccagcgaggtgtagacgtgtagtagagtcgtcgtaggcagctcctgtagccacctktgcggggtacgttggaagctctaagatgactaagaattggcaaactgggacatgaaatcacagtgatctgggaaaagcgtcgacatggatgatatctggt

SEQ ID NO: 419647 - DNA, 201 bp, Homo sapiens
aagagcacgtggaggatgacgggctgtctttggacattcaggaaagtgagtacatgtgcaatgaagagacggagatcaaagaggcgcagagctaccagaaytccccagtcagctctgcgactaaccaggacgccggctacgggtcgcccttcagtgagagcagcgaccagctagcccatttcaaaggctcttcctctcgag

SEQ ID NO: 419648 - DNA, 201 bp, Homo sapiens
attagtggaccttgctgtgtgtgacaggtatagcctgggggtgggttggaggggggctggcttcccaaagtgatttggcacattcctccctgatacagacktagcaaaatccaagcactccttccttgcctagtacggaggccaaggtgctgggttgctcctgtttggaggcacctgggttctgggttggaatttctccta

SEQ ID NO: 419649 - DNA, 201 bp, Homo sapiens
attcccaaagtgttacttttactgctatactttaaaatttcttcatttgccactttttaggtttgtggtcccgggcaagtttaatttcttttcaggattcycatttgtataatgaggacaacagctgttggttcaggattgtgaagcttcaatgagataattgtttagcatgtttttattccatcatgaacaccatttgta

SEQ ID NO: 419650 - DNA, 201 bp, Homo sapiens
ggggttttctaaatagacagtcatattatctgaaaacagaaacaatttgacttcctctcttcctatttgaataccctctatttctttctcttgcctgattkcccgggccagaacttccaatactatgttgaataggagtggtgagagagggcatccttgtcttgtgccagatttcaaatggaatgcctccagttttttccc

SEQ ID NO: 419651 - DNA, 201 bp, Homo sapiens
gtttacaatgaggatattttagggaaagaatactaatctaggtagtgaattgccataagtataaaaactgttgacttggaagaaaagtggttatgttgtcyttaatggtttctgtttaaggcttggagagaagtgcttttcttaatatgtactgcaccaggtaaaggtacaaaaatgtattcttgagtcttgagaagaaat

SEQ ID NO: 419652 - DNA, 201 bp, Homo sapiens
cttttttataaaattaatctacccaagataacacttcatgaaaacctcttttaaggttaaagattaaaggttaagattaagattaaagatctgcccacgtyggcatagaaacaggtggggttttctgacagggtcttgctctgtcacccaggctggagtgcagtggcatgatcagagctcattgcagcctcgacttccctt

SEQ ID NO: 419653 - DNA, 201 bp, Homo sapiens
gcctaggctggtctcgaggtcctgcactcaagcgatccacctatctcggcctctcaaagtgcaggattacaggcatgagccactgcgcccagcccagaaakagttctaaaatggagaaatatcctcaaatgctgtgttttgttatcatgctttcataatgcacttggtagaaatctcaaagatttcatgtagatcttaaaa

SEQ ID NO: 419654 - DNA, 201 bp, Homo sapiens
atcatattatctaaaattaatttaaaattattgaaagactatcttgagttgtataaagatatttgagcaggtgtcttttacaaaacagcagaattctttaytgaagctataaaataaggaaaagtgcataaatttatagttcaacaaactgtaaagataattcttgtaaaaaattttattccactaaaattactcatgatt

SEQ ID NO: 419655 - DNA, 201 bp, Homo sapiens
aatctagatgaagattgcatataaacatatgcattcatagcaccgccactcaagtcaagatatggtattccttactaattgcagtcccctacctcggtctmttattctgacatgtgtggtttgaaataatgctttttaaactctttttcatcataaaatagatcagccttaaacatttggaaaatatggcagttcttttta

SEQ ID NO: 419656 - DNA, 201 bp, Homo sapiens
taaactctttttcatcataaaatagatcagccttaaacatttggaaaatatggcagttctttttatggaaaactcttgcataattaaaaatgattttaacrgagaatttaatgataaagaaaaatgcttatgataaaatgtaggaggaaacaggttatataaatgtataatgatatctcagctatataaaaatttaataga

SEQ ID NO: 419657 - DNA, 201 bp, Homo sapiens
tggaatataatccctcttctcatactgtaacttaatgtcaggataagataaaacacatgtaaaaatttcataaatagtattaaaaattaccagtaacttgwgtgtagcagagaaattagaaaagtttatcctactaaaaaaacaattactcataattttcctttttaaagataaccactgttaccatcttggtatatagtc

SEQ ID NO: 419658 - DNA, 201 bp, Homo sapiens
cgtgatccgcctgcctcggcctcccaaagtgctgggattatgggcgtgagccactgtgcccagccaaggttaaaagatttgaattttaatgataaaattarggatcttgaagtaggactgtcaagaaaggaacttgtgattgtgggtaattgacctgtgttgatgacagcacaatgttactgggcagagtaggtgagaaaa

SEQ ID NO: 419659 - DNA, 201 bp, Homo sapiens
ttggatctaaatcacaaatattgggaaaggtaagttttaattgcttatttattttctctttacatcaatgaagaaaaaattatcatttttcatcagtgacyccagtatatatatagctgtcttaatttttatttaaaataggtgacttctaaaaacattttctaatccagtgacctacccccaaaagtattttcccctttc

SEQ ID NO: 419660 - DNA, 201 bp, Homo sapiens
tgcacaaatctatatagacgttgcctataaacatcaaggttttgagacagagaaaagtccccagagaagtggaaggtattactatgtattacagtatttgrgggggaattagatctttgaggatctggttccagtaatacagcaccaaaagaaactatttgtgtaataataacactttggcttttcagattccacttttga

SEQ ID NO: 419661 - DNA, 201 bp, Homo sapiens
tcccatgatggtcaaggaataattttggaggagacgtttaactttaaaaaaaaaaatacaatcattagtttcatgtttgtttaaaagaaactttgttttcstaaccaacatttgagctccattcatctcttgatgcagggagagatgttattgtaaatgtctagttctttatgttactttacagtagggtttttaaaagac

SEQ ID NO: 419662 - DNA, 201 bp, Homo sapiens
agggaattgtggggtcagagcccccatacagagtccctactggggcactgcctagtggagctgagagaagagggccaccaccctccaggccccagaatggsagatctgacaacagcttgtactgtgtgcctggaaaatccacagacactcaatgccagcccgtgaaagcagctgggagggagggtttaccttgcaaagcca

SEQ ID NO: 419663 - DNA, 201 bp, Homo sapiens
tgcccttcaagcagtatgggagccagctaacagtgtggaggtcactggcaccaagctgttctgatgagagtagaacacctgggaaaattttcttctgtccrtttcagatgggtggtgtttttccaatgacagaagaaaagtatgtaaaaaatacttaaacccttccctacacttaataggtatggtagtagactcctttgg

SEQ ID NO: 419664 - DNA, 201 bp, Homo sapiens
caagtcttctaagagtctataatcctaataggaagataaagcagacatttttacccccatctttaaattgcaaatgatgtaactgagtcatggagatagtraatacttagtgcagtgccacaaagtgagcaaattgtaccagcaaaacatgtccaagtttgctgattttaggaactctttccccatccccacaccaccaat

SEQ ID NO: 419665 - DNA, 201 bp, Homo sapiens
tgattagcacccgaagagattcaaaggaagcagttgttccgtccccaacatatttccgtttcaaaccacccacttccggtttttcagccggttccggtccygcccttcacttccggtcgctttcggtctctcagcggccggtttctgcgtccgctgccgcaggttccaccgcgctccaggtgaggggttgcggggcaccct

SEQ ID NO: 419666 - DNA, 201 bp, Homo sapiens
tcattgttcttgcttctcagtaagtgacaatgattaaatatcattcatttttcagtgttaactgtgtaaaattaataactaatgaccaaaaaaaaaaaaaactaatgaccaatttgcattttctccaaatcaaaagaatatactaatactttgctaagtatgatgaaatcagtccttacatgtgtgctttaggaatatgtg

SEQ ID NO: 419667 - DNA, 201 bp, Homo sapiens
ggtgatttgggtactgttaaaggcactcagttttataagggaagcagagcatagaagtttggaaaattagcagcctgactatgcagtagaaaagaaaaacscattttctgtggagaaattcaagctggctgcagaaatctgcgtaagtatcaaggagcctaatgttaatcccctagaccgtggggaaaatgtctccaggct

SEQ ID NO: 419668 - DNA, 201 bp, Homo sapiens
aggtgaggaggactgaccttgttaaaacacagattcctaggtcccttctctccaccccaattacatttctaccaaattaccaagtgaggtcaatgctgttsgttagcccagggaccacgctttgaaaaccactagtctagaagagcaatcacttgtccagggtcacctggaactcagatgatttcactccaaactctgcac

SEQ ID NO: 419669 - DNA, 201 bp, Homo sapiens
cttgttaaaacacagattcctaggtcccttctctccaccccaattacatttctaccaaattaccaagtgaggtcaatgctgttggttagcccagggaccaygctttgaaaaccactagtctagaagagcaatcacttgtccagggtcacctggaactcagatgatttcactccaaactctgcactactacgcatcacaata

SEQ ID NO: 419670 - DNA, 201 bp, Homo sapiens
ctgtggacttttgagttaatgctgaaatgaattaagactttgggggactgttgggaaggcatgattggttttgaaatgtgaggacatgagatttggagggrccaggggcagaatggtacagtttgactgtgtgcccaccaaaatctcaacttgaatgatatctcccataattcctatgtgttatgagagggacccagggga

SEQ ID NO: 419671 - DNA, 201 bp, Homo sapiens
atttgtccatttgaagatattatgatttatactacactgttgtattatagttttaattgtggtaaaattgtcagtctagcaatcaatgaaaaataaaaccygcaccgtgaatgtgttattaactgtataagtatagtagtagcacaaatgatcaaatttaatatggtaaatctgcccaggaaacatacataacgaattatt

SEQ ID NO: 419672 - DNA, 201 bp, Homo sapiens
gtccaccccctgacaatgatgatgttgttaatgactttgatattgaagatgaagtagttgaagtagaaaataggtaagtgcttttcgctttagaagtaatsagttgtcatgtgagaacaagtgaatattttatctaattatatgttttccattagggaagaaaacctactgaaaatttctcgcagagtgaaagagtacaaa

SEQ ID NO: 419673 - DNA, 201 bp, Homo sapiens
tgatatatatatatgtgtgtgtgtgtatatatatttttttatttttttggccagaaagtattctagtttatggatgcatcatcatttaaccatgttattcmctgttgattataaataattttttataaggaatattttaaaaattatgtttgatattttatcactagttttctgtttagttatattcaagcagattcttga

SEQ ID NO: 419674 - DNA, 201 bp, Homo sapiens
tatttctaaccctaaacctaaaacataagttaatgtacagtttttaaaaatttaattaattggttaattggcctgtcattttgatgaaatgtgattatatmtgcaaggtagatgactaaaggtgagtataagtggacatagtttgtttttcattattaaaaaataacatctaaactttagagactaggtgagaaaaaaatt

SEQ ID NO: 419675 - DNA, 201 bp, Homo sapiens
gaatggaaaggtgaataaattgtctgttccttaacaaaatttactgatatggtttgtctttgtgtccccacccaaatctcatctcaaattataatccccaygtgttgagggaggggcttgctgggaggtgattggatcatgggggtggtttcctccatgctgttctcatgataatgaggagctctcacgagatctgatggt

SEQ ID NO: 419676 - DNA, 201 bp, Homo sapiens
aaataggttgttccatatattattgtgctgtataaaatgtgacttaaaatgacctgtgtttaaatatgaaatagttttcattttttagcaaatttctaaartgaagcatgtatcacaatataaacttaaacatatattggccaaataccagtgagatagttaatttaactataggacatgagtacattatagtgtaagaat

SEQ ID NO: 419677 - DNA, 201 bp, Homo sapiens
ataagggactgtagctcgtcatttgatgtagtaggatatgtaatgatttagaaattttcatgacacatttaagtgaaagaagtattttagagaacactgtygtaagccgttagaaaatagttcttaacctttgtttggttcaggattacccttaatttaacaaagaacctgtcaactctctgaggctgctcttgtttataa

SEQ ID NO: 419678 - DNA, 201 bp, Homo sapiens
attttctctttacatcaatgaagaaaaaattatcatttttcatcagtgaccccagtatatatatagctgtcttaatttttatttaaaataggtgacttctraaaacattttctaatccagtgacctacccccaaaagtattttcccctttcatcttaacctctaacttgttcataaacatacctcttgtaaactctttaat

SEQ ID NO: 419679 - DNA, 201 bp, Homo sapiens
aatagagaagggcagtaactgggcatgcttcattaagaacctgtattctgtcatgtggggcagattctaaatattttcagctctcttactgcaggcaagayaaaggcaaaggagtaggtattagaagagagagacaaacttctagagggaactaaatttttgaagaggattgtcttccaactgggaagagagggaaagctt

SEQ ID NO: 419680 - DNA, 201 bp, Homo sapiens
atatgggacaatgtcatctgcctagagcaaaggagtatattggaagttctgaggtttgaagagaatggagtttttaagtagtagtttggggaaagcatgckgaatagagaagggcagtaactgggcatgcttcattaagaacctgtattctgtcatgtggggcagattctaaatattttcagctctcttactgcaggcaag

SEQ ID NO: 419681 - DNA, 201 bp, Homo sapiens
ggaaagttttcggagttttacagcaagaaaaacaccattatgtttgatgacatagggagaaattttctaatgaacccacagaatggactaaaggtaagacrtacttttacttgttatgtgctcatgtaatctgggctgtgtggtagaacttttgtagtaagcactgttgaatttcatatatttttggaagtactgtattct

SEQ ID NO: 419682 - DNA, 201 bp, Homo sapiens
gtcttttttaagaaaaagtataactaagcttgtcccctcccccacattcttcctcattttacaataatactttattttccttcttttgctctagtgtgcartacttaaagagtcagtattctcctaaaatggtaaattaggaagtaatctatttctattttccttggtttaccatttattgacttggctaagtgaaactaa

SEQ ID NO: 419683 - DNA, 201 bp, Homo sapiens
gccccaccctccacaccagctgcaagtccacatgcttgcctctcctccctctcctggtcctctgcctccttacagggctgggtgcatcctgtggtgagggkctcactcaggagcctcccctgccaggctgagcctgtgcccactctgtccccagctggcgttctccggggtggttggcattgtgtcctggaagcggccatt

SEQ ID NO: 419684 - DNA, 201 bp, Homo sapiens
ccagctgacttcagggacctttataccaaagtgcttgaggaagaagctgcttctgtttcctctgcagatacaggtcaggcatgtggtttgcgccccagggrtggggattgggcatggctgcccagccccctctccaccctacaataccattctcttatctctgtctctctgcagggctctgctctgaagcctgcctcttcc

SEQ ID NO: 419685 - DNA, 201 bp, Homo sapiens
ggtaggtgccagggtccagtgcccactgggaggcaggtgcccagcacgcaaggggaagcccatttatgtcctcaagaagggaactggctccccagttggtkccagccgggtgggcacgaagtgtctgtgaaggagggggactctgtccgtggcagaggagtactcatgagggtcccagccctgagtctgcaccctgttttc

SEQ ID NO: 419686 - DNA, 201 bp, Homo sapiens
tcccagcactttgggaggccaaggcaggtggatcacctgaggtcaggagttcaagaccagcctagccaacatggtgaaacccccatctctactaaaaattsaaaaattagctgggcctggtggtggacgcctgtaatcccagctactagggaggctgaggcaggagaatcgcttgaacctgggaggcggaggttgcagtga

SEQ ID NO: 419687 - DNA, 201 bp, Homo sapiens
tcccagcactttgagaggcccaggcaggcggatcacctgaggccaggagttcaagacccacctggccaacatggcgaaaccctgtctctattaaaaatacwaaaatcgggccgggcgcagtggctcgtgcctataatcccagcactttgggaggctgaggagggcagatcacctgagatcaggagatcgagactatcctgg

SEQ ID NO: 419688 - DNA, 201 bp, Homo sapiens
gactacagatgcctgccaccacgcccggctatttttttgtatttttagtagagatggggtttcaccgtgttatccaggatggtctcaatctcctgacctcrtgatctgcccgcctcggcctcccaaagtgctgggattacaggcatgagtcaccgtgcccgggcaatttttgtattttttagtagagacagggtttcaccc

SEQ ID NO: 419689 - DNA, 201 bp, Homo sapiens
gcaacacagtgagactccatctcaaaaaaataagaaaggagatagtactggggaacgctcagcactgtgcgccaggtgctgaacaacaccactgcagtccytgttgtggtggattgtaccatctagttgctggctaatatggacagagatgctggccctttgattggggatggagcgtgggagctgtgaaagctcctctgg

SEQ ID NO: 419690 - DNA, 201 bp, Homo sapiens
aacaacaccactgcagtccttgttgtggtggattgtaccatctagttgctggctaatatggacagagatgctggccctttgattggggatggagcgtgggrgctgtgaaagctcctctgggcttgagttcccacaggagggtgggcgtgtccacagaacacttccactcactccctgtctccctttctctcttctccccag

SEQ ID NO: 419691 - DNA, 201 bp, Homo sapiens
ccagggatggggattgggcatggctgcccagccccctctccaccctacaataccattctcttatctctgtctctctgcagggctctgctctgaagcctgcytcttccgcctagcccgctgcccttcccccaagttgctacgtgcccggtcagccgagaaacggcgccctgtgcccaccttccaaaaagttcccctgccctc

SEQ ID NO: 419692 - DNA, 201 bp, Homo sapiens
acaggcaccagctggttgggaccagcagcccccagcatcctcttgcactggctggcacaaaaagaaacctgctgtataccccccaaagtgtccctttcccmcctacctctggggtctcttgctgcttgcctctgctgctctggactgggagagcttctgtcctgtgctgcatgggtatttagactgtgggggagatgcccc

SEQ ID NO: 419693 - DNA, 201 bp, Homo sapiens
ggtggacaagggcggggctgccagggatagctggggtgggtagagacaatagaaggggaaaacaaggcggagttggtggtttggggacataggagggctgyggcaacttggaaccctggacttatttttctcctctgagataaagctggaggcacagtggcccctagaggctgggcttgggagaagaggaactgcctgggc

SEQ ID NO: 419694 - DNA, 201 bp, Homo sapiens
ctgagggcacaccgaccgcgcctctagagtcaccccacgccgacccctcccctcttctctagacttatttccatccttcccgcttttaccctccccacccstccctgggctccaggccgccgccccctcctcactcctggaccggcccttctcggtgcccctcttccctagggagatgcgatgagccggtgcccccgcgtc

SEQ ID NO: 419695 - DNA, 201 bp, Homo sapiens
gccataaagaggaatttgtgggtgggcagggccagagctagaggtacagggtgagcgtggggttaaggagagctgattttgggtgagggaggggccagaayaagagcttctctcaggggatagggccagaaaaaataatgtagatgagagaggagtttgggggcccaggaggagctgtattcccagaatccagacttgctg

SEQ ID NO: 419696 - DNA, 201 bp, Homo sapiens
ccccggagcctgtggggccggcctggccgagagagcctccaccttcgcagctgcggagatctgagctctagctcttccctgcggcgtctcctgtctggccrcaggctggagcgtggtacccgcccccacagcctcagcctcaacgggggcagccgggagactgggctctgacctaggcttcttgtcacactgaacacatcc

SEQ ID NO: 419697 - DNA, 201 bp, Homo sapiens
gcttctggatggaggtggggccataaagaggaatttgtgggtgggcagggccagagctagaggtacagggtgagcgtggggttaaggagagctgattttgkgtgagggaggggccagaacaagagcttctctcaggggatagggccagaaaaaataatgtagatgagagaggagtttgggggcccaggaggagctgtattc

SEQ ID NO: 419698 - DNA, 201 bp, Homo sapiens
cgacccctcccctcttctctagacttatttccatccttcccgcttttaccctccccacccctccctgggctccaggccgccgccccctcctcactcctggrccggcccttctcggtgcccctcttccctagggagatgcgatgagccggtgcccccgcgtcctcatcgtcgccccgggcacggtgcccgtccagtgcccgt

SEQ ID NO: 419699 - DNA, 201 bp, Homo sapiens
cccctaactccacctgtgatgaagcccgaggggccctcaaggtgagcttgcaccctgcaaacatcctcctggttctcactcttgcctcccctgctggggtwctcacaggcccataatgtgtggaacttagccgtctcctgactcctctcctcctttcccttccccagaacctgctcttcagcgtctgtgggctcaccattt

SEQ ID NO: 419700 - DNA, 201 bp, Homo sapiens
ccgcctcggcctcccaaaaggatttattttttgaaaccagttccacagctctcagcttggtccacttatctgtcctccccaagcttcagctgtcacttgtwaaacatgtataataatagtacttcaggccgggcacggtggcttgcacctgtaatcccagcactgtgggaagctgaggtgggtggatcacctgaggtcggg

SEQ ID NO: 419701 - DNA, 201 bp, Homo sapiens
ttcctgtgaagacacagaatgtgtggagcttctggatggaggtggggccataaagaggaatttgtgggtgggcagggccagagctagaggtacagggtgascgtggggttaaggagagctgattttgggtgagggaggggccagaacaagagcttctctcaggggatagggccagaaaaaataatgtagatgagagaggag

SEQ ID NO: 419702 - DNA, 201 bp, Homo sapiens
gcccctaactccacctgtgatgaagcccgaggggccctcaaggtgagcttgcaccctgcaaacatcctcctggttctcactcttgcctcccctgctggggwactcacaggcccataatgtgtggaacttagccgtctcctgactcctctcctcctttcccttccccagaacctgctcttcagcgtctgtgggctcaccatt

SEQ ID NO: 419703 - DNA, 201 bp, Homo sapiens
caactggcccgagacttccaacagtgctctctggtgagatttgaggagggagagctggaaagaactggctgggggaggtgtgcaggacacctcagtttgtsctgactcaggctgcctcaccctccctgctccactcaggaaggaaaggtctgtgtgtgctgtccctctgttcccctcctccggccctgtccagagtcgggg

SEQ ID NO: 419704 - DNA, 201 bp, Homo sapiens
attgtgtcctggaagcggccattcactctagtggtaggtgccagggtccagtgcccactgggaggcaggtgcccagcacgcaaggggaagcccatttatgwcctcaagaagggaactggctccccagttggtgccagccgggtgggcacgaagtgtctgtgaaggagggggactctgtccgtggcagaggagtactcatga

SEQ ID NO: 419705 - DNA, 201 bp, Homo sapiens
gccactgcattccagcctgggcgacaagagcaagactccgtctcaaaaaaaaaaaaaaaaaaaaaaaatatatatatatatatatatatatatatatatayacacacaaaattacaaaaattaggctgggctccgtggctcatgcctgtaatcccagcactttgggaggccaaggcaggaggatcaccagatatcaggagt

SEQ ID NO: 419706 - DNA, 201 bp, Homo sapiens
tgcactggctggcacaaaaagaaacctgctgtataccccccaaagtgtccctttccctcctacctctggggtctcttgctgcttgcctctgctgctctggwctgggagagcttctgtcctgtgctgcatgggtatttagactgtgggggagatgccccttcttatagcactggaggaggaaaacaaattcttgtccccctc

SEQ ID NO: 419707 - DNA, 201 bp, Homo sapiens
ccagcctgggcgacaagagcaagactccgtctcaaaaaaaaaaaaaaaaaaaaaaaatatatatatatatatatatatatatatatatatacacacaaaawtacaaaaattaggctgggctccgtggctcatgcctgtaatcccagcactttgggaggccaaggcaggaggatcaccagatatcaggagtttgacaccagc

SEQ ID NO: 419708 - DNA, 201 bp, Homo sapiens
tcctgtgaagacacagaatgtgtggagcttctggatggaggtggggccataaagaggaatttgtgggtgggcagggccagagctagaggtacagggtgagsgtggggttaaggagagctgattttgggtgagggaggggccagaacaagagcttctctcaggggatagggccagaaaaaataatgtagatgagagaggagt

SEQ ID NO: 419709 - DNA, 201 bp, Homo sapiens
gtgtggagcttctggatggaggtggggccataaagaggaatttgtgggtgggcagggccagagctagaggtacagggtgagcgtggggttaaggagagctsattttgggtgagggaggggccagaacaagagcttctctcaggggatagggccagaaaaaataatgtagatgagagaggagtttgggggcccaggaggagc

SEQ ID NO: 419710 - DNA, 201 bp, Homo sapiens
ctgaggaggaagaaagggtgagttcactcctctggtagacacttctcaggtactcacctcctagggacagaacatccatagcttagcagctaaaaaaggakaatttttttttttttttgagacggagtctctggctctgtcgcccaggctggagtgcagtggcatgatcttggctcactgcaacccgtttcccgggttcaa

SEQ ID NO: 419711 - DNA, 201 bp, Homo sapiens
cgggttcaagtgactctctcctgcttcagcctgccgagtagctgggactacaggtgtgcgccaccatgaccggctaatatttttttttttttttttttttgagacggtgtctcgctctgtcacccaggctggagtgcagccgcgcgatctgtgctcactgcaagctccgcctcccgggttcacgccattctccttcctcag

SEQ ID NO: 419712 - DNA, 201 bp, Homo sapiens
aggtgtgcgccaccatgaccggctaatatttttttttttttttttttttgagacggtgtctcgctctgtcacccaggctggagtgcagccgcgcgatctgkgctcactgcaagctccgcctcccgggttcacgccattctccttcctcagcctcccgagtagtgagtagctgggactacagatgcctgccaccacgcccgg

SEQ ID NO: 419713 - DNA, 201 bp, Homo sapiens
tgtgtttctgtgtgtgagtgtgtgtgctgggcagcaggctgctgagtggtagtgatgctgttaggctggggtggggaaccagtggctggaatgggcggtartgtctttgtcctctacttgcagatccactccttataccgccgcacaggtgccagctttcagaaggcccagcaagaatttgctgctggtgtcttctccaac

SEQ ID NO: 419714 - DNA, 201 bp, Homo sapiens
tcttcactggcattgctgtgctaggaattgtcatgctgaaacgggtgagggctgtgtcgaaggtggggccgggatggtgagatcatgggtccccaggggcrtgggtggaacattcaggagcaactggcacaggtcaggctgctgggttgttctcagctaatggacctctggggtgtgtgtttctgtgtgtgagtgtgtgtg

SEQ ID NO: 419715 - DNA, 201 bp, Homo sapiens
cagcagccacagctgagctgctgaagaaacaggaggagctcaaccggaaggcagaggagttggaccgaagggagcgagagctgcagcatgctgccctgggrggcacagctagtaagtaatagagtggggaagagcatctgagagtttgggaggagcaaaaacaggtcttaagggcctgggctcggctgggtgcggtggctc

SEQ ID NO: 419716 - DNA, 201 bp, Homo sapiens
ccaccctcagctccctccttgcagccctcgagaaagctcagccccacagaacctaagaactatggctcatacagcactcaggtacaggaggtgtgcaggtragggctggggagaagggccagtcctggggcccagggctcacatctccgtctgctcacactgggcaggcctcagctgcagcagccacagctgagctgctga

SEQ ID NO: 419717 - DNA, 201 bp, Homo sapiens
tctgacagaaattcaacagaagaactagcttcctaacaaatgggggaaaggctgcttccttacatcatgagttctgggtctaaaggtattcaagcagactmtagattcctgtgttatgagggactagatgatcactaaggtcttttcctcaacagccaccaccagcctatgagcctccagcccctgccccattgcctccac

SEQ ID NO: 419718 - DNA, 201 bp, Homo sapiens
tgtgtgtgctgggcagcaggctgctgagtggtagtgatgctgttaggctggggtggggaaccagtggctggaatgggcggtaatgtctttgtcctctactygcagatccactccttataccgccgcacaggtgccagctttcagaaggcccagcaagaatttgctgctggtgtcttctccaaccctgcggtgcgaaccgca

SEQ ID NO: 419719 - DNA, 201 bp, Homo sapiens
tgactgggatgccctggccctgctacttgagggagctgacttagctcccgtccctaaggtctctgggacttggagagacatcactaactgatggctcctcmgtagtgctcccaatcctatggccatgactgctgaacctgacaggcgtgtggggagttcactgtgacctagtccccccatcaggccacactgctgccacct

SEQ ID NO: 419720 - DNA, 201 bp, Homo sapiens
gtggctcacacctataatcccagcactttgggaggctgaggtgggcggatcacgaggtcaagagatcgagaccatcctagccaacatggtgaaaccctgtrtctactaaaaatacacacacaaaaaaattagctgggcatggtggcgcgcacctgtagtcccagctactcgggaggctgaggcaggagaatcgcttgaacc

SEQ ID NO: 419721 - DNA, 201 bp, Homo sapiens
ggatgggccccacgtctgcccatccttcagctctaattcttctcccaccctccccatttttttcctctttgtaggagtgacagttcattcaatttcttcgytttcttcttcattttcttcgtccaggatgtgctctttgtcctccaggccattggtatcccaggttggggattcaggtttgtgaggctgttatccaccctc

SEQ ID NO: 419722 - DNA, 201 bp, Homo sapiens
cgtctgcccatccttcagctctaattcttctcccaccctccccatttttttcctctttgtaggagtgacagttcattcaatttcttcgttttcttcttcawtttcttcgtccaggatgtgctctttgtcctccaggccattggtatcccaggttggggattcaggtttgtgaggctgttatccaccctcacctttccctct

SEQ ID NO: 419723 - DNA, 201 bp, Homo sapiens
atccttcagctctaattcttctcccaccctccccatttttttcctctttgtaggagtgacagttcattcaatttcttcgttttcttcttcattttcttcgwccaggatgtgctctttgtcctccaggccattggtatcccaggttggggattcaggtttgtgaggctgttatccaccctcacctttccctctagatccagc

SEQ ID NO: 419724 - DNA, 201 bp, Homo sapiens
gaattcccctaggtggcactgggtgccagctgagacccgggtctctgccctcaggacccagctgtgatccagcaccgacccagccggcagtatgccacgcktgacgtctacaacccttttgagacccgggaggtgagctactggagagcataggagttcaaggaagggaagggtttgccagtgagacaagttagcttgggt

SEQ ID NO: 419725 - DNA, 201 bp, Homo sapiens
cttgcagatccactccttataccgccgcacaggtgccagctttcagaaggcccagcaagaatttgctgctggtgtcttctccaaccctgcggtgcgaaccscagctgccaatgcagccgctggggctgctgaaaatgccttccgggccccgtgacccctgactgggatgccctggccctgctacttgagggagctgactta

SEQ ID NO: 419726 - DNA, 201 bp, Homo sapiens
cccccatcaggccacactgctgccacctctcacacgccccaacccagcttccctctgctgtgccacggctgttgcttcggttatttaaataaaaagaaagwggaactggaactgacatccccgtttcctgaatcttcattgggaattaggccttatgaaagagaaaggagagtgtggagtgaggtgggaaggtcggacccg

SEQ ID NO: 419727 - DNA, 201 bp, Homo sapiens
aaaaaaaaaaaaaaaaaagagaggatccagggatggagagaagggggagtgattcctttgttggtctctgttttacttctggggtccacctgtttttttgygccttacagctcgacagaacaattggccccctctaccttctttttgtccagttcagccctgctttttccaggacatctccatggagatcccccaagaatt

SEQ ID NO: 419728 - DNA, 201 bp, Homo sapiens
ggcccaggagtttgaggcttcgatgagtgatgattgcaccactgcactccagcctgggtggcagagagacaaccccacactccatccccagaagaaaagaraaaaaaaaaacacagttaagtggggagatatggtaaatgagtgatttgagtcctcactaaggaattggatatgagggatgataaggctgctacaggtcat

SEQ ID NO: 419729 - DNA, 201 bp, Homo sapiens
tgcctgtaatcccacttgggaggctgaggtgggaggattgcttgagcccaggaatttgatggagaccatcctgggcaacagcgagacccccatctcttgaracgttttaaaaattggctaggtgtagtggcacatgcctgtagtccttgctacttgggaggctgggatggaaagactgcttgggcccaggagtttgaggct

SEQ ID NO: 419730 - DNA, 201 bp, Homo sapiens
ctgacaggcgtgtggggagttcactgtgacctagtccccccatcaggccacactgctgccacctctcacacgccccaacccagcttccctctgctgtgccmcggctgttgcttcggttatttaaataaaaagaaagtggaactggaactgacatccccgtttcctgaatcttcattgggaattaggccttatgaaagagaa

SEQ ID NO: 419731 - DNA, 201 bp, Homo sapiens
gggacaacggcgtggccccgaaggtgcagtacttggagccacaggcagtttgggaatggtccctgggaattcccctaggtggcactgggtgccagctgagmcccgggtctctgccctcaggacccagctgtgatccagcaccgacccagccggcagtatgccacgcttgacgtctacaacccttttgagacccgggaggtg

SEQ ID NO: 419732 - DNA, 201 bp, Homo sapiens
tgaggcaggagaatggcgtgaaccggggaggcggagcttgcagtaagctgagattgcgccactgcactccagcctgcgcgacagagccagactccgtctcaaaaaaaaaatgtctttgcaaggggatcacacattattgacatttgctttctccatctcccctgttgaggattccatgaaggcagcagctgccttcatttc

SEQ ID NO: 419733 - DNA, 201 bp, Homo sapiens
ttgcagatccactccttataccgccgcacaggtgccagctttcagaaggcccagcaagaatttgctgctggtgtcttctccaaccctgcggtgcgaaccgsagctgccaatgcagccgctggggctgctgaaaatgccttccgggccccgtgacccctgactgggatgccctggccctgctacttgagggagctgacttag

SEQ ID NO: 419734 - DNA, 201 bp, Homo sapiens
ggttagaggtatcacgtgggggcactttcgtcttagcttttggacaagacgcaggcgcaacccacggctgctgcggggatccttgtggcccttccggtcgrtggaaccaatccgtgcacagagaagcggggcgaactgaggcgagtgaagtggactctgagggctaccgctaccgccactgctgcggcaggggcgtggagg

SEQ ID NO: 419735 - DNA, 201 bp, Homo sapiens
gttagaggtatcacgtgggggcactttcgtcttagcttttggacaagacgcaggcgcaacccacggctgctgcggggatccttgtggcccttccggtcggrggaaccaatccgtgcacagagaagcggggcgaactgaggcgagtgaagtggactctgagggctaccgctaccgccactgctgcggcaggggcgtggaggg

SEQ ID NO: 419736 - DNA, 201 bp, Homo sapiens
aaaaaaaaaaaaaaaaaaaagagaggatccagggatggagagaagggggagtgattcctttgttggtctctgttttacttctggggtccacctgttttttkgtgccttacagctcgacagaacaattggccccctctaccttctttttgtccagttcagccctgctttttccaggacatctccatggagatcccccaagaa

SEQ ID NO: 419737 - DNA, 201 bp, Homo sapiens
ctgcttccttacatcatgagttctgggtctaaaggtattcaagcagactctagattcctgtgttatgagggactagatgatcactaaggtcttttcctcarcagccaccaccagcctatgagcctccagcccctgccccattgcctccaccctcagctccctccttgcagccctcgagaaagctcagccccacagaaccta

SEQ ID NO: 419738 - DNA, 201 bp, Homo sapiens
gcactttgggaggctgaggtgggcggatcacgaggtcaagagatcgagaccatcctagccaacatggtgaaaccctgtatctactaaaaatacacacacamaaaaattagctgggcatggtggcgcgcacctgtagtcccagctactcgggaggctgaggcaggagaatcgcttgaacccgggaggtggaggttgcagtga

SEQ ID NO: 419739 - DNA, 201 bp, Homo sapiens
ccccaaattggagataaaagagaggatccagggctgggtatggtgcctcacgcctgtaattccaacactttgggaggccgaggcaggcaggttgcttgagytcaggagttagagaccaacctggacaacatagtgagatcctgcctccaaaacattaatgaaaaaaattagcagggcatgatggtacctgtctgtagtcct

SEQ ID NO: 419740 - DNA, 201 bp, Homo sapiens
ggaggctgaggcaggagaatcgcttgaacccgggaggtggaggttgcagtgagccgagatagcgccactgcactccagcctggtgacagagtgagactccrtctcaaaaaaaaaaaaaaacacaaacctgggctctggagtcagactgctgagtttgaattttagagatactgcttactaaccatgagcttttagggaagt

SEQ ID NO: 419741 - DNA, 201 bp, Homo sapiens
aaattagcagggcatgatggtacctgtctgtagtcctagctcctcaagaagctgaggtggacggccaggcgccggggctcatgcctgtaatcccagcactytgggaggccaaggcgggtggatcacctgaggtcaggagttcaggaccagccaacatggtgaaaccctgtctctactaaaaatacaaaaattagctgggcg

SEQ ID NO: 419742 - DNA, 201 bp, Homo sapiens
aggtgactggtgggcatctcctttcttgcaatggtgacctccttaagcactctccctcatccctacttcccaagtgcttcctcattctccttggcctccaytagggaccaaggtcccatcaggctgtgcccagacatcaggggcacctggtatggggtgcttataaggtgctttaggagcccatgtaccaaacaatagggt

SEQ ID NO: 419743 - DNA, 201 bp, Homo sapiens
tcatgcctcaacctccctgagtggctaggattacaggcatgtgctaccaagcccagctaattcttgtattttcagtagagacagggtttcaccatgttggmcaggctggtctcgaactccttacctcaggtgatccgccagcctctgcctcccaaagtgctgtgattacaggtgtgagccactgtgccagcgaaatgcaag

SEQ ID NO: 419744 - DNA, 201 bp, Homo sapiens
ttgccaatgtctcctaggcagtgacatcagtgtctggcccaggtgagcacctccgaaatgccctgtggcatactggccacacccctgatcaggtacgactsctgtggacagacccacgaaatgtgggctggcgggacaagacctcctatcgctggcagcttctgcaccggcctcaagttggctacattcggtaaggagagg

SEQ ID NO: 419745 - DNA, 201 bp, Homo sapiens
accagattcagaattcagaattttagaccctttggccttggggtccatcctggagaccctgaggtctaagctacagcccctcagccaaccacagacccttytctggctcccaaaaggagttcagtcccagaggggtggtcaccccacccttcaggggatgagaagttttcaaggggtattactcaggcactaaccccagga

SEQ ID NO: 419746 - DNA, 201 bp, Homo sapiens
catcctggagaccctgaggtctaagctacagcccctcagccaaccacagacccttctctggctcccaaaaggagttcagtcccagaggggtggtcaccccmcccttcaggggatgagaagttttcaaggggtattactcaggcactaaccccaggaaagatgacagcacattgccataaagttttggttgttttctaagcc

SEQ ID NO: 419747 - DNA, 201 bp, Homo sapiens
ggaaatgtccctgatccgaaacaccattatggagtgtcaggtgtgcggtgagtgggagagcaggggaggctccacatgaccgtgccacgttccccacccawtggctttggctttcccttctggtggcttaaatagtgaccaccgggtagctctgactgtgtccacccctcaggcttccatgagcagcgttcccactgcagc

SEQ ID NO: 419748 - DNA, 201 bp, Homo sapiens
gcagctgctccagggaagggtgtgaggaggaggccaccagattcagaattcagaattttagaccctttggccttggggtccatcctggagaccctgaggtytaagctacagcccctcagccaaccacagacccttctctggctcccaaaaggagttcagtcccagaggggtggtcaccccacccttcaggggatgagaagt

SEQ ID NO: 419749 - DNA, 201 bp, Homo sapiens
ctggatcctgagggtgatgctcagattgacccaaactgggttgtgctcaaccaggtaactcggggcagtgggctgggcaggtgctatcagacagggctacygggacggggggcctgggagggatagcacacctgcatcacagctttttctttactatacaaccccagggcatggaaatcgttcagaccatgaacagtgacc

SEQ ID NO: 419750 - DNA, 201 bp, Homo sapiens
gggtccatcctggagaccctgaggtctaagctacagcccctcagccaaccacagacccttctctggctcccaaaaggagttcagtcccagaggggtggtcmccccacccttcaggggatgagaagttttcaaggggtattactcaggcactaaccccaggaaagatgacagcacattgccataaagttttggttgttttct

SEQ ID NO: 419751 - DNA, 201 bp, Homo sapiens
ccccagccctttggatggaaagtggtcagatcaccctcttcagagttatcaagaggagatggtgagaacaggtccctctctctcagacagatgcagacagygacctggtgggggatgtctgtgatactaatgaagacaggtaaggtcttggtcaagagacgcaaggtctttcttttttttgtctttctgagacggagtctt

SEQ ID NO: 419752 - DNA, 201 bp, Homo sapiens
ggtatgtaagggatatgcagttcaatcacttccaaatggaggaatcctataggggcagagggtaggggaggaaacagacagggagaatgggcaaagtggcragagagaaggcagtggcacaagctggccacatacatagcaggcatcccttcccaactttaccccatgatgggccgccagtagctttgctgcccctgacct

SEQ ID NO: 419753 - DNA, 201 bp, Homo sapiens
agttgtcctctgggtggggagacaaagttcgggactttcaccaacctagaagagagaatatggcatgttctagtaacaaccttgtgctacccatgtcttcyaggcatccccaatggattggacaattgccctaaagtccccaacccactacagacagacagggatgaggacggggtgggagatgcttgcgacagctgccct

SEQ ID NO: 419754 - DNA, 201 bp, Homo sapiens
caatggctttggctttcccttctggtggcttaaatagtgaccaccgggtagctctgactgtgtccacccctcaggcttccatgagcagcgttcccactgcrgccccaatccctgcttccgaggtgtggactgcatggaagtgtacgagtacccaggctaccgctgtgggccctgcccccctggcctgcagggcaacggcac

SEQ ID NO: 419755 - DNA, 201 bp, Homo sapiens
gcaagagaaatgcaagatgggagagacagaaggcctggggcaaagactgaaggccatacagggaaggagctggggaaactgcaggggaggcttgagatggygaccagtggcatggggagggagagagggaaccccgagggaagtggggtggggaccaggagcacaaggcagttgtgtggggagagctgcacaaaggggaga

SEQ ID NO: 419756 - DNA, 201 bp, Homo sapiens
atttcaccacgttggccaggctggtctcaaacacctaatctcaagtgatgcacccacctcggcctctcaaagtgctgggattacaggcgtaagccaccgcrcccggcctggtctcgagtcttttatagttctcactggcagctgtcaccagcaatttctctgagtgttgcccatctgcctggtctctctgacagggatgtt

SEQ ID NO: 419757 - DNA, 201 bp, Homo sapiens
gatgggccgatggatgtgggagaggtagctggagcagatgacacaggcatagattctttactggctggagggaaaaccacagattggccaggacacaggargcagaggagctgggtcctacattcccgtgggagatagcccagatggtgggagggttagagtcctcagtgggcagctgttcttatccagagcgagtgtgct

SEQ ID NO: 419758 - DNA, 201 bp, Homo sapiens
gggctccagctgcatcaacaccatgcccggcttccactgtgaggcctgtcctcgagggtacaagggcacacaggtgtctggtgtgggcattgactatgccygggccagcaaacaggtcagactgggtagtgtgtgtggacaagggatcttggccttgtagaggccaggggcttctgggttggacatgggacccttgtgatg

SEQ ID NO: 419759 - DNA, 201 bp, Homo sapiens
gattacaggcgtgagccactgtgcccggcctcctttttttttttgagatggagtcttgctctgtcactcaagctggagtgcagtgatatcggctcactgcracctccacctccagggttcaagcgattttcctgcctcagcctcccgagtagctgggattacaggcgcgtgctaccaagctcagctaatttttgtgttttt

SEQ ID NO: 419760 - DNA, 201 bp, Homo sapiens
ctggagcaatggttcctggatcacaggcagggacctgagtttcccagagggcggcctgacctctgccttctcatctggtccccagtgtgctcacgctgacmcctgtttcccgggctccagctgcatcaacaccatgcccggcttccactgtgaggcctgtcctcgagggtacaagggcacacaggtgtctggtgtgggcat

SEQ ID NO: 419761 - DNA, 201 bp, Homo sapiens
gctgcagctcaaggtccccagctgctcagattccgcaacccagggccctttcccaaagctctcctctgcagccccagggcctcccccactgcttgactggraaccctcttacccagacatctggcttggaggccggctctctggggccccagggcattttcatgaccgccttgaatccctttcccacctgcacttaccgac

SEQ ID NO: 419762 - DNA, 201 bp, Homo sapiens
ataaactccaaaaattagttgtgtattatttggactactatttcaatcattcagaaatttgttttaaaaaatccttgcagtcttgctgctgacttcatagygtgcagtagtgtgatatggagatgatgcactgtctttcagaagccttggctctatgccttctagctgggcctggggcaagtcatttagcctctgtggacc

SEQ ID NO: 419763 - DNA, 201 bp, Homo sapiens
ccttaagaaacgtcaaaggatggtgattggaaaagagaagaagcagcacacaagggttttgtcttagaagcatttattttatttatttatttattattacttttttttttttttgagatgcagtctcactctatcgcccaggctggaatgcagagaagcatgtatttaagcaccccagtcctcagctatgcagtgccccgc

SEQ ID NO: 419764 - DNA, 201 bp, Homo sapiens
acatgcagactgaattattctggtggtttttgttgttttgttttgttttgttttgttttgagacagagtcttactctgtcacccaggctagagtgcagtgrcacgatctcagctcactgcaacctccacctcccgggttcaagtacttctcccaccctagccccccgagtagctgggactacaggtgtatgtcaccacgcc

SEQ ID NO: 419765 - DNA, 201 bp, Homo sapiens
catgcagactgaattattctggtggtttttgttgttttgttttgttttgttttgttttgagacagagtcttactctgtcacccaggctagagtgcagtggmacgatctcagctcactgcaacctccacctcccgggttcaagtacttctcccaccctagccccccgagtagctgggactacaggtgtatgtcaccacgccc

SEQ ID NO: 419766 - DNA, 201 bp, Homo sapiens
gaggccttggtgggcctcacttgaggtcaggcattcaagaccagcctggccaacatggtgaaaccccatctttactaaaaatacaaaaattaaccaggcgkggtggcacgcagctgtaatcccagctactcgggaggctgagtcaggagaatcgcttgaacccaggaggcggaggttgcagtggcagcgagccgagatcat

SEQ ID NO: 419767 - DNA, 201 bp, Homo sapiens
aggtagtgtaataaagttatttctgtaggaaactgggaattcattggctatttgactctgaatgtaacctctttaaagctgatgaacgagtggccccttakatttgaagtggtaaggtagtcataagttaggctcccagacactggcattcaacgtgattttgaagtgtgatagaccatgtatacacttgattgtgcacca

SEQ ID NO: 419768 - DNA, 201 bp, Homo sapiens
ttgaactatatttttttctataatctagctcttagaactctattttcctttgatactaatgattcctcttgccctcagaaatgtttacatgaaacagcacrtgactgtcctttttgttgatcccaaaactttttattgttcattctagagaggcaaataatgtccttcagtgtcactaattgagtttttaaaaggaagatt

SEQ ID NO: 419769 - DNA, 201 bp, Homo sapiens
agcaaccactgatcagatgtctatcaccacagattagttttgtgtattctggaatcccctgttaattgcatgtatttttcttttcttttcttttcttttctttttttttttgttttggtgacaggatctcactctgttacccaggctggagtgcagtgtcacaatctcagctcgctgcaacccccacctcccagctttaag

SEQ ID NO: 419770 - DNA, 201 bp, Homo sapiens
cctctgcctccctggttcaagcaattctcttgcctcagcctccctagtagctggcacctgccaccatgcccagctaatttgggtttcaccatgttagccaggctggtctcgaactcctgacctcaagtgatccacccacctcgggcttccaaagttctgggattacctgcgtgagccactgtgcccagccaaggatatttt

SEQ ID NO: 419771 - DNA, 201 bp, Homo sapiens
tcaccatgttagccaggctggtctcgaactcctgacctcaagtgatccacccacctcgggcttccaaagttctgggattacctgcgtgagccactgtgccyagccaaggatatttttcttgtagtatctccattatcaaaacgtgctggaaaggatgttttacttgtttatcaatatggtgatgcctcaggagcttttaag

SEQ ID NO: 419772 - DNA, 201 bp, Homo sapiens
tttatgttcttaccagctttcaccctaattaaatggggcactacaccgcagagtttagcctgtggtgtagcagagcccaggtcatctgtcacagagaatcrtaatcttacattctctctctcctctgaacaatagaattttgaggtgggggagaatcttagtttataatgaggcaactctagttttatcacactcagaaac

SEQ ID NO: 419773 - DNA, 201 bp, Homo sapiens
cacttttttcctactggtaattcctgtttttctaattacacaaaatgtttaacttaaactattctttgcaatgagttttagctttcctcctctatcctaayttcaaaacctttaatttaagaaccatttaaaattaatccagtggtaaccagaagaatattttaggtatcatgaccacttaatcttgtgcctgattttagt

SEQ ID NO: 419774 - DNA, 201 bp, Homo sapiens
cattctgttaggttaccagtattttactgtcatgcacccatgggtagtagaaacaaaataaaaataaatataaatgtttaactttaggtgttggcaccaayatagattatgcataaactgttgcaataaaagatactcattgtgcctgtacctgaaaaatttaccttaggttttctctggccttttttgtttaggcctgca

SEQ ID NO: 419775 - DNA, 201 bp, Homo sapiens
gaaattatacatccttcgctttccccacaaaatgaattcagaatcgacattcaagtttataattttaagctgctaattataaaaatatattaataccttakggattgaagattacatgaaataagaactacaaaagaatgctaattaataacataactccatatgctatcaaacttctgatagcactgagtttcttataaa

SEQ ID NO: 419776 - DNA, 201 bp, Homo sapiens
tatattcttctcttggtgagtaaaattatattttccttggcatcaatgcattgagatctgaatatacctgtatctatcaatccttattacacatttcttaygcagtagcttcaaataggccaaaattggcctagacacaactaaaaattgagggtttgttacatgctttctaacagaaaggttttcaacgagattaattat

SEQ ID NO: 419777 - DNA, 201 bp, Homo sapiens
cctatgaagctgatccttccaactctaataaagcacagtctacccccagccgccactatacatctgcctcagcttacttggaattattttatccaaaaccrtcccctatatgtgggactagtctcaccaaagagacacttggcttatatgaggattccattggttaaagttggtgctaataaatacaagttatttgatctt

SEQ ID NO: 419778 - DNA, 201 bp, Homo sapiens
caattaactgatataaaaatatacctgtaataatatattttagtagcacttttgcaattgctacccttaaaaccatgtcaacacttccaatataatcctgwattttacaggtgttttaattctggagggggtggggattttttttttctaaaaataatttagaatacaaatttccagtctgagaaaaatattatttgaaga

SEQ ID NO: 419779 - DNA, 201 bp, Homo sapiens
ctcccgggttcaagtacttctcccaccctagccccccgagtagctgggactacaggtgtatgtcaccacgcccagctaatttttgtattctttggaagagwtggggtttcactgtgttggccagactggtcttgaactcctgacctcaagtgatccacccattttgacctcccaaagtgctgggattacaagtgtgagcca

SEQ ID NO: 419780 - DNA, 201 bp, Homo sapiens
gtgagattatatagacgtcattcagaatatttgtttttatccttcaactcgaagagttttctcacctctttattttcaagttgaaaacattattataagaktatgttagcgggtcatttgactctgaaaaaaatagctttttaaaggttgatcacactttaatcttcaatttcaggatagtaaagaaccattataatttag

SEQ ID NO: 419781 - DNA, 201 bp, Homo sapiens
tattttcttctgaatgaaattattgtcttttatcttggctttattcacctcccacacaataagtccatctaatcatatttaagagccagaacactgatttyaacccccaaatatcactctcattgatgagagctggctgcatggattcaaatcagaatgtagctcttcttttatatgctaaaagtaatttaaaattatatc

SEQ ID NO: 419782 - DNA, 201 bp, Homo sapiens
tttttaaaaaaaactaagtatgtgcctatgcttttcctttttaaccatattgaatgtgtaatgttgagttagaagacactgtgtgaggtaagaaatggcarttcaaggggaacaagaacattcgtttattcagtcaacaaatatggattgagttcctcccataggcccagcattgtactagggaaattgctcactattttt

SEQ ID NO: 419783 - DNA, 201 bp, Homo sapiens
accctattatccccattttcatatgattttccagaggtttataaactggttcagaatatcagaactaatgtatttgaacccaaatttacaccaaagccaamgattgtgcccgttcagttaggccaaactgcctttcagatttcctatgaagctgatccttccaactctaataaagcacagtctacccccagccgccactat

SEQ ID NO: 419784 - DNA, 201 bp, Homo sapiens
ttttaaccatattgaatgtgtaatgttgagttagaagacactgtgtgaggtaagaaatggcagttcaaggggaacaagaacattcgtttattcagtcaacmaatatggattgagttcctcccataggcccagcattgtactagggaaattgctcactatttttatttttcccctctaacctaaggtggagatgataatgaa

SEQ ID NO: 419785 - DNA, 201 bp, Homo sapiens
gttagaagcagactttttcagaaacctgtttgaaaggaatgatccaggttttatgaaatcaactcaagaacccactgttcttcatctgcatcagtaccatsattacagttgttgacagtgaaggccctagagcactgcagtattctcatttgtgcatgcaaaatttaatcacatttattatgttgtatttattaaagcaga

SEQ ID NO: 419786 - DNA, 201 bp, Homo sapiens
tcaagagtgcattttgatatgacttttctattgaccaccaagaaaaaattatctgaaaaatgaaagatcccatacttgagtcctgaaagatgctatctaaytatgaattaaagcaaccagagtaaaagatccaatacaattgtaaatatctttaaaaatgtgggttgaggaagaagaattttttcatggattggtatccgt

SEQ ID NO: 419787 - DNA, 201 bp, Homo sapiens
tctttaggctcaattctgcactcagtaaactcttggttttggccctggcagaaggcctagcaactcattggtgctcatgtctgtgcaccagctgcttgccracctcagcctctgcctcaaactctgagcctttgtcctctgtgcttaagactccctgcctgagcttcccaccttagctaaccttccagaacttgacgtttc

SEQ ID NO: 419788 - DNA, 201 bp, Homo sapiens
tctttctgactttacacaagactcacccatttacctgtattaaaaattactttccaggaagtgccacagcaatttttcaacacctaagcaattttttaaayaagtggatatagtgttatatgtgtaccaacccatcctgtattaattgactgaaattacatctattcagctatattttcttctgaatgaaattattgtctt

SEQ ID NO: 419789 - DNA, 201 bp, Homo sapiens
ggtgtttttgtttttgtttttgtttttgttttgagacggagctattctcttgcctcagtctcccgagtagccgggaccacaggcgcccaccaccacgcctygctaatttttatatttctagtagagacggggtttcaccatgttggccatggctcgtctcaatctcctgaccttgtgatccaccctcctcgccctctcaaa

SEQ ID NO: 419790 - DNA, 201 bp, Homo sapiens
tttcaaaatttgattgttacatatattgtcatttcagtgactggagacaagatgtatatgtagacaaatagataaaaacagggtaattaaaccagtgtggtttttttttattttaaaggaaaacacatacgacttatgtacattgcatggcagagtattactaaaattcgcctaaacaaaccgtcacgatgttttcaggtt

SEQ ID NO: 419791 - DNA, 201 bp, Homo sapiens
tcaaaaaacagaaagttaaatgccttcaggtacataaggctgttaacgaaatgtcacataatcaaagcatttaacaaatattagttaacatcattattaaktcttcccaacccacgaaatggatggttccctggaaagtataacaacattatgcaaagttcaaagggagcctccttttaccataggaacctttaggtgtag

SEQ ID NO: 419792 - DNA, 201 bp, Homo sapiens
cagctaatttgggtttcaccatgttagccaggctggtctcgaactcctgacctcaagtgatccacccacctcgggcttccaaagttctgggattacctgcrtgagccactgtgcccagccaaggatatttttcttgtagtatctccattatcaaaacgtgctggaaaggatgttttacttgtttatcaatatggtgatgcc

SEQ ID NO: 419793 - DNA, 201 bp, Homo sapiens
ggtcttgaactcctgacctcaagtgatccacccattttgacctcccaaagtgctgggattacaagtgtgagccactgcacctgtccgaattattctgtttstgtatttatggccacagaagtttcatattggctaaatctgcacaaattatcatatagttataaatataaaagtcagatcaatatggctaagattatcaca

SEQ ID NO: 419794 - DNA, 201 bp, Homo sapiens
cagttctctgtcttcacattttaccctcttaaacttaatttttgcaaaaaatttttctattcggttttcattttcctagggaaagggaaaaattgtccctratgaaaagtgtttatagtatttaaaagagttgctcaaagtgtaagactggggaaaaaaagcttatgttgttttttttgtctttatcaaaataatggtata

SEQ ID NO: 419795 - DNA, 201 bp, Homo sapiens
tggttttctgaaaataattttttcataagtgtgagctttttttccttcttatctccaaatgtttttcattggaatatttatgaaatcctattcaaagcttkatgtaaggggtttgcttagtcaccacttagtttgaagtctgtctttactaaaacaccaaacatctttgacaacatacaaagaggagttaacattgattct

SEQ ID NO: 419796 - DNA, 201 bp, Homo sapiens
agtacagatgggtagagggtgaaaagtagcaaccaatgttagcaatttcttgtgtatccttctagagttactctgcatatacaagtatatgtgtatgtatrtatatatatatatatatatatattctttttaaaacatacagatgaaaacatattatatatactatcttgtacctagtagattcaatttcagatctgtcat

SEQ ID NO: 419797 - DNA, 201 bp, Homo sapiens
ttttgtttttgttttgagacggagctattctcttgcctcagtctcccgagtagccgggaccacaggcgcccaccaccacgcctcgctaatttttatatttytagtagagacggggtttcaccatgttggccatggctcgtctcaatctcctgaccttgtgatccaccctcctcgccctctcaaagtgctgggattacagcc

SEQ ID NO: 419798 - DNA, 201 bp, Homo sapiens
ttttgagacggagctattctcttgcctcagtctcccgagtagccgggaccacaggcgcccaccaccacgcctcgctaatttttatatttctagtagagacrgggtttcaccatgttggccatggctcgtctcaatctcctgaccttgtgatccaccctcctcgccctctcaaagtgctgggattacagccgtgagctacca

SEQ ID NO: 419799 - DNA, 201 bp, Homo sapiens
tgacagttttaattttgtagatgaatttggcatgacgtggatgaattctgtcaaggtcattattgttttcttctcaaaaccaatagaattttctcacttayttatttttagaattgtcaggtagtgtaataaagttatttctgtaggaaactgggaattcattggctatttgactctgaatgtaacctctttaaagctgat

SEQ ID NO: 419800 - DNA, 201 bp, Homo sapiens
tgaagcaaaagtggaccagcacagctttttgtgggggttagtggtaggagagtgttatagtgaagttctttgttctgttttctcagtctcatttctcattsattcattaaatcaatagatatttattttgcctgtggtatgagctaaccatttctctgggtctggataatatagcagacaacaagatccagtctttggccc

SEQ ID NO: 419801 - DNA, 201 bp, Homo sapiens
gcaaggaacctatgaacagtcactaacacaaatatgatatctcagaattcacagaagtactaaccttccccaactaaaaagggtattgggggatttagtgkatccttccatcttaaaagcttcttaagatgtacatttgaaaactagataactgttgcttaataatactttactgagaaacactgtgtactaacaattcat

SEQ ID NO: 419802 - DNA, 201 bp, Homo sapiens
cagattgcatttttcttcttttgaaagtcctaattaaattgtttgccatgttatgcaaagattcattgagattctggggagtggcagtaaatttaagcaargattatactgtgattctggggagccatagtaaattgtgtatcaacaaatctaaagggtgaatttttactttctgcttattgtctttttcaagaaaattct

SEQ ID NO: 419803 - DNA, 201 bp, Homo sapiens
tcattgagattctggggagtggcagtaaatttaagcaaagattatactgtgattctggggagccatagtaaattgtgtatcaacaaatctaaagggtgaayttttactttctgcttattgtctttttcaagaaaattctatagttaccaaaaaggtggctgaattttgacataataaaggagaaggttgagctggcctttg

SEQ ID NO: 419804 - DNA, 201 bp, Homo sapiens
tagccactttcttacttttacaaaaagttagtatggtgttttttttgtttttttgttttttggtttttttttgagatggagtcttgctctgtcacccaggytggattgcagtggggcgatctcgggtcattgcaacctccacttcccaggttcaagcgattcttttgcctcagcctcccaagtacctgggattacaagtgg

SEQ ID NO: 419805 - DNA, 201 bp, Homo sapiens
aatactgtacagattcccatcttatcagaggaagaaccagttagcataacatagaattttagggctagaagagactttcaacatcatcaagtcttacctckcggtattcaatagttcaatataattattatctttttacaggtcttagctttcctgccctaatttccaaaacaatgaagaactagtagtccccagatcccc

SEQ ID NO: 419806 - DNA, 201 bp, Homo sapiens
atatttattttgcctgtggtatgagctaaccatttctctgggtctggataatatagcagacaacaagatccagtctttggccccaaagagcatacagtacrggtactcacaacatggacaatgctagataactgcccagagagcagagaagctacatgagatcattataaacctgtgcacctgaaccactgcacaagcaat

SEQ ID NO: 419807 - DNA, 201 bp, Homo sapiens
actacgcggcctcagccacccctaatcaggccgggggcgcagccgaaatccaggagctggcctccaaacgagtggacatccagaaaaagaggttttacctrgacgtgaagcaaagctcccggggccgcttcctaaagatagccgaagtctggatagggagaggccggcaggacaacatcagaaagagtaaactgaccctct

SEQ ID NO: 419808 - DNA, 201 bp, Homo sapiens
agtatgtgtaatatatattaaacatacatatattgcacatgcatatatatacaattttttacatatatatgtaaaaatttttaaaagagatcccaatcctrttcacctttttcttgtccctggagaagtagtggtaaatgggtttcatctcgcttgtatttgcaattgattggctgccctaaagtgctgtgtttgtatcta

SEQ ID NO: 419809 - DNA, 201 bp, Homo sapiens
actcttggataatgataactaagtcttcgtttcatgaatttaacaatttgtatcagtgctaccttatgagtttttcagaaaaatgctatttgtattgaacyattttaaataattccataatctggaataattcagatttttttaatgatctgctgcaacatattggtattattgaatctcattttttctttgatttccatt

SEQ ID NO: 419810 - DNA, 201 bp, Homo sapiens
tcttttccctgcattccattttttattatttttttattttttattttttcaagacagggtcttgctttgtcacccaggccggagtgcagtggtgcagtgayggctcactgcagccttgacttctggggcttaagtgatcctcccgcctcagactcctgagtagctggtactacaggcatgcaccaccatgcccagctattt

SEQ ID NO: 419811 - DNA, 201 bp, Homo sapiens
gtaattaaaccagtgtggtttttttttattttaaaggaaaacacatacgacttatgtacattgcatggcagagtattactaaaattcgcctaaacaaaccrtcacgatgttttcaggttttatggtaatgctttgactatatagtatttggatttgaatcctcataatcacaaagtctcttagttgtttaaaacaaaaaac

SEQ ID NO: 419812 - DNA, 201 bp, Homo sapiens
ttgtagtcaaagctgctccgaagccacgcagccgaagaggcggtcgttctatgcaacattcctgtgaaaattacccagctgtgactgtcgaagggaaaaartcacacttacctatatccgggatcccacgccggagctccagacacacaagggggacagcagagaggaagaaaatgccaacaaccccacgtgaagccatgg

SEQ ID NO: 419813 - DNA, 201 bp, Homo sapiens
tactgaatttgtcctcaagaaactcagcttatccgactttgtggttctatggagaagaaaaaaaaaaactgggaaagatagccctgtaagcaaataaacayaatgcagtgcctgagtgctatgatagagatatacacagggtgttgcagaaccatacccagaaggcttgcaaaaggctttccaaaaggaagtcacgcctac

SEQ ID NO: 419814 - DNA, 201 bp, Homo sapiens
tgattctatgtgaggccaaacatttttttcatatatttatctatcactgagtcttcttcgggaaatcatgatattcatgtgtttctttccctgccagtctwctgagatgtttatctcttccttgatttaagttccttataaaaaataactatcatacataaatagtaaaatgggctggtcgtggtgggtcacgcctgtaat

SEQ ID NO: 419815 - DNA, 201 bp, Homo sapiens
gattattatatatagaaagcaatccttttctaatcctattcccatggatatcaatgttcaaagtttactgccatgagctcaatcaaggtatggtgtgattygaaagtgaagcctttattgtgccagaaggtcatagcataactgacttcatgcaaacagggagctctcccttctttcctagttggtctgctccttctcctc

SEQ ID NO: 419816 - DNA, 201 bp, Homo sapiens
aggtagggcatggtggtggctcacgcctgtaatcccaggactttgggaggctgagacaggcagaccacttgaggccaggagtttgagacaccccccgccayaaaaaatagaaaaattagctagatgtgggtgcacgcctctagtcccagctacttgggaggttgaagtgggagaatagcctgagcccagggaatctgaggc

SEQ ID NO: 419817 - DNA, 201 bp, Homo sapiens
gagtgcagtggtgcaatcatagctcactgtaaccttgaattcctgggctcaagtgatcctttcaccttaccctccagagtagccaggactacaggtgtatsccaccacacccagctaatttttaatttttttgtggatatgaggaactcccctatgttgctcaggttggtctcgaactcgtgggcttaaggggtcttcctg

SEQ ID NO: 419818 - DNA, 201 bp, Homo sapiens
agagatcacaattcagagacatccggcaggcatgcctagttagccaaatttctgcaacgtggagtacctggaaatgtcctttatccatacctgatgggagrtgcagatgacagtgtgatcacaccttcccccacggcatgtgaataaactactgccatattcaacaaagatatttctcaaaatgtgaattccttcacttac

SEQ ID NO: 419819 - DNA, 201 bp, Homo sapiens
gctagagtaaactgagtccaacacttctacacagtcatgctcaacagggctctctgatactgggaacaaggtagcggggttcagggtgttacaaacttcartggttatacggggattttcacaaagcaaactttggtacttagtgagtctagcactcattagccaatgatgtcctttagtattcattaaagtcaccacagc

SEQ ID NO: 419820 - DNA, 201 bp, Homo sapiens
acccaggccacagtattgtttttaaaagaaaaaaaaaagtctaaagttaatagtggctacttcctaaggatttaaaagcatcttgcccatcaaattatgakaatgtaatgaaagcaaacaacaaaggaaaaatacaccaaagggaaagaatgagtaaaatgtgaatgcagagatcacaattcagagacatccggcaggcat

SEQ ID NO: 419821 - DNA, 201 bp, Homo sapiens; identical to SEQ ID NO: 155583

SEQ ID NO: 419822 - DNA, 201 bp, Homo sapiens
tctctacaaaaaatacaaaaattagccaggcctggtggtgcatgcctgtaatcccagatactcaggaggtgaggtgcaaggatcacctgagtccggggagsttgaggtttcagtgagctgtgattgcaccactgtgcttcagccttggtgacagagtgagaaccaatcttacaaaaataaataaaaataatggtaaattat

SEQ ID NO: 419823 - DNA, 201 bp, Homo sapiens; identical to SEQ ID NO: 155587

SEQ ID NO: 419824 - DNA, 201 bp, Homo sapiens
cgcccgccaccacggccggctaattttttgtatttttagtagagacggggtttcaccgtgttagccaggatggtcttgatctcctgacatcgtgatccgcscgccttggcctcccaaagtgctgggattacaggcgtgagccaccatacccggccatgtgtgatttagttctatgcaatattatcacctgtgtcaattcct

SEQ ID NO: 419825 - DNA, 201 bp, Homo sapiens
aattgaggtataattgagttaaaatccatctctttaattttgtcatttcaagaatattatatacatgaatcatacagcagcaacaacaacaaaaaagcctyttttgagatggagtttcactcttgttgcccacgctggagtgcaatagcacaatctcagctcactgtaacccctgtctcccaggttcaagcgatcctcctg

SEQ ID NO: 419826 - DNA, 201 bp, Homo sapiens
ggcgggtggatcacttgagcccaggagttcaaggccagcctaggcaacatagtgagaccctgtctctatgttctaaaaaagacctagttacagtataatcmcatgaacacttatgctatcacttctttctaaacccaagtttagataagacatatttaatggatgttaagcaaagaaaatagaaaataagtttaattttcg

SEQ ID NO: 419827 - DNA, 201 bp, Homo sapiens
aagccttttttgagatggagtttcactcttgttgcccacgctggagtgcaatagcacaatctcagctcactgtaacccctgtctcccaggttcaagcgatyctcctgcctcagcctcccgtgtagctgggattacaggcgcccgccaccacgcctggctaattttttgtatttttagtagatacgaggtttcaccatgttg

SEQ ID NO: 419828 - DNA, 201 bp, Homo sapiens
attttgattctgttttagtaagcaacgcattttctgacctaaagttctggaaaagcccacgtgtcctatgcctgaggcagtgggtgggtgtaatcccagcrctttgggaggtcaagacaggcagatcacttgaggtcaggagttccaggccagcctggccaacatggtaaaaccccgtctctactaaaaatacaaaaacta

SEQ ID NO: 419829 - DNA, 201 bp, Homo sapiens
gctcactgcagccacaacctccagggctcaagcagtcgtcccatgtcagcctcccaagtagctgggaccacagatgtgggccatcagataatatatatatwttttttccaaatgatcctcctttcttgggcatggtggttcatgcctgtagtcccagctactcaggaggctgaggcaggagaatcacttgaacccagaagg

SEQ ID NO: 419830 - DNA, 201 bp, Homo sapiens
cacaatctcagctcactgtaacccctgtctcccaggttcaagcgatcctcctgcctcagcctcccgtgtagctgggattacaggcgcccgccaccacgccyggctaattttttgtatttttagtagatacgaggtttcaccatgttggtcaggcaggtttcaaatcctgacctcaggtgatccacccacctgagcctccca

SEQ ID NO: 419831 - DNA, 201 bp, Homo sapiens
ttcaccatgttggccaggatggtcttgatctcttgacctcatgatccgcttgcctcagcctcccaaagtgctgggattacaggcgtgagccatggtacccrgccaaaaaactattaaagttttaagaatccctgttttcccaacacatttgccaaatctgggtactatttctttttaatctttgacagtctagttaagtag

SEQ ID NO: 419832 - DNA, 201 bp, Homo sapiens
tgtgcctgtagttccagctacccaggaagctgaggcaggaagatcccatgaacccaggaatttgaggcgacagtgaggtatggttgtaccactccaccccrgcctgggcaacagagagaggcccagtctcaaaaaaaaaaaaaaaaaaaagtggtatatctattcaatggaatattattcatccacaataggtaaatccat

SEQ ID NO: 419833 - DNA, 201 bp, Homo sapiens
acatttcgtacttggaaattatctttcctggccaggcgcggtggctcacgcctgtaatctcagcactttgggaggccgaggcgggcggatcacaaggtcasgagttccagaccagcctggcaaatatggtgaaaccccgtctctactaaaaatacaaaaattagccgggtgtggtggcggtcgcctgtaattccagctatt

SEQ ID NO: 419834 - DNA, 201 bp, Homo sapiens
gcacttctcccaagctactgaggtcctcccaatctacaacatttcgtacttggaaattatctttcctggccaggcgcggtggctcacgcctgtaatctcarcactttgggaggccgaggcgggcggatcacaaggtcaggagttccagaccagcctggcaaatatggtgaaaccccgtctctactaaaaatacaaaaatta

SEQ ID NO: 419835 - DNA, 201 bp, Homo sapiens
caaaaagaacattaatcccttatatgaatatttattttttgatgatgaacattattcccaagaacagataaatgaaggaaatgataaacaccacatttaaracattgattacctcttgggggagggagacagggagaagggtgcaactgggatagctatgtagaactagacagtgtggtagtactacatttcttaagctaa

SEQ ID NO: 419836 - DNA, 201 bp, Homo sapiens
cagtccacagattattatatatagaaagcaatccttttctaatcctattcccatggatatcaatgttcaaagtttactgccatgagctcaatcaaggtatrgtgtgatttgaaagtgaagcctttattgtgccagaaggtcatagcataactgacttcatgcaaacagggagctctcccttctttcctagttggtctgctc

SEQ ID NO: 419837 - DNA, 201 bp, Homo sapiens
tcttatttacattcacattaacaagttatgatggccaggcacagtggctcacacctgtaatcccagcactttggaaggatgaggcaggagaatcatttgarcccaggagttcaagattggcctggtcagcatagtgagacctgttctatttaaaaaaaaataaaaaatattaaaggttttgttttgttttgttttttgtga

SEQ ID NO: 419838 - DNA, 201 bp, Homo sapiens
cacctgtaatcccagcactttggaaggatgaggcaggagaatcatttgagcccaggagttcaagattggcctggtcagcatagtgagacctgttctatttwaaaaaaaataaaaaatattaaaggttttgttttgttttgttttttgtgatggagtcttgctgtctcccagactggagtgcagtggcacgatcttggctca

SEQ ID NO: 419839 - DNA, 201 bp, Homo sapiens
cttgatactcctaataaattataacacattagaagattatttgtactggaaaagtatagtagaagttatacaactgtcttatgattttgttcatataatartcatccctcagtattcatggggtattggttccaggactcctgagtataccaaaatccacggatgctcaagtccctgatataaaatggcacagtgtttgca

SEQ ID NO: 419840 - DNA, 201 bp, Homo sapiens
tttttaaagcattttattttcatttcttattgcacgcaacatttctaggcatctgactccttgtgagcagggagaaaatgtggagaaagagagggagtacwcaaagccaagtttcattatggtctctaactttagaattgaccttaaaaagggagacagacatgtaaactgatcactgaaatgtccaaaaatcaactcatg

SEQ ID NO: 419841 - DNA, 201 bp, Homo sapiens
ctcccgagtaggtgggattacaggcatccgccaccatgcccggctaattttcttatttttagtagagatggggtttaaccatgttggccaggctggcctcsaactcctgacctcaagtgatctgcccgccttggcctcccaaagtgttgggattacagacatgagccactgcacccaggccacagtattgtttttaaaaga

SEQ ID NO: 419842 - DNA, 201 bp, Homo sapiens
catgccaccatgactggctaatttttattttttctttcctttctttttttttttttccaggagatggggtcttactatattgttcaggctgatcttgaacwcctggtctcaagtgattctctagcgttggcctcccaaagtgttggaattacaggcatgagccacggcacctgaccatatgtgtttttttccttgtaggaa

SEQ ID NO: 419843 - DNA, 201 bp, Homo sapiens
cttggtgttacagtgcatgactttatcattataggcttataagcaagagagggaaatgatgagatagatacagttttaaaaattcacctatattttaatgmtttcatagttttattttttaaaatactgattcatttggaactttgtaacatttaatacaaggcaaaattatataaatcgcaaacatcagttaagtaaact

SEQ ID NO: 419844 - DNA, 201 bp, Homo sapiens
gaggcaggaaaatcgcttggaacccatgaagcagaggttgcagtgagctgaggttgtgccactgcattctggcctgggtgacagagcaagcctccatcttaaaaaaaaaaaaaaaagaaaagaaaattcagtaagaccccaaaattattttgcttcaaacatatacatattttattttattttattttattttattttatt

SEQ ID NO: 419845 - DNA, 201 bp, Homo sapiens
tccacaggtgcttaaatactcaatgtggaactcagggatacagagggtttactgtactctcctttgggcattaaaaaactcatgatggttgtcatttccasaacaaatgtacagagcataattctagaataaacactatcttgggaatacagttacaattagagcgatcagctacactatattatgaatatcagtaatgta

SEQ ID NO: 419846 - DNA, 201 bp, Homo sapiens
aattaacatttaaatcacttaactctgagtaagcagattgccctccattatgtgtgtgagcctcatccagtcagctaaaggcctgaatagaaagaaaagamcagcttccccgagtaagagtgatttcccaacagactgcctttggactggaactgcaccatcatgccaaaaagcagaaggtaacacaagcaggagaaaaaa

SEQ ID NO: 419847 - DNA, 201 bp, Homo sapiens
agccgggaggaggagcttgcagtgagccgagatcacgccactgcactccagcctgggtgacaaagtgagactccgtctcaaaaaaaaaaacaaaaaaaaamaaaacaaaaaaaaaaaacatttgttaccaatgacttcatctccaggaactctttattaataccatagagtatattttataacatttaatctaaccttacc

SEQ ID NO: 419848 - DNA, 201 bp, Homo sapiens
atccagtcagctaaaggcctgaatagaaagaaaagaacagcttccccgagtaagagtgatttcccaacagactgcctttggactggaactgcaccatcatrccaaaaagcagaaggtaacacaagcaggagaaaaaaaaatcaatcaacagaaacagacccagaaatgacagagttgatggaatccacagatacaacttta

SEQ ID NO: 419849 - DNA, 201 bp, Homo sapiens
caggaggatcccttgagccctggagtttgaggctgcagtgagctatgatcgtgccactgcaccccagccagggcaagagagagagactgtcttttaaaaayaaagaccagctgggctcagtggctcacgcctgtaatcccagcactttgggagggtgaggcgggcggatcatgaggtcaggagattgagaccatcctggct

SEQ ID NO: 419850 - DNA, 201 bp, Homo sapiens
acctgtaatcccagcactttggaaggatgaggcaggagaatcatttgagcccaggagttcaagattggcctggtcagcatagtgagacctgttctatttawaaaaaaataaaaaatattaaaggttttgttttgttttgttttttgtgatggagtcttgctgtctcccagactggagtgcagtggcacgatcttggctcac

SEQ ID NO: 419851 - DNA, 201 bp, Homo sapiens
gaggcaggaagatcccatgaacccaggaatttgaggcgacagtgaggtatggttgtaccactccaccccagcctgggcaacagagagaggcccagtctcaaaaaaaaaaaaaaaaaaaagtggtatatctattcaatggaatattattcatccacaataggtaaatccataccaacagaaagcagattggtggttttcaga

SEQ ID NO: 419852 - DNA, 201 bp, Homo sapiens
gaaacaataccacatatttatattcagaataggagtagtagtgttatttccaaaactttttatgatctcccccatgatctttcaagatatgttactgaaaygagatcaaaagcgtgaaagagatcctcagtgcatgtgtgatttccctttagatgttatcttctgaggatgtatccagttttctcaacaaggcagacttgc

SEQ ID NO: 419853 - DNA, 201 bp, Homo sapiens
agtggggttttttttgagacacggtctcactctgttgctcaggctggaatacagtggtgtgatcacatttcaccacagcctcaacgccccgggctcaagtsatctgctacctcagcctcctgagtagctggggctacaggtgtgcaccaccacacctgactaatttttaatttttttgtagagaccaggtcttactatgtt

SEQ ID NO: 419854 - DNA, 201 bp, Homo sapiens
gatttagagctcttagttctcattggtgattgttaagctgtaagttactggtgtctccattctcaccaaaagggtctcactcttgtcacccaggctggagygcagtggcacaagcatagctcactgcagcctggaacccctgggctcaagcgatcatctcacctcatcctcctgagtagctgggactacaaacacatgcca

SEQ ID NO: 419855 - DNA, 201 bp, Homo sapiens
ctactccgaattaatccactattccaatgtttctcaaatttaagagtcacctgaaggcaagagacagtgttggtcaaaatgtagttcctagctgggcacaygcacacctgtaatcccagctactcgggaggctgaggccagaggatctcttgagcctaggaaaggagtttgagacccctgactttaaaagaaaaataaggc

SEQ ID NO: 419856 - DNA, 201 bp, Homo sapiens
tccgcttgcctcagcctcccaaagtgctgggattacaggcgtgagccatggtacccagccaaaaaactattaaagttttaagaatccctgttttcccaacrcatttgccaaatctgggtactatttctttttaatctttgacagtctagttaagtagaaaatactgtttcattttatttgtacttcattgattctatgtga

SEQ ID NO: 419857 - DNA, 201 bp, Homo sapiens
ctttcctagttggtctgctccttctcctccaggatgagtacagtgtccacagttattcctatgtcctccagcgactggcctccctccactgccagaggccrtctgggaaaggaagtagaaaggctgtatagagatatgtggtacccaattctcgtcatccagtcaaataagacctagaagatgaaaagcttggcttagtca

SEQ ID NO: 419858 - DNA, 201 bp, Homo sapiens
tcaatgttcaaagtttactgccatgagctcaatcaaggtatggtgtgatttgaaagtgaagcctttattgtgccagaaggtcatagcataactgacttcaygcaaacagggagctctcccttctttcctagttggtctgctccttctcctccaggatgagtacagtgtccacagttattcctatgtcctccagcgactggc

SEQ ID NO: 419859 - DNA, 201 bp, Homo sapiens
tctatgcaacattcctgtgaaaattacccagctgtgactgtcgaagggaaaaaatcacacttacctatatccgggatcccacgccggagctccagacacayaagggggacagcagagaggaagaaaatgccaacaaccccacgtgaagccatggtggcggaagcgcctggtgcaggcggaaagcccgccccttccggccgc

SEQ ID NO: 419860 - DNA, 201 bp, Homo sapiens
cgtgaagccatggtggcggaagcgcctggtgcaggcggaaagcccgccccttccggccgcgttttccgggaaggaagtggaactcttcttgccgcgggccrgctggagagggtcaataacgtggtaaatactgacggccgtgtcgttattgagggggagctaagccccgtgttttaaagttatagtctgtagccgtgtttc

SEQ ID NO: 419861 - DNA, 201 bp, Homo sapiens
tggtgcaggcggaaagcccgccccttccggccgcgttttccgggaaggaagtggaactcttcttgccgcgggccggctggagagggtcaataacgtggtaratactgacggccgtgtcgttattgagggggagctaagccccgtgttttaaagttatagtctgtagccgtgtttcagaagaaaggcaagtcgtcccccaag

SEQ ID NO: 419862 - DNA, 201 bp, Homo sapiens
ggcgcccgccaccacggccggctaattttttgtatttttagtagagacggggtttcaccgtgttagccaggatggtcttgatctcctgacatcgtgatccrcgcgccttggcctcccaaagtgctgggattacaggcgtgagccaccatacccggccatgtgtgatttagttctatgcaatattatcacctgtgtcaattc

SEQ ID NO: 419863 - DNA, 201 bp, Homo sapiens
gtgcaggcggaaagcccgccccttccggccgcgttttccgggaaggaagtggaactcttcttgccgcgggccggctggagagggtcaataacgtggtaaayactgacggccgtgtcgttattgagggggagctaagccccgtgttttaaagttatagtctgtagccgtgtttcagaagaaaggcaagtcgtcccccaagtc

SEQ ID NO: 419864 - DNA, 201 bp, Homo sapiens
accagccctgctgctggtataaagtatgatgtgtaaatcagacttaaatgctgttaagaaataattattggaagctcactatcaagaatccaaaggtagcmaaaaaaaaaaaaaaaaaaaaaaagaaaaaatatatattaaaaaaagaaaacttggcctcccaaagtgctgggattacaggcatgagccaccttgcttggc

SEQ ID NO: 419865 - DNA, 201 bp, Homo sapiens
aatttgacctcattatatattttttaaaatcttagcaccaagacagaagcaacagcccttaattttaattgcctcagagatttttgtatttctctacgcayaaagtctctaaaaattctgccttaccttctctccttgtgcttcttgttgtttttttctcacaagtttttgtcttttctcattcttttcttcttcttctaa

SEQ ID NO: 419866 - DNA, 201 bp, Homo sapiens
ttgcctaaaatattcctcccctcccccatcccttccctgcccccactggcttttcacgggcgtggccccttatttaaacctagggccgggcgcagtggcgyaggcctgtaatcccagcactttgagaggccgaggcaggaggatctcttgaacccaggagttcgagaccagcctgggcaacatagtgagaccctgtctcta

SEQ ID NO: 419867 - DNA, 201 bp, Homo sapiens
gatcccacgccggagctccagacacacaagggggacagcagagaggaagaaaatgccaacaaccccacgtgaagccatggtggcggaagcgcctggtgcargcggaaagcccgccccttccggccgcgttttccgggaaggaagtggaactcttcttgccgcgggccggctggagagggtcaataacgtggtaaatactga

SEQ ID NO: 419868 - DNA, 201 bp, Homo sapiens
ccaccacggccggctaattttttgtatttttagtagagacggggtttcaccgtgttagccaggatggtcttgatctcctgacatcgtgatccgcgcgcctyggcctcccaaagtgctgggattacaggcgtgagccaccatacccggccatgtgtgatttagttctatgcaatattatcacctgtgtcaattcctctgaac

SEQ ID NO: 419869 - DNA, 201 bp, Homo sapiens
agtagaatggtataacagggtagaataaataataaacttacccttcagataaacttggggagatttaaatgagttaagccatgaggtagtcacagaaatarttaaagtaagaagagcaagcagtagcaaaatccggccacaaagcaaaagaaaatccttgattcctgataaaggaaaaaaactaaaattaaaattcaaaac

SEQ ID NO: 419870 - DNA, 201 bp, Homo sapiens
gagatggggtcttactatattgttcaggctgatcttgaacacctggtctcaagtgattctctagcgttggcctcccaaagtgttggaattacaggcatgarccacggcacctgaccatatgtgtttttttccttgtaggaatttagaaaattgccatgccagctgtgccctaaaccctcaaaaagtagctgactttttgtt

SEQ ID NO: 419871 - DNA, 201 bp, Homo sapiens
cacctgtggtcacagctactccagaggctgaggcagaaggatcacttgagcccaggaggtggaggctgcagtaagctgtgtttgtgacactgcactccagsctgggcgacagagagagaccatgtctcaaaacaaaaagcaaaaagcattgcacagagagcaagcattgctctgatttttttccaccataggttaattttg

SEQ ID NO: 419872 - DNA, 201 bp, Homo sapiens
ggagtgcagtggcacaatctcggcttactgcaaactccacctcccaggttcacgccgttctccttcctcagcctcccgagtagctgggactacaggcgccygccaccacggccggctaattttttgtatttttagtagagacggggtttcaccgtgttagccaggatggtcttgatctcctgacatcgtgatccgcgcgcc

SEQ ID NO: 419873 - DNA, 201 bp, Homo sapiens
ggcacaatctcggcttactgcaaactccacctcccaggttcacgccgttctccttcctcagcctcccgagtagctgggactacaggcgcccgccaccacgsccggctaattttttgtatttttagtagagacggggtttcaccgtgttagccaggatggtcttgatctcctgacatcgtgatccgcgcgccttggcctccc

SEQ ID NO: 419874 - DNA, 201 bp, Homo sapiens
tgagcaacttagagaccagataaatgggaagttcctaaagctcagaatgaaggtatggattgacctatagcctatcttcgtgagtaagaattcctggaacrgtaaaatcaggttgatttagagctcttagttctcattggtgattgttaagctgtaagttactggtgtctccattctcaccaaaagggtctcactcttgtc

SEQ ID NO: 419875 - DNA, 201 bp, Homo sapiens
cctttattattattattattttttaaaaagacagagtcttgattgctctgtttcccaggctggtctcaaactcctaggctcaagcaatcctgcctcagccycctgagtagctggcactacaggaatgtgtcattgcacccagctgttactgactttttgatgagaagtttttaattttgatgacaatttatctaagttttc

SEQ ID NO: 419876 - DNA, 201 bp, Homo sapiens
ttgaagtgggagaatagcctgagcccagggaatctgaggcaacagtaagctgtgatcacgccactgcacccagcctggatgacacagcaagactctgtttwaaaaaaaaaagacattataaaatgagaagataacacattagtgtttatttttcacctgtcaagaaaccctttatgactaacatgatcattaactgtgctg

SEQ ID NO: 419877 - DNA, 201 bp, Homo sapiens
tgtcctcaagaaactcagcttatccgactttgtggttctatggagaagaaaaaaaaaaactgggaaagatagccctgtaagcaaataaacacaatgcagtkcctgagtgctatgatagagatatacacagggtgttgcagaaccatacccagaaggcttgcaaaaggctttccaaaaggaagtcacgcctacgttgtgttc

SEQ ID NO: 419878 - DNA, 201 bp, Homo sapiens
tgtctcccaggttcaagcgatcctcctgcctcagcctcccgtgtagctgggattacaggcgcccgccaccacgcctggctaattttttgtatttttagtaratacgaggtttcaccatgttggtcaggcaggtttcaaatcctgacctcaggtgatccacccacctgagcctcccaaagtgctgggagtacaggtgtgagc

SEQ ID NO: 419879 - DNA, 201 bp, Homo sapiens
ggggtcttactatattgttcaggctgatcttgaacacctggtctcaagtgattctctagcgttggcctcccaaagtgttggaattacaggcatgagccacsgcacctgaccatatgtgtttttttccttgtaggaatttagaaaattgccatgccagctgtgccctaaaccctcaaaaagtagctgactttttgtttcctt

SEQ ID NO: 419880 - DNA, 201 bp, Homo sapiens
ccatgttggtcaggcaggtttcaaatcctgacctcaggtgatccacccacctgagcctcccaaagtgctgggagtacaggtgtgagccaccgtgcctagcttttttttttttttttttttgagacggaggctgtcgcccaggctggagtgcagtggcacgatctcggctcactgcaagctccgcctcccagattcaggcca

SEQ ID NO: 419881 - DNA, 201 bp, Homo sapiens
aagaattggatcccattctaattgaggtgtggtgtgtttccattctccttcattgtgctgggcctcgctgccctgtgacctggaccttccttcctttgccwaccgggctcagccgtgtgctcggatgacctgtgcactgtccttgtgggcacaggatcgtggcctaccacaagacaaattcgaagctgcacttactacttt

SEQ ID NO: 419882 - DNA, 201 bp, Homo sapiens
catgttggtcaggcaggtttcaaatcctgacctcaggtgatccacccacctgagcctcccaaagtgctgggagtacaggtgtgagccaccgtgcctagcttttttttttttttttttttgagacggaggctgtcgcccaggctggagtgcagtggcacgatctcggctcactgcaagctccgcctcccagattcaggccat

SEQ ID NO: 419883 - DNA, 201 bp, Homo sapiens
atgttggtcaggcaggtttcaaatcctgacctcaggtgatccacccacctgagcctcccaaagtgctgggagtacaggtgtgagccaccgtgcctagcttttttttttttttttttttgagacggaggctgtcgcccaggctggagtgcagtggcacgatctcggctcactgcaagctccgcctcccagattcaggccatt

SEQ ID NO: 419884 - DNA, 201 bp, Homo sapiens
tgctgggagtacaggtgtgagccaccgtgcctagcttttttttttttttttttttgagacggaggctgtcgcccaggctggagtgcagtggcacgatctcsgctcactgcaagctccgcctcccagattcaggccattctcctgccttagcctcctgagtagctgggactacaggcgcctgccaccatgccggctaatttt

SEQ ID NO: 419885 - DNA, 201 bp, Homo sapiens
ttttaattttgatgacaatttatctaagttttcttttatgattattgctttctgtgtcctaagaaacctttgcttttcttgaagtcgagagattctcctattttttttttttttaaatagacacagggtttcaccatattgttcaggctggtcttcaactcctgagcttaagcaatctgcccaccttggcgtcccaaagtg

SEQ ID NO: 419886 - DNA, 201 bp, Homo sapiens
cgtctcaaaaaaataaaaagtaaaaataaaaataaacagttacagaaacaataccacatatttatattcagaataggagtagtagtgttatttccaaaactttttatgatctcccccatgatctttcaagatatgttactgaaatgagatcaaaagcgtgaaagagatcctcagtgcatgtgtgatttccctttagatgtt

SEQ ID NO: 419887 - DNA, 201 bp, Homo sapiens
ggaaagatagccctgtaagcaaataaacacaatgcagtgcctgagtgctatgatagagatatacacagggtgttgcagaaccatacccagaaggcttgcaraaggctttccaaaaggaagtcacgcctacgttgtgttcaaaggttaggaatctgggcaaggatgtccgggaagggtgggatttcaagtttaggaacctga

SEQ ID NO: 419888 - DNA, 201 bp, Homo sapiens
gtctcaaaaaaataaaaagtaaaaataaaaataaacagttacagaaacaataccacatatttatattcagaataggagtagtagtgttatttccaaaactttttatgatctcccccatgatctttcaagatatgttactgaaatgagatcaaaagcgtgaaagagatcctcagtgcatgtgtgatttccctttagatgtta

SEQ ID NO: 419889 - DNA, 201 bp, Homo sapiens
atttattgagctccacagtttggtactctacaactcttggatattcaaatatttacaagttactgaatttgtcctcaagaaactcagcttatccgactttstggttctatggagaagaaaaaaaaaaactgggaaagatagccctgtaagcaaataaacacaatgcagtgcctgagtgctatgatagagatatacacaggg

SEQ ID NO: 419890 - DNA, 201 bp, Homo sapiens
tctcaaaaaaataaaaagtaaaaataaaaataaacagttacagaaacaataccacatatttatattcagaataggagtagtagtgttatttccaaaactttttatgatctcccccatgatctttcaagatatgttactgaaatgagatcaaaagcgtgaaagagatcctcagtgcatgtgtgatttccctttagatgttat

SEQ ID NO: 419891 - DNA, 201 bp, Homo sapiens
aatcaactcatgattctcagcatctccacagtttttctttccatttcccctttaccagtagcactaccaaatacctaggtttgctcagtcccccatgaggyagtcgtccttgaatccttcctttcccttgccccaaacatcaacccataaacaaagcctgttggttgatcctactccgtcaatatcccaattctgtctaca

SEQ ID NO: 419892 - DNA, 201 bp, Homo sapiens
gctcactgcaaccatggcctccagggttcaagactcatgtctcagcctcctgagtgggtgggactacaggtacacaccaccactctggctaatttttgtatttagtagagacggggttttcctgtgttgcctaagctggtcttttattttcactgtaagacatactcagtgatggtttctttctaataatggttaataggc

SEQ ID NO: 419893 - DNA, 201 bp, Homo sapiens
agaagttatacaactgtcttatgattttgttcatataatagtcatccctcagtattcatggggtattggttccaggactcctgagtataccaaaatccacrgatgctcaagtccctgatataaaatggcacagtgtttgcatacagtctatgctcccacatactttaaatcatctatagatgactcatatactacccaata

SEQ ID NO: 419894 - DNA, 201 bp, Homo sapiens
tttttttaagagatgaggtctcactatgttgactaggctggtctcgaactcctgagctcacgtgatcctcctgccttggcctcccaaagtgctaggattayaggcatgagccaacatgcccaacccaaaacatttttcttgatactcctaataaattataacacattagaagattatttgtactggaaaagtatagtagaa

SEQ ID NO: 419895 - DNA, 201 bp, Homo sapiens
atcatgactaaagttgtactgattactctccctgaaactacacatcacaaattaatagtaaaatggctcttactgtgcaaagttctagaataaataaattwgagtagaatggtataacagggtagaataaataataaacttacccttcagataaacttggggagatttaaatgagttaagccatgaggtagtcacagaaat

SEQ ID NO: 419896 - DNA, 201 bp, Homo sapiens
actgattactctccctgaaactacacatcacaaattaatagtaaaatggctcttactgtgcaaagttctagaataaataaattagagtagaatggtataamagggtagaataaataataaacttacccttcagataaacttggggagatttaaatgagttaagccatgaggtagtcacagaaataattaaagtaagaagag

SEQ ID NO: 419897 - DNA, 201 bp, Homo sapiens
agtatgctgaacaaaaactgataatcattatcaataaaaactcctaaaagcagtctaacatcattttcaattaaaaatcaatcatgtaataggaaacatastaagaggattcaaaatataaaatgagaatattttccaaccccaagtttgtgaccactgcttaatttccaggcttcacccgtcatttgataaaagcgctcc

SEQ ID NO: 419898 - DNA, 201 bp, Homo sapiens
gcgcgccttggcctcccaaagtgctgggattacaggcgtgagccaccatacccggccatgtgtgatttagttctatgcaatattatcacctgtgtcaattyctctgaacactacagtcaagatatagagtagttccatcacaggaattcctcatgctacccttctacagccaaaccacctcactttctaccctcaccacca

SEQ ID NO: 419899 - DNA, 201 bp, Homo sapiens
gctcacgcctgtaatctcagcactttgggaggccgaggcgggcggatcacaaggtcaggagttccagaccagcctggcaaatatggtgaaaccccgtctcyactaaaaatacaaaaattagccgggtgtggtggcggtcgcctgtaattccagctattcgggaggctgaggcaggagaattgcttgaacccgcatgcggag

SEQ ID NO: 419900 - DNA, 201 bp, Homo sapiens
ccgaattaatccactattccaatgtttctcaaatttaagagtcacctgaaggcaagagacagtgttggtcaaaatgtagttcctagctgggcacatgcacrcctgtaatcccagctactcgggaggctgaggccagaggatctcttgagcctaggaaaggagtttgagacccctgactttaaaagaaaaataaggctgggc

SEQ ID NO: 419901 - DNA, 201 bp, Homo sapiens
gtttccacttctccatctcgagctggtttcttcaaaacttctgatgcgatggaacactccctcactctgaaaacacacttccccaggctttactgacacamattttcctcaatccctgacctaaacattgttcccatgaatcctgtccttggctcccatctttttcttcatcccagatttttctcctgagctccagacccc

SEQ ID NO: 419902 - DNA, 201 bp, Homo sapiens
agacatctgccctggaccacacagtaggttccgaggagacgttcagcctgggctggcctgggatagcctaaagtgggggtgccatggaggggctgagtgcytggcagcttagaagggtcctggggaaaagcttccagggcagcgtggcaaccaggttatgtggtagggagaggggatcactacacccccacagctaagggc

SEQ ID NO: 419903 - DNA, 201 bp, Homo sapiens; identical to SEQ ID NO: 109239

SEQ ID NO: 419904 - DNA, 201 bp, Homo sapiens; identical to SEQ ID NO: 109240

SEQ ID NO: 419905 - DNA, 201 bp, Homo sapiens; identical to SEQ ID NO: 109242

SEQ ID NO: 419906 - DNA, 201 bp, Homo sapiens
acctacttcctaggtttgtggtgatgcttacctgagttaataaaggtcaagtgcttaggggagtgcctggcacacagcaagcagtcgacagattttgcctrtcattaggatctggggatactgatgttccatcatcaagggccaagtcgtgaggggtgttctccctggaaggagctaatcctttcccctcagtcttaaaat

SEQ ID NO: 419907 - DNA, 201 bp, Homo sapiens
cagaacaggtactgaggagaaacacaagagagactacatggaaagggattttgggagaacaggaatagtagcaccaccaggagaggccagggctggtgtaytgagcttcatacctgcagggagtagaaacagaagcagaaggcccaggctgaggtggtggctccggagccccatggccctggcactgcaagagcgggggca

SEQ ID NO: 419908 - DNA, 201 bp, Homo sapiens; identical to SEQ ID NO: 109247

SEQ ID NO: 419909 - DNA, 201 bp, Homo sapiens
cctccctggcctgcctgcagggacacatgaggtaaaggccatggagtgaactggtactatcttctggcgccaggctgacaaatttctcctccaccctcccyttttcaaggacctggagtctgcctgcctctccacaaatgctagaggggcccaaataagccacaagagtccagactttcacccagggattctaaatcccac

SEQ ID NO: 419910 - DNA, 201 bp, Homo sapiens; identical to SEQ ID NO: 109250

SEQ ID NO: 419911 - DNA, 201 bp, Homo sapiens; identical to SEQ ID NO: 109252

SEQ ID NO: 419912 - DNA, 201 bp, Homo sapiens; identical to SEQ ID NO: 109253

SEQ ID NO: 419913 - DNA, 201 bp, Homo sapiens
ttggcaaagaggtcacggaacagcttgagagccagccggccctcagctcccaggcactctggagggtcagtaaggagggttgtccatcccaggccctagtyccagggcctctgctcacaccctccactcccagggctggggccctgtccttatgagtgtcctcctggtgtctgccttctcttgctctagctgtggctctag

SEQ ID NO: 419914 - DNA, 201 bp, Homo sapiens
gctctcggccagcagcaactggaagacggtgagcgccagcagcacggtgacgcccagcgacaccttctcgcctgagtcggcaggcaggtggaaggcgagcrgcgcaagcagcgagatgagcacgcagggcagcagcaggttgcacacgtaggcggcggcgcggcggcgcagcagcagcgtgaaggtgacgtcggggtaggg

SEQ ID NO: 419915 - DNA, 201 bp, Homo sapiens
ggacgcccccctctcactttctgcagtggggccgttccgcagacccaggccctgtcgcggccccgccctggggggaccccagcgcatcgtcaggtcccccsgcgcccccgctgctcaccgatgagcggcacgctctcggccggtggcatgctctcggccagcagcaactggaagacggtgagcgccagcagcacggtgacg

SEQ ID NO: 419916 - DNA, 201 bp, Homo sapiens
attatccctcccttctccctctgctgcctcctcctcggggaatccagttaatctccagatcctgtcagatcattcaaatcctccagattttgcgaaacatygtcttgagtctaccctctcccctccaggtcagggccctcccttcactgtctccctttccccaaaggctcaccttcttctacccctcccatgccccaggac

SEQ ID NO: 419917 - DNA, 201 bp, Homo sapiens; identical to SEQ ID NO: 109258

SEQ ID NO: 419918 - DNA, 201 bp, Homo sapiens
ctccccttttcaaggacctggagtctgcctgcctctccacaaatgctagaggggcccaaataagccacaagagtccagactttcacccagggattctaaaycccactgctctgccccctccagtatctctcaaacctgtttccacttctccatctcgagctggtttcttcaaaacttctgatgcgatggaacactccctca

SEQ ID NO: 419919 - DNA, 201 bp, Homo sapiens
gtttcctcagcaggaatatggggtgagaatccctgcttagcagggattcagtaagttcaggtgaacaaaatattgggcacgaggtaggcacccaatactcmgtacccaacagtcagtacccaacagtttgtaactgctacctttgttaatattaacatttacagaaaagaaattccatggagaataatcccagtctctcac

SEQ ID NO: 419920 - DNA, 201 bp, Homo sapiens
catggaggggctgagtgcttggcagcttagaagggtcctggggaaaagcttccagggcagcgtggcaaccaggttatgtggtagggagaggggatcactayacccccacagctaagggcaagtctagagaggggtaagagagaggaggggcccagataggcagtacttgttatagagtacgatgtctggccgccacacaag

SEQ ID NO: 419921 - DNA, 201 bp, Homo sapiens
acacagcaagcagtcgacagattttgcctgtcattaggatctggggatactgatgttccatcatcaagggccaagtcgtgaggggtgttctccctggaagragctaatcctttcccctcagtcttaaaatgagggcacgttcccaggacgcccccctctcactttctgcagtggggccgttccgcagacccaggccctgtc

SEQ ID NO: 419922 - DNA, 201 bp, Homo sapiens
caccatgaagctctccagaccctccaagccccatggatggaagcaggaaggaggtaagggccgagttctccccatccttcattcctacacgtgggtcatcrgaagctactgctctctaattgctcccgtcactgctggaggctgcactcatacacaatccaggacagtcccgctctcaaataacgacgggcatgagctggg

SEQ ID NO: 419923 - DNA, 201 bp, Homo sapiens; identical to SEQ ID NO: 109267

SEQ ID NO: 419924 - DNA, 201 bp, Homo sapiens
catcgtcttgagtctaccctctcccctccaggtcagggccctcccttcactgtctccctttccccaaaggctcaccttcttctacccctcccatgccccargaccacgcttttaagcatgcacatctgaccaggctagtatgctgctgaaacctttcagtgctccccgtcatctgcaggagaaagacctggcctggccggc

SEQ ID NO: 419925 - DNA, 201 bp, Homo sapiens; identical to SEQ ID NO: 109269

SEQ ID NO: 419926 - DNA, 201 bp, Homo sapiens
ctctgagggtccaaaatatgaactcgcttcctccctccatgctctgaaacctgcttcctatcccatgttccctatctcagcaaatagcatgccctcagctkcaacagtgaccttagttggaaatctgggaattatccctcccttctccctctgctgcctcctcctcggggaatccagttaatctccagatcctgtcagatc

SEQ ID NO: 419927 - DNA, 201 bp, Homo sapiens
tggaggctgcgcgtcggctctgggggcaggcggggcagggctcacctaggctgtccagcctgaggagcagccccggaggccgggagcccagggcagacccycaggggctgaaagaaaccaaaacttctccccagaatattgaggctcgttaagttcgagacactcacgacgcaggggagcacctggccccagcgtctgctg

SEQ ID NO: 419928 - DNA, 201 bp, Homo sapiens; identical to SEQ ID NO: 109271

SEQ ID NO: 419929 - DNA, 201 bp, Homo sapiens; identical to SEQ ID NO: 109270

SEQ ID NO: 419930 - DNA, 201 bp, Homo sapiens
agtaatgcaggttcatgataaggatggtgagtgctgttgagaatgtgaccatggtcatagtggccatgtagtacttccctgcaagagagagagaaagccarttgactcaaaacaaaagcctgtggttcctgagcttcccagccacctctgcacaaatggaaataagcccaccatgaagctctccagaccctccaagcccca

SEQ ID NO: 419931 - DNA, 201 bp, Homo sapiens; identical to SEQ ID NO: 109281

SEQ ID NO: 419932 - DNA, 201 bp, Homo sapiens; identical to SEQ ID NO: 109290

SEQ ID NO: 419933 - DNA, 201 bp, Homo sapiens; identical to SEQ ID NO: 109291

SEQ ID NO: 419934 - DNA, 201 bp, Homo sapiens
catatcctgccctgtctgtgcacactcccctgcagggctctggtcagcacccacaaacctgacttgtccataccgtccagttcccacccagacctgacctygccatgtgaccttagtgggctcttctcttttctgcccctgtttcctcagcaggaatatggggtgagaatccctgcttagcagggattcagtaagttcagg

SEQ ID NO: 419935 - DNA, 201 bp, Homo sapiens
gtatacatatgtatacatacatacgtatacatatgtatacatacatacatacgtatacatacatatgtatacacatatatatatacatatatatatatatwttttttttgagacacagtctcactctgtcgcccagctggggtgcagtggcgcgatctcagctcactgcaacctccaccgcccgggttcaagtgattctcc

SEQ ID NO: 419936 - DNA, 201 bp, Homo sapiens
atatccaatctaggatcacacattacattttgttgtgctatctctttagtctcctttaatctcgaacacaccccgacctctttgtcttgcatgaagagtgyagatcaaattggatttatctataaattattgatcataattagattcaagttaagcagttttggcaagaacatgacctagttgattgtgtgtactttctac

SEQ ID NO: 419937 - DNA, 201 bp, Homo sapiens
atgcctcccatagttggcacatggagagaattttgtgaaaggaagtgagagagggtagctgggcccacgtcagaagctcagggaggtcttggtgagaagcytgggctttctccaggaggccagagagctctaggtggcctcccaagcagctgcccaatcataaattcctcatgagtgcaactgcctgatagttttatcgat

SEQ ID NO: 419938 - DNA, 201 bp, Homo sapiens
aatttcttacctggtctctgcacctctgctgtctcacttacttcccttccattctactcacagcagccaacatgatcttttccaatgtaaatcagcgtcamccctctgcttagaactcttcacagcttcctattgctcatagaccatggtaaggatttttgtttttctcctacaagctcttgcatgaggtggctggtccct

SEQ ID NO: 419939 - DNA, 201 bp, Homo sapiens
aaggccaggaagtagactgccagactctgcaggcagaagtaaacttccaacacctcacacgtgggattgggggttcctgtgtcttcccaggcgatctcttygtgaaggagctattttggatgttgcacttgcaaaaggaaacctttgccacctatgttgctcgattccaaaaagagggtgagagaagatgggagtcggtgt

SEQ ID NO: 419940 - DNA, 201 bp, Homo sapiens
acaacaaatgtaaaggattaggggagggtaaagaaccgtgaaggaggcccggcgcagtgcctcatgcctgtaatcgcagcactttgggatgctgaggcagrcagatcacctgaggtcaggagttccagaccagcctgtccaatatggtgaaaccccatctctactaaaaatacaaaaattagccaggcgtggtggcaagcg

SEQ ID NO: 419941 - DNA, 201 bp, Homo sapiens
cacactccagcctgggtggcagggtaagaccctcccccatcccccaaaatatgcattgcctagcccagcagctggcattatgttagacggtcagttgtagygccctttcctgagaaggccaggaagtagactgccagactctgcaggcagaagtaaacttccaacacctcacacgtgggattgggggttcctgtgtcttcc

SEQ ID NO: 419942 - DNA, 201 bp, Homo sapiens
ggttccatgatctgcaccccactcccacccctaggatatttcgtcgaaggaaggtgatcgatttcatcaaatcctcactgtttggccttggcagtggagckgccgagcaaacccaggtcccaaaagaaaaggccacagattcgaggcaacaataaagatttatcttgttgtctaagcatctgactcactccccgggacggg

SEQ ID NO: 419943 - DNA, 201 bp, Homo sapiens
cggttccatgatctgcaccccactcccacccctaggatatttcgtcgaaggaaggtgatcgatttcatcaaatcctcactgtttggccttggcagtggagyggccgagcaaacccaggtcccaaaagaaaaggccacagattcgaggcaacaataaagatttatcttgttgtctaagcatctgactcactccccgggacgg

SEQ ID NO: 419944 - DNA, 201 bp, Homo sapiens
aaattagccaggcgtggtggcaagcgcctgtagtcccagatactcaggaggctgaggcaagagaatcgcttgaacccaggaagcggaggttgcagtgagccgagatcgcgccaatgcattccagcctgggcgacagagcgagtctccatctcaaaaacaaaaacaaaaacagaatcatgagtgtcccatggtcatccccca

SEQ ID NO: 419945 - DNA, 201 bp, Homo sapiens
ctacttacaatctttactgagccttgttggagcccacttactacttacctgcgtcctggtcctgtgccttcgtctgaccatctaggaatgtcatagatgayctggccccagcccttagccctgacctctccttttagccatgccccttagtgggcaaatacaagccttgaccctgcccctccaggtgtgatgttgcaaact

SEQ ID NO: 419946 - DNA, 201 bp, Homo sapiens
gaactcaggaggcgaaggttgtagtgagataagatcgcgccactgcactccagcctgggtgacagagtgagacttcatctaaaaaaaaaaaaaaaaaaaaagagagagagaaagaaaagagaaaagacgaggttacaacaaatgtaaaggattaggggagggtaaagaaccgtgaaggaggcccggcgcagtgcctcatgc

SEQ ID NO: 419947 - DNA, 201 bp, Homo sapiens
actctatctctacaaaaaaatttaaaaattagtcaggtgtggtgttgcgttcctgtagtcccagctacttggaaggctgaggcaggaggattgcttggacycaggagttggagactgcagtaagctatgatcataccactgcactccagcccaggcaaaagagtgagaccttgtctaaaaagaaaaaaaagaggccgggcg

SEQ ID NO: 419948 - DNA, 201 bp, Homo sapiens
taagggttggagttcaggctcacgtcaatctggggacttggaaaattccacagtttgggattttgggaaggggcgcatggggttgggagattccaggttcwgagtttggggacttatgagtgattcctgtttaatagtttttctgatctctcagttgggggattcagtgagaaccctaaattttgggtcccctggattggg

SEQ ID NO: 419949 - DNA, 201 bp, Homo sapiens
aagaccaggggaaggaagaggctgacagcagggtctccgggattcgggaatggagaaggctgagatgcagattccgaggttccccgaggctagtaaatacygttttccctatcctcggctggcaattttatgtaataaaactacaactcccagaaggcaacgggcggctgagtccttaaccaggcctatctttgcccagtg

SEQ ID NO: 419950 - DNA, 201 bp, Homo sapiens
tagtaaatactgttttccctatcctcggctggcaattttatgtaataaaactacaactcccagaaggcaacgggcggctgagtccttaaccaggcctatcyttgcccagtggcctcatgggtattgtagtttctaagattaggcgcgccaatgagacagtaaggctggaatctggggttatatctcctctgacagatgagg

SEQ ID NO: 419951 - DNA, 201 bp, Homo sapiens
cggtgcccgccatcacacccagctaatttttgtattttcagcagagacggggtttcaccatgttggtcaggctagtcttgaactcctgaccttgtgatcckcccgcctcggcctcccaaagtgctgggattacaggagtaagccaccgcatccggcctctacttacaatctttactgagccttgttggagcccacttacta

SEQ ID NO: 419952 - DNA, 201 bp, Homo sapiens; identical to SEQ ID NO: 109657

SEQ ID NO: 419953 - DNA, 201 bp, Homo sapiens
aaaaaaaaaaaaaagagagagagaaagaaaagagaaaagacgaggttacaacaaatgtaaaggattaggggagggtaaagaaccgtgaaggaggcccggcrcagtgcctcatgcctgtaatcgcagcactttgggatgctgaggcaggcagatcacctgaggtcaggagttccagaccagcctgtccaatatggtgaaacc

SEQ ID NO: 419954 - DNA, 201 bp, Homo sapiens; identical to SEQ ID NO: 109660

SEQ ID NO: 419955 - DNA, 201 bp, Homo sapiens
tcgggaaccaaggtcggggagcggctgtttagggtgcatcactgttcaggatgcatcggggctcctttttctaagcggaagggtgcgccctgcaaattggragcccgttagttttggggaagggtgaacaagggccccctaggtctagaggaccgcatggagtctcgcttaagtgttagtggggtcctcagttctaggaat

SEQ ID NO: 419956 - DNA, 201 bp, Homo sapiens
tgggagcccgttagttttggggaagggtgaacaagggccccctaggtctagaggaccgcatggagtctcgcttaagtgttagtggggtcctcagttctagraatctggtatgtgttttggttttgaaggagttccgagtttgataatatcgtggttgggtctgtgttagatgtttattggtttgggcattgaatcttcagc

SEQ ID NO: 419957 - DNA, 201 bp, Homo sapiens; identical to SEQ ID NO: 109663

SEQ ID NO: 419958 - DNA, 201 bp, Homo sapiens
acccctgggtcctgggaaaggagggagataagaccaggggaaggaagaggctgacagcagggtctccgggattcgggaatggagaaggctgagatgcagawtccgaggttccccgaggctagtaaatactgttttccctatcctcggctggcaattttatgtaataaaactacaactcccagaaggcaacgggcggctgag

SEQ ID NO: 419959 - DNA, 201 bp, Homo sapiens
gaaggggcgcatggggttgggagattccaggttcagagtttggggacttatgagtgattcctgtttaatagtttttctgatctctcagttgggggattcastgagaaccctaaattttgggtcccctggattggggctcagtttcacacttcggaggcatttgatgaaggacataggtcctctttatttggagatttcctg

SEQ ID NO: 419960 - DNA, 201 bp, Homo sapiens
ctcggagggggtggtttcaggagttccttgtggagaggggatcgtccgtgactcagaccccgtcgaaaagctctcgatttcacgcaaccaaccttaccctsgtccccaacacaatccttgattttacccctgggaaaattagcgtaggtggtcatgaccccggcttcctctttaaaagccctcagaacctggaccgggctc

SEQ ID NO: 419961 - DNA, 201 bp, Homo sapiens
aacctccacctcccaggttcaaactattctcctgcctcagccccctgagtagctgggattaccggtgcccgccatcacacccagctaatttttgtattttyagcagagacggggtttcaccatgttggtcaggctagtcttgaactcctgaccttgtgatccgcccgcctcggcctcccaaagtgctgggattacaggagt

SEQ ID NO: 419962 - DNA, 201 bp, Homo sapiens
ccaggctggagtgcagtggcacgatcacggctcactgcaacctccacctcccaggttcaaactattctcctgcctcagccccctgagtagctgggattacmggtgcccgccatcacacccagctaatttttgtattttcagcagagacggggtttcaccatgttggtcaggctagtcttgaactcctgaccttgtgatccg

SEQ ID NO: 419963 - DNA, 201 bp, Homo sapiens; identical to SEQ ID NO: 109690

SEQ ID NO: 419964 - DNA, 201 bp, Homo sapiens
atctcttcgtgaaggagctattttggatgttgcacttgcaaaaggaaacctttgccacctatgttgctcgattccaaaaagagggtgagagaagatgggartcggtgtcccccagctcctctttccactatccaagagtccttgtctccagccccttacttctccaagcccagttcctcagcttccccaactgcctcctcc

SEQ ID NO: 419965 - DNA, 201 bp, Homo sapiens
tggtcctgtgccttcgtctgaccatctaggaatgtcatagatgacctggccccagcccttagccctgacctctccttttagccatgccccttagtgggcawatacaagccttgaccctgcccctccaggtgtgatgttgcaaactctgatctggtgcaagaactgcaaaaaggaggttcacgcttgtcgaaagtcctacga

SEQ ID NO: 419966 - DNA, 201 bp, Homo sapiens
gagggtggggccctggatgactttccagcctcttcaactgacttgctcccctctccttttcttctctttagagacccagcccagggccctcccacccttgyccagacctggtgggcccttcagagggaggggtggacctgtttctctttcactttcatttgctggtgtgagccatggggtgtgtatttgtatgtggggagt

SEQ ID NO: 419967 - DNA, 201 bp, Homo sapiens
tgggacttggtctggttgagtgagggccagcagtgtctcccagcagacatgggagtattggttcctagagtggtggtgagttccagcacctgttctgctcrgtcccgcccctctttttttcctagctggtcctttcagtgggccagataccagaatcacatgcccccagcaccaggtaccctatttttttcctctgttttc

SEQ ID NO: 419968 - DNA, 201 bp, Homo sapiens
tccgccgcttgcgccgcatggagtccgaatcggaaagcggggctgctgctgacacccccccactggagaccctaagcttccatggtgatgaagagattatygaggtggtagaacttgatcccggtccgccggacccaggtgagaactgccgctcctcaggccatgggacaggagacgctcacccctggcctctgactcctg

SEQ ID NO: 419969 - DNA, 201 bp, Homo sapiens
ccctatccatgtactgaaaggtatcagaggtgggggaagtgttagcctgggcctttgtagggaggggctgagaacctggggcaggactcagaggggaggtmggacgaagcctgagctgcctccctgctctatgctagggactgagggtcaccagggcccactcacctgtgttgctgccaaccaggatggcagcttgatcct

SEQ ID NO: 419970 - DNA, 201 bp, Homo sapiens
gtgttttgggcacagaggcaggaggcactaattggccaagggaatccaggaaaggccagagaaggccacattggtataggagcaggcgggcagaggtgtaragtggacagaagggggaaggcataggaggctgggacttggtctggttgagtgagggccagcagtgtctcccagcagacatgggagtattggttcctagag

SEQ ID NO: 419971 - DNA, 201 bp, Homo sapiens
gagaacctggggcaggactcagaggggaggtaggacgaagcctgagctgcctccctgctctatgctagggactgagggtcaccagggcccactcacctgtkttgctgccaaccaggatggcagcttgatcctaactggctctgtggactgccaggccaagctggtcagtgccaccaccggcaaggtgagtggacctggagc

SEQ ID NO: 419972 - DNA, 201 bp, Homo sapiens
tctgtccccttacccatggaatatctcttgggacagcatctgtgttttgtgtgagcctggaccccaagaccaataccttggcagtgaccgggggtgaagakgacaaagccttcgtatggcggctcagcgatggggagctgctctttgagtgtgcaggtgagggggctggggtagaggcctgggagaggtcatattcttttg

SEQ ID NO: 419973 - DNA, 201 bp, Homo sapiens
ttccagcctcttcaactgacttgctcccctctccttttcttctctttagagacccagcccagggccctcccacccttgcccagacctggtgggcccttcaragggaggggtggacctgtttctctttcactttcatttgctggtgtgagccatggggtgtgtatttgtatgtggggagtaggtgtttgaggttcccgttct

SEQ ID NO: 419974 - DNA, 201 bp, Homo sapiens
aaaaaaaaattagctgggtgtggtggcatgtgcctgtaatcccagctactccggaggctgaggaaggagaatcacttgaacctgggaggcagaggttgcaytgagctgagattgtgccactgcgcttcggcctgggcgacagagcaagattccatctcaaaaaaataaaataaaatgagagataattatatctttttgagc

SEQ ID NO: 419975 - DNA, 201 bp, Homo sapiens
gatgtggaaagtcccgaatggtgactgcaagaccttccagggtcccaactgcccagccacctgtggccgagtcctccctgatggtgagagcacctcccttragtgacctttcctgggtgcagaggccgaatcccgggatatacacctcccagagcagccttctgggtcacagccggcaaaatctgaggcctgctgtttgca

SEQ ID NO: 419976 - DNA, 201 bp, Homo sapiens
ataaaataaaatgagagataattatatctttttgagcatattttatataactttctcaagtgctagttcttagtaagaaactgttgccaggcacggtggcwcatgcctgtaatcccagcactttgggaggccgaggcgggtggatcagaaggttaggagttcgagaccagcctgaccaacatgatgaaaccccatctctac

SEQ ID NO: 419977 - DNA, 201 bp, Homo sapiens
cctgtgtgtctggtgttgaggggacgaagggacccctgcccctgtctgccagcagaggcagtagggcacagagggaagaggagggtggggccctggatgaytttccagcctcttcaactgacttgctcccctctccttttcttctctttagagacccagcccagggccctcccacccttgcccagacctggtgggcccttc

SEQ ID NO: 419978 - DNA, 201 bp, Homo sapiens
tgctggtgtgagccatggggtgtgtatttgtatgtggggagtaggtgtttgaggttcccgttctttcccttcccaagtctctgggggtggaaaggaggaaragatactagttaaagattttaaaaatgtaaataaaatatacttcccagagacagagtctgtgtggattttgtgatggctggaccctaggaggagctagcg

SEQ ID NO: 419979 - DNA, 201 bp, Homo sapiens
cttgatcctaactggctctgtggactgccaggccaagctggtcagtgccaccaccggcaaggtgagtggacctggagcccggctggggcctccgctttccygactcctctccttccttcctgggtcttcactgtctcctctccccaccgtctttctctccatcaagcacccggattccgtgtcctcctctgatcctctctg

SEQ ID NO: 419980 - DNA, 201 bp, Homo sapiens
gtttctctttcactttcatttgctggtgtgagccatggggtgtgtatttgtatgtggggagtaggtgtttgaggttcccgttctttcccttcccaagtctytgggggtggaaaggaggaagagatactagttaaagattttaaaaatgtaaataaaatatacttcccagagacagagtctgtgtggattttgtgatggctg

SEQ ID NO: 419981 - DNA, 201 bp, Homo sapiens
  misc_feature (1)...(201): n = A,T,C or G
tctgccctctcttcatctgtgcctctcttcagggaagagagctgtggtaggctatgaagatgggaccatcaggatttgggacctgaagcagggaagccctntccatgtactgaaaggtatcagaggtgggggaagtgttagcctgggcctttgtagggaggggctgagaacctggggcaggactcagaggggaggtaggac

SEQ ID NO: 419982 - DNA, 201 bp, Homo sapiens
tgtagtgccttactatataattgatcatctaaactgagacacactgggaaaacttaaagagggtactattaataattatgctgggacaacagacataaacyaggatggttccagccagactcttcaggaaggctgggaccacataaccttttgtctgcttttgccctgattcttaaaagccatactctgtgtccttcctat

SEQ ID NO: 419983 - DNA, 201 bp, Homo sapiens
accccactgcagccccagcccgtgggccccggccccatctacagtgtggggactgtggcttcacctgtaaacagagccgttgcatgcagcagcaccggcgrctcaagcacgagggggtgaagccccatcagtgccccttctgtgacttttcgaccaccagacggtaccggttagaggctcaccagtcccgacacacaggca

SEQ ID NO: 419984 - DNA, 201 bp, Homo sapiens
ggctggttttcctcaggcagaaaactctagcagggaagcaggaggtgatcttcatcatatagagatgccagaagttattgatgatcagcagcctattttgyctggcactgagccctcaaatacttttttctgaatctttgcttcccagtttttcacctcagtagaatatttgaaagtcatcccacaaggagcatagttatc

SEQ ID NO: 419985 - DNA, 201 bp, Homo sapiens
ctacagcatcatcccatttgtgatctctatatcaacatcagtggattgacaggacatttttagaattttcatcaaagacactggtttgggagaaaaaattktaggcagcctgggacaaagccattctcactgaactcattcctgtacatgctttagtcacaaaatctcatgtttctgaggtctttccaaaaggcttaatct

SEQ ID NO: 419986 - DNA, 201 bp, Homo sapiens
ccttaagttgagtgtcatttagctagtaaagtagtagagctaggatttgaatccatgcagtctgattccagagcctgtgctctaaccactgtggtgctgtrcctcgctcttaagcccttgtccagttctgcccacccctagtcaggcttgagtgggttaacaccaagcctgaagaaacctaaaccaggacaaataccttac

SEQ ID NO: 419987 - DNA, 201 bp, Homo sapiens
cccaatcccaagaatcttagccaagctagcttcctctcggatctaacttctggccctatttctttctccggtccctggagagtctcctcctaaggccgggygcaatggctcacacctgtaatcccagcactttgagaggccggggcgggcaaattgcttgagcttgggagttcaaggccatctgggcaacaccccatctct

SEQ ID NO: 419988 - DNA, 201 bp, Homo sapiens
accccatctctactaaaactacaaaaattagctgggcatggtagcagacgcctgtaatgccagcttcttgggaggctgaagcactagaatcgcttgagccrgggggtggaggttgcaatgagccaagattgcaccactgtactccagcctgggtgacagagtaagactctgtttcaaaaaagaaaaggaaagaaaaaagag

SEQ ID NO: 419989 - DNA, 201 bp, Homo sapiens
taactgcttcacagtataattctgtagtgccttactatataattgatcatctaaactgagacacactgggaaaacttaaagagggtactattaataattaygctgggacaacagacataaaccaggatggttccagccagactcttcaggaaggctgggaccacataaccttttgtctgcttttgccctgattcttaaaag

SEQ ID NO: 419990 - DNA, 201 bp, Homo sapiens
cagacacctatgcctgtcctgtctgccgtgaggaattccgcctcagccaggccctaaaggagcacctcaagagccacacggcagcagccgcagcagagccrttaccccttcgctgctttcaggagggctgcagctatgcagcacccgaccgcaaggccttcattaagcacctgaaggagacccatggggtgcgggctgtgg

SEQ ID NO: 419991 - DNA, 201 bp, Homo sapiens
ggcctctgtgactgtggctcagtcacatagcgagcactctctgggctctgggaagggagtatagacctacagtataggcctagagactaaggtgtcacttragttctcagagtttggccctgggaaagtggatagacactatattcatgccccaatcttgccacttccaaatccaggcaagttctctgacctatggcacag

SEQ ID NO: 419992 - DNA, 201 bp, Homo sapiens
ggcatatgtactttccaaaagcttcccaggtgactgtgttacgaagtcagtcatttttcccctcttgagaacccccaactcaaacttgtatgactaagggyagatttgcttggctcttacacagacatgatggaactatcatgagttaaaaaggagaaagtgaaggattctcctgttctagtctgtccttttcttctcctg

SEQ ID NO: 419993 - DNA, 201 bp, Homo sapiens
ccaccaaggcaccccagcctttgcctgctcccagtgtgaagcccagttcagctcagagacagcacttaagcagcatgctctgcgccgacaccccgagcctrcacagcctgcccctggctctcctgcagagaccactgagggccccctgcactgttcccgctgtgggttgctgtgccccagccctgccagcttacgaggaca

SEQ ID NO: 419994 - DNA, 201 bp, Homo sapiens
aaacagaagagcctcttgccacagtctctggttccccagtccctcctgcaggaaactccttgcccacagaggcccctaagaagcactgctttgacccagtycctcctgcaggaaactcctcacccacggaggcccctaagaagcaccaccttgacccagtccctcctgcaggaaactcctcacccacagaggccctgaaga

SEQ ID NO: 419995 - DNA, 201 bp, Homo sapiens
aacagcccctatggagttcaggcccctgggactggaagggccagatggactggaaggaccagagctatctagctttgaaggtattgggacttctgacttgrgtgctgaagaaaatccccttctggaaaagccagtgtctgagccctccacaaatcctccatccttagaggaggctcctaacaactgggtaggaaccttcaa

SEQ ID NO: 419996 - DNA, 201 bp, Homo sapiens
caagtggaagcactacctccgtgtgcacatgcgaaaacatgcaggggacctcaggtacaacacacacataggcctccgtcccaatcccaagaatcttagcsaagctagcttcctctcggatctaacttctggccctatttctttctccggtccctggagagtctcctcctaaggccgggtgcaatggctcacacctgtaat

SEQ ID NO: 419997 - DNA, 201 bp, Homo sapiens
ttttatccattcctgtgcctttgtaaagctctttacagaatttgaaagtaaagctcttaaccatttatattgcagatattatccctagtttgtcattttcytttggaagtttctggttttcacttgggcaaaatatactgtcttaatgctttctggatttgcttgcttgttcactcatttaacaaatatttattaagcacc

SEQ ID NO: 419998 - DNA, 201 bp, Homo sapiens
gaagctgttgttcctccctggcatcagggcaggcttgctggaagaaatggtctgtccacttgatctgtatctgacctgtgttctctcccttcatccgcatyccccatataaggtgagaagccccacaagtgtgagctgtgtgacttcacatgccgagacgtgagctacctatccaagcacatgctgacccactccaacacc

SEQ ID NO: 419999 - DNA, 201 bp, Homo sapiens
aagaagcagggccaccctggcagtgaagagctgcgctgcaccttctgcccctttgccaccttcaacccagtggcttaccaggatcatgtaggcaagatgcmtgctcatgaaaagatccaccagtgtcctgagtgcaactttgccactgcccacaagagggtgctcatccgacacatgcttctacatacgggtaggatggtt

SEQ ID NO: 420000 - DNA, 201 bp, Homo sapiens
aaacaacagtgcagtgtgacctcgtttctgatagggctgtgtacagagtgcccttaggacgccagaagagagaagataagagtttcgggaagccaggcccrgcgcggtgcctcacgcctgtaatcccagcactttgggaggccgaggcaggtggatcacctgagttctggagttcaagaccagcccaaccaacatggagaa

SEQ ID NO: 420001 - DNA, 201 bp, Homo sapiens
atccgacacatgcttctacatacgggtaggatggtttccatccttaaaataatgttgtaataatgatggtggtgatactggctacaaagggtcttgcataygttttctcatttgacccaaaattcctagagatagatctagcattccaagtttacaaatgagccttaagttgagtgtcatttagctagtaaagtagtagag

SEQ ID NO: 420002 - DNA, 201 bp, Homo sapiens
ccaactcaaacttgtatgactaagggcagatttgcttggctcttacacagacatgatggaactatcatgagttaaaaaggagaaagtgaaggattctcctsttctagtctgtccttttcttctcctgggtgtggatggaatccacaaacccgattcttgaaagcacacaatcgtgtgcctgtgcttattgcatctgatccc

SEQ ID NO: 420003 - DNA, 201 bp, Homo sapiens
caagccgttgtgtttaaatgaattgtcgaattccatgagtactctgtgaccaaaagagggttataatttcccatggggaaacccttccatatttgagtatycattactgtcaggtagctagttggttagaggtcccgttaatcatcagcatccattgggcacccacaacattgattgctgggactacaacattgagttctt

SEQ ID NO: 420004 - DNA, 201 bp, Homo sapiens
tgggcctggtaaagcactacctggaacagcatgaggagacttcagcagccgtggcagcctcagatggggatggggatgctggccagcccccgctacactgscccttttgtgacttcacatgccgccatcagctggtactagatcaccatgtgaaagggcatgggggcactcgtctctacaagtgcaccgattgtgcttaca

SEQ ID NO: 420005 - DNA, 201 bp, Homo sapiens
agcacgtacgcaggcaccaccctgaccaagccgacccaaaccagggtgtgggcaaagaccccaccacccccacagtgcacctgcatgatgtgcagctggargatcccagccctcctgctcctgccgctccccacactggacctgagggctgaaagcctgccccacctcctgtataggaagagggtatggtctgagatgtgc

SEQ ID NO: 420006 - DNA, 201 bp, Homo sapiens
ccctgaccttatggggcctacagtccaggtgtaggaccagacttaaagtccatctgtactctacgaatattaaaagattcacctacattttctactagtarctaactcctatgagtcttgttccatctgattctatgcctttctctgtcggtcctctgcctgcaggtgtcctggtaaaggtggtggaggtgtacttctgtg

SEQ ID NO: 420007 - DNA, 201 bp, Homo sapiens
ctgagacacactgggaaaacttaaagagggtactattaataattatgctgggacaacagacataaaccaggatggttccagccagactcttcaggaaggckgggaccacataaccttttgtctgcttttgccctgattcttaaaagccatactctgtgtccttcctatgtagcacatgcaagaggtctcctgggaacctct

SEQ ID NO: 420008 - DNA, 201 bp, Homo sapiens
cggctgagccggaggcggtcgcacaaagcgggccccgggggccgttccagccgcggccgaccatagagatgcggctcccgccggctctgggtctggaggtragtgagcggctgcggggcggaactgggaagggaatgcgggtggagcgagctggaggcaaagtttttcgagccccgggatcagggtgggcctgggcgctgg

SEQ ID NO: 420009 - DNA, 201 bp, Homo sapiens
tgcgttcggccccgccccgggtcctttcatctacttcccgccacacccacagagaagcccacgccactctaccccagagctctcgatggtgcttctccggyttcagggctggagtgggggtggagggcgggaaaaaccacagagacaaaacatagagtaccccggcagccggcaagaggaagagagagtggcttccacatc

SEQ ID NO: 420010 - DNA, 201 bp, Homo sapiens
tctctggttccccagtccctcctgcaggaaactccttgcccacagaggcccctaagaagcactgctttgacccagtccctcctgcaggaaactcctcaccmacggaggcccctaagaagcaccaccttgacccagtccctcctgcaggaaactcctcacccacagaggccctgaagaagcaccgctttgagcagggcaagt

SEQ ID NO: 420011 - DNA, 201 bp, Homo sapiens
ctactgagccaggctgcctgctggtagaggccacagcaactgaagagggaccagggaacatggagatcattgtggagacagtagctggaaccctgaccccrggtgctcctggagagaccccaggtacaaacacagttgcaagcaggccagtgggacaagcagctctgaggttttgtctgggttatttttgattctgtataa

SEQ ID NO: 420012 - DNA, 201 bp, Homo sapiens
actctgtctttacaaaaataaatttttttaattagctggacattgtggcgcatgcctgtattcccagctacttgggaggctgaggtgggaggatcgctttmgcccaggaggttaaggctgcagagagctgtgatcacaccagttcactccagcctgggcaacagagtgagaccctgtctctttaaaaaaaaaaaaaaaaaa

SEQ ID NO: 420013 - DNA, 201 bp, Homo sapiens
atacttttttctgaatctttgcttcccagtttttcacctcagtagaatatttgaaagtcatcccacaaggagcatagttatcaagtgaataagaaagattkggttgtatttattaccaacttcattattatctagagcctgtgagccagtaagagtactgtaccttcttttggctcacccccttgggggctcttttccttc

SEQ ID NO: 420014 - DNA, 201 bp, Homo sapiens
tgagccttaagttgagtgtcatttagctagtaaagtagtagagctaggatttgaatccatgcagtctgattccagagcctgtgctctaaccactgtggtgytgtgcctcgctcttaagcccttgtccagttctgcccacccctagtcaggcttgagtgggttaacaccaagcctgaagaaacctaaaccaggacaaatacc

SEQ ID NO: 420015 - DNA, 201 bp, Homo sapiens
ctaggaatttgaggctgcagtgagctatgatcatgccactgcaccccagcctgagtgacagagcaagactccatttaaaaaaaaaaattgaggctgggtgyggtggctcacgcctgtaatcccagcactttgggaggccaaggtgggcggatcatgaggtcaggagatcgagaccatcctggctaacactgtgaaaccccg

SEQ ID NO: 420016 - DNA, 201 bp, Homo sapiens
gggcgtggtggcgggcacctgtaatcccagctactcgagaggctaaggcacaagaattgcttgaacccgggcagccgagcttggcagtgagctgaggtagygtcactgcactccagcctgggcgacagattgagactctgtctcaatttaaaaaaaaaaaagaaaagcttggtctttactttcttcccatcttcactggtg

SEQ ID NO: 420017 - DNA, 201 bp, Homo sapiens
tggacagctcacctttgagttctcactgagtatcactgacagctttgggacatttcatataatctttataccaaccttttggaggcaaggaaacagactgytcaaacccacatggtagtcaactaggatttaaactaccacttaatggctctatgatttctctgtgcctctgtttccctatctgtaaaatgagggtgataa

SEQ ID NO: 420018 - DNA, 201 bp, Homo sapiens
acacgcatatggccttctataacttgggcatccatgacactgaaaaagatcacctccagtgacctggaagttgcagatgtttaactcgcactcgtaactgtcttctagcattcttgatgctttaggtaacaaccaaaccaagcttcctgctacagcatcatcccatttgtgatctctatatcaacatcagtggattgacag

SEQ ID NO: 420019 - DNA, 201 bp, Homo sapiens
agaagcaccgctttgagcagggcaagtttcactgcaactcctgcccattcctttgttcccggctctcctctattacctctcacgtggctgaaggctgcagrgggggacgtggcgggggaggaaaacgagggaccccccagacccagcctgatgtgtccccgttgagcaatggggactctgctcccccgaagaatgggagta

SEQ ID NO: 420020 - DNA, 201 bp, Homo sapiens
cacacgcatatggccttctataacttgggcatccatgacactgaaaaagatcacctccagtgacctggaagttgcagatgtttaactcgcactcgtaactgtcttctagcattcttgatgctttaggtaacaaccaaaccaagcttcctgctacagcatcatcccatttgtgatctctatatcaacatcagtggattgaca

SEQ ID NO: 420021 - DNA, 201 bp, Homo sapiens
tgatactggctacaaagggtcttgcatacgttttctcatttgacccaaaattcctagagatagatctagcattccaagtttacaaatgagccttaagttgrgtgtcatttagctagtaaagtagtagagctaggatttgaatccatgcagtctgattccagagcctgtgctctaaccactgtggtgctgtgcctcgctctt

SEQ ID NO: 420022 - DNA, 201 bp, Homo sapiens
actgccagaagttcttcaccagtaagagcaagctcaagacccatctgctgcgggagctgggtgaaaaggcccaccactgcccactgtgccactacagtgcrgtggagaggaatgcactcaaccgccacatggccagcatgcatgaagatatttccaacttctactcagacacctatgcctgtcctgtctgccgtgaggaat

SEQ ID NO: 420023 - DNA, 201 bp, Homo sapiens
  misc_feature (1)...(201): n = A,T,C or G
tcagggcaagtctctgatgtgtgaggtgtgtgccttcgcctgcaagcggaagtatgagctgcagaagcacatggcttcccagcaccaccctggcacaccgnccccactctacccttgccactactgcagttaccagagccgccacaagcaggctgtgctgagccatgagaactgcaagcatacccgcctccgtgagttcca

SEQ ID NO: 420024 - DNA, 201 bp, Homo sapiens
cttgagctcaggaggtggaggttgcagtgagccaagattgcagcactgcacttcagtctggatgacagagtaagaccctgtctcaaaaaaaaaaaaaaaaagaagtaaagaaaggaacttaggaactttcaagggagacggcgttttagtagttgtcattcttcttggtcccaaaaaagcatgagagagcagaggagcagg

SEQ ID NO: 420025 - DNA, 201 bp, Homo sapiens
agtgggaagcccccacctgcatcacaagaagcagagctactgcttccaaaagatgctcctttggagcttcccagggagccagaagaaacagaagagcctcwtgccacagtctctggttccccagtccctcctgcaggaaactccttgcccacagaggcccctaagaagcactgctttgacccagtccctcctgcaggaaac

SEQ ID NO: 420026 - DNA, 201 bp, Homo sapiens
agcaggtacacccttgcctgggcaggagacagctgaagaggagaatgtagagaaagaagagaagagtgacacccagaaggactcccaaaaggctgtggatmaaggccaaggggctcagcggctggaaggtaatgacattctgaggcttgaagcccttggtggtggggaagaatggattgttgaaaccctgccattgaggct

SEQ ID NO: 420027 - DNA, 201 bp, Homo sapiens
acttgagctcaggaggtggaggttgcagtgagccaagattgcagcactgcacttcagtctggatgacagagtaagaccctgtctcaaaaaaaaaaaaaaaaagaagtaaagaaaggaacttaggaactttcaagggagacggcgttttagtagttgtcattcttcttggtcccaaaaaagcatgagagagcagaggagcag

SEQ ID NO: 420028 - DNA, 201 bp, Homo sapiens
accaaatgagagcgtttattaagcctttctttatcaaagtcttgcccattgcttttaaaacggcagcaattattatggagaataataattattttcagaaaggatattctccattttatccattcctgtgcctttgtaaagctctttacagaatttgaaagtaaagctcttaaccatttatattgcagatattatccctag

SEQ ID NO: 420029 - DNA, 201 bp, Homo sapiens
caaggccaagcaaaagttccaggtggtcaagcacgtacgcaggcaccaccctgaccaagccgacccaaaccagggtgtgggcaaagaccccaccacccccmcagtgcacctgcatgatgtgcagctggaggatcccagccctcctgctcctgccgctccccacactggacctgagggctgaaagcctgccccacctcctgt

SEQ ID NO: 420030 - DNA, 201 bp, Homo sapiens
cttgaacccaggaggcggaggttgcagtgagccaagatcacgccactgcactccagcctgggtgacagagcgagactctgtctcaaaaaaaaaaaaaaaaaggacttctgagatatttgggccccacctaattttgttgcagataagaaatctgagacccaaattgcttaatgacttggctaagggcacttagctagcaga

SEQ ID NO: 420031 - DNA, 201 bp, Homo sapiens
atgatggaactatcatgagttaaaaaggagaaagtgaaggattctcctgttctagtctgtccttttcttctcctgggtgtggatggaatccacaaacccgrttcttgaaagcacacaatcgtgtgcctgtgcttattgcatctgatccccctatgtggaggaattgattaggagcatttcaaggccctctgcttttatgaa

SEQ ID NO: 420032 - DNA, 201 bp, Homo sapiens
taagaagcactgctttgacccagtccctcctgcaggaaactcctcacccacggaggcccctaagaagcaccaccttgacccagtccctcctgcaggaaacycctcacccacagaggccctgaagaagcaccgctttgagcagggcaagtttcactgcaactcctgcccattcctttgttcccggctctcctctattacctc

SEQ ID NO: 420033 - DNA, 201 bp, Homo sapiens
tttttcttctggttggcttgtcagcatttaagaagccaaaacacacaagtcggtggtgatgacagacccccttttggactcacagccagccagtagcaccrgggagatggatggactgtgccctgagctattgctgatccccccgcctctctctaaccgtggaatcctggggcctgtccagagcccctgtccttcccggga

SEQ ID NO: 420034 - DNA, 201 bp, Homo sapiens
gccctcccgcaggtgaaggttcttaatcttgacggctcagcgtcctccttggctccccccggaggccatgtatggtcaagcttgaagattccccagaacarcgctaatattcagtaagtggaggctgcagtttccagagaatccctctgaccacgggagtgcactttccagccaccttgtgaatccctgtgatctgttgtt

SEQ ID NO: 420035 - DNA, 201 bp, Homo sapiens
gtggtgatgacagacccccttttggactcacagccagccagtagcaccggggagatggatggactgtgccctgagctattgctgatccccccgcctctctstaaccgtggaatcctggggcctgtccagagcccctgtccttcccgggaccctgcacctatacctactgagccaggctgcctgctggtagaggccacagca

SEQ ID NO: 420036 - DNA, 201 bp, Homo sapiens
ctcccgcaggtgaaggttcttaatcttgacggctcagcgtcctccttggctccccccggaggccatgtatggtcaagcttgaagattccccagaacagcgmtaatattcagtaagtggaggctgcagtttccagagaatccctctgaccacgggagtgcactttccagccaccttgtgaatccctgtgatctgttgttttg

SEQ ID NO: 420037 - DNA, 201 bp, Homo sapiens
accccaggtgctcctggagagaccccaggtacaaacacagttgcaagcaggccagtgggacaagcagctctgaggttttgtctgggttatttttgattctrtataaatatgatgagaacacaaggtagcatcctatttttatacttggagatgttgtcatttggtttgcagttggtgcatgttgattgaaggctggcgaag

SEQ ID NO: 420038 - DNA, 201 bp, Homo sapiens
ggtagactctctatgtggagatgggcggccttggagccagagcacctgaagccctggactgcatcactgcactcctaggggaaggggtgggttcaatctgsctggcagctgagaatcaggttctcggaggcagactgggagaggaacccagaggactgagatgatgggcctaggtggaagggaccttgcgggggtctctgg

SEQ ID NO: 420039 - DNA, 201 bp, Homo sapiens
tgggactacaggcgtccgccaccacatccagctaattttttgtattttttagtagagatggggtttcaccatgttagccaggatggtctcgatctcctgamctcgtgatccgcccgccttggcctcccaaagtgctgggattacaggcgtgagccgccatgcctggccccttccctagttcttttttggggttagttatca

SEQ ID NO: 420040 - DNA, 201 bp, Homo sapiens
ggggagctgaggggatgaggggaggaatctagggaagggggcatgaatttagactgcctgggaggcagggaatggggccatagcaggccattcctctcacyactgtccagagattccattgatttttgtgggcactcttgccatctcttgttcaagctgcctgctattagaacactagtcagccatattgagaacggtgtg

SEQ ID NO: 420041 - DNA, 201 bp, Homo sapiens
ggtggccaggcagggcaagtcagtagtcaccgaggctggtgttggacaggaggggagatggcagggagcatgggagcggggctgaggaagaagtgcacatwgcctctgagccaggcatctcactggggtcgcctctgggccaggctgcagctagggagggttcttgagtgggaggaaagtactgggggctggcagcttcct

SEQ ID NO: 420042 - DNA, 201 bp, Homo sapiens
gcagaaatcaaatcagcccaaggatatagttaggattaattacttaatagagaaatcctaactatatcacacaaagggatacaactataaatgtaataaartttatgtctagaagttaaaaccctgtatggctccaggagtatgtgtggctctgcccaaagtatccacttcttccttctgcattctggcttgggctgtccc

SEQ ID NO: 420043 - DNA, 201 bp, Homo sapiens
tgacacccagcaagtcctgctgtctgagctcacccacttgtgccgctgctgtggtagaaagcaggggctctggttccttcctaatgggggactggggccckgagagaggagcaaacttagatctataatgggcaaggatagggcacagtctgaatgccttgataacaggcattgtgaggcaaggaagaatgttctaatcga

SEQ ID NO: 420044 - DNA, 201 bp, Homo sapiens
atggggacccatttcagaaggatgtcctggctgtctcctccaccttatctgggccgcctgttctgatctcctctgtggctgcctctttccaacttggtggyattccccagctctggcagaggccaccatggccactcccccagcaccctgccttccttcctttttaagtgtttcattcttgtctctctccttcccttagac

SEQ ID NO: 420045 - DNA, 201 bp, Homo sapiens
gcagaggccatactggtagagtatggtggccaggcagggcaagtcagtagtcaccgaggctggtgttggacaggaggggagatggcagggagcatgggagyggggctgaggaagaagtgcacattgcctctgagccaggcatctcactggggtcgcctctgggccaggctgcagctagggagggttcttgagtgggaggaa

SEQ ID NO: 420046 - DNA, 201 bp, Homo sapiens
taggcccctttccttccccttgagtaacatgcccagtttcctttctgtcctggagacaggtggcctctctggctatggatgtgtgggtacttggtggggayggaggagctagggactaactgttgctcttggtgggcttggcagggactaggctgaagatgtgtcttctccccgccacctactgtatgacaccacattctt

SEQ ID NO: 420047 - DNA, 201 bp, Homo sapiens
ccggcttgcccgctcctgggcccaaggagcccgttccagatggggatctcccctcctggcccttggcgtttcgctctccctgggcgcgcgggtgggcggcygggtctgtggcacctggttagccttgggagcccagcagcgtgttgtgggcactggtgagcggagccagggtctgggggtgtcctcgtgttccctctttcg

SEQ ID NO: 420048 - DNA, 201 bp, Homo sapiens
aatcgcttgcaatcccaggaggtggaggttgcagtgagccaggatcgcactactgcacttcagcctgagcaacagagcaagactctgtctcaaaaaaaaaaccaaaaaaaaacaaaaaaaaaacaaaaaacaaaacaaaacaaaaaaagaggccgggtacggtggctcatgcctgtaatctcaacactttgggaggctgag

SEQ ID NO: 420049 - DNA, 201 bp, Homo sapiens
tggccgtccttgggtgagtttctttccagctctgacctttatgtatctccaagcctgggccaccctcttctcccggggccgttggccaggctgtgagcccygtggtggtgtggagggcctgagtagtttggcttccacttgtgtcagcctcctgttgaggctaaaacccatgagagggttttagatggaagctatggcaga

SEQ ID NO: 420050 - DNA, 201 bp, Homo sapiens
ggctgtctagttggtaaagtgaggggttggccgtccttgggtgagtttctttccagctctgacctttatgtatctccaagcctgggccaccctcttctccyggggccgttggccaggctgtgagccccgtggtggtgtggagggcctgagtagtttggcttccacttgtgtcagcctcctgttgaggctaaaacccatgag

SEQ ID NO: 420051 - DNA, 201 bp, Homo sapiens
cagataaaggaaaagggaggggaacaaatcgtcagatctgggctgtgctcctgcgcctgctgggtggggtttcctgagatgtgcattctgagctattttttccactctgggcatccgtctctggcagggaggagggcaggctgcctggaccagtcagctgctcctttccatccctccctccagtacacatactctcctctt

SEQ ID NO: 420052 - DNA, 201 bp, Homo sapiens
gcaggggcagagctgaccctttcagagggtcccagctggccctgtgagtcgccaggaggctgtgcctggcccatctggcttcttcgctggttctgccatcmagccaccaaaactggaaggttttcttaaaccacaacagggagttcccaggctccctggttccctctctcctcagcgaatccttcctcctgctttcctatg

SEQ ID NO: 420053 - DNA, 201 bp, Homo sapiens
tccttaggaactcctttgggaacctgaaccactttcctcatcctttaaagtgaaatctgacttttgcaaaagacatttggagccaagtttggtaaacatcwtggcagggacatgcttgtgtttggtcagaaatgaggtgaggccggccgcggtggctcacgcctgtaatcccagcactctgggaggctgaggcgagcagat

SEQ ID NO: 420054 - DNA, 201 bp, Homo sapiens
gggacaggagcccagttggtggggaggtggcctgtggacagcaaatcacacgctgccctctaaggagaaaataggtggtgttcctctccacggaggcagcytggacaaggctggaagtgggcccatgaggctgagtgagctgggcctgggcattcacgattgcttttctcctctcccatttcaggtcccagcagctggggt

SEQ ID NO: 420055 - DNA, 201 bp, Homo sapiens
caggggcagaatatgccattgtgaatttccaagaagggggtgtggattgtttctcaagagtcatctgtttccagcactcattcattaacgtctcctggggygtgttctttagaacagtctgggaaatgcctggctaggtgattctgtttctccactgtggctcccataaacaagtccctactcctttcccccacgtgggct

SEQ ID NO: 420056 - DNA, 201 bp, Homo sapiens
aaggctggaagtgggcccatgaggctgagtgagctgggcctgggcattcacgattgcttttctcctctcccatttcaggtcccagcagctggggttccccstcagcccgtgagcagccatgtccaaccccagcgccccaccaccatatgaagaccgcaaccccctgtacccaggccctccgccccctgggggctatgggca

SEQ ID NO: 420057 - DNA, 201 bp, Homo sapiens
gcccatgaggctgagtgagctgggcctgggcattcacgattgcttttctcctctcccatttcaggtcccagcagctggggttccccctcagcccgtgagcrgccatgtccaaccccagcgccccaccaccatatgaagaccgcaaccccctgtacccaggccctccgccccctgggggctatgggcagccatctgtcctgc

SEQ ID NO: 420058 - DNA, 201 bp, Homo sapiens
ccatgttgtccctgcgtaccacacctgaacaggtgccaaaggccatgccaacctccctccttggagtcaaggcttaatcctccaggcacaggagccaagcrcttccttctgctgtaggagcctctgacgcctgaggggccccaagtcatttaatcaaggcttctctttcccttcagacgccgtttcccatggaacatcatt

SEQ ID NO: 420059 - DNA, 201 bp, Homo sapiens
ccgtttcccatggaacatcattctgctgaccctttttgtaagtctagaagggtggcaggagggtgtggagatgctgtgagggagactgctcccagggaagrgatggggacccatttcagaaggatgtcctggctgtctcctccaccttatctgggccgcctgttctgatctcctctgtggctgcctctttccaacttggtg

SEQ ID NO: 420060 - DNA, 201 bp, Homo sapiens
tcccagcagctggggttccccctcagcccgtgagcagccatgtccaaccccagcgccccaccaccatatgaagaccgcaaccccctgtacccaggccctcygccccctgggggctatgggcagccatctgtcctgccaggagggtatcctgcctaccctggctacccgcagcctggctacggtcaccctgctggctaccca

SEQ ID NO: 420061 - DNA, 201 bp, Homo sapiens
ggaggctttgggattgacgccacatgtctcaggtccccagctgagtcaagtgtcatctgtccctaggcccaggccatggctatgatggggaggagagagcrgtgagtgatagcttcgggcctggagagtgggatgaccggaaagtgcgacacacttttatccgaaaggtaagatacgcgctgggaggtgggtgtacctggg

SEQ ID NO: 420062 - DNA, 201 bp, Homo sapiens
tatgaagaccgcaaccccctgtacccaggccctccgccccctgggggctatgggcagccatctgtcctgccaggagggtatcctgcctaccctggctaccygcagcctggctacggtcaccctgctggctacccacagcccatgccccccacccacccgatgcccatgaactacggtgagtcctggaagggcagatggaag

SEQ ID NO: 420063 - DNA, 201 bp, Homo sapiens
gggggacaagggtcagtctgtcgggtgggggcagaaatcaaatcagcccaaggatatagttaggattaattacttaatagagaaatcctaactatatcacmcaaagggatacaactataaatgtaataaagtttatgtctagaagttaaaaccctgtatggctccaggagtatgtgtggctctgcccaaagtatccacttc

SEQ ID NO: 420064 - DNA, 201 bp, Homo sapiens
cttcacctttgtgtaagtctctaggctttgccacccactcctactgccctgggggttcagggtcacctgctgggggtgtgggtggcggtgggccctgctcwcagggtgaccatgggcaattagagaaggtgaagccagggctgcctggctggcctgggtggggcagacaagcctcagggtgactactcctgtcctcctgtg

SEQ ID NO: 420065 - DNA, 201 bp, Homo sapiens
cacctggcttctctaaccccagggttccctctttttgcacctctcttcttgaccatgttttgggaggacacattcagtctgggagaatctcctaggtgggytctgccacagcgcccgccttccccagacatctttctccctttagactataggcagcttggagccagaaatgatcctactcgcttgtaacccaccctctcc

SEQ ID NO: 420066 - DNA, 201 bp, Homo sapiens
acccacagcccatgccccccacccacccgatgcccatgaactacggtgagtcctggaagggcagatggaaggtgggtgggagggacagcacttggagcagrtgaggccaccgcctcctgccccttttctcttctagtttcccttaaatccctttctcatcttctctgttgagatctctccctctgtttctgtctttgttac

SEQ ID NO: 420067 - DNA, 201 bp, Homo sapiens
tatgccattgtgaatttccaagaagggggtgtggattgtttctcaagagtcatctgtttccagcactcattcattaacgtctcctggggcgtgttctttaraacagtctgggaaatgcctggctaggtgattctgtttctccactgtggctcccataaacaagtccctactcctttcccccacgtgggctgatttagggat

SEQ ID NO: 420068 - DNA, 201 bp, Homo sapiens
aggctgcagctagggagggttcttgagtgggaggaaagtactgggggctggcagcttcctggggcaggccaggggtgccggatggtgacccatgcccggcygtctgtgtccaggtttactccatcatctccgtgcagctgctcatcactgtggccatcattgctatcttcacctttgtgtaagtctctaggctttgccacc

SEQ ID NO: 420069 - DNA, 201 bp, Homo sapiens
atctcgttcttgcttcctgttgagttgcttcccctcagacttccaaacggctatttgggccccaaatcactggcctggtgtgtgctgccaagcggggcagrtttgggcctgaactgcttccccatctctttgtccctagtgctgtcttcgttgtcacctacctgatccttgcctgctgccagggacccaggtgagtcccag

SEQ ID NO: 420070 - DNA, 201 bp, Homo sapiens
ccatttcagtcaccatcttctgctttcagaccaaggtgagggcatggagggcccttccctggccccccgactcccctttcttatcaggcccggaccccggyacactagggatgttccctagagacctgatccccttctcctcatccgcacctacaaaactgtgtcctgtttctgtccttagaatgttgtggacattcccat

SEQ ID NO: 420071 - DNA, 201 bp, Homo sapiens
cactgatgcctgagttctcacttctggcttccctatccttgcagttcctggcttacgacacacagctggtcctggggaaccggaagcacaccatcagcccsgaggactacatcactggcgccctgcagatttacacagacatcatctacatcttcacctttgtgctgcagctgatgggggatcgcaattaaggagcaagcc

SEQ ID NO: 420072 - DNA, 201 bp, Homo sapiens
agagtgaactcttgcttcctgtattcaggcagctcagagcagaaagtaaggggcagagtcatacgtgtggccaggaagtagccagggtgaagagagactcrgtgcgggcagggagaatgcctgggggtccctcacctggctagggagataccgaagcctactgtggtactgaagacttctgggttctttccttctgctaac

SEQ ID NO: 420073 - DNA, 201 bp, Homo sapiens
gagaaccagtttatagcttaaatggaagaggcaggaccacagtgtcaggggccctgtctttctgtgctatgacctcaaggcctcacttgtaaaaatgagcmcttcagagaggtaatgatgggttatcctgtaagtgttgggagagcctcatgtcatgagctggggtaatagccacctgggctcagcctcctcccctgggaa

SEQ ID NO: 420074 - DNA, 201 bp, Homo sapiens
ctgaggaagaagtgcacattgcctctgagccaggcatctcactggggtcgcctctgggccaggctgcagctagggagggttcttgagtgggaggaaagtaytgggggctggcagcttcctggggcaggccaggggtgccggatggtgacccatgcccggccgtctgtgtccaggtttactccatcatctccgtgcagctgc

SEQ ID NO: 420075 - DNA, 201 bp, Homo sapiens
gaaccagtttatagcttaaatggaagaggcaggaccacagtgtcaggggccctgtctttctgtgctatgacctcaaggcctcacttgtaaaaatgagcacwtcagagaggtaatgatgggttatcctgtaagtgttgggagagcctcatgtcatgagctggggtaatagccacctgggctcagcctcctcccctgggaatg

SEQ ID NO: 420076 - DNA, 201 bp, Homo sapiens
tcattcattaacgtctcctggggcgtgttctttagaacagtctgggaaatgcctggctaggtgattctgtttctccactgtggctcccataaacaagtccytactcctttcccccacgtgggctgatttagggataaaaggaggccaggggaggtcatttgcctggattcctgcagctagttcatgaacccaggtcagtgg

SEQ ID NO: 420077 - DNA, 201 bp, Homo sapiens
agatttgggcctgaactgcttccccatctctttgtccctagtgctgtcttcgttgtcacctacctgatccttgcctgctgccagggacccaggtgagtccyagagacttaacacagtgagaggggtgacagggattgggatgggggccgagtattttggaaagaaggattcctttatagcagctgaatggaaacttacaag

SEQ ID NO: 420078 - DNA, 201 bp, Homo sapiens
agagcccatatgttatgctgtgcgttaatgtggccctaagcactgtgtggcgcataggcccccaagacaaatctgctgaccaaaaatgagctctggacacygatgcctgagttctcacttctggcttccctatccttgcagttcctggcttacgacacacagctggtcctggggaaccggaagcacaccatcagcccggag

SEQ ID NO: 420079 - DNA, 201 bp, Homo sapiens
cattctttcatttgaggggaattgtcttactgatgttaaaactgggtctagagatgtggctctcacagtggagtgagtcccaaagccaggacaagaactcrggtccccacctcctagcccaggacccaggcttcagatcaactttccgcaggggaaagaaataatggtagcaacaacagcttgctcagctcctttctatct

SEQ ID NO: 420080 - DNA, 201 bp, Homo sapiens
tggggacccatttcagaaggatgtcctggctgtctcctccaccttatctgggccgcctgttctgatctcctctgtggctgcctctttccaacttggtggcrttccccagctctggcagaggccaccatggccactcccccagcaccctgccttccttcctttttaagtgtttcattcttgtctctctccttcccttagact

SEQ ID NO: 420081 - DNA, 201 bp, Homo sapiens
aaaggtccccggggcaggctctgacctccagaacctctcgactggctagcaaaggcaccaacgtggaggcagcatccttctgggtgagggtagactctctrtgtggagatgggcggccttggagccagagcacctgaagccctggactgcatcactgcactcctaggggaaggggtgggttcaatctgcctggcagctgag

SEQ ID NO: 420082 - DNA, 201 bp, Homo sapiens
gataaatctccaatctgctttccacagtggctgaactaatttacattcccaccaacagtgtataaacatttccttttctctgcaacatcaccagcatctgtttttttttttgactttttaataatcaccattctgactgatgtgagatggtatctcattgtggttttgatttgcatttctatgattagtgatgatgagcat

SEQ ID NO: 420083 - DNA, 201 bp, Homo sapiens
gctctgaaactccttctccatagcgaagcaatgtcacaaaatgttcacagttgttgacaagtaagttataggccacctcctgtccaattacaaactctgaycgctttatgatttcttccacagggagaggggggtacgtttcatcgtatttattgtttattctgtatgtgtcatttcccacaacatccttcaagagctgca

SEQ ID NO: 420084 - DNA, 201 bp, Homo sapiens
cgtaactgaaattttctaccctttgactaacatctcctcatttccaaaaataaaataagtaaacaaataaaaattgcttggttagtgcagtgaacaacttygtcattaacaaagaagaagaggaatggaacctatttcctatctacaccactaattttcaacgcaaaagtgagcaggaatttgtgtgtaccctctatgttc

SEQ ID NO: 420085 - DNA, 201 bp, Homo sapiens
tttcatcgtatttattgtttattctgtatgtgtcatttcccacaacatccttcaagagctgcattttcaccagggccttactgctgaatacagacttggcrcttgtaaaggacgcaggaatgccatctataaagtagaattctggttagtaaggtatagtgacccagtccaatgaactctactgccatctaaagactttgg

SEQ ID NO: 420086 - DNA, 201 bp, Homo sapiens
acccttttaaggtcctagcccttatcaatttatattaccatcaacaatacctttatgttcatttcactatattcttatcaacactgatcgttatcacttarcctttgctaatgagataggtatgaaatattttattggtttattttacaattcctaggccagaaagttgaaattttttcaaaaggtgtattagcttttgct

SEQ ID NO: 420087 - DNA, 201 bp, Homo sapiens
gtttatgtggtgaatcatatttatggatttgtgtatgtcgaaccaatcttgtacctcaggaataaagccttcttgattatgaattaactttttgatgtgcrccaaatttggtttgttggtcttttgttgaggatttttgcatctatgttcatcaggaatactggcctgaagttttctttttttgtgtgtctctccgatttt

SEQ ID NO: 420088 - DNA, 201 bp, Homo sapiens
gtatgaaatattttattggtttattttacaattcctaggccagaaagttgaaattttttcaaaaggtgtattagcttttgcttttcttcttttacaaactrttcctaattctttatccatttgtttgttgaggttttagtgtctgctgtccccttgacctgggatactatatctctagagagcatctgaccggtttcttta

SEQ ID NO: 420089 - DNA, 201 bp, Homo sapiens
ttctttcccctgctcgctccagcaacaatccagcccagagatctctctgttgaaagaaactgggagacctctgccaacaagaatgggagggatggcactcycaaaccttttcccttgacttgccctggaaataaactcctttaatctccaattggaaaaaggtgcgggggtgggggggatagggcagggcaggggcttctt

SEQ ID NO: 420090 - DNA, 201 bp, Homo sapiens
gaaagtgactctaatgaaatgtaaatatgtgatttatctgacagggaattcaaaagggcagtcataacaatttttattgaggtagggaaagcaatgcatgaaaaaactgggaacttcaacgatgagacagaaaatattaaaaagtaccaaacaaaccatcaagctgaataataatataactgaaatgaaaaaaccaataag

SEQ ID NO: 420091 - DNA, 201 bp, Homo sapiens
tgctcgctccagcaacaatccagcccagagatctctctgttgaaagaaactgggagacctctgccaacaagaatgggagggatggcactctcaaacctttycccttgacttgccctggaaataaactcctttaatctccaattggaaaaaggtgcgggggtgggggggatagggcagggcaggggcttcttcatgtctgaa

SEQ ID NO: 420092 - DNA, 201 bp, Homo sapiens
caatcacaattttgaaacatttcatcattccaaaaagatacctcttaccctttagcagtctcccctgatttacctcaaccacctcagccccaggcaaccastaatttattttgtctctatagatttccctattctaggcatctcatatcgatgaaataatataatatgtagtctcttgtgattggctaagtaggcaacttg

SEQ ID NO: 420093 - DNA, 201 bp, Homo sapiens
ccaaaagctaacatggtggcatgtgcctgtggtcctaactacttgagaggctgaggtgagaggacagcttgagctcgatgcgggtggaggttgcagtgagycaagatcacaccactgcactccagcttgggtgacagagtgagactctgtctcaaaaataaataaataaatacattaataaataaatataccatattaaca

SEQ ID NO: 420094 - DNA, 201 bp, Homo sapiens
gtgtgacagagagtctaaatagtggttaaacccctaaatataggcatctctgaggccggcaccacctcagctctttctgcagtttccctccatgatgcaaygaagatttctcagtaaagaatatttgataactaatatcatatggctaaatcttaattcatttaaccattcccctattgaaaatatgccattgtctacttt

SEQ ID NO: 420095 - DNA, 201 bp, Homo sapiens
ctcttttacatttttcctcaaatgtcactttcttaagaaattttcctgaccacttcatttaaaatcacagcatctgcacccaccaccttctgccctcagcrcttctcatcctaccttcttattttttctgtatcacttatcacaattttaacatttctgtaacttgctcatggtctgtccctgcttactaaaatgtaaact

SEQ ID NO: 420096 - DNA, 201 bp, Homo sapiens
aatccctggataatataacttacacagattttaaaaatatcaaggattaaatattaaaaaatggtctatttaggataaaaaggggaaataggaaagtaaayatataatatctgtttactaagtaaatgttcagtctatgactatactaaaggatataaaaaagggtttatatgcttgcacttatttagcatgaaaaagtca

SEQ ID NO: 420097 - DNA, 201 bp, Homo sapiens
cgcaggtgatcacaggctacccctggcccaaggcttctaattaggtttcgaccttttcccattccagctgcactttccatccataatcctcctacactgtkatgtttccatgaagccctgtattcccagattggctaattcatagactctcagtgctgcaaagatccttggtccaacactctcacgctacaaaggagggtt

SEQ ID NO: 420098 - DNA, 201 bp, Homo sapiens
cattcagacaaattgtgtaatgcagtgcttcataagtatgagaaaacacagaaccaattaaagacacatttataacatcctctactacaatctttaaggtaaaaaaatgcttcattttgagtccatctgcaaagaactgtatgaacagtttataataaagagtggcatgaaggttaagtctgtaatctttgtataagaaat

SEQ ID NO: 420099 - DNA, 201 bp, Homo sapiens
tttgatttgcatttccctgatgaaaaatatgtattctagatacgtatctaaaaagagtccagtatccaaagtacataaagaaaacttactactgaacaatraaaaggcaaataatccaatttaaaaacgggcaaataggctgggcacggtggctcacgcctgtaatcccagcgctgtgggaggccaaggcgggtggatcac

SEQ ID NO: 420100 - DNA, 201 bp, Homo sapiens
acgaatggccaataagcacataaattgatgcccaacatcattagccatcaggaaaatgcaaatcaaaaccacaataaatttgaatcttgggtatagggcasgataagtaggattttgaaaaattaggctcaagaggtgcagcgtttaaataacacgaggctttgctagccttcttatagatgacatttttccaagcttttg

SEQ ID NO: 420101 - DNA, 201 bp, Homo sapiens
atcatatggctaaatcttaattcatttaaccattcccctattgaaaatatgccattgtctactttaaccattataaatgacacagaagtgaatatccttayacagaaatgcttgtctacatctctaaatatttccccagaatagattcctagaagtacaattacagggtcagaggatacgaacccttttaaggtcctagcc

SEQ ID NO: 420102 - DNA, 201 bp, Homo sapiens
taaacgatcactcaccataatcaagtgggacttatcccagggatgcaaggatgggtgaacatatataaatcaataaatatgggccaggcactgtggctcaygcttgtaatcccagcactttgggaggccgaggcagatggatatcttgagcccaggagttctagaccagcctaggaaacatggctaaacctcatctctaca

SEQ ID NO: 420103 - DNA, 201 bp, Homo sapiens
aatggacctaacaaatatttacagaaaacttcatccaacaacaattgaatatacatttttctcaattgcacatggagtattctccagggtagatcatatgrtatatcacaaagcaaatctcaacaaatttaagaagactgaaatcttatcaagtatttcttctgaccacaatggcacaaacctagaaatcaataacaggag

SEQ ID NO: 420104 - DNA, 201 bp, Homo sapiens
gtgagaggacagcttgagctcgatgcgggtggaggttgcagtgagtcaagatcacaccactgcactccagcttgggtgacagagtgagactctgtctcaaaaataaataaataaatacattaataaataaatataccatattaacaaaatgaacgacaaaaagcacacaagtatctcagtagatgcagaaaaaacatttga

SEQ ID NO: 420105 - DNA, 201 bp, Homo sapiens
tgagaggacagcttgagctcgatgcgggtggaggttgcagtgagtcaagatcacaccactgcactccagcttgggtgacagagtgagactctgtctcaaaaataaataaataaatacattaataaataaatataccatattaacaaaatgaacgacaaaaagcacacaagtatctcagtagatgcagaaaaaacatttgac

SEQ ID NO: 420106 - DNA, 201 bp, Homo sapiens
gagaggacagcttgagctcgatgcgggtggaggttgcagtgagtcaagatcacaccactgcactccagcttgggtgacagagtgagactctgtctcaaaaataaataaataaatacattaataaataaatataccatattaacaaaatgaacgacaaaaagcacacaagtatctcagtagatgcagaaaaaacatttgaca

SEQ ID NO: 420107 - DNA, 201 bp, Homo sapiens
agaggacagcttgagctcgatgcgggtggaggttgcagtgagtcaagatcacaccactgcactccagcttgggtgacagagtgagactctgtctcaaaaataaataaataaatacattaataaataaatataccatattaacaaaatgaacgacaaaaagcacacaagtatctcagtagatgcagaaaaaacatttgacaa

SEQ ID NO: 420108 - DNA, 201 bp, Homo sapiens
aaagcagttatatcattttacatgcctaccagaagggcaagagagttccaatttcttcacttccttgccaacacttactatcttttgtattatagcaatcrtattgagtgtgaagcgaaatctcattgtggctttgatttgcatttccctgatgaaaaatatgtattctagatacgtatctaaaaagagtccagtatccaa

SEQ ID NO: 420109 - DNA, 201 bp, Homo sapiens
tgcagagataatgtagatgtagagggttgcttagtattaaccactagactctggaagctctgaatcataaatatcattttatttgtcattttcacttatartattctaaaacaagaggcaaatactttaaaatgttgcaaaaaaccacttcattaaaaagtctcagaagttcccaagataataaaacttaggtctataaat

SEQ ID NO: 420110 - DNA, 201 bp, Homo sapiens
tctgcttgttcagacaggagagcagtcactccctctacacctttttctctggcttgtgccagcaagaaatccagatctgcagactttctccagaagtagtytccatacacacggagtgctcttttatagccttcacccaagagacaggctcctagtctgggagttgacagagttcttcatttttgagtctcgtagacaaca

SEQ ID NO: 420111 - DNA, 201 bp, Homo sapiens
tcccaagaaaacatttctaagctcaagggccctaagcttaaagggattcaaaaaactaatctaatattagctattattagtagtaatactattagttattkatagtaatatataatccagttgctgctagatcaagattttattgactatgctaacaacgatctataaaattcccggatactgttatgaaaagtaatatcc

SEQ ID NO: 420112 - DNA, 201 bp, Homo sapiens
tctcaaaaaataggcatagaaagaatgtaccttaacacaataaaggccatatatgacaagcccacagacaccatcatgctcgatggtaaaaagttgaaagwttttcctgtaagattagaaagacaacagtgattcccactctcacagctattcaacatagtctggaagtcctagctagagcaattaggcaagaagaagaaa

SEQ ID NO: 420113 - DNA, 201 bp, Homo sapiens
ctagaaacacaagatgttaatgaaagctgacaaatttaagaggcctggttgggggatgggcaacctgatcccaaaccaaaatccctagagatgacaaaggycagatatcatgatcataaagccactttaagcagtgccactttaagacagcttccccaattccaaatgttcatttatttcaagtctcattctagataatga

SEQ ID NO: 420114 - DNA, 201 bp, Homo sapiens
tatttataatactataataatggattgtgtcattttaaatttgtccaaaccatagaattcgtaacataaccagcgaaccctaatgtaaactatggactttrgttgataatgatgtattaatgttggttcatcaattttcacaatggtatggtaatgatgtgacatattgatgaaggagatggctatactgggtggggaagg

SEQ ID NO: 420115 - DNA, 201 bp, Homo sapiens
agatctaattagcacaccatatatttacccactgaaataatgtagttcaatgttttttagtatattcatagacttgtgcaacaatcacaattttgaaacayttcatcattccaaaaagatacctcttaccctttagcagtctcccctgatttacctcaaccacctcagccccaggcaaccactaatttattttgtctctat

SEQ ID NO: 420116 - DNA, 201 bp, Homo sapiens
acccacgtattactgcaacacaatgctacctccctaactgcagcttccctgttaggaacaggcacaagggccagggccaggaaagagggacacaacagaastcttggctccatgtgtttgcagcatgtgttcattccactacaccatcctgtggtgggcagagactaggcctgtaattgtggcccactgtctctgctccaa

SEQ ID NO: 420117 - DNA, 201 bp, Homo sapiens
gagagttctatactttcagcttaattttgctatgaagctaaaaactgctctagaaaattgaatctattatttttttcaaatacagaaaagcacaaagaagaaaaaaagatgaaatcataatcctacccttctcaccttttttatgcattactagtttttaaacttgggaaatacatagccattcccaagaaaacatttcta

SEQ ID NO: 420118 - DNA, 201 bp, Homo sapiens
acaattaatgttagaagggtgttttcccaagtgtttgtatgccatctgttgaaaagttcaatcatcacactgtcacagaaacgtggccaaatgtaagctgyccatctgttgaaaaacaactattaaaacaactttatgaaaacgattaagtctaaccaccctctcaaatatgtttgcatcttattaatatggcagttcgta

SEQ ID NO: 420119 - DNA, 201 bp, Homo sapiens; identical to SEQ ID NO: 106276

SEQ ID NO: 420120 - DNA, 201 bp, Homo sapiens
acgtgcctcccgcctgtccacgtgggcagctccccagagctggtgtgccttcatgccttctgccttgccttttaagatacacttgtttgggccaggtgcastgctcacacctgtaatctctgcactttggaaggctgagatcacttgaggtcaggagttagagatcaccctggccaacatggtgaaaccccgtctctacca

SEQ ID NO: 420121 - DNA, 201 bp, Homo sapiens
aaagaccccatgagccaccttcacgcacccccaactcttggggcggggatgggtatgaggaagactggaaagcaggtcacgtgcccctggctgtcacccgygtgggcgacactggcgataggcgtacctgtgtggatgagcttcacgtggcgctgcaggtagcggtcgatcatgaaaaccttgttgcagccagggtggggg

SEQ ID NO: 420122 - DNA, 201 bp, Homo sapiens
cttctcacctgcccgcctgcccctcccccgcctcccgctcactgagggaagccacgtttcactgggctcgggagatccgcacacgagagagtgaactgagkgggcaccggggagaggccctggagcacaggcgggtgtctaggtcgcccaacggatgcctccagcagaccccgggctgcccacttacttcctttctgggta

SEQ ID NO: 420123 - DNA, 201 bp, Homo sapiens
cagtgccgagaccaggtcccagctccaaagcaccaggaggacccaccttctcacctgcccgcctgcccctcccccgcctcccgctcactgagggaagccaygtttcactgggctcgggagatccgcacacgagagagtgaactgagtgggcaccggggagaggccctggagcacaggcgggtgtctaggtcgcccaacgga

SEQ ID NO: 420124 - DNA, 201 bp, Homo sapiens
attatcaatgaacaatacatatgcaatagcatgaaaaaagtagtttacactgccgagtccagtggctcatgttggcagtcccagcaccctgggaggctgargtgagaggctcacttgagcgcacagggctgcagtcagccatgatcgtgccagggcaccccagcctaggcaacaacatgagaccctgtcgctaactgccct

SEQ ID NO: 420125 - DNA, 201 bp, Homo sapiens
cagttatgtttctatatattatcaatgaacaatacatatgcaatagcatgaaaaaagtagtttacactgccgagtccagtggctcatgttggcagtcccascaccctgggaggctgaggtgagaggctcacttgagcgcacagggctgcagtcagccatgatcgtgccagggcaccccagcctaggcaacaacatgagacc

SEQ ID NO: 420126 - DNA, 201 bp, Homo sapiens
aaaccctaaagatccacatacaaaaaaccctaattaattatttcagcaaagttgcagggcacaaaatccatacacaaaacccagttatgtttctatatatyatcaatgaacaatacatatgcaatagcatgaaaaaagtagtttacactgccgagtccagtggctcatgttggcagtcccagcaccctgggaggctgaggt

SEQ ID NO: 420127 - DNA, 201 bp, Homo sapiens
aagcgacgggttgggggcttcgggggtacactggggtgtgaacccagggcaggaccggcagaagggacgtaagagcctccttctcaagcaaggcggggttytgtcgacagagacacctgccatccactgctgggactctgaggcagcctcacagtgccgagaccaggtcccagctccaaagcaccaggaggacccaccttc

SEQ ID NO: 420128 - DNA, 201 bp, Homo sapiens
tagaaaaccctaaagatccacatacaaaaaaccctaattaattatttcagcaaagttgcagggcacaaaatccatacacaaaacccagttatgtttctatrtattatcaatgaacaatacatatgcaatagcatgaaaaaagtagtttacactgccgagtccagtggctcatgttggcagtcccagcaccctgggaggctg

SEQ ID NO: 420129 - DNA, 201 bp, Homo sapiens
aaagcagaagcgacgggttgggggcttcgggggtacactggggtgtgaacccagggcaggaccggcagaagggacgtaagagcctccttctcaagcaaggyggggttttgtcgacagagacacctgccatccactgctgggactctgaggcagcctcacagtgccgagaccaggtcccagctccaaagcaccaggaggacc

SEQ ID NO: 420130 - DNA, 201 bp, Homo sapiens
aactcgactatttctgccagagcccctcccctgtggtctgaggcctagtgggcggcatgggctgaggacctgctcctctctcacagctgctggctgatcgyggggactgcgacccagaggtgagcgccgccctccagagcagacagcaggctgcccctgacgctgacctgtcccaggagcctcatctcttctgacgggacc

SEQ ID NO: 420131 - DNA, 201 bp, Homo sapiens
tacttgagggatgcccgctgcctgcactggaacccacagacctcacacctgggggacagaggcagataagaaggtgcgagggccacagccctggggggggkcctgactcacacttactgcaaaggcttggctcccgaatgtcgcatttggtggacgagaaggtgcttccgctgcttgaaggtttgtccacattcgtcacag

SEQ ID NO: 420132 - DNA, 201 bp, Homo sapiens
ggcggggttttgtcgacagagacacctgccatccactgctgggactctgaggcagcctcacagtgccgagaccaggtcccagctccaaagcaccaggaggmcccaccttctcacctgcccgcctgcccctcccccgcctcccgctcactgagggaagccacgtttcactgggctcgggagatccgcacacgagagagtgaa

SEQ ID NO: 420133 - DNA, 201 bp, Homo sapiens
agcttctcacacgtggcagaggtaacgtcaagatgcccaccttgggccacgtgggggacatgagaattgacagctgcctgggccatgtgcctgcctggctkgcaatacaactcgactatttctgccagagcccctcccctgtggtctgaggcctagtgggcggcatgggctgaggacctgctcctctctcacagctgctgg

SEQ ID NO: 420134 - DNA, 201 bp, Homo sapiens
agatcgcgccactgcactccagccatggtgataagagtgagactgtttccatcaataaattaaaaaaaaagtttttggtaaagacggcctcactatgttgyccaggctggtgtcaaaatcctggcctcaagcaatcctactgccttagcctccaaagtgctgcgattacaggcatgagccactgcacccggcccaatttca

SEQ ID NO: 420135 - DNA, 201 bp, Homo sapiens
atgtggtacttgagggatgcccgctgcctgcactggaacccacagacctcacacctgggggacagaggcagataagaaggtgcgagggccacagccctggrgggggtcctgactcacacttactgcaaaggcttggctcccgaatgtcgcatttggtggacgagaaggtgcttccgctgcttgaaggtttgtccacattcg

SEQ ID NO: 420136 - DNA, 201 bp, Homo sapiens
taggtgacagctgaggcccctggaaggcagatccaactcctcctccagcgacaccactggctccttcacagcttcactccaagaaacttctagaccccccrgggggtgtctcaagtgaaagtctggcctcacatctacccccaaggatggcactggctaggactgcttcaggtctcggttaacctaggtcaaagtgtcctt

SEQ ID NO: 420137 - DNA, 201 bp, Homo sapiens
actgcaacctgcgcctcccaggctcaagcgattcttgtgcctcagcctgccaagtagctgggattacaggcgccccccaccacgcccagctgatttttgtrtttttagtacagacagggtttacaccatattggccaggctggtcttgaattcctgaccttgtgatctgcctgcctcggtctcccaaagtgctgggattac

SEQ ID NO: 420138 - DNA, 201 bp, Homo sapiens
acacagcagagggcgagggcatggtacagcagggtcaggggcaaacggcagaggacgagggcgcagggtacagcagggtcgggtgagcacagcagagggcraggacgcagggtacaggagggtcagggcaaacacagcggagggcgagggcacagggtacagcaggggtgggttctgagaactaaagcttcaccctgtgct

SEQ ID NO: 420139 - DNA, 201 bp, Homo sapiens
gcgcctcccaggctcaagcgattcttgtgcctcagcctgccaagtagctgggattacaggcgccccccaccacgcccagctgatttttgtatttttagtasagacagggtttacaccatattggccaggctggtcttgaattcctgaccttgtgatctgcctgcctcggtctcccaaagtgctgggattacacgtgtgagc

SEQ ID NO: 420140 - DNA, 201 bp, Homo sapiens
  misc_feature (1)...(201): n = A,T,C or G
ttttagtacagacagggtttacaccatattggccaggctggtcttgaattcctgaccttgtgatctgcctgcctcggtctcccaaagtgctgggattacangtgtgagccaccgtgcctggcctacaaattcttaaaggaagccgtatcactaaggttgtatagaatactgattgtcacagctatggctgttctctagaat

SEQ ID NO: 420141 - DNA, 201 bp, Homo sapiens
cgagcacagcagagggcaagggcgcaggacacagcagggtcaggtgaacacagcagagggtgagggcgcagggtacagcagggtcagggtgaacacagcaragggcgagggcatggtacagcagggtcaggggcaaacggcagaggacgagggcgcagggtacagcagggtcgggtgagcacagcagagggcgaggacgca

SEQ ID NO: 420142 - DNA, 201 bp, Homo sapiens
gcaccaccacacccaggtaatttaaaaaatttggggggccggtgcagtggcttacacaaagtgctcaatcccagcactttggaaggccaaggcaggcggaycatgaagtcagttcaagaccagccccagcccaatcaatatggtaaaaccctgtctctactaaaaatacaaaaattagccaggtgtggtggcacacacctg

SEQ ID NO: 420143 - DNA, 201 bp, Homo sapiens
ttcacaagacagacttttctcttcgaagggaaaccctatcttggcattttactctacgctgttctttttttttgagacttgagtcttgctctgttgcccasgctggagtgcaacagcccaatctcagctcactggaaactccacctcccaggttcaagggattctttttttttttttttttttggagacagggtcttgctc

SEQ ID NO: 420144 - DNA, 201 bp, Homo sapiens
tgcaccaccacacccaggtaatttaaaaaatttggggggccggtgcagtggcttacacaaagtgctcaatcccagcactttggaaggccaaggcaggcggmtcatgaagtcagttcaagaccagccccagcccaatcaatatggtaaaaccctgtctctactaaaaatacaaaaattagccaggtgtggtggcacacacct

SEQ ID NO: 420145 - DNA, 201 bp, Homo sapiens
ccaccacacccaggtaatttaaaaaatttggggggccggtgcagtggcttacacaaagtgctcaatcccagcactttggaaggccaaggcaggcggatcakgaagtcagttcaagaccagccccagcccaatcaatatggtaaaaccctgtctctactaaaaatacaaaaattagccaggtgtggtggcacacacctgtag

SEQ ID NO: 420146 - DNA, 201 bp, Homo sapiens
gtgtgcaccaccacacccaggtaatttaaaaaatttggggggccggtgcagtggcttacacaaagtgctcaatcccagcactttggaaggccaaggcaggmggatcatgaagtcagttcaagaccagccccagcccaatcaatatggtaaaaccctgtctctactaaaaatacaaaaattagccaggtgtggtggcacaca

SEQ ID NO: 420147 - DNA, 201 bp, Homo sapiens
gcataacatggagctcttgttgcactaaaaagtggattacaaatctcctcgactgctttagtggggaaaggaatcaattatttatgaactgtccggccccragtcactcagcgtttgcgggaaaataaaccactggtcccagagcagaggaaggctacttgagccggacaccaagcccgcctccagcaccaagggcgggca

SEQ ID NO: 420148 - DNA, 201 bp, Homo sapiens
accacacccaggtaatttaaaaaatttggggggccggtgcagtggcttacacaaagtgctcaatcccagcactttggaaggccaaggcaggcggatcatgmagtcagttcaagaccagccccagcccaatcaatatggtaaaaccctgtctctactaaaaatacaaaaattagccaggtgtggtggcacacacctgtagtc

SEQ ID NO: 420149 - DNA, 201 bp, Homo sapiens
caccctcctgcaagaggtcgacccccccatcctctcccagctgctgacaggtacctgggtatcctcagctcaggctgttcgccccacactatccccacagscaggcctcccagggtacacgtcccgacccccaggggtgtccccagcactgataataggcagagatgtccagagttgcctgagccacttcttggtgttgca

SEQ ID NO: 420150 - DNA, 201 bp, Homo sapiens
tggaggttgcagtgagctgagattgcacagctgcactccaggctgggcgacacagactgtcccggaaaaaaaaaaaaaaattgggggctgggcacggtggytcatgcctgtaatcccagcactttgggaggccaaggcaggcaaatcacctgaggtcaggaactcgagaccagcctggccaacatagcaaaacctgcctct

SEQ ID NO: 420151 - DNA, 201 bp, Homo sapiens
gtaatcccagcactttgggaggccaaggcaggcaaatcacctgaggtcaggaactcgagaccagcctggccaacatagcaaaacctgcctctctactaaawatagaaaaattacccaggcgtcatggctcacgcttataatcccagcacttcgggaggccgaggcaggtggatcacaaggtcaggagattgagaccagcct

SEQ ID NO: 420152 - DNA, 201 bp, Homo sapiens
catgccgtcagcgcctcggtacacggccgtgcagccctggtaaggacacttgtagatggtgggaagctcctccctgcaatgaagagcatgcatggagcccyggccccgacaggcagggcgagcctcgcgttgcaggcatcacctctcacaacgaagcttcttcttccatccgggcttgggtcccggcttcttccgaattct

SEQ ID NO: 420153 - DNA, 201 bp, Homo sapiens
ccgaacacaaagggccagccaggctcacaagccagcaatccccacaagccatgtgctctgggcaccaggacactggacttggaaacagccctttccacagyggcccagaaggggtggaggcgctcaaaggtagcttcctgctaagcagactttgagaaatcgaccacctcaccccataactgcgaaccctatgcaactgat

SEQ ID NO: 420154 - DNA, 201 bp, Homo sapiens; identical to SEQ ID NO: 106306

SEQ ID NO: 420155 - DNA, 201 bp, Homo sapiens
tcatgtggtacttgagggatgcccgctgcctgcactggaacccacagacctcacacctgggggacagaggcagataagaaggtgcgagggccacagccctkgggggggtcctgactcacacttactgcaaaggcttggctcccgaatgtcgcatttggtggacgagaaggtgcttccgctgcttgaaggtttgtccacatt

SEQ ID NO: 420156 - DNA, 201 bp, Homo sapiens
gcattatagaaattgtgaaaaataagacgggcacagagacagcaccctcagtcataattcccccatccgcctccggtcttaatgacacgacctacacacaygtgaagaggcagaaccacacgtgcctcccgcctgtccacgtgggcagctccccagagctggtgtgccttcatgccttctgccttgccttttaagatacac

SEQ ID NO: 420157 - DNA, 201 bp, Homo sapiens
atcgtgccactgcactccagtctgggcaacagagcaagactccatctcagaaacaagacaaaaacgcactgagaagaactgttgacttcgcacaggctgcrccttctctccctgtccctaataactggttttcatgacctagccacatgtccccctcacctgccctgcctgcctggattgggtggccccttgtttgtgagt

SEQ ID NO: 420158 - DNA, 201 bp, Homo sapiens
gtgtctcaagtgaaagtctggcctcacatctacccccaaggatggcactggctaggactgcttcaggtctcggttaacctaggtcaaagtgtccttgggcrcaagtctgagttaggctgcagaaacacctgctacctcccccaggttcacactgacagctgccgggcctgggtcaggcacagccagtgctcaccttcatgc

SEQ ID NO: 420159 - DNA, 201 bp, Homo sapiens
ggacctcctcgtggtgctccttgatgtgcttctgaaggagagactcggtgagagaccctcagagccgcacccgggccacatggcacgagccctcagtaggkgacagctgaggcccctggaaggcagatccaactcctcctccagcgacaccactggctccttcacagcttcactccaagaaacttctagaccccccggggg

SEQ ID NO: 420160 - DNA, 201 bp, Homo sapiens
gcagattcacactgacgccctactctagccttcatctaccaacgtgactgagtaccaaagaccccatgagccaccttcacgcacccccaactcttggggcrgggatgggtatgaggaagactggaaagcaggtcacgtgcccctggctgtcacccgcgtgggcgacactggcgataggcgtacctgtgtggatgagcttca

SEQ ID NO: 420161 - DNA, 201 bp, Homo sapiens
ttccttccatcacagggaagggcagattcacactgacgccctactctagccttcatctaccaacgtgactgagtaccaaagaccccatgagccaccttcaygcacccccaactcttggggcggggatgggtatgaggaagactggaaagcaggtcacgtgcccctggctgtcacccgcgtgggcgacactggcgataggcg

SEQ ID NO: 420162 - DNA, 201 bp, Homo sapiens
acacgacctcctgcctaaagataccaaatggacccccatgtcccacatttgagttcttctgaaaatgtcttaaatctaaaatccccaaatttccaatcccrtttccgaacacaaagggccagccaggctcacaagccagcaatccccacaagccatgtgctctgggcaccaggacactggacttggaaacagccctttcca

SEQ ID NO: 420163 - DNA, 201 bp, Homo sapiens
aggagggtcagggcaaacacagcggagggcgagggcacagggtacagcaggggtgggttctgagaactaaagcttcaccctgtgctacacataaaacccamaactagaggtatcaggacggcagaacagggatgtccaaaggaccactcctttatcaaaacgaccttacgctaggaaaaagctcagaatccactctctcaa

SEQ ID NO: 420164 - DNA, 201 bp, Homo sapiens
acaggcatgagccactgcacccggcccaatttcaggtttttaaggaactgctggttgtgaccatcagtgaccggacagatgcagagtctgaaggaccaaacccaaggaagtgctgccatcaggagagatgtcggagaacccaaaaaataacaacccgcatgtcgggagatgacccagcagtgaaaagcaatcctaatgaaa

SEQ ID NO: 420165 - DNA, 201 bp, Homo sapiens
gtacagcagggtcggggtgaacacagcagagggcgagggcgcagggtacagcggggtacagcagggtcagggcgagcacagcagagggcaagggcgcaggacacagcagggtcaggtgaacacagcagagggtgagggcgcagggtacagcagggtcagggtgaacacagcagagggcgagggcatggtacagcagggtca

SEQ ID NO: 420166 - DNA, 201 bp, Homo sapiens
tacagcagggtcggggtgaacacagcagagggcgagggcgcagggtacagcggggtacagcagggtcagggcgagcacagcagagggcaagggcgcaggacacagcagggtcaggtgaacacagcagagggtgagggcgcagggtacagcagggtcagggtgaacacagcagagggcgagggcatggtacagcagggtcag

SEQ ID NO: 420167 - DNA, 201 bp, Homo sapiens; identical to SEQ ID NO: 106311

SEQ ID NO: 420168 - DNA, 201 bp, Homo sapiens
gaatggcgtgaacccgggaggcagagcttgcagtaggccgagattgtgccactgcactccagcctgggcaacacagcgagactccgtctcaaataaaaaawaaataaataaatacaaaacttagctgggtgtggtggcgggcgcctgtaatcccagctactcgggaggctgaggcgggagaatcacttgaacgcgggaggt

SEQ ID NO: 420169 - DNA, 201 bp, Homo sapiens
ccaacctggctaacatggttaaaccccgtctctacaaaaaatacaaaaaattgagctgggcgtggtaactcatgcctgcaattccagcactttggaggccrgggtgggcggatcacctgaagtcgggagttcgagaccagccttaccaacatggagaaaccccatttctactaaaaaatacaaaaatagccaggcatagtg

SEQ ID NO: 420170 - DNA, 201 bp, Homo sapiens
ctgtaatcccagctactcgggaggctgaggcaggagaatcgcttgaacctgggaggcagaggttgtggtgagctgatatcgtgccactgcactccagcctrggtaacaaagagtgaaactccttctcaaaacaaatacaaatacaaatacaaaaaaattagcagggtgtggtggcacaagcctgtaatcccagctactcgg

SEQ ID NO: 420171 - DNA, 201 bp, Homo sapiens
attagcagggtgtggtggcacaagcctgtaatcccagctactcgggaggctgagacaggagaatcacttgaacccaggaggcagaggctgcagtgagccgwgattgtgccactgcactcgagcctgggcgacagagtgagactccatcaataaataaataatactgttctctcggccaggcctggtggcgacagagcgaga

SEQ ID NO: 420172 - DNA, 201 bp, Homo sapiens
tctgtctcaaaaataaataaacacatagatagatagataagtaggtaaataaatagataaataggtagataaatagatacatagatatacagataggtagrtagatagagagagacaaagaagtaggaagatagataggtaggtaggtagatagatacacagatagatagaattgttctcaacacactgcatacaagttta

SEQ ID NO: 420173 - DNA, 201 bp, Homo sapiens
agatccaactcctcctccagcgacaccactggctccttcacagcttcactccaagaaacttctagaccccccggggggtgtctcaagtgaaagtctggccycacatctacccccaaggatggcactggctaggactgcttcaggtctcggttaacctaggtcaaagtgtccttgggcacaagtctgagttaggctgcagaa

SEQ ID NO: 420174 - DNA, 201 bp, Homo sapiens
gagccgcactgtctcatctgtgcacccgtatctagctaaactatctgggtagctgtgtttctgtttgggacagagtcttgctctgtcacccaggctggagyacggttgtgcgatgtcggctcactgcaacttccgcctcccaggctgaagtgattctcgtgcctcagcctccagagtagctgggattacagatgcccacca

SEQ ID NO: 420175 - DNA, 201 bp, Homo sapiens
gatacacagatagatagaattgttctcaacacactgcatacaagtttacagagccaagcagctctaagatgtgacactcacaatcccgttcctacctgagrcccccgagccgcactgtctcatctgtgcacccgtatctagctaaactatctgggtagctgtgtttctgtttgggacagagtcttgctctgtcacccaggc

SEQ ID NO: 420176 - DNA, 201 bp, Homo sapiens
aacacggagcacagaaaggtctcacctgcaaggaggcatgattctactattgatgactagaagggagactggggtccctgaccctcaagttctccccaccrtggccccatccccaccaagggtgctatgcagcctctgatcctgccctgccagcccaacgtccagaagcacacaggcagcaacaagcatcagaaccctcag

SEQ ID NO: 420177 - DNA, 201 bp, Homo sapiens
ttgcctgttttctctctagggcaaccccgtggaactgataacaaaagctcgtctttttctgctgcagttaatacctcggtgcccgaaaaagagcttctcasacgtggcagaggtaacgtcaagatgcccaccttgggccacgtgggggacatgagaattgacagctgcctgggccatgtgcctgcctggctggcaatacaa

SEQ ID NO: 420178 - DNA, 201 bp, Homo sapiens
actcaacccggagggtcacggagtgggggcttccgtacagcagcctcaggcggcactcccagccatgactcctgggaacaagcctgggggtagggaccccygggcaccttttctgggcctgaccagttttctgttcatgctgaagctgctgcagcccctctggctcagtcctgccctctgcttcgcatctctctccgggcc

SEQ ID NO: 420179 - DNA, 201 bp, Homo sapiens
acaaaagctcgtctttttctgctgcagttaatacctcggtgcccgaaaaagagcttctcacacgtggcagaggtaacgtcaagatgcccaccttgggccaygtgggggacatgagaattgacagctgcctgggccatgtgcctgcctggctggcaatacaactcgactatttctgccagagcccctcccctgtggtctgag

SEQ ID NO: 420180 - DNA, 201 bp, Homo sapiens
cactatccccacagccaggcctcccagggtacacgtcccgacccccaggggtgtccccagcactgataataggcagagatgtccagagttgcctgagccayttcttggtgttgcagacctcaggctggggcggctcctcctccgtgtggccccggatcagcacaccaggctgctgcctttcgctttttacaggtacctcca

SEQ ID NO: 420181 - DNA, 201 bp, Homo sapiens
tacctggggccctgcaaaggggcaggcttggctgaggtgggaagcccgacctgggccccaccgcgtcgctgtccgaaggaggctgggccacatccgtgctrggcagggtcttggtctcagccccaactggggtccctgtccctctaccctgggaggtctgaggggcatccccagggttccaccctcggtgctggggcagcc

SEQ ID NO: 420182 - DNA, 201 bp, Homo sapiens
tcaggggcaaacggcagaggacgagggcgcagggtacagcagggtcgggtgagcacagcagagggcgaggacgcagggtacaggagggtcagggcaaacamagcggagggcgagggcacagggtacagcaggggtgggttctgagaactaaagcttcaccctgtgctacacataaaacccacaactagaggtatcaggacg

SEQ ID NO: 420183 - DNA, 201 bp, Homo sapiens
cccccgggcaccttttctgggcctgaccagttttctgttcatgctgaagctgctgcagcccctctggctcagtcctgccctctgcttcgcatctctctccrggcctcctccactgctcccgtttctcttttcagaacttaacagcatcagaacttccatgaaaaaaggccgttgacctctcagtctgcacagcagggttct

SEQ ID NO: 420184 - DNA, 201 bp, Homo sapiens
gtcctgggattcagactcaacccggagggtcacggagtgggggcttccgtacagcagcctcaggcggcactcccagccatgactcctgggaacaagcctgsgggtagggacccccgggcaccttttctgggcctgaccagttttctgttcatgctgaagctgctgcagcccctctggctcagtcctgccctctgcttcgca

SEQ ID NO: 420185 - DNA, 201 bp, Homo sapiens
ccatcccagctcccagccctcctcacaccagcagccccagaccttctgggcagcaagccagagacacattctcaggtgtcctgggattcagactcaacccrgagggtcacggagtgggggcttccgtacagcagcctcaggcggcactcccagccatgactcctgggaacaagcctgggggtagggacccccgggcacctt

SEQ ID NO: 420186 - DNA, 201 bp, Homo sapiens
tcctcccatcccagctcccagccctcctcacaccagcagccccagaccttctgggcagcaagccagagacacattctcaggtgtcctgggattcagactcmacccggagggtcacggagtgggggcttccgtacagcagcctcaggcggcactcccagccatgactcctgggaacaagcctgggggtagggacccccgggc

SEQ ID NO: 420187 - DNA, 201 bp, Homo sapiens
gtctgtagccatttgtcactatgtctttacctctagtcttctctcctacttccatgaagacgcggccatcagggaagaggccttcctgcatgttgctgtgkacatgtacttgaagctggtccagctcttcgtggctggggatacaagcacagtttcacctccagctggcaggagcctggagctcaagggtcaggcaggtgc

SEQ ID NO: 420188 - DNA, 201 bp, Homo sapiens
tccctaataactggttttcatgacctagccacatgtccccctcacctgccctgcctgcctggattgggtggccccttgtttgtgagtggctggccatgccrttcccacaatgaccactcacctcctcagcacaggaggcttcagagcacccgcagtctctgtgccctcgtgtttgggacgggaatctttgcggaccgggtg

SEQ ID NO: 420189 - DNA, 201 bp, Homo sapiens
tgtccctaataactggttttcatgacctagccacatgtccccctcacctgccctgcctgcctggattgggtggccccttgtttgtgagtggctggccatgscgttcccacaatgaccactcacctcctcagcacaggaggcttcagagcacccgcagtctctgtgccctcgtgtttgggacgggaatctttgcggaccggg

SEQ ID NO: 420190 - DNA, 201 bp, Homo sapiens; identical to SEQ ID NO: 106305

SEQ ID NO: 420191 - DNA, 201 bp, Homo sapiens
gagaccctgtcgctaactgcccttctctttaaagagtgcattgaggccggcgcggtggctcacgcctgtaatcccagcactttggcaggctgaggcgggcrgatcatgaggtcaggagttcgagaccagtgtggccaacgtgggagaaatcccatctctactaaaaatacaaaaattagccaggtatggtggcacatgcct

SEQ ID NO: 420192 - DNA, 201 bp, Homo sapiens
tagccatttgtcactatgtctttacctctagtcttctctcctacttccatgaagacgcggccatcagggaagaggccttcctgcatgttgctgtggacatstacttgaagctggtccagctcttcgtggctggggatacaagcacagtttcacctccagctggcaggagcctggagctcaagggtcaggcaggtgcaaggg

SEQ ID NO: 420193 - DNA, 201 bp, Homo sapiens
caccttcacgcacccccaactcttggggcggggatgggtatgaggaagactggaaagcaggtcacgtgcccctggctgtcacccgcgtgggcgacactggygataggcgtacctgtgtggatgagcttcacgtggcgctgcaggtagcggtcgatcatgaaaaccttgttgcagccagggtgggggcagggccgctcccgg

SEQ ID NO: 420194 - DNA, 201 bp, Homo sapiens
cagccatgatcgtgccagggcaccccagcctaggcaacaacatgagaccctgtcgctaactgcccttctctttaaagagtgcattgaggccggcgcggtgsctcacgcctgtaatcccagcactttggcaggctgaggcgggcggatcatgaggtcaggagttcgagaccagtgtggccaacgtgggagaaatcccatctc

SEQ ID NO: 420195 - DNA, 201 bp, Homo sapiens
gctgcagtcagccatgatcgtgccagggcaccccagcctaggcaacaacatgagaccctgtcgctaactgcccttctctttaaagagtgcattgaggccgscgcggtggctcacgcctgtaatcccagcactttggcaggctgaggcgggcggatcatgaggtcaggagttcgagaccagtgtggccaacgtgggagaaat

SEQ ID NO: 420196 - DNA, 201 bp, Homo sapiens
ggcagcgcctgcagcgcccttcgcgcggctcccggacacagcaagcggctcgggcgcgcggctctcggcgggacaagccgccctgtgggggatgtggccgytggtccaagaaatctttcaaatttcaaaggcctctaaggcctctccagcgaagcaacttcaagagtgaaacctggaactgcaccctcctcccagcgaccg

SEQ ID NO: 420197 - DNA, 201 bp, Homo sapiens
tggaaggctgagatcacttgaggtcaggagttagagatcaccctggccaacatggtgaaaccccgtctctaccaaaaattacaaaaattagccaggcatgsttgcgggtgcctgtaatcccagctacttgggaggctgaggcgggagaattgattgaacctgggaggcagaggttgtggtgagccaagatggtgccactgc

SEQ ID NO: 420198 - DNA, 201 bp, Homo sapiens
acagcagagggcgagggcgcagggtacagcagggtcagggcaaacacagcagagggcgagggcgcagggtacagcagggtcagggcgaacacagcagaggrggagggcacagcagaggatgagggcgcagggtacagcagggtcggggtgaacacagcagagggcgagggcgcagggtacagcggggtacagcagggtcag

SEQ ID NO: 420199 - DNA, 201 bp, Homo sapiens
tagaaattgtgaaaaataagacgggcacagagacagcaccctcagtcataattcccccatccgcctccggtcttaatgacacgacctacacacacgtgaaraggcagaaccacacgtgcctcccgcctgtccacgtgggcagctccccagagctggtgtgccttcatgccttctgccttgccttttaagatacacttgttt

SEQ ID NO: 420200 - DNA, 201 bp, Homo sapiens
caccaccacacccaggtaatttaaaaaatttggggggccggtgcagtggcttacacaaagtgctcaatcccagcactttggaaggccaaggcaggcggatmatgaagtcagttcaagaccagccccagcccaatcaatatggtaaaaccctgtctctactaaaaatacaaaaattagccaggtgtggtggcacacacctgt

SEQ ID NO: 420201 - DNA, 201 bp, Homo sapiens
tcctggggaagtcaggaattccttccatcacagggaagggcagattcacactgacgccctactctagccttcatctaccaacgtgactgagtaccaaagamcccatgagccaccttcacgcacccccaactcttggggcggggatgggtatgaggaagactggaaagcaggtcacgtgcccctggctgtcacccgcgtggg

SEQ ID NO: 420202 - DNA, 201 bp, Homo sapiens
tcaggtttttaaggaactgctggttgtgaccatcagtgaccggacagatgcagagtctgaaggaccaaacccaaggaagtgctgccatcaggagagatgtsggagaacccaaaaaataacaacccgcatgtcgggagatgacccagcagtgaaaagcaatcctaatgaaaaaatacttcagtaaattcaagtaagaataaa

SEQ ID NO: 420203 - DNA, 201 bp, Homo sapiens; identical to SEQ ID NO: 133314

SEQ ID NO: 420204 - DNA, 201 bp, Homo sapiens; identical to SEQ ID NO: 133391

SEQ ID NO: 420205 - DNA, 201 bp, Homo sapiens; identical to SEQ ID NO: 133415

SEQ ID NO: 420206 - DNA, 201 bp, Homo sapiens; identical to SEQ ID NO: 133411

SEQ ID NO: 420207 - DNA, 201 bp, Homo sapiens; identical to SEQ ID NO: 133416

SEQ ID NO: 420208 - DNA, 201 bp, Homo sapiens; identical to SEQ ID NO: 133418

SEQ ID NO: 420209 - DNA, 201 bp, Homo sapiens; identical to SEQ ID NO: 133311

SEQ ID NO: 420210 - DNA, 201 bp, Homo sapiens; identical to SEQ ID NO: 133213

SEQ ID NO: 420211 - DNA, 201 bp, Homo sapiens
aatgagacaagaaaattataataaaggaatcaattaggcaagaggatataacaattgtaaatatctatgcacccaacatcagaaaccaaaatatataaaayaaatattattacagctaaaaagacaggctaatacaacaatagttggggatttcaccactcccacattcagcatggaagagattatctagacagaaattca

SEQ ID NO: 420212 - DNA, 201 bp, Homo sapiens; identical to SEQ ID NO: 344172

SEQ ID NO: 420213 - DNA, 201 bp, Homo sapiens; identical to SEQ ID NO: 344166

SEQ ID NO: 420214 - DNA, 201 bp, Homo sapiens; identical to SEQ ID NO: 344182

SEQ ID NO: 420215 - DNA, 201 bp, Homo sapiens; identical to SEQ ID NO: 123145

SEQ ID NO: 420216 - DNA, 201 bp, Homo sapiens; identical to SEQ ID NO: 123147

SEQ ID NO: 420217 - DNA, 201 bp, Homo sapiens; identical to SEQ ID NO: 211868

SEQ ID NO: 420218 - DNA, 201 bp, Homo sapiens; identical to SEQ ID NO: 211902

SEQ ID NO: 420219 - DNA, 201 bp, Homo sapiens; identical to SEQ ID NO: 211905

SEQ ID NO: 420220 - DNA, 201 bp, Homo sapiens; identical to SEQ ID NO: 211821

SEQ ID NO: 420221 - DNA, 201 bp, Homo sapiens; identical to SEQ ID NO: 211909

SEQ ID NO: 420222 - DNA, 201 bp, Homo sapiens; identical to SEQ ID NO: 211823

SEQ ID NO: 420223 - DNA, 201 bp, Homo sapiens; identical to SEQ ID NO: 211835

SEQ ID NO: 420224 - DNA, 201 bp, Homo sapiens; identical to SEQ ID NO: 211931

SEQ ID NO: 420225 - DNA, 201 bp, Homo sapiens; identical to SEQ ID NO: 211883

SEQ ID NO: 420226 - DNA, 201 bp, Homo sapiens; identical to SEQ ID NO: 211837

SEQ ID NO: 420227 - DNA, 201 bp, Homo sapiens
atcttcacagcccccagcccttcaaataaagcccaaattccccagcagggcatacaaattcctcccagtctgaccccaatcaacctcgctgcctcaccccyaaaccacaaagctcacgcagcctctgcagctcactcaaggccctctcgggccaccatgtttttgcatatgctgtccctggtcccggaagcatcctctgcc

SEQ ID NO: 420228 - DNA, 201 bp, Homo sapiens
agccaacccgaagcaccgtctgggtgtgtgttccattgtgggtctctccggcattaggggttagggcttgcataggaaaagtggctcagtgttcatgtgtkgggttctgccagccactgggccactgccaggaagcccgactctgcatccaggtgatgccaacacatcctgctcagcccagtaagaatccagttcctcagg

SEQ ID NO: 420229 - DNA, 201 bp, Homo sapiens
attgtaagtctcttgctttctttttggatcgtcctcattttggcttttctgggctcatggaggaggcagggccaggcattgggcctctcccattgggagtrgggagggcacaggccaggcccttgaccatctgcccggcctggtgaggttgggggttggatgtggttggctggccgtgatgaaacaacctgagttgccacc

SEQ ID NO: 420230 - DNA, 201 bp, Homo sapiens
aacacaggctaaggaaccaaactgaatccagttcaaattccaagctctgccattcatcctctgtgggatcttagacaagcaacttcacctctctcagcctwggtttcttcatctgtagaatggtcattgcctgccccccatgggtggttgtgtggttcagtgaggagacagatatcagaggtcacacagtggcccccctgg

SEQ ID NO: 420231 - DNA, 201 bp, Homo sapiens
ttccctccagcaggggatgccctttgacctctgcttcctgctacagagctcagatttcaaggtgagcaggaaacccctccccacctctcacccccgggtcycccagctctatcaggcgaatgggctttaagtaatcaccttgattgacattcagccagagtgatgctactatacagataacacaatcatttccttgtaagg

SEQ ID NO: 420232 - DNA, 201 bp, Homo sapiens
accatctccgtcaatggctctgtgcagctgtcctacatcagcttccaggtcagactgtgcacctggcaccggtcccaggggctgggatgcagggcccagcrtagctgtgtctaggcccagctgggtgggcccaagccaatctcctacccaggtcactctggggacaacctctgcttccctgtcccagtacctgcccgcccc

SEQ ID NO: 420233 - DNA, 201 bp, Homo sapiens
ctcccagtctgtctgtttcccacccaggcccagggggcgcagacaaaaagtgagttcaacacagaggccctgggtggccgagcagacagtaggaaggaccragggtctgagaggctggccccagccagcaggccactcagggcctacaggccccatcttgcccactcaagagttccctgtctgtctgccgggcacccagag

SEQ ID NO: 420234 - DNA, 201 bp, Homo sapiens
tcagggcctacaggccccatcttgcccactcaagagttccctgtctgtctgccgggcacccagagctggggacctgggggtctccctgaattcttcattcycccttctttacgtctctccaaggcaccaagaggcccgaagccaccgacatggcccaggcctccgggattcctcaccatgacgacaggggtccagttcccc

SEQ ID NO: 420235 - DNA, 201 bp, Homo sapiens
ctctatcaggcgaatgggctttaagtaatcaccttgattgacattcagccagagtgatgctactatacagataacacaatcatttccttgtaaggtgttaytcatggctgcctagtcatcttatacacctttatctgaatctacaggtgcacctgctgcttcttttactctgaaaataagaactagaggagtcatcacgtt

SEQ ID NO: 420236 - DNA, 201 bp, Homo sapiens
gtaatcaccttgattgacattcagccagagtgatgctactatacagataacacaatcatttccttgtaaggtgttactcatggctgcctagtcatcttatrcacctttatctgaatctacaggtgcacctgctgcttcttttactctgaaaataagaactagaggagtcatcacgttgctgtttggtggtgtgtgtctttg

SEQ ID NO: 420237 - DNA, 201 bp, Homo sapiens
tggtctctccctcttgcccttgcctctgcctttcggcttctccttggctctattaatgcttctcctcactgcccggtgccttttgttttaacagaaccccygcacagtccctgttcagcctgccttctccacggtgccattctcccagtctgtctgtttcccacccaggcccagggggcgcagacaaaaagtgagttcaac

SEQ ID NO: 420238 - DNA, 201 bp, Homo sapiens
gtcgctcctctgggagtcctccccgcctggaatattgttggacgctcccccatgaccccacggagtctgtacgtatctgtgccatgccagttcaaagcacyccattgtaactgtgtttgcgttgtctgtccccgtcactccacccccatctccctatgcccatgaggcttcagagggccgggactgtgccttgttcatttg

SEQ ID NO: 420239 - DNA, 201 bp, Homo sapiens
ctcgcgcacacatgcgctctcccattgaatttcctggtttcttttcagcagactcccgccaacccacctatgatgtacccccaccccacctatgtaagtgrtttctcagggagggcggaggttctgtttgtggtgggcaggctgggggtgaagggccacttcgggggtatccactagccttgcaaaatgaaaagcgaaggg

SEQ ID NO: 420240 - DNA, 201 bp, Homo sapiens
cagcacacgcctaattgcccttccatgctctgcctaaatgtcgctcctctgggagtcctccccgcctggaatattgttggacgctcccccatgaccccacrgagtctgtacgtatctgtgccatgccagttcaaagcaccccattgtaactgtgtttgcgttgtctgtccccgtcactccacccccatctccctatgccca

SEQ ID NO: 420241 - DNA, 201 bp, Homo sapiens
aggatgtcactaccgatcataggcttaagctcttctcctgctggtgcaaatcaggccggaagtttagcgttagtggggctgcctgcagaggggttgagggrcaggtgaccgtggtggagtccgggaacacggcaggaagttccaggaaggctaacatgaaaagggaggtggatgggggagtccaagggccaaaggctcatg

SEQ ID NO: 420242 - DNA, 201 bp, Homo sapiens
tctgtgcagctgtcctacatcagcttccaggtcagactgtgcacctggcaccggtcccaggggctgggatgcagggcccagcatagctgtgtctaggcccwgctgggtgggcccaagccaatctcctacccaggtcactctggggacaacctctgcttccctgtcccagtacctgcccgccccttctcctctgtcactctg

SEQ ID NO: 420243 - DNA, 201 bp, Homo sapiens
tgtttgctaatatcagcacttttccttaagcattttctacttatttttagaaaatcatactgtaaaggcaaaatccaataattgcacaaaaacacattagrtccaaattagagaaacaaaaagatgccaaccaagcagtctctgcgacgcaagttgtatgcaagatcccagacaaatgcaaggcagaggcaccgaagccct

SEQ ID NO: 420244 - DNA, 201 bp, Homo sapiens
aattgcacaaaaacacattaggtccaaattagagaaacaaaaagatgccaaccaagcagtctctgcgacgcaagttgtatgcaagatcccagacaaatgcraggcagaggcaccgaagccctcctgtgcctgtcactggcaataacccatgccacagaagactatttgctttccctgggcctaggtttgctgtgcgctttc

SEQ ID NO: 420245 - DNA, 201 bp, Homo sapiens
gagatctcgctgttgctcaggctggtcttcaacttctgggctcaagtgacccacctgccttggcgtcccaaggtgctgtgattacaggcgtgagccactgygcccggccccaatttcacatgctctttacatttgttctcttctttcccacttaatcaggcttgtgctagcctccaacaagtgtccactggcatggaaggc

SEQ ID NO: 420246 - DNA, 201 bp, Homo sapiens
gagcagttgggactacaggagtgcactgtgatgcccagctaattaatttttttttaaagtagagatgagatctcgctgttgctcaggctggtcttcaactyctgggctcaagtgacccacctgccttggcgtcccaaggtgctgtgattacaggcgtgagccactgcgcccggccccaatttcacatgctctttacatttg

SEQ ID NO: 420247 - DNA, 201 bp, Homo sapiens
tacgatcatagctcactgcagcctccaattcctgggctcgagcaatcctcccatctcagcctctggagcagttgggactacaggagtgcactgtgatgccmagctaattaatttttttttaaagtagagatgagatctcgctgttgctcaggctggtcttcaacttctgggctcaagtgacccacctgccttggcgtccca

SEQ ID NO: 420248 - DNA, 201 bp, Homo sapiens
ccttttgttttaacagaacccccgcacagtccctgttcagcctgccttctccacggtgccattctcccagtctgtctgtttcccacccaggcccagggggygcagacaaaaagtgagttcaacacagaggccctgggtggccgagcagacagtaggaaggaccgagggtctgagaggctggccccagccagcaggccactc

SEQ ID NO: 420249 - DNA, 201 bp, Homo sapiens
agggtccctcacaaatcccacgagggtgttggagaaagcaggctggggctctagccttttgggcaggagtctcggacacaggaaggtggtaatggggtacmccaggaaacagccccatgcctccgagatgggagaggggctggggcagagcctgtgagggccacagcagggtcagagctgcctcctcagacctggcgtccc

SEQ ID NO: 420250 - DNA, 201 bp, Homo sapiens
caggtgagctaagactagaaagacaaacctactgcaggaaacaaccagaagaatgaaaagtccaactggagccccgtagagactcgggttgatgcacttcrggtcacacacacgttcctgtaactggccccacactgaagaccagactcaggtcttcattttctagaaagagggtccaggagctcaggggtggtccccatc

SEQ ID NO: 420251 - DNA, 201 bp, Homo sapiens
ttaattaattattttttttcttttgagacagggacttttttctttgacccaggctggagtgcagtggtacgatcatagctcactgcagcctccaattcctrggctcgagcaatcctcccatctcagcctctggagcagttgggactacaggagtgcactgtgatgcccagctaattaatttttttttaaagtagagatgag

SEQ ID NO: 420252 - DNA, 201 bp, Homo sapiens
ttgttcaaggaaaaataaataataaataaatgaaaccccaggtgagctaagactagaaagacaaacctactgcaggaaacaaccagaagaatgaaaagtcyaactggagccccgtagagactcgggttgatgcacttcgggtcacacacacgttcctgtaactggccccacactgaagaccagactcaggtcttcattttc

SEQ ID NO: 420253 - DNA, 201 bp, Homo sapiens
tgtctctcccttccttggggcaggaatttccaaaggactacagggatgaagctgaagggctccaaaagaaaaaaatacattcagaggtatttcaaatgtamtcatctccatttattcatttattcatttaattaattattttttttcttttgagacagggacttttttctttgacccaggctggagtgcagtggtacgatc

SEQ ID NO: 420254 - DNA, 201 bp, Homo sapiens
tgcaagcagagtaggtctctgggcttgagaagcctgtgggtaagtcagtccgagtatgcttatctgagataaggatgtccccatccactcagtatgcaacstgaggtcacctctcctctgctccccatgagcattttatgcatatataaataatacccctgcagccataaaaaggaacgagatcatgtcctttgcaggaac

SEQ ID NO: 420255 - DNA, 201 bp, Homo sapiens
ttcgtgcagtacttccaccgcgtgcccttccaccgtgtggacaccatctccgtcaatggctctgtgcagctgtcctacatcagcttccaggtcagactgtscacctggcaccggtcccaggggctgggatgcagggcccagcatagctgtgtctaggcccagctgggtgggcccaagccaatctcctacccaggtcactct

SEQ ID NO: 420256 - DNA, 201 bp, Homo sapiens
tcccattgggagtggggagggcacaggccaggcccttgaccatctgcccggcctggtgaggttgggggttggatgtggttggctggccgtgatgaaacaayctgagttgccaccccgtgggcagccacggaagaccatgccccacattcacttctgtcacctgcaaagggaggctaggctgagagacgtttccccgagagg

SEQ ID NO: 420257 - DNA, 201 bp, Homo sapiens
tcccgccttcatcaaatgtcaccctgccccttaaaatgccgcccatgcatgttctcccacctactgcttttgtttccaatcattcctaatggcccggatcyattggatcccagcatcactgcttgttagcgcagtggccttgggcaagtcactcctctggtgcagatgggggtccctaagaccaccctcagtttccatgat

SEQ ID NO: 420258 - DNA, 201 bp, Homo sapiens
cagtttcagtgactatgatgtgaatattttggggaaccatgattcttgctaccgcaatgctcggaaacaaagagttttctttttctttttttcttttttctttttttttttttttgctttgagacagggtctcgctctgtcaccccaggctggagtgcagtagtgcgatctcggctcactgcaatctctgcctcccgggtt

SEQ ID NO: 420259 - DNA, 201 bp, Homo sapiens
aagccattctccttcctcagcctcccaagtagctggaattacaggtgtaatcccattagcctattattagccagcacgcctggctaatatatatatatatwtttttttttagtagagacagggtttcaccatgttggccaggctggtctcaaactcctgatctcaggtgatccgtcccccctcagcctcccaaagtgctgg

SEQ ID NO: 420260 - DNA, 201 bp, Homo sapiens
gccattctccttcctcagcctcccaagtagctggaattacaggtgtaatcccattagcctattattagccagcacgcctggctaatatatatatatatatwtttttttagtagagacagggtttcaccatgttggccaggctggtctcaaactcctgatctcaggtgatccgtcccccctcagcctcccaaagtgctggga

SEQ ID NO: 420261 - DNA, 201 bp, Homo sapiens
cagggcgtgccaccacgccggctaatttttttgtatttttagtagagacggggtttcaccatgttagccaggatggtctcgatctcctgaccttgtgatcygcccgcctcggcctcccaaagtgctaggattacaggcgagagccaccacgcccggcctgaatttattctaattaattgaaatttaaatagccacctatgg

SEQ ID NO: 420262 - DNA, 201 bp, Homo sapiens
ttcccctgctatgtagttacacaggcctcctgcagcttagtttcagcttttctagtttttcatggctcccagagggaatattttctatgccgtatagcctsttttcacatgaagccattttggggtgttatagtaacagctggtgacttgattttatttatgttgctatgtgctgaaagctttatgaatgttctggctgtg

SEQ ID NO: 420263 - DNA, 201 bp, Homo sapiens
gacatggctgcacaccctcgcgtgagttcactcactcaggatgtattgagccattgttccagggcaggtagcattcaaagcatcaggggtgctgttatagscaaggctacagtttattacagcagaaggacacggaataaaatcagcaaagggaagagccacatagggcagaggccaggagagaccatcccgaaggggaac

SEQ ID NO: 420264 - DNA, 201 bp, Homo sapiens
tgtggggcttccatcttaaggagggcaagcaggcaatgggcagatcaggaaacgaagatatgacttgccaaagggtggtaagtgccatggccaaaaggagscagagagagatggggtgtctgcttagttgggaagtcacagaagagcgggacgtgatgtttgaacagagacgataattataatggccactttcagaacact

SEQ ID NO: 420265 - DNA, 201 bp, Homo sapiens
caggaaacgaagatatgacttgccaaagggtggtaagtgccatggccaaaaggaggcagagagagatggggtgtctgcttagttgggaagtcacagaagascgggacgtgatgtttgaacagagacgataattataatggccactttcagaacacttactatttgttggataagtaataacagtaatatatgtaccaggca

SEQ ID NO: 420266 - DNA, 201 bp, Homo sapiens
ccgttagactgtggtacctggatctcaaacccaggcaatccggctccagagtgtttttaaccatttccctgcactgcctcctgccggtcaaaagaataaaygcatatgcaggcaagaatgaatgggtggtcccatttccgtagaaggggaaaccgaggtcggggagctgggcggggagaccccagcatcctctgacctctt

SEQ ID NO: 420267 - DNA, 201 bp, Homo sapiens
tttacacagaaatttcacctttttttcacttataaaatctaatgaaagagttctatattattatgttaataatacagtagtaatataacagtataatgtaatagataattaatatattatattaattatatattataattatatattatattatatatattatatattatatattaattatatatattatatatattatat

SEQ ID NO: 420268 - DNA, 201 bp, Homo sapiens
aggccactggccacacatggctacagaatgcttaatgaggccagtatgactgaggaactgaatttgtcatttaatttatcgaaatgtaaacaacctaatgkagctagtggcttctggattggacagcgcagctctgcacatatacaggtcaatttgcatgtctgtatgtttaactttaatttttaactttatttcctcttt

SEQ ID NO: 420269 - DNA, 201 bp, Homo sapiens
ccccagcatcctctgacctctttccttgcctccctgcccccgcccgcaggtgaagctggtgttcgtggaggaccaggctgtggtggagacggtgttcttcytgacgtcgcgcaccagggcgctgctgcggcgcttccctcgcatgctgctggtggaccggctgccggggctgcagggcgcgctggatctgctggccgtgct

SEQ ID NO: 420270 - DNA, 201 bp, Homo sapiens
catttaatttatcgaaatgtaaacaacctaatgtagctagtggcttctggattggacagcgcagctctgcacatatacaggtcaatttgcatgtctgtatktttaactttaatttttaactttatttcctctttctgccccgccaccccccacccccagcaagcagggcagcctagtgtacacgctgtttttgtttgtttg

SEQ ID NO: 420271 - DNA, 201 bp, Homo sapiens
caccagaccagtcatccttaagcatgcataggagtcccctggagggcttgtcaaactagattgctggggcccgcccccagagtttcagactcagtgggtcygaggtggccccgagaaggtgcatttctgtccaggtcccaagaaccgatggtgatgctgctggtccagggcccacattttgagacccactgccctagactg

SEQ ID NO: 420272 - DNA, 201 bp, Homo sapiens
acagccgcgagccactgtgcccggcctgacttacagaatgtaatagagacttcgagaggcagagcgtaaaacacacacaccccaagaggagaaaatagtcacggaaaattccagaaacatggagacatggaggcagagacaccagagacagccagggaaacagaagagccaggttttgtacacgtgacaaagactgggaga

SEQ ID NO: 420273 - DNA, 201 bp, Homo sapiens
tccagaaacatggagacatggaggcagagacaccagagacagccagggaaacagaagagccaggttttgtacacgtgacaaagactgggagacagagactrggagactgaactgcagagaagccgcaggataaagaaaaggatccatctattcagtgaataaggggccaggtcccatgctgtgggctggggatattctagt

SEQ ID NO: 420274 - DNA, 201 bp, Homo sapiens
ttacacagaaatttcacctttttttcacttataaaatctaatgaaagagttctatattattatgttaataatacagtagtaatataacagtataatgtaatagataattaatatattatattaattatatattataattatatattatattatatatattatatattatatattaattatatatattatatatattatata

SEQ ID NO: 420275 - DNA, 201 bp, Homo sapiens
tacacagaaatttcacctttttttcacttataaaatctaatgaaagagttctatattattatgttaataatacagtagtaatataacagtataatgtaatagataattaatatattatattaattatatattataattatatattatattatatatattatatattatatattaattatatatattatatatattatatat

SEQ ID NO: 420276 - DNA, 201 bp, Homo sapiens
acacagaaatttcacctttttttcacttataaaatctaatgaaagagttctatattattatgttaataatacagtagtaatataacagtataatgtaatagataattaatatattatattaattatatattataattatatattatattatatatattatatattatatattaattatatatattatatatattatatatt

SEQ ID NO: 420277 - DNA, 201 bp, Homo sapiens
atgaaagagttctatattattatgttaataatacagtagtaatataacagtataatgtaatagataattaatatattatattaattatatattataattawatattatattatatatattatatattatatattaattatatatattatatatattatatattatattataatatattatattatatatattatatattat

SEQ ID NO: 420278 - DNA, 201 bp, Homo sapiens
tattatattataatatattatattatatatattatatattatattataatatattatattatattatatatattatatattatattattattatattataktatatatattatatataatattatatatattatatattatatatataatattatatattatattaatattataatatgtaacgcataacatgtaatattg

SEQ ID NO: 420279 - DNA, 201 bp, Homo sapiens
ggagaatggtgtgaactcaggaggcgtagcttgcagcgagccaagatcgtgctactgcactccagcctgggcgacagagtgagactccatcctaaacaaamaaaaaaaaaagaataagaacaagtctaggaactattttgaaagatctctcaaacacatttttaagttaaaaaagcaaaatgcaaaactgtacataatatg

SEQ ID NO: 420280 - DNA, 201 bp, Homo sapiens
taccttctccaacccttagttcatttatctgtaaaatggggataatactatcttatagggctgttggggttgttgtgtgagaaagtgcagtgtgtatgtgtatgtgtgtgtgtgtgtgtgtgtgtgtgtgtgtgtgcagaatgggtagaaccgtgcccagaagtaggaagccctgcatatgttcaatatttagctattatt

SEQ ID NO: 420281 - DNA, 201 bp, Homo sapiens
ttaaacatgtattgtgaaatacattcttgcaacttctttctcactacttattctagaaacagagactcggagatctgaaagtggaacagcatcaaacacayacatcacccagaaacctagaacgttagagcttgcaagaagctcaaagaagctcaggcctaatctgaaacctattaacagaacccagttccaatgtaacaa

SEQ ID NO: 420282 - DNA, 201 bp, Homo sapiens
accttctccaacccttagttcatttatctgtaaaatggggataatactatcttatagggctgttggggttgttgtgtgagaaagtgcagtgtgtatgtgtatgtgtgtgtgtgtgtgtgtgtgtgtgtgtgtgtgcagaatgggtagaaccgtgcccagaagtaggaagccctgcatatgttcaatatttagctattattt

SEQ ID NO: 420283 - DNA, 201 bp, Homo sapiens
aggcctaatctgaaacctattaacagaacccagttccaatgtaacaaatgcttattgagcacctactatgtgcatgcccttcactggacgtttagaatccragactgatctcggctcttgaacagttcagaacttaatggggtagacaaagaccaaaaaacaaaaaaaaattatagatagtggcccatagtagtgagagtg

SEQ ID NO: 420284 - DNA, 201 bp, Homo sapiens
aacccaggcaatccggctccagagtgtttttaaccatttccctgcactgcctcctgccggtcaaaagaataaatgcatatgcaggcaagaatgaatgggtggtcccatttccgtagaaggggaaaccgaggtcggggagctgggcggggagaccccagcatcctctgacctctttccttgcctccctgcccccgcccgcag

SEQ ID NO: 420285 - DNA, 201 bp, Homo sapiens
ggaacgatatcttggagccgtcatgtctagctccctcactctctcgagctgctcaaagcagagcctctccagtgccacagcccagggacagcccatgggcsgaggtcaggctggagaagttagtgtgtaaggaaaggcaggacatgaggctgcagtggtgtcaagggctggatctggcagggctgagtacaggagttggga

SEQ ID NO: 420286 - DNA, 201 bp, Homo sapiens
attttaattaccaccctcccgcctttctttctcactttctctttctctctccttccctcatctttatttcaatcattcaaccctcagtgtgagggttgacygtgccatggatcccctaaagatgtgttgtttctgggcaccagcctatccatcccttcacccaagaggtttttgggagcccctgcaatgtgcaaggtggtg

SEQ ID NO: 420287 - DNA, 201 bp, Homo sapiens
gtggctcacacctgtaatcctagcactttgggaggccgaggtgggtggattgcctgagctcaggagtttgagaccagcctgggcaacatggtgaaactccrtctctactaaaataaaaattaaaaaaaaaaaattagctgggtgtggcggcgtgtacctgtaatctcagctattcaggaggctgaggcaggagaattgctt

SEQ ID NO: 420288 - DNA, 201 bp, Homo sapiens
tgattagtgttttattttaggaatataccacaacttattttctcactctattgttggatatttaggtttcaagtatttggcgaatacacatagtgctgctrtgaacattctcgtacacagctttagatgcccatttgtcttgagtggcaccactgggtcacaggagagacataaaatttgctttagtagatactgccatga

SEQ ID NO: 420289 - DNA, 201 bp, Homo sapiens
acctaatttttgtatttgtagtagagatggggtgtcaccatgttggccaggctggtctcgaactcctgacctcaaggaggctgaggtgatctgcccacctyggcctcccagaatgctgggattacaggcatgagccaccacacccagccaaattgaccccaattttattttactttattttattttattttatttgagacg

SEQ ID NO: 420290 - DNA, 201 bp, Homo sapiens
ggctggtcttgaattcccaacctcaggtgatccgcccacctcggcctcccagagttctgggattacaggcatgagccaccgcgccaggccattcttccaatttttttttttttttttgagagataggggtctcactagtctcactatgttgcccaggctgaactcaaatgatcctcccagctcagcctcctgagtaactgg

SEQ ID NO: 420291 - DNA, 201 bp, Homo sapiens
catacatgagaaaaacacataaccctggtgcctggaacatggggtggctggttaagtgatagctgttacaggattcgagagcatggactctgggccattgygctgctgatgcttggtggatgctgttgagtgagtgacttcacctttctgtggcctcagtttcctcatgtggaaaatgggagacataatagtgtctatctc

SEQ ID NO: 420292 - DNA, 201 bp, Homo sapiens
tatgaaggaggaggctggggctgagggtgcaaggaaccagacaagaactttcttcctgtccactccttcccccttgccagaggttacacagtgactctctygaagtcaccactgctgcagcttcagctctccagctccagttcctcccccatccctctctctcagaacttccctccctggaacagaattgctcagcctttc

SEQ ID NO: 420293 - DNA, 201 bp, Homo sapiens
cttcccccttgccagaggttacacagtgactctctcgaagtcaccactgctgcagcttcagctctccagctccagttcctcccccatccctctctctcagmacttccctccctggaacagaattgctcagcctttctcaatacacaccggccgttgaaaacataaagatcttgaaaacctgaacgatcaagaataaatggg

SEQ ID NO: 420294 - DNA, 201 bp, Homo sapiens
tcttatttagccctctctacaagcctgagagactagtattactattggccccactttccaggtgagaaaactgaggcacagaatgcttaaagattgttccyaggataacacagcagctaagagggaaaaccagggtctggaccctcattctagttactaagcccatgattttaattaccaccctcccgcctttctttctca

SEQ ID NO: 420295 - DNA, 201 bp, Homo sapiens
caggcgctaagaggattggaagggtatacctggagggtggcccagctggaagatcgcaggagtaccaccgacctgagggggacccagtttgactatgagakggtcaggagtcttgaaggaagcccctggaggggggcgcagctgcacgatgaaagggcagggggactgagaactgcagaatggaaggggccacagtcagaa

SEQ ID NO: 420296 - DNA, 201 bp, Homo sapiens
cactttccaggtgagaaaactgaggcacagaatgcttaaagattgttcctaggataacacagcagctaagagggaaaaccagggtctggaccctcattctrgttactaagcccatgattttaattaccaccctcccgcctttctttctcactttctctttctctctccttccctcatctttatttcaatcattcaaccctc

SEQ ID NO: 420297 - DNA, 201 bp, Homo sapiens
tgggaagctggtatgatctcagtggagggcaatttagcaatatctatcaaaatgacaagaacactcacccttaggctcacaatcccactactggtgatttmtcctgcagatgtagttgcacagctgtggaaggacttacttacaaggttaatcattgttgtttgtgaaagcagcagattagaaacaacccagactccacca

SEQ ID NO: 420298 - DNA, 201 bp, Homo sapiens
tgctggctgtgaggcctgaaagatgagtaggagttgactaggtgaaaagggagaggaatgttttatgaaggagggaagaacttacgataggttgtggcaayggaaaaaatgtggatgggtaggacgtggtgatggatggttttggtggaatggagaccatatcccagagtaggtgtgccagggtttgtaggttacatcgtg

SEQ ID NO: 420299 - DNA, 201 bp, Homo sapiens
acccaggcaatccggctccagagtgtttttaaccatttccctgcactgcctcctgccggtcaaaagaataaatgcatatgcaggcaagaatgaatgggtggtcccatttccgtagaaggggaaaccgaggtcggggagctgggcggggagaccccagcatcctctgacctctttccttgcctccctgcccccgcccgcagg

SEQ ID NO: 420300 - DNA, 201 bp, Homo sapiens
cggcagcagtaaaaggaatgaaactgaacagttttgaaaatccgagtgaaaagccagctgcaaaggcatctgtagggtgggatgattgtcttagtctcaaytgatgtaacaaactaccacaaatatggtggcttaaaacaataccaatttatttatctcacagttctggaggtcaggcggccaatatgggtctcagggcta

SEQ ID NO: 420301 - DNA, 201 bp, Homo sapiens
ctcctgggttcaagcgattctcctgcctcagcctcccaagtagctgggattacaggcatgcaccaccacgcctggctaattttgtatttttagtagagacmgcgtttctccatgttggtcaggctggtcttgaattcccaacctcaggtgatccgcccacctcggcctcccagagttctgggattacaggcatgagccacc

SEQ ID NO: 420302 - DNA, 201 bp, Homo sapiens
tgcctctcagtgcatggagaaatgaatgttcagtgcctagaagggataatcagggaatatggaggttaaggaggcaactgaggcacagagaggttaaatcrcagggttcagaagtgttgggggtgggactcaaagctaaatgatctgcctccacaatctaagctcattaccaccagaccagtcatccttaagcatgcatag

SEQ ID NO: 420303 - DNA, 201 bp, Homo sapiens
tcaggtgatccgcccacctcggcctcccagagttctgggattacaggcatgagccaccgcgccaggccattcttccaatttttttttttttttttgagagrtaggggtctcactagtctcactatgttgcccaggctgaactcaaatgatcctcccagctcagcctcctgagtaactgggactataagcaagtgccactgt

SEQ ID NO: 420304 - DNA, 201 bp, Homo sapiens
cccgcaaaggtcctcttgccatggaaggcagcatatgcacagtttcagtgactatgatgtgaatattttggggaaccatgattcttgctaccgcaatgctyggaaacaaagagttttctttttctttttttcttttttctttttttttttttttgctttgagacagggtctcgctctgtcaccccaggctggagtgcagta

SEQ ID NO: 420305 - DNA, 201 bp, Homo sapiens
gacagagtgagactctgtctcaaaaaaaaaaaaaaaaaaaaaaaatatataaatatatatatatatatatatatatacacacacacacacatttacatagycccgccttcatcaaatgtcaccctgccccttaaaatgccgcccatgcatgttctcccacctactgcttttgtttccaatcattcctaatggcccggatct

SEQ ID NO: 420306 - DNA, 201 bp, Homo sapiens
tgtactaaaaatacaaaaattagccgggcctggtggcaggtgcctgtaatcccagctactcgggaagctgaggcaggagaatcacttgaacccaggaggcraaggttgcagtgagctaagattgtgccactgcattccagcctgggcaacagagcgagactctatctcaaaaaaatgaataaatgggtaagtggaaggcaa

SEQ ID NO: 420307 - DNA, 201 bp, Homo sapiens
gcagtggcgcgatctcggctcactgcaacctccacctcctgggttcaagcgatctcctgcctcagcctcctgagtagctgggactatgggcgtgtgccacsgcacctggctaatttttgtatttttagtagagacagggtttccccacgttggtcagactggtctcgaactcttgacctcgtgatctggccacctcagcct

SEQ ID NO: 420308 - DNA, 201 bp, Homo sapiens
gagcctcttcctccatttgttttatttatttattctagacggagttttgctcctgttgcccaggctggagtgcagtggtgcgatctcggctcaccgcaacrtccgcctcctgggttcaagcgattctcctgcctcagcctcccaagtagctgggattacaggcatgcaccaccacgcctggctaattttgtatttttagta

SEQ ID NO: 420309 - DNA, 201 bp, Homo sapiens
tctctggcaagattcatggcttcacagaagaggtgacctacccggagcaaggggctgtcctagggcctgaaacacctaggctgaaggaagtcagacaaggrtttcacaaaagcccacgaattattctagaaaaatgtacggggtggcataccgtgaacttgcaatcttgataaatcaaacatggctgcacgcggggatttc

SEQ ID NO: 420310 - DNA, 201 bp, Homo sapiens
tgcctggccaaaaacaaagttttttcgaagtagacttttaaaaaatgtaacacacatccagaaaagtacacacatcatatgtgtgaaactgaatgaatttycccaaaaaaaaaatcagaggtaaccagcacccagaacaagaaacagaatatgtccagtcccaagaaacctcctggtgccccctcacagggttaaccactt

SEQ ID NO: 420311 - DNA, 201 bp, Homo sapiens
gttggaggttgtaatggtgtgttcattcttggtgctgattagtgttttattttaggaatataccacaacttattttctcactctattgttggatatttagstttcaagtatttggcgaatacacatagtgctgctatgaacattctcgtacacagctttagatgcccatttgtcttgagtggcaccactgggtcacaggag

SEQ ID NO: 420312 - DNA, 201 bp, Homo sapiens
gcatggtttctgatgttcatgtttgtggaatctgtcgtctatggcagatgcttccccgtgctaccaatttgtgtgtctgaaaggacacccgtacattcatytgcatcctcaaaatctgttcctccgtgggtttctccatctctgcaaaatgcactgctgtccactgtgtgcctaagccagccctgtttggtcaattttttg

SEQ ID NO: 420313 - DNA, 201 bp, Homo sapiens
atctgtaaaatggggataatactatcttatagggctgttggggttgttgtgtgagaaagtgcagtgtgtatgtgtatgtgtgtgtgtgtgtgtgtgtgtgygtgtgtgtgcagaatgggtagaaccgtgcccagaagtaggaagccctgcatatgttcaatatttagctattattttgttgttgttgtttgtttgtttgtt

SEQ ID NO: 420314 - DNA, 201 bp, Homo sapiens
tccctggaaggggagttgtcttttcattttgaaggctgtcttggaatctcggctaaaccacggttggctcctgcgtctgtgttttgacctgctttcatactttttttttttttttttttgagacggagtttcgctcttgtcacccaggctggagtgcaatggcggaatcttggctcaccgcaacctccgcctcccgggttc

SEQ ID NO: 420315 - DNA, 201 bp, Homo sapiens
tggacgccctgcacgtgctcgagggcctcttccgcaccgaccccgaggccaaggtggggtctcgagagaggcaggccgggggagggggcgggggaaagccrcgctgaagactcgtgggtcattcatgccttcatccgccctctcatcccttcactcctttcctccattcatccgttcattcattcaataagtacttaccga

SEQ ID NO: 420316 - DNA, 201 bp, Homo sapiens
ctcttccgcaccgaccccgaggccaaggtggggtctcgagagaggcaggccgggggagggggcgggggaaagccgcgctgaagactcgtgggtcattcatkccttcatccgccctctcatcccttcactcctttcctccattcatccgttcattcattcaataagtacttaccgaggcattggggatgcagcagcaaacca

SEQ ID NO: 420317 - DNA, 201 bp, Homo sapiens
tgaaatttaaatagccacctatggctattggctgccttgcagaggtaactgccagaacgcccctgcagttctggcgggaaaaaccaacaactgacaaacaygtccaaatatgatgtaacatcactaggggctggctgggtgctagcaagaaggggagccacagtgatgacaaatgctatgtaagtttttttttttttaatc

SEQ ID NO: 420318 - DNA, 201 bp, Homo sapiens
ggccgggggagggggcgggggaaagccgcgctgaagactcgtgggtcattcatgccttcatccgccctctcatcccttcactcctttcctccattcatcckttcattcattcaataagtacttaccgaggcattggggatgcagcagcaaaccagacccacgtggtctctgtccgcagagagcttaccttctagggtagtg

SEQ ID NO: 420319 - DNA, 201 bp, Homo sapiens
tcctgtaatgtgatggagcgataagttatcatcaaggagaaaaaggccggggcctggagcgggacagttctaagggtgctgtttgaattggtcagggaagktctctttagcaaatgatggtgaagcagaggagatggaacagaggcaagggaccctcattctgtcatcagagggaagagaattctaggcagaaggaacagc

SEQ ID NO: 420320 - DNA, 201 bp, Homo sapiens
ggtttctccatgttggtcaggctggtcttgaactcctgacctcaggtgatccccccgccttggcctcccaaagtgctgggattacaggcatgagccaccgygcccagccccttaatgctcttgaaagaaaggaggaagaagttctaggacaggagagacagattagtgaagcaacatttaaatatttactttttgaatatg

SEQ ID NO: 420321 - DNA, 201 bp, Homo sapiens
atagaaatgttccttatccaggctaggcatggttactcacacctgtaatcccagcactttgggactctgaggcagatggatcacctgatggcaggagttcragaccagcatggccaacatggcaaaacctgatctctactaaaaattcaaaattagccaggcatggtggcaggtgcctgtaatctcagctactcgggaggc

SEQ ID NO: 420322 - DNA, 201 bp, Homo sapiens
agaaagatgagaaagtaggggaagaactggtttctcctcctggctgtgcctttgtctcccttgtgtgtggaagaggtcccaaggcagggtaaagtcgagaytcagctctggcacactcttcctgtcttcatctcatgcccagtaagaagccctgattcaagccaccagcccaagcccaggcctctgtcccgacataataat

SEQ ID NO: 420323 - DNA, 201 bp, Homo sapiens
gatattgtaaggatgaaagattagctgttggaactgtgcctggtgcagagaaactacttcatgtgtgctttgcacacccgaaaccttcttttttatatttrtttatccttggcctgggggctgtctcctctcactcagtggtgtgtctcatttgttctcctctgtgcctgagccagcacatggcacatcatattttctcag

SEQ ID NO: 420324 - DNA, 201 bp, Homo sapiens
gcctgtcttggcctcccaaagtgctaggattacaagtgtgagtcaccatgcttggccagttttcagtcgtttttgttgttgttgttgttgttgttgttgtktgtttgtttgttttttgtttttcttttttgagatggagtctcgctctgtcacccaggctggagtgcagtggcgcgatcttggctcactgcaacctctgcc

SEQ ID NO: 420325 - DNA, 201 bp, Homo sapiens
tcaagcagttccacgactgcaagatcaagttcccgctgccccaccgggtcctgcgccttcagcacaagccacgattcaccaccaagaggcccaacaccttyttctaggtgcagggccctcgcccgggtgcgccccaaataaactcaggaacgccccggtggaaaaaaaaaaaaatctttatccactgacgcataacttgga

SEQ ID NO: 420326 - DNA, 201 bp, Homo sapiens
gtgctaccgagacatgggcgcccggcaccgcgcccgggcccactccattcagatcatgatggtggaagagatcgcggccagcaagtgacgccggcaggctrtcaagcagttccacgactgcaagatcaagttcccgctgccccaccgggtcctgcgccttcagcacaagccacgattcaccaccaagaggcccaacacctt

SEQ ID NO: 420327 - DNA, 201 bp, Homo sapiens
gtttttttgtttttgtttttgttttcttttaaggggtcatctagtcataagggaaaatccttcgggctgtgaccgaagcaacaaaggcaaaaacgcggacsttggttatgaagggtgtggtctccctggtggagtacgtcggtgggttgggatggggagcggctggacagaccggtctcactccgtttggtgccactccac

SEQ ID NO: 420328 - DNA, 201 bp, Homo sapiens; identical to SEQ ID NO: 141735

SEQ ID NO: 420329 - DNA, 201 bp, Homo sapiens
tcttcctgtcttctggtggttgtcagtaatccttagtgttccttggcttgtagctgcattactccaatctgttgctgtcatctcatggtcctcttcgtgtstctctcatgatttgtcattggatctagagcccaccctaatcaaatataacgtcattttacctaattatttccgtaacgaccttatttccaaatagggcca

SEQ ID NO: 420330 - DNA, 201 bp, Homo sapiens
aaggagtacatccatctttctttggcttttaagaatcgaatcaatgaatgcaagaatattatttcacttgagtatttctctccacaaacctaatgaattcytggctttctagatacataacgttctttttttttcccttaagtcagaatgtgtagttagttgtggaaatagcctaccagtatgtgtccatgcgtgcagggc

SEQ ID NO: 420331 - DNA, 201 bp, Homo sapiens
ctgagtgggacatttactcagatgagccataattgacactcctttcctgtcgaagtgtgaaggagtacatccatctttctttggcttttaagaatcgaatmaatgaatgcaagaatattatttcacttgagtatttctctccacaaacctaatgaattcttggctttctagatacataacgttctttttttttcccttaag

SEQ ID NO: 420332 - DNA, 201 bp, Homo sapiens; identical to SEQ ID NO: 141736

SEQ ID NO: 420333 - DNA, 201 bp, Homo sapiens; identical to SEQ ID NO: 141739

SEQ ID NO: 420334 - DNA, 201 bp, Homo sapiens; identical to SEQ ID NO: 141740

SEQ ID NO: 420335 - DNA, 201 bp, Homo sapiens; identical to SEQ ID NO: 25722

SEQ ID NO: 420336 - DNA, 201 bp, Homo sapiens; identical to SEQ ID NO: 25714

SEQ ID NO: 420337 - DNA, 201 bp, Homo sapiens; identical to SEQ ID NO: 25718

SEQ ID NO: 420338 - DNA, 201 bp, Homo sapiens
gggggcaataggcagagctcaggacatgacaccaatcccccacacctggccagaaccctggagtcccaacctcacccgccagtcacctctgagcctctgtmagtggccggagcccctgtagccacctctggatatcatggtcaggttggaggttatagccacgacattcattctggagccgtcgcaactcagaaaggactg

SEQ ID NO: 420339 - DNA, 201 bp, Homo sapiens
tcccaacctcacccgccagtcacctctgagcctctgtcagtggccggagcccctgtagccacctctggatatcatggtcaggttggaggttatagccacgrcattcattctggagccgtcgcaactcagaaaggactgcaaactcctgggaaggagccctcaaactgcaggagccaaaactcagggacccctgacttttcc

SEQ ID NO: 420340 - DNA, 201 bp, Homo sapiens
tgagaattgggttgtgaagacataagcaaaaatgaagcaaggctggggagacttgagtctcatccagatcaccttgactgctggattaagaaaagaaagtrgtttagggagagactgacccctttagcatttaccacagaaaataagtgattaaagccaagatagtggtctaaggtcaagccaaaacatttcacctgggga

SEQ ID NO: 420341 - DNA, 201 bp, Homo sapiens
tgttcactcacccgctgcccccatccttttctgcttcctcagatccatatccacctgactaggattgtggggataggtggcacatttgatgtttctaaatygcctttcctctcatccccagacttaagtaaatccatgtcggggaggcagaaacttgaagcacaactaacagaaaataatatcgtgaaagaggtgagggac

SEQ ID NO: 420342 - DNA, 201 bp, Homo sapiens
cccctgggggaaggcaggagcagaatttgacattcccttccccaacaataacacggctaaaactcccgcgggaagcgtttcaggcggagagagagccggtyactccatccccacgggattaccctccctaccacaacccacgaatgtagctgaccgaaatcccggccgggttttccgaagggccctcgattcccgccccct

SEQ ID NO: 420343 - DNA, 201 bp, Homo sapiens
gtgggtgtgtccaagaagaaataagtctgtaggccttgtctgttaataaatagtttatatacctatggcttcctgtcctttctgtccattctaatagggartgttaaagtgctgggtcctttttccatttagagctgccctactcagttgcccacacagtgctattagttttagcagtggtgatgctgcagaccccccagt

SEQ ID NO: 420344 - DNA, 201 bp, Homo sapiens
gggatgacagaggataactgtgtagaaactaatggcatcacctgagctaggcgtggtggctcatgcctgtaatcccagcactttgggaggccgaggtgggyggatcacctgaggtcaggagtttgagaccagccaagccaacatggcaaaaccccatctctactaaaaatacaaaaattagcgcatgcagtggcatgcact

SEQ ID NO: 420345 - DNA, 201 bp, Homo sapiens
atcttgagcggcagtcagagcaacagagggagacccttgctcagctgcagcaggagttccagcgggcccaggcagcaaaggcaggggctcctggcaaggcmtgaccccatggtggggggaggggaggggaggggagggaatgaggcagctctaggatctatactgtagctaataaaatgtaaaaacacctggctctgtttc

SEQ ID NO: 420346 - DNA, 201 bp, Homo sapiens
cctccccttccagaaacctgaaagcaagggttaggatggcagtaaagcttcccaatatgaagcaagtataccaacataaaaacgagaaaagacagtcccawaaggcagggaatgggggtccagattagggctcactcacccaggttcttcagcaagcagcagctcagaacgagcagctttgatacttgtttcctcttcctc

SEQ ID NO: 420347 - DNA, 201 bp, Homo sapiens
cagaatggagaaacctgggggagaggaagagtggttcaattgggaaatgaggtcacaggctatcattcaatcaggaatggactatctcaccccaactgacygctgacagtgaggccactgaccggatgtcccgcaccgcctccatgacgttgatctcgcacataagcttctttgttacccaatcaagggcagccacatgac

SEQ ID NO: 420348 - DNA, 201 bp, Homo sapiens
cctattttgctaagcgctgtgctaaactatatgccttaactcatcttaatgtctacaacagcttatatgagggctttaaaccaaggcttggtaaactactrcccatgggccaaacctggcccatcatctagttctgtatagcccacaagccaagaatggtttttacatttttaagtggttgaaaaaaaatcaaaagaatat

SEQ ID NO: 420349 - DNA, 201 bp, Homo sapiens
cctttgccatcactgccattaaggtaagtgaagtagggtaaggaatagggaatgtaaatgagaattgggttgtgaagacataagcaaaaatgaagcaaggytggggagacttgagtctcatccagatcaccttgactgctggattaagaaaagaaagtggtttagggagagactgacccctttagcatttaccacagaaaa

SEQ ID NO: 420350 - DNA, 201 bp, Homo sapiens; identical to SEQ ID NO: 141744

SEQ ID NO: 420351 - DNA, 201 bp, Homo sapiens; identical to SEQ ID NO: 25716

SEQ ID NO: 420352 - DNA, 201 bp, Homo sapiens; identical to SEQ ID NO: 25717

SEQ ID NO: 420353 - DNA, 201 bp, Homo sapiens; identical to SEQ ID NO: 141748

SEQ ID NO: 420354 - DNA, 201 bp, Homo sapiens
agaaaagtggaagtcccaagaaaccaccccccagccagtgaatctctcactctgtccactgcgagatgaccaatgttggccgaagcacccgtggggcaggwgggtcactggaaccaggtggctccacctcacaggatacacgatggctgggttaggggggcaataggcagagctcaggacatgacaccaatcccccacacc

SEQ ID NO: 420355 - DNA, 201 bp, Homo sapiens
ccacaggaggcctacacgccgccgcttgtgctgcagccatggtaagactggaatccgtgccgtgatccagcggcatcgcagctcgggcaaggaaagccggytgtcagggttctggaaacgtcctgccctgagggcctgcgactttctgtatggagccttggatcgcgtccctggaaagggacaccaaagatttccaattcc

SEQ ID NO: 420356 - DNA, 201 bp, Homo sapiens
ggcctcttctgcacccccactcagcggggagccacaggaggctgagcggcggtgacctcgagaaggcctaggggaggaggctggtggggagaggtggctgrggtcagctggactgtgcagggatggactgctttccaaggcagagtctagtgacgagacagatggccacttcatgtgctaggaacaaacaacatgggactg

SEQ ID NO: 420357 - DNA, 201 bp, Homo sapiens
tctttcttgggcgggacatccttgcccggcttgggggctgtctccatctcgcccacccgaacggcgatccacgtgcaaaactcctctcagctgccacacaktcggcttgaaaactcccggaagccctctgtccttcatccaatcagcagcgtaccaggtatgaagctctctaggtgccatcttgagtgagggcacgctctc

SEQ ID NO: 420358 - DNA, 201 bp, Homo sapiens
ttgtgctgcagccatggtaagactggaatccgtgccgtgatccagcggcatcgcagctcgggcaaggaaagccggctgtcagggttctggaaacgtcctgycctgagggcctgcgactttctgtatggagccttggatcgcgtccctggaaagggacaccaaagatttccaattccggagagcgggcccgaggaagggtca

SEQ ID NO: 420359 - DNA, 201 bp, Homo sapiens
actctccggctggacctcacctttcgggatttgtcaatgcgacagaacttctggaccacttccacagggacgggggcggggcctgggaatggatcttgggyctaggggaaaggaggacgcaattagcagacagccttggattgaccccaaccctctcactctcaaggaacgaggcggcctgcctcgccacccatcaggtcc

SEQ ID NO: 420360 - DNA, 201 bp, Homo sapiens
aagcacacacacagttgttccccccacagccgcccagatgtggaagtactccactctcctcccgagtctgcctttccctcatggcctctgacctcgctccyctggtagcagctgtaccagctcatactctgaagccactgcagagtcacgattgtttttcttaaggacacgactgatgacacttggagccttgtcctggct

SEQ ID NO: 420361 - DNA, 201 bp, Homo sapiens
ctcgccacccatcaggtcccacgctcaccccggacaagccgcgctgggactccgggttcttccattctcggggtttcttcgggacctgaggcttcttagaratccgagacttctttaagatgtaagcattttttggtctctgaggacggagctcccgattcttcttgttacgaggaggccctggagaggctccggctgtgg

SEQ ID NO: 420362 - DNA, 201 bp, Homo sapiens
ccaagaaaccaccccccagccagtgaatctctcactctgtccactgcgagatgaccaatgttggccgaagcacccgtggggcaggagggtcactggaaccrggtggctccacctcacaggatacacgatggctgggttaggggggcaataggcagagctcaggacatgacaccaatcccccacacctggccagaaccctgg

SEQ ID NO: 420363 - DNA, 201 bp, Homo sapiens
aaaaatagtaataaaataaataaatgcatcacctggccaatcattctcaaaaaccatagccatggccgggtgcagtggctcacgcctgtaatcccaacacytgcactttgggaggccgaagcaggtggatcacgatgtcaggagttcaagaccagcctggccaagatggtgaaaccccatctctactaaacattaaaaaat

SEQ ID NO: 420364 - DNA, 201 bp, Homo sapiens
gaccatctggaacactaactttgtacatcaattaggcaaaatgttaacctcaaaaagagaaattcagttcttcccattagtagatctgtattacacaaathtatttgattattattattttttttttctgagaccgggtctcactctgttgcccatgctagagtgcagtggcatgatcacagctcactgcagccttaacct

SEQ ID NO: 420365 - DNA, 201 bp, Homo sapiens; identical to SEQ ID NO: 25719

SEQ ID NO: 420366 - DNA, 201 bp, Homo sapiens
cagcctcatcactggagcccccgtggcctgacaagctcctgaggaggaccagagaaaagcagggatgggctgaagatcacaaggaccagagctgtttagcmtcaaggtgttgattaaacttcaggcctcagcgaactagtgattaagccctaagcacaggagtggctgacccaggtagcccacggagggcaagctacagct

SEQ ID NO: 420367 - DNA, 201 bp, Homo sapiens
gacttacgtgcctgtagaatctactgccacagcccggaccccaccacgatgacagagaatctttgccagtggctccttcatagctggactccataaagacrcagtacctggaagagaagaagaaccaaagttgctaatacacacctaagcctgaggttactaaacatgggaaagatgggaactcaagaccaagagataaca

SEQ ID NO: 420368 - DNA, 201 bp, Homo sapiens
gaaacccccagagtgggaagaagagctcctgcgaggacctacattttgccattcccctctgccctggggctcagagccttgaagcctttgcttggcccttrcatgttaggatatggccaagaatcagaaactgatgcgtttttccagcactacctgtgtgctgcactcatggaaggtgggaagctatacacaggtatccaa

SEQ ID NO: 420369 - DNA, 201 bp, Homo sapiens
cctgaccttctccagcaggggggaacctgaccttctccaggaaggaggaacctcaccctctccaggacgggggaacctgaccctctccagcaatggggggratctcaccctctccagcaggggagcctcaccttctctagcagggccttcacctcccactcctggcgctgcttccggcttctgtatggattactctccagg

SEQ ID NO: 420370 - DNA, 201 bp, Homo sapiens; identical to SEQ ID NO: 141737

SEQ ID NO: 420371 - DNA, 201 bp, Homo sapiens
gaatattcattgagcttggaaaggggttggaatgagagaaccgtttggaagcactggaatacagctttattcctacacgattagacccgttaccccgtggstctggccgaccgtcctgactcggagatccctgagctgcgccgccgcttccttcgtcaacatccagcagctacttgatgagcgccctccagtgggccttag

SEQ ID NO: 420372 - DNA, 201 bp, Homo sapiens; identical to SEQ ID NO: 141738

SEQ ID NO: 420373 - DNA, 201 bp, Homo sapiens
ggaagcactggaatacagctttattcctacacgattagacccgttaccccgtgggtctggccgaccgtcctgactcggagatccctgagctgcgccgccgyttccttcgtcaacatccagcagctacttgatgagcgccctccagtgggccttaggtccctatgccggcgcggggttacagcagtggacagacaggccagt

SEQ ID NO: 420374 - DNA, 201 bp, Homo sapiens
cgcttccttcgtcaacatccagcagctacttgatgagcgccctccagtgggccttaggtccctatgccggcgcggggttacagcagtggacagacaggccrgtccctgtcctcgaggagcccatgatccgcggggagacaggcatttaacgacgactcacacgatcacttaaatacaactgtggtgaaccgcacaagaggg

SEQ ID NO: 420375 - DNA, 201 bp, Homo sapiens
gatccctccctgccttcctcctcaatctatcatggcctaagcactccacttgaccctttaaattgaatttctcaggtagacaacgagtctgctttgcagaygagaggactggatagtatccaattcgacaggattccttatccagagaggataaggaacttgtccaaggtctcagtatttgtttatttaacaaactctagc

SEQ ID NO: 420376 - DNA, 201 bp, Homo sapiens
aaagggctgcaatttattttcttttctttctttttttttttttttttttgagacagggtctcactttgtcacccaggctggagtacagtgggacaaccttrgctcattgcagcctcaccctcccagattcaagcgatccttctgccacagctccccaagtagctgggactatagctgtgtgccaccatgcccagctaattt

SEQ ID NO: 420377 - DNA, 201 bp, Homo sapiens
ggacctcacctttcgggatttgtcaatgcgacagaacttctggaccacttccacagggacgggggcggggcctgggaatggatcttgggcctaggggaaasgaggacgcaattagcagacagccttggattgaccccaaccctctcactctcaaggaacgaggcggcctgcctcgccacccatcaggtcccacgctcaccc

SEQ ID NO: 420378 - DNA, 201 bp, Homo sapiens
tgcagagtcacgattgtttttcttaaggacacgactgatgacacttggagccttgtcctggcttgtcacctggcagaacaggagaccaaaagagcaatcartcagccatgatttcccatccttctaccctcagccactgaacccaaccacaaaatgttacttgtgtccaaggctttaaaatgaacaggaaaacccaatatg

SEQ ID NO: 420379 - DNA, 201 bp, Homo sapiens
cagccagaggaaggaaaactgggaatgaagagtcagaggtgagaagctaaagtcatgatctcaccaagggatcaagaggtcgatattggcggcttgtgacrgtaaacacggcaccatcctcctcctcatcccagacggacacaggggcctggaggagcaaggaaggggaagtcagacagttccacaccaccccccattgcc

SEQ ID NO: 420380 - DNA, 201 bp, Homo sapiens; identical to SEQ ID NO: 25715

SEQ ID NO: 420381 - DNA, 201 bp, Homo sapiens
agactctgtctcaaaaaaaaaaaaaaaatagccacaagtttttatacctaaaggataacgggagcaccacaccagggcaggctcaacgattcatccttttrtctccagaacctcagcgcagagccctgcccacagcaggtgcccagtgaatacctgatgacaaaaggaatcagaggaaaatacaaatcagacagaaaagct

SEQ ID NO: 420382 - DNA, 201 bp, Homo sapiens
aaccatagccatggccgggtgcagtggctcacgcctgtaatcccaacacttgcactttgggaggccgaagcaggtggatcacgatgtcaggagttcaagaycagcctggccaagatggtgaaaccccatctctactaaacattaaaaaattaactgggcgtggttcgtgggcgcctgtaatcccagctactcaggaggctg

SEQ ID NO: 420383 - DNA, 201 bp, Homo sapiens; identical to SEQ ID NO: 25720

SEQ ID NO: 420384 - DNA, 201 bp, Homo sapiens
gcatcattgtggagtgggttagctgagcctagccagttgcagttaaggtgagtttgcaggtcttggtcactctgggtttttttgtttttgtttttgttttyttttaaggggtcatctagtcataagggaaaatccttcgggctgtgaccgaagcaacaaaggcaaaaacgcggacgttggttatgaagggtgtggtctccc

SEQ ID NO: 420385 - DNA, 201 bp, Homo sapiens
aggttcttcagcaagcagcagctcagaacgagcagctttgatacttgtttcctcttcctcagcttcagccacctcaagtcggcttcgagttttggctttakaatgtggtagctgtaacattgttggtggggaggagtggcagaagaaccacaggataagtggggtcacaggagagctacctgtcccagcctccatccaact

SEQ ID NO: 420386 - DNA, 201 bp, Homo sapiens
tgaccttctccagcaggggggaacctgaccttctccaggaaggaggaacctcaccctctccaggacgggggaacctgaccctctccagcaatgggggggayctcaccctctccagcaggggagcctcaccttctctagcagggccttcacctcccactcctggcgctgcttccggcttctgtatggattactctccaggcc

SEQ ID NO: 420387 - DNA, 201 bp, Homo sapiens
atcgaatcaatgaatgcaagaatattatttcacttgagtatttctctccacaaacctaatgaattcttggctttctagatacataacgttctttttttttyccttaagtcagaatgtgtagttagttgtggaaatagcctaccagtatgtgtccatgcgtgcagggctaggcctgtcttcttggcttctgttgcatggtag

SEQ ID NO: 420388 - DNA, 201 bp, Homo sapiens
caggggggaacctgaccttctccagcagtggggaacctgaccttctccagcaggggggaacctgaccttctccaggaaggaggaacctcaccctctccagsacgggggaacctgaccctctccagcaatgggggggatctcaccctctccagcaggggagcctcaccttctctagcagggccttcacctcccactcctggc

SEQ ID NO: 420389 - DNA, 201 bp, Homo sapiens
catccatctttctttggcttttaagaatcgaatcaatgaatgcaagaatattatttcacttgagtatttctctccacaaacctaatgaattcttggctttstagatacataacgttctttttttttcccttaagtcagaatgtgtagttagttgtggaaatagcctaccagtatgtgtccatgcgtgcagggctaggcctg

SEQ ID NO: 420390 - DNA, 201 bp, Homo sapiens
ggggtcacaggagagctacctgtcccagcctccatccaactcacccagacactccctgcctccagcacttcccaactctccggctggacctcacctttcgrgatttgtcaatgcgacagaacttctggaccacttccacagggacgggggcggggcctgggaatggatcttgggcctaggggaaaggaggacgcaattagc

SEQ ID NO: 420391 - DNA, 201 bp, Homo sapiens
gaggggaatctcaccctctccaggaagaggaaaccttaccttctccagcaggggggaacctgaccttctccagcagtggggaacctgaccttctccagcasgggggaacctgaccttctccaggaaggaggaacctcaccctctccaggacgggggaacctgaccctctccagcaatgggggggatctcaccctctccagc

SEQ ID NO: 420392 - DNA, 201 bp, Homo sapiens
ccgtccaggagaggggaatctcaccctctccaggaagaggaaaccttaccttctccagcaggggggaacctgaccttctccagcagtggggaacctgaccytctccagcaggggggaacctgaccttctccaggaaggaggaacctcaccctctccaggacgggggaacctgaccctctccagcaatgggggggatctcac

SEQ ID NO: 420393 - DNA, 201 bp, Homo sapiens
gaccccgtccaggagaggggaatctcaccctctccaggaagaggaaaccttaccttctccagcaggggggaacctgaccttctccagcagtggggaacctbaccttctccagcaggggggaacctgaccttctccaggaaggaggaacctcaccctctccaggacgggggaacctgaccctctccagcaatgggggggatc

SEQ ID NO: 420394 - DNA, 201 bp, Homo sapiens
gatagggaagtccagcatccagcccagacactccgctcaccttcctccgcttgtcaaaattgatgtatccattctgcgaggaaaatggggatggggtgaargttccaaccctaccttccggccacagagagagaatatcccctctcttaaacacacacagccacatccaactcacaaccacttccctccagcctctctgac

SEQ ID NO: 420395 - DNA, 201 bp, Homo sapiens; identical to SEQ ID NO: 25721

SEQ ID NO: 420396 - DNA, 201 bp, Homo sapiens
cctccaaccctttccttcccttttaaccccccttcttctccctcccctggatctcaagttttccacctatctctttcttgcgtttagcactctccatagtragtcctactaatttctccctttctgcttgtctcccttgtctctccttagtaagcgatacgaatcccagcttcgggatcttgagcggcagtcagagcaaca

SEQ ID NO: 420397 - DNA, 201 bp, Homo sapiens
gtgagggcacgctctccttagaggggcggaacagtttttggcaccttatcgcgagcggcagcttatgcaagagtgacttaaaaaagaaaggcaggtccggrgccaggggctaagtagcggtgcggtttctttttctggattagtttccccatcttgcctaaaaatgtcctagtctagtctttttagcagaactccactccc

SEQ ID NO: 420398 - DNA, 201 bp, Homo sapiens
ggttcattggaggaaaggaatagccctgtgtgtgatgagcattgagaggaggtctggcgagcaccatctagggctgaagaactaggcagtggctccagcgyggggcggtgggggggacaagtgagccagggcaagaagaatggatttggccctagagtacgggttctccaaatgtaacctcggccctacagatctctgaga

SEQ ID NO: 420399 - DNA, 201 bp, Homo sapiens
gaagctctctaggtgccatcttgagtgagggcacgctctccttagaggggcggaacagtttttggcaccttatcgcgagcggcagcttatgcaagagtgayttaaaaaagaaaggcaggtccggagccaggggctaagtagcggtgcggtttctttttctggattagtttccccatcttgcctaaaaatgtcctagtctag

SEQ ID NO: 420400 - DNA, 201 bp, Homo sapiens
tcttggtctgaagtttgtctttcttgggcgggacatccttgcccggcttgggggctgtctccatctcgcccacccgaacggcgatccacgtgcaaaactcytctcagctgccacacagtcggcttgaaaactcccggaagccctctgtccttcatccaatcagcagcgtaccaggtatgaagctctctaggtgccatcttg

SEQ ID NO: 420401 - DNA, 201 bp, Homo sapiens
ccagtgggccttaggtccctatgccggcgcggggttacagcagtggacagacaggccagtccctgtcctcgaggagcccatgatccgcggggagacaggcrtttaacgacgactcacacgatcacttaaatacaactgtggtgaaccgcacaagagggacgcgcggcggtctgcggggaatgacgaggccgacctcgtctg

SEQ ID NO: 420402 - DNA, 201 bp, Homo sapiens
actgagagagaaagacagagagaatgacccagtcctgattgccctctgtattccctctgctggggtcctaaaggagaggtggtcatcccaagggcttccamccagttcctgagctccatggccactcacagctgtagccaggaggaagtggaagggcaggaactcaagccgtgttactcggtcacagcggcggatacagtg

SEQ ID NO: 420403 - DNA, 201 bp, Homo sapiens
aaagaaaggcaggtccggagccaggggctaagtagcggtgcggtttctttttctggattagtttccccatcttgcctaaaaatgtcctagtctagtctttktagcagaactccactccctaaacatgtcagaactacacttcccatcaagggtcagaaagaaacttccggcacagtcttttcccagcattccttgtttact

SEQ ID NO: 420404 - DNA, 201 bp, Homo sapiens
ctctctgactcttcgatccctccctgccttcctcctcaatctatcatggcctaagcactccacttgaccctttaaattgaatttctcaggtagacaacgartctgctttgcagatgagaggactggatagtatccaattcgacaggattccttatccagagaggataaggaacttgtccaaggtctcagtatttgtttatt

SEQ ID NO: 420405 - DNA, 201 bp, Homo sapiens
ggagaagcatggagccataaggaagaacctcagtccaacagctccagcccaactaagcccccagttcctggatgtctctggcccaaacttccacccagagktcattcacttcaagccccatcccctggcccactcaccagggaccagcatgctggtgatgcccccagtgtgccccacccccagcacatcttcaaaggggca

SEQ ID NO: 420406 - DNA, 201 bp, Homo sapiens
agctactccggaggctgaagccacagaattgcttgaacccaggaggcggaggttgcagtaagccaagatcatgccactgcactgcagcctgggcggaagaktgagactccgtctcaaaaaaaaaaaaaaaagaaaaattatcccttatataagtgaaagaaaaaaaaaaaagcattccagccactcagtggagagagattg

SEQ ID NO: 420407 - DNA, 201 bp, Homo sapiens
gcggggaggtcgtggttaccaggctccactctgatgataagactgcccagctgcaagcaccgtgcagccccagtaacgtcgccgaacgccctcgcctgtgrcgtcgccgaaggcccacctctatggcgacgccgaggaacgtctctcacgcggagccaatcggaactcgcggaggggctgctggggcttccaggagggcgc

SEQ ID NO: 420408 - DNA, 201 bp, Homo sapiens
ctagactctagatgtgcacttcttattaaatggtacagcagcctgtagtcacttctcatcttagcaaaggtcaccgaacttcaagtaacatgacttgggtytgtatacgaactttgccacttatttgataaagttgtttaacttctttaaacccatttacttttctataaaatggagataatacctatcataaaattgttt

SEQ ID NO: 420409 - DNA, 201 bp, Homo sapiens
taggaatgctaagagatgaggtcagctggagaatctatgtcttcacaagctttgtaggccatactagttaaggcatctggtctttaataagatttttggtyagggcataactcaataagatttggatttagaaagaccactctgacttcagtatggatggtttgtattacagttattcattccaaaggtcttggtggccta

SEQ ID NO: 420410 - DNA, 201 bp, Homo sapiens
gagagtcagttgaccaattgaagataattgaaatctaactggggatgtgaagaatcttgttctcccaaactgatcaattcagtcgtattaaatactgtgtwtttcagacttaaaccattggatattgagtttatgaagcgtttgcatgaaaaagtgagtatcaccccacttattgccaaagcagacacactcacaccagag

SEQ ID NO: 420411 - DNA, 201 bp, Homo sapiens
cacaaagcacatgttgtaacttttattatgcttccttagaggtaagatgcaaacttgggcttagccagtgtaagatgataaatatgacttcataaaatttwaaaaaaaaagaagtacagttaatcagaagaattatcttgactagaactttccaaatttgtcctaaggactctcctagagatggcactgtgacatagtaac

SEQ ID NO: 420412 - DNA, 201 bp, Homo sapiens
ttatctaatgctcacattacagtagtagtgtaaaccaattccttcaagtatacctttctcttcaatttttggcttctcactctctctttttttttttttttaatggatgggtcaatgcccattatcactctagatagataaggcagccttaattatatacttatatttttgcactgtcagattggagtggggtaaaaatgt

SEQ ID NO: 420413 - DNA, 201 bp, Homo sapiens
caatgttttcttgtgccatttctttctacaataaatctatttggcttctgtttcaccttagctgtcatagacatgtcgtttaggtatcatattgtcattastaactttttgtttattaaggcataagacctaagaaactagacattaatctgatgtgattgttctgttatagttagcctgtactccctttttttgttgttt

SEQ ID NO: 420414 - DNA, 201 bp, Homo sapiens
gtttttccgtaagtcctaagtgaagaaaacaactatgaaattttagtctgaagtaattatcttagtattttataaataatacttttatttttgtttgaatwcacattgtttttgaggtatttttctgtcaactcttaaaactcctaagttcatcatgaagtttttatattatttaaagtaatctctcatttgaaatttaag

SEQ ID NO: 420415 - DNA, 201 bp, Homo sapiens
gtttaacttctttaaacccatttacttttctataaaatggagataatacctatcataaaattgtttttaagacgtactctaaaataatgtagctagatagagaattctcattattgtaagaaatttaaaactgtttgctttaattttatccatttgtataaattctatctcaatcctaatttaaacctgatatttagacct

SEQ ID NO: 420416 - DNA, 201 bp, Homo sapiens
tgtttaacttctttaaacccatttacttttctataaaatggagataatacctatcataaaattgtttttaagacgtactctaaaataatgtagctagataragaattctcattattgtaagaaatttaaaactgtttgctttaattttatccatttgtataaattctatctcaatcctaatttaaacctgatatttagacc

SEQ ID NO: 420417 - DNA, 201 bp, Homo sapiens
tcgacaatagtttattttctttcatttgaaacgttttgaaataatgaataaagatttattcaacataatttatatttttgaatctttatatagactaactsgacatgtcttccactggtaaattcattttgcctatttgaaaatattgattattgtccgttaacagtcatcagttaattcatatgtagaattgcaacttaa

SEQ ID NO: 420418 - DNA, 201 bp, Homo sapiens
agatatattcaaaatcaaagatgctatttattataagtctcataagagatggttatcaaaagcacttgcatgccaatgttttcttgtgccatttctttctrcaataaatctatttggcttctgtttcaccttagctgtcatagacatgtcgtttaggtatcatattgtcattagtaactttttgtttattaaggcataaga

SEQ ID NO: 420419 - DNA, 201 bp, Homo sapiens
aggtaagatgcaaacttgggcttagccagtgtaagatgataaatatgacttcataaaattttaaaaaaaaagaagtacagttaatcagaagaattatcttkactagaactttccaaatttgtcctaaggactctcctagagatggcactgtgacatagtaaccagttcccctggagttgtgctgtctagtatgatagtcat

SEQ ID NO: 420420 - DNA, 201 bp, Homo sapiens
tatcaaataggggggcccaggcaccacctgtgagcaagacaccattcagggtatatgggcctcacttgcagggtacaggccccactcgatgggaccggccstcactcccatacacgttcctgtattctgaactatgcatgcacaataaatcctgtggttttgcacacgctttgagcatatgtatgattgtgagaccaggca

SEQ ID NO: 420421 - DNA, 201 bp, Homo sapiens
ttgcttctctgtcccttgttggccatgaggctgtcccctactctatatgaatctggctctgtagaccagctggtaggtttatatctcaaccatcatccctrcctcaaagggttttgtttttttgttgttgtttgttttggagatggagtcttgctctgtcactcaggctggagtgcaatggcacaatcttggttcactgca

SEQ ID NO: 420422 - DNA, 201 bp, Homo sapiens
ccggacaaaggtagttgggcacagtggcacatgactgtagtcaaacctactcaagaggctgagatgaagaatgccttgagccctgtagtttgagtccagcmtgggctacacagcaagacccccatctctaaaaaaacaaagacaaagctaacctacaaattgttctcaaatgtaaagacacggaggctgggcatggtggct

SEQ ID NO: 420423 - DNA, 201 bp, Homo sapiens
tccacctggcctcacagcctcttgtcctgcccttccagaggggtgttcctaaggcacaaacctgaccctgtcctttccctactcggaacctcccagggctccccagagcctcccgcagaaagccctggctctccccacggccctgcgtgatctgctccctgcagcttcatcataacccccacgcacacacactgcagcccc

SEQ ID NO: 420424 - DNA, 201 bp, Homo sapiens
gcagcctgggaggcagagtttgcagtgaaccgagatcgcgccactgtactccagcctgtgcaacagagcaagactccatcaaaaaaaaaaaaaaaaaaaagaaggaaggaaggaaggaaagaaagaaaggaaagaaagaaagaaagaaagaaagaaagaaagaaagaaagaaagaaagaaaaaattgcttctgtgatcgac

SEQ ID NO: 420425 - DNA, 201 bp, Homo sapiens
ctgggaggcagagtttgcagtgaaccgagatcgcgccactgtactccagcctgtgcaacagagcaagactccatcaaaaaaaaaaaaaaaaaaaagaaggaaggaaggaaggaaagaaagaaaggaaagaaagaaagaaagaaagaaagaaagaaagaaagaaagaaagaaagaaaaaattgcttctgtgatcgactcttt

SEQ ID NO: 420426 - DNA, 201 bp, Homo sapiens
gaggcagagtttgcagtgaaccgagatcgcgccactgtactccagcctgtgcaacagagcaagactccatcaaaaaaaaaaaaaaaaaaaagaaggaaggaaggaaggaaagaaagaaaggaaagaaagaaagaaagaaagaaagaaagaaagaaagaaagaaagaaagaaaaaattgcttctgtgatcgactctttgggc

SEQ ID NO: 420427 - DNA, 201 bp, Homo sapiens
aggccacgcccagccttcttcgcctggggagggagatccggctgcgccaaggtggaaatgcactcccggaggtccccgtcatccccggccttgcgcaggaycacggcgtccacctcgcggcccgcctcttccaccttcacgcgggtcccgttagtgtccttggacatgacggacaagacctgtcggagggggtctcgcttg

SEQ ID NO: 420428 - DNA, 201 bp, Homo sapiens
agtttgcagtgaaccgagatcgcgccactgtactccagcctgtgcaacagagcaagactccatcaaaaaaaaaaaaaaaaaaaagaaggaaggaaggaagraaagaaagaaaggaaagaaagaaagaaagaaagaaagaaagaaagaaagaaagaaagaaagaaaaaattgcttctgtgatcgactctttgggctggagga

SEQ ID NO: 420429 - DNA, 201 bp, Homo sapiens
ctgtattagtctgttttcacactggtgataaagatatacccaagactgggcaatttacaaaagaaagagttttaatggactcacagttccacgtggctggrgaggccttacaatgatggtagaaggtaaaagtcacgtctcacatgatggcagacaagagagtgagagccagggaaaaggggttttcccttataaaaccat

SEQ ID NO: 420430 - DNA, 201 bp, Homo sapiens
aagggttttgtttttttgttgttgtttgttttggagatggagtcttgctctgtcactcaggctggagtgcaatggcacaatcttggttcactgcaacttcygcctcccatgttcaagcggttctcctgcctcagcctcctgagtagcaaggatgacaggcctcccaagtagctgggattataggcatacaccatcacgtct

SEQ ID NO: 420431 - DNA, 201 bp, Homo sapiens
agtgtagtcccgagaccagcagcagcctctggcaattcataggaaatgcacattcccaggttcccccaagacctactaagtcggaagctccgggggcaggwcccagaaaactgtgccctaacaaactctccagggaattctgatgcccactttgagagccactgacctcatgctctgtcagcatttgcataattgaatgtg

SEQ ID NO: 420432 - DNA, 201 bp, Homo sapiens
tgctccatgaaagatggctaagagaagtatttgttgagaacttaccattataaaagcatctgttttgttggtttgtttttgagatggagtcttgctctgtygcccaggctggagtgcaatggagcaatctcggctcactgcaacctccaccacccgggttaaagccattctcctgcctcagcctcccgagtaactgggact

SEQ ID NO: 420433 - DNA, 201 bp, Homo sapiens
aaacacctcgagttttttgtttttgccaccaggcccaaccccttacttttgtgtttggatttttttatgtttaaggagagtttaactgcaaggttaccacrgcaactgggcaaaccgcttactcactcctattttcccccactttttcctcctctgatcttcctgatccacagatggatgtgatgtgactcttttctccag

SEQ ID NO: 420434 - DNA, 201 bp, Homo sapiens
ctcactgcttcactcactgctgtatgcccagtgctttcaaaagcacctggggctgggcgcggtggctcatgcctataatcccagcagtttgggaggcagargagagcagataacctgagatcaggagttcaagaccagcctggccaacatggcaaaaccccgtctctactaaaaatccaaaaaaaaaaaaaaattagccag

SEQ ID NO: 420435 - DNA, 201 bp, Homo sapiens
ttgtcatggaaacagcagtagccaatggaggagggagagacaggcccctcccagagcccaggcctcctgcggtgggtgatggggcacagaagaaccatcargattaaggggcaacggggaggggggtgtccccatgtggctggagcgggaggagtttcctcatctggtagctctgagagggagccgctgctctcaaaggga

SEQ ID NO: 420436 - DNA, 201 bp, Homo sapiens
cacagatggatgtgatgtgactcttttctccagagcagcgttgtccagcaggaatagaatgccagccccaaattcgaaccgcacgtgcaatgttaaaactyctagttgcagccagccaacactgacctcaggtggtccacccacctcagcctcccaaagtgctgggattacaaagtgtcatttttgacatttgaatctcca

SEQ ID NO: 420437 - DNA, 201 bp, Homo sapiens
tgattctgtctctttggagaactctgattaatatgcttcctctatgaaacaaacagggctgttcctagccatctcccagcccctagggagatgaaacgccrtggcatacctggccaccgcagggctcaattaagatgagctgtaattattattattattattactttgagatggagtctcactctgtcactcaggctggag

SEQ ID NO: 420438 - DNA, 201 bp, Homo sapiens
gcacatggtaactctatgttgagtcatttgaggggctgaagggatgcttttagcaatggtcaacgcagagcaagagtctttcctacttcccacaaagccgytgtaagtgctaaaatggagttaggttctggacccagatcattgtagactgatttttcaacagtgtcacaggctggatggcttagataacagaaatctatt

SEQ ID NO: 420439 - DNA, 201 bp, Homo sapiens
gctgtgagccaccaaagcacccggcctcattttaccttaattacctctttaaagacccccatctccaaatacagtcacattcagaggtgctgggagttaaracttcaacatatgaatttggggatggcgatagcatagtatatggtaactctatgttaaacttccagaggaactgtggccacaggtaactctttaacagaa

SEQ ID NO: 420440 - DNA, 201 bp, Homo sapiens
cacgttggccaagctggtctcaaattcccgacatcaagtgatctgcccgcctcagcctcccaaagtgttgggattacaggtgtgagccaccatgccaagcytaaaggtttattttcacatacatgttggtagtagtggctgtgggtcaggcagaagggagagcccctgtttggatcttttctgcaggggctcacagcatgg

SEQ ID NO: 420441 - DNA, 201 bp, Homo sapiens
aactcactccctaccttggagggctgtcactgtgtttatctcagtaacaaagacccctgaagtcccagtgccttgcaacgattaaggtttcttttcttttytttcttttctttcttttcttttctttcttttttctttttgagatggagtctcactctgtcacccaggctggaatgcagtggcgccatcttggatcactgc

SEQ ID NO: 420442 - DNA, 201 bp, Homo sapiens
accccgtctctactaaaaaaaaaaaaattatccgggcatggtggcgggcacctgtagtcccagctacttgggaggctgaagcaggagaatggcgtgaaccyggggggcagagctttcagtgaggcgagatcgccactgtactccagcctgggcgacagcgagactccgtctcaaaaaaaaaaaaaaaaaaagatacatgca

SEQ ID NO: 420443 - DNA, 201 bp, Homo sapiens
tgtgactgcagcccaaccaacattgcaggaagcagggaaaccgtcctgttgagccctgttaacccacagaatcgtaagagacaataaaataattattgggttttttttttttttagataaggtctcactctgtcaccaaggctggagtgcagtggtgcgaccatggctcactgcagcctcgaccgcctggactcaagcgat

SEQ ID NO: 420444 - DNA, 201 bp, Homo sapiens
agaattgcttgaacccgggaagcggaggttgcaatgatccgaaatcaagccactgcactccagcctaggctccatctcataaaaaaaaaataattaaaaayagtaaaaataaataaaaagcactcagcgtgggattttcaataaatagttactgaatgagtaaatcaaaagcagtcaatgttacatatgatgatcagggca

SEQ ID NO: 420445 - DNA, 201 bp, Homo sapiens
tcccagcagtttgggaggcagaagagagcagataacctgagatcaggagttcaagaccagcctggccaacatggcaaaaccccgtctctactaaaaatccaaaaaaaaaaaaaaattagccaggcatggtggcgcatgcctgtaatcccagctactcaggaggctaaggcatgagaattgcttgaacccgggaagcggagg

SEQ ID NO: 420446 - DNA, 201 bp, Homo sapiens
cccatgagtcaagggagagacagatggagataattgaatcatgggggtggtttcccctatgctattctcatgatagtgagtgagatctaatggttttgtarggggctctttcccctttactgggcacttctccttcctgccgctttgtgaagaaggtgccttgcttcccctttgccttcagccatgattgtaagtttcctg

SEQ ID NO: 420447 - DNA, 201 bp, Homo sapiens
acagaagcccacatattgtatgatttcatttatatgaaataaccataataggcaaatctgtagaaaaagaagaaactgagtggttgctggggctgccaacyggcatgggctttcttttttgggatgatgaaatgttctagaattagataatggcaatagttggacaactctgtgaatatactaaaagccatcaaattgtaa

SEQ ID NO: 420448 - DNA, 201 bp, Homo sapiens
ggttaaataaagtcacaaggtaggatcctaatctgataggactatgaccttataagaagagaaagggccaggtgcagtggttcatgcctgtaaccccagcrctttggcaggctgaggctggaggatcacttgagcccaggagttcgagaccagcctgggcaacagagtgagaccccacttctaaaaaaataaaaaatattt

SEQ ID NO: 420449 - DNA, 201 bp, Homo sapiens
gaaaatggcctctagttccatccatgctgctgcaaaatacatgatttcattcctttttatggctgagtggtattccattgtgtgtgcacacatacacaccmcacacacacacacacacgcatatataattttctttatccagtcatccattgctggacacttaggttgatttcatatctttgctattgtggatagtgctgc

SEQ ID NO: 420450 - DNA, 201 bp, Homo sapiens
tgctgaccttagtcatattgttgaattgtttattttttaaaacgtgcagtaaaagattgtcacttacaaaaagctaaattcccttatagttaccttctactttatttatttatttatttatttatttatttatttatttatttatttttgagacagagtttcactctgtcacccaggctggagtccagtggcatgatcttg

SEQ ID NO: 420451 - DNA, 201 bp, Homo sapiens
gctgaccttagtcatattgttgaattgtttattttttaaaacgtgcagtaaaagattgtcacttacaaaaagctaaattcccttatagttaccttctactttatttatttatttatttatttatttatttatttatttatttatttttgagacagagtttcactctgtcacccaggctggagtccagtggcatgatcttgg

SEQ ID NO: 420452 - DNA, 201 bp, Homo sapiens
ctgaccttagtcatattgttgaattgtttattttttaaaacgtgcagtaaaagattgtcacttacaaaaagctaaattcccttatagttaccttctactttatttatttatttatttatttatttatttatttatttatttatttttgagacagagtttcactctgtcacccaggctggagtccagtggcatgatcttggc

SEQ ID NO: 420453 - DNA, 201 bp, Homo sapiens
gtgtggaatgttctgggctggagcgtggagcatccaggcctgactcactcatgctctcgatgtccagcgagtccaccacggagcgcttgtgctcgtcgccygcgatggcccgctcaaaggccttctgcttcacgatcttgttgcactcctggtatttcattttggcatccttgtcgtggggcttcaccttgaccacctggg

SEQ ID NO: 420454 - DNA, 201 bp, Homo sapiens
tgaccttagtcatattgttgaattgtttattttttaaaacgtgcagtaaaagattgtcacttacaaaaagctaaattcccttatagttaccttctactttatttatttatttatttatttatttatttatttatttatttatttttgagacagagtttcactctgtcacccaggctggagtccagtggcatgatcttggct

SEQ ID NO: 420455 - DNA, 201 bp, Homo sapiens
acaggaactttttactcactcactgcttcactcactgctgtatgcccagtgctttcaaaagcacctggggctgggcgcggtggctcatgcctataatcccmgcagtttgggaggcagaagagagcagataacctgagatcaggagttcaagaccagcctggccaacatggcaaaaccccgtctctactaaaaatccaaaaa

SEQ ID NO: 420456 - DNA, 201 bp, Homo sapiens
acataaggagaccccatctctacaaaaaatacgagaaaaattagtcagttgtggtggcccatgcctgtaataccagctactggggaggctgaggtaggagrattgcttgaacctgggaggtttgaggctgcagtgaaccatgattgtgccaccgcacttcagcctgggaaacagagtgagaccctgtctcaaaaaaaaaaa

SEQ ID NO: 420457 - DNA, 201 bp, Homo sapiens
cagatatgaaccactaataactacgaattcataatgatgaaaagagtgaataaattacttcacagactttctgtggattttcatgtgatgatgaaaaacastgagctgggtcccaatgtatttcctggcaactggccatgttctattgttgcagagaagcaagatataggatgaagtgtatcagtgattccattcacacta

SEQ ID NO: 420458 - DNA, 201 bp, Homo sapiens
tgttgcacaggctggagtgcagtggcactatctcggctcactataagctccgcctcctgggttcacgccgttctcctgcctcagcctcctgagtagctggractacaggcgcccgccaccacacccggctaattttttgtatttttagtagagacagggtttcactgtgttagccaggatggtctcgatctcctgacctgt

SEQ ID NO: 420459 - DNA, 201 bp, Homo sapiens
tgaggcaggagaatcacttgaacccaggaggcggaggttgcagtgagctgacatcatgccattgcactccagcctgggcaacagagagagactccatctcaaaaaaaaaaaaaaagaaaggaaaagaaaagaaaatggtctaatacaccagggcacggccaaaagggtccttaaaggttttgctccccagcatcagtttaa

SEQ ID NO: 420460 - DNA, 201 bp, Homo sapiens
tttttagtttatttggaaatccccttctttaaatatcctgttcatagtgttttcccattttctcattgctgtttgtgcttttaccaccacaactgttgactttttttttttttttttagacagtctcgctctgttgcacaggctggagtgcagtggcactatctcggctcactataagctccgcctcctgggttcacgccg

SEQ ID NO: 420461 - DNA, 201 bp, Homo sapiens
tgcctgtaatcccaacactttgggaggccaaggtgggaagattgcttgaacccaagaattcgtgaccagcctaagcaacatagcaagaccccatgtccacaaaaaaaaaaaaaaagaagaagaataaattagccaggcatggcagcatacgcctgtaattccagctacttgggaggctgaagtgggagaatcacttgaatc

SEQ ID NO: 420462 - DNA, 201 bp, Homo sapiens
gctggtctcaaactcctgacctcacgtgatccacccacttcagcttaccaaagtgctgggattacaggcatgagccaccgttcctggcctatatttactatttttttttttttttttgagacaaggtctcactctgtcacccaagctgcagtgcagaggtgcaatcacggctctctgcagccttgaactcccagagccaag

SEQ ID NO: 420463 - DNA, 201 bp, Homo sapiens
ctgaagcaggaggatcgcttgaacccaggaggcagaggttgcagtgagccgagattgcaccactgcactccagcctgggtgacagagcaagactctgtctaaaaaaaaaaaagaaaaaaacaaacccatactttactgtacattttaaataactaaaagagtatatttggggtgtatgtaatacaaagaaattgtacatgc

SEQ ID NO: 420464 - DNA, 201 bp, Homo sapiens
aatttgtaatgtgtcaatttcattaagctgaaggaggtttcccacaagcctttccctatgcagctgaaagttagcatgggccccaggagacaacgtgcatraatgtggaaggcagaagggaagcagaagccacatgcttttgtgttgggcaggtgggtgcaggcccaggcactgtggctgtcatgcacgttgtttgcacct

SEQ ID NO: 420465 - DNA, 201 bp, Homo sapiens
gcagaagaatcacttaaaccccagaaagtagaggttgcagtgagctgagatcgcaccactgcactccagcctgagcgacagaatgagactctgtctcaaaacacacacacacacacacacacacacacacacacacacacacaaatgaaaaacaataaaagcaagcattcagtaagatgtgacatgcaccaaggaggagac

SEQ ID NO: 420466 - DNA, 201 bp, Homo sapiens
agcagcatatatgtgtatttatatgcatacgtgtatatatcatatctatatctcctactggttctgttcttctggagaaccaggactgatacctggatacrtatatgcatatccacatcttactcctcatcattctctttctctggctgacacctggctggtactttgctctcccagagcaaacccagagaagatatttta

SEQ ID NO: 420467 - DNA, 201 bp, Homo sapiens
gcatgagccaccgttcctggcctatatttactatttttttttttttttttgagacaaggtctcactctgtcacccaagctgcagtgcagaggtgcaatcayggctctctgcagccttgaactcccagagccaagtgataatcccacctcagctgggatcacaggcatgcaccaccaatgcccaggtaattaaaaaaaaaaa

SEQ ID NO: 420468 - DNA, 201 bp, Homo sapiens
tcttaggcagttatttatagcagtgtgaaaacagacaaatacactggtataaaacaacaatgggccaggcgtggtggctcatgcttgtaatcccagcactytgggaggctgaggcaggcagatcacttgaggtcaggagttggagaccagcctggccaacatgatgaaaccccgtctctactaaaaatacaaaaattagcc

SEQ ID NO: 420469 - DNA, 201 bp, Homo sapiens
gaggcaggagaatggcatgaacccgggaggcggagcttgcagtgagccgagattgtgccactgcactccagcctgggtgacagagcgagactccgtcccaaaataaataaataaataaataaataaataaataaataaataaataaatattttttaaaaaaacagactcctatttacatagaacaaaatgaaactgatgaa

SEQ ID NO: 420470 - DNA, 201 bp, Homo sapiens
accccgtctctactaaaaatacaaaaattagccaggcttggtggcgcacccctggaatcccagctacttgggaggctgaggtgggagaatcgcttaaaccmgagaggcagagattgccgtgagccaagatcatgccactgcactccagcctgggtgacaggctgagactctatctcaaaaatcatcatcatcatcattatc

SEQ ID NO: 420471 - DNA, 201 bp, Homo sapiens
aggcaggagaatggcatgaacccgggaggcggagcttgcagtgagccgagattgtgccactgcactccagcctgggtgacagagcgagactccgtcccaaaataaataaataaataaataaataaataaataaataaataaataaatattttttaaaaaaacagactcctatttacatagaacaaaatgaaactgatgaag

SEQ ID NO: 420472 - DNA, 201 bp, Homo sapiens
tgaatcaaagcactcatccccacgcacagatagacataaatggtggtagctgtgggcatcgcggttgtggtcggctgtcatcttcacttcatcagagcgcycactggtgggtaatgagagaacagcagggctatcccagctaggagacccccttccctcccttcctctctggagggttcaccaccccaaatagccaggctt

SEQ ID NO: 420473 - DNA, 201 bp, Homo sapiens
ggcaggagaatggcatgaacccgggaggcggagcttgcagtgagccgagattgtgccactgcactccagcctgggtgacagagcgagactccgtcccaaaataaataaataaataaataaataaataaataaataaataaataaatattttttaaaaaaacagactcctatttacatagaacaaaatgaaactgatgaagg

SEQ ID NO: 420474 - DNA, 201 bp, Homo sapiens
gcaggagaatggcatgaacccgggaggcggagcttgcagtgagccgagattgtgccactgcactccagcctgggtgacagagcgagactccgtcccaaaataaataaataaataaataaataaataaataaataaataaataaatattttttaaaaaaacagactcctatttacatagaacaaaatgaaactgatgaagga

SEQ ID NO: 420475 - DNA, 201 bp, Homo sapiens
tggtttctgcaccccaaaactgtccatagctaagctgctcacaccggcacacttcatcaaccttagctataactacattaaaatcaaacaccttgcccgtytgaggaccatgggctcagctcctggtcccccgtgggaaccagtgcaggcagcgacaactccaggcttcccagccttggactccaggacttacgccagctg

SEQ ID NO: 420476 - DNA, 201 bp, Homo sapiens
acatttatcatgaccaagtgagatttatcccagggatgcaaggatggttcaacatatgcaaatcagtcaatgtgatacatcatatcaatacaatgagggaraaaaaccatatgatcatttcaattgatgctgacaaagcctttaatagaattcaacatcccttcatgataaaaaccctcaaaaaattgggtatagaaggaa

SEQ ID NO: 420477 - DNA, 201 bp, Homo sapiens
gcttgcagtgagctgagatggcgccactgcactccagcctgggcaacggagcgagactccatctcagaaaaaaaaaattttttttcaaaaagaattttttrtaaaaacatgtcacccagttaaatttgaatttcagataaacaacaaatacttttttagtatgagtatatcccatgcaacattttggatatatttatttaa

SEQ ID NO: 420478 - DNA, 201 bp, Homo sapiens
cacttcaggagatcgatggtagaggatagcctgagtgcaggagttctagaccagcctgagcaacatagcaagaccccctctctaccaaaaaaaaaaaaaawttttttttttttgacagagtttcactcttgttgtccaggctagagtgcaatggcacgatctctgctcacttcaacctccacctcctgggttcaagcgatt

SEQ ID NO: 420479 - DNA, 201 bp, Homo sapiens
gtttcatcatgttggccaggctggtcttgaacttctgacctcagtgagctgcccgccttggcctcctgggattacaggcataagccacggtgtctggcctytacaaaaaaaaaattttttttaattagctgagcgtggtggcacacacctgcagtcctagctacttgggaggctaaagcagaaggattatttaaaaccagg

SEQ ID NO: 420480 - DNA, 201 bp, Homo sapiens
gaaggaccatgcacaggacacgaggttcctgaggcagatgagacgcctgctgctggatgatgggcccatgcaggccgtggtggctgggacccccggggagrtgcccacccctcccgcttcaaagacccaggctgaggggttgggacagtcatggggaaggccggtgcccctcctggggctacaagcgatagtaacaagaag

SEQ ID NO: 420481 - DNA, 201 bp, Homo sapiens
caagaggatggcttgagcccagaaattcgaggctgcggtgacctgggatcacactacagcctgggtgagggtgagaccccatccctttaaaaaaaaaaaaraaagaaagaaagaaattaaaaacagccaggtgcagtggctcacacctgtaatttcaacaggttggaaagcagaggcagaaccacatgatgggaccttgtc

SEQ ID NO: 420482 - DNA, 201 bp, Homo sapiens
gttctgtggaaggaccatgcacaggacacgaggttcctgaggcagatgagacgcctgctgctggatgatgggcccatgcaggccgtggtggctgggacccycggggaggtgcccacccctcccgcttcaaagacccaggctgaggggttgggacagtcatggggaaggccggtgcccctcctggggctacaagcgatagta

SEQ ID NO: 420483 - DNA, 201 bp, Homo sapiens
tcctcatacagcaacagcccgttctacacacaaaagggaattatgaaaataaggattgacaccaataatcgatacttaaagccctactgtgaccagtaccwatgctaaattatccacgtgcctaaatcaacacagcaattctgagaatatcttataaatgaggaaagtgaggctcagagaggtcatttaactttcccagtg

SEQ ID NO: 420484 - DNA, 201 bp, Homo sapiens
ttttgagttaatttttgtatatggtgtgaggtagggttccagctttattcttttgcttgttgatatccaattatcccagcaccattagttaaaaagactaytccttcccccattaaatgatcttggcactcttgttgaaaatcaattgaccatgaatgtgagagttcatttctggaatctcaattctattccattgatcta

SEQ ID NO: 420485 - DNA, 201 bp, Homo sapiens
ctgctcctctcttttcgcctcagagcagtgttgccagggaaaccagatcagcacatcctcaacacaaaatcaatttacctcccgtgtgtctggagggtgaygaatggcaggtctgcctttcaacacgtttacatccaaggagctgtcaactccgcctgcctccacgtcttagaaatgccattttatcttcatccccctctc

SEQ ID NO: 420486 - DNA, 201 bp, Homo sapiens
gggcgtgtgtgtgcgtgcgtgtgtgtgtgcatgtgtgtgtgtgcgtgtgtgtgtgcatgtgtgtgtgcgtgtgtgtgtgcatgtgtgtgtgtgcgtgtttytccagcaagttacagttgaatcatgggagttaggtgcactgcagactcatctcccatctcccctccgttgtctttctgctcctctcttttcgcctcagag

SEQ ID NO: 420487 - DNA, 201 bp, Homo sapiens
tactcgggagactgaggcaagagaatggtgtgaacccaggaggtggagctttcagtgagcccagatcgcggccactgcactccagcctaggcgacagagcraaactccgtctcaaataaataaataaataaataataaaaaaagaattgcagctcccctaagagcatggagctgtgagaaggcccaggagaattgaagctt

SEQ ID NO: 420488 - DNA, 201 bp, Homo sapiens
cccagccgggcgcggtggctcacgcctgtaatcccagcactttgggaggccaaggcgggcggatcacgaggtcaggagatcgtgaccatcctggctaacayggtgaaaccccgtctctactaaaaatacaaaaattagccgggcgtggtggcaggcgcctgcagtcccagctactcgggagactgaggcaagagaatggtg

SEQ ID NO: 420489 - DNA, 201 bp, Homo sapiens
aacaaagcaaaacaacaaaaactatagttgaagctgttggcagctagttccaaagatattggtgggtgtattagtttgctagggcacatatactgggtggyttaaacaacagaaatctatttactcacaattttggaagctagaatctgagatcacagtgttggcaggattagtttcttctgcagcctctctccttggctt

SEQ ID NO: 420490 - DNA, 201 bp, Homo sapiens
gatatgatcttatactcgactccaccaaaaaactgttaaaactgataaacaaattcagtaaagttgcaggatacaaaatcaacatacaaaaatcagtagcrtttggccaggtgcagtggcttacgcctgtaatcccagcaatttgagaggccgaggcaagtggatcacctgaggtcaggagttccagaccagccttgccaa

SEQ ID NO: 420491 - DNA, 201 bp, Homo sapiens
aggccgaggagggcggatcacttgaggtcaggagtttgagaccagcctggcaaacatggtaaaaccccgtcttagtaaaaatacaaaaattagctgggcayggcgcgggcacctgtaatcccagctattcaggaggctgaggcaggagaatcacttgaacccagaaggtggagattgtagtgagccaagatcgtgccactg

SEQ ID NO: 420492 - DNA, 201 bp, Homo sapiens
acaggtgcgcaccaccacacccagctaatttttttgtattttttgtagagacagggtctcactgtgttgcccaggctggtctcaaactcgtgaactgaagygatccacctgcctctgcctcccaaagtgctgggattacaggcatgagccatcatgcccagctggattgtgccttataaaagtccctttggctgaatgtag

SEQ ID NO: 420493 - DNA, 201 bp, Homo sapiens
atatatattatatctggaaagatccataatgattctgataaaaatatgaaaaacatcaactgactaagtagtcggtgcaactacttagaataatgggtagrtattattacaaataacttcatcctttctgacaatgcagaataacttcatccatcctgacaatgtagcattttcatgagtttaatatgcattggctcccat

SEQ ID NO: 420494 - DNA, 201 bp, Homo sapiens
aaactgaagggtgcagactgaggaagagggaagtaacagtcaaattgtgcatttattagaaaaaacaatctaggtccctttggggaggctggaaaaaatgyccaggtaatagtaagtgaagaaaaaaaaaactggtagaaatatgtacatagaatgagtccattttggttaaataaataaattcataaagctaacatttat

SEQ ID NO: 420495 - DNA, 201 bp, Homo sapiens
aattaaaaacagccaggtgcagtggctcacacctgtaatttcaacaggttggaaagcagaggcagaaccacatgatgggaccttgtctctacaaaaaattaaaaaaaaaaaaaaaagattgggtggcttaaacaacagacatttattttttcacagttctggaggctggggagtccaagatgaaggtgccagcagattcag

SEQ ID NO: 420496 - DNA, 201 bp, Homo sapiens
aaaaaaaaaagattgggtggcttaaacaacagacatttattttttcacagttctggaggctggggagtccaagatgaaggtgccagcagattcagttgttrgtgaggccttgcttcctgacttgcaagcagatgcctttttgctgtgccttcccatggcctttccccagtgtgtgcacgtggagaacgtgagctctggttt

SEQ ID NO: 420497 - DNA, 201 bp, Homo sapiens
acatttattttttcacagttctggaggctggggagtccaagatgaaggtgccagcagattcagttgttggtgaggccttgcttcctgacttgcaagcagaygcctttttgctgtgccttcccatggcctttccccagtgtgtgcacgtggagaacgtgagctctggtttctcttcctcttgttttttttctttctttcttt

SEQ ID NO: 420498 - DNA, 201 bp, Homo sapiens
ctcacaccacatatacaacttaacttgaaatggatcagaggcctaaatgttaagagttaaacctggaaaactctcagaaaacatagatgtatagtcgtgcrttgcttaacaatggggatacattctgagatatgtatcgttaggtgatttcatcattgtgcaaacatcatggagtgtacttatccaaacctaaatggtaga

SEQ ID NO: 420499 - DNA, 201 bp, Homo sapiens
tatctcaaaaaaaaaaaaaaaaaaaaaaaaaaaaatatatatatatatatatatatgtatttttaaaatatatatttatttaatatatatttaatattttwtatatatatatatttttttaatagagacagggtcttgctctgttgcccaggctggtctcctgggctcaaacaatgctcccacctcagcctcccaaagtgc

SEQ ID NO: 420500 - DNA, 201 bp, Homo sapiens
aaaaaaaaaaaaaaaaaaaaatatatatatatatatatatatgtatttttaaaatatatatttatttaatatatatttaatattttatatatatatatatwtttttaatagagacagggtcttgctctgttgcccaggctggtctcctgggctcaaacaatgctcccacctcagcctcccaaagtgctgggattacaggtg

SEQ ID NO: 420501 - DNA, 201 bp, Homo sapiens
gaagtgtgagcttgggacctcattcctattcatatgatcctttcctctggctccttgaacttcctcacaacatggtggctggattccaagagcaagcattytaagagaacaaggcatgtctttttttttttttttttttttgagacagggtctccctttgttgcccagactagtcttgaactcctgggctcacacaatccg

SEQ ID NO: 420502 - DNA, 201 bp, Homo sapiens
catcatgttggccaggctggtcttgaacttctgacctcagtgagctgcccgccttggcctcctgggattacaggcataagccacggtgtctggcctctacaaaaaaaaaattttttttaattagctgagcgtggtggcacacacctgcagtcctagctacttgggaggctaaagcagaaggattatttaaaaccaggagtt

SEQ ID NO: 420503 - DNA, 201 bp, Homo sapiens
tccatcactgaccaaaatgtcattatatggtgcacgactgtatatctttgtaaccttagatatgacatcatggcttcttagatattacatcacaagtacaygcaataaaaaaatacatacaaattagacctcatcaaattttaaattttgtgcttcaaaagacactattaatgaagtgaaaagaaaacctacaggatggga

SEQ ID NO: 420504 - DNA, 201 bp, Homo sapiens
cgggaggcggcagttgcagtgagctgagattgcaccactgtactccagcctgggcgacagagcaagactctgtctaaaaaaaaaaaaaaaaaaaaaaaaargatcaaatcagggtaattaggatattcatcaccttaaatattcatctttatgctaaaaacatgaagtcttcttctattattctaattttgaaatgtacaa

SEQ ID NO: 420505 - DNA, 201 bp, Homo sapiens
tctttggtgttcaagcggatggattcggccccagctggctccttctctgcctcttctttcttcgatttgtcggtgacggtgaccagagccaagaactcgckgggaccgtcttcttccccctcggagttgcagggcgcccactgcctaaccagctccctggcagcggcctgcagcgtggcgtacagcgcgctctggtcctct

SEQ ID NO: 420506 - DNA, 201 bp, Homo sapiens
ccaggctgcccagccctggattccatgaacgcggaagtcaggccgcccgggcaccagtgctgatggtgcaaccctggacatgtttaacctccaagtcttgstttctgcaccccaaaactgtccatagctaagctgctcacaccggcacacttcatcaaccttagctataactacattaaaatcaaacaccttgcccgtctg

SEQ ID NO: 420507 - DNA, 201 bp, Homo sapiens
gagcgttaggtggcaccttggagaccccgccacctccaaaggcccagttaggggcggagcttctaaaccctagcattttggattgaaccatcgtccgtcgrttaaaggggagagccgagaaagcccttctgcatttgtcgccagcctttttaccacctcctggccacagaaacgacgtatttgcttctctaacggcgacgc

SEQ ID NO: 420508 - DNA, 201 bp, Homo sapiens
tgttatgcagcaataaagagctgaaacaaataatatctagaacatagtaacaataagctgctattattatgtcattcaatcttcacaacaactctgtaagrttgacatcaatagtacctgtattagtctgttttcacactggtgataaagatatacccaagactgggcaatttacaaaagaaagagttttaatggactcac

SEQ ID NO: 420509 - DNA, 201 bp, Homo sapiens
accgtcctgttgagccctgttaacccacagaatcgtaagagacaataaaataattattgggttttttttttttttagataaggtctcactctgtcaccaargctggagtgcagtggtgcgaccatggctcactgcagcctcgaccgcctggactcaagcgatcctcccacatcaatctcccaggtagctaggactacaggt

SEQ ID NO: 420510 - DNA, 201 bp, Homo sapiens
accccagggaaggactctcattggttcagtctccattctgttccaggtggagcataatgattggtccagcctgactcgtttgcccatctcttaaccatcamcatggtggggaggggacacgcaggagactgtcagctcctatcctaaacgggggagggggcaggggtgatcattttctgagctcctataaacaaagtttca

SEQ ID NO: 420511 - DNA, 201 bp, Homo sapiens
ctatgaaatatttaatgatgtattagttaactgtgattttgccagtttcttctgtattttgaaactgatactttttttctggttcaaaaatttttggaagktgcttaagaaataactgttcctccccactgggcctgtggagacctgtagacaaagtactaaagtaactcagcacaaatgtgcaaagtctgtaaatttggg

SEQ ID NO: 420512 - DNA, 201 bp, Homo sapiens
ggaggcccactagattctcaggcccaccagggcccatgagtggcaggacccacactgggggactgggagctgtgaccctctaggctaacggggaactatgrgagctctgcctggggacacagggccccaggcctgggccagttcaagagatgagtggctggcagctcccagcagatcaccaggctggggacgaaccctgag

SEQ ID NO: 420513 - DNA, 201 bp, Homo sapiens
ttgttagaagcttgtcactatgcccaatctacacacaaaggggtataggtcccagaagggcatgaataccacgaggctggaccactgcaggtcatcctacyataagtaaacatgttaagatgttaagataataaatatgaccatggctccacctggtgggaaacaatggcaaacagagtgacgaggtagaaagttctagtt

SEQ ID NO: 420514 - DNA, 201 bp, Homo sapiens
cgcccagccacttccctttttttttaatctataaatttgttctgaccaggaggcatccctggagtctctctgaatctgctgtgattctgggggctgcccarttcacaaattgttcattgttcaattaaactttaaatttaattcagctgaagttttaaacaatggcggctggcttctaacagggaggcggtgaatcctgcc

SEQ ID NO: 420515 - DNA, 201 bp, Homo sapiens
aatgcctgtaatcccaacaccttgggaggccaagacaggaagattgcttgaggccaggagttcaagaccagcctgggcaacatagcaagacctgtctcttaaaaaaaaaaaaaaaaaaaaaagctttctttcactcctccagtcatcctgctcttttctagtttctggataatcaatttgacccccaaaatgtgaaaacac

SEQ ID NO: 420516 - DNA, 201 bp, Homo sapiens
gctgacttgggcttcctcataccatggcaggatcacaggggtcaggcttcttacatggtgttaaagcaaactaaatatggcccgagaaggattctatactyctatttttgagtccttgtggacaagctataacctagcttaataggcagacaagatcgaaaacctaattcaaactgtgttcaaataaggcaaacaccaaca

SEQ ID NO: 420517 - DNA, 201 bp, Homo sapiens
aaagtatcacctatctgataagatttacatctgttctttaaaatcctctgaagtgtgggcaaaaattcttgatatattaacacagaaatgacagcttcatkcattatacctcctttttgggcagttagagtagctcagactcatacattttgtgaaattattgaagcaaggctagaaacctcggtttgtaagccttggagg

SEQ ID NO: 420518 - DNA, 201 bp, Homo sapiens
ctctgaagtgtgggcaaaaattcttgatatattaacacagaaatgacagcttcattcattatacctcctttttgggcagttagagtagctcagactcatayattttgtgaaattattgaagcaaggctagaaacctcggtttgtaagccttggaggaaattaacagtgtcattgaagtttttttctaaagttttagagcat

SEQ ID NO: 420519 - DNA, 201 bp, Homo sapiens
aatagtgtaaaaacctccctgatttttgaacacacaatgtgaaaaatgctttcaaactaaaaagatgagttcagccttccttagattaattttgtgcattmaatgtcactattataaatatatctcagagactgtccacttttacaggatggtgatgtgtcaatatcttcagtgtccataatctgttcttgcccccaggag

SEQ ID NO: 420520 - DNA, 201 bp, Homo sapiens
cctgtttggtgttggctgttgtggctgcccttctcctgtcattttgctcagtgcccgcgcctggcagtgctgtgatgccatcccagggttcccgggtgccyggtacctgacaggtgcattacctggtaggcgcatttctggtgcagtttcttctggtccttgtaccactgcatgagccccttcatgaaggtgattgtcact

SEQ ID NO: 420521 - DNA, 201 bp, Homo sapiens
caccacactcacctaatttttgtatttttagtagagacggggttttgccacgttggccaagtggatctcgaactcttgacctcaagtgatccgcctccctyggcctcccatagttctgggattacaggcgtgaaccaccatgcctggccccctttttttctttcttactgtcttcctttgtggttaagtgattttctctgg

SEQ ID NO: 420522 - DNA, 201 bp, Homo sapiens
tttctctggtagtatgttttaacttgttactttttatttttattgaatctattataggtttttgcattgtggttaccttaaggcttataaaaaaatcttayaacaagttttttgttttttgtttttttttgagatgaagtttcatttttattgcccaggctggagtgcaatggcacaatctcggctcaccacaacctccgc

SEQ ID NO: 420523 - DNA, 201 bp, Homo sapiens
cattgtggttaccttaaggcttataaaaaaatcttataacaagttttttgttttttgtttttttttgagatgaagtttcatttttattgcccaggctggartgcaatggcacaatctcggctcaccacaacctccgcctcccaggttcaagcgattctcctgcctcagtctcccgagtagctggaattacaggcatgtgcc

SEQ ID NO: 420524 - DNA, 201 bp, Homo sapiens
cggtttctctatgttagtcaggctgatctcgaactcccgacctcaggtgatccgcctgcttcagcctcccaaagtgctgggattataggtgtgggccaccrtgcctggcccccttttttcctttcttactgtcttcctttgtggttaagtgattttctctggtagtacgttttaacttgctactttttatttttattgaat

SEQ ID NO: 420525 - DNA, 201 bp, Homo sapiens
tcctcggcctcactcctcgcgggagcagacggccgtcctcctcggcttctcttcttgcccttctgggtcaacctgttgcgtctggttctgtttctgcgacyccgacggcccctccttgggttcctggctgccccaagaagcgagccagcctgccctgttacctccccagaatcctgggcctgcgtctccgaagcgggaggg

SEQ ID NO: 420526 - DNA, 201 bp, Homo sapiens
gtaagctatgattgggccactgcactccatcctgggtgatagagcaagatcgtgtctcaaaaaaaattttttttctttttgcatggttttttttttttccrgattgaggaactctctggaactgtctttcttcaagagagcatttcttataatacagatctggtagtggtgaattctctctgcttttatttgggaaaaact

SEQ ID NO: 420527 - DNA, 201 bp, Homo sapiens
ggctgtgtcaccttttctaatctagcctcggaaatcacttatcatctgttcatgagaagcaagtcaatagggctgcccgtattctagaggacaagaactgraatccacctttttattttttcaatttttaaatattttttttaggcagggcgtggtggcttacgcctgtaatcccagcactttgggagtccgaggcgggcg

SEQ ID NO: 420528 - DNA, 201 bp, Homo sapiens
accccttaagtggggaattatgactgccctacctacagatgaggattccaaaaccagagaggtttagtctcctgcccaaggtcacacataaactggaggasctatgagttattcaaacccaggtctctctgacagtaggcagagaacttcagcgtagagggaatgtggcgggactcaaaaggctcccaatccaccctcaag

SEQ ID NO: 420529 - DNA, 201 bp, Homo sapiens
ccagtagactatttagaaagaccagctttggatatgggtgtgggcctgactcaatgcagtaagtgctttctgggcccaagtaaaggccctgccattttccratttgctgtttcgttttttgtattagttatttatggctgtataacaaatcaccccaagatccagcaatcccacaactcaatatacatacagaggaaatga

SEQ ID NO: 420530 - DNA, 201 bp, Homo sapiens
aaaatttttttttttttgacagagtttcactcttgttgtccaggctagagtgcaatggcacgatctctgctcacttcaacctccacctcctgggttcaagygattctccagcctcagtctcccaagtagctgggattacaggcgcccgccaccactcccatctaatttttgtatttttaatacagacaaggtttcatcatg

SEQ ID NO: 420531 - DNA, 201 bp, Homo sapiens
gctaactttttgtctagacataggtctcactacgttacccaggctggtcccccaaactcctggactcaagcaatctgcctgcctcagcctcccaaagtgckggattacaggcgtgagccacgcagttattgctgctgttgtcactgtggggaagtggccaagggcacaggtttggagccagagggtcctggtctgagtctc

SEQ ID NO: 420532 - DNA, 201 bp, Homo sapiens
ctgaaacctctgcctcccaggctaatgtgatcctcccacctcagcctcccaagcagctgagactacaggctcatgccaccacgcctggctaactttttgtmtagacataggtctcactacgttacccaggctggtcccccaaactcctggactcaagcaatctgcctgcctcagcctcccaaagtgcgggattacaggcgt

SEQ ID NO: 420533 - DNA, 201 bp, Homo sapiens
atttagtcctacaatcaataagtgacttctgctttcctttcatgctttcctgaaggttagctggaaactacaggccagaaattgggtcttggacaaaggaragtcaaagtgcctcgatgaatagacaatacctgataccctgagctattgacacttcaagaaataggctcactgggttcaggttttcccatgtgtatgagt

SEQ ID NO: 420534 - DNA, 201 bp, Homo sapiens
ccgagtaactgggactacaggcatgcaccaccatgcctgactagttttttgtttgtttgtttgtttgagagagagtctcgcactgtcactcaggctggagkgcagtggcgtgatcttggttcactgcaacctccgcctcccggcttcaaaccattctccagcctcagcctcccaagtagctgagattacaggtgcccgcca

SEQ ID NO: 420535 - DNA, 201 bp, Homo sapiens
cctccatgctaggctccgctaacctctggaactttgccaccaggttctttctgcctgaaggccaaaaccatcaaccccctagggagacccccaggcatgcrtccagagacccagcatcccccatccctcgtccactatgtcaccccactgtgagagctgaaaggttgtttctgcccattcagggacagagcctaccccagg

SEQ ID NO: 420536 - DNA, 201 bp, Homo sapiens
tccagcctcagcctcccaagtagctgagattacaggtgcccgccaccacgcccagctaattttttgtatttttagtagagacggggtttcactatgttggkcaaccttgtctcaaactcccaacctcgtgatccgcccgcctcggcctcccaaagtgctgggattacaggtgtgagccaccgtgcccggcctagttttgta

SEQ ID NO: 420537 - DNA, 201 bp, Homo sapiens
ccgggcaccagtgctgatggtgcaaccctggacatgtttaacctccaagtcttggtttctgcaccccaaaactgtccatagctaagctgctcacaccggcrcacttcatcaaccttagctataactacattaaaatcaaacaccttgcccgtctgaggaccatgggctcagctcctggtcccccgtgggaaccagtgcagg

SEQ ID NO: 420538 - DNA, 201 bp, Homo sapiens
tctggctgcctgcccagccccaggactcctgagagcctggatccggggtcctggggggtaaggggcccctcccaaaggctgctgttgcccggaactctgaygcagcctcagcagcaacccccaagcaggctgctcccatcccagggaagtccaccttccaccccatcacccagctgagactgagcctcatcctggactcct

SEQ ID NO: 420539 - DNA, 201 bp, Homo sapiens
ttacaaagtgtcatttttgacatttgaatctccaatctaggctgggcatggtagcgcacgcctgtaatcccagctacttggaggctgaggcaggagaatcrcatgaacctgggaggcagaggttgttgcattgagccgagattgcgccactgcactccagcctgggagacagagcaagacgctgtctcaaaaaaaccaaac

SEQ ID NO: 420540 - DNA, 201 bp, Homo sapiens
gacacagccaagccatatcagcggggtgttgcagctcctgacctcgcccattgggaatcatgagacggagctttgggctgcggatggagcgccctggaacrcaggcagaggagcgacagacagcagcctgggggcagaacaaggggctacccttgagcccacccccacccccagggaatggagaaggcccgtgtggaatgt

SEQ ID NO: 420541 - DNA, 201 bp, Homo sapiens
cttgggtccgctgtactcaccctcgatggctggcatgtgaacaggggagacacgagagtcagcgaccacggccactgtaagggggaagggggtcttgctcycagggatgaggtggacctggctctggacacacagattgagagagggacagagcgagtgaagagtcccctctctggtcaggtctggcccagaggcctcttc

SEQ ID NO: 420542 - DNA, 201 bp, Homo sapiens
cactttgggaggccgaggcaggcagatcacttgagcccaggagtttgagaccggcctggccaacatggcaaaacctcgtctctacaaaaaatacaaaagtyagccaggcttagtgacacacatctgtagtccctgatactcaggaagctgaggtaggaggattgcttcagcccaggagatcaaggctgaagtgagagatga

SEQ ID NO: 420543 - DNA, 201 bp, Homo sapiens
ctttggagtagccgtatttcaagggctcagcagccacacagggccattgggaatttgtttgcaagaattaattagggggagagagagagagagagagagagtgtgtgtgtgtgtgaatacactcagcacaactgttatttataactgcaagattggaaaacacaacaaaaagagaaacaggaagcttgcactttgtgtgtg

SEQ ID NO: 420544 - DNA, 201 bp, Homo sapiens
tttggagtagccgtatttcaagggctcagcagccacacagggccattgggaatttgtttgcaagaattaattagggggagagagagagagagagagagagwgtgtgtgtgtgtgaatacactcagcacaactgttatttataactgcaagattggaaaacacaacaaaaagagaaacaggaagcttgcactttgtgtgtgt

SEQ ID NO: 420545 - DNA, 201 bp, Homo sapiens
attcctttttcactaacctgcttaaacatggctaacttgggtttctgtacttgggacctaaacagtcctgtgtatcccactcctcaaagcattctctgagsccccaagggaagcagggtggggggtggcttctcagtgtcctgccagtcagtacatctggctccaaatgctggaccaggagttagggggagagggaaaggg

SEQ ID NO: 420546 - DNA, 201 bp, Homo sapiens
atcgaggaggcagatgagggggcttgagcagagatgacaatgacagcaggctgtacacagcgctccaggcagcagccagggagcaagttcacaagaagtgraccctctgaagccacaaagacgaggcaggtggtcctatggagttcttgcccctgatgaccaggacagacaaagccaaacaggagatgatggaagaaagcc

SEQ ID NO: 420547 - DNA, 201 bp, Homo sapiens
gcatacgcctgtaattccagctacttgggaggctgaagtgggagaatcacttgaatcgaggaggtggaggctgcagcgagccgtgatcatgccacagcacmccagcctggggaatggagcaagaccctgtctcaaaaaaaattaagagaaaatatttttagtattgggggggtattgtaatgatattgtaattatgttttt

SEQ ID NO: 420548 - DNA, 201 bp, Homo sapiens
cccagctggctccttctctgcctcttctttcttcgatttgtcggtgacggtgaccagagccaagaactcgcggggaccgtcttcttccccctcggagttgsagggcgcccactgcctaaccagctccctggcagcggcctgcagcgtggcgtacagcgcgctctggtcctcttctccgctcaggtcgccctggtcgatctc

SEQ ID NO: 420549 - DNA, 201 bp, Homo sapiens
gctgtacacagcgctccaggcagcagccagggagcaagttcacaagaagtggaccctctgaagccacaaagacgaggcaggtggtcctatggagttcttgsccctgatgaccaggacagacaaagccaaacaggagatgatggaagaaagccctctgatttgatgcacttgaccatcaaagaaggcaggagcagtgactcc

SEQ ID NO: 420550 - DNA, 201 bp, Homo sapiens
ccattcaagattgttgtttccaatggtctcaaatagctgctataaatatggagtgatcacaggaactatcaatggcttacagacaccttatggaagctcaytgcaccatctgtaaagttgtcttgccaaagagtgagatttaaatttgattgagcttctagttctaaatactagtttacaggataaacagggaacagagga

SEQ ID NO: 420551 - DNA, 201 bp, Homo sapiens
gggtgggagggaaggggcgtgcacactgaggccgaggtgggggcacagcggctgtccccaggctgcccagccctggattccatgaacgcggaagtcaggcygcccgggcaccagtgctgatggtgcaaccctggacatgtttaacctccaagtcttggtttctgcaccccaaaactgtccatagctaagctgctcacaccg

SEQ ID NO: 420552 - DNA, 201 bp, Homo sapiens
gggggcagcctccggccccgacgggccttcttcccgcgcgcggccttggatccagtgggcgcctggcccttggcctcgcctgccctggcatgggccccggmgcccgcgctccccttcttcttcctgcttcctgcggcgtcgtcctgggccgagccccggctcccggctttcttctcgggagtgacgccccggcctcggcct

SEQ ID NO: 420553 - DNA, 201 bp, Homo sapiens
ggctcctcgtccggggtgtctctcacagccagcagggccactaagtcggggacaccatttttgtcttctttggtgttcaagcggatggattcggccccagstggctccttctctgcctcttctttcttcgatttgtcggtgacggtgaccagagccaagaactcgcggggaccgtcttcttccccctcggagttgcagggc

SEQ ID NO: 420554 - DNA, 201 bp, Homo sapiens
tggagtagccgtatttcaagggctcagcagccacacagggccattgggaatttgtttgcaagaattaattagggggagagagagagagagagagagagtgwgtgtgtgtgtgaatacactcagcacaactgttatttataactgcaagattggaaaacacaacaaaaagagaaacaggaagcttgcactttgtgtgtgtgt

SEQ ID NO: 420555 - DNA, 201 bp, Homo sapiens
agagagagtgtgtgtgtgtgtgaatacactcagcacaactgttatttataactgcaagattggaaaacacaacaaaaagagaaacaggaagcttgcactttgtgtgtgtgtgtgtgtgtgtgtgtgtgtgtattttagagtcagagtcttgctgtctcccaggctagagtgcagtggcatgaccatggctcactgcagtct

SEQ ID NO: 420556 - DNA, 201 bp, Homo sapiens
gagagagtgtgtgtgtgtgtgaatacactcagcacaactgttatttataactgcaagattggaaaacacaacaaaaagagaaacaggaagcttgcactttgtgtgtgtgtgtgtgtgtgtgtgtgtgtgtattttagagtcagagtcttgctgtctcccaggctagagtgcagtggcatgaccatggctcactgcagtctt

SEQ ID NO: 420557 - DNA, 201 bp, Homo sapiens
aaagaaaaaattgcttctgtgatcgactctttgggctggaggaatgagaaagaaaaaacgatgccctctcgcaggtcttgtctgtcctgtccaaggacacygtggtcccgcggaaagcctgagatgacaggaaccttctggagtgcattttcaccttggcgcagccagaaccccctccctggaggaagaaggctgagcctg

SEQ ID NO: 420558 - DNA, 201 bp, Homo sapiens
agagagtgtgtgtgtgtgtgaatacactcagcacaactgttatttataactgcaagattggaaaacacaacaaaaagagaaacaggaagcttgcactttgkgtgtgtgtgtgtgtgtgtgtgtgtgtgtattttagagtcagagtcttgctgtctcccaggctagagtgcagtggcatgaccatggctcactgcagtcttg

SEQ ID NO: 420559 - DNA, 201 bp, Homo sapiens
taggctgattctcccccacacagcctctctgcattcacctgggctttcactattttgtaacccagctttagcttccttgcaagatggcagctggcatgcamgtgagtaagagtgggagtctcctggactcttaaggcctaggcttgaaattgacgcatcactctgctacattctattggtcaaaacaagtcacgaggcctg

SEQ ID NO: 420560 - DNA, 201 bp, Homo sapiens
ttagtcttttacatttgcccaataaccaagcaagtcactttgtctcttcatggctctgtggccccagtttatcgtgaggttgtgaggatttaagcgggatktgtgtgtgtgtgtgtgtgtgtgtgtgtgtgtgtgtgtgtgtgttggaacagtgcctggccctgagtgttactgggacaaagatttcattctcaccgtggg

SEQ ID NO: 420561 - DNA, 201 bp, Homo sapiens
ctgaatgagatgctgaagggctgtaaagcttcagaaagtgggcgggtgcaaccaccaggtcacagagcggggctggaggaccctgagttcctgactactgyggcctgtaccagcccttcagacaccaaaagctgccaggaggtgttgaaaatcgcttctgaggcggggtgcggtggctcatgcctgtaatctcagcacttt

SEQ ID NO: 420562 - DNA, 201 bp, Homo sapiens
ccaataaccaagcaagtcactttgtctcttcatggctctgtggccccagtttatcgtgaggttgtgaggatttaagcgggatgtgtgtgtgtgtgtgtgtrtgtgtgtgtgtgtgtgtgtgtgtgttggaacagtgcctggccctgagtgttactgggacaaagatttcattctcaccgtgggacaggatgaggtggcacg

SEQ ID NO: 420563 - DNA, 201 bp, Homo sapiens
ccttcagacaccaaaagctgccaggaggtgttgaaaatcgcttctgaggcggggtgcggtggctcatgcctgtaatctcagcactttgggaggccgaggarggcagatcacctgaggtcaggagtttgagaccagcctggccaacatggtgaaaccctgtttctactaaaaatacaaaaattagctgggcgtggtcgtggg

SEQ ID NO: 420564 - DNA, 201 bp, Homo sapiens
ggctgaggcaggagaaccgcttgaacctggaaggcggaggttgcagtgagctgagattgtaccactgaactccagcctgggtgacaggcatgactgtctctaaataaataaataaaataaaataaaataaaataaaataaaataaaataaaataaaataaaattcatatgttgggctgtgtgtggtggctcacacctgtaa

SEQ ID NO: 420565 - DNA, 201 bp, Homo sapiens
gcggtggctcatgcctgtaatctcagcactttgggaggccgaggaaggcagatcacctgaggtcaggagtttgagaccagcctggccaacatggtgaaacyctgtttctactaaaaatacaaaaattagctgggcgtggtcgtgggctcctgtaatcacagctactcaggaggccgaggcaggagaatcactgcagcctgg

SEQ ID NO: 420566 - DNA, 201 bp, Homo sapiens
gctgaggcaggagaaccgcttgaacctggaaggcggaggttgcagtgagctgagattgtaccactgaactccagcctgggtgacaggcatgactgtctctaaataaataaataaaataaaataaaataaaataaaataaaataaaataaaataaaataaaattcatatgttgggctgtgtgtggtggctcacacctgtaat

SEQ ID NO: 420567 - DNA, 201 bp, Homo sapiens
ctgaggcaggagaaccgcttgaacctggaaggcggaggttgcagtgagctgagattgtaccactgaactccagcctgggtgacaggcatgactgtctctaaataaataaataaaataaaataaaataaaataaaataaaataaaataaaataaaataaaattcatatgttgggctgtgtgtggtggctcacacctgtaatc

SEQ ID NO: 420568 - DNA, 201 bp, Homo sapiens
tgaggcaggagaaccgcttgaacctggaaggcggaggttgcagtgagctgagattgtaccactgaactccagcctgggtgacaggcatgactgtctctaaataaataaataaaataaaataaaataaaataaaataaaataaaataaaataaaataaaattcatatgttgggctgtgtgtggtggctcacacctgtaatcc

SEQ ID NO: 420569 - DNA, 201 bp, Homo sapiens
ctgctgcttttaaaaaatcgtaagtcagaaatgctcccaggcaagaattgaccagttcacaaacaaaaatggacagaagtaaaattcagcaaaggaaagasgcattttctttctttagcctaacatctaaatgtattgtgagtctagaggcttggagtcttacagattgacaaggttactaaacaacaagagagagcctcc

SEQ ID NO: 420570 - DNA, 201 bp, Homo sapiens
ggattataggcatgaggccaccatgcccagctatctttgcctctttgatgtaatgatttattttcctttgggtatataccccatagtggaattgcagggtygaatggtagttctatttttagttttttgagaaatctccatactgttttctgttttctatagagattgtactaatttacactcccaccaacagtatataag

SEQ ID NO: 420571 - DNA, 201 bp, Homo sapiens
aaaaaaaaaagaaaggaaaagaaaagaaaatggtctaatacaccagggcacggccaaaagggtccttaaaggttttgctccccagcatcagtttaaccacytggaaacaagaggccagaaattgctgcaggcagggaacagaggtcttatgctatggactgaattgtgtccccttatccccaaaattcatatgttgaagcc

SEQ ID NO: 420572 - DNA, 201 bp, Homo sapiens
acttctcctggaagacatccgctcatgaaaattggagtcctggagactgtgagggtcccgtctgtctacatggcttcccactgatcctctcagttcgtctkccctggcttccccactttgtatcccatcttcccttcccaatacctgccctgctgacttcaggctgtaccagcagatgcagagagatcacccttacataga

SEQ ID NO: 420573 - DNA, 201 bp, Homo sapiens
gaatattgggagggattactgccaatccataatgaccacgactcctgtttggtgttggctgttgtggctgcccttctcctgtcattttgctcagtgcccgygcctggcagtgctgtgatgccatcccagggttcccgggtgcccggtacctgacaggtgcattacctggtaggcgcatttctggtgcagtttcttctggtc

SEQ ID NO: 420574 - DNA, 201 bp, Homo sapiens
ccttaaaatgtataaagtgaagctgtgccccaaccgccttgggcacatgtcatcaggacctcctgaggctgtgtcacaggagtgtccttaaccttggcaarataaactttctaaattgattgcaacctgtctcagatacttttggatcacacctctaacaagcctccccctatcccttcccaccctctagtatcctacatt

SEQ ID NO: 420575 - DNA, 201 bp, Homo sapiens
tgtccttaaccttggcaagataaactttctaaattgattgcaacctgtctcagatacttttggatcacacctctaacaagcctccccctatcccttcccamcctctagtatcctacatttttgagtggtagaagttccaagctaggaggaattggtcttaaagatagtctaacaacattctcaaattttaggatgtttcca

SEQ ID NO: 420576 - DNA, 201 bp, Homo sapiens
ttcgagaccaacctggccaacatgatgaaaacccatctctactaaaaatacaaaaaattagccaggcatggttgcggatgcctgtaatcccagttactcakgaggctgaggcaggagaatcccttgaacccgggaggcggaggttgcaatgggcagagagcatgccattgcactccagcctgggagatagagagagactcc

SEQ ID NO: 420577 - DNA, 201 bp, Homo sapiens
aaaagagcgaagtggctcctggagctggtggtgcgcatctggcggctcaggcattgctgcagccgggagcaccacctggggaagagggaaagaggaaaagsgtggggaggtgggaaattcaaatacaccaaaggcaaccaagggactacgcagctttccaggctgccagtgaggacataaagtcgggaaaggcagctgcag

SEQ ID NO: 420578 - DNA, 201 bp, Homo sapiens
tacaaaaaattagccaggcatggttgcggatgcctgtaatcccagttactcaggaggctgaggcaggagaatcccttgaacccgggaggcggaggttgcartgggcagagagcatgccattgcactccagcctgggagatagagagagactccatctcaaacaaaaataaagttattgatagctgggcctggtggcatgca

SEQ ID NO: 420579 - DNA, 201 bp, Homo sapiens
gctgaggtagaaaattgcttgaacacgggaggcggcagttgcagtgagctgagattgcaccactgtactccagcctgggcgacagagcaagactctgtctaaaaaaaaaaaaaaaaaaaaaaaaaagatcaaatcagggtaattaggatattcatcaccttaaatattcatctttatgctaaaaacatgaagtcttcttct

SEQ ID NO: 420580 - DNA, 201 bp, Homo sapiens
gaaccgcttgaacctggaaggcggaggttgcagtgagctgagattgtaccactgaactccagcctgggtgacaggcatgactgtctctaaataaataaataaaataaaataaaataaaataaaataaaataaaataaaataaaataaaattcatatgttgggctgtgtgtggtggctcacacctgtaatcccagcactttg

SEQ ID NO: 420581 - DNA, 201 bp, Homo sapiens
catgtgttcctgcaaaatgtgcattgctgtttgggggcatctaggctaaatttgcataacttgttttccatgatctatctctttttgtttctcatggtttkgtgtgtgtgtgtgtgtgtgtgtgtgtgtgtgtgtgtgtgtgtgtgcggttttctttctttttttttttttttagcactcagcagtaacgtgtctaagatt

SEQ ID NO: 420582 - DNA, 201 bp, Homo sapiens
atgtgttcctgcaaaatgtgcattgctgtttgggggcatctaggctaaatttgcataacttgttttccatgatctatctctttttgtttctcatggttttktgtgtgtgtgtgtgtgtgtgtgtgtgtgtgtgtgtgtgtgtgtgcggttttctttctttttttttttttttagcactcagcagtaacgtgtctaagattg

SEQ ID NO: 420583 - DNA, 201 bp, Homo sapiens
atgtgcattgctgtttgggggcatctaggctaaatttgcataacttgttttccatgatctatctctttttgtttctcatggttttgtgtgtgtgtgtgtgtgtgtgtgtgtgtgtgtgtgtgtgtgtgtgcggttttctttctttttttttttttttagcactcagcagtaacgtgtctaagattgatcccagttctgtat

SEQ ID NO: 420584 - DNA, 201 bp, Homo sapiens
aacttgttttccatgatctatctctttttgtttctcatggttttgtgtgtgtgtgtgtgtgtgtgtgtgtgtgtgtgtgtgtgtgtgtgcggttttctttctttttttttttttttagcactcagcagtaacgtgtctaagattgatcccagttctgtatcttgctggtaatttcacctgctgaatggggctgcatggttg

SEQ ID NO: 420585 - DNA, 201 bp, Homo sapiens
aacactttgggaggccgaggccggtggatcacctgaggtcaggagttcgagactagcctggccaacatggcgaaaccccatctttactaaaaaagcaaaarttagccgggcatgatggtgggtgcctgcaatcccagctacacagggggctgcggcagaagaatcacttaaaccccagaaagtagaggttgcagtgagctg

SEQ ID NO: 420586 - DNA, 201 bp, Homo sapiens
acttaaaccccagaaagtagaggttgcagtgagctgagatcgcaccactgcactccagcctgagcgacagaatgagactctgtctcaaaacacacacacacacacacacacacacacacacacacacacacaaatgaaaaacaataaaagcaagcattcagtaagatgtgacatgcaccaaggaggagacacatgaggtgc

SEQ ID NO: 420587 - DNA, 201 bp, Homo sapiens
cccagaaggtggagattgtagtgagccaagatcgtgccactgctgcactccagcctggatgacaagagggaagctccgttaaaacaaaacaaaacaaaacaaaaaaaacaccactcctgggaggaaacagctagtgacccaagttgaccagggtctgctttaagacaaggaatgaagaggtctccaaagaccagagtatcc

SEQ ID NO: 420588 - DNA, 201 bp, Homo sapiens
gacctgtcggagggggtctcgcttgtctttctcgtcgctccagcccagcgactcgataacagaagcgattttcaacatctcctcccgggcccaggggtccsacgggtcggtataggccacaatggccacgaactcaggattatccaactcctctgtttcttggtccccactttcctgcgagtcgctctccgaagtgtcgct

SEQ ID NO: 420589 - DNA, 201 bp, Homo sapiens
atgccattgcactccagcctgggcaacagagagagactccatctcaaaaaaaaaaaaaaagaaaggaaaagaaaagaaaatggtctaatacaccagggcayggccaaaagggtccttaaaggttttgctccccagcatcagtttaaccacctggaaacaagaggccagaaattgctgcaggcagggaacagaggtcttatg

SEQ ID NO: 420590 - DNA, 201 bp, Homo sapiens
gccacctctgagtgacttggtgaaagggaaaaaagagaaagttcagagcaagacatttccttgaaagcaggtaaagtggaaattgcgcaagtcatgtccamctgcaagccactggggaggacccagtcatgtggctgcagccaacctcaagggaggctgggaaatgtagtccccagccaggcagccatgtgcctgaggaga

SEQ ID NO: 420591 - DNA, 201 bp, Homo sapiens
gcctgagcccaggaaatagaagttacagtgagccatgattgcaccactgaactccagcctgggtaacagaccaagactgtctcaaaaaaaaaaaaaaattrtaagctaacaaatcatcagagactgaaatattataataattctaatcagaatgcagatgaatgcatttatgatgggtaaggcttagaaaaattataactg

SEQ ID NO: 420592 - DNA, 201 bp, Homo sapiens
aaaaaaataaaaaatattttttttaaaaagagaagagaaagctgtctccctgaccatgtgaggacatagtgagaaggtggctgtctgcaaaccaagaagasagccctcctcagaacctgaacatgctggcaccctgatctcacatttgcagcctccagaactgtgagaaaacagaattctgttgtttaagccacccagtct

SEQ ID NO: 420593 - DNA, 201 bp, Homo sapiens
tcctgaaggttagctggaaactacaggccagaaattgggtcttggacaaaggagagtcaaagtgcctcgatgaatagacaatacctgataccctgagctaytgacacttcaagaaataggctcactgggttcaggttttcccatgtgtatgagtctgttttcatgctgctgataaagacatacctgagacatggtgattta

SEQ ID NO: 420594 - DNA, 201 bp, Homo sapiens
cgagatcatgccaccacactccagcctgggcgacaaagcaagaccctgaaaaaaaaaaaaagtgagtcattaaagactggatttgcaagttattttctccrgaagagcttgtacaggtgattctggctctccaatttggcccattccgatgtctaactccactaaggctccccggcctagaaggccacacttcttccttta

SEQ ID NO: 420595 - DNA, 201 bp, Homo sapiens
ccaccacactccagcctgggcgacaaagcaagaccctgaaaaaaaaaaaaagtgagtcattaaagactggatttgcaagttattttctccagaagagcttrtacaggtgattctggctctccaatttggcccattccgatgtctaactccactaaggctccccggcctagaaggccacacttcttcctttagaaataataa

SEQ ID NO: 420596 - DNA, 201 bp, Homo sapiens
tgggaggccaaggtgggtgtatcaactaaggtcaggagttcgagaccagcctggccaacatggtgaaaccctgtgtctactaaaaatacaaaaattagccrggcatggtggtgcatgtctgtagtcccacctattcaggaggctgaggcaggagaattgcttgaacccagaggcggaggttgcagtgagcagagatcgtgc

SEQ ID NO: 420597 - DNA, 201 bp, Homo sapiens
ttattttttgagacagcgtcttgctctattgcccaggctggagtgcagtggcacaatctcagctcactgcaacctctgcctcctaggctcaaggcattatyctcccacctcagtctctcacgtagctgggactacaggcacctgccaccacaccgggctaatttttgtatttttagtacagaggaggtttcaccatgttgg

SEQ ID NO: 420598 - DNA, 201 bp, Homo sapiens
ttgctctattgcccaggctggagtgcagtggcacaatctcagctcactgcaacctctgcctcctaggctcaaggcattattctcccacctcagtctctcamgtagctgggactacaggcacctgccaccacaccgggctaatttttgtatttttagtacagaggaggtttcaccatgttggccaggctggtctagaactcc

SEQ ID NO: 420599 - DNA, 201 bp, Homo sapiens
cggcgcccgtgatccaatcacctcccatcaagcccctccaccaacaatggggattacaattccacatgagatttgggcacagacacagacccaaaccatayccaatggaaagtgacaaatacaccactgcagtaacttactgtgcagttactatgtcgaaaacctgggtgaacgcctcccaccatctgaggttctcttcag

SEQ ID NO: 420600 - DNA, 201 bp, Homo sapiens
cttgggatgctaaagtgggaggatcatttgagtccaggagttcgaggtagccatgagccatgatcatgccactgcacttcagcctgggcaacatatcaagwccatgtttcttaaaaaaacaaacaaacaggctgggcgccatggctcacgcctgtaatcccagcactttgggaggccaaggggccgggcgggggaggcgtg

SEQ ID NO: 420601 - DNA, 201 bp, Homo sapiens
ctacttgggagcctgaggcaggagaatcacttgaacccaggaggtggaggttgcagtgagccgagattgcaccattgcactccagcctgggcaacaagaasgaaactccatctcaaaaaaaaaaaaaaaaaaaaattaaaaagggggccaggtacggtggctcatgcctgtaatcccagcactttgggaggccaaggcggg

SEQ ID NO: 420602 - DNA, 201 bp, Homo sapiens
agggtggacctcacatttcaggaagacctgaaggaggtgagagaaagagacccatttttgactggaggaagaacagcgcagtcagagggagcaggaagtgygaaggccctgaggtgggaacaccactggcatgtgcaggggtgagacagaggagtgtatgactgggagagggcaggtaacaggaaggagagtaggaaatga

SEQ ID NO: 420603 - DNA, 201 bp, Homo sapiens
gatgcactcacctagcattaagggagagggtgaagcactggaaggcttatggtctttgctccaaaacagatccaaataaagttgcatttcaaatcaatgtrgaaaatatatttttaataaatgcctatgattctagcactttgggaggccaaggtgggaggatcattttagcccatcaacccgtcacctacattaggtatt

SEQ ID NO: 420604 - DNA, 201 bp, Homo sapiens
cccatttttgactggaggaagaacagcgcagtcagagggagcaggaagtgcgaaggccctgaggtgggaacaccactggcatgtgcaggggtgagacagargagtgtatgactgggagagggcaggtaacaggaaggagagtaggaaatgaggggccagacctcgactgtgactcaagagagtgcagcacaggagtggcag

SEQ ID NO: 420605 - DNA, 201 bp, Homo sapiens
atgaaatgaaagctccaaaaaaatgcttccaaaaggaaggagtggtcagtcatgccaaatgtcactgcaagactcaataaagaggctagcagatggaccawgggacttggcagggtggaggtcttcattgtgaagacagtttcagctgaaagcctgactgaagaagactcaggagagaaggaaatgtggaaaagcaaacag

SEQ ID NO: 420606 - DNA, 201 bp, Homo sapiens
gctcccatggccaggcgaggagcctggcaaccccagccccagcgggcaggagcgctggtcccaccatgccctggaggaagggaagccccagaaagctgaaygccctgtgcccgatttataaatagctcttcagaggcatgggctctcacgggcggcccctgccaactcccttctggcggcctttaatttttccatgccagg

SEQ ID NO: 420607 - DNA, 201 bp, Homo sapiens
catgagtttcatggggcttcagaaggggtttggattcactctagtggtaatctgaggcctttagattaacatttcagaatcactggccactctacttttcmgagaaatgattggaggggataaaaggaaaagcagtaggaccagttaggagactttcggagtagccccactaagagaggacaacggtatagagtaggactc

SEQ ID NO: 420608 - DNA, 201 bp, Homo sapiens
aatgtcccaagccagcttaggcatgatctgaaaagtccctgcaagtttctcttgctttgtatgttactcagtgataacagtaattcaattccattccagamcaacaatatacattgggtttccattgcatcttcaggatcctgttccgggatattcctgaagactgccggtatccagtattttacccacttgatcctggtg

SEQ ID NO: 420609 - DNA, 201 bp, Homo sapiens
gagtggcagaaaatgtagaaacgtacaaaatgccatctgtgagtgatatggtttggatctgtgttccccgcccaaatctcatgttaaattgtaatccccaktgttggaggaggggcctgatgggaggtgattagatcatggggatggatctctcccttggtgctgctgttctcatgatagtgagatgtggttgtttacgag

SEQ ID NO: 420610 - DNA, 201 bp, Homo sapiens
atgatctgaaaagtccctgcaagtttctcttgctttgtatgttactcagtgataacagtaattcaattccattccagaacaacaatatacattgggtttcyattgcatcttcaggatcctgttccgggatattcctgaagactgccggtatccagtattttacccacttgatcctggtgcatgtacaggaagacatctcag

SEQ ID NO: 420611 - DNA, 201 bp, Homo sapiens
ggaagacatctcagaccacacgctctgatttgagacggtaggccctatagttagcataattatagagtgagcaagataactataacttaaccatgccctgmatgagtatgcagtcagtgcctacagaaggccacgggaacatgtgtaactacgataccagcaggaggcaaggagtgacagggtctggagctaacaaattac

SEQ ID NO: 420612 - DNA, 201 bp, Homo sapiens
agagaccgaataaaataaacaaaaacaaaagaccctagaggaaatggataatgcagacaatagaaaagagcttcaaaactttctaaactatctctcagagrctttatagtttattcattaaaaaagaaaagaaatacaagctgctcaccaaaaagagtaggtaacaaaataattcttgaatttttaaaatacaattgacaa

SEQ ID NO: 420613 - DNA, 201 bp, Homo sapiens
ttgggaggaggaatactcttaggccaggtgcagtggctcatgcctatagccccaactatttgggaggctaaggtgggaggattgcttgagcccaggagttrgaggctacagtgagctgagattgcaccactgcattcctgcctgggcgacagagtgacaccctgtctcaaaaaaagggatattcttgatggagggggaaag

SEQ ID NO: 420614 - DNA, 201 bp, Homo sapiens
atgtagaaaatatatttttaataaatgcctatgattctagcactttgggaggccaaggtgggaggatcattttagcccatcaacccgtcacctacattagstatttctcctaatgctatccctcccctagccccccaccccccaacaggccccggtgtgtgatgttcccctccctgtaatgtgatttttaacaaagagaat

SEQ ID NO: 420615 - DNA, 201 bp, Homo sapiens
tactttcctttcttttgagacagaatctcactctgttgccaggctagagtgcagtggcacggtctcagctcactgcaacctctgcctcccaggttcaggcrattctcctgagtcagcctcccaggcagctgggattacaggtgtgcaccaccacgcccggctaatttttgtatttttaatagagacggggtttcaccatgt

SEQ ID NO: 420616 - DNA, 201 bp, Homo sapiens
gcttgcaatagaagactaggttgggaaaatttcccagagagaagggtaaacagaaaaagagatagaaaatagacaagaaaaaaataagaaaattagagaaytgtccaggagtttcaaaaagagaaaataaagaaaccatcagcaaaattattcaagaaaaatctctcagaattgaaagacataagtttctagattaaaagg

SEQ ID NO: 420617 - DNA, 201 bp, Homo sapiens
gggagggagagcattaggagatatacctaatgctaaatgacgagttaatgggtgcagcacaccaacatggcacatgtatacatatgtaactaacctgcacrttgtgcacatgtaccctaaaacttagtataattaaaaaaaaaaagaaactgttggatatgtaaaccacaaatacatacaaggatacttattgcagcactg

SEQ ID NO: 420618 - DNA, 201 bp, Homo sapiens; identical to SEQ ID NO: 184737

SEQ ID NO: 420619 - DNA, 201 bp, Homo sapiens
gagtgcagtggcgtgatctcagctcactgtaaactccacctcccgggttcatgccattctcctgcctcagcatccagagtagctgggactacaggcgcccrccaccacgcccggctaatttttggtatttttagtagagacgaggtttcaccgtgttagccaggatggtctcgatctcctgacctcatgatccgcccgact

SEQ ID NO: 420620 - DNA, 201 bp, Homo sapiens
tcagtggctcacacctgtaatcccagcactttgggatgctgaggtgggctaatcacctgaggtggggagttcaagaccagcctgaccaacatagagaaacyctgtctctactaaaaaaaaagaaaaaaaaaattacaaaactagctggacgtagtgacgcatgcctgtaatcccagctacttgggagcctgaggcaggaga

SEQ ID NO: 420621 - DNA, 201 bp, Homo sapiens
aaatgaccaagttgggtttattccaggaatgaaaagttagatcattagaacataaattaatgtaatttagcttattcgttgaagaaaaattatgttgtgattttttttttttttttgagacggagtctcgttctgttgcccaggctggagtgcagtggtgcaatcttggctcactgcaacctccgtctcctgggttcacac

SEQ ID NO: 420622 - DNA, 201 bp, Homo sapiens
tacaagcaaagataaggaaaataatacagattcaaaaaatatctgtcattatatgcaggtattatattctacacagaaaacttccagttatctatactgtrttagtccattctcaagctgctaacaaagacatacccaagactgggtaatttataaagaggtttaattgactcacagttcagcatggctagggaggcctca

SEQ ID NO: 420623 - DNA, 201 bp, Homo sapiens
cacactctctctctgctagtttggatggcaacacccatggcaagcttggagcacaccatggagacaacagaacctccaccaacgtcatccttggttgattktgtgccggggagcacaccaccgcctcccacccagccccacttcccaagggacttttcctgagtgaggaagttacaggatgctaggctgctgagatgtcag

SEQ ID NO: 420624 - DNA, 201 bp, Homo sapiens
ttcccaagggacttttcctgagtgaggaagttacaggatgctaggctgctgagatgtcaggattcacttgcatgaactctgaagtcagcatttctccaacyaaaataccagggttggggtcgcatgttcttccttaggccgtgctttgggaagggaagcccgggggcagcgtggaagctggtgtggacgcaggaagaaagc

SEQ ID NO: 420625 - DNA, 201 bp, Homo sapiens
gattcacttgcatgaactctgaagtcagcatttctccaaccaaaataccagggttggggtcgcatgttcttccttaggccgtgctttgggaagggaagccygggggcagcgtggaagctggtgtggacgcaggaagaaagccacagcaggaccctgttgaaagactactgaagggcagataagagatgagaagtgaggaaa

SEQ ID NO: 420626 - DNA, 201 bp, Homo sapiens
tgcttgagcccaggagttagaggctacagtgagctgagattgcaccactgcattcctgcctgggcgacagagtgacaccctgtctcaaaaaaagggatatycttgatggagggggaaagtgaatgtacgtggtatgtttaaagagcagttaagttatgctctcttgtgccttggagttgggtcaaactccaagaagatgga

SEQ ID NO: 420627 - DNA, 201 bp, Homo sapiens
cagtgataacagtaattcaattccattccagaacaacaatatacattgggtttccattgcatcttcaggatcctgttccgggatattcctgaagactgccrgtatccagtattttacccacttgatcctggtgcatgtacaggaagacatctcagaccacacgctctgatttgagacggtaggccctatagttagcataat

SEQ ID NO: 420628 - DNA, 201 bp, Homo sapiens
agtaatgaccaaagataatttaaggtgttttgatatttcttaatcatcagatggcactgtgccattttctctgggtcatggaccgattccttttctcattsttcctgctcatgacatagctttccaacccttttcgttctccttatattcttcacaagatttaatgcaacccaagctctacctgaattagtcaggactctt

SEQ ID NO: 420629 - DNA, 201 bp, Homo sapiens
agaggaagagctttcctcccagctccaatttcaaaaccgcaggaaaacacaagttagctcagcttggctcactttgagtgtacccctcagaacagtgaccmtggtcacatcagtgaaattatttacccatcctgggtcacatacccacttctggtgtcaaagaaatagggtatgctgccagaaaaaaggaagagagattga

SEQ ID NO: 420630 - DNA, 201 bp, Homo sapiens
aattgactcacagttcagcatggctagggaggcctcaggaaacttataatcatggtgaaaagggaagccaacacgtccttcttcacatggcagcggggagragaaggaacgccgagcaaagggaaaagtcctttataaaaccatctgatctcatgagaacttatgcactatcacaagagcaggatggggggaaccaccccc

SEQ ID NO: 420631 - DNA, 201 bp, Homo sapiens
ctcagagtataatcatatttggagagagagcctttatataaattgaaacaaggtcattagaatggactctgatccaatctgactggtctccttataggtargggaagagacagacacacacagagggaagaccacgtgagaacacaggggaaagatgccatctaagccaaggagagaggtctcagaagaaaccaaccctgc

SEQ ID NO: 420632 - DNA, 201 bp, Homo sapiens
atataaattgaaacaaggtcattagaatggactctgatccaatctgactggtctccttataggtaggggaagagacagacacacacagagggaagaccacrtgagaacacaggggaaagatgccatctaagccaaggagagaggtctcagaagaaaccaaccctgcctacaccttgatcttgaacttctagtctccagaat

SEQ ID NO: 420633 - DNA, 201 bp, Homo sapiens
aggagagaggtctcagaagaaaccaaccctgcctacaccttgatcttgaacttctagtctccagaattatgaagaaataaattaagccccccagtctgtgrtatttgttttggcagccctaactaactgatactagttagtgaggaagtgaactttcagctgacaggccttgtcagcactcccaatctctccacccctagc

SEQ ID NO: 420634 - DNA, 201 bp, Homo sapiens
cttgaacttctagtctccagaattatgaagaaataaattaagccccccagtctgtggtatttgttttggcagccctaactaactgatactagttagtgagraagtgaactttcagctgacaggccttgtcagcactcccaatctctccacccctagccttcttctctcttcccacagacctggaaaagtaaggctctgtct

SEQ ID NO: 420635 - DNA, 201 bp, Homo sapiens
atcagtttggtaagatttccctagagggtcactagtagctaccagcacagaagtttctggatgttgaaggcctggaaattaaatctttatacttgtcccartgatgaggtagccagatgagagcagagaccaccaacgctggccacgcaaggttgccctcgggcaggcgagactcttccctgggctgttaatttcacagag

SEQ ID NO: 420636 - DNA, 201 bp, Homo sapiens
ccagcactttgggatgctgaggtgggctaatcacctgaggtggggagttcaagaccagcctgaccaacatagagaaaccctgtctctactaaaaaaaaagaaaaaaaaaattacaaaactagctggacgtagtgacgcatgcctgtaatcccagctacttgggagcctgaggcaggagaatcacttgaacccaggaggtgg

SEQ ID NO: 420637 - DNA, 201 bp, Homo sapiens
gtccatggcagctggaagccagagcaagggggagatagacagacatgcagagacacatgggaagtaagcgggacacagacagccaggtggaaaccatgtcrccttgtgtggcctagctttcagaagtcatgcaccatcactctgccacacgctgttatgcaaagggaggcactagcactggcccatattcaaagggatgag

SEQ ID NO: 420638 - DNA, 201 bp, Homo sapiens
cttgaggttgagagtttgagaccagcctgggcaacatagcaagacctcacctctacaagaaatttaaaaattatgtgggcatggtgacgcatggctatagycccagctactcaggagactgaggcgagaggatcacttaagcctaggagttagaggctacagtgaactataatcataccactgcactccagccaggggggc

SEQ ID NO: 420639 - DNA, 201 bp, Homo sapiens
agaggctacagtgagctgagattgcaccactgcattcctgcctgggcgacagagtgacaccctgtctcaaaaaaagggatattcttgatggagggggaaartgaatgtacgtggtatgtttaaagagcagttaagttatgctctcttgtgccttggagttgggtcaaactccaagaagatggaactgcaaaagcagactgg

SEQ ID NO: 420640 - DNA, 201 bp, Homo sapiens
ctttagcagctctccaaccagagaggaagagctttcctcccagctccaatttcaaaaccgcaggaaaacacaagttagctcagcttggctcactttgagtktacccctcagaacagtgaccatggtcacatcagtgaaattatttacccatcctgggtcacatacccacttctggtgtcaaagaaatagggtatgctgcca

SEQ ID NO: 420641 - DNA, 201 bp, Homo sapiens
tgttccgggatattcctgaagactgccggtatccagtattttacccacttgatcctggtgcatgtacaggaagacatctcagaccacacgctctgatttgrgacggtaggccctatagttagcataattatagagtgagcaagataactataacttaaccatgccctgaatgagtatgcagtcagtgcctacagaaggcca

SEQ ID NO: 420642 - DNA, 201 bp, Homo sapiens
atctttctttttctttttaaggaaagcattaataagcaatggagagggcacatgagtcaggctcaaaacaaaaccacaggggacaatgaagagctgcatcrgagcaggccctgtggacaggcgtgggaagtgaggtctaatgcaaaggggagagaggccttacacaacttctccacttcacagagcggcagactgagtcct

SEQ ID NO: 420643 - DNA, 201 bp, Homo sapiens
tccgggatattcctgaagactgccggtatccagtattttacccacttgatcctggtgcatgtacaggaagacatctcagaccacacgctctgatttgagayggtaggccctatagttagcataattatagagtgagcaagataactataacttaaccatgccctgaatgagtatgcagtcagtgcctacagaaggccacgg

SEQ ID NO: 420644 - DNA, 201 bp, Homo sapiens
tttttctttttaaggaaagcattaataagcaatggagagggcacatgagtcaggctcaaaacaaaaccacaggggacaatgaagagctgcatcagagcagrccctgtggacaggcgtgggaagtgaggtctaatgcaaaggggagagaggccttacacaacttctccacttcacagagcggcagactgagtcctgggatgt

SEQ ID NO: 420645 - DNA, 201 bp, Homo sapiens
cagctgagggcagcccgaagggcaccagctccaaggtgcaggccgagctcctcggggaggccagcgtggctggaatgtagggtggcagcaaaaagagagcrctccacacagagaaagggacttgcaggatttctttcaaggggctgtcaatctccagcataggccctttcccaaaggtaacctgggaacttagaagatgtg

SEQ ID NO: 420646 - DNA, 201 bp, Homo sapiens
acaggggacaatgaagagctgcatcagagcaggccctgtggacaggcgtgggaagtgaggtctaatgcaaaggggagagaggccttacacaacttctccayttcacagagcggcagactgagtcctgggatgtcaggcgacttgggttagctcacatgaaaaagacccagatgactgcattttcttgctaccttatatttt

SEQ ID NO: 420647 - DNA, 201 bp, Homo sapiens
ggcagcccgaagggcaccagctccaaggtgcaggccgagctcctcggggaggccagcgtggctggaatgtagggtggcagcaaaaagagagcactccacayagagaaagggacttgcaggatttctttcaaggggctgtcaatctccagcataggccctttcccaaaggtaacctgggaacttagaagatgtgcactgaga

SEQ ID NO: 420648 - DNA, 201 bp, Homo sapiens
ctacaggtggcatattaccctttccaagtgagccaatggagtgtgacataaaaggcaggactttggaatccaaaggtctgccttgggtcttggttccatcmctctctggctgcatgatcttgggtgaatctcattacttcgtgaagtctccagcattttgcaaaggacacgataactgtcctcactctgagtggaagaggc

SEQ ID NO: 420649 - DNA, 201 bp, Homo sapiens
cactgagacattttaagaaacccaagagtaaaagggggtgcttttatggacatgtgtggctgtaggaggaggcctgggcttagagcaagagcagctacagrcgataacatgggcaaggaatcctcagggttctgctcctgccctcgagcctctgcttcacgtgtcctcaggaataaaatcagaccttgcagaaactcaatc

SEQ ID NO: 420650 - DNA, 201 bp, Homo sapiens
aagcaccttagaaatgttcagtgtcattatttacaaactatgatgtactatgcaaaggttgcccatgaaattttacaatattggtgtctccccactgtttyatattgtactggacaggtctcctctggttgtacatgagagaaatctaactccgaactccatgatagaaaggggacactttggggcctatgctattgcaaa

SEQ ID NO: 420651 - DNA, 201 bp, Homo sapiens
ttagaaatgttcagtgtcattatttacaaactatgatgtactatgcaaaggttgcccatgaaattttacaatattggtgtctccccactgtttcatattgyactggacaggtctcctctggttgtacatgagagaaatctaactccgaactccatgatagaaaggggacactttggggcctatgctattgcaaagtccaga

SEQ ID NO: 420652 - DNA, 201 bp, Homo sapiens
gacgccctcacactgcatgtagggaaatctagcctgaggaatcacatggtcattgaggtgggaggagagacctaggaagagaggagggaggagatagagakagaaccacaagagtggccgtgacagccaagcagctgcccagaaaccagagaagagatgctacactcccagagactctccttctagatcccgtggcaagtc

SEQ ID NO: 420653 - DNA, 201 bp, Homo sapiens
acaaattgaatttttaaaatccagatatgtgctatttataagagacactcaagcataaggacatacaacagttgaaagcaaaaggatggaaaatgacatgrtaggcaaatatgaacaaaaagaaagctgtgtagcatattagtatcatatgagccaggctcctagacaggaaacattattagggatccagaggatcactac

SEQ ID NO: 420654 - DNA, 201 bp, Homo sapiens
accccagcctcatgcatggtttggttatgggctattaagggctgccttgggttccagaaggcacacttcatttgctggtgaattaattcttagatgtactrtgtataacacatttaaggctctttccaagcaaagacattgtgtaaccttcgattacttttgcctgtgcaaaattgtgtatgtccagagttgagtcactct

SEQ ID NO: 420655 - DNA, 201 bp, Homo sapiens
taaccttcgattacttttgcctgtgcaaaattgtgtatgtccagagttgagtcactctaagcacctccaagtgactgcactggctagtcctgacttaggarctgtggcaagaggtggtgtgccaattttcagtccaattctcactcctccactgcctgggggcaaggttcttggcagcctgagccccagtttcttgatctg

SEQ ID NO: 420656 - DNA, 201 bp, Homo sapiens
agtgggtagatgatggtgccatttactgagacagaaaagacaggagaagcagccatgaggagacagagaaacaagagttctgtgttggccacacaagcctragatgcctgatacacctctaagtgatgtcaagcaggcagatggatttaggactctggagatccagggggaaattaggctatcagaagtcttcaatagaaa

SEQ ID NO: 420657 - DNA, 201 bp, Homo sapiens
agatggatttaggactctggagatccagggggaaattaggctatcagaagtcttcaatagaaagatggtcatgaaagctgagagtgcaggtaggatcacayagggagaaaatggggaaaagagaaggggatctagagttgggttttggaatattccaacattgagaggacagacattgaggggggatactgaccaggagca

SEQ ID NO: 420658 - DNA, 201 bp, Homo sapiens
tctactaaaaagtacaaaaattagccaggcatggtggtgagcacctgtagtcccagctactcaggaggttgaggcaggagaatcacttgaacctgggaggsggatgttgcagtgagccaagatcatgccaccgtactccagactgggagacagagcgagactgtcaaaaaaaaaagagagacaacaactttaaacataaat

SEQ ID NO: 420659 - DNA, 201 bp, Homo sapiens
gacaaaaacttcccaaagaagagaaatgcccagcatggtccccatctccaaagggaaaaaaatcaaaagatggttcaattttggccaccaattgtggtcaytttggaatctatgacccttgtcagaagaatctgccatgtggcctctagtcaatccaacagctgcaaggaccccacaaagtgatcccaagccagcctcctc

SEQ ID NO: 420660 - DNA, 201 bp, Homo sapiens
gtggtgagcacctgtagtcccagctactcaggaggttgaggcaggagaatcacttgaacctgggagggggatgttgcagtgagccaagatcatgccaccgyactccagactgggagacagagcgagactgtcaaaaaaaaaagagagacaacaactttaaacataaatgcacaaaataaaatagcctcaagtatattaggt

SEQ ID NO: 420661 - DNA, 201 bp, Homo sapiens
cacctccaagtgactgcactggctagtcctgacttaggagctgtggcaagaggtggtgtgccaattttcagtccaattctcactcctccactgcctggggrcaaggttcttggcagcctgagccccagtttcttgatctgtgatatggggatgatcatgtcctccacctggtgttgttatgagaattcgagcatgtttatg

SEQ ID NO: 420662 - DNA, 201 bp, Homo sapiens
gaatgactttgcatatccaccagcacttcagaaaaagctcggaaaagagctctcacaaattgtgttgtttctgcccattataaaaagaggagcaaaatctstcattcattgacacatagggagttggctagttttcagcctctgtagtcacctctccgaaagtgacggatgcggagggggaggtggggggggggggttgga

SEQ ID NO: 420663 - DNA, 201 bp, Homo sapiens
ccttcacagcctggtccggcaggctagtccaggtagcccgtaggttacctcccatgcatgtcataagaaaatacacacagcacaacgtttgtgcagaaaaygacctcaactgagtgggcacgtgggaagggggaagacaggaatggaggaggcactggttcactgtactcactgggactggtgaggcagagtacaaggcag

SEQ ID NO: 420664 - DNA, 201 bp, Homo sapiens
attaaattagaagtttaaagtatacattttaaatgactacatatttagcagtactgctaaacaacacatgggttaaaggagaaatatcataataaaaaatktaatatatctaaaactgaatgacaataaaaatagcaaatatcaaaattgctcggatgcagccaacgtgtactctgagggaagttaatagataattacgta

SEQ ID NO: 420665 - DNA, 201 bp, Homo sapiens
cactggctagtcctgacttaggagctgtggcaagaggtggtgtgccaattttcagtccaattctcactcctccactgcctgggggcaaggttcttggcagyctgagccccagtttcttgatctgtgatatggggatgatcatgtcctccacctggtgttgttatgagaattcgagcatgtttatgaagtgtctcctgccta

SEQ ID NO: 420666 - DNA, 201 bp, Homo sapiens
tgtttctgcccattataaaaagaggagcaaaatctgtcattcattgacacatagggagttggctagttttcagcctctgtagtcacctctccgaaagtgasggatgcggagggggaggtggggggggggggttggaggaggagcctgaggctcctctgcttcccctctgcatctccttggagttcgcatttgtcccaaacc

SEQ ID NO: 420667 - DNA, 201 bp, Homo sapiens
ttcgccactaaaactaacaatacagataaacttttcaagatttgtcaagacaagaagatagaagtcacaataagtaatattatgaatgaaatggggggtgwtatacataaagtatccataatacataataagagaatatgaccaaaaacaatatgccaaaaattttgaaaacttagataaatatctacaaaacataattta

SEQ ID NO: 420668 - DNA, 201 bp, Homo sapiens
aagtatttcctcgcaccccaatctcttcctgcagagatttggtaacttcaacttgtgccaaagaacataaaacattctctctgcccacccttcttgcattygtacctgtgctccagcttagagttgttatattaaaatgtaccagtgtgcagggcacagcatcaatcttgggagctctggagccgaagcgatcacgctctt

SEQ ID NO: 420669 - DNA, 201 bp, Homo sapiens
gaggacagacattgaggggggatactgaccaggagcagctggtgaggtagcaggacaaccagaagcatgggatgccatgaaatggcatggaatgggatggratggcatggaatgggatgggatggcatggaatgggatgggatggcatggaatgggatgggatgagatgaaatagaatggaatggaatggaatgaaatgaa

SEQ ID NO: 420670 - DNA, 201 bp, Homo sapiens
aagtaatattatgaatgaaatggggggtgttatacataaagtatccataatacataataagagaatatgaccaaaaacaatatgccaaaaattttgaaaasttagataaatatctacaaaacataatttattaaaactgacttaagcaaaaaaccaaaaggtaaaacttgaataatgctataattattaaagaaaaattat

SEQ ID NO: 420671 - DNA, 201 bp, Homo sapiens
agtatttcctcgcaccccaatctcttcctgcagagatttggtaacttcaacttgtgccaaagaacataaaacattctctctgcccacccttcttgcatttrtacctgtgctccagcttagagttgttatattaaaatgtaccagtgtgcagggcacagcatcaatcttgggagctctggagccgaagcgatcacgctcttt

SEQ ID NO: 420672 - DNA, 201 bp, Homo sapiens
tctctctgcccacccttcttgcatttgtacctgtgctccagcttagagttgttatattaaaatgtaccagtgtgcagggcacagcatcaatcttgggagckctggagccgaagcgatcacgctctttgatggccaagacaaagttaggtgataggaaaataggatgagggtataagacctatattttttggcagtgaattt

SEQ ID NO: 420673 - DNA, 201 bp, Homo sapiens
tggtgtatatgtaccacattgtcttaatccagtctatcattgttggacatttgggttggttccaagtctttgctattgtgaatagtgccgcaataaacatrcgtgtgcatgtgtctttatagcagcatgattccttaattttttttttttttttagagacagggtcttgctatgttgcccaggctggtctcaaattcctgg

SEQ ID NO: 420674 - DNA, 201 bp, Homo sapiens
ggggccagtgcctataggttcaacaatgcactgcactgtctgtcccaacaatgcactataggaacaggcatctggcccttcacactagccctagacaaccrtcagcttctccatgttctccaagccctgatcaactgtccccagggcattagaaatatcccagcagccaaaataagggccctcctgaatagggctggcagg

SEQ ID NO: 420675 - DNA, 201 bp, Homo sapiens
tctatcattgttggacatttgggttggttccaagtctttgctattgtgaatagtgccgcaataaacatgcgtgtgcatgtgtctttatagcagcatgattycttaattttttttttttttttagagacagggtcttgctatgttgcccaggctggtctcaaattcctgggctcaagccatcctcctgcctcaaaagtgctg

SEQ ID NO: 420676 - DNA, 201 bp, Homo sapiens
cagtgcctataggttcaacaatgcactgcactgtctgtcccaacaatgcactataggaacaggcatctggcccttcacactagccctagacaaccgtcagyttctccatgttctccaagccctgatcaactgtccccagggcattagaaatatcccagcagccaaaataagggccctcctgaatagggctggcaggaggcc

SEQ ID NO: 420677 - DNA, 201 bp, Homo sapiens
actgcactgtctgtcccaacaatgcactataggaacaggcatctggcccttcacactagccctagacaaccgtcagcttctccatgttctccaagccctgrtcaactgtccccagggcattagaaatatcccagcagccaaaataagggccctcctgaatagggctggcaggaggcctggggctacccatgtgtacccttt

SEQ ID NO: 420678 - DNA, 201 bp, Homo sapiens
ttttttagagacagggtcttgctatgttgcccaggctggtctcaaattcctgggctcaagccatcctcctgcctcaaaagtgctggcattacaggcatgakccacagtgctggggcaaaacccatattttaatattgcttaccaagacagacttatagcacctcagtgaggctggcagtgcagtgatgattaggtgaactt

SEQ ID NO: 420679 - DNA, 201 bp, Homo sapiens
ataggaacaggcatctggcccttcacactagccctagacaaccgtcagcttctccatgttctccaagccctgatcaactgtccccagggcattagaaataycccagcagccaaaataagggccctcctgaatagggctggcaggaggcctggggctacccatgtgtaccctttggtcatgttcaaattgttgcttgaggta

SEQ ID NO: 420680 - DNA, 201 bp, Homo sapiens
actaaataagtgctcctttgttctctgaagcccagggtctagcttccacacactcttggaacatttcttggttacagtgatattctcaaaaagagggcatrcctatctactccatatctggcctttgcacagtgtcaatagcagaagacaaaaacttcccaaagaagagaaatgcccagcatggtccccatctccaaaggg

SEQ ID NO: 420681 - DNA, 201 bp, Homo sapiens
atggagaagacttaaattgtgttctgagagacaggcgggtaaaagacggtgaaatctttgtattccagcaaatacttactacccacattttttcttcaagmaacatgctagcattttacatatttaccaatttacatattttacaaatacggaaatgaacatgaaaacactcaggtgaaagttacaaggaggtgcttctgg

SEQ ID NO: 420682 - DNA, 201 bp, Homo sapiens
gaaaaataagaaaattcagaagctctaaactaagtgtattcataaagaaaattgattccctgcaagaaactttaacacttaaaagtggataattttagttrtaagatggatgcataaaataataaaagtaagccaggcatgtatctgtagtcccagctactcaggaggcagagatgggaagatcgcttgagcccaggagtt

SEQ ID NO: 420683 - DNA, 201 bp, Homo sapiens
gacaataaagtattacctttaagttttgacgaaataacataaaaggttatagcttcctgagctatcaatcaagaataaaaataaaacctagatattaatgkataagcaaagactctgatatttatcaaatagtgatcttctctgagagcactactcaagtatgcaccccagccaaacaacaaaggagtgcaagaaagtgac

SEQ ID NO: 420684 - DNA, 201 bp, Homo sapiens
cattataaaaagaggagcaaaatctgtcattcattgacacatagggagttggctagttttcagcctctgtagtcacctctccgaaagtgacggatgcggasggggaggtggggggggggggttggaggaggagcctgaggctcctctgcttcccctctgcatctccttggagttcgcatttgtcccaaaccatgggtctaa

SEQ ID NO: 420685 - DNA, 201 bp, Homo sapiens
tctcatttgtttctttctgcagcttgttttcttaagccacttatttcagggttgcttttatgaacagcctgagttaacctcaatagctatgatttcactgkcaataaaacagctttacttgatgctctctctcaaccctctgaacatatttttgttcaaaataatgtcctcagcaaatggggaaaaaagcaaactccactt

SEQ ID NO: 420686 - DNA, 201 bp, Homo sapiens
tagctcttcagaggcatgggctctcacgggcggcccctgccaactcccttctggcggcctttaatttttccatgccaggcccaccttgtacccgaccccgmcccacaaaacaaaggtccaccctgtgtgggatcctcagcccagcagcccccctcccaccccaggggcacgccccacctttactcaggccagagatggttg

SEQ ID NO: 420687 - DNA, 201 bp, Homo sapiens
atgacccttgtcagaagaatctgccatgtggcctctagtcaatccaacagctgcaaggaccccacaaagtgatcccaagccagcctcctcctgtggggtaygtgtgaggctggcttccatcctccccaccccacaaccaagggcatcacaacaattctcccaggaaggaagatgcaaattccaatgtgtctcttccccata

SEQ ID NO: 420688 - DNA, 201 bp, Homo sapiens
gcggcccctgccaactcccttctggcggcctttaatttttccatgccaggcccaccttgtacccgaccccgccccacaaaacaaaggtccaccctgtgtgsgatcctcagcccagcagcccccctcccaccccaggggcacgccccacctttactcaggccagagatggttgaaaagcagcaagacctcgggagggcacaa

SEQ ID NO: 420689 - DNA, 201 bp, Homo sapiens
acaagagtcaactgaaagaggccccagggtgcagaattccaggaggcatcattctcaggatggagtgagtgcagagtcagcactgagcatgagaaccatcytttgcaggccatgggtcacctccctccagtccacccagaggaccaaagtctgcctacccttcaaaggctacccaagacctgcgctccatcgagccttccc

SEQ ID NO: 420690 - DNA, 201 bp, Homo sapiens
tttgccccccatcaccatggccatcagctatcaggagagaaccagcagcagccctggctcccaccaaccacgacacatgactccgtggccccttcccaacrtacctgggctctgagctttgcgtgcgtcccccgcctctctcactgcctatttatgtgcaaagtgagctacctcttcccaggagtcctgagccagctccca

SEQ ID NO: 420691 - DNA, 201 bp, Homo sapiens
ttcacacccctttcccatctgcagcaccggcagtacagtaactgaggggctctgtgtgtggcttctttgcatctctggcaagctgccaacagtgtccccayggccacagatgctgaatccctctgtactaatggcttgaattacaaagagaaagatgctatggacacaccatgataaaagagtgttgcagagtagaagtta

SEQ ID NO: 420692 - DNA, 201 bp, Homo sapiens
catgtaatgttaggcagggctgataaagatgtcagaatcaagaacaaaaaattccagtacattggaagcacttatctcatgaagtttcatgggaatgactytgcatatccaccagcacttcagaaaaagctcggaaaagagctctcacaaattgtgttgtttctgcccattataaaaagaggagcaaaatctgtcattcat

SEQ ID NO: 420693 - DNA, 201 bp, Homo sapiens
aaattgtgttgtttctgcccattataaaaagaggagcaaaatctgtcattcattgacacatagggagttggctagttttcagcctctgtagtcacctctcygaaagtgacggatgcggagggggaggtggggggggggggttggaggaggagcctgaggctcctctgcttcccctctgcatctccttggagttcgcatttg

SEQ ID NO: 420694 - DNA, 201 bp, Homo sapiens
tcaatgacagtcatgccatcgtgtctacatctgtgggctcaggacactacgccaacattctttcatttgtagacaaggatctgctggcaactggctgctcrgtcctgctcaatcacaaggtgcatgccatgagaggggtgctgatggatgacgtggatcccctggtcacagtgatgaaggtggaaaaggtcccccaggaga

SEQ ID NO: 420695 - DNA, 201 bp, Homo sapiens
tgatgcttcccagaggccagatgccaaggtcttcagggctcactcttgcagtggtcaccccaagtgaccaagtctccactgtggaggatttcctcttgcamctgctccatcacttctgaaaggtgctaatgattgggctgttgtgatgggatgtgctgaggctcagtccccaccacataggtcatgccttcactataaaga

SEQ ID NO: 420696 - DNA, 201 bp, Homo sapiens; identical to SEQ ID NO: 184736

SEQ ID NO: 420697 - DNA, 201 bp, Homo sapiens
tgggagaggaaggaaaggaggagatatttttcatcatccactccctctttctattcaacttttatatcactgttaattgaaacagatttctcatagctcaycagtgacctcctcatccagaaccaaggatcatctttcttattagcggtgccatcctgtagcatttgaccactgcctccttttttggaggctgtcttccct

SEQ ID NO: 420698 - DNA, 201 bp, Homo sapiens
gtcaactctggacacatgacctacgagttagccctgctctgcaaggagcagttttttgtaataaaagataaaaacaaacaagcaaaaaaatgattacttaygggagaggggcagaatcgaaaagaagagattagagacaaccttctctaagtatatgttttcatatagttttaatttttaaaccatgcaaagatttttaca

SEQ ID NO: 420699 - DNA, 201 bp, Homo sapiens
cttattagcggtgccatcctgtagcatttgaccactgcctccttttttggaggctgtcttccctttcgccacccccagtccttcttgtctctgaacctccsttctctctccctctttctcttccacaccaccccccgaccccgccacaccacacacactcctctcttccacctcaaatgtaagctgtcccaaggttctggc

SEQ ID NO: 420700 - DNA, 201 bp, Homo sapiens
gacggatgcggagggggaggtggggggggggggttggaggaggagcctgaggctcctctgcttcccctctgcatctccttggagttcgcatttgtcccaarccatgggtctaaagattcctcaggcatgagaatcccaccggcacttgtaacaaatgctgcttccatggtcccatctccggagatgctctttcagtaagtc

SEQ ID NO: 420701 - DNA, 201 bp, Homo sapiens
gaataataacgagattaacagccttttattttaaaaaagaaaaaatatataatatagtgctattaaataatagtacaacagtaatatacacatataagtgscctttatttataaaaaaaaaattaaaagaataacttagaaaccaataaaaatgactacctagtcaactctggacacatgacctacgagttagccctgctc

SEQ ID NO: 420702 - DNA, 201 bp, Homo sapiens
cctgaattagtcaggactcttctggttgcagaaatccaagtggcagaaatccaagctaagttcatgggagcaaaccaagagaaggacaggcagaagaggasacagccacgcagaccaccaagctggggactcagaccccatcggggttcacccactgtgctctggcctcagtttctctttctgtgtggacttcacccagcc

SEQ ID NO: 420703 - DNA, 201 bp, Homo sapiens
aggcggcaagtgaggctgagctgctgtcacctaaaaggcagtgggtaccaccaggcagcttgaagcagttacgtggggacacctttgcagcctctcagtcrgcagccccaggaaaacccctccaccaacactcacagctggtcactctgtattacgtagaacacaggttctgggtttgaatcttgactccagctactcatc

SEQ ID NO: 420704 - DNA, 201 bp, Homo sapiens
ggcggcaagtgaggctgagctgctgtcacctaaaaggcagtgggtaccaccaggcagcttgaagcagttacgtggggacacctttgcagcctctcagtcgrcagccccaggaaaacccctccaccaacactcacagctggtcactctgtattacgtagaacacaggttctgggtttgaatcttgactccagctactcatca

SEQ ID NO: 420705 - DNA, 201 bp, Homo sapiens
aaggatacttattgcagcactgtttgtaatgaaaaactggagacaacccaatatctatcaagagtagcatggataagtaagtgatgatataatcaagagamtactacacagatatgaaaatgaataacttatagttttacatatcagtgtggatacattgcaaaaataatgttgaatgaaaataactcacaacagactata

SEQ ID NO: 420706 - DNA, 201 bp, Homo sapiens
atggccagtccttccctccagggcctcaaggctctgacaccagtgatatggtttgggctctgtgtggaactaatctcatcttggattgtaatccgaattgygatccctgcttgttgagggagggacctggagggaggtgatagtatcatgggggcggtttctctcatgctgttctcgtgatagtgagtgagttctcacgag

SEQ ID NO: 420707 - DNA, 201 bp, Homo sapiens
agtcaggactcttctggttgcagaaatccaagtggcagaaatccaagctaagttcatgggagcaaaccaagagaaggacaggcagaagaggagacagccaygcagaccaccaagctggggactcagaccccatcggggttcacccactgtgctctggcctcagtttctctttctgtgtggacttcacccagccaatccact

SEQ ID NO: 420708 - DNA, 201 bp, Homo sapiens
tattagccaccgtttaaacatacttccctccacacatgtgccttcctgacctgtcctctccatattcaatattgtggacagctgccagttgccaggtggtrtgtagtgaatggagattgtagaaatgagtcttctccgtgccccgtgaagagaagacttccagcccaggaacactgcagggagaatgatctccagtgatcc

SEQ ID NO: 420709 - DNA, 201 bp, Homo sapiens
cctgggcaacatagcaagacctcacctctacaagaaatttaaaaattatgtgggcatggtgacgcatggctatagtcccagctactcaggagactgaggcragaggatcacttaagcctaggagttagaggctacagtgaactataatcataccactgcactccagccaggggggcagagcaaggccctgtctctaaaaat

SEQ ID NO: 420710 - DNA, 201 bp, Homo sapiens; identical to SEQ ID NO: 184739

SEQ ID NO: 420711 - DNA, 201 bp, Homo sapiens
tgtgccttcctgacctgtcctctccatattcaatattgtggacagctgccagttgccaggtggtgtgtagtgaatggagattgtagaaatgagtcttctcygtgccccgtgaagagaagacttccagcccaggaacactgcagggagaatgatctccagtgatcccttctggttgtaacagcctaaggttctgagagccta

SEQ ID NO: 420712 - DNA, 201 bp, Homo sapiens
actcacctggaaggtgggggcgctggccccagcagggccttatccagggccttacctggaacacccatacgggcctgtccatggcagctggaagccagagmaagggggagatagacagacatgcagagacacatgggaagtaagcgggacacagacagccaggtggaaaccatgtcgccttgtgtggcctagctttcagaa

SEQ ID NO: 420713 - DNA, 201 bp, Homo sapiens
aaaatgtataaagaagggccagtgaccaaaaagctgaaacagggaaagtgttctgccagaaatgacatattataagtaattagattgtgtgttattagcaygaggatgaaaaacagaccaacggaacaaaaagagaacccaggaactgatccacactttatgatatatgatagatccagcattgcagatcagaggggctat

SEQ ID NO: 420714 - DNA, 201 bp, Homo sapiens
gggaagtaagcgggacacagacagccaggtggaaaccatgtcgccttgtgtggcctagctttcagaagtcatgcaccatcactctgccacacgctgttatkcaaagggaggcactagcactggcccatattcaaagggatgagattagaattcacctgttaagggagaagtgccaaagagtctgtggaaatgctttagaac

SEQ ID NO: 420715 - DNA, 201 bp, Homo sapiens
tttttcatatttttagtagagacagggtttccccatgctggccaggctggtctcgaactcctgacctcaggggattcacctgcctcagcctcccaaagtgytgggattacaggcgtgagccactgtgcctggccgattcaatgtaattctaacaaaaataccaataagacatttcatagaacttggcaaacattctaaaat

SEQ ID NO: 420716 - DNA, 201 bp, Homo sapiens
ctgatcttgcttcctggcttcatggggtaatgacaacccaaatccttgactccacacaatcggctctatgaagcttaattcagccttcacagcctggtccrgcaggctagtccaggtagcccgtaggttacctcccatgcatgtcataagaaaatacacacagcacaacgtttgtgcagaaaatgacctcaactgagtggg

SEQ ID NO: 420717 - DNA, 201 bp, Homo sapiens
agttatctctacctgttccctcccatgacacatggggactataggaactataattcaagatgagatttgggtggggacacagaaaacccatatcatatacmttattagaagtaatagaagagtttagtaagtttcctaggcataaaatccacatgtgcatcaactgcgtttctaaacaccagccaaaaaacaggtggaaaa

SEQ ID NO: 420718 - DNA, 201 bp, Homo sapiens
acccatctttggttgttctgtgtaatggattcataacagtgcctggcacgtagtaagcaccttagaaatgttcagtgtcattatttacaaactatgatgtrctatgcaaaggttgcccatgaaattttacaatattggtgtctccccactgtttcatattgtactggacaggtctcctctggttgtacatgagagaaatct

SEQ ID NO: 420719 - DNA, 201 bp, Homo sapiens
agccatgtcacgccctgcgaggcaggttggaccagcagctggggtggagagaccctgtctgcaggctccaggcacttccatctagaacccaaggaaacaarttgtttggaatcctcattcttgccagagaaaaacaaagtaaatctgctatcaaccaaacccgaccaacaagaatcactagttcactggcgtttcccagca

SEQ ID NO: 420720 - DNA, 201 bp, Homo sapiens
tctcaagctgctaacaaagacatacccaagactgggtaatttataaagaggtttaattgactcacagttcagcatggctagggaggcctcaggaaacttayaatcatggtgaaaagggaagccaacacgtccttcttcacatggcagcggggagaagaaggaacgccgagcaaagggaaaagtcctttataaaaccatctg

SEQ ID NO: 420721 - DNA, 201 bp, Homo sapiens
cagtgcctggcacgtagtaagcaccttagaaatgttcagtgtcattatttacaaactatgatgtactatgcaaaggttgcccatgaaattttacaatattrgtgtctccccactgtttcatattgtactggacaggtctcctctggttgtacatgagagaaatctaactccgaactccatgatagaaaggggacactttgg

SEQ ID NO: 420722 - DNA, 201 bp, Homo sapiens
tttattctttctggctttaaaaatacaaccccaatttttttgttgtttgtttttcttaaaaagaggtggggtctcgctctgtcacccaggctggagtgccrtggcgcaatcatagctttactgcctcactgctgcagccttaacctcttaggctcaagtgatcctctcacctcagcctcccaagaaactgggcacatgcca

SEQ ID NO: 420723 - DNA, 201 bp, Homo sapiens
tggccagtccttccctccagggcctcaaggctctgacaccagtgatatggtttgggctctgtgtggaactaatctcatcttggattgtaatccgaattgtratccctgcttgttgagggagggacctggagggaggtgatagtatcatgggggcggtttctctcatgctgttctcgtgatagtgagtgagttctcacgaga

SEQ ID NO: 420724 - DNA, 201 bp, Homo sapiens
agtgatatggtttgggctctgtgtggaactaatctcatcttggattgtaatccgaattgtgatccctgcttgttgagggagggacctggagggaggtgatwgtatcatgggggcggtttctctcatgctgttctcgtgatagtgagtgagttctcacgagatctgatggtttaaaagtgtttggcacttcctctcttgctc

SEQ ID NO: 420725 - DNA, 201 bp, Homo sapiens
tttctggctttaaaaatacaaccccaatttttttgttgtttgtttttcttaaaaagaggtggggtctcgctctgtcacccaggctggagtgccatggcgcratcatagctttactgcctcactgctgcagccttaacctcttaggctcaagtgatcctctcacctcagcctcccaagaaactgggcacatgccaccatgcc

SEQ ID NO: 420726 - DNA, 201 bp, Homo sapiens
tgttctcattgttcaattcccacctatgagtgagaacatgcagtgtttggctttttgtccttgcgatagtttgctgagaatgatggtttccagcttcatcyatgtccctacaaaggacatgaactcatcattttttatggctgcatagtattccatggtgtatatgtaccacattgtcttaatccagtctatcattgttgg

SEQ ID NO: 420727 - DNA, 201 bp, Homo sapiens
tttacaatattggtgtctccccactgtttcatattgtactggacaggtctcctctggttgtacatgagagaaatctaactccgaactccatgatagaaagrggacactttggggcctatgctattgcaaagtccagatgcagctatggccccaggctttatgaaaatcttgcctagaatgagaaggggagaaagctgcaga

SEQ ID NO: 420728 - DNA, 201 bp, Homo sapiens
ctgtattagtccattctcaagctgctaacaaagacatacccaagactgggtaatttataaagaggtttaattgactcacagttcagcatggctagggaggyctcaggaaacttataatcatggtgaaaagggaagccaacacgtccttcttcacatggcagcggggagaagaaggaacgccgagcaaagggaaaagtcctt

SEQ ID NO: 420729 - DNA, 201 bp, Homo sapiens
aataaattaagcttctttcctttataaattacccagtctcaggtagtatctttatagtagtgtgaaactggattaatacaaccaggtactcttcagtgccraaacatgctgtgagttaggcctggagagtccagctgggctcacctatctcaaggcactgtctactcttcaccttagcagacagagccaaagcttcatcac

SEQ ID NO: 420730 - DNA, 201 bp, Homo sapiens
tactgcctcactgctgcagccttaacctcttaggctcaagtgatcctctcacctcagcctcccaagaaactgggcacatgccaccatgcccagctaatttktttttaattttttgtagagacagggtctcacatgttgcccaggctagcccaatttctaatatatctcctagggcccatacaaattgctaatgagttggta

SEQ ID NO: 420731 - DNA, 201 bp, Homo sapiens
tctcacctcagcctcccaagaaactgggcacatgccaccatgcccagctaatttttttttaattttttgtagagacagggtctcacatgttgcccaggctrgcccaatttctaatatatctcctagggcccatacaaattgctaatgagttggtagattaatcaaatatgtatttgtaattggggcatcttttggcctaat

SEQ ID NO: 420732 - DNA, 201 bp, Homo sapiens
ccgcacacagacgccctcacactgcatgtagggaaatctagcctgaggaatcacatggtcattgaggtgggaggagagacctaggaagagaggagggaggwgatagagagagaaccacaagagtggccgtgacagccaagcagctgcccagaaaccagagaagagatgctacactcccagagactctccttctagatcccg

SEQ ID NO: 420733 - DNA, 201 bp, Homo sapiens
tcaatctccatgaacatagatgcaagaatcctgaacaaaatattaccaaactgaatccagcaattaaaattttaaaaaaatgaccaagttgggtttattcyaggaatgaaaagttagatcattagaacataaattaatgtaatttagcttattcgttgaagaaaaattatgttgtgattttttttttttttttgagacgga

SEQ ID NO: 420734 - DNA, 201 bp, Homo sapiens
tcctagggcccatacaaattgctaatgagttggtagattaatcaaatatgtatttgtaattggggcatcttttggcctaattctggaagccaataatgggstcctgtccccaaaacgcacagtgcaagccttcacatggccagtccttccctccagggcctcaaggctctgacaccagtgatatggtttgggctctgtgtg

SEQ ID NO: 420735 - DNA, 201 bp, Homo sapiens
aatgcaaaggacatgtgccatctggcgtctgtgtgctttttatggacactcgcgtcctgcttccagccctgtcgggaggactatcagagcctctcctcttaacacacacacacacatccacacatgtacacacccgcacacagacgccctcacactgcatgtagggaaatctagcctgaggaatcacatggtcattgaggt

SEQ ID NO: 420736 - DNA, 201 bp, Homo sapiens
gtcaatattggaaagaaaaattgaaggtcaatctccatgaacatagatgcaagaatcctgaacaaaatattaccaaactgaatccagcaattaaaattttwaaaaaatgaccaagttgggtttattccaggaatgaaaagttagatcattagaacataaattaatgtaatttagcttattcgttgaagaaaaattatgttg

SEQ ID NO: 420737 - DNA, 201 bp, Homo sapiens
ggactctgcgctcagccctgggagcatgttgatgtccagcctggacgacgccttcctgagggggccatgcagacaaccatgcccaggccgcagcaagtctrctttgctctgcttctcatgtttctctcacaatgaaaatataccttgacgatgacaccatcacactctaaatcagctgggaactcctcacccccttgccag

SEQ ID NO: 420738 - DNA, 201 bp, Homo sapiens
gtagtgtgaaactggattaatacaaccaggtactcttcagtgccaaaacatgctgtgagttaggcctggagagtccagctgggctcacctatctcaaggcwctgtctactcttcaccttagcagacagagccaaagcttcatcaccagcaggtgacagacacagcatggaggcatgtgcagcagcagggaatgtgtggggc

SEQ ID NO: 420739 - DNA, 201 bp, Homo sapiens
gaaactggattaatacaaccaggtactcttcagtgccaaaacatgctgtgagttaggcctggagagtccagctgggctcacctatctcaaggcactgtctrctcttcaccttagcagacagagccaaagcttcatcaccagcaggtgacagacacagcatggaggcatgtgcagcagcagggaatgtgtggggctcccagg

SEQ ID NO: 420740 - DNA, 201 bp, Homo sapiens
atgtatctctaacagatggggctttttaaaaatagccataacagccgggtgcagtggcctgcacctgaaatctcagcgttttgggaggccaaggtgggcaratcacttgaggtcaggagtttgagaccagcctggccgacatggtgaaaccccatctctactaaacatacaaaaattagccgggcgtggtggtgcacgcct

SEQ ID NO: 420741 - DNA, 201 bp, Homo sapiens
ccttagcagacagagccaaagcttcatcaccagcaggtgacagacacagcatggaggcatgtgcagcagcagggaatgtgtggggctcccaggtgtggccycaggaggccccaccctggtcgagggtaacacatggcccactcaggcagatgttgtttctgcaagtctgggagggagctgatgtgaaaacaggcctcttct

SEQ ID NO: 420742 - DNA, 201 bp, Homo sapiens
ggaatattccaacattgagaggacagacattgaggggggatactgaccaggagcagctggtgaggtagcaggacaaccagaagcatgggatgccatgaaayggcatggaatgggatggaatggcatggaatgggatgggatggcatggaatgggatgggatggcatggaatgggatgggatgagatgaaatagaatggaat

SEQ ID NO: 420743 - DNA, 201 bp, Homo sapiens
tacggtaatctgaaagccagagaccaaagcaaagtggaaaaaggaggtaaaaacagagaaaatagcccccaaacccttattaatatcctgagagagataayggaatacaatatactcatttttaaaaaatatgaaagaacatttaaataatccttggaatttaaaataaggcagcttgcaatagaagactaggttgggaaa

SEQ ID NO: 420744 - DNA, 201 bp, Homo sapiens
caagtatttcctcgcaccccaatctcttcctgcagagatttggtaacttcaacttgtgccaaagaacataaaacattctctctgcccacccttcttgcatytgtacctgtgctccagcttagagttgttatattaaaatgtaccagtgtgcagggcacagcatcaatcttgggagctctggagccgaagcgatcacgctct

SEQ ID NO: 420745 - DNA, 201 bp, Homo sapiens
aagcagtcacgatgctctcgttgagcgccagctgcatgctaagcacttagtgttggcacctcctagacacatacctccctgagcatctacggctctcatcsgcagtacagaccaaggtctatgccatggcctcccaaacctgggtagttccacgaactgtccaacaaagtttcagttagggtaagtagcatctatttatga

SEQ ID NO: 420746 - DNA, 201 bp, Homo sapiens
ttgaaactcagtgcccagattgtactttaatagtctcaaattagcaaaaaggacttttccctctgtctatagcaagtaattggcccaattctcccaggcatttttttttaatgcagaaaccacttggtattcacccaaggcaacacaaaagcatcagaactatttgcctcttgcaattcacatgactttccagtccacatg

SEQ ID NO: 420747 - DNA, 201 bp, Homo sapiens
ttatgactcagccatcccttcacctcttcccataggcttccctgtgcctcttcacagcaggcttatgaggtcagaaatcccagtaggtaaaccccgtgtcwctgctggccagcaaggtggagtgacctcttgcccactggggccagtgcctataggttcaacaatgcactgcactgtctgtcccaacaatgcactatagga

SEQ ID NO: 420748 - DNA, 201 bp, Homo sapiens
gtgtaccctttggtcatgttcaaattgttgcttgaggtattccatcaccagtgctgcctgactggaccctctcaaacccttttctattttgcaagatgaamcagcaatttatgctagttcagctcctccatctccaggatggaattaaacacgcaaggattttcagaaaggaaatgcctgcattaagggaaataagaaggg

SEQ ID NO: 420749 - DNA, 201 bp, Homo sapiens
ataggtcaggatgtaaaagtccaaaaatactacttaaagctacagtggtagccaagagaggaactaaaaataaaatgtgtcaagcagaaactaaagtggargaaaagaaagaaacataaattaatcattgttgtaatggggagacaatagatactgtcaaaaaattataaatcaaggaacagaggtaaaatcacatcattg

SEQ ID NO: 420750 - DNA, 201 bp, Homo sapiens
tatttatcaaatagtgatcttctctgagagcactactcaagtatgcaccccagccaaacaacaaaggagtgcaagaaagtgacagacacagtagtgttaamccaggagagcgtgaaaagatactctagggtgatcgctgtgcaacagctagatccaaattagaacctagaaaaataagaaaattcagaagctctaaactaa

SEQ ID NO: 420751 - DNA, 201 bp, Homo sapiens
ctctgatatttatcaaatagtgatcttctctgagagcactactcaagtatgcaccccagccaaacaacaaaggagtgcaagaaagtgacagacacagtagwgttaacccaggagagcgtgaaaagatactctagggtgatcgctgtgcaacagctagatccaaattagaacctagaaaaataagaaaattcagaagctcta

SEQ ID NO: 420752 - DNA, 201 bp, Homo sapiens
atacaaaaattagccgggcgtggtggtgcacgcctgtaatcccagctacttgggaggctgaggcatgagaactgcttgaaccccggaggcagaggttgcastgaggcgagatcgtgccactgccctccagcctgggcaacagagcaaggccctgtctcaaaaacaaacaaaaaaatagccataacaccactgacccaccca

SEQ ID NO: 420753 - DNA, 201 bp, Homo sapiens
gtgcagcagcagggaatgtgtggggctcccaggtgtggccccaggaggccccaccctggtcgagggtaacacatggcccactcaggcagatgttgtttctrcaagtctgggagggagctgatgtgaaaacaggcctcttcttcccctacgtggggcctgaaactgaggggggtggttcttgggtttgttggggaaaggggg

SEQ ID NO: 420754 - DNA, 201 bp, Homo sapiens
actctgatatttatcaaatagtgatcttctctgagagcactactcaagtatgcaccccagccaaacaacaaaggagtgcaagaaagtgacagacacagtaktgttaacccaggagagcgtgaaaagatactctagggtgatcgctgtgcaacagctagatccaaattagaacctagaaaaataagaaaattcagaagctct

SEQ ID NO: 420755 - DNA, 201 bp, Homo sapiens
taacacatggcccactcaggcagatgttgtttctgcaagtctgggagggagctgatgtgaaaacaggcctcttcttcccctacgtggggcctgaaactgasgggggtggttcttgggtttgttggggaaagggggcctgctgcttcatgctggtttcagaccttggcaggcctggaggtggacctctcctgtgaatacagt

SEQ ID NO: 420756 - DNA, 201 bp, Homo sapiens; identical to SEQ ID NO: 184738

SEQ ID NO: 420757 - DNA, 201 bp, Homo sapiens
catgatttcattcttttttatggctgaatagtattccattgcatcacatccctcttaatatgctcctatggcttcctactgcacttaaatcaaaggcaagytccttaccccagagcctacctagaggtgcaccttatctgaccctttctcctctccagacaccccctggctgtggtcaccttgctggctgccccttgtctt

SEQ ID NO: 420758 - DNA, 201 bp, Homo sapiens
aagcagagactagtatgaagaatccccctgcctccatcattcagtttcaacaaccatcaactttctgccttacttattgacccccctccacagagatacayacacaatttcttctggagcttaaaggagatctcagccatcacatcatttcagctgtaagtactttaatatgtatctctaacagatggggctttttaaaaa

SEQ ID NO: 420759 - DNA, 201 bp, Homo sapiens
aaataagagcatatgtggctgcagagcttagcaacagcaagaataatgcagttccctaacatcacttacagagcaagaagcagagacccagaaagaaagawgcactcacctagcattaagggagagggtgaagcactggaaggcttatggtctttgctccaaaacagatccaaataaagttgcatttcaaatcaatgtaga

SEQ ID NO: 420760 - DNA, 201 bp, Homo sapiens
ggaatgtagggtggcagcaaaaagagagcactccacacagagaaagggacttgcaggatttctttcaaggggctgtcaatctccagcataggccctttccyaaaggtaacctgggaacttagaagatgtgcactgagacattttaagaaacccaagagtaaaagggggtgcttttatggacatgtgtggctgtaggaggag

SEQ ID NO: 420761 - DNA, 201 bp, Homo sapiens
aaaaaaatgaaaaaaaaaaagaacagccgagctgaatcatcttacaattaattccactgtcagtaaagccctccactcacctactaccaccagcaccatgyagagcagactataaacagatttttggtgcaccactcttaaactataaacagtataggcaagaatcccaagataacttgagaagcatttaccctgtttcat

SEQ ID NO: 420762 - DNA, 201 bp, Homo sapiens
gaatgtagggtggcagcaaaaagagagcactccacacagagaaagggacttgcaggatttctttcaaggggctgtcaatctccagcataggccctttcccraaggtaacctgggaacttagaagatgtgcactgagacattttaagaaacccaagagtaaaagggggtgcttttatggacatgtgtggctgtaggaggagg

SEQ ID NO: 420763 - DNA, 201 bp, Homo sapiens
aaaattagctgggcatggtggcgggcacctgtaatcccagctactcgggagactgaggcaggagaatcatttgaacctgggagatggaggttgcagtgggccgagatcatgccattgcactccagcctgagtgacagtgtgagactatgtctcaaaaaacaaaaaaatgaaaaaaaaaaagaacagccgagctgaatcatc

SEQ ID NO: 420764 - DNA, 201 bp, Homo sapiens
aaaaagagagcactccacacagagaaagggacttgcaggatttctttcaaggggctgtcaatctccagcataggccctttcccaaaggtaacctgggaacktagaagatgtgcactgagacattttaagaaacccaagagtaaaagggggtgcttttatggacatgtgtggctgtaggaggaggcctgggcttagagcaag

SEQ ID NO: 420765 - DNA, 201 bp, Homo sapiens
ggcttatggtctttgctccaaaacagatccaaataaagttgcatttcaaatcaatgtagaaaatatatttttaataaatgcctatgattctagcactttgrgaggccaaggtgggaggatcattttagcccatcaacccgtcacctacattaggtatttctcctaatgctatccctcccctagccccccaccccccaacag

SEQ ID NO: 420766 - DNA, 201 bp, Homo sapiens
tacaaagtagtaaaactttaattcatcaagaagagaacaagccgggtatggtggctcacgcctgtaatcccagcattttaggaggccaagatgggcagatygcttgaagtcagaagttcaagaccagcctggccaacatggcaaaaccctgtctctactaaaaagtacaaaaattagccaggcatggtggtgagcacctgt

SEQ ID NO: 420767 - DNA, 201 bp, Homo sapiens
tttatagcagcatgattccttaattttttttttttttttagagacagggtcttgctatgttgcccaggctggtctcaaattcctgggctcaagccatcctmctgcctcaaaagtgctggcattacaggcatgatccacagtgctggggcaaaacccatattttaatattgcttaccaagacagacttatagcacctcagtg

SEQ ID NO: 420768 - DNA, 201 bp, Homo sapiens
tggggctgggagcaactattcaaggaatttccatttccaagctaccaacggtgtattggtccattctcacattactataaagaactacctgagaccaggcrcagtggctcacgcccatattcccagcactttgggaggccaaggtgggtgtatcaactaaggtcaggagttcgagaccagcctggccaacatggtgaaacc

SEQ ID NO: 420769 - DNA, 201 bp, Homo sapiens
ttgggaggctaaggtgggaggattgcttgagcccaggagttagaggctacagtgagctgagattgcaccactgcattcctgcctgggcgacagagtgacamcctgtctcaaaaaaagggatattcttgatggagggggaaagtgaatgtacgtggtatgtttaaagagcagttaagttatgctctcttgtgccttggagtt

SEQ ID NO: 420770 - DNA, 201 bp, Homo sapiens
gcagtggtgcgatctcggctcactgcaagctccgcctcccaggttcacgccattctcccacctcagcctccccagtagctgggactacaggcggccgccascaggcctggctaatttttttggtatttttagtagagacggggtttcaccgtgttagccaggatggtctcgatctcctgacctcctgatccgccgcctcgg

SEQ ID NO: 420771 - DNA, 201 bp, Homo sapiens
gccaggtgtggtggctcacacctgtaatctcagcattttgggaggccaaggcagctggatcacttgaggccaggagtttgagaccagcctggccaacatgrtgaaacactgtctctactaaaaatacaaaaaaaaaaaaaaatacctaggtgtggtggcacatgcctataatcctagctactcaggaggctgaggcatgag

SEQ ID NO: 420772 - DNA, 201 bp, Homo sapiens
gagtttgagaccagcctgggcaacatagcaagacctcacctctacaagaaatttaaaaattatgtgggcatggtgacgcatggctatagtcccagctactmaggagactgaggcgagaggatcacttaagcctaggagttagaggctacagtgaactataatcataccactgcactccagccaggggggcagagcaaggcc

SEQ ID NO: 420773 - DNA, 201 bp, Homo sapiens
tttcctttataaattacccagtctcaggtagtatctttatagtagtgtgaaactggattaatacaaccaggtactcttcagtgccaaaacatgctgtgagwtaggcctggagagtccagctgggctcacctatctcaaggcactgtctactcttcaccttagcagacagagccaaagcttcatcaccagcaggtgacagac

SEQ ID NO: 420774 - DNA, 201 bp, Homo sapiens
ttgttgttgttgttgtcattgtttgagacggagtctcgctctgtcgcccaggctggagtgcaatggtgtgatcttggctcactgcaacctccacctcccargttcaagcaatactcctggctcagcctccggagtagctgggattacaggcgcacaccaccacacctggaaaattttttgtatttttagtagagacagggt

SEQ ID NO: 420775 - DNA, 201 bp, Homo sapiens
caatacgtttgcagctagaacaccagtgtcatgaaaaccatccctaaagtcaaatgggaaagaaaagaaaaagactcccatcaacattgtcaaaattggayacattgattcaggcaagtccaccactactggccatttgatctacagatgtggtgggattgaccaaagaaccatcgaaaattttgaggaagaggctgttga

SEQ ID NO: 420776 - DNA, 201 bp, Homo sapiens
ctggtgaatttgaactggtgtctccaggaatgaacagacgtatgagcatgcatttctggtttacacactgggtgtgaaacagttattgttaacaaaatggmttccacttagccactctatagccagaaaaggtacaaagaatcattgagaaagctgaaacttaagaaaattggctacaatgccaacacagtaacatctgtg

SEQ ID NO: 420777 - DNA, 201 bp, Homo sapiens
tgggattgaccaaagaaccatcgaaaattttgaggaagaggctgttgagataagaaagagttacttcaagtatgcctgggtcttagataaactgaaagccraacctgaacatggtatcaccattgataccctgtggaaatttgagaccagcagttactacttgattattattgatagtctgggacacagatgctttgcgaa

SEQ ID NO: 420778 - DNA, 201 bp, Homo sapiens
aatttgagaccagcagttactacttgattattattgatagtctgggacacagatgctttgcgaaaaacgtgaatacagccacatttcaggctgactgtgaygtcctgattgttgctgctggtgctggtgaatttgaactggtgtctccaggaatgaacagacgtatgagcatgcatttctggtttacacactgggtgtgaa

SEQ ID NO: 420779 - DNA, 201 bp, Homo sapiens
gtgatgctaccattgtcgatatggttcctggcaagctcctgtgttgagagcttttctgactatcctctgagtcattttgctatttgttctatgagacagayagtcgctgtgggtgtcatcaaagcagtggacaggaaggctgctgatggtggaaaggtcaccagagttggtgaggaagaaataaaaggcatccaaactggg

SEQ ID NO: 420780 - DNA, 201 bp, Homo sapiens
ttaacaaaatggattccacttagccactctatagccagaaaaggtacaaagaatcattgagaaagctgaaacttaagaaaattggctacaatgccaacacrgtaacatctgtgccaatttctggttggaattgtgacaatatgctagagccatgtgctaacatgcattggttcaagggatggaaaatcacctgtaaagatg

SEQ ID NO: 420781 - DNA, 201 bp, Homo sapiens
cagcattgtgcagtgtgagcttctcatgctgagagttctgcgcttccaggtctccttccagcttccacacaagtacctgctccactacctggtttccctcraaaactctctgaaccgccacagctggcagcggaccccggttgccgtcactgcctgggccctgttgcgggacagctaccacgggggtctgtgcctccgttt

SEQ ID NO: 420782 - DNA, 201 bp, Homo sapiens
ttgtgctgctggagaagggctggagaaggcgatggcatgctgccgctttgacagtccctagcagtcgcggtgcaggtgatgggagccgcgcctccagcggscaggtcgggagtgcactgcgtgcagctgatccaaggcagccatatctgcttttgtcctttgagaggactctgactacaatagaggcctgacatcaatgaa

SEQ ID NO: 420783 - DNA, 201 bp, Homo sapiens
aagttttgcaaggcttgtggaagagcaagagaacaaatttcaagctgcagtcttggaagaattacaggagttatccaatgaagccctgagaaaaattctaygaagggatcttccagtgacccgcactcttattgactggcacaggatactctctgacttgaatctggtgatgtatcctaaattaggatatgtcatttattc

SEQ ID NO: 420784 - DNA, 201 bp, Homo sapiens
caaggcttgtggaagagcaagagaacaaatttcaagctgcagtcttggaagaattacaggagttatccaatgaagccctgagaaaaattctacgaagggaycttccagtgacccgcactcttattgactggcacaggatactctctgacttgaatctggtgatgtatcctaaattaggatatgtcatttattcaagaagtg

SEQ ID NO: 420785 - DNA, 201 bp, Homo sapiens
caaaaggaaattgcaacatgctgagaaaaactgtcaaaagtaaggagtacttgatagcttgcattgaagatcacaactatgaaacaggagagtgctggaamggactttggaaatctaaatggattttccaagttaacccatttctaacccaagtaacgggaagaatatttgtgcaagctcacttcttcaggtgtgtcaacc

SEQ ID NO: 420786 - DNA, 201 bp, Homo sapiens
tgaagatcacaactatgaaacaggagagtgctggaacggactttggaaatctaaatggattttccaagttaacccatttctaacccaagtaacgggaagartatttgtgcaagctcacttcttcaggtgtgtcaaccttcatattgaaatatccaaggacctgaaagaaagcttggaaatagttaaccaagctcaactggc

SEQ ID NO: 420787 - DNA, 201 bp, Homo sapiens
gaattcccattgtgatatcatcagaggttccacacttcacaaggaaagcttcttatgacctcatcaggaggctcagaccttgccagactgcctgctttcayggatagacataaaaaccttcagcttgaatgttaacaccttgatgggaaaggtggctcatggaatgttttcttatcctttgaacactcctcatttcagaag

SEQ ID NO: 420788 - DNA, 201 bp, Homo sapiens
gtcctagaatcatcaggggatgaaacagcctaggagggggtccagcactggtccctggatatcattcccatttgcccccgcaaagtcaagtcttggatgtrtccaaaagggatttggtcattgtgaggaatagtttagtttttgggaagctcctagaaatattttcactctgaaaagccatagattaagaaatatgtgaag

SEQ ID NO: 420789 - DNA, 201 bp, Homo sapiens
atgagagcccttttgcaaaatagaaatggctggtgattcttgtcctagaatcatcaggggatgaaacagcctaggagggggtccagcactggtccctggayatcattcccatttgcccccgcaaagtcaagtcttggatgtatccaaaagggatttggtcattgtgaggaatagtttagtttttgggaagctcctagaaat

SEQ ID NO: 420790 - DNA, 201 bp, Homo sapiens
gagtatctttaaggaaacaagctactttatttgttacaatccacagacaagattaacaacattactacagtctagccaaaaaagacacgtttatttaattwatttatttatttatttatttgagacagagtttccctcttgctgcccaggctggagtgcggtgactcgatctcggctcactgcaacctccatctcccgggt

SEQ ID NO: 420791 - DNA, 201 bp, Homo sapiens
ttacctaaggggaagtgttctgttctctattgaccccactgggccaaataagtacagatgaaagcaacacatgtttaaactttttttttttttttttttttttaatgaacatctttaaaagaggtggtacatatcaggaggccgaggcgggtggatcacgaggtcgggagattgaaaccatcctggctaacacggtgaaac

SEQ ID NO: 420792 - DNA, 201 bp, Homo sapiens
ggtgaagggaaatagttcccgtgatacaccctgcagtctgactcacaggcctttcaaacccagcctcataagaggggatgtttatgtcaccaagtccttayttcctgttaggagctaaattgccccgcagctgaagttcagaagggcaagagaacttctttcttgcctggggtcgacatgagaattaaataggttaatatt

SEQ ID NO: 420793 - DNA, 201 bp, Homo sapiens
gggagatgaaatgtgacacatcagtaagatgaaagttacaaatggtaagatgaaagttacaaattgtgacattgcttcagaagctcataatatataaattsactgtactagaacaagaagagaaggtactgtcaagggagtgttgacaaagtgaatctgtcaatttaccctattaataggtcatggggtttgcttttcttt

SEQ ID NO: 420794 - DNA, 201 bp, Homo sapiens
aaaccatttcaggcaataaagcaacttgaagctttgaaaagtcatgaaataaatatcagtgtattaaatgtaagataaatatataatattttactaaatgygatagaacttccttatgtaagattttaataaagatacagagttaaagttttaaaaagaacttctgaaataaacattttaaactggtaacattctaagcat

SEQ ID NO: 420795 - DNA, 201 bp, Homo sapiens
tcaagaactaatacattattttcaaataaaaacattaaacatactcttccattattaaaaaaaccaaaatcttaaaatacagtacttcttcccaaagaaaygtccgtggaaagaacacgtgccacatgtgttcatactactttgttgtttttctcattttgtttcagattggacaaattttgttacaagtgtgcacaattc

SEQ ID NO: 420796 - DNA, 201 bp, Homo sapiens
tttgtttcagattggacaaattttgttacaagtgtgcacaattcacagtatttgtggactattgatacaaagaaaagaactttaattaggaaccaggaaayccagttttaaatcttagctttaccatttactagctttatatgtttaagaaaactgctttttcagtgacttttttgtgcagatactcggttttgttttgac

SEQ ID NO: 420797 - DNA, 201 bp, Homo sapiens
aaaaacattaaacatactcttccattattaaaaaaaccaaaatcttaaaatacagtacttcttcccaaagaaacgtccgtggaaagaacacgtgccacatktgttcatactactttgttgtttttctcattttgtttcagattggacaaattttgttacaagtgtgcacaattcacagtatttgtggactattgatacaaa

SEQ ID NO: 420798 - DNA, 201 bp, Homo sapiens
gaagtattcccaaaagaaatgtttagccatgaaattattgcttggaaaataaagtgaaggatcttatacattttcttttcaagaactaatacattattttsaaataaaaacattaaacatactcttccattattaaaaaaaccaaaatcttaaaatacagtacttcttcccaaagaaacgtccgtggaaagaacacgtgcc

SEQ ID NO: 420799 - DNA, 201 bp, Homo sapiens
aactaatccttagtaaataccttcagatttagagcacattttcttgaatatatcaataagtagaaattatttgtcctctgagagtcaatttgatttttggraagagccaaatgtccttctgtgagcagtatgtttgattcatctgggttatggcataaggttcaaaacgagatatgacttcaaaaaaaatgcatcttattt

SEQ ID NO: 420800 - DNA, 201 bp, Homo sapiens
ttgttttatttagttgttttctctctctcttcccagttttccagagactggagctaaactgggctttcaacatcatcatgaagtttatcctcctctgggcyctcttgaatctgactggtgagtgtgtgcatatttgtctctttacccaccaaagagaaatcctgggaaaagcatgaaagacgggtaacagcgagaggcatc

SEQ ID NO: 420801 - DNA, 201 bp, Homo sapiens
gcctataatcccagcactttgggaagctgaggtgggaggatcacttgagcccaagagtttgagaccagcctgggcaacatatcaagactccatctctattwaaaaaattaaaaaatttaaaaattaaccagatatggtggcacacacctgtagtccaagctactcaggagggtttgcttgagcccaggaggttgaggctgc

SEQ ID NO: 420802 - DNA, 201 bp, Homo sapiens
tgacaaagggctaccattatttttatcaatggaagttttctatacataatttgaaactcctgaactagatagtctatctaaactttgttctaggcctcatrtttcatattccataaaacacccacaacttaaggcaactttctgttttctaagttgcatctccatctgcccattactccatctccaaatttctatgcaaac

SEQ ID NO: 420803 - DNA, 201 bp, Homo sapiens
gtgttttgagagccgatgttggcatctatgccaaaattttttactatataccctggattgaaaatgtaatccaaaataactgagctgtggcagttgtggaycatatgacacagcttgtccccatcgttcacctttagaattaaatataaattaactcctcacattgccccatgcatacctgtctcaattctgctaaacaga

SEQ ID NO: 420804 - DNA, 201 bp, Homo sapiens
ttcttctttgagcccctttcctcctctgctccccttcattcactctgggtcagcagccatggcctctgtgatgtaactgacacaagcctcaggacccatgytgcagctgttgcctctgcctggagtcccttcacccagatatttgactagcaacttcccccgttttcatgttattgttcaacattgcccatgaagttatac

SEQ ID NO: 420805 - DNA, 201 bp, Homo sapiens
tgagcctgatcttgccactgcactccaatctgagcaacagagtgagatcctgtctcaaacaaacaacaaacaaatactgcctgaaacccctccttctcccscaacacacaattggtaatacctttctctctttccctgtcctacttttatttccatagcactaatcaccatttaacatcatatatagtttacttgtgtgtt

SEQ ID NO: 420806 - DNA, 201 bp, Homo sapiens
aagtttatcctcctctgggctctcttgaatctgactggtgagtgtgtgcatatttgtctctttacccaccaaagagaaatcctgggaaaagcatgaaagaygggtaacagcgagaggcatcattccagaattcaagtgtaggatggtcctctgtccctctccactgccccgttcccatcaagtttcctcctgtgatagtgc

SEQ ID NO: 420807 - DNA, 201 bp, Homo sapiens
ctatgccaaaattttttactatataccctggattgaaaatgtaatccaaaataactgagctgtggcagttgtggaccatatgacacagcttgtccccatcrttcacctttagaattaaatataaattaactcctcacattgccccatgcatacctgtctcaattctgctaaacagagtgggtgcttgagcagttttacttg

SEQ ID NO: 420808 - DNA, 201 bp, Homo sapiens
attattaatgcaactttactcatgagtaagtttgagtatatataatatacatcatacactagataccatagtatgaaaaggagatttatttgaaacaaacytgtcagattacattcatctatccatcactactttctttttatagaaaccaacgggcagatgtacacttattctatcattgttgccatgattcaagccttt

SEQ ID NO: 420809 - DNA, 201 bp, Homo sapiens
aagtagttaagtaagcatttcctacagaagtattcccaaaagaaatgtttagccatgaaattattgcttggaaaataaagtgaaggatcttatacattttmttttcaagaactaatacattattttcaaataaaaacattaaacatactcttccattattaaaaaaaccaaaatcttaaaatacagtacttcttcccaaag

SEQ ID NO: 420810 - DNA, 201 bp, Homo sapiens
tgtattggggaccaatcacttgactctattcttgtctctctgacagatgacgctacactctcctctgaataatggacaccatttctaaaactgaatcctgytactaaaataattcagatgatatatttttccaattctacaatcttgctttgttttatttagttgttttctctctctcttcccagttttccagagactgga

SEQ ID NO: 420811 - DNA, 201 bp, Homo sapiens
ttttcaaataaaaacattaaacatactcttccattattaaaaaaaccaaaatcttaaaatacagtacttcttcccaaagaaacgtccgtggaaagaacacrtgccacatgtgttcatactactttgttgtttttctcattttgtttcagattggacaaattttgttacaagtgtgcacaattcacagtatttgtggactat

SEQ ID NO: 420812 - DNA, 201 bp, Homo sapiens
cacacagtgggggatagcatcacacagacaggaggggcagcagcccacacatagtttagaggggaacctgcctaccaaggctggcaaaaaggagaccagasaggaggcgtctgtagagatatcatgaacttcaacttagctttggtactttcttccctgaagacagagggcagaactctgagttccagaaccattttcaac

SEQ ID NO: 420813 - DNA, 201 bp, Homo sapiens; identical to SEQ ID NO: 291304

SEQ ID NO: 420814 - DNA, 201 bp, Homo sapiens
tggcacagttccagttactcaggcataaacccaggcttattcataaatcctctctttctctcataccccacgtttgatctcttagaaaaatgttggctttrtcttctaaatgtatcctaaattcaatcacatctcaccatctccactgctcacaatgatctaagccaccacctcttgcctggattagcaaattattctcct

SEQ ID NO: 420815 - DNA, 201 bp, Homo sapiens
gtgataagccttcaaaggcactccattctttgggttctcaggttgggcacagactctcacccctgtctgagaccatctcccaattaaatgggattagaaargcctttgggagacatacgagggtacagaaaaaggtctgtggggagggataatagaggctcataatgatggagaagccatctctgttaagtcctctcataa

SEQ ID NO: 420816 - DNA, 201 bp, Homo sapiens
ataccatgtgctctgtctctacctggagctacaatgtgtgtgatatctgtgagttcaagacaatgttcttctctcagaattagacatgcttctacaccttygcgactcttggcttcttcaattcggcctagtgaagctttcttctaacctctttcccccctttccttttctctgtacctcactgaaggagtgcttcaaggt

SEQ ID NO: 420817 - DNA, 201 bp, Homo sapiens
aaagaaaacatttgtattccaatcctaattttctatgtgacagcaggtcattttaccttggagcctcaatttccttaactctaaaataaagcagattactmtgttgtatattttcaaaccatttcaggcaataaagcaacttgaagctttgaaaagtcatgaaataaatatcagtgtattaaatgtaagataaatatataa

SEQ ID NO: 420818 - DNA, 201 bp, Homo sapiens
gtacagaaaaaggtctgtggggagggataatagaggctcataatgatggagaagccatctctgttaagtcctctcataaacgtctatattgttccagaaarcttcgggtgatattgggggttacaatcccagcagactctaatgaaaagcatctgcaagtgattggctatgagaagatgattcatcatccacacttctcag

SEQ ID NO: 420819 - DNA, 201 bp, Homo sapiens
tcattttaccttggagcctcaatttccttaactctaaaataaagcagattactctgttgtatattttcaaaccatttcaggcaataaagcaacttgaagcyttgaaaagtcatgaaataaatatcagtgtattaaatgtaagataaatatataatattttactaaatgcgatagaacttccttatgtaagattttaataaa

SEQ ID NO: 420820 - DNA, 201 bp, Homo sapiens
actcaggcataaacccaggcttattcataaatcctctctttctctcataccccacgtttgatctcttagaaaaatgttggctttgtcttctaaatgtatcytaaattcaatcacatctcaccatctccactgctcacaatgatctaagccaccacctcttgcctggattagcaaattattctcctaacagacccctctacc

SEQ ID NO: 420821 - DNA, 201 bp, Homo sapiens
cccgccccctcatgcagtggtagggtctggaaagaggtgtcttcgcttcaacctgcctggccccctcccacagcctgatcctgcctggtctttgccttgcyctctggctcctctcccatacctgtcctcagcccctgtctctgtccccgtctcctgtgtcttcccttgtcccccatttcccattccagtctccctttgagt

SEQ ID NO: 420822 - DNA, 201 bp, Homo sapiens
gtgaggtaataaggacagaagcaaggcaaagaggggtcagggacgaggtaattggagagagacaacacaaacgtctaaagaaaacaggtaagtggggggayctcacaggggtcagagatggagtaattggcaaggagatggggaactttggacctagccctgcaactcaagatgtgtgggatccgtgagggacagggcaac

SEQ ID NO: 420823 - DNA, 201 bp, Homo sapiens
gaatggcttctcgggaccctcagctagcgtgggtgcccttttccttatgcggagtgcccgcaaggctggggtagccccctccagtacaccccaaagtgaargggataagagtgcagccccagaataggcggggcttggaggcggtcccaatgtcccctgggtccacagtgggtccccttttcacccttggcgctaggctgc

SEQ ID NO: 420824 - DNA, 201 bp, Homo sapiens
ccaggaaagatgagccaggatccagagctccactccctactcaccttcacactggctttgggtttttggccctcattggagctctgtgggccacatcaggrttcttgacgtcatttcacagatgtacaaactgaggcccagatccatgaagtgactgggccaagactacatagcttgaaagggctgcagttctcctccaag

SEQ ID NO: 420825 - DNA, 201 bp, Homo sapiens
tctcacccctccctgtctgaactcccctacaaggtcgcttcagccgtgcccccccaactcttcctttttatcttggctgtctacagtagtgggtgggggcrggactgcccaaagccaggggattcgccaggatcagagaagcacagacggcactttgtctgagatcagagatgggggtgacaccctggaacctctccttac

SEQ ID NO: 420826 - DNA, 201 bp, Homo sapiens; identical to SEQ ID NO: 404152

SEQ ID NO: 420827 - DNA, 201 bp, Homo sapiens
cccccccaactcttcctttttatcttggctgtctacagtagtgggtgggggcaggactgcccaaagccaggggattcgccaggatcagagaagcacagacrgcactttgtctgagatcagagatgggggtgacaccctggaacctctccttaccctgctgaacctcctcccctccccctgccccttacttctaccccctgc

SEQ ID NO: 420828 - DNA, 201 bp, Homo sapiens
ggcctccttacctacccacagcacagcctgtgggccagtgtaggacacctccccagagaccactcagatacaattgacatgcatgtatgtcacccccatcrgaacacagcaagaccacacttgttctatgactacggatacaccccctttagaaagagcttgacacttgggcagaggatgacaggggctcacacaggaaag

SEQ ID NO: 420829 - DNA, 201 bp, Homo sapiens
gcctccttacctacccacagcacagcctgtgggccagtgtaggacacctccccagagaccactcagatacaattgacatgcatgtatgtcacccccatcgraacacagcaagaccacacttgttctatgactacggatacaccccctttagaaagagcttgacacttgggcagaggatgacaggggctcacacaggaaagg

SEQ ID NO: 420830 - DNA, 201 bp, Homo sapiens
attaataacccgggatcgcagcgtggcggggacggggaccaggcggtggagattctagcccagcagcttggctctgctgttcctgtccccagtgacactgygtgtgtacacatgggtgtgggcaaacagaggggggcacccatgcttcctggcctccttacctacccacagcacagcctgtgggccagtgtaggacacctc

SEQ ID NO: 420831 - DNA, 201 bp, Homo sapiens
gacggggaccaggcggtggagattctagcccagcagcttggctctgctgttcctgtccccagtgacactgtgtgtgtacacatgggtgtgggcaaacagasgggggcacccatgcttcctggcctccttacctacccacagcacagcctgtgggccagtgtaggacacctccccagagaccactcagatacaattgacatg

SEQ ID NO: 420832 - DNA, 201 bp, Homo sapiens
gctgagaggagggatggatgggagggggaatgaggggggcgataaatatgtatgacgagcgggtggtggcagcattaataacccgggatcgcagcgtggcrgggacggggaccaggcggtggagattctagcccagcagcttggctctgctgttcctgtccccagtgacactgtgtgtgtacacatgggtgtgggcaaaca

SEQ ID NO: 420833 - DNA, 201 bp, Homo sapiens
aatccccagaattatttcttaatatccaaatgtatgcgggtttctcttttgaatatcttgcacctttagagaggccactgtacaaagtctcctgttttccrtacaggacaaattctttgtttcagccaactctcagtggaggggcaaccaggaaaatgccatctccccggagaaagaacactggaatattctgttttgttg

SEQ ID NO: 420834 - DNA, 201 bp, Homo sapiens
ccagaattatttcttaatatccaaatgtatgcgggtttctcttttgaatatcttgcacctttagagaggccactgtacaaagtctcctgttttccatacakgacaaattctttgtttcagccaactctcagtggaggggcaaccaggaaaatgccatctccccggagaaagaacactggaatattctgttttgttgattca

SEQ ID NO: 420835 - DNA, 201 bp, Homo sapiens
atttaaatgttgatcataagtatgtaatctgcctcgaagctctcggtcgtttctcattttcacacaaattcgctcctctgggctgagcctaagatccaggrggtcctccacagtgttggtagtttgctgctggtctatgtcgtctgccatgtttcatcaagtaattcttcggtctcagcctcccgagtagctgggactaca

SEQ ID NO: 420836 - DNA, 201 bp, Homo sapiens
tcttttgaatatcttgcacctttagagaggccactgtacaaagtctcctgttttccatacaggacaaattctttgtttcagccaactctcagtggaggggsaaccaggaaaatgccatctccccggagaaagaacactggaatattctgttttgttgattcatatgtctcttcatatgtttcctcatcaatttctatagta

SEQ ID NO: 420837 - DNA, 201 bp, Homo sapiens
tgccttctgggttcaagcaactttcccgcctcagcctctggagtagctgggacaacaggcgccccgccagcatgcctggataatttttttgtatgcttttrtaaagacagggtttcaccatgttgcccaggttggtctcgaactcctgggctcaagcaatccacccatcttggtctctcaaaatattgtgattacaggggt

SEQ ID NO: 420838 - DNA, 201 bp, Homo sapiens
aaaaacgggtaggctcgagccgctgcatcagcttcgcgctgggtctctcggtcccgcagccatgaggaggacgctgcccagactcactacccgccctctcrgtcccgcagccacgaggaggacgctgcccagactcactacccgccggctccctcccccgcgtccctgtggtggtgggcgaagatgacctgttgtgcatca

SEQ ID NO: 420839 - DNA, 201 bp, Homo sapiens
tggtctcgaactcctgggctcaagcaatccacccatcttggtctctcaaaatattgtgattacaggggtgagccactgcgatcggtccttttaaaaaaaawgtcccctcccaccactgccgtttttactttttgattgagatgtagcatatataaagcacactaatcttaaattgcccagtgaacttttacatacatatac

SEQ ID NO: 420840 - DNA, 201 bp, Homo sapiens
ttgttagtctctgtatggcccatgcaaatgcccagctcttcggcatataggcacaaagagccaaggaagctgtagaagaggacgcttaaaaaaaaaaaaaacgggtaggctcgagccgctgcatcagcttcgcgctgggtctctcggtcccgcagccatgaggaggacgctgcccagactcactacccgccctctcagtcc

SEQ ID NO: 420841 - DNA, 201 bp, Homo sapiens
aggctggaggactagggcggtggcagtggccaggtgagtgcacatggctgtgggtggtccctcaattgctccctcctctctttcgctaccccctgggctgkagggaggcagggcacccagccggaatggcatgatcctgaagcccaacttccacaaggactggcagtggtgtggccatgtggctcagccagcccatggggc

SEQ ID NO: 420842 - DNA, 201 bp, Homo sapiens
gcacacctgtagtcctagtactcaggatgccaaagtgggaggattgcttgagtccaggagttcaaggctgcaggggctgcgaatgtgccactgcactacaractgggcaacagagtaagaccctgtcttttaaaacaaacaaactaataaacaaaacaaaaccaaattccttttcagagaacttttttcacaagtctttgg

SEQ ID NO: 420843 - DNA, 201 bp, Homo sapiens
accgccataggcctagcattgtcaccaactgagccatagagggacctcggcccaagctggggcctcttcattgtcgaagaaggcctcttgccagaccaggmtctgtgggcgcggccaggctggaggactagggcggtggcagtggccaggtgagtgcacatggctgtgggtggtccctcaattgctccctcctctctttcg

SEQ ID NO: 420844 - DNA, 201 bp, Homo sapiens
atccacccatagtaaggtgccccatgctgaggcatcactacaaagcacaagctggcaggggcctcagcttggaggagttaagggtggctggcatttacaaraaggtggcccagaccattggcatctctgaggatgcaaggaggaggaaccagtccacccaggccctgcaggccaaggtgcagaggctgaaggaggaccgct

SEQ ID NO: 420845 - DNA, 201 bp, Homo sapiens
ccaggctggtctagaactcctgaccttgtgatctgcctgccttagcctcccaaagtgctgagattacaggtgtgagccaccacgtccggccaaaaaaaaawtttttttagagacagggtctcccaaagtgctgggatttcaggcatgagccactacgcccagccccagatttctgtagttttctgttatgtaaaataggag

SEQ ID NO: 420846 - DNA, 201 bp, Homo sapiens
taggtggatcctttttttttttttttgagatggagtcttgatctgtcgcccaggctggagtgcagtgacaggatctcggctcactgcaacctctgcctccygggttcaagtgattttcctgcccagcctcctgagtagctgggattataggcgtgcgccaccacacctggctaatttttgtattcttagtagagtcagggt

SEQ ID NO: 420847 - DNA, 201 bp, Homo sapiens
gctttgaaacaaaagaatccagaagaattgatgttttcttgtgggcatcagaactagcacctttgaaaagtaaaatgatctatacaagctccaaggatgcratcaaaaagaaatttcaaggcataaaacatgaatggcaaacaaacggaccagaagatctcaatcgggcttgtactgctgaaaagttaggtggatcctttt

SEQ ID NO: 420848 - DNA, 201 bp, Homo sapiens
ataccggcagcagccgcggagagcatgccccgcccccgtggagcccaccccgggcggttaacctcgggtctcagtcccgggctgtgaccctccccgaggcyccgcccccacggcgaaggcccggggcagttaacccttctcttgctgcggcagagtccgcacccgggcaggcccatctcagaattaacgctttgatggcat

SEQ ID NO: 420849 - DNA, 201 bp, Homo sapiens
tgggctggtccctttctgccccgggttgtgagtcagcctgtgccacctctgaggctgtgaaatctgcttcaggctctaggctgtacgcatcatagttctcyctgctggtccagtcttcatactggatgccaatccattactgagccgttgatctcatttggtagagtgtcctgattaagacttcgagtttgagtgaagcta

SEQ ID NO: 420850 - DNA, 201 bp, Homo sapiens
gaagggagacagttctgctgaagaactcgaactggatactcagctgacaggaccagaaatgcccatcggcaatgtctacaaggagaaagccagagtcatcrctgactaggaggaaaacttccaggccttgttagtctctgtatggcccatgcaaatgcccagctcttcggcatataggcacaaagagccaaggaagctgta

SEQ ID NO: 420851 - DNA, 201 bp, Homo sapiens
ggggttggtagtgagaatccaatgaggttatagatgtaacacatttggaagagtttctggttcgcatttaatgatttgtgctaagcactggagattaagcwgtgaatccttaaggaggttacaaagacttttataaaataatgtatcatgtagtaatagtaaataaaattatggagatataaagaaagtactataggagta

SEQ ID NO: 420852 - DNA, 201 bp, Homo sapiens
gagacagttctgctgaagaactcgaactggatactcagctgacaggaccagaaatgcccatcggcaatgtctacaaggagaaagccagagtcatcgctgastaggaggaaaacttccaggccttgttagtctctgtatggcccatgcaaatgcccagctcttcggcatataggcacaaagagccaaggaagctgtagaaga

SEQ ID NO: 420853 - DNA, 201 bp, Homo sapiens
atgtagaaggcaaagagatcttggttggagatgttggtgtaactataagtgagcctttcaagcattttgtgggaatgcttcctgaaaaagattgttgctakgctttgtatgatgcaagctttgaaacaaaagaatccagaagaattgatgttttcttgtgggcatcagaactagcacctttgaaaagtaaaatgatctata

SEQ ID NO: 420854 - DNA, 201 bp, Homo sapiens
tgggctgaatctaaaaggatgaccaggaattggcctgagacgagccacttctctgcagtatggaggttgggttacggttgctgcatgtagaagatattccmgacagaagagtccgcatgaaaaaaagcaagaagcagcaggtgggtttggggaagtacgatatcttcaaggttgctacagccagaaaggaagcatgagaag

SEQ ID NO: 420855 - DNA, 201 bp, Homo sapiens
ctcgagccgctgcatcagcttcgcgctgggtctctcggtcccgcagccatgaggaggacgctgcccagactcactacccgccctctcagtcccgcagccaygaggaggacgctgcccagactcactacccgccggctccctcccccgcgtccctgtggtggtgggcgaagatgacctgttgtgcatcagatgcctttgaga

SEQ ID NO: 420856 - DNA, 201 bp, Homo sapiens
acctctgccttctgggttcaagcaactttcccgcctcagcctctggagtagctgggacaacaggcgccccgccagcatgcctggataatttttttgtatgyttttataaagacagggtttcaccatgttgcccaggttggtctcgaactcctgggctcaagcaatccacccatcttggtctctcaaaatattgtgattaca

SEQ ID NO: 420857 - DNA, 201 bp, Homo sapiens
atctcagctcactgcaacctccacctcctgggttcaagcaattctcctgcctcagcctcccaagtatctgggattacaggcatgtgccatcatgcctggcyaattttgtatttttagtagagatggggtttcaccatgttagtcaggttggtcttgaactcctgacctcaggcgatccgcccaccttggcctcccaaagtg

SEQ ID NO: 420858 - DNA, 201 bp, Homo sapiens
agtggttcccagggctgggggctctgaaagtggccccaagacaggtttggagtgcctgtccctctcttcagcctgtccctctttaaggccaggtgtggcayacaccttcacggggtttgcagcagcagaagtggaaggagcagcacagtccaggcaagtgggaagaggcgtggggcagcactgtgaccgatgctatgtaga

SEQ ID NO: 420859 - DNA, 201 bp, Homo sapiens
cacgcatgctccgtaaatgagcgagtccagaaagccgcccgcctccattacgactagagtcggatcccgcgcccagcgcccgccgcgagcctgcggttgcygggacctactgcagcccagacctgcggctctggagccccgccccgcgcactcggctccgcccccgcacgctcgggccgtccctccggaaactgcgccgaa

SEQ ID NO: 420860 - DNA, 201 bp, Homo sapiens
agcccccctgctggcacagctctggggagtgctgccccaggatgggagagaatgcagtacctggctacaaacttctctgtggcagctccacagatgaggtmttgctgggagatgctgggtcagcccaagcatgctgcctctcctgtacctggcttccaagcaagaaactgtttcttgcttttccttcagtcagttcatctg

SEQ ID NO: 420861 - DNA, 201 bp, Homo sapiens
ccaagggtgaagaccacgcatgctccgtaaatgagcgagtccagaaagccgcccgcctccattacgactagagtcggatcccgcgcccagcgcccgccgckagcctgcggttgccgggacctactgcagcccagacctgcggctctggagccccgccccgcgcactcggctccgcccccgcacgctcgggccgtccctccg

SEQ ID NO: 420862 - DNA, 201 bp, Homo sapiens
ccgggccgcgcggggaaggggagacgtggggtagaggtaagtgtaggttgaaggctgaatggggagggcgagagatggggagtgggtctcaaatatagagrgggtagcaaggtggaaggggcccttccaccttttgtgggcactcaagttcggacctctgggatcggcgattcccctctggccagggctggttttaatgct

SEQ ID NO: 420863 - DNA, 201 bp, Homo sapiens
tacgactagagtcggatcccgcgcccagcgcccgccgcgagcctgcggttgccgggacctactgcagcccagacctgcggctctggagccccgccccgcgyactcggctccgcccccgcacgctcgggccgtccctccggaaactgcgccgaagccccaccctccctccgacgccgaaccggaactcgcgcccctctcctc

SEQ ID NO: 420864 - DNA, 201 bp, Homo sapiens
tgtcgggctggttggcctccttccggttgaaaaccttaatactgacccgttttgaggctgctaggtgatagcttatgcctgtggtgggagtggttcccagrgctgggggctctgaaagtggccccaagacaggtttggagtgcctgtccctctcttcagcctgtccctctttaaggccaggtgtggcatacaccttcacgg

SEQ ID NO: 420865 - DNA, 201 bp, Homo sapiens
gggaaaggactgtctccacttctttctccatccctccgaggtgaaggtggggatggcactgtcgggctggttggcctccttccggttgaaaaccttaataytgacccgttttgaggctgctaggtgatagcttatgcctgtggtgggagtggttcccagggctgggggctctgaaagtggccccaagacaggtttggagtg

SEQ ID NO: 420866 - DNA, 201 bp, Homo sapiens
agaggggcctgggtctcccacagctgagaatcctttaaacagtgcctgtagggccctctattgtggatttggtagttctgcctgcaccgagggagatgctwgcaggtgcttctgaaccctgtgtttgggaattagctgcgcatacaattaaggcttttgggtatagtaaaatttgtgtgcctttgaccctgtggttctgag

SEQ ID NO: 420867 - DNA, 201 bp, Homo sapiens
acccacctcggcctcccaaagtgctgggattacaggcgtgagccactgcgcgcagcctggcgcacacttcttaccagaacctagtcacgaattcctcgtckaactagaattaggtatgtttgttactgtaaacgcagcttggtggcttacagtgattggcactctaacagtcaggtcaggctagagagccagccaccgcag

SEQ ID NO: 420868 - DNA, 201 bp, Homo sapiens
ctgagagtagcaccccatgcttctccagcacctgctcctaaccaggaaattggggtagaccagaaccccagtcttcccagcagctcagtgtttcttgcccyggagcatctgccttcatcacagtgactctgaacacgctgccatggtgacatctggtaaaccttaggatggccatggaaaacgactctttgccctgtttct

SEQ ID NO: 420869 - DNA, 201 bp, Homo sapiens
ggcgcacacttcttaccagaacctagtcacgaattcctcgtcgaactagaattaggtatgtttgttactgtaaacgcagcttggtggcttacagtgattgrcactctaacagtcaggtcaggctagagagccagccaccgcagacagaggagtggacgcgtgaacgttgagttgagaccaaaggggccacctggtgggata

SEQ ID NO: 420870 - DNA, 201 bp, Homo sapiens
tttaactttatttttgtcctttactttttaagtctaaagtaagtgcttgaatcgggtgggttttcatttttttgctttctcacccctcaggttggcccctracttggcctctcaccctcgtgtcagctgttagacactgactcagtggctcagaatatgaaaggctcaggaagtagcatgctggccccacctccctgtccc

SEQ ID NO: 420871 - DNA, 201 bp, Homo sapiens
gactcagtggctcagaatatgaaaggctcaggaagtagcatgctggccccacctccctgtccccataccttagcagagcagctgcccagcagggcctcctyctctttcctaagagtttactccatccatggtgggtgtcttggtaggcccgagatacgagagggagtgctgctgttacaagaatttacagttgttctcttc

SEQ ID NO: 420872 - DNA, 201 bp, Homo sapiens
ctctttcctaagagtttactccatccatggtgggtgtcttggtaggcccgagatacgagagggagtgctgctgttacaagaatttacagttgttctcttcrgcacagaaatgctgtaaatggcctctttcgatactagtttatgaaattataagtgtctgatgattgtgcatctttggtttcaacagctactctgacctac

SEQ ID NO: 420873 - DNA, 201 bp, Homo sapiens
gcaggagaatctcttgaacccaggaggcggagcttgcagtgacccgagatcatgccattgcactccatcctgggtgacagagtgagactccatctcaaatwaaaaaaaaaaaaaagcaagcagaagggaaaaccatcctttcttcaggtaactcaaattttagaccaaggagtcacatttgtatggaactgaaatgtggct

SEQ ID NO: 420874 - DNA, 201 bp, Homo sapiens
tgggatgtcctgtggtctttcctggacagtaagctctttggtaccatgtcccctcctgtcccctcttgtgtcacccagttgggcctcagcaggcccttggkccccctatggcagtgggtggggggaccgtctgctcccacctgggacctgtgctcagtcccccgcccctccacagcactgcttcatgatgccccagtccct

SEQ ID NO: 420875 - DNA, 201 bp, Homo sapiens
acatgaatttctggggcgctccctgagtcagagtctcagaagacctgtgcaggctggcgtgagaggagcggcagccacactgcggccccacgcccaaggaytgggctgctctcgaggggggcgcgcccaccgctgtgtcctctctgcccagcctggcttaccaagggctacctcagtgggagatgaggttggaggaacgaa

SEQ ID NO: 420876 - DNA, 201 bp, Homo sapiens
gggatgtcctgtggtctttcctggacagtaagctctttggtaccatgtcccctcctgtcccctcttgtgtcacccagttgggcctcagcaggcccttgggycccctatggcagtgggtggggggaccgtctgctcccacctgggacctgtgctcagtcccccgcccctccacagcactgcttcatgatgccccagtccctg

SEQ ID NO: 420877 - DNA, 201 bp, Homo sapiens
ggtgtatttgaacttaatggaacacctcttattcccttcactctgaagttggcttccttgcctataaagtttggtgataaacctaagaaatacacctgctrtgcattttactgcgtccgtgatgaaaatccctcaacttcacagccgctcaggcctcgtgaccctgctttcagagggagcctttttccttttcttccttat

SEQ ID NO: 420878 - DNA, 201 bp, Homo sapiens
ggggagggccggagtgcgtttctctggacggaggagcagagcagcttggggcacggtgtgggagccctccttagggacctcatgggtcacgttcgccgtgrctgcgccactcctgttcactgccaagcaccgtgattgctccttggatttgctcccctggggtttcctggtctccttgatggtttatacagtgagcaatct

SEQ ID NO: 420879 - DNA, 201 bp, Homo sapiens
tttgaagttgtcagacacagacatgaatttctggggcgctccctgagtcagagtctcagaagacctgtgcaggctggcgtgagaggagcggcagccacacygcggccccacgcccaaggactgggctgctctcgaggggggcgcgcccaccgctgtgtcctctctgcccagcctggcttaccaagggctacctcagtggga

SEQ ID NO: 420880 - DNA, 201 bp, Homo sapiens
agtaaaacagagtaagatggcatgcagggctaatcattagcccagcaggtaagcaccatggctctgcagccagctgcctccttagaaagtggggtgttgcsccatggaagtggtggcatgctcttctggtagcattgttgaaatgaaaacaggttcagtccttgatcactaggctttttgtacccgggtacctctggggac

SEQ ID NO: 420881 - DNA, 201 bp, Homo sapiens
acctaggccgaggtgagtcacagccctggggagggcgcatggccacggtgttctcaggaagcaaaggggactgtggggtcagggctctttagagcagaccrcaggtaaaacagtaagtagaacttgggggtttcttgagtaatgagccacttgtttttcttgatttaaaaaactgactttaaagaatgctaataaatccgc

SEQ ID NO: 420882 - DNA, 201 bp, Homo sapiens
acaggagggcttggggagcgtgggcacttttctcatgagcagctactgcggcgttggcaggactcgctgctgctgctgctgcttgtgtaggtcggggagcyggagatccccgaggacgcgcgccggacagtcggcactgaccggcccacctggtagcagaggacacccccagccccccaagcattgaagacatagtgtatt

SEQ ID NO: 420883 - DNA, 201 bp, Homo sapiens
agtaaatgtggcccttggcgttactgagtcctaagaggtgtgtgttgccccaggtggagctgatggaggagggagtcggtgcctgtggtgtgggactgacyggctgcctcctgccagtgggcttgtggcctgtggggccatctggccatgagcacttctctctctgtctgccacgacaggggggacaggccccacctcgga

SEQ ID NO: 420884 - DNA, 201 bp, Homo sapiens
cgaggcgggtgggtcacgaggtcaggagatcaagaccatcctggccagcatggtgaaaccccatctctactaaaaacacaaaaattagctaggcttggtgrcatgtgcctgtagtcccagctactcgggaggctgaagcaggagaatcgcttgaacccgggaggtggaggttgcagtgagccgagatcacgccattgcact

SEQ ID NO: 420885 - DNA, 201 bp, Homo sapiens
tgtggctcagttttaacaaatgggctcattgagtgagttccaaattcatgtttcaccttccatgatgtagccaagctgagaactcttaaaaatgcctcacygcctttttcactcagggccacctttttcccaaggaacttctcaaaactccctcaattccaattttattgaagttctacatgtaggctattgccttgaatc

SEQ ID NO: 420886 - DNA, 201 bp, Homo sapiens
aggtaacaaagcaccagtcagcaggaaactcaccaccgggaagcctttctatcaaaacataacttcaaaatcagtaaagtgggccgggcatggtggctcaygcctataatcccaacttcaaaatcaataaagcgggccgggcgcggtggctcacgcctataatcccaacttcaaaaccaataaagtgggccgggcgcggtg

SEQ ID NO: 420887 - DNA, 201 bp, Homo sapiens
tgtagttggggtggggaagcagggaaggctggtgcgatctccattccttgggctccgcgtccgagttcatggtgcgccgctgtgctgggagctgcagtggkaatgtgtgggacaccttgaccaaaggggagctttgtctcgtgtgttttgaaaaaggcttaatgaagagaatgttgttcattcttagtagtatagtttgca

SEQ ID NO: 420888 - DNA, 201 bp, Homo sapiens
tggccaggactcctctcttttttctttttttttgagacagtctagctcagtagcctgggctggagtgcagtggtgcaatcttgggctcactgcttcctccrcctcctgggtcccggttcaagcagttctcctgcctcagcctccccagtacctggaattacaggcacccgccaccatgcccagctaattttttcaattttt

SEQ ID NO: 420889 - DNA, 201 bp, Homo sapiens
ggtcttgaactcctgacctcgtgatccacctgccttcgcctcccagagtgctgggattacaggcgtgagccaccgcgcctggccaggactcctctctttcttttttttttttttattttttttccgagacagagtctagctctgtagtccaggctggagtgcagtggtgcaatcttgggctcactgctacctccgcctccc

SEQ ID NO: 420890 - DNA, 201 bp, Homo sapiens
gtttcattctagaggaggagtcacatgatagactgtgttcaacaggcttgctctggcatctcttttgagaatgtactgcagaggggcaagggcagaggcarcgagaccagctaagagactgttgaacaagccagcaaggagatgccagtggattagctcagggtgggtaagaggttgacttctgcatgtgttttggaggtt

SEQ ID NO: 420891 - DNA, 201 bp, Homo sapiens
ctgatgtggagaattgctagaacccaggagatggaggctgcagtgagctgagatcgcaccactgcgctccagcctctgcaacagagttagaccctatctgaaaaaaaaaaaaaaaaaaaaagaagaagaagaatgctaataaatgttttaaattactgaaactgttttctgtacagatttgttttgataacttggcgtata

SEQ ID NO: 420892 - DNA, 201 bp, Homo sapiens
agcacttaaatagccacactgcccattccttgaggacagagctggtgtcttgtgcttgcatttctagtgcatcacttgtgtctggcatgtggttggtaataaaaaaaaaacagaacttgaattaataataacctacacattcccctactatcaaagctttcagtttgtagagtttaacataaatccagtatgttagcataa

SEQ ID NO: 420893 - DNA, 201 bp, Homo sapiens
tgatgtggagaattgctagaacccaggagatggaggctgcagtgagctgagatcgcaccactgcgctccagcctctgcaacagagttagaccctatctgaaaaaaaaaaaaaaaaaaaaagaagaagaagaatgctaataaatgttttaaattactgaaactgttttctgtacagatttgttttgataacttggcgtatat

SEQ ID NO: 420894 - DNA, 201 bp, Homo sapiens
acccaggagatggaggctgcagtgagctgagatcgcaccactgcgctccagcctctgcaacagagttagaccctatctgaaaaaaaaaaaaaaaaaaaaagaagaagaagaatgctaataaatgttttaaattactgaaactgttttctgtacagatttgttttgataacttggcgtatatgtatttgaaatcctggagaa

SEQ ID NO: 420895 - DNA, 201 bp, Homo sapiens
tgtaatcccagcactttgggatgccgaggcgggtgggtcacgaggtcaggagatcaagaccatcctggccagcatggtgaaaccccatctctactaaaaayacaaaaattagctaggcttggtgacatgtgcctgtagtcccagctactcgggaggctgaagcaggagaatcgcttgaacccgggaggtggaggttgcagt

SEQ ID NO: 420896 - DNA, 201 bp, Homo sapiens
cactgaaggagtaggagaaaattcccctgagttggtgagagttgagtctttagagctaaagacccccaaatttttttatcagaagtacttaaacatacatrttcctgataatatttccaaattgcagaagtaaagggaaacttctctaaacatccaaataatagtatcactactaagctgctttgaagaaaggcagtctca

SEQ ID NO: 420897 - DNA, 201 bp, Homo sapiens
cctgggaatttctatgaaactaatgcggaataaaatgaaaaaaggacaaaaccctgctgcctggaaatgtgaaacctcaaaaaagtcaagtgtagagaccstaactatgtatctgaacctgatgtgtacagaactcagaagaaaacctgtgtatcttcagtactagtatatgggttctttacaaagtgaaaattaatgaaa

SEQ ID NO: 420898 - DNA, 201 bp, Homo sapiens
ctgaagcaggagaatcgcttgaacccgggaggtggaggttgcagtgagccgagatcacgccattgcactccatcctgggtgagagagcgagactctgtttaaaaaaaaaaaaaaaaaaaaagattctgaaaaaggtttggatgccatctgtatctttagtgtgaaagtgaaaacttgtttctcatatttatggtagagctg

SEQ ID NO: 420899 - DNA, 201 bp, Homo sapiens
gctgagcctgcagattgggtttcttgtgcctgtgggatgtcctgtggtctttcctggacagtaagctctttggtaccatgtcccctcctgtcccctcttgygtcacccagttgggcctcagcaggcccttgggccccctatggcagtgggtggggggaccgtctgctcccacctgggacctgtgctcagtcccccgcccct

SEQ ID NO: 420900 - DNA, 201 bp, Homo sapiens
atatatgtataaatatatatatacgtgtgtgtgtgtgtgtgtgtatgtatatatttttccccccccccgtcgtccaggctggagtgcagtggcgtgatctyggctcactgcaacggggttttgccatgttggccaggctggtcttgaacccttgacctcaggtgatccacccaccttggcctcctaaagtgctgggattac

SEQ ID NO: 420901 - DNA, 201 bp, Homo sapiens
agctgtggcgcagccccagagtgcacaccacgctccatgcacctcctgggcagggtggcagtagtggggaacatgggctggagctctgtggctcacactttttgtttgtttgtttgtttttgagacggagtctcactctgtcgcccaggctggagtgcagtggcgcgatctcggctcactgcaagctccgcctcccaggtt

SEQ ID NO: 420902 - DNA, 201 bp, Homo sapiens
gctgtggcgcagccccagagtgcacaccacgctccatgcacctcctgggcagggtggcagtagtggggaacatgggctggagctctgtggctcacactttttgtttgtttgtttgtttttgagacggagtctcactctgtcgcccaggctggagtgcagtggcgcgatctcggctcactgcaagctccgcctcccaggttc

SEQ ID NO: 420903 - DNA, 201 bp, Homo sapiens
ggccgggcgcggtggctcacgcctataatcccagcacttcgggaggccaaggtgggtagatcacatgaggtcaggagttaaagaccagcctggtcaacatygtaaaaccccatgtctactaaaaaaaaagttagctgggcatggtggcacgccctcgtaatcccagctgctcgggaagctgaggcacgagaattgcttgaa

SEQ ID NO: 420904 - DNA, 201 bp, Homo sapiens
tctcgtgggcgaatcaaggcacagcaacgcagtggagcctgaggggagccgggcactggtgcaggggaccatgcacagggcaccctcggagctccgttccyggccacaggagccaaggcaggctggaatgtccagcacctgcatgctgggggcctctgctgcgccactggcagtgggaatggaagcccccacctcttagcc

SEQ ID NO: 420905 - DNA, 201 bp, Homo sapiens
taacatctcgtgggcgaatcaaggcacagcaacgcagtggagcctgaggggagccgggcactggtgcaggggaccatgcacagggcaccctcggagctccrttcctggccacaggagccaaggcaggctggaatgtccagcacctgcatgctgggggcctctgctgcgccactggcagtgggaatggaagcccccacctct

SEQ ID NO: 420906 - DNA, 201 bp, Homo sapiens
ttttgagacggagtctcactctgtcgcccaggctggagtgcagtggcgcgatctcggctcactgcaagctccgcctcccaggttcacgccattctcctgcytcagcctctggattagctgggactacaggcacccgccaccacgcctggctaattttctgtatttttaatagagacgggttttcactgtgttagccaggat

SEQ ID NO: 420907 - DNA, 201 bp, Homo sapiens
gtatctttagtgtgaaagtgaaaacttgtttctcatatttatggtagagctgacctgtaattttttttccaatagattggaggtggacacaaaggaagagrcagccagacagctacttcagcgtcctcaacgcattcatcgacaggaaggacagttactactccattcaccagataggtgggaggctgcagaatgtgccag

SEQ ID NO: 420908 - DNA, 201 bp, Homo sapiens
ttcccctcagagcttttctggtgtcgtgggatgtggagcaggaggctgtaaacctgtaaacactgacctctgaccatctgtgcgctgctgtcacatcaccyccgtgtcatcccacatcacccccgtcccacccaggcccagaccctgggccttgcccttcctgctgtccatgcggcttgcagtgcctggtgctcggcacag

SEQ ID NO: 420909 - DNA, 201 bp, Homo sapiens
ttttaagggcattccatgagcaggtaccacaccccaggtgaccacttgaggccactggtggaaaagcagcatgccctggggttcattttcagcctggtcgmgggcggcctcctgtgtgcccctttccctgatggtctggtgccctcggctccctccccacctcctgcccactgcttctcagtgtgatgtgggtgcagtggg

SEQ ID NO: 420910 - DNA, 201 bp, Homo sapiens
ccagcgtccagacaaagggacagtggattctggtgtccagacaaggggaaggtagtggcgcccaagcaggggtgcttacaaccctgaagcccaagaggggktgttgcagagtgtcagcagccctgttactcccattgccctgctccaggctatagctctggggctggctccgtccccgctgcttccctttgctgcctcctg

SEQ ID NO: 420911 - DNA, 201 bp, Homo sapiens
acaggtttgtccgctggctgtggccggctggcccctttctcttggccgcagcaagcactggggtgaggctgcacctaacggccatgtctcactaacagctrtctctgcttggaggtgccctgcccatgtttgagctggtggagcagcagccttcacatctggcctgccccgacgtcctgaacctgtccctaggtgagagct

SEQ ID NO: 420912 - DNA, 201 bp, Homo sapiens
gccgcagcaagcactggggtgaggctgcacctaacggccatgtctcactaacagctgtctctgcttggaggtgccctgcccatgtttgagctggtggagcwgcagccttcacatctggcctgccccgacgtcctgaacctgtccctaggtgagagctgccaagtccaggtggggtccctcggaggtacgatctgtgccctt

SEQ ID NO: 420913 - DNA, 201 bp, Homo sapiens
ttcgcctgtgagaccaggtatggagtggagcgtcccctcctccaagcttgcgcccagcagcccaggacccacctcgtcttccccaccagcgctgcctgccsgggcgctgtggagctgggcgtgctaccatggagtcctcaggggtctggagcagacagaacatgcaggctctgtggtgacgcagtcctgggtgggggactg

SEQ ID NO: 420914 - DNA, 201 bp, Homo sapiens
aaaaatacaaaaattaggcatgacggtgcatgcctgtagtcccagctactcaggaggctgaggtgggaggatcccttgaggccggaagggggaggttgcartgagctgagatcacaccactgcactccaccttgggtgacagagccagacccttgggtgacagagccagaaggaacgtttgggaatggaatcatcgtgttg

SEQ ID NO: 420915 - DNA, 201 bp, Homo sapiens
catctgcataaaacatattggccactgctctgccttgaaccgccctggctcttcactgctgactcaggcggggctctacccgacctccctggcatgacacsttgtgctcctgggacacaccagcctcagggcctttgcatgtgtggtgcctggcacttggaccctgttcccccgacacctgcctgggttgcgccccatgtc

SEQ ID NO: 420916 - DNA, 201 bp, Homo sapiens
atgcctgtagtcccagctactcaggaggctgaggtgggaggatcccttgaggccggaagggggaggttgcaatgagctgagatcacaccactgcactccascttgggtgacagagccagacccttgggtgacagagccagaaggaacgtttgggaatggaatcatcgtgttggtcgatctgcagatgttagtgattgtgag

SEQ ID NO: 420917 - DNA, 201 bp, Homo sapiens
caggatggccaggaagggtctcactctgaaggtttaagttttgacgaagacttaaagcagtgtaggaggaagggcaggtagcaagagcctggtgtggctcrggtgcagcgggtggcggtgggagaagcaggagctgaggatagaaaggtgacttaggctcagtgtagtggggccttgccagctcatagtgaggactcggtg

SEQ ID NO: 420918 - DNA, 201 bp, Homo sapiens
ctgcaccatctcgagcaaaggcacgtcgtgaaggcagagctcttttcagctttctggaagaaaggtctgctgcaaccctgaaggaacctgggcgtggcaayatttacatctaggaggaaaactgtggctcagttttaacaaatgggctcattgagtgagttccaaattcatgtttcaccttccatgatgtagccaagctga

SEQ ID NO: 420919 - DNA, 201 bp, Homo sapiens
ggttctcaccccacttggaaaactggtggctgtgccccatttcatgggtgaggagactgaggctggaagaagtccaggcctgtgtctgtcctgtagctatygaccaggctctcagactccagaaacaaacctcagtaggaatcagaagtgttggccgggcgcggtctgcctgtagctatcgagcaggctgtcagactccag

SEQ ID NO: 420920 - DNA, 201 bp, Homo sapiens
tcagtagaaatcagaagtgtcggccggttgcggtggctcatgcctgtaatcccagcactttcggaagctgatgtgggcggatcatctgagatgaggagttygagaccagcctgaccaacatgggagaaacccatctctactaaaaatacaaaattagccaggcgtggtggcacacacctgtaatcccagctactcgggagg

SEQ ID NO: 420921 - DNA, 201 bp, Homo sapiens
cattgaagacatagtgtatttcctcgtatcctttctcccttgggtgtagttggggtggggaagcagggaaggctggtgcgatctccattccttgggctccrcgtccgagttcatggtgcgccgctgtgctgggagctgcagtgggaatgtgtgggacaccttgaccaaaggggagctttgtctcgtgtgttttgaaaaagg

SEQ ID NO: 420922 - DNA, 201 bp, Homo sapiens
gcctgcctcaaagttggcaaaacccacagcgtctcagagctgcgttcatgttctagttcctgcctctgtgccagtgagaccagaaaaccaggccactcaamagcctcttgcgtgtgctctctatgaatggaggctggggcaagggcaggacccctgggcctcaggcgagaagaagcagatttaccctcagctttcttcctg

SEQ ID NO: 420923 - DNA, 201 bp, Homo sapiens
caggagggcttggggagcgtgggcacttttctcatgagcagctactgcggcgttggcaggactcgctgctgctgctgctgcttgtgtaggtcggggagccrgagatccccgaggacgcgcgccggacagtcggcactgaccggcccacctggtagcagaggacacccccagccccccaagcattgaagacatagtgtattt

SEQ ID NO: 420924 - DNA, 201 bp, Homo sapiens
caccccaggtgaccacttgaggccactggtggaaaagcagcatgccctggggttcattttcagcctggtcgcgggcggcctcctgtgtgcccctttccctsatggtctggtgccctcggctccctccccacctcctgcccactgcttctcagtgtgatgtgggtgcagtgggtctgaaatgcggcctcctctgtccctttc

SEQ ID NO: 420925 - DNA, 201 bp, Homo sapiens
gtgctgggattacaggcgtgagccaccgtgcctggccaggactcctctcttttttctttttttttgagacagtctagctcagtagcctgggctggagtgcrgtggtgcaatcttgggctcactgcttcctccgcctcctgggtcccggttcaagcagttctcctgcctcagcctccccagtacctggaattacaggcaccc

SEQ ID NO: 420926 - DNA, 201 bp, Homo sapiens
cgattccagcacccaccaccgcctgaccctgtgtaacctgctgtcccgggtcccagagtgcactctgccccactgctctgctgcctgtcctgggaaagtakctttgccccactaggaaatgtaaacaggagggcttggggagcgtgggcacttttctcatgagcagctactgcggcgttggcaggactcgctgctgctgct

SEQ ID NO: 420927 - DNA, 201 bp, Homo sapiens
cgtgtgtctggatgtgagcgtgtgtgggcgcgtgctgagtgtgcatggatgagtgtgagccatggtgagtgtgtccccctcacacctacatttaaacacaygggcggcccctccacccacccctgcaccaccttcgtcacacccacatttaaacacgggcggcccctccacccacccactcctgcaccaccttttgttttc

SEQ ID NO: 420928 - DNA, 201 bp, Homo sapiens
caaagagatacttgccagtgttcatttagctctgctgtactttaaataaaagatatgtgtatctttagttcaaagctggtgccttggaacggtgtcaaacatgagaagaatgttccaacagcaagatggaatcattgtcttgcagtgttgaaattagaccggtggtggccaggcgcagtggctcacgcctgtaatcccagc

SEQ ID NO: 420929 - DNA, 201 bp, Homo sapiens
gtcagtctggcagtgaggacaaatgactccaatgaaagaaaagtaaataccagagcaagcacagtcagaaacagagtggggaggagaatcacaatagctgraactcaactctctgagaggcagtgcagccaaatagaggcagctgagagcagagtatgtggattagaacttttcgggagagttggccactgaaggagtagg

SEQ ID NO: 420930 - DNA, 201 bp, Homo sapiens
cccttcagagtcctctgtccagcagctccccagcccccaccacacccttccactcacacttctcttgctgctgcctggagtggccccaccaagtcagcgcygtttctctggaagcaccaggccactcgccatgctcgctgtttctcctggtcccctgcctgctccccaccagcccccgcccctgttgctggatgatcctcc

SEQ ID NO: 420931 - DNA, 201 bp, Homo sapiens
aaagagatacttgccagtgttcatttagctctgctgtactttaaataaaagatatgtgtatctttagttcaaagctggtgccttggaacggtgtcaaacatgagaagaatgttccaacagcaagatggaatcattgtcttgcagtgttgaaattagaccggtggtggccaggcgcagtggctcacgcctgtaatcccagca

SEQ ID NO: 420932 - DNA, 201 bp, Homo sapiens
tgaagcctctccttctgcatctgcctgttctgtatcccactcaaggccctcaggcatcccacgttccacattcctgaaatggccctgtctcccctcacccwcagcctgctcctcagcatggcagtcactgtctccacccagcttttctgtcaggttccctggggtcctgcacaagtccgtctctgccacatcccacgtcac

SEQ ID NO: 420933 - DNA, 201 bp, Homo sapiens
aagagatacttgccagtgttcatttagctctgctgtactttaaataaaagatatgtgtatctttagttcaaagctggtgccttggaacggtgtcaaacatgagaagaatgttccaacagcaagatggaatcattgtcttgcagtgttgaaattagaccggtggtggccaggcgcagtggctcacgcctgtaatcccagcac

SEQ ID NO: 420934 - DNA, 201 bp, Homo sapiens
ctgtggcgcagccccagagtgcacaccacgctccatgcacctcctgggcagggtggcagtagtggggaacatgggctggagctctgtggctcacactttttgtttgtttgtttgtttttgagacggagtctcactctgtcgcccaggctggagtgcagtggcgcgatctcggctcactgcaagctccgcctcccaggttca

SEQ ID NO: 420935 - DNA, 201 bp, Homo sapiens
tgccccctcatgcctcccccgatcttgttggggcatccttccgtctggaggctgggtcgggtgctgtccaggccttcctgtgacgtgtctcctggcaccaygtgccaccagaggtcagggctgggggcgggtgtgtgttgctaatgtgtatctgttccctgcagcgcaaatgggagttggcgaaggcaagtccataggcca

SEQ ID NO: 420936 - DNA, 201 bp, Homo sapiens
tcagcagcactggatgtcatcaagcgtttgaatttctgcctttctgataattggaaaatgcgttgttttgtttaactttgcattttctggatgacttacgrgggtcagtgtcttcatatgtttgtcagacattccttttgctccgtgactgacttgttcatgtgttttgcccattttgaggaggttgtcgggacatttcac

SEQ ID NO: 420937 - DNA, 201 bp, Homo sapiens
catgagccgggaggcagagcttgcagtgagccgagatcgcgctactgcactccagcctggtgggcgacagagtgagactccgtctcaaaaaaaaaaaaaaraaaagaaaagaaattagaccggtggtgttttcatcctttttccttgagaataagttttctggattttagtctatatattgaataaagcctacaggtcaaa

SEQ ID NO: 420938 - DNA, 201 bp, Homo sapiens
tgtggcgcagccccagagtgcacaccacgctccatgcacctcctgggcagggtggcagtagtggggaacatgggctggagctctgtggctcacactttttgtttgtttgtttgtttttgagacggagtctcactctgtcgcccaggctggagtgcagtggcgcgatctcggctcactgcaagctccgcctcccaggttcac

SEQ ID NO: 420939 - DNA, 201 bp, Homo sapiens
acctggtggcatttccagaacctcagccccgattccagcacccaccaccgcctgaccctgtgtaacctgctgtcccgggtcccagagtgcactctgccccrctgctctgctgcctgtcctgggaaagtagctttgccccactaggaaatgtaaacaggagggcttggggagcgtgggcacttttctcatgagcagctactg

SEQ ID NO: 420940 - DNA, 201 bp, Homo sapiens
cattttctggatgacttacgggggtcagtgtcttcatatgtttgtcagacattccttttgctccgtgactgacttgttcatgtgttttgcccattttgagraggttgtcgggacatttcactctccagtaaatgtggcccttggcgttactgagtcctaagaggtgtgtgttgccccaggtggagctgatggaggagggag

SEQ ID NO: 420941 - DNA, 201 bp, Homo sapiens
tgtgagccactgcacccggcgagtggatattttttccgaagtttgactccttttctatcaggagctacatgaattaccttataaatcacatgatgtggcaygggaagatgatgaaattatgacaggggctatgaaataagacaagggaacctctccatggcgaattgctgaggcagctggtgtcaggcctaagtggatctc

SEQ ID NO: 420942 - DNA, 201 bp, Homo sapiens
tggggaacatgggctggagctctgtggctcacactttttgtttgtttgtttgtttttgagacggagtctcactctgtcgcccaggctggagtgcagtggcrcgatctcggctcactgcaagctccgcctcccaggttcacgccattctcctgcctcagcctctggattagctgggactacaggcacccgccaccacgcctg

SEQ ID NO: 420943 - DNA, 201 bp, Homo sapiens
gaagatgatgaaattatgacaggggctatgaaataagacaagggaacctctccatggcgaattgctgaggcagctggtgtcaggcctaagtggatctcatwcatctgagagtcagtgaaggaacaagtgtggtggctcacacttgtagtcccagcactttgggaggctgaggtgggtggatcactggagcccaagagtttg

SEQ ID NO: 420944 - DNA, 201 bp, Homo sapiens
atctcatacatctgagagtcagtgaaggaacaagtgtggtggctcacacttgtagtcccagcactttgggaggctgaggtgggtggatcactggagcccargagtttgagaccagcctgcttaacatagggaaaccccacctctacaaaaaatacaaaaattaggcatgacggtgcatgcctgtagtcccagctactcagg

SEQ ID NO: 420945 - DNA, 201 bp, Homo sapiens
tatttcttttttctctgggtggcaagattatgaaaaaattttcttacgcttttctatattttccaagtttgaatttcactgtaagcacctggctttgtacygccctttttctgttacacagtcatcatttgcttgcttgttgtgggagcacttttgcacaggtctgcttggttagtgaaagcatgtctccctttctaggaa

SEQ ID NO: 420946 - DNA, 201 bp, Homo sapiens
gggaagcagggaaggctggtgcgatctccattccttgggctccgcgtccgagttcatggtgcgccgctgtgctgggagctgcagtgggaatgtgtgggacmccttgaccaaaggggagctttgtctcgtgtgttttgaaaaaggcttaatgaagagaatgttgttcattcttagtagtatagtttgcaattcttaatggca

SEQ ID NO: 420947 - DNA, 201 bp, Homo sapiens
gaagggatggaagctctttaacttttatgaagttattggtaggttggaggagagaaacgtgacgtgttcatcacagtatacgtatcttttttgtttttgtyttcaatttagtaaccagtagattctccaagctgcttttccgtgacgagaaagagaaacagtgaatttgtatcatcgggtcttagtttcttggggtcctaa

SEQ ID NO: 420948 - DNA, 201 bp, Homo sapiens
tctgctgcctgtcctgggaaagtagctttgccccactaggaaatgtaaacaggagggcttggggagcgtgggcacttttctcatgagcagctactgcggcrttggcaggactcgctgctgctgctgctgcttgtgtaggtcggggagccggagatccccgaggacgcgcgccggacagtcggcactgaccggcccacctgg

SEQ ID NO: 420949 - DNA, 201 bp, Homo sapiens
tggagcctgccctcagagtgtccctttccagtgctgtggcattctgtggcagcttccccaggtgtggtgacggggggggcggggcctccacctgtgacagycaggcttgagggtggacggcgtgcctctcccaggagccttccccatgtccttgccttgctgagaattgccctcccatgccgctgaggtgttaggtggttt

SEQ ID NO: 420950 - DNA, 201 bp, Homo sapiens
gaggaacgaaggcgaggttcctccttgctttggggagaaaagtattcaggaagtgggtgtgtgggaaacctgaagatggcgtgcacaggacacagcgtggkcggcctgggcagaagggcggctggctgtcctggagctgctgctggagcctgccctcagagtgtccctttccagtgctgtggcattctgtggcagcttccc

SEQ ID NO: 420951 - DNA, 201 bp, Homo sapiens
tccgctggctgtggccggctggcccctttctcttggccgcagcaagcactggggtgaggctgcacctaacggccatgtctcactaacagctgtctctgctyggaggtgccctgcccatgtttgagctggtggagcagcagccttcacatctggcctgccccgacgtcctgaacctgtccctaggtgagagctgccaagtcc

SEQ ID NO: 420952 - DNA, 201 bp, Homo sapiens
cccgggaggccttactgcttggtgtcagactgcccagctcagagtgcccgtcagggcctgtgcatccgcacgcggagccgtctgttaggagcttccagagygttctctcgacactgccagccccgtgttagcacctgggcctcagtcccacttgctcccaggcgccggttctgtggttggtttggaattaaagtcctgttt

SEQ ID NO: 420953 - DNA, 201 bp, Homo sapiens
cttcacatctggcctgccccgacgtcctgaacctgtccctaggtgagagctgccaagtccaggtggggtccctcggaggtacgatctgtgcccttgcttcyccagtcctggcccccttggttttgaccattaaggtgtgtgtgagcctgagccgtgagcacttggcagtggttcgcctgtgagaccaggtatggagtggag

SEQ ID NO: 420954 - DNA, 201 bp, Homo sapiens
gcacctgggcctcagtcccacttgctcccaggcgccggttctgtggttggtttggaattaaagtcctgtttgaagttgtcagacacagacatgaatttctkgggcgctccctgagtcagagtctcagaagacctgtgcaggctggcgtgagaggagcggcagccacactgcggccccacgcccaaggactgggctgctctc

SEQ ID NO: 420955 - DNA, 201 bp, Homo sapiens
gtaagtggctcagagtttccatggacaagaaagttgaaatcacgggcaacatacacacttcctcgcctgagtccccacgggagcctcggcgagtgttgtcrgtcgccccatgccgtgcaggtgctccgtggggcctgtgcgccaagccagatgcacggtggcctcgctctcctatcccggcggtcataccaagagaggaga

SEQ ID NO: 420956 - DNA, 201 bp, Homo sapiens
aggtcagggaggtctttgtaccgttctgatgcctcagtccatggctcctcattgtgtcttcctcttcagctggagctgcgagggtgtccaggaggggtgarttctgctcggagggcctgccgagggcattccttcctgtcctccagcatgagagggacagtgtggggcccctagagtacagggaagacctcctcataactg

SEQ ID NO: 420957 - DNA, 201 bp, Homo sapiens
agggcggctggctgtcctggagctgctgctggagcctgccctcagagtgtccctttccagtgctgtggcattctgtggcagcttccccaggtgtggtgacggggggggcggggcctccacctgtgacagtcaggcttgagggtggacggcgtgcctctcccaggagccttccccatgtccttgccttgctgagaattgccc

SEQ ID NO: 420958 - DNA, 201 bp, Homo sapiens
cagtcatcatttgcttgcttgttgtgggagcacttttgcacaggtctgcttggttagtgaaagcatgtctccctttctaggaaggttgtgcaggaccagcrttccctgtgcaggcgccactgcgtttcctgcagattccgaccggcactgcaacggattccctgccggagctgaggtcaccaacaggccgtcgccatggag

SEQ ID NO: 420959 - DNA, 201 bp, Homo sapiens
cgttatgttggattcagtgttagtaaagagactcatgtttggttgggtctctgttgaccttgtactctgtgctgcacctctgcttacagaatacctcccawccatgccggttcgtgactgctcacccgtttcagtgatctgagagggctggccctgaaagagtggttactgctcccgtgcagtttagagcttttcctgcac

SEQ ID NO: 420960 - DNA, 201 bp, Homo sapiens
ttagtgaaagcatgtctccctttctaggaaggttgtgcaggaccagcgttccctgtgcaggcgccactgcgtttcctgcagattccgaccggcactgcaayggattccctgccggagctgaggtcaccaacaggccgtcgccatggagacccctggtacttctcattcccctgcgcctggggctcacggacatcaacgagg

SEQ ID NO: 420961 - DNA, 201 bp, Homo sapiens
gggtctctgttgaccttgtactctgtgctgcacctctgcttacagaatacctcccatccatgccggttcgtgactgctcacccgtttcagtgatctgagarggctggccctgaaagagtggttactgctcccgtgcagtttagagcttttcctgcaccttgacttgtccgtttcacagtgaggacaccaagtcacaagaag

SEQ ID NO: 420962 - DNA, 201 bp, Homo sapiens
cgtggcggccacctgagcacacaggcatttggtgctgaatgctgtttgggaatgacgaggaaaactttcggatttttgcgttttttttttcagcatgttgsgataagtactgtgttcacgtggttgggaatctgaagggtataagagccggaactgtgtccttgcaccctcacgtccctcccccaggcaccacctcctgtg

SEQ ID NO: 420963 - DNA, 201 bp, Homo sapiens
gctgagtttgcccaactgtaggctaatgtaagtgttctgagcacatttaaggcaggctaggctaagctatgatgttaggtagattacgtgtattcaatgctttttttttttttttttgagacagagtttcactctcccacctgggctggaatgcagtggcgcgatctcaggtcactgcagcctccgcctcctgggtttaag

SEQ ID NO: 420964 - DNA, 201 bp, Homo sapiens
gccgaggcgggaggatcatgaggtcaggagattgagaccatcctggctaacacagtgaaaccccgtctctactaaaaaaaatacaaaaaattagccaggcrtggtggcgggcgcttgtagtcccagctactcaggaggctgaggcaggagaatggcatgagccgggaggcagagcttgcagtgagccgagatcgcgctact

SEQ ID NO: 420965 - DNA, 201 bp, Homo sapiens
gtcactgtcacctgtcactgtccatctttttgatgcttgacggttccacctttggccggtggccacctcagtctggtggtgtcttttgccgtgttctggcrtttttcgtttatgttttgagccctcccttatgttctgggttaagcagatgctgcaggcacctctgaacattccctgcctggccctggaatcagcctggct

SEQ ID NO: 420966 - DNA, 201 bp, Homo sapiens
ttcactgtaagcacctggctttgtaccgccctttttctgttacacagtcatcatttgcttgcttgttgtgggagcacttttgcacaggtctgcttggttastgaaagcatgtctccctttctaggaaggttgtgcaggaccagcgttccctgtgcaggcgccactgcgtttcctgcagattccgaccggcactgcaacgga

SEQ ID NO: 420967 - DNA, 201 bp, Homo sapiens
ggtctgcacaacccccggacctgttcacacccgcatggggacagctgtctgtgggctgcagagcaggcactgctcagtctgccccacgccaagggcccttractcacacccaggtggcccacccaagatgcctgatgcgctatgtcctgttccttctagattcttctgatgtagagcgactggaaagattcttcgactcag

SEQ ID NO: 420968 - DNA, 201 bp, Homo sapiens
cccctcggaccatggccagcgtgccgcaggagccggcctgggctcgtgcagtgaagtgagtggccgtgagcgcgtcctcctcatctctgtctccctgtggraaactctacaaacaaggcaatggcaatggaaccactcctgatgaccacgagggtcagacgcgggacagaggcccctcaggcctgagattgtgccggccgc

SEQ ID NO: 420969 - DNA, 201 bp, Homo sapiens
catgggtggcgtagacccctcggaccatggccagcgtgccgcaggagccggcctgggctcgtgcagtgaagtgagtggccgtgagcgcgtcctcctcatcyctgtctccctgtgggaaactctacaaacaaggcaatggcaatggaaccactcctgatgaccacgagggtcagacgcgggacagaggcccctcaggcctga

SEQ ID NO: 420970 - DNA, 201 bp, Homo sapiens
ctgtggctcagttttaacaaatgggctcattgagtgagttccaaattcatgtttcaccttccatgatgtagccaagctgagaactcttaaaaatgcctcaycgcctttttcactcagggccacctttttcccaaggaacttctcaaaactccctcaattccaattttattgaagttctacatgtaggctattgccttgaat

SEQ ID NO: 420971 - DNA, 201 bp, Homo sapiens
ggggtgagttctgctcggagggcctgccgagggcattccttcctgtcctccagcatgagagggacagtgtggggcccctagagtacagggaagacctcctyataactgaagagatgcgagtctgagagtctttattggctcttttgtaggaatcgctgcaggtctctttggtccttggagccagcccgtgaggccgggggc

SEQ ID NO: 420972 - DNA, 201 bp, Homo sapiens
ttaaatttattagaactaacacatactagaactggctctttgaagcaataacatatatgttttaaaaaaatcaaagttaaaatccctcccttggctaagcrctgtggctcccgcctgtaatcctagcactttgggaggtggaggcaggcagattgcttgagtccaggagtttgagaccagccgcctaggtaacatggtaaa

SEQ ID NO: 420973 - DNA, 201 bp, Homo sapiens
ttgggcttgggttgagcctgtggctgagagtagcctctgggtggcagtgtcctctgctctcccatccggggcctgcagtgggacactatgtcagatccccrgagatggtgtcttttttcctttgtaattaatgaataatccagtggtgacactgagcatgtcctggtgagctgtgtgactcctgcctgataatggtggttt

SEQ ID NO: 420974 - DNA, 201 bp, Homo sapiens
caaagaatagtagggacttctgaagattcaggagtggctttagagaggtagcagggacatcatgatgtttttcagctctttaaaaagataggagtgggccrgatgctgtggctcacgcctgtaatcccagcactttgggaggccgaggtgggtggatcacttgaggtcaggagatcgagaccagcctggctaacacagtga

SEQ ID NO: 420975 - DNA, 201 bp, Homo sapiens
actgtccatctttttgatgcttgacggttccacctttggccggtggccacctcagtctggtggtgtcttttgccgtgttctggcgtttttcgtttatgttwtgagccctcccttatgttctgggttaagcagatgctgcaggcacctctgaacattccctgcctggccctggaatcagcctggctcctctgagtggggagt

SEQ ID NO: 420976 - DNA, 201 bp, Homo sapiens
agaaacctcgatctagacgccgggcatgctccatgctcccggagtgtcttctcccatcaccgcaccctccggttgatgtgtcctccggaccattgactcaygggtgtgtgtaggcagaaggggtggaagcgaggaaaggcgttgctgaggaggcccggagggagcgggttctggctgtgctggcactagccaggctggcag

SEQ ID NO: 420977 - DNA, 201 bp, Homo sapiens
ggctccctccccacctcctgcccactgcttctcagtgtgatgtgggtgcagtgggtctgaaatgcggcctcctctgtccctttcctctgccggctcggccrcccacctgcccacctgcctcatcctcccaggtgaggagctcatctacctggacccccacaccacgcagccagccgtggagcccactgatggctgcttcat

SEQ ID NO: 420978 - DNA, 201 bp, Homo sapiens
aagactgaagatgacttcaatgattggtgccagcaagtcaaaaaggtttgtagccgccccacacccacagccgagctgagccacccagggagacaggcagyggggcgtgcaggggtcgaaggcctgcgtccaggtctcaggcagcctcactgggccgtggggagctttgtcccgcctggcacagctatgtagctgagcagg

SEQ ID NO: 420979 - DNA, 201 bp, Homo sapiens
ggaagcccccacctcttagccgactgcagatgggggtgtcgtgttctgctcatcgtcatttcgttttaggggtttttctgtaagactgaagatgacttcartgattggtgccagcaagtcaaaaaggtttgtagccgccccacacccacagccgagctgagccacccagggagacaggcagtggggcgtgcaggggtcgaa

SEQ ID NO: 420980 - DNA, 201 bp, Homo sapiens
tgggccggatgctgtggctcacgcctgtaatcccagcactttgggaggccgaggtgggtggatcacttgaggtcaggagatcgagaccagcctggctaacrcagtgaaaccctgtctctactaaaaatacaaaaattagccgggcatggtggcagatgtctgtaatcccagctactcgggaggatgaggcaggagaatttc

SEQ ID NO: 420981 - DNA, 201 bp, Homo sapiens
tgagaccggagaattgattgagcctgggagtttgaggctgcagtaagctgtgattacaccactgtactccagcctgggtgacaaaatgagtcccggtctcaaaaaaaaaaaagaaaaaaaaacaggagcagagctcttggacaaagccctgctgtggaaagcttgcttcatctggctgcagccgctccacaacgcccgtca

SEQ ID NO: 420982 - DNA, 201 bp, Homo sapiens
aattggggaaggttgcacaagggtgcaggggaggacagagggctctagagcagaggaatgtgggacagacagccaggctcggagctgtcgttgggaagcaygcagaacatactgcttctctgcctttcttcccctccccaagaccaaccagaggttgttccagggtagtccagctgttcccccaaaaagcatccccagaga

SEQ ID NO: 420983 - DNA, 201 bp, Homo sapiens
ctcccagcacaatctgtcctcccagcgattgggaattcctaaaggaaagatcagaagctcttggaaacccataacctccaggacccagcaactcaggcaaytggggaaggttgcacaagggtgcaggggaggacagagggctctagagcagaggaatgtgggacagacagccaggctcggagctgtcgttgggaagcatgc

SEQ ID NO: 420984 - DNA, 201 bp, Homo sapiens
gtgggtcttaggtctcaccacaggcagtgtagagacggctgcacttggaggagggcacccaaacattggacgaaccagtgtcaaagacgactttgaaggtytggggtggggtgccgatgccaatctcgccatagtactgggtctgtgggggtaaaaagagagggctggaggggctcaggggaccttgggtcttggggtctt

SEQ ID NO: 420985 - DNA, 201 bp, Homo sapiens
ctcccaggtggaaagagatgtcggggagtgtagggccctcgttacacttcacgacatactggggtggggggcaaagagagccttcttgagtatggaagacrtctcagcagacaaggagtcctgcgctggtggcctggtctctctgctggagagggctggggacagtgccccgccccatgggtgaccagccacatgtgtgga

SEQ ID NO: 420986 - DNA, 201 bp, Homo sapiens
agcttacagtttgccttagcttctgatcctagacaagttattcaacttctctaagcctattgattatgaaaagagggtaagaatataggagcataggattmttgggagtatttgatgagaaaatggagatgagggaacaggcatagtgatgcccaaacatggccacacattggaatcacctggggaaactgaaccccaggt

SEQ ID NO: 420987 - DNA, 201 bp, Homo sapiens
tccttctaattgtgggctacctaaagccttgtttttttctttcttttttttttttagactgagttttgctcttgttgaccaggctggagtgcaatggcgcyatgtcggctcactgcaacctcagcctcccaggttcaagcgattctcctgcctcagcctcccaagtagctggaattacaggcatgtgccaccacgcccggc

SEQ ID NO: 420988 - DNA, 201 bp, Homo sapiens
caggtgcatgggaggggaccctggggaggctattgggtatggggtgggcaggtggcatggagagagcaggaaggagagacagagaacttcggcatctagcrgaggctgggcttgctgatgtgagttttgggccggtggcgtgtgtaattctaggtcaggtgctcggggagtactggaaggtcacagccatgtgggggtttt

SEQ ID NO: 420989 - DNA, 201 bp, Homo sapiens
agggctgaaggcagggcctgcctgggtggcagagggcctcagcgggccaaggcgaagccaatgcggttgttacgccgatcaaactctgtgtagaactttcrgatgaaggtggcccccagggcccaggtgggtccagtgggtggcgggatatccatggcgtggatggccagtgtgcacagctttttactactgtaggattcc

SEQ ID NO: 420990 - DNA, 201 bp, Homo sapiens
agtttgagaactacagttctaacatgacctgtgcattgtaatctgtcactctttgagggtctctgtccagcctttctccctgccaccgagggggccgactygaacctcacctgaaatacatagtccgcgctggtgagcgtgtattctttgcctcccaggtggaaagagatgtcggggagtgtagggccctcgttacacttc

SEQ ID NO: 420991 - DNA, 201 bp, Homo sapiens
atgcaaaaacatccacaaaccacccaacggtgagcccgtagcccaggcttgctcccccataggtactgctgctttgcagcaacagccagatgtggcagagyagggtgttcctcagctccccaggctccaagtgggctgcagtgtacctccccgcaggtgtgggccctggagggtcaggagaggcctggggacagaaggggt

SEQ ID NO: 420992 - DNA, 201 bp, Homo sapiens
ctcttacccagtgctcacaacccagcaattactctccgagagcctcagagcaagggaaagcagtttcggaagcaaaaggcccagtgtgtgttgaggcttakcctcttacatatcacctccctgagcctcagtgtcctcatctgcaaagtgggaatgctgagttgttgggggcatgacttgagatgagacatgtgaaaagat

SEQ ID NO: 420993 - DNA, 201 bp, Homo sapiens
ccgtcttttttttttttgagatggagtcttgttctgtcactcaggctggagtgcagtggcacgatcttggctcagcaatctccaccttccgggctcaaacrattctcctgcctcagcttcccgagtagctggggattacaagtgcctgccaccatgcccggctaatttttgtatttttagtagagatggggtttccccatg

SEQ ID NO: 420994 - DNA, 201 bp, Homo sapiens
gctgggattacaggcaggagccaccgcgcccaaccacccatgcccttcttaatattcaggctgtgagctcctcaagtgcaaggggcatgtcctaatacttstgagttctctacagtgcttagttagcatggtgctctgggcaggaagcaaaagtcacagcttctagacctgactactagtgtcatttattgggcaagtcac

SEQ ID NO: 420995 - DNA, 201 bp, Homo sapiens
ccttcaggactgctggtcatatctgctgtccccagattgaaaacccctttctctgtgaggccttttctcaaatgctgtctcttccccttcttcagtctttwttttttttttttttttttttacataaggtctggctctatcacccaggctagagcacagtgggtcagtctctgctcactgcagcctccacctcccaggctg

SEQ ID NO: 420996 - DNA, 201 bp, Homo sapiens
tgggctgcagtgtacctccccgcaggtgtgggccctggagggtcaggagaggcctggggacagaaggggtccggggcagatgacctagggcggcccaactyacggtgatgatgtcctggctgagaaagccactgactgtccctgttgaatagcggagggtgagttctgttccattgtgcttgtagctggaggaatccgaag

SEQ ID NO: 420997 - DNA, 201 bp, Homo sapiens
ggtccatgagggaaaggagacagggagggagcgaggggctgagccaagcactcacgtccatgtagttggtgaggatcacggaggaggtggtgttgccaagkgtcagcctcttcatgggttggctccactcgggaccaagcctggccatgtccacacctcgttccttcaggctttctcggattgagggcattctcttgagga

SEQ ID NO: 420998 - DNA, 201 bp, Homo sapiens
ccccaggcccctcccttctctgttccccagcctggacagagcaggcagagagcaaatggtggctgtgcttaagaagtggctgcatttggaaagagggcagsatggtaatgcagtccttccccaccctccccaaccccagtgacggcagcattttttggagcccggggagggttgaggatttctgaccccttcatttgaatc

SEQ ID NO: 420999 - DNA, 201 bp, Homo sapiens
ttaccaattaccgtttaaaggtggtggtgtctgtcgggagaccaaaggtacaggagccccagagcagcagcagcagtccccagcgaggcatccttctccawccatccatgcttccctcagtctggggctctctctgagatccactgaggttctgtggctcccttagcccttccccttttatacactccatgcatggggtga

SEQ ID NO: 421000 - DNA, 201 bp, Homo sapiens
ctgtgcttaagaagtggctgcatttggaaagagggcaggatggtaatgcagtccttccccaccctccccaaccccagtgacggcagcattttttggagccyggggagggttgaggatttctgaccccttcatttgaatctgccagacaccagtcttgatgaggttgatatagtggaaattcccttcgtaatgctgggggtc

SEQ ID NO: 421001 - DNA, 201 bp, Homo sapiens
gaccagaggagaccaagcccactgcccactccttggttggagtctggtctgggcttccacactagggatcccaggggcacacatgctccagggtacagaartcggggtaagagtattgcctcaaccctgcacgcacacactctgtgccaatacacatctctgctgcggagcccagagagagctagagttgaccagggatcg

SEQ ID NO: 421002 - DNA, 201 bp, Homo sapiens
ggaaggaccagaggagaccaagcccactgcccactccttggttggagtctggtctgggcttccacactagggatcccaggggcacacatgctccagggtayagaaatcggggtaagagtattgcctcaaccctgcacgcacacactctgtgccaatacacatctctgctgcggagcccagagagagctagagttgaccagg

SEQ ID NO: 421003 - DNA, 201 bp, Homo sapiens
ctccccatctcttctcccctcctgtccccccacctcagcccttggagtcccagtccccacctgttgtagtagaaagagaagacgtcctcttttagcacccyttgggagatgatgttgtcgaagataggggtgaccctgccaatggcctgttcaatgaagcccatgcccacaaccccatcaaactcggccagcatgaagggt

SEQ ID NO: 421004 - DNA, 201 bp, Homo sapiens
tggggtgggcaggtggcatggagagagcaggaaggagagacagagaacttcggcatctagcggaggctgggcttgctgatgtgagttttgggccggtggcktgtgtaattctaggtcaggtgctcggggagtactggaaggtcacagccatgtgggggttttgtctccttactcggaatctctgcagagaaagagagacag

SEQ ID NO: 421005 - DNA, 201 bp, Homo sapiens
agactctccttccactccccatctcttctcccctcctgtccccccacctcagcccttggagtcccagtccccacctgttgtagtagaaagagaagacgtcytcttttagcaccccttgggagatgatgttgtcgaagataggggtgaccctgccaatggcctgttcaatgaagcccatgcccacaaccccatcaaactcgg

SEQ ID NO: 421006 - DNA, 201 bp, Homo sapiens
ttctctgcctgagttaccaattaccgtttaaaggtggtggtgtctgtcgggagaccaaaggtacaggagccccagagcagcagcagcagtccccagcgagscatccttctccatccatccatgcttccctcagtctggggctctctctgagatccactgaggttctgtggctcccttagcccttccccttttatacactcc

SEQ ID NO: 421007 - DNA, 201 bp, Homo sapiens
aagcaaaagtcacagcttctagacctgactactagtgtcatttattgggcaagtcacttgacctctctgaacaggtccatacttccctgtccagctgatcrtaaggactgaatgacaccgcatgtggaaaagccagggtgttgggaaggtgggaaccctgcacccctcccaccccttctctgcctgagttaccaattaccg

SEQ ID NO: 421008 - DNA, 201 bp, Homo sapiens
gttgcctaattttgattagacaaggctatttgtttattggtccgttcattcatttattccgtaatcacctgctgaacaactactttgtgcctcactgtgcyggacactggagctagaaagataatgatcatgactgcctttaaggaactccacctggcgggaggacagacaggaaacaggcacagacattccctctgaaga

SEQ ID NO: 421009 - DNA, 201 bp, Homo sapiens
cccctacatgtcagtgggcacagaggcagagaggaagccactcccttggtggcaagagggatgggagctgggtgttgggcaggattgctcatgcacagtasggcagggggatggaggagaggcactgtgggtcttaggtctcaccacaggcagtgtagagacggctgcacttggaggagggcacccaaacattggacgaac

SEQ ID NO: 421010 - DNA, 201 bp, Homo sapiens
ccccaggctccaagtgggctgcagtgtacctccccgcaggtgtgggccctggagggtcaggagaggcctggggacagaaggggtccggggcagatgacctmgggcggcccaacttacggtgatgatgtcctggctgagaaagccactgactgtccctgttgaatagcggagggtgagttctgttccattgtgcttgtagct

SEQ ID NO: 421011 - DNA, 201 bp, Homo sapiens
ggtgcaggggtcagggcacgcatccagcaggagctccacatccaatgtctccatctgagggcataagcccaggcagaggggcatctcagagagtgttccakctctgggccagggctgaaggcagggcctgcctgggtggcagagggcctcagcgggccaaggcgaagccaatgcggttgttacgccgatcaaactctgtgt

SEQ ID NO: 421012 - DNA, 201 bp, Homo sapiens
ctgatttaataggtatgggatgtggcccaggtaccaggatttttcaaagctctccaggtgacatgcacagccaagtttgagaactacagttctaacatgayctgtgcattgtaatctgtcactctttgagggtctctgtccagcctttctccctgccaccgagggggccgactcgaacctcacctgaaatacatagtccgc

SEQ ID NO: 421013 - DNA, 201 bp, Homo sapiens
cccactgcccactccttggttggagtctggtctgggcttccacactagggatcccaggggcacacatgctccagggtacagaaatcggggtaagagtattkcctcaaccctgcacgcacacactctgtgccaatacacatctctgctgcggagcccagagagagctagagttgaccagggatcggagagcagaggctgaga

SEQ ID NO: 421014 - DNA, 201 bp, Homo sapiens
cccacaaggcctggcacctaggggatgctaaggttttctccttctaattgtgggctacctaaagccttgtttttttctttcttttttttttttagactgarttttgctcttgttgaccaggctggagtgcaatggcgctatgtcggctcactgcaacctcagcctcccaggttcaagcgattctcctgcctcagcctccca

SEQ ID NO: 421015 - DNA, 201 bp, Homo sapiens
ttgttgaccaggctggagtgcaatggcgctatgtcggctcactgcaacctcagcctcccaggttcaagcgattctcctgcctcagcctcccaagtagctgraattacaggcatgtgccaccacgcccggctaattttgtatttttagtagagacagggtttctccatgttggtcaggctggtcttgaactcctgacctcgg

SEQ ID NO: 421016 - DNA, 201 bp, Homo sapiens
cagcaactcaggcaattggggaaggttgcacaagggtgcaggggaggacagagggctctagagcagaggaatgtgggacagacagccaggctcggagctgwcgttgggaagcatgcagaacatactgcttctctgcctttcttcccctccccaagaccaaccagaggttgttccagggtagtccagctgttcccccaaaaa

SEQ ID NO: 421017 - DNA, 201 bp, Homo sapiens
tttttagtagagacagggtttctccatgttggtcaggctggtcttgaactcctgacctcgggtgatctgcccccctcggcctcccaaagtgttgggattayaggcgtgagccactgctcccggccaaaccttgcttttgatatttgtaagaatctatcctgtagtactaacagtagctgggctcttacaacgtgcccagct

SEQ ID NO: 421018 - DNA, 201 bp, Homo sapiens
cttttccccccagttctttagtcctccaaggcccaacatgtacccccacctccaggaagcttaccccaaggcctccagcccacaccggcctcaccttcccktgggcctcagctctgtttttccttgggtctcacagcccacactgtacagcttgtggaactggtgccgtacggtggtgaagacagtggttgcagggggcat

SEQ ID NO: 421019 - DNA, 201 bp, Homo sapiens
accagccacatgtgtggagagtgtgaggtgaacaagcgaaggcctgagatggcctcatttgcctgggggatttgtgagccgataccaggtggcgctccccmcacccacagcaccttccctctttggcttcttacatcaaacagcctcttcttggctcccaaggcctccatgagcttctctatggagctggtagaacctgag

SEQ ID NO: 421020 - DNA, 201 bp, Homo sapiens
ggaggacagagggctctagagcagaggaatgtgggacagacagccaggctcggagctgtcgttgggaagcatgcagaacatactgcttctctgcctttctwcccctccccaagaccaaccagaggttgttccagggtagtccagctgttcccccaaaaagcatccccagagaggtcacagaaaaggagcaggtacaaggac

SEQ ID NO: 421021 - DNA, 201 bp, Homo sapiens
gctatgtcggctcactgcaacctcagcctcccaggttcaagcgattctcctgcctcagcctcccaagtagctggaattacaggcatgtgccaccacgcccrgctaattttgtatttttagtagagacagggtttctccatgttggtcaggctggtcttgaactcctgacctcgggtgatctgcccccctcggcctcccaaa

SEQ ID NO: 421022 - DNA, 201 bp, Homo sapiens
aattaattttcaacaagggtgtcaagaaaattcaatgtggggtaagaatagtcttttcaacgattggtgctaggaaaaccgcatatgtacatgtaaaagamtaaagctggatccctacttcacaccatatagaaaaattaactcaaaatggatcaaatacctaaatgtaagagctataaccataaaaatcttagaaaacac

SEQ ID NO: 421023 - DNA, 201 bp, Homo sapiens
tggtatcttttggttgcaagcaacaaaaacgaatttaagaaaaagaagaagtaattaaatccggccgggcgcggtggctcacgcctgtaatcccagcactktgggaggccgaggcggacggatcacgaggtcaggagatcaagaccatcctggctaacacggtaaaaccccgtctctacttaaaaaaaaattagctaggta

SEQ ID NO: 421024 - DNA, 201 bp, Homo sapiens
agttcgagaccagcctggccaacatggcaaaaccccgtctctactaaaaatacaaaaattagctggttatggtggtacacacctgtaatcccagctactcrcgaggctgaggcgcgagaattgcttgaatctgggaggtagaagttgcagtgagccaacatggcaccactgtactccagcctggttgacggagtgagactt

SEQ ID NO: 421025 - DNA, 201 bp, Homo sapiens
ttttcctcacgtgaaaaattggatactttctttgtattccttttgaaagcagtttgctttctctgtttgtctagataagttagggagagttgtctgtacarcaaataagcattgttcattttgtgtccgatttttaatcaacttccacaattaagtcttctagaagatcaaattgaatactttcagtttggaatgaattaa

SEQ ID NO: 421026 - DNA, 201 bp, Homo sapiens
aataggtagatctcattttaataaatatagcaatgttcttgccacttctaaaagattcaatgctactaattctctttgagttacaacgtggaacatatcayagatgtctttccccaatactttgcctattcagaagtcagtatacttaaattgtgtttgatatatccataatttaatttgatgttcttaggaatttaaccg

SEQ ID NO: 421027 - DNA, 201 bp, Homo sapiens
agcattcttcttttatacatttcagatattatttgttgatcagacactcttcttcctgtcttggaccacacagtgttttaggtatctgctgtcagttgatyagagttggcatgagaaacaaaaaaaatctattggcatctctgacttagaagatcagttttgggagaatcttctggaatatctattctattcttaagttta

SEQ ID NO: 421028 - DNA, 201 bp, Homo sapiens
ttttttttttttttttgagatggagtttcactgatgttgcctaggctggagtgcaatgccacgatctcagctcactgcaacctccgcttccaggttcaagygattctcctgcctcagcctcccaagtagctgggattacaggctcccgccaccatgcctggctaatttttgtatttttagtagagatggagtttcaccatg

SEQ ID NO: 421029 - DNA, 201 bp, Homo sapiens
cccaggaccttcactcgtcctgtcccaccgcagccccgcctcctccacgccgggtgagctgtggcctagcagcatccgaggctccgccccccccacccccmagcgtctgcgctctagcgaaggggcggagcagggcggtggcgcgctgacacctggcggcggcggagggcgggcagaaggcgagcgtgggctgggattggc

SEQ ID NO: 421030 - DNA, 201 bp, Homo sapiens
actacaaacctgtgtaatttactgtaagatttttgatggctgcatgacagatgttggcttattgtaaaaataaagttaaagaaaataatgtatgtattggyaatgatgtcattaaaagtatatgaataaaaatatgagtaacatcataaaaattagtaattcaacttttaagatacagaagaaatttgtatgtttgttaaa

SEQ ID NO: 421031 - DNA, 201 bp, Homo sapiens
atgttaggcccaagtgagatgaaggaaaggctctttgataagcatttggcattttagatcagagatggcaagtacgtatgacatagcattcttcttttatmcatttcagatattatttgttgatcagacactcttcttcctgtcttggaccacacagtgttttaggtatctgctgtcagttgatcagagttggcatgagaa

SEQ ID NO: 421032 - DNA, 201 bp, Homo sapiens
gcactgtgggaggccgaggcggacggatcacgaggtcaggagatcaagaccatcctggctaacacggtaaaaccccgtctctacttaaaaaaaaattagcyaggtatggtggcgggcgcctgtagtcccagctacttgggaggctgaggcaggagaatggcatgaacccgggaggcggagcttgcagtgagccgagatcta

SEQ ID NO: 421033 - DNA, 201 bp, Homo sapiens
tcgttccgtatttcttaatattgcatgtttggtatcttttggttgcaagcaacaaaaacgaatttaagaaaaagaagaagtaattaaatccggccgggcgyggtggctcacgcctgtaatcccagcactgtgggaggccgaggcggacggatcacgaggtcaggagatcaagaccatcctggctaacacggtaaaaccccg

SEQ ID NO: 421034 - DNA, 201 bp, Homo sapiens
cccagctactcgcgaggctgaggcgcgagaattgcttgaatctgggaggtagaagttgcagtgagccaacatggcaccactgtactccagcctggttgacrgagtgagactttgtctcaaaatgaaacaaaaacacgcacaaaaaaaggtctagttcttcaaaacttcttttcttgaaatgtcaccatggtcttattagac

SEQ ID NO: 421035 - DNA, 201 bp, Homo sapiens; identical to SEQ ID NO: 115654

SEQ ID NO: 421036 - DNA, 201 bp, Homo sapiens; identical to SEQ ID NO: 115652

SEQ ID NO: 421037 - DNA, 201 bp, Homo sapiens
gctcgctaggtcgggatcagcggggccggcccagcccccaggcgcagctcttcaatccgcatgcagcctcctagggtggggacgctgggaggtggccccarcgctgctgcagtccgggcctccaccgctctccggtcctctctgcaccggctgggaggtgaattaggcagaatcccccagtcgccgcgggagcagcgcctg

SEQ ID NO: 421038 - DNA, 201 bp, Homo sapiens
caccgccttccttgtgtgaaagcctctccatcttccgccttcgcagcctcaccgccactactcctctatagaaaaatctgtgttccagacagccatttctkcagttatccagcgcctgctgagccccaggccccattctaggatctgggtccttcctgtcctcaagcagtgcacattcccggaaccgtgttttgtttcttt

SEQ ID NO: 421039 - DNA, 201 bp, Homo sapiens
agctcttcaatccgcatgcagcctcctagggtggggacgctgggaggtggccccaacgctgctgcagtccgggcctccaccgctctccggtcctctctgcrccggctgggaggtgaattaggcagaatcccccagtcgccgcgggagcagcgcctgccgagcagccgtgcccggagcccgccccatgctggagcagaggga

SEQ ID NO: 421040 - DNA, 201 bp, Homo sapiens
ccgcttccccagcatccccctcttctccagctgggccttcaggcgggcaatctcctcttggaattcccgcagcagtgtgtccttggggtcctcgttcaccyggggcttgttcttgatgttcttggctcggttggcaaagcgcaaggtggagaggctctcatcgtagctgtgagaagctggccccagtgtggctaccatgat

SEQ ID NO: 421041 - DNA, 201 bp, Homo sapiens
ggtcctctctgcaccggctgggaggtgaattaggcagaatcccccagtcgccgcgggagcagcgcctgccgagcagccgtgcccggagcccgccccatgcwggagcagagggagcgctgccgtaaacagcttcggcaacaatgagataaaggaagaggaaaatgggatgggggtgggcggcgagctgtcttctcctccttc

SEQ ID NO: 421042 - DNA, 201 bp, Homo sapiens
caatctctgctgtaatttctggtgaacaggatttgtcaacctaaataaaaaaatcatagaaaaatctgaaaattaagactctggatattataaaaagaacmgttcatagttgttcccctttactgagaacctaatgggtgggtcacagatgttttatctaatcttcacattcacttacctggtaagtggctgcactggaac

SEQ ID NO: 421043 - DNA, 201 bp, Homo sapiens
ccctcttagtccatgccccctacatctctcacctgcacgctgcagtagtattttaacaggaacccctggttccacccttatcctcctactcttcctctgcracagaacagctagagtcttccttcagaactacatatcaaatcatcctacctcctcctctccatcctccaatgacgtctcatccctctcagaacgaaatcc

SEQ ID NO: 421044 - DNA, 201 bp, Homo sapiens
ctatcaggggcctcacggtttcgtcatacaggtcggcctgcttggagctggcatcatacacggcgtcaaaggtgaaggtcttgggcagctcccccggggcrgcgcgggggttccgcagggtcacctggcccagtttcacgtccatggtcaggatctgctcgtgaccagcagcctcctccttcctgctgagggggcggcacc

SEQ ID NO: 421045 - DNA, 201 bp, Homo sapiens
tgttccttgactctgtcctttcctccccctgtcccggtctacttctggccttcctcttctctctgctggagcccaccttccagctgattctctcgcacctyatgtccgcacaagcacccgggagccccctcgctcctcctccaccgccttccttgtgtgaaagcctctccatcttccgccttcgcagcctcaccgccacta

SEQ ID NO: 421046 - DNA, 201 bp, Homo sapiens
gctgttcccgccgcaggtcctccagcatcttctccttctcctccagcagcttctgcttctcctcgctcaccaggctgcggtcatcctggatggctgccttmtcctcctccagccgctccttctgttcctgcaggtaattctccatgttcttctccaaggctgactccaggatgggctggggcgggcggtggttgttgttgt

SEQ ID NO: 421047 - DNA, 201 bp, Homo sapiens
ccagcgcctgctgagccccaggccccattctaggatctgggtccttcctgtcctcaagcagtgcacattcccggaaccgtgttttgtttctttaactggckttgctgtgcagcatctttgtgcttttgcccagaggcctggtcacccttcggcacttagtgccctgccacttgggcagttcaagcacctcctcctccacga

SEQ ID NO: 421048 - DNA, 201 bp, Homo sapiens
ctggataaaagggattctcaccctgttctccccacttgatgtcaccacctggcaggggacttacccagatcctcttgtgtgagagggagattggaatcgcrttgcttacaagatgtgtgatcctaggccaggcgcggtggctcacgcctataatcccagcactttgggaggccgaggcgggtggatcatgaggtcaagaga

SEQ ID NO: 421049 - DNA, 201 bp, Homo sapiens
tctcactctgtcacccaggctggagtgcagtggcacattcttggctcactgcaacctccacctcctgggttcaagtgattctcctgcctcagcctccccargtagctgggactacaggtgtgtgccaccacgtctggctaatttctgtatttttagtagagatggggttttgtcatgttggccaggctggtctcaaactcc

SEQ ID NO: 421050 - DNA, 201 bp, Homo sapiens
aagtgtaattccacaaggccaaggaccaagccagagtcctatccatggtccactctgcagagggcagttgagtctgtggactgagcccaagctgtctgtcyttactctccatatgagaaccagattgagaggtgctgttatctgaaacctggagacccttcttcacagaggcaccagaagagtctttccacaaaacatttc

SEQ ID NO: 421051 - DNA, 201 bp, Homo sapiens
catagcgtgggctgccggtcgtgggcggccgggggtcccgggcctcccgagggcagaggctcacctggagtcctccccccaagctgggggatcattcattscagccagcgcggctgctgctgcctctgcctccgccttccccgccgccgccactggagaatgagagagaaaaacagaaggggatggggcggagcagcggca

SEQ ID NO: 421052 - DNA, 201 bp, Homo sapiens
gccccaagagctgggagcaggtccccagttggagtcaggaaaccctagctcaggcctggctcagccacaatatgccgcgtgatgctggacctctgatgccrggactcatggtgacttcacccctctgagcctgtgcccttatatgcccagcaaggggcagccctgcccagccacccacacaatgatggtgtcaggagcaaa

SEQ ID NO: 421053 - DNA, 201 bp, Homo sapiens
gccacaaccatcattttgaatggctgcttaacttaatgtaattttttttttttttttgagacagattttcgctgttgttgtccaggctggagtgcaatggygcgatctcggctcaccacaacctctgccttccgggttcaagagattctcctgcctcagcctccctattagctgggattacagccatgtgccaccacgcct

SEQ ID NO: 421054 - DNA, 201 bp, Homo sapiens
gcccagaggcctggtcacccttcggcacttagtgccctgccacttgggcagttcaagcacctcctcctccacgaagccttcccttagcaatttttttttttctatagtgaaagaggcacagaatttacctaagacaaaacctggattgaagttccagttctgatggccatccaatggagtggctttgagcagtcactcccc

SEQ ID NO: 421055 - DNA, 201 bp, Homo sapiens
atagcgtgggctgccggtcgtgggcggccgggggtcccgggcctcccgagggcagaggctcacctggagtcctccccccaagctgggggatcattcattgsagccagcgcggctgctgctgcctctgcctccgccttccccgccgccgccactggagaatgagagagaaaaacagaaggggatggggcggagcagcggcag

SEQ ID NO: 421056 - DNA, 201 bp, Homo sapiens
aggtctggacgagtcaagaaagccgtagccaacgctgttcggcaggaagtaaaatctctttgtggcttggaagcctctcaggttcctgcagaggaagctcwttctggggctggtgagccctatgacatcatcgacagcagtgatgagatggatgcccaggaggaaaacatccatgagagaactgtctccagaaaaaagaaa

SEQ ID NO: 421057 - DNA, 201 bp, Homo sapiens
aaagttccatgatagggtgtgggatggccgcggagccgggcggagctggcttgcggctaccggggccggctctctggccggagacatggcccgggggcccrgcccgctaggcaggcctcgccccgatacggtcgccatgcccaagagaggaaagcgactcaagttccgggcccacgacgcctgctccggccgagtgaccgt

SEQ ID NO: 421058 - DNA, 201 bp, Homo sapiens
tctggcggtcgtgaggtctggacgagtcaagaaagccgtagccaacgctgttcggcaggaagtaaaatctctttgtggcttggaagcctctcaggttcctrcagaggaagctctttctggggctggtgagccctatgacatcatcgacagcagtgatgagatggatgcccaggaggaaaacatccatgagagaactgtctc

SEQ ID NO: 421059 - DNA, 201 bp, Homo sapiens
gacgcctgctccggccgagtgaccgtggcggattacgccgactcggatctggcggtcgtgaggtctggacgagtcaagaaagccgtagccaacgctgttcrgcaggaagtaaaatctctttgtggcttggaagcctctcaggttcctgcagaggaagctctttctggggctggtgagccctatgacatcatcgacagcagt

SEQ ID NO: 421060 - DNA, 201 bp, Homo sapiens
acttgcactgctgccttttggaccaggttgtaccgaaggcactacacgctggatgcttccctgcctttgcgtctgcgaccagagtcaatggagaagctgcrctgtctccgggcttgtgtgatccgatctctgtaccatatgtatgagccatttgctgctcgaatctccaagaatccagccattccagaaagcacccccagc

SEQ ID NO: 421061 - DNA, 201 bp, Homo sapiens
tgcctggactgtcacttgcactgctgccttttggaccaggttgtaccgaaggcactacacgctggatgcttccctgcctttgcgtctgcgaccagagtcartggagaagctgcactgtctccgggcttgtgtgatccgatctctgtaccatatgtatgagccatttgctgctcgaatctccaagaatccagccattccaga

SEQ ID NO: 421062 - DNA, 201 bp, Homo sapiens
ctggtgagccctatgacatcatcgacagcagtgatgagatggatgcccaggaggaaaacatccatgagagaactgtctccagaaaaaagaaaagcaagagrcacaaagaagaactggacggggctggaggagaagagtatcccatggatatttggctattgctggcctcctatatccgtcctgaggacattgtgaattttt

SEQ ID NO: 421063 - DNA, 201 bp, Homo sapiens
gcctctcaggttcctgcagaggaagctctttctggggctggtgagccctatgacatcatcgacagcagtgatgagatggatgcccaggaggaaaacatccrtgagagaactgtctccagaaaaaagaaaagcaagagacacaaagaagaactggacggggctggaggagaagagtatcccatggatatttggctattgctg

SEQ ID NO: 421064 - DNA, 201 bp, Homo sapiens
agcctctcaggttcctgcagaggaagctctttctggggctggtgagccctatgacatcatcgacagcagtgatgagatggatgcccaggaggaaaacatcyatgagagaactgtctccagaaaaaagaaaagcaagagacacaaagaagaactggacggggctggaggagaagagtatcccatggatatttggctattgct

SEQ ID NO: 421065 - DNA, 201 bp, Homo sapiens
ttggaagcctctcaggttcctgcagaggaagctctttctggggctggtgagccctatgacatcatcgacagcagtgatgagatggatgcccaggaggaaarcatccatgagagaactgtctccagaaaaaagaaaagcaagagacacaaagaagaactggacggggctggaggagaagagtatcccatggatatttggcta

SEQ ID NO: 421066 - DNA, 201 bp, Homo sapiens
gccgtagccaacgctgttcggcaggaagtaaaatctctttgtggcttggaagcctctcaggttcctgcagaggaagctctttctggggctggtgagccctrtgacatcatcgacagcagtgatgagatggatgcccaggaggaaaacatccatgagagaactgtctccagaaaaaagaaaagcaagagacacaaagaagaa

SEQ ID NO: 421067 - DNA, 201 bp, Homo sapiens
tttttgtccaagtgtttgtgtaaacatgtgatttaaagttccatgatagggtgtgggatggccgcggagccgggcggagctggcttgcggctaccggggccggctctctggccggagacatggcccgggggcccggcccgctaggcaggcctcgccccgatacggtcgccatgcccaagagaggaaagcgactcaagttcc

SEQ ID NO: 421068 - DNA, 201 bp, Homo sapiens; identical to SEQ ID NO: 385816

SEQ ID NO: 421069 - DNA, 201 bp, Homo sapiens; identical to SEQ ID NO: 385817

SEQ ID NO: 421070 - DNA, 201 bp, Homo sapiens
ataaaccaagagatgagtggactgggtcaagcctgacacaaagtaacatagaaaggcgaaggcaaaaacaaagggaaaaaaaacccccaaaactgtactayattcccaagggagggagatttcacaaaatgagcagtggataagattagtaatatgaacagcaagttgtgcagcctctggaaagaatacgcaagggtatca

SEQ ID NO: 421071 - DNA, 201 bp, Homo sapiens
aacagtggactaaacaggaaaaaaagcttggggccacactactttctctcaaaatgtcagacaaagaaattcttctgcagactggtggaagcttgtaaggyatttagcaaaaaagttaccagattataatgccttttagaaagatgccaagcaaaagtatttagtgattttgaagtgaccagaacatacctatttttaaat

SEQ ID NO: 421072 - DNA, 201 bp, Homo sapiens
gtctggccctgctggccctgcacctgcacagcctgtccaccctggatctggatctgtccaggtgggaccaactgtatctgcagaaaagaacataaaaaaasgattgtactctactgacactggtctcctttggtccccgagagttatccacatttctctagaaagcagaaaatgttctgaagaggaaaaaagaagtcctgc

SEQ ID NO: 421073 - DNA, 201 bp, Homo sapiens
tgggcaccagatacttaagacctttatgtgccagggaatgcactagatgattcacatgagtaaaaataattttcagagtcctaggacaagtctcctcttcmtccccaaagaactcagccactatcacggggcagaacccataaacaagtcagaaactcgttttttcaatcttaggaaaaaatatagctctagatcccttct

SEQ ID NO: 421074 - DNA, 201 bp, Homo sapiens
aacagcaccagacatgaggagaggagaagttcatgcagtgctcacagagaatcagagagggtaccactacctggagggtctggacttgctggcctgaggcrgatgccacctgggcctcagtctgcaactgcacagcagtgacaccaccctgctgctgagaacaggaacaggaagagcttgaaatatgtcaggaaggaaatg

SEQ ID NO: 421075 - DNA, 201 bp, Homo sapiens
ctgaatgatatctgagaacctttaataaagacttcattaaaaaattaaaatgatataagttagcaatcggcaattcatcttggaaatatgggagggaggayagatatataaacaaaaatgtagataggtctttctctctgatttttcactaggccctcataaattccaacatctgaataataaaatgacgtgacctaactg

SEQ ID NO: 421076 - DNA, 201 bp, Homo sapiens
caaccaattgagtggtgctgttatcagtttcattgctgtaatgtttaaagcagttttgcttccatacctgctgctgaatctgtcctgcctggacaacaatytgctctgtcgaactattgctgtttgctgtatactgctccatggtccctccaagtgagattcctgtccactctggagatcctagaaggctgtgaggtacac

SEQ ID NO: 421077 - DNA, 201 bp, Homo sapiens
acagggtttcaccatgtttgccaggatggtctcgatctcctgacctcgtgatccgcctgcctcggcctcccaaagtgctgggattacaggcgtgagccacygcgcccggccgagccctgaataaattctaatgtcacttataagaatttcttcctgtcacttataccatttcttttccaggcattctcaaagaaacatgct

SEQ ID NO: 421078 - DNA, 201 bp, Homo sapiens
gattaccgacagtgccttaaggatcgatctcaatcccaagaggtcaacataataaattttaggaggcatcaagttgcatgttcaagaaaatttcaaagacmaagctgaaaaatacattttcttaccatgaccatccctcctgaattgaccacattgcctgccactggtagtgtcacagtgacagtcccttgcccactgctg

SEQ ID NO: 421079 - DNA, 201 bp, Homo sapiens
ttctttcggcttaatttatgttcaaagttggctgtacatcattaccaaacactattggtggcaggggtaggggtgggattgaaaggataaagtgatgacartaagaggtagttatctgctggatgcttagcagcactagcaataaagtgagatgccagttctacattctagattctactttgaatcatttctaattcaatg

SEQ ID NO: 421080 - DNA, 201 bp, Homo sapiens
tttttacttccttttcccttctcatagctgaagaaacacttaaattctggaaatagcgactcagtatcatggccagcagccttaatgaagatccagaaggragcagagtgcgtaacaactattgacttattggtgaactgaaattcgtaataatggaggtcaaaagcataaacactttttaattaaattaatgattgcatt

SEQ ID NO: 421081 - DNA, 201 bp, Homo sapiens
atagggtatttaattaaacccagacctaacagatagggagatagacatgcatgaaaaagataaagggcatacagactgaaaattctaaggacaaagacccrtggcaggaagtagaccaatgaacagtaaacagcagcatagagaccaagaagtagaaatgcagttagaggtagacaggagctggagcatgtaaggctttgc

SEQ ID NO: 421082 - DNA, 201 bp, Homo sapiens
agatcacttatgtgaaaggagacctttttgcatgcccgaaaacagactctttagcccactgtatcagtgaggattgtcgcatgggcgctgggatagctgtyctctttaagaagaaatttggaggggtgcaagaacttttaaatcaacgtgagttttggaaaccacttacctgatttgccctggctagagcaccttttaatc

SEQ ID NO: 421083 - DNA, 201 bp, Homo sapiens
gcttatgcccataatcccagcacttcaggaggctgaggcgagcagattaggtcaggagttcgagaccagcctgggcaacatggcaaaaccctgtatctackgaaaaatacaaaaattatccaggcatggtaggacatgcctgtggtcccagctacttggggaactgaggtgggaggatcatttgagcctgggaggcagagg

SEQ ID NO: 421084 - DNA, 201 bp, Homo sapiens
aaataagtagaggcttttagcagggaattttcaggtggtatgctttcttccctgttagagatatgcagcttatctcttggaagtggcacagagacttcacytaccttgcttaaaaatattgacaataggcatcatctgctaatctcatgggtttcctaggaaaaggaaagattgctacgtggcagagtctgggtttctcag

SEQ ID NO: 421085 - DNA, 201 bp, Homo sapiens
ttcaggtcaggacgcagtggctcatgcctgtaatcccaacgttttgggagaacaagaagggaggatggcttgagcccaggagttccaggttagtgagctaygattgcgccactgtactccagcctggatgacagaggaaagccctgtatccaaaaacaaacaaaaaaacgttccaaaggcaaatatacatgttttttagac

SEQ ID NO: 421086 - DNA, 201 bp, Homo sapiens
tgggtatagaatagaaaatcaggttttcagccagactgtgagtctgttaggggcactaacaggcttccctaaattctatcttgtctctaatacacaatacatttatggctgtaaactaataaaattaaggttatgatgtaaacgaatatatatgattccatttatataaaatctccaaaagacatcagtaatctagagaca

SEQ ID NO: 421087 - DNA, 201 bp, Homo sapiens
tttggcattttttgtcgtttgtgcacataacttggtgttatccttatgtcatcagattcctcctaggggagagtttttgttttaattacaaaattaaattytacattgttaccaagaaatttgtggtgataaaaatggaaaaataaaaatttggggagttagtgaggttctgtgcttatgtctatttgttctggacatggg

SEQ ID NO: 421088 - DNA, 201 bp, Homo sapiens
tgctgctgaatctgtcctgcctggacaacaatctgctctgtcgaactattgctgtttgctgtatactgctccatggtccctccaagtgagattcctgtccrctctggagatcctagaaggctgtgaggtacactcctgttagaaaggtggggaaagaaactaaagtgagattgtcaataaaggccttaccagacaattaac

SEQ ID NO: 421089 - DNA, 201 bp, Homo sapiens
tggctcactcaatttctttcacaactcaacaagtgggtcctgatagacgcttgatgaaagactagactacaacaaagggctgtccagcttccccatcatcmtacagatttctggattggagctttctaatgcacttctctccactaattatgtaccatgtgccagacactgttctgaaggttttaaaaataaaaagaaatc

SEQ ID NO: 421090 - DNA, 201 bp, Homo sapiens
ctgggtatagaatagaaaatcaggttttcagccagactgtgagtctgttaggggcactaacaggcttccctaaattctatcttgtctctaatacacaatacatttatggctgtaaactaataaaattaaggttatgatgtaaacgaatatatatgattccatttatataaaatctccaaaagacatcagtaatctagagac

SEQ ID NO: 421091 - DNA, 201 bp, Homo sapiens
tctgggtatagaatagaaaatcaggttttcagccagactgtgagtctgttaggggcactaacaggcttccctaaattctatcttgtctctaatacacaatacatttatggctgtaaactaataaaattaaggttatgatgtaaacgaatatatatgattccatttatataaaatctccaaaagacatcagtaatctagaga

SEQ ID NO: 421092 - DNA, 201 bp, Homo sapiens
ttctgggtatagaatagaaaatcaggttttcagccagactgtgagtctgttaggggcactaacaggcttccctaaattctatcttgtctctaatacacaatacatttatggctgtaaactaataaaattaaggttatgatgtaaacgaatatatatgattccatttatataaaatctccaaaagacatcagtaatctagag

SEQ ID NO: 421093 - DNA, 201 bp, Homo sapiens
gtagattaccgacagtgccttaaggatcgatctcaatcccaagaggtcaacataataaattttaggaggcatcaagttgcatgttcaagaaaatttcaaaracaaagctgaaaaatacattttcttaccatgaccatccctcctgaattgaccacattgcctgccactggtagtgtcacagtgacagtcccttgcccactg

SEQ ID NO: 421094 - DNA, 201 bp, Homo sapiens
ttctagttctgaggtaaactcagatctgtaaacattttaaaatctttagagatcagtgtttggttttctttttcatttctactattaaataactttttctyagaaaagaaatctggagaagtggctgttctgaagagagatgggcgatatatatattacttggtaagatggggccaattcctttttttttcagggccagtt

SEQ ID NO: 421095 - DNA, 201 bp, Homo sapiens
aagattgctacgtggcagagtctgggtttctcagcctctatttagtggattttcttgaaggtctcccataacagtgtggaaagggcaatatgacatttgtyatccttgctctagactaattctataaaaatgtgcttactcttttaattattgggatgttgggggaatgtgatgacttttctttggctatcattttgggat

SEQ ID NO: 421096 - DNA, 201 bp, Homo sapiens
caaaactgtactatattcccaagggagggagatttcacaaaatgagcagtggataagattagtaatatgaacagcaagttgtgcagcctctggaaagaatrcgcaagggtatcaatcttctaagagtgaggttccaggcaccgaatggactggtcttacagcccggacaagaaacggagaccgcttggttgggctccaaga

SEQ ID NO: 421097 - DNA, 201 bp, Homo sapiens
aaaaaacccccaaaactgtactatattcccaagggagggagatttcacaaaatgagcagtggataagattagtaatatgaacagcaagttgtgcagcctcyggaaagaatacgcaagggtatcaatcttctaagagtgaggttccaggcaccgaatggactggtcttacagcccggacaagaaacggagaccgcttggttg

SEQ ID NO: 421098 - DNA, 201 bp, Homo sapiens
tggatgttagagctgtctaggaatggtcttcggtgactcacaacaagaattgacttccaaactcctaccatggttgcccataagggtgtcagactagattrtttgtttttatgctttgagtggatatagcttaaaagagaggagcagtttcctagatactttcgttaccatcaatggagatattttgtctttttcaggatt

SEQ ID NO: 421099 - DNA, 201 bp, Homo sapiens
aatggaatgacccagaaaaaaacataagcagcaatagcactctaaagccaacttgatttttgatctatttctctctttaccaatgaactccctatttctawtcttctgtttagaaacacttcttccctaaaagcttacacaatccctagattagcaaccactatagaaactgctacacatggaatcactgttggtcacaga

SEQ ID NO: 421100 - DNA, 201 bp, Homo sapiens
cccagtgaaaggaatacgcaggcgctttccagacgcgccagacccttcaactcaaaacgctgccttgagcttagtactacgcaggcgctaactagcccctytgccagctgcccacccctttccaagtggccactaggacacacccctgcggctaatgcgcaagcgccacttttcccgactcgtggggcagtttcgttacgc

SEQ ID NO: 421101 - DNA, 201 bp, Homo sapiens
tcgttatttgaattctgaaaagaattccataaaatcactatttatccattgctttatctccagcatctagaatagtccctggtgaatagtccctggcacayagtaggtgctcagaatgaattatggtttgtcataatgttattgtcaaagtagattaccgacagtgccttaaggatcgatctcaatcccaagaggtcaaca

SEQ ID NO: 421102 - DNA, 201 bp, Homo sapiens
agcagctattttataaatctaagccaaagaagagaggattagaccaggctcacatcagttagaagggaaaaaagtaaacattcaaattatatttgtgatgsggtaataaaacctgttcaataaaaataaaacttgttccttgaaaattaagaaaagtgtgattttcaagaaagaatgaatagtaataagtgacaaagacga

SEQ ID NO: 421103 - DNA, 201 bp, Homo sapiens
agagatactcgttaagctacatcactttgatacaaggcatacctaacactgattttcaggtttgcacatatactttagagaataaagcttctttaagttgkaacacgtaattgcttcccaccaaacatgttactcaggtccactacatatggtaggcaaaatttacccttctcatagactttaagagttgaagatccactt

SEQ ID NO: 421104 - DNA, 201 bp, Homo sapiens
ttaacaagacagactttggttgctgtattcaagtatttggattatgactgtggaggagggcttgcttaagatatgtggttgtgtttttttgtggaaaagtraggagttaggtggcttgataataggcagggaaaccagattgtcgggactatgacctttttctccagtatgctacctgatttgtttggctggccactaggt

SEQ ID NO: 421105 - DNA, 201 bp, Homo sapiens
ttcttgaaggtctcccataacagtgtggaaagggcaatatgacatttgtcatccttgctctagactaattctataaaaatgtgcttactcttttaattatygggatgttgggggaatgtgatgacttttctttggctatcattttgggatgatgaaagtttgaatcctttgtgttcagattacaaagaaaagggcttcgca

SEQ ID NO: 421106 - DNA, 201 bp, Homo sapiens
cttagaaaagaaatctggagaagtggctgttctgaagagagatgggcgatatatatattacttggtaagatggggccaattcctttttttttcagggccarttcttaatacattttaaggatttgtgaacagatgggctgcactgcatttgtgttgatcatgatgttctattctagacaactaagaatgtcaaaaagcttc

SEQ ID NO: 421107 - DNA, 201 bp, Homo sapiens
attctgggtatagaatagaaaatcaggttttcagccagactgtgagtctgttaggggcactaacaggcttccctaaattctatcttgtctctaatacacaatacatttatggctgtaaactaataaaattaaggttatgatgtaaacgaatatatatgattccatttatataaaatctccaaaagacatcagtaatctaga

SEQ ID NO: 421108 - DNA, 201 bp, Homo sapiens
agttgaagatccacttttaaaaataaggatacaattagataaactgaatgatatctgagaacctttaataaagacttcattaaaaaattaaaatgatataagttagcaatcggcaattcatcttggaaatatgggagggaggacagatatataaacaaaaatgtagataggtctttctctctgatttttcactaggccctc

SEQ ID NO: 421109 - DNA, 201 bp, Homo sapiens
tatcacaagatagaacttccttgcctggaagccatctctgaatacaaagcgtccattcagttagtcagtgtgagattcccccaccagagggataaatgctdtctagattccatgggaaggagtgggctgctgctttcctgattgcagttttggttgagaaggttgttcttccctgctgagatggctggctgacttcaccag

SEQ ID NO: 421110 - DNA, 201 bp, Homo sapiens
gagttgaagatccacttttaaaaataaggatacaattagataaactgaatgatatctgagaacctttaataaagacttcattaaaaaattaaaatgatataagttagcaatcggcaattcatcttggaaatatgggagggaggacagatatataaacaaaaatgtagataggtctttctctctgatttttcactaggccct

SEQ ID NO: 421111 - DNA, 201 bp, Homo sapiens
ttcaagatatcttatgcctcaaccccccaagtagctgggattacaggtgcgtgccaccacgcccggctaattttttatttttagtagagatggggttttgycatgttggccaggctggtcttgaactcctggcctcaagtgatccacctgccttggcctccccaagtgctgggatcacaggcatgagccactgcgcctggc

SEQ ID NO: 421112 - DNA, 201 bp, Homo sapiens
caaaggcaaatgaaaaccaaaatccttaactatattttataaattagaaattctgattcatcaagttgactgaacattatgaaagaattaaaaaaaaaaaatgaaaacacaaccccacatgcatggtacaattatgcccaaaaattatgcataaaaacacaaaagaatacacaaaaagtacaagtttgatttatgagcagt

SEQ ID NO: 421113 - DNA, 201 bp, Homo sapiens
gcaagctttactaggattctaaaatagagaatacaattcaaaaaaggttaagaagtagtcttctttaaaaaatggctactcaacactaatgagaaaaaaaactcctatacaaaggggattaaagccttaagtattgtaagggaggctatggaatctcacctagagagctttatttacgtaacagaatatatttttttcagc

SEQ ID NO: 421114 - DNA, 201 bp, Homo sapiens
atgtcaatgtcatcaacagtctgaaataggtcctgactgaaagagtaagacaaaggcttgcaacttcaatttgccaggcatcgctgcaattgtaatactgrgccacttattaaaaactaagtggtttctgtcctgtagtaaagggcagaatgtgatcatcaatgtcccattggaagagttgatcaatttcctggaacagtg

SEQ ID NO: 421115 - DNA, 201 bp, Homo sapiens
atagaaaatcaggttttcagccagactgtgagtctgttaggggcactaacaggcttccctaaattctatcttgtctctaatacacaatacatttatggctrtaaactaataaaattaaggttatgatgtaaacgaatatatatgattccatttatataaaatctccaaaagacatcagtaatctagagacagaaaatggat

SEQ ID NO: 421116 - DNA, 201 bp, Homo sapiens
gcagctgtatggaagggaaagctatcaggggagttcgtctttgatcattagacgggaaaaactcatcatcaatactacctttcccttccctactacttttmtatattagctaaattccattttgaaaacaaagtatttccaaaatatcaatcttggcctaaggtcaaatagaaacataatacatttttttcttctggggtg

SEQ ID NO: 421117 - DNA, 201 bp, Homo sapiens
atacacatttggcaagtaaaaaactacacactataaaacaatttcaaggcaatagagaaagtttgtggacaaatgaggatatatttaaaagtagtagtggkacaaaagatgggttgtgaggaaacatgactgtaagaaagctgttaagttaaggaatatagtatttgggaatgctgataaaaagcaaagtgtttgtgggag

SEQ ID NO: 421118 - DNA, 201 bp, Homo sapiens
ttgacgatattactgtacttctctgaaacttgaaataactctgagatgcttagtctataggttggcattcaagatcctttacttaccaatattctgctttytcttcaaagaggaatttagaaacctcttcttccttacagacccctcccatcactttctacgggccactttaaaccagaaatgtgcactagaatcctatgt

SEQ ID NO: 421119 - DNA, 201 bp, Homo sapiens; identical to SEQ ID NO: 406824

SEQ ID NO: 421120 - DNA, 201 bp, Homo sapiens
tgggtggggagaagacacaaggcagtttgttctggctagatgagagggaacccaggaattgtgaggttagcaggaatatctttagggtgagtgagttttcyttgagttgggcacccgttgtgagagtttcagaacctttggccagcaggagagaggtggtagggagcagccagccggcaaaggaaggaggtggaaaaaaac

SEQ ID NO: 421121 - DNA, 201 bp, Homo sapiens; identical to SEQ ID NO: 406834

SEQ ID NO: 421122 - DNA, 201 bp, Homo sapiens
gtgagttttccttgagttgggcacccgttgtgagagtttcagaacctttggccagcaggagagaggtggtagggagcagccagccggcaaaggaaggaggkggaaaaaaaccgccaccgggctgacttccacctcccagtggtgagcagtgggggcccaaacccagtttccttctcatttttgttagtttgccctttcggc

SEQ ID NO: 421123 - DNA, 201 bp, Homo sapiens; identical to SEQ ID NO: 406835

SEQ ID NO: 421124 - DNA, 201 bp, Homo sapiens; identical to SEQ ID NO: 406830

SEQ ID NO: 421125 - DNA, 201 bp, Homo sapiens; identical to SEQ ID NO: 406823

SEQ ID NO: 421126 - DNA, 201 bp, Homo sapiens
gattgctcacaatgtttcctccaagaactgcaaagccatcatggaaagagccacccagctggccatcagagtcaccaaccccaatgccaggctgcacagcraagaaaatgagtagacagctcatgtgcatgttttgtgtttaaataaaactgtaaaaactgccaaaaaaaaaaaaaagaaggaaattctgcaatatgttac

SEQ ID NO: 421127 - DNA, 201 bp, Homo sapiens
tttgccagcctctcttcatatcccgattctgcaggaacaggtgcttgaacattaagagaaggggctgaatctttggatggggtttcatgaagggcacaccrttattgggatgctagcatttgccattcatgacattggcattcgggtatcatgaaacacaggaaggtttttccaaccccccactgtattgactgttgggat

SEQ ID NO: 421128 - DNA, 201 bp, Homo sapiens
accttcttttctcatatcattatctctaggtaggaaagggttaatagagttagtgtgacagtgtagtgtggacagcatagaaacctccccaacctccaccbgcccgcaagctgcagaagtacctggtttgtggcctttgccagcctctcttcatatcccgattctgcaggaacaggtgcttgaacattaagagaaggggct

SEQ ID NO: 421129 - DNA, 201 bp, Homo sapiens
ttgtgggagtggagttcttataaaggatgagtttgtccccctctcttgctctgtctctcctctgtgatgcctcctgctatgttatgacacagcaagaaggycttcatcagatgtgatgtggcccttcagtcttggacttcccagactccagaaccatgacccaaataaattctgttaactaaaaattacctagtctgtggt

SEQ ID NO: 421130 - DNA, 201 bp, Homo sapiens
acagggtgctgtgaaaactcacatctactcttcctgctagaggaaaagtatggcttctagctcccttctgtcttccaaattttcttcagagattgcattcrcaagggagtctgagaaatattgtctcaaggcctccagtctctgaaatccagggaagggaataagagtgggaatgttgtggagtgtcaatagacaatacct

SEQ ID NO: 421131 - DNA, 201 bp, Homo sapiens
ccacggaaggccggccgcagctgaagggtgtggtcctgtgcacgtttacccgcaagccgaagaagcccaactcagccaatcgcaagtgctgtcgagtgcgkctcagcactggccgcgaggccgtctgcttcatccctggggagggccacaccctgcaggagcaccagattgtccttgtggagggcggccgcacccaggacc

SEQ ID NO: 421132 - DNA, 201 bp, Homo sapiens
gagcatttgcggatcggtcactttttcctcctttctgagtctcttatcccctaccacagggacggcccaggtggcaggatgtcctggtctggccttctccrtggcctcaacacgtccctaacttgtggtaagtgggggacttgggcttcagggacgaggctagagggggagggttattcgctcttggacttgtgtgcctcc

SEQ ID NO: 421133 - DNA, 201 bp, Homo sapiens
aagccagaaagtcctgagagcggatcggggagcatttgcggatcggtcactttttcctcctttctgagtctcttatcccctaccacagggacggcccaggyggcaggatgtcctggtctggccttctccatggcctcaacacgtccctaacttgtggtaagtgggggacttgggcttcagggacgaggctagagggggagg

SEQ ID NO: 421134 - DNA, 201 bp, Homo sapiens
ctggggtcctccaaatctaccaggccatctccccagtttcccagttcttcctgcgtgcgggcgagagtggttgggccctcgggaacccactcagagcgagkctaaatttacggagggactttctgttagcagcatgagggcctgtggttagacctatagaggtatttcctttgatttaagccagaaagtcctgagagcgga

SEQ ID NO: 421135 - DNA, 201 bp, Homo sapiens
tcttcagtgacgcgaggcagaaccagccaatccctgcacggatagcgcccggaagaggctagaagctggattcagcgtgtccgcgacctcacctttaggtsctgtgaggtcggtggaatcctggggtcctccaaatctaccaggccatctccccagtttcccagttcttcctgcgtgcgggcgagagtggttgggccctcg

SEQ ID NO: 421136 - DNA, 201 bp, Homo sapiens
agcgtgtccgcgacctcacctttaggtcctgtgaggtcggtggaatcctggggtcctccaaatctaccaggccatctccccagtttcccagttcttcctgygtgcgggcgagagtggttgggccctcgggaacccactcagagcgaggctaaatttacggagggactttctgttagcagcatgagggcctgtggttagacc

SEQ ID NO: 421137 - DNA, 201 bp, Homo sapiens
aacaccaaaattgagttgctactactctaagatctgttctctgggataataacccctttcggccctctccaggcccagctctggttccccggctctgggcyacctgctccatggctaccctgaaccagatgcaccgcctggggccccccaagcggccgcctcggaagctgggccccacggaaggccggccgcagctgaagg

SEQ ID NO: 421138 - DNA, 201 bp, Homo sapiens
gttgggccctcgggaacccactcagagcgaggctaaatttacggagggactttctgttagcagcatgagggcctgtggttagacctatagaggtatttcckttgatttaagccagaaagtcctgagagcggatcggggagcatttgcggatcggtcactttttcctcctttctgagtctcttatcccctaccacagggacg

SEQ ID NO: 421139 - DNA, 201 bp, Homo sapiens
ggagcaaagaaacagcaaagtacatagattaatcaaggaaggattcattgagagttagattcctatttgataggaattggccacatagaaaaggggggagracattctagcaaaagaaaaaagttgtacttctcctaaacagctgatttattattagtattatagtcactgtgactcttaaaactaaccaaatttccacct

SEQ ID NO: 421140 - DNA, 201 bp, Homo sapiens
atgtagttttatatgaaaattggaaaagtaaaattcatgatttgtctgggtgatgtgtgaaaatggatacaaaataaagcctttctataaatgcctgggcytgtcttcatattttctcccaatagacctttacaaaagtcttatagagcagctcaaacttcagctagtgttggagcaatggcaatgaaaggggatgatgcc

SEQ ID NO: 421141 - DNA, 201 bp, Homo sapiens
cgggctctaccgcagtgcccgcatcccggagccgccccttgacgcagcggctgtggcgcgattgcatcacacccgtccccgcgaccctgcggcccggaagycccgcttcccagcccgcgtgcagacgcagcctgctcctcttcgctcaccctgccccttccccatctcccgccttcccagggatccctggcacttccctgg

SEQ ID NO: 421142 - DNA, 201 bp, Homo sapiens
tgtaatttcctagaatgcagtaaataagcttgaggtcacagaaagatcatcccatttgttaggataaatgagtgaacatctgaaaattgtgtttttctccttttctttctttttttttttttttttttttgagatggagtcttgctctgtctcccaggctggagtgcagtggtgctgtctcggctcactgcaacctccatc

SEQ ID NO: 421143 - DNA, 201 bp, Homo sapiens
gtaatttcctagaatgcagtaaataagcttgaggtcacagaaagatcatcccatttgttaggataaatgagtgaacatctgaaaattgtgtttttctccttttctttctttttttttttttttttttttgagatggagtcttgctctgtctcccaggctggagtgcagtggtgctgtctcggctcactgcaacctccatct

SEQ ID NO: 421144 - DNA, 201 bp, Homo sapiens
ccaccaatggccccaaggccgcaacgcagaggctttagggtttagtcagcaccagggacagcgacagcagttggggcccccgttttggctactgctagggrctttgggaaccacacaagagctggggaaagtaggataggtggtgaaacaactggccagcctcccgttagttgaattaagtgtctactcgagagagagaga

SEQ ID NO: 421145 - DNA, 201 bp, Homo sapiens
gcttaggtgacagagggagaccctgtctcaaaaaaaaaaaaaaaaaaaaaaagagggtagattaatgagtagatgaccacagtggacaatgggagctcaaytgctgtgagtattctgagaaactgtgtggaaggcatctcagaattgttctactgcaggttggaggctggggcattaatccactgtcttaatttgtttcta

SEQ ID NO: 421146 - DNA, 201 bp, Homo sapiens
gcctcggggcgggtgtcagggggctctggtggctctgggtggtcgtcccggcggttgtccgcgggtttagcagcggaggcgggcggcgggcggcgggcggsgggggcaggacgggctctaccgcagtgcccgcatcccggagccgccccttgacgcagcggctgtggcgcgattgcatcacacccgtccccgcgaccctgc

SEQ ID NO: 421147 - DNA, 201 bp, Homo sapiens
gagtggctgggactacaggtgtgtgccaccacgcccagctgatttttgtatttttagtagagatggggtttcatcacgttggccaggatggtcttcatctyttgacctcgtgatccgcctgcctcagcctcccaaagtgctgggattacaggcgtgagccaccacgcctggcaaaaattgtgttttgtctattaaccaata

SEQ ID NO: 421148 - DNA, 201 bp, Homo sapiens
cccaggctagggtgcaccggcatgatcacggctcactgtgacctctgcctcccaggctcaagcaatcctcccaccttagcctccagagtagctgggactamaggcatcttgaataggtagatgtggcaagagtggacaactttgtttctgatctattgagatgttcatgtggggtatttatttccctcttcagtttattaa

SEQ ID NO: 421149 - DNA, 201 bp, Homo sapiens
catcttgaataggtagatgtggcaagagtggacaactttgtttctgatctattgagatgttcatgtggggtatttatttccctcttcagtttattaatacrcagttgctttttaagaaaaaagttaaaaacaaaaaatgcattactattgatttttatacttctacatacttgattttataatcttttacacttttaaaat

SEQ ID NO: 421150 - DNA, 201 bp, Homo sapiens
ataggtagatgtggcaagagtggacaactttgtttctgatctattgagatgttcatgtggggtatttatttccctcttcagtttattaatacgcagttgcyttttaagaaaaaagttaaaaacaaaaaatgcattactattgatttttatacttctacatacttgattttataatcttttacacttttaaaatatattttg

SEQ ID NO: 421151 - DNA, 201 bp, Homo sapiens
ttattttctcacagaaccattccaacaaattgcccaaggagtaactagccatgattgacatgaaaccagaggtaatactctataaccccatctccattctyattatactttaagcatccatgcatgaagaaacttgttttctctaagccatggtccacctccaaaggtgactgactgtagggatctgatctccaccccagt

SEQ ID NO: 421152 - DNA, 201 bp, Homo sapiens
ttctcttgcctcagtctcctcagtggctgggattacaggcgcccgccactacgtctggctattttttgtatttttagtagagacagggtttccccatgttrgtcaggctggtctcgaactcccaacctcaggtgatctgcccaccccggcctcccaaagtgctggcattacaggcgtgagccaccatgcccggctgaatct

SEQ ID NO: 421153 - DNA, 201 bp, Homo sapiens
gcagcggctgtggcgcgattgcatcacacccgtccccgcgaccctgcggcccggaagccccgcttcccagcccgcgtgcagacgcagcctgctcctcttcrctcaccctgccccttccccatctcccgccttcccagggatccctggcacttccctgggccacagggacgggggcgtctctgctgcaggagagggggaggt

SEQ ID NO: 421154 - DNA, 201 bp, Homo sapiens
gtgtcagggggctctggtggctctgggtggtcgtcccggcggttgtccgcgggtttagcagcggaggcgggcggcgggcggcgggcggcgggggcaggacsggctctaccgcagtgcccgcatcccggagccgccccttgacgcagcggctgtggcgcgattgcatcacacccgtccccgcgaccctgcggcccggaagcc

SEQ ID NO: 421155 - DNA, 201 bp, Homo sapiens
attagccaaatttgggaaactcaaaacttgctgcttggagctcccagtatagttcatgactgtttcttctcagagaagagggctttctgtctcttgatttsgtgacctgagctagacttcgactttgcagttctgcagcaccacttctggtatagcttttctggtatggcttctggtattttcttcttttctggtatagct

SEQ ID NO: 421156 - DNA, 201 bp, Homo sapiens
attgggtaaaatgccattgtagattttttggtcatcagattatagaataaatacttaaagtaacttcagattattattttcaaaaccatagcagaaactcytaccttacctatcttattgagagacaatgtgaagccaagactaatggagttagtatgccacattgatgatgaatgactgggtagtacaccacagagggct

SEQ ID NO: 421157 - DNA, 201 bp, Homo sapiens
taaagtaacttcagattattattttcaaaaccatagcagaaactcctaccttacctatcttattgagagacaatgtgaagccaagactaatggagttagtrtgccacattgatgatgaatgactgggtagtacaccacagagggctgtgtcatggagtgtaaaggtgttattccattcctacaccctaccatccgtctttc

SEQ ID NO: 421158 - DNA, 201 bp, Homo sapiens
gtaacttcagattattattttcaaaaccatagcagaaactcctaccttacctatcttattgagagacaatgtgaagccaagactaatggagttagtatgcyacattgatgatgaatgactgggtagtacaccacagagggctgtgtcatggagtgtaaaggtgttattccattcctacaccctaccatccgtctttcccca

SEQ ID NO: 421159 - DNA, 201 bp, Homo sapiens
gagtaacctacttttggtattgatgagactagggtggttcttaagtattttatggagatcagggtatcttcctaaatccagatgaagagatcaggttaagractgctcgctttcaggctccacctgaagaaactatgtagtaggcttctctccctctacttattttatcatcttctttgatctaataaaatgttttcctta

SEQ ID NO: 421160 - DNA, 201 bp, Homo sapiens
ccacaaaaccgccatcgtcatcatggcccgttctcaatgagctgttgggtacacctcctagacggggtggtggccgggcagaggggctcatcacttcccaraaggggcggccgggcagaggcaccccccacctcccggacggggcggctggccgggcggaggcaccccccatctccctcccggatggggcggctggctggg

SEQ ID NO: 421161 - DNA, 201 bp, Homo sapiens
ccaataggagatcgcaccactgcactccagcctgtgtgtcagagtgagactctgtctcaaaaaaaaaaaaaaaaaaaaaaaaaaagaaagagattagatgscccttgccatgcagaaagttagggaaatagtgttctagttacaggaagcttttaggcagtgctgagcttgatgagttcaaagaatcaaaagaagtccagt

SEQ ID NO: 421162 - DNA, 201 bp, Homo sapiens
aaggaataaattccggacacagaaccgtgactgggaccatgtgaagtggggacttcacatgatcccaataggagatcgcaccactgcactccagcctgtgygtcagagtgagactctgtctcaaaaaaaaaaaaaaaaaaaaaaaaaaagaaagagattagatgccccttgccatgcagaaagttagggaaatagtgttct

SEQ ID NO: 421163 - DNA, 201 bp, Homo sapiens
ggtaagagcgctgtgttctctatacttgggaacctcatagattcctggccccgatttcccggaactgggtctggagctttctgcacatcattgactcgccsgacatcggtctgccgaatacctgctgcccacttctaagccgccggccctaaaccctgggcatcacggcctcggccccgtacctcctgcccacctcttaat

SEQ ID NO: 421164 - DNA, 201 bp, Homo sapiens
ccctgggcatcacggcctcggccccgtacctcctgcccacctcttaattcatcctgggctgctccacctgacctcacctctttacctcccgtgtccttaatttttttttttcttagcaagtttccctctgataactctcccctcaattttcttgcattcttttatacctggtctttttcctacgatgacctccccccacac

SEQ ID NO: 421165 - DNA, 201 bp, Homo sapiens
gggcgaaaagggggattttgctcttcagtggtttccagggtccttgtgacagtgaagacagcagcgtactaatgacttgcagacggtctgcactcctatcrctgttgaaggaaatggctttaggaagaaggcaggacgtactgtttcaacttcgtttattttggttgtcatgctgccagtgtctttaatatcattgttccg

SEQ ID NO: 421166 - DNA, 201 bp, Homo sapiens
tcaaaaaaaaataaataaataaataaaattatgcagaaggacttggtgcttatacgtagaatgtaattaggttctaggctttggtaattatacagattttwaaaatccagttaactattcataaggaagtttgagaataaagacattttttctttgtgctggacttgcctatgctttcctggcctctgccaattgaatgtc

SEQ ID NO: 421167 - DNA, 201 bp, Homo sapiens
tgggcaacagagtgagacccctctctacaaaaacaaacaacatttatgcagcatactagccagcaccagcatcacaaacccagaagctgttttgggttggsttgtagctactacgaggagctcccccagggtgaatgtcaatcctgtccttggccaactgtctttatggttgttcctttccttacaagtgtccaggttcag

SEQ ID NO: 421168 - DNA, 201 bp, Homo sapiens
acggctttatttctgcatatgagagcttataagaagaggagtcatcccataattacatgcctttcagataaacagctgatgggctttgtaggcagagttaytttaatgaagtcattaatagctgaatttgttgaatgaaagcttcttctagagaatcttttctaatttaggtactactgtgaggtatttttgctctcaaac

SEQ ID NO: 421169 - DNA, 201 bp, Homo sapiens
  misc_feature (1)...(201): n = A,T,C or G
cagattttaaaaatccagttaactattcataaggaagtttgagaataaagacattttttctttgtgctggacttgcctatgctttcctggcctctgccaantgaatgtcagtaacactttttttttttttctgcaacttttattttaagtcccggggcacatgtgcaggatgtgcaggttttgttatgtaggcaaacctgt

SEQ ID NO: 421170 - DNA, 201 bp, Homo sapiens
tgtagaggaataggagctttgaaaagctattgtggatgagaaactagaaagccaagtgcacagctcagggcagtatgtgtgctcagaaaagacctgagaargccattagctttcacctctggcttgtctttaggttcaacacaaacaggaagtgaatattaaggtagatttataaaggccctgggtaagttttgaaggagt

SEQ ID NO: 421171 - DNA, 201 bp, Homo sapiens
tttgttaaaacataacaagagtcttctttgctccagttcccaacaagtttcttatctccatctgagaccacctcagcctggaccttattgtccatatcacwattagcattttgggcaaagccattgaacaagtctctaggaagttccaaattttcccacattttcttgtcttcttctgagcccttcaaactgttccaactt

SEQ ID NO: 421172 - DNA, 201 bp, Homo sapiens
aaaacaaacaacatttatgcagcatactagccagcaccagcatcacaaacccagaagctgttttgggttggcttgtagctactacgaggagctcccccagrgtgaatgtcaatcctgtccttggccaactgtctttatggttgttcctttccttacaagtgtccaggttcagtcttgtgatagagtggcaacataatgtat

SEQ ID NO: 421173 - DNA, 201 bp, Homo sapiens
caaagggataatttgaaaagctgaataggtgtttttctaagccttagttaatgcctggagaagtttcttgatctttttggtgtgatatattatttgtcatrtctgatttgtaaattgaggcctaacacaattgagtataaccggattcttcctaaatatatccaaggttctctgctgagtgtcctggaggtgatagggagt

SEQ ID NO: 421174 - DNA, 201 bp, Homo sapiens
ccagaaggggcggccgggcagaggcaccccccacctcccggacggggcggctggccgggcggaggcaccccccatctccctcccggatggggcggctggcygggcgggggctggcccccacctccctcctggatggggcagctggccgggcgggggctgaccccccacctccctcccggaccgagtggctgctgggcagag

SEQ ID NO: 421175 - DNA, 201 bp, Homo sapiens
gaatgggttagggaagagtccctcttcgattttttggaataatttcagtaggattggtactagctcttcttcgtgtctggtggggtttggctgtgagtccrtctggtccagggccttttctgattggtaagttttttatttttcattattttttgagacagggtctcactgtgtcgcccatactggagttcagtggcatga

SEQ ID NO: 421176 - DNA, 201 bp, Homo sapiens
cgcgggctctgaagcggtgggccgcaccgaggcggcggcggcggcgacgactgcagctcgggaggtagcggcctggcgagggacgggccggctgccctctsggacggccgcggcggagggcaaaaatggcggaggcttcggcggccggggcggactcgggcgccgctgtagccgcccaccggtttttctgccacttttgca

SEQ ID NO: 421177 - DNA, 201 bp, Homo sapiens
tctggtggggtttggctgtgagtccatctggtccagggccttttctgattggtaagttttttatttttcattattttttgagacagggtctcactgtgtcrcccatactggagttcagtggcatgatcacggctcactgctgcagcctcgacttcccagactcaggtgatcctcccaccttagcctcctgagtagctggac

SEQ ID NO: 421178 - DNA, 201 bp, Homo sapiens
atgaaaaaatgctcaggattactaatcgtcagagaaatgcaaaccaaaaccacagcgagataccatctcacaccagtcagaatagctattattagaaagtyaaagaataacagttgttggcaaggttgtggagaaaagggaatgcctatacactgccggtgagaatgtaaattagttcagccactgtggaaggcagtttga

SEQ ID NO: 421179 - DNA, 201 bp, Homo sapiens
ctaccattctgcccagcaatccattactgggtatatacccagaggaatataaatcgttttaccaaaaagacacatgcacttgtatgtttattgtggcactrttcacaagagcaaagacatggaatcaacctagatgcccatcagtggtggacttaataaagaaaatgtggtacatatacatcatgggatactatacagcta

SEQ ID NO: 421180 - DNA, 201 bp, Homo sapiens
cataaacatggacacgagggcttacttgaggtggtgagggtaagaggaggatgagggtcaaaaaactgcctatcttgtactatggtcagttgctgggtgaygaaataatcagtacaccaaattccagtgacacagtttatccgtgtaacaaatgtacatatgtgcccccaaacctaaaatcaaaaaaaatatgtatagaaa

SEQ ID NO: 421181 - DNA, 201 bp, Homo sapiens
tgagatcgtgccattgcactcgcaaaaagagcgagactccatctcaaaaaaaaaaaaaaaccattcaaaaagaggacaaaaggttcatttggaaagaggayattaagaaataaggagaaatcatgaagggaattttaaaatgaaaacatatttagtggcattgttttctgttaggtttcaaaaaagtctccattccaagtg

SEQ ID NO: 421182 - DNA, 201 bp, Homo sapiens
accggtaagagcgctgtgttctctatacttgggaacctcatagattcctggccccgatttcccggaactgggtctggagctttctgcacatcattgactcscccgacatcggtctgccgaatacctgctgcccacttctaagccgccggccctaaaccctgggcatcacggcctcggccccgtacctcctgcccacctctt

SEQ ID NO: 421183 - DNA, 201 bp, Homo sapiens
gtacttgcaataactctaatacaggaaaatgttcaaaccacccataataaaagtagctaaaaagcagatttcttaaagactttgtgaccgtttaagctcarctgacctttctaagttgcatgattcttagaaaggtcccagagagatgtctatctggtgctatatagcagttgctaattaaatattttttaattgaatgat

SEQ ID NO: 421184 - DNA, 201 bp, Homo sapiens
gtgaccgtttaagctcaactgacctttctaagttgcatgattcttagaaaggtcccagagagatgtctatctggtgctatatagcagttgctaattaaatrttttttaattgaatgattgatatgaattgaacacccagtaattatatttaaaaagtgatgacttcagtgttttgacgcctttaaaaggctacagtggtac

SEQ ID NO: 421185 - DNA, 201 bp, Homo sapiens
ggagtttcaccatgttggcaagggtggtcttgaactcctgacctcaagtgatctgcccaccttggcctcccaaagtgttaggattgcaggcgtgagccacygcgcccagactaaaaagtagcagtttctatacccatcattattataatgttttactgcgttgatatgtatatagtggagcttttttgttagatttgaaga

SEQ ID NO: 421186 - DNA, 201 bp, Homo sapiens
agtagagatggagtttcaccatgttggcaagggtggtcttgaactcctgacctcaagtgatctgcccaccttggcctcccaaagtgttaggattgcaggcrtgagccaccgcgcccagactaaaaagtagcagtttctatacccatcattattataatgttttactgcgttgatatgtatatagtggagcttttttgttag

SEQ ID NO: 421187 - DNA, 201 bp, Homo sapiens
tgaaacaatttcttcaggtttttcttttgctgaggcatcactccagtatctctttgggtaacaaagactcattcgtgtaaagaactgtgtacctgtgccaycttaagtattcagagtgacaaatgctaagcatgtgtgtgtttatatgtgtttgtgttataatcatctgaaacaaccttaacatagaattattgcttaaac

SEQ ID NO: 421188 - DNA, 201 bp, Homo sapiens
ctggcccagtttatgtcttttgtatgtacacagtaaaaagtagtagtctctttctttacatagtaaaaagtagcagtttcttactttttttttttgagacrgagtctcgatctgtcgcccaggctgaagtgcaatggcactatctgggctcactgcgacctctgcctcctgggttcaagcagttctcctgcctcagcctcc

SEQ ID NO: 421189 - DNA, 201 bp, Homo sapiens
gaggaaaggcttataacttaaaacttagaggaaaggctttataactttggatttggcagtgatttctggcatatgacaccataagcacaggcaacaaaagsaaaaataggcaaatgggactgcatcaaacttaaaaactttggtgcatcaatgaacacaatcaacttgaaaaggcaacctgtggaatgggagaaaatgttt

SEQ ID NO: 421190 - DNA, 201 bp, Homo sapiens
ttaagggctttggaactggcatagtattgtatctattaaagaagtcacagggcctcccagattcaaggggcttgagaaataaactgcatgtctttaaaggragtgggaaggtcacattgcagaagaatatatgggctgagaggtcttattggggctgtctctggaaggccatctgggcacaattttttttcattttcttgt

SEQ ID NO: 421191 - DNA, 201 bp, Homo sapiens
cttctcccgttaaggtctttcatgtggttgtggtcagatagtacctggagatggggccatctgaagactctgccctaggctggatccaagatggtgttttycttttacttgtctgatgtctcagtgctctttgagatggcctctttatccagcagagtagcctaaacttatgtggctgctcagggttccaagagttaggaa

SEQ ID NO: 421192 - DNA, 201 bp, Homo sapiens
ctggataattttttttttagaactattttataaatattctttgtttgctttgaggttgcatttacattgcttttgtttttaaagttgtattcagttaactrattgttttcttaatccaatggtcagtggctactgttaacaaccagtttgtatgtgatctttcctgacttgaatgttcctgctgtgagttgaattagatca

SEQ ID NO: 421193 - DNA, 201 bp, Homo sapiens
agataccattataccccagttagaatggccattattaaaaagacaaaaataacagatgctgaccagaatgtggaagaaagggaactcttaaacactgttgwtgagaatgtaaattagtatggtcactatggaaaacagaatggatatatttcaaaaaaaactgaaaactaccatacaatccagcaatcccgctactgggta

SEQ ID NO: 421194 - DNA, 201 bp, Homo sapiens
ggtctcgaactcttgacctcaagtgatccacccgactcgggctcccagagtgctgggattacaggcgtgagccactgctccccgcctaaatgctacttagytttgtttgctgattttgctgtgtgtttatgttttttttttttttggccatatttcagtgctgggaagagcaggtgtctagtttttttccagccaacatca

SEQ ID NO: 421195 - DNA, 201 bp, Homo sapiens
tctaagttgcatgattcttagaaaggtcccagagagatgtctatctggtgctatatagcagttgctaattaaatattttttaattgaatgattgatatgarttgaacacccagtaattatatttaaaaagtgatgacttcagtgttttgacgcctttaaaaggctacagtggtacaaaatgtaggtgctaccatgtgaaat

SEQ ID NO: 421196 - DNA, 201 bp, Homo sapiens
cacccagtaattatatttaaaaagtgatgacttcagtgttttgacgcctttaaaaggctacagtggtacaaaatgtaggtgctaccatgtgaaatttgaaygtacagtgaagtacatatattcactgcaatatctagaaataaatatgtattcttataggtagaggctagtttatccttgtaattctactgataaatataa

SEQ ID NO: 421197 - DNA, 201 bp, Homo sapiens
tttaaaaagtgatgacttcagtgttttgacgcctttaaaaggctacagtggtacaaaatgtaggtgctaccatgtgaaatttgaatgtacagtgaagtacrtatattcactgcaatatctagaaataaatatgtattcttataggtagaggctagtttatccttgtaattctactgataaatataaatgtatatattgggg

SEQ ID NO: 421198 - DNA, 201 bp, Homo sapiens
tagctgggattacaggcgcctgccaccatgcctggctaatttttgtatttttagtagagacgagggtttcaccatgttggccaggttggatctcttcacakcctactgagcaataaatgagatagcctagagcagtggttttcaatttcaggtagttttgtttcccagggaacatttggcaaagtctgtagacaatttttt

SEQ ID NO: 421199 - DNA, 201 bp, Homo sapiens
tgggattacaggcgcctgccaccatgcctggctaatttttgtatttttagtagagacgagggtttcaccatgttggccaggttggatctcttcacagcctrctgagcaataaatgagatagcctagagcagtggttttcaatttcaggtagttttgtttcccagggaacatttggcaaagtctgtagacaattttttatct

SEQ ID NO: 421200 - DNA, 201 bp, Homo sapiens
tttcaccatgttggccaggttggatctcttcacagcctactgagcaataaatgagatagcctagagcagtggttttcaatttcaggtagttttgtttcccrgggaacatttggcaaagtctgtagacaattttttatcttttttttggagacagagtctgactttgttgcccaggttggagtgcagtggcgtgatcacggc

SEQ ID NO: 421201 - DNA, 201 bp, Homo sapiens
ctaattttttaattttttgtagagacagagtctcactgtgttgcctaggctggtgtcaaactcctggcctcaagcagtcctgcttcggcctcccaaagtaytgggatggtaggtgtgagccaccacacccagcctgtagacatttttgatttttgtaactaggggctagaggagggttgctactgtcatgcagtgggtgga

SEQ ID NO: 421202 - DNA, 201 bp, Homo sapiens
tcttattgagagacaatgtgaagccaagactaatggagttagtatgccacattgatgatgaatgactgggtagtacaccacagagggctgtgtcatggagygtaaaggtgttattccattcctacaccctaccatccgtctttccccattaaatcaaggtcagggaatgttaccttatgtgattaaatctggtagagtcat

SEQ ID NO: 421203 - DNA, 201 bp, Homo sapiens
gtgatgcgcctgcctcggccttccaaagtgctgggattacaggtgttagccaccacgcctggccagaccagttagttttgtcttccttgaaaatctgttargacagattaatctctctccttgataatttgaacaagtgtcacaggaaacttcttagtagacaaggtaatgtttacctccttgccactcactttgatgttg

SEQ ID NO: 421204 - DNA, 201 bp, Homo sapiens
agatttggatagacttttaacccatagtaccatcttccagaagtttcattttgcttacctttcaccatgcttagaatttacattctcaaaagaaaaaacarttatagttacatgctctttcttaccttttgctggattaactgagacctgcaggtatcctacaatgatgctgatcttctagcccgttaattctcagacctc

SEQ ID NO: 421205 - DNA, 201 bp, Homo sapiens
cgtgatcttggctcactgtatcctctgcctcctgggtgcttcaagcgatgctcgtgcctcagccttccaagtagctgagattacaagcgtgcatcaccacrcctggctaatttttttgtattattatttattctttgtagagacagggtttcaccatgttggccaggctggtctcgaactcctggcctcaagtgcgcccac

SEQ ID NO: 421206 - DNA, 201 bp, Homo sapiens
taagtatatcccattgtaaaatgatacttaggtgcacgtattggaagcttgaatgaggaatggagctgtataatcctaattgaaaggcagtgtaagaatcrtgagcaatccttatttgcagagaaatagggccattaccgtattagaagcattttaggttgttgttatagtttcacatacagaagtttaggtgctgaaaaa

SEQ ID NO: 421207 - DNA, 201 bp, Homo sapiens
aataaacaaaattcattgtaaatactctgtcaactattgttctccgagcaacagctcttatgcattggggccaccctcagcagtctctgttactgctacaraaacatgggactaacatctgacttccagagagtaagtagccaagaaagagaaatcatcagctgatcagctgctggtgagttgtccctcgtaattccaagc

SEQ ID NO: 421208 - DNA, 201 bp, Homo sapiens
taagccgccggccctaaaccctgggcatcacggcctcggccccgtacctcctgcccacctcttaattcatcctgggctgctccacctgacctcacctcttyacctcccgtgtccttaatttttttttttcttagcaagtttccctctgataactctcccctcaattttcttgcattcttttatacctggtctttttcctac

SEQ ID NO: 421209 - DNA, 201 bp, Homo sapiens
cctcccaaagtgctgagattacaaacgtgagccactgcatctgccccaaagtacagttttctcttactttattcagcagttgcttttctggacatttagtrcatattaaaattatggactgggcacggtggcttacgcctgtaatcccagcactttgggataccaaggcggttggatcacttgagcccaggagttggagaa

SEQ ID NO: 421210 - DNA, 201 bp, Homo sapiens
ccaaagtgctgagattacaaacgtgagccactgcatctgccccaaagtacagttttctcttactttattcagcagttgcttttctggacatttagtgcatrttaaaattatggactgggcacggtggcttacgcctgtaatcccagcactttgggataccaaggcggttggatcacttgagcccaggagttggagaacagc

SEQ ID NO: 421211 - DNA, 201 bp, Homo sapiens
ttccatgtctttgctattgtgaatagtgagaagcacttcttaactgctgtgacaaccaaagcacttccatagatgtcccaactatcccctagatgattgtrttgtcctcattaagaatgacctctagtcatacaggaaaacatttttctgttttatcattcactcttcttttttttttcttgcttattattcactacttta

SEQ ID NO: 421212 - DNA, 201 bp, Homo sapiens
tttagtctaaaagacaaagatttacttggcctttagacaattcctatatgtctttaaatttcttatttcctcaccactcttattattgatgttttcttttycataagtgttaggacagtgccttggtacatagtagatactcaattagtatttgttgaatgaaggaaacttaactgtaggctttttcttcttgccactttc

SEQ ID NO: 421213 - DNA, 201 bp, Homo sapiens
aagggatacttgcacttccatgttcattgtagtactattcacagcagcaaagacggaatcagagtatccatcagtggatgaatggataaagaaaatgtggwatatatatatatgcaagagaatagtgtttggccataagaaagaatgaagtcgtgccatttgtagcaacatggatggaactggaggttattatgttaagtg

SEQ ID NO: 421214 - DNA, 201 bp, Homo sapiens
gcaaagacggaatcagagtatccatcagtggatgaatggataaagaaaatgtggtatatatatatatgcaagagaatagtgtttggccataagaaagaatsaagtcgtgccatttgtagcaacatggatggaactggaggttattatgttaagtgagataagccaggcacagaaagacaaatattgcatattcccactcat

SEQ ID NO: 421215 - DNA, 201 bp, Homo sapiens
ggggatgaaaccataaatcaaggtagttttattggcctggaactgaatcacagcccttcaaacagtatttaaattgtataggtatccttgtgtaacactgaaactgtggcctattgttttcctttttagtaaactgattttctttattaatagccaagtgaacaattgcttacaactccttgagctcagagaactaatttc

SEQ ID NO: 421216 - DNA, 201 bp, Homo sapiens
gtactgatttccagggcttacctctagtcaacacagtagtttggtgtagattaaggatgtttacttgcctttcagatcccaagatggggtctgtaaataawttctatatcttcttataatgtggcgtccatattttttgggaaaaacaaatcttaactgtgatttgaaaacagggcattagtcttcattcttgaataccat

SEQ ID NO: 421217 - DNA, 201 bp, Homo sapiens
tgggctgagtgtggtggctcatgcctgtaatcctagtattttgggaggctgaggcaggcagattgcttgagcttaggagttcaagaccagcctgggcaacrtggtgaagcctcatgtctacaaaaaatacaaaaattagccaggtgcagtggcatgcacctgtagtctcaggaggcggaagttacaatgagttgagatcat

SEQ ID NO: 421218 - DNA, 201 bp, Homo sapiens
gtacatctgtacgcatgtcagagtaaatctggtaagttttcatttattatctgagacttggggcttctcttagattattagttggtttttagtgaccactstgctgtctgaaggtaaactgctgttatacctctttggcgggttagggagtgacttctgacaaagatacctaatcaggtaaacaggctgttctagccagga

SEQ ID NO: 421219 - DNA, 201 bp, Homo sapiens
tctgaaggtaaactgctgttatacctctttggcgggttagggagtgacttctgacaaagatacctaatcaggtaaacaggctgttctagccaggaaaaccrattgttactctgctttgaggaggccttgaatctcttgttcttattaaggttatttggccagtgtggtggctcacgcctgtaatcccaacactttgggagg

SEQ ID NO: 421220 - DNA, 201 bp, Homo sapiens
ggtctgtgctacttcttaatatacagtattaagagttttggttaactctgaactgcccgggttgattagagtgattccagacagatcgtgttttgaacttrcatttttattttcccattttaatggattgaaaaacattatttaatatgtgttctgggccaggcacagtggctcacgcctgtaatcgcaacactttgggag

SEQ ID NO: 421221 - DNA, 201 bp, Homo sapiens
ttaatatacagtattaagagttttggttaactctgaactgcccgggttgattagagtgattccagacagatcgtgttttgaacttgcatttttattttccmattttaatggattgaaaaacattatttaatatgtgttctgggccaggcacagtggctcacgcctgtaatcgcaacactttgggaggccgaggtgagcaga

SEQ ID NO: 421222 - DNA, 201 bp, Homo sapiens
tttttattttcccattttaatggattgaaaaacattatttaatatgtgttctgggccaggcacagtggctcacgcctgtaatcgcaacactttgggaggcygaggtgagcagatcacctgaggtctggagttcgagaccagcctagccaacatggtgaaaccccatctctactaaaaatacaataaattagctgggcatgg

SEQ ID NO: 421223 - DNA, 201 bp, Homo sapiens
tataacagtgattaagaacacagcctctggaaccagattgcctgagctcaaatcctgtgtctgccacttattggctgtgtaatctgggcaaagttacttaraatctctcagtgcctctcttgtccttgtctgtaaattgggaaataatcatccttccctcatagggatgttacgaggattaaatgagttaatacatgctag

SEQ ID NO: 421224 - DNA, 201 bp, Homo sapiens
tttcacaaaatcgcctgtgaactttttcaagattacatttctaaggttaataattataaaattatttacccttaattgactcatctttatacactctaatrttattttttgagatataattcatatactacgtaattcaccctgttaaagtgtacagctaagtggttttagtatattcacagagttatacaactattacca

SEQ ID NO: 421225 - DNA, 201 bp, Homo sapiens
ataggccacaaatacattgactgttactattaatttgcactaatttgcactttgtatactagtaggaaaatgcctcatgctgatgttgaagctgtttttargcatggatcctttagaaattttgtatattattaggtgtggtaacaatttatagtcatctaaagtatgttagtatcaaagcagagtattatgaacttggtg

SEQ ID NO: 421226 - DNA, 201 bp, Homo sapiens
agagacagaatttattctgtcttgttgcccaggctgttcttgaatttgtgggctcaatgtgtcctcccactatatcctcctgagtagtagtagataggtgygttccaccatgcctggctaatttttttttcttttttgtagagatgggattttgccatgttgccccggctggtctcaaatttctgggcttaagcaatctgc

SEQ ID NO: 421227 - DNA, 201 bp, Homo sapiens
cggggcgtggtgtcacatgcctgtaatcccagcttctcgggaggctgaggcaggagaatggcttgaacccaggaggtggaggttgcagtgagccgagatcrtgccactgcaccccagcctgggcaacagagcaagactccatctcaaaaaggaaaaaaagaaaaaaaaagaaagaaatgtctggatttctaaaacaccaaa

SEQ ID NO: 421228 - DNA, 201 bp, Homo sapiens
cctcaagcagtcctgcttcggcctcccaaagtattgggatggtaggtgtgagccaccacacccagcctgtagacatttttgatttttgtaactaggggctrgaggagggttgctactgtcatgcagtgggtggaggccagagatgctgctgaacatgctgcagtgcacaggatagacccctcaaaacaaagaattatattg

SEQ ID NO: 421229 - DNA, 201 bp, Homo sapiens
gtgcgccaccacacctggctaatttttgtatttttagtagaggcggggtttcaccatgttggccaggctggtctcaaactcctgaccttgcaagtgatgcrcctgcctcggccttccaaagtgctgggattacaggtgttagccaccacgcctggccagaccagttagttttgtcttccttgaaaatctgttaagacagat

SEQ ID NO: 421230 - DNA, 201 bp, Homo sapiens
ggcaggcagattgcttgagcttaggagttcaagaccagcctgggcaacgtggtgaagcctcatgtctacaaaaaatacaaaaattagccaggtgcagtggsatgcacctgtagtctcaggaggcggaagttacaatgagttgagatcatgccactgcgctccagcttgggtgacagagggagaccctgtctcagaaaaaaa

SEQ ID NO: 421231 - DNA, 201 bp, Homo sapiens
ttttaatcatttagagactacaacccagaaggtaccagtcagcctataaaaaacactgacgtttttcttttgcttgtttgtatgtgtaccctatattgccrtacaacttgttcagctctagaaagctgacagatgctaaaaggaagaaataagttaaatcccataatcaggatttctttatgttttaggatcacattagcc

SEQ ID NO: 421232 - DNA, 201 bp, Homo sapiens
gaggtgggagaatctcttgagcctgggaggcagaggttgcagtgagctgagctcgtgccactgcaccccagcctgggtgtcagagtgagaccctgtctccaaaaaaaaaaaaaaaattaggacttcatattctttaatggctacattatatttattaaactattatcctgtgttaggcatgtctagttatatatgatggtt

SEQ ID NO: 421233 - DNA, 201 bp, Homo sapiens
tcgtgccactgcaccccagcctgggcaacagagcaagactccatctcaaaaaggaaaaaaagaaaaaaaaagaaagaaatgtctggatttctaaaacaccaaaaaaaaaaaaaatgttgggggaaagagaagacatatgaatggctggtaaatattacatgacaagatgtttagccttattggtatattcgtatcagggaa

SEQ ID NO: 421234 - DNA, 201 bp, Homo sapiens
ttagtagacaaggtaatgtttacctccttgccactcactttgatgttgtacagatttggatagacttttaacccatagtaccatcttccagaagtttcatyttgcttacctttcaccatgcttagaatttacattctcaaaagaaaaaacagttatagttacatgctctttcttaccttttgctggattaactgagacctg

SEQ ID NO: 421235 - DNA, 201 bp, Homo sapiens
cttttgtatgggacactgtactagacactaggaacacaatgatgagtcaaatagatggttttgctcatggatctcatttagttggaataataaacgttaattttaagtgtttaccatatgcagaggactgtgcttcatgctttatctgctttatgttgtttaatttgtgtgaagtaataggtgctattgctgttttcattt

SEQ ID NO: 421236 - DNA, 201 bp, Homo sapiens
tctctctccttgataatttgaacaagtgtcacaggaaacttcttagtagacaaggtaatgtttacctccttgccactcactttgatgttgtacagatttgratagacttttaacccatagtaccatcttccagaagtttcattttgcttacctttcaccatgcttagaatttacattctcaaaagaaaaaacagttatagt

SEQ ID NO: 421237 - DNA, 201 bp, Homo sapiens
agcaatcctcccacttcagcctatgaactaggtaggactacaagcatgtgccaccacgcctggctaatttttcaatttttggtagagactaggttgcccargctggagtctcttaacacattattggagttgatttgttccttatctttttttttttttttttttaaggatttttacatttattcaaaagaggatgagtct

SEQ ID NO: 421238 - DNA, 201 bp, Homo sapiens
tttctgtaggattgggtaaaatgccattgtagattttttggtcatcagattatagaataaatacttaaagtaacttcagattattattttcaaaaccatarcagaaactcctaccttacctatcttattgagagacaatgtgaagccaagactaatggagttagtatgccacattgatgatgaatgactgggtagtacacc

SEQ ID NO: 421239 - DNA, 201 bp, Homo sapiens
agtttaggtaaattgtctaagagtataaaggcagttaaatattggagccaggatagtgcaaaaatcaaagtatttgtatttggtgagatttttaactgttyacttatactaaaaaattttagtataactatttagtataagtcaaaaatttaaaattaagtagccttctcacttattttttaaccaaagatttaagcattt

SEQ ID NO: 421240 - DNA, 201 bp, Homo sapiens
ttgaggtcaggagttccagatcagcctggccaacatgatgaaatcccatctctactaaaaatccaaaaattaaccaggcatggtggcggttgcctgttatygcagctactcaggaagctgaggcaggagaatcacttgaacctgggaggtggaggttgcagtgagccgagattgcgccactgtactccagcctgggcgaca

SEQ ID NO: 421241 - DNA, 201 bp, Homo sapiens
tgacctttctaagttgcatgattcttagaaaggtcccagagagatgtctatctggtgctatatagcagttgctaattaaatattttttaattgaatgattkatatgaattgaacacccagtaattatatttaaaaagtgatgacttcagtgttttgacgcctttaaaaggctacagtggtacaaaatgtaggtgctaccat

SEQ ID NO: 421242 - DNA, 201 bp, Homo sapiens
ttgcctgttattgcagctactcaggaagctgaggcaggagaatcacttgaacctgggaggtggaggttgcagtgagccgagattgcgccactgtactccarcctgggcgacagagcaagacctcatttcaagaaaaagagtactttggctggcgccaacagggtccaggtctgtgcctgccattggagaggatgccacagc

SEQ ID NO: 421243 - DNA, 201 bp, Homo sapiens
aggaaaagattgagaaatcagatggttgccgtgtctgtgtagaaagaggtagacatgggagacttttcattttgttctgtactaagaaaaattcttctgcyttaggatcctgttgatctgtgaccttacccccaaccctgtgctctctgaaacatgtgctgtgtccactcagggttaaatggattaagggcggtgcaagat

SEQ ID NO: 421244 - DNA, 201 bp, Homo sapiens
tttgtcctttctccaaaggactgccaccaggggcaaaaaacaaacaaaaaaaccaaaaaaagaaaaaaaaaaaacagggcaaacaataagatattgaaagyctgagaggaaaagctgtagagtgagtttttgtagaggaataggagctttgaaaagctattgtggatgagaaactagaaagccaagtgcacagctcagggc

SEQ ID NO: 421245 - DNA, 201 bp, Homo sapiens
attcacaagaaaaaagaaatgaacagaaactaccccgaggaagcactaatactagaattactagacaaaaactttaaatcagctgtcttaagtatactcaragagctaaaggacaccatggacaaagaagtaaaggaattcaagataataatgtctcaacaaatagagaatatcaataaagagaaatttttaaaagtaggc

SEQ ID NO: 421246 - DNA, 201 bp, Homo sapiens
aaatcaaaaaaaatatgtatagaaaacaaagagcaaaatgaaggacctaaaacctaaaaaccatttatagtcaatatataaaaaggcttaataccccagtyaaaatcagatatggataaattttataaaaacaaagtaaacaaagagggtactgactcttgtgatagttggataccaagaaccatccctcactggggcatg

SEQ ID NO: 421247 - DNA, 201 bp, Homo sapiens
ccaaccaagaattctaaatctggcaaaactatccttcaggaattaagaagaaatcatgacatacccagataaacaatagctgagggggcttcattgttaayagacctgccctgtaagaaatgctaaaaggagtcttcaggctcaccacagatctattaaattttctttttggcataggaccgaaacatgcattttaattaa

SEQ ID NO: 421248 - DNA, 201 bp, Homo sapiens
tgcattttaattaaacattcgtaatttttcttacacagcaaaaccaaaagccccacaatggaaaatcattttctgttcactgattgttaaaaacttttttwaaaaaaagtcctgtgacatcaagtgcttgccaggatgtggcacagtagaaactcttaaacacttggtgggtgtttaaattgctacaaccagtttggaaaa

SEQ ID NO: 421249 - DNA, 201 bp, Homo sapiens
tttgttctaaaattcttcgggtgacttctcgctgagtcatctgaccgtctcagtttacctaagtatatcccattgtaaaatgatacttaggtgcacgtatkggaagcttgaatgaggaatggagctgtataatcctaattgaaaggcagtgtaagaatcatgagcaatccttatttgcagagaaatagggccattaccgta

SEQ ID NO: 421250 - DNA, 201 bp, Homo sapiens
taattgagatagaaacactgcatgtaatttagtaagacagctggaaatcccagtttgaaaacaaaatgaaaagcagacaacaagcctaacttttagttttrctttctgtgtttctcttatacctctcagaagtttcataagctccagaaattttgtgtttaaccttttagtttcttcaaattcttggttgagagggtatat

SEQ ID NO: 421251 - DNA, 201 bp, Homo sapiens
caggtgtgcagcactaggcccagctaatttttaaattttttttgtagagatggggtctccttatgttgtccaggctagtcttgtattcctgtcttggcctyccaatgtgctgggattacaggtgtgagccactctgcctggccccataagaggtctcttaatttattcagcagacattgtgtattactgtgtgccagatgt

SEQ ID NO: 421252 - DNA, 201 bp, Homo sapiens
gcaattccattatagcagtatctattggagttactttctgtctttggaattactgagaccagaggaattggattacccctctcaagttacatactgtaagrgcaacttataaaagaaaactatccacatttttttgtcagttgggaattaattgagatagaaacactgcatgtaatttagtaagacagctggaaatcccag

SEQ ID NO: 421253 - DNA, 201 bp, Homo sapiens
ctggataaagtggtcaaagaagtcaagataggaaatagcagagctcagagaattgaggcctgggccctcgatggttagaagtttggaagataaggaagaayaagcaaaggagactgagaagaaacagccagggaagtacaaggaaaacctagagaggctacagctctggaaactatgtgaagactcttacctggttttagc

SEQ ID NO: 421254 - DNA, 201 bp, Homo sapiens
cctctgatgggagagagggtttagaacaggaactagggctcagttagtggctgcaattccattatagcagtatctattggagttactttctgtctttggarttactgagaccagaggaattggattacccctctcaagttacatactgtaagggcaacttataaaagaaaactatccacatttttttgtcagttgggaatt

SEQ ID NO: 421255 - DNA, 201 bp, Homo sapiens
ctagagaatttatggatgtattttaaaatcaccacagtttgccctctagccacaaattatttacacttcttctatgtgcaaaatgcactcacttcctcccraaatctatcaaaaaagtctccttcttctatagcatcagcttgaaatataggtagctgtccttttaactaggtccaagtgtgggtgtggctccttgggtat

SEQ ID NO: 421256 - DNA, 201 bp, Homo sapiens
gttttggtgtaggtttgatttttaattttgggatcccagtgaattttcagtaagaaaattgagaccgtataattttaggcaaacctctgatgggagagagkgtttagaacaggaactagggctcagttagtggctgcaattccattatagcagtatctattggagttactttctgtctttggaattactgagaccagagga

SEQ ID NO: 421257 - DNA, 201 bp, Homo sapiens
cccctcaaaacaaagaattatattgggcccaaaaaggtaagagggctgaggttgagaaaccctgggatagatagagggatagtcagtgtcatcttgtgctrattgtgtttaaggttttgttttggtgtaggtttgatttttaattttgggatcccagtgaattttcagtaagaaaattgagaccgtataattttaggcaaa

SEQ ID NO: 421258 - DNA, 201 bp, Homo sapiens
cagtgcacaggatagacccctcaaaacaaagaattatattgggcccaaaaaggtaagagggctgaggttgagaaaccctgggatagatagagggatagtcrgtgtcatcttgtgctaattgtgtttaaggttttgttttggtgtaggtttgatttttaattttgggatcccagtgaattttcagtaagaaaattgagaccg

SEQ ID NO: 421259 - DNA, 201 bp, Homo sapiens
tttctgccacttttgcaagggcgaggtcagccccaaactaccggtaagagcgctgtgttctctatacttgggaacctcatagattcctggccccgatttcycggaactgggtctggagctttctgcacatcattgactcgcccgacatcggtctgccgaatacctgctgcccacttctaagccgccggccctaaaccctgg

SEQ ID NO: 421260 - DNA, 201 bp, Homo sapiens
atcctgttgatctgtgaccttacccccaaccctgtgctctctgaaacatgtgctgtgtccactcagggttaaatggattaagggcggtgcaagatgtgctktgttaaacagatgcttgaaggcagcatgcttgttaagagtcatcgccactccctaatttcaagtacccagggacacaaacactgcggaaggccgcagggt

SEQ ID NO: 421261 - DNA, 201 bp, Homo sapiens
agccaaaccatgtcattctgcccctggcccctccaaatctcatgtcttcacatttcaaaaccagtcatgcattcccagcagtcccccaaagtcttaattcrtttaggcattaacccaaaagtctgaagtccaaagtctcatctgagataaggcaagtcccttctgcctgtgagcctgtaaaatcaaaagcaagctagttac

SEQ ID NO: 421262 - DNA, 201 bp, Homo sapiens
gaaacaactgatgagtactgaaaaagtaaactcagtgtgatttaacactgagtttaaatttaagaaataaatgtggctgggcgccatggctcacgcctgtwatcccagcactttgggaggccgaggtgggcggatcacttgaggtcaggagtttgagaccagcctggccaacatggtgaaaccccatctctactgcaaata

SEQ ID NO: 421263 - DNA, 201 bp, Homo sapiens
gcagctccacccctgtagctttgcggggtccaacctccctcccggctgctttcactggctggtgttgagtgtctgtggcttttccaggcgcattggtgcargctgtcagtggatctaccattctgggatctggaagatggtggcccacttctcacagatccgctaggcagttccccagtagggactctgtgtgggggctcc

SEQ ID NO: 421264 - DNA, 201 bp, Homo sapiens
ggcaccaatttactatattagtccattttcacgctgctgataaagacatacccaagactgggaagaaaaagagctttaattggacttacagttccacatgrctggggaggcctcttaatcatggtgggaggtgaaaggcacttcttacatggcggcggcaagagaaatgaggaagaagcaaaagcagaaacccctgataaa

SEQ ID NO: 421265 - DNA, 201 bp, Homo sapiens
aagaattgcttgaacctgggatatggaggttgcagtgagctgagatggtgcctctgcactccatcctaggtgacagagcaagacttcatctcaaaaaaagaaaaaaaaaaacaaccagtgttttgtacatctgaaaattgctgagagagtagattttaagggttattgttgcaaataagtttgtgaggtaatgcatatgtt

SEQ ID NO: 421266 - DNA, 201 bp, Homo sapiens
agaattgcttgaacctgggatatggaggttgcagtgagctgagatggtgcctctgcactccatcctaggtgacagagcaagacttcatctcaaaaaaagaaaaaaaaaaacaaccagtgttttgtacatctgaaaattgctgagagagtagattttaagggttattgttgcaaataagtttgtgaggtaatgcatatgttg

SEQ ID NO: 421267 - DNA, 201 bp, Homo sapiens
gggtgacgaaataatcagtacaccaaattccagtgacacagtttatccgtgtaacaaatgtacatatgtgcccccaaacctaaaatcaaaaaaaatatgtrtagaaaacaaagagcaaaatgaaggacctaaaacctaaaaaccatttatagtcaatatataaaaaggcttaataccccagtcaaaatcagatatggataa

SEQ ID NO: 421268 - DNA, 201 bp, Homo sapiens
gaattgcttgaacctgggatatggaggttgcagtgagctgagatggtgcctctgcactccatcctaggtgacagagcaagacttcatctcaaaaaaagaaaaaaaaaaacaaccagtgttttgtacatctgaaaattgctgagagagtagattttaagggttattgttgcaaataagtttgtgaggtaatgcatatgttga

SEQ ID NO: 421269 - DNA, 201 bp, Homo sapiens
agaggaggatgagggtcaaaaaactgcctatcttgtactatggtcagttgctgggtgacgaaataatcagtacaccaaattccagtgacacagtttatccrtgtaacaaatgtacatatgtgcccccaaacctaaaatcaaaaaaaatatgtatagaaaacaaagagcaaaatgaaggacctaaaacctaaaaaccattta

SEQ ID NO: 421270 - DNA, 201 bp, Homo sapiens
aattgcttgaacctgggatatggaggttgcagtgagctgagatggtgcctctgcactccatcctaggtgacagagcaagacttcatctcaaaaaaagaaaaaaaaaaacaaccagtgttttgtacatctgaaaattgctgagagagtagattttaagggttattgttgcaaataagtttgtgaggtaatgcatatgttgat

SEQ ID NO: 421271 - DNA, 201 bp, Homo sapiens
gcataaagggaatgaggatatgtgctttaggattcagagaggggaatttcatagcattggtgtggccagtgggatttaaattgagttttgagggatgggtrcatttcagattgagaattccaaagactgtgaggtagcaaaaggaagagggagttgatgaagaagggagaaatatttaataaatcatgtttttttcacaac

SEQ ID NO: 421272 - DNA, 201 bp, Homo sapiens
tagacttcgactttgcagttctgcagcaccacttctggtatagcttttctggtatggcttctggtattttcttcttttctggtatagcttttattaataatttttttttttttttgagacagagtcttgctctgtcatccaggctggagtgcagtggcgcaatcttggctctctgcaacctccgcctcccgggttcaagca

SEQ ID NO: 421273 - DNA, 201 bp, Homo sapiens
ctatttataatggtacatttactttctgtttaataacatgtaaaaggcaaacagcaaattaattttcactgctagtcttgatttgtatgttttagattaawgggttgttgaaactataataaaaaaccaaataatggttgggcaaaggaggacatgattagacatttctcaaaagaaggcatataaatggccaacaggtat

SEQ ID NO: 421274 - DNA, 201 bp, Homo sapiens
tgaaaattgctgagagagtagattttaagggttattgttgcaaataagtttgtgaggtaatgcatatgttgatagtttgatgtagtcattccacaatgcawacatatttcaaaatatgttatataccataatatatgcaatttttgtcagttaaaaataaataatgaaaaataatacaaaaaagcaagcaaacaaacggaa

SEQ ID NO: 421275 - DNA, 201 bp, Homo sapiens
aagcagctccatctgtgtttaatatcagtgggcacagaaaacacaaatttttgaaaccaacaggcaatgagtcactctttttgttctggcgtgtcatgtgstactttaggtagcttcacattttatgttctagttaagtaaaattcttagagaatgaggtactatctctggatagtctgtttgatcttgaaaatgtacaga

SEQ ID NO: 421276 - DNA, 201 bp, Homo sapiens
cactggaggaatttagtgacaagggacagcattttggtctgggagtttctgttcccatcagttcgggtttagagttagagattttaaagacaaggtgggcyatcttaggtcattctatttaaggaaaagtatgaactaatatacgtggtgtgtgagtcaggtaaagtggtctttagggaagattagtctaggggcagtgtg

SEQ ID NO: 421277 - DNA, 201 bp, Homo sapiens
tcacacccagctaatctttgtatttttagtagagacagggtttttaccatcttggccaggctggtcttgaactcctgacctcgtgatccacccgccttcamcctcattaacagtttttacagaggactttaggacagccacactgaaataggatgcttcatcccatgctgaaaagagcatggtgaaagtggcaagtggctt

SEQ ID NO: 421278 - DNA, 201 bp, Homo sapiens
ttatgtatttgttttgagacagagtctcactctgtcacccagactggagtgcagtggcgtgatctcagctcactgaaacctctacctcctggtttcaagtrattcttgtgtctcagtctccagagtagctaggattacaggcgtgcaccaccatgcccagccaatttttgtgtttttagtagagacagggtttcgccatgc

SEQ ID NO: 421279 - DNA, 201 bp, Homo sapiens
gtatttgttttgagacagagtctcactctgtcacccagactggagtgcagtggcgtgatctcagctcactgaaacctctacctcctggtttcaagtgattsttgtgtctcagtctccagagtagctaggattacaggcgtgcaccaccatgcccagccaatttttgtgtttttagtagagacagggtttcgccatgctgat

SEQ ID NO: 421280 - DNA, 201 bp, Homo sapiens
ccacttccaggataaaggcatttaatccactcacaggagattcatctcttaaagtctccacctttcaacactgctccactggggattaagtttccaacacrtgaatttttgaggagggcacattcaaactatagcagtatatttatcaaaatttcaaaagggtatcaaatatattaggcattaggattaaatatttcaaca

SEQ ID NO: 421281 - DNA, 201 bp, Homo sapiens
catcaggtgcttgctaccacacttagctaatgtttaaattttttgtagagacaggatctcactctgttgcccagactggtcttgaactcctgggctcaagygatcctcctgccttggcctcccaaagtgctaggattacaggcataagccactgtgcccagcctgtttttgggttttctaggtacacaaattattaagagt

SEQ ID NO: 421282 - DNA, 201 bp, Homo sapiens
gtccagcttcggctcggcatcagagggagaccatggaaagagagggagagggagaccatggggagagggagagggggagggggagggggagggccaaatawttttttaagacggtaaaatattaatgcttgttaggttttttcctttgtgttaggtcaacaccagcacattcatgttttccagacaagtaatagagattac

SEQ ID NO: 421283 - DNA, 201 bp, Homo sapiens
ccaacctctaccccaccattagtgtattttactataaaaacagtggaaccacagccctaaagtcctgctgatataaagtccttttgtcttaattgtatttaaaaaaaaaaaaaactactcttgatcacattagctatgaggcgaggtcaaattcaggtatctaagactaatgattttgttttgtcttgatccccagagagc

SEQ ID NO: 421284 - DNA, 201 bp, Homo sapiens
cttagtagagatggggtttcaccgtgtttgccaggctggtcttgaagtcctgacctcgtgatccgcccatcttggcctcccaaagtgttgggattacaagygtgagccactgcacctggcctaacttaaaattttaataaattttagaatagcattgataggatggcctcttttggctaaacaaaatggcacatttgttct

SEQ ID NO: 421285 - DNA, 201 bp, Homo sapiens
ttacagcttttggggaaagacaaggcaaacatagaaaaagtaacagcataaagggaatgaggatatgtgctttaggattcagagaggggaatttcatagcrttggtgtggccagtgggatttaaattgagttttgagggatgggtacatttcagattgagaattccaaagactgtgaggtagcaaaaggaagagggagttg

SEQ ID NO: 421286 - DNA, 201 bp, Homo sapiens
aaaaaaaaaaaaaagagtgagaagacagtctaaacttccccaattgattatatcttttcttctcacctttaagtccttacttcaaagggataatttgaaargctgaataggtgtttttctaagccttagttaatgcctggagaagtttcttgatctttttggtgtgatatattatttgtcatgtctgatttgtaaattgag

SEQ ID NO: 421287 - DNA, 201 bp, Homo sapiens
ttgcactccagcctgggcaacaagagtgaaactccgtctctaaataaacaaataaataacctaaattttaaaataaaaaaatctttgacactctacctttyagctgtcagtggaaaccacttaggtagctatgaagcaattctgcaaatattttatggaattctatatttgccagagtataatagaaaaaactaggccggg

SEQ ID NO: 421288 - DNA, 201 bp, Homo sapiens
tatataattaaaaaaattatcttgcagtaagataaaggataaatagaaaatatttctgacagattagcttgacatgacagctacctgagtagactgctatragggtatttgcaacttaaataccaggagaagcaaaccagtacagtgaacaattctttgcaaatgtacaaataaaactcaagtacaacttctttcttcttc

SEQ ID NO: 421289 - DNA, 201 bp, Homo sapiens; identical to SEQ ID NO: 409541

SEQ ID NO: 421290 - DNA, 201 bp, Homo sapiens; identical to SEQ ID NO: 409549

SEQ ID NO: 421291 - DNA, 201 bp, Homo sapiens; identical to SEQ ID NO: 409526

SEQ ID NO: 421292 - DNA, 201 bp, Homo sapiens; identical to SEQ ID NO: 409550

SEQ ID NO: 421293 - DNA, 201 bp, Homo sapiens; identical to SEQ ID NO: 409527

SEQ ID NO: 421294 - DNA, 201 bp, Homo sapiens; identical to SEQ ID NO: 409542

SEQ ID NO: 421295 - DNA, 201 bp, Homo sapiens
gagccagactgtctcaaataaataaatatgagataatgcagtcgggagaagggagggagagaattttattaaatgtgacgaactgccccccccccccccccagcaggagagcagcaaaatttatgcaaatctttgacggggttttccttgtcctgccaggattaaaagccatgagtttcttgtcacatgcctttctatgcc

SEQ ID NO: 421296 - DNA, 201 bp, Homo sapiens; identical to SEQ ID NO: 409528

SEQ ID NO: 421297 - DNA, 201 bp, Homo sapiens; identical to SEQ ID NO: 409530

SEQ ID NO: 421298 - DNA, 201 bp, Homo sapiens; identical to SEQ ID NO: 409558

SEQ ID NO: 421299 - DNA, 201 bp, Homo sapiens
gtaatcccagctggcctgtaatcccagctacttgggaggctgaggcagaactgcttgaacccaggaggtggaggttgcagtgagccgtcatcgcgccactragccaagatcgcgccactgcactccagcctgggcgacagagccagactgtctcaaataaataaatatgagataatgcagtcgggagaagggagggagaga

SEQ ID NO: 421300 - DNA, 201 bp, Homo sapiens
tggaccaatggttcccagccctgtgtccacctccaagcccagattcagattcgagtcatgtacacaacccagggtggaggagaggtaaagctaaaactggsggatgagaggggagggaggcaggactggatataggctcagagggaagaaggaagaggggacagggaaccttggccggcatcgcatgcagtcttgtgacct

SEQ ID NO: 421301 - DNA, 201 bp, Homo sapiens
ggagtttgagaccagcctggccaacatggtgaaaccctgtctctactaaaaatacaattagccaggtgtggcggcgtaatcccagctggcctgtaatcccrgctacttgggaggctgaggcagaactgcttgaacccaggaggtggaggttgcagtgagccgtcatcgcgccactgagccaagatcgcgccactgcactcc

SEQ ID NO: 421302 - DNA, 201 bp, Homo sapiens; identical to SEQ ID NO: 409540

SEQ ID NO: 421303 - DNA, 201 bp, Homo sapiens
aaaataacacccagcattattgaagatctgtatgccaggagctgtgccaagcatttcagattttcctttttgtcttaaatgaaaatgaagtgtccttgccyataactgtcattgaagctacacagtaaccctgtggagtaggcattattatcatccctgttttacaacgcgaggaaactgaggcataggaaggctaagaaa

SEQ ID NO: 421304 - DNA, 201 bp, Homo sapiens
cagcattattgaagatctgtatgccaggagctgtgccaagcatttcagattttcctttttgtcttaaatgaaaatgaagtgtccttgcctataactgtcaytgaagctacacagtaaccctgtggagtaggcattattatcatccctgttttacaacgcgaggaaactgaggcataggaaggctaagaaacttgcttgtgg

SEQ ID NO: 421305 - DNA, 201 bp, Homo sapiens
atagttaatcctctgacaggtgggcttcgataacagttgtgaaatgtaacacatttttcttttcacttatagttggcagaagggccagtgaaatttgaaakttgacctcatattaatcatgggtcatcacagtgtctttacacttggaacatgttgtgcatttctttgtccatcaaaagaaacagaacaaccgagaaaagg

SEQ ID NO: 421306 - DNA, 201 bp, Homo sapiens
tacttaggagttctgatactgggcaagtcacctagcctgtgagcttcatttgcttatacagttgttggaattagatgtggtgacatgcgaaaagcacaaarcctggctcctatcaagcttctgcatctatttttttttctatttttctctcaattattggaagctcatagaagcattttgggatagaattttagtagtttg

SEQ ID NO: 421307 - DNA, 201 bp, Homo sapiens
gcccaagagaaaaataaataaaccagtttctgaacgtttcatttcgttacgtgaggaccgccccgaagtagatccatggcctctgaattgtttttcctgtstcagaagtgaatttgcaccaagctgtgtcttcagaacccctgagcactgggggaagttgctagctaaggacctcatatcagtcctttaaaaaaagttctc

SEQ ID NO: 421308 - DNA, 201 bp, Homo sapiens
ctcttagacaggggctctgccaacccagggggattccgtgttactcagacattggagtgtgaccattcatgttatatagatgggcccctggaaatccccawgataaggtacactctgattgcaggcagcttgaataggattctggctctgtagaattaaaccaactgaccagatggttagaagtgataacgaaactaccca

SEQ ID NO: 421309 - DNA, 201 bp, Homo sapiens
ttcctggtacccctcaccatcatctgtctttgctacctgttcattatcatcaaggtgaagtcctctggaatccgagtgggctcctctaagaggaagaagtytgagaagaaggtcacccgaatggtgtccatcgtggtggctgtcttcatcttctgctggcttcccttctacatattcaacgtttcttccgtctccatggcc

SEQ ID NO: 421310 - DNA, 201 bp, Homo sapiens
gtttggagagaaaaaaccactgcataggccgtgcccaaaagccgctggccaagtcccccaagcgactgtcttctgcgccccgatgtctctgtcctcagcgccccccccccacacccggcacccctgctgtgcgtttcgatactgggcgtgctggcgccacaatctccgctcttgcctcgtcttcctggaaatggcacagag

SEQ ID NO: 421311 - DNA, 201 bp, Homo sapiens
gagacaggagaatggcttgaacccaggaggtggagattgcggtgagctgagatcgtgccattgcactccagcctgggcaacaagagcgaaacttcatctcaaaaaaaaaaaaacaaagactaattctatagtacccatgaccctgcaaccagagaaactgcctgtagggaggccagagtccaaagcagccacctgtaacct

SEQ ID NO: 421312 - DNA, 201 bp, Homo sapiens
gtgtcagacccttctgaggtcaggcgctgaacttctccaagctctgcctttctgcagtttagatcagtcaacttcttaggggtcaaagtatgtgctttttkaagccacagccctccccgacatgtgcgtcagcagatgatggctgaacccaaacccttccctactattggaaaaacaactcaaaaagtctgcacactgatg

SEQ ID NO: 421313 - DNA, 201 bp, Homo sapiens
ccatgataaggtacactctgattgcaggcagcttgaataggattctggctctgtagaattaaaccaactgaccagatggttagaagtgataacgaaactayccaagttaatccagggatactaaccacagtttctgtacagcttctgttttaattgctgccagtctatgcttttttacgcaatgcagacatgaaattccag

SEQ ID NO: 421314 - DNA, 201 bp, Homo sapiens
ggcgcagagcggagaaagaggggcttctctccctagacgctgaacgatctaggatccgtccccgtcccccacctcgggacagaaaggacagtttgtctagktttggagagaaaaaaccactgcataggccgtgcccaaaagccgctggccaagtcccccaagcgactgtcttctgcgccccgatgtctctgtcctcagcgc

SEQ ID NO: 421315 - DNA, 201 bp, Homo sapiens
agcctcccacctccaccaccttcaccaagactctgaaccctgtctgttgctaccattaagcaattctgtcctgttgactcaaactccagttaaaatgaccsagttagggctggaaagcaacactcaaccctctctcatactccctgcaccatcatcgttcctagcccaaaagctcttagacaggggctctgccaacccagg

SEQ ID NO: 421316 - DNA, 201 bp, Homo sapiens
ttaggacctcccctgatgtcgggtcgccatcccaacactcatttcttgggctggtaatcacagcccctatgtaaaaggggggcggggggggcaggtgcgtragaccattctcaccctcctctctacagagcctggacatggttcagaggaaaccaaccactagccatttccagcatctaacaattcttgggctggaaaaac

SEQ ID NO: 421317 - DNA, 201 bp, Homo sapiens
ctttaactgatctgcagtctttccaaggattaagaagtaatcttccatctacacccaggcaccaggaaaaggacctagctcaggggaaatgtgtcagccargtgaattagtcccactctgctgaacacaccaccctttgaacatctcgcctcttcctagattggcctctttgctgtcctcctgcttcactcttcatatacc

SEQ ID NO: 421318 - DNA, 201 bp, Homo sapiens
gcgccgcggtggccctcaggggcttttgtcaccctgccagtgggggctctcgctctagccgcacagagaccaagccgggttctgcaggccctgagggaggyggggggtgggaagtgaatgcgggaaacatgatggggagaggagaaactgaagctgagtaggatttaggacctcccctgatgtcgggtcgccatcccaaca

SEQ ID NO: 421319 - DNA, 201 bp, Homo sapiens
gctgaacacaccaccctttgaacatctcgcctcttcctagattggcctctttgctgtcctcctgcttcactcttcatatacccaagacccagctcaaacamttctctttggaagcctcctctgagtcccccaggaaaggaaggcattcttaagtccttcatttatctctcgtgcaatgcccaccctatatgagctggcttc

SEQ ID NO: 421320 - DNA, 201 bp, Homo sapiens
acgatctaggatccgtccccgtcccccacctcgggacagaaaggacagtttgtctaggtttggagagaaaaaaccactgcataggccgtgcccaaaagccrctggccaagtcccccaagcgactgtcttctgcgccccgatgtctctgtcctcagcgccccccccccacacccggcacccctgctgtgcgtttcgatactg

SEQ ID NO: 421321 - DNA, 201 bp, Homo sapiens
tcctctccaggcccccaacccccgtgatattttttgaatggctgtatatcaatcatttaattatgggatgaactattgttttagatcttaagccaagccartagtgctccaattattttctcagcaaggaagtaacacaggagtcagttgcttcaaaccaaagcccagttatcagccgttcggtctctaggccactgagga

SEQ ID NO: 421322 - DNA, 201 bp, Homo sapiens
caactcaaaaagtctgcacactgatgaggaactctagagcttaatgttgatgtggaaagataatacatttttcaatttaagagtatgtctgagaggctaarccagaaatgtgtaaatttggtgagagtttaaacagcctgtgaccgacgggccaatcttcctcttttccttccagatgtcacactggatccttggcctcca

SEQ ID NO: 421323 - DNA, 201 bp, Homo sapiens
aggaactctagagcttaatgttgatgtggaaagataatacatttttcaatttaagagtatgtctgagaggctaagccagaaatgtgtaaatttggtgagastttaaacagcctgtgaccgacgggccaatcttcctcttttccttccagatgtcacactggatccttggcctccagggtccattaaggtgagaataagatc

SEQ ID NO: 421324 - DNA, 201 bp, Homo sapiens
gagctccttaaactctcttaagcctcagtttccacatctctaaaatgggggtaattatccctaccacctaggacagttggggagatcaagggactcgtgartgtgaatgaattatatcagtactggaagccttctgcttacttctgtgaaagagcttgtgtcccacacctgcttcccgtttttgtccgtaattagaaaatg

SEQ ID NO: 421325 - DNA, 201 bp, Homo sapiens
tcgagtatgcatagtgtagatggacatttgccacaacacactgcccgcagaaatggacttaccgtgaagccaataaagttcaagcttcagggatctctctygcacgggccttgccaaggcccaggagggacttgggcagtatgttcatgtggtcatatgtttttgtaaaaaattgtgaaagtaagatatgtttgtattgtt

SEQ ID NO: 421326 - DNA, 201 bp, Homo sapiens
aggccaaggcaggaggatcactttgagaccaggagtctgagaccagcctgggtatcacaaagagaacccgtccttacaaaaaaaatacaaaaattagctcrgtgtaatggcgtatacctgtagtcccagccacccaagaaactgaggtcagaggatcacttgaggctaggagttccaggctgcagtgagcaatgactgtgt

SEQ ID NO: 421327 - DNA, 201 bp, Homo sapiens
caccatactagattgcctctccagggtgggctgtatgtaggacaagttcaaggccagaaaaacatgcatgcctagtaacactataataaattcttgacacyagagcagagtacgagtctgaggtggagggagtcatggcaggacaagcgtttaagtttcttccactctttgaccgagtattggttgaaaggagtgctgttg

SEQ ID NO: 421328 - DNA, 201 bp, Homo sapiens
tagcctgtctaacaaattcattttcattcttaagatgaaatgttttttctgttgctttagtgatatcttcttaagcatctgtcttttcatctttaaaaggrgaaatgagtactaactcaagaactgttaggaggattaactaatgcatgccatgtgttctgcacaatgtatggcatatcatagtacctacacaatagatgt

SEQ ID NO: 421329 - DNA, 201 bp, Homo sapiens
ctgcaagttaccactgttttactcggccataggttgcagtgcagtccaggctccacaagaaagaatttgaaaagcagaaacagtcacgtggctttcatcgstaacatattttgtatctattaaattatttaatcctcagaactctaagtagtcaagtttggtatttatttcaattatacaggtgaaaaagctgatgctgac

SEQ ID NO: 421330 - DNA, 201 bp, Homo sapiens
taattattgaactatccagaaaaaaacggatattaagaggataaaaagttcacatgtgctttgtagatcagatgtgaaggataaaaagaactgaaaatcaygtacggtcagttgcaacttcactaaacataagaattagacttaagctatcaaaccgttttaaaagtttccttcctggcccttggcattgattactactgc

SEQ ID NO: 421331 - DNA, 201 bp, Homo sapiens
taggaggactgcttgagaccagaagttgagactacagtgatccatgatcatgtcactgtcatacagcctggggaataaagtgagatcctgcctcaaaaaaraaaaaaaaaatgctgaatttactatatatattttatgctagtaagagaataaaaaacatgtacatacgccacccagtagttccttttagctcaaacccaa

SEQ ID NO: 421332 - DNA, 201 bp, Homo sapiens
acatggagttcctctatgtctttcagtgtcttaaaagctcatttcttcttataagtgagtatcactgaattaaatttcactgtatgaaaaaaaaaaaattyagctgggtatggtggtacatgcctgcagtcccagctaccagaaaggtgaggtaggaggatcgcttgagcccaggaggtcgagtagagaaagttatttcaa

SEQ ID NO: 421333 - DNA, 201 bp, Homo sapiens
tgtacatacgccacccagtagttccttttagctcaaacccaattactggttctactcaagtcatcttcaggattggcaaggatctccactttggaataatyttctcctggccccagctgccttacacaactttagaatttaaacatagatatgtaggcaaaaaaaaaaaaaaaaaaaaaaaaaaaaaaaaaaaaggtttcc

SEQ ID NO: 421334 - DNA, 201 bp, Homo sapiens
cattatgcttccagaaaaatctcaaggaaaagtattgcaagcaacagtagtcgctgttggatcgggttctaaaggaaagggtggagagattcaaccagttrgtgtgaaagttggagataaagttcttctcccataacatggaggcaccaaagtagttctagatgacaaggattatttcctatttagagatggtgacgttct

SEQ ID NO: 421335 - DNA, 201 bp, Homo sapiens
ccatagtttaccttagggttcactttttgttttgtacagttctataggttttgacaaatacatgtaatgaatccatcattatataactgtttcaccaccctaaaaatcctgtgttctgcctattcatccctctgctcatcctgaacctttatcaaccatttatctttttactctctctctagttttgccttttccagaatg

SEQ ID NO: 421336 - DNA, 201 bp, Homo sapiens
acatacgccacccagtagttccttttagctcaaacccaattactggttctactcaagtcatcttcaggattggcaaggatctccactttggaataatcttytcctggccccagctgccttacacaactttagaatttaaacatagatatgtaggcaaaaaaaaaaaaaaaaaaaaaaaaaaaaaaaaaaaaggtttcccaa

SEQ ID NO: 421337 - DNA, 201 bp, Homo sapiens
aattgttcctcaatcttttccatgtcaacagcagcatccaagggtagtaaaactctgtaaaaaataataataataaaaataaaaattaatgcttaacaagrgagacacataaaaaaatttaacttgaagtttctctaaaattgcaattaaatcaagaacattttcctctgagggctggcatgaatcaatcaatcaacagaa

SEQ ID NO: 421338 - DNA, 201 bp, Homo sapiens
aagtccttatcggagctatttctttaaagccaacatttactacattaacagatgggttctttaaataagaaattttactttcaactcactgattttatacktagaggctttaaaattttttagaatatgtgaagaccggaattaaaccattctcaccatatttttccaggactgtttgctaactggcttgtttttacataa

SEQ ID NO: 421339 - DNA, 201 bp, Homo sapiens
ggctgaggcaggaggatcacttgagctcagaagttcgaggctgcagtgagctaagactgtgccaccgcactcccgtctggaaaaacaccctgtatttacamagtgagagaaaagaacccaaaaagtagttacatgggcttgatcttacttttgctttacaatagctacaacaatctaaggtaagaatacaaaccaggtaag

SEQ ID NO: 421340 - DNA, 201 bp, Homo sapiens
cgaagtcactaaatctgttgtaatttgttacagtagctatatgaacaaaatacacccttttgacagtttggcgataatctgtacataatctgccctaaaayattgaacagaattaacataaagaccattccagttcagatttatcaaaattctcttgtattttctaccaagtaaatgaaaatatcttaaacacatggaaat

SEQ ID NO: 421341 - DNA, 201 bp, Homo sapiens
agtcatcttcaggattggcaaggatctccactttggaataatcttctcctggccccagctgccttacacaactttagaatttaaacatagatatgtaggcmaaaaaaaaaaaaaaaaaaaaaaaaaaaaaaaaaaaggtttcccaaaaatattcatgccttaatccctggaatctgtgaatatgttaggttacaaaggaaa

SEQ ID NO: 421342 - DNA, 201 bp, Homo sapiens
ctcatctgctggctcgatggagaagactccttggtcctacaggatggtatagccataaaatgaaaggagtcgcagcctaccaatcaccagatgaaaggctwtctgctgatcaggaaaacctacatttggctgcatcagtcaatcagcggtgaacagatctgaaacatgtagttttaaaactccaaatctgcttgcagaggt

SEQ ID NO: 421343 - DNA, 201 bp, Homo sapiens
aaatctcaaggaaaagtattgcaagcaacagtagtcgctgttggatcgggttctaaaggaaagggtggagagattcaaccagttcgtgtgaaagttggagrtaaagttcttctcccataacatggaggcaccaaagtagttctagatgacaaggattatttcctatttagagatggtgacgttcttggaaagtacgtaaac

SEQ ID NO: 421344 - DNA, 201 bp, Homo sapiens
aggattaactaatgcatgccatgtgttctgcacaatgtatggcatatcatagtacctacacaatagatgtaataggtcaggcatggtggctcatgcctgtwatcccaacacttctggaggccgaggcagcgatcactgaggtcaggagttcgagaccagtctggtcaacatggtaaaaccccgtctctactaaaaatacaa

SEQ ID NO: 421345 - DNA, 201 bp, Homo sapiens
ttaggtgggaggataacttgagcgtgggagacagaggttgcagtgaacccagatcgccctattgcactccagtctgggtgacacagaaaaaccaggtctcaaaaaaaaaaaaaaaaaaaatgcatatagtaaaccctagactaaccacttcaaacaaacaaacacacaaaatattaaacagtaaattcacaaaccaaaacc

SEQ ID NO: 421346 - DNA, 201 bp, Homo sapiens
tcactgaggtcaggagttcgagaccagtctggtcaacatggtaaaaccccgtctctactaaaaatacaaaaattagtttggtgttgtggtgcacacctgtwatccagctactcgggaggctgaggcaggagaactgcttgaggtagaggttgcaatgagccaaggtcttgccactgcactccagcctgaacaacagagtga

SEQ ID NO: 421347 - DNA, 201 bp, Homo sapiens
gaggttggggcaggagaatctcttgaacccaggaggcggaggttgcagtgagctgagctcacaccactgcactccagcctgggagacagagtgagactctktctcaaaaaaaaaaaaaaaaaaaaaaaaaaaatccaaccacaccaacaattacattaaataaaaataatatgacaccttatttaaaagacagagattgtc

SEQ ID NO: 421348 - DNA, 201 bp, Homo sapiens
gctgaggctgcagggagctgtgattgcaccactgcacttcagcctcggcgacagagcaagacacgtgctgtctgtctctctctctctctatatatatatayatacacacacacacacatatatacatacacatacacacacacacacacacacacacacacacacgagctgggaaagttccatcatctaattgtggtccct

SEQ ID NO: 421349 - DNA, 201 bp, Homo sapiens
gccactgtgcctggcctaattacaagcttttaagataagatgattaactggacaatttgataattatccagttgcttatacaggccttactgataaactgkggtatgttaatacaatagaattctctttttttgttgtttttttgagaccaagttttgcattgtaacccaggctgcagtgcagtggaatgatctcggctca

SEQ ID NO: 421350 - DNA, 201 bp, Homo sapiens
gttccaggctgcagtgagcaatgactgtgtcaacgcactctagcttaggtgacagaataagactttgtctctaaacacacacacacacacacacacacacwctctctctctctctctctctctctctctctcctctctaaatgttaaactttttgacaagtattctggtactatataataaaactagaagtatgtgtctcc

SEQ ID NO: 421351 - DNA, 201 bp, Homo sapiens
gttttgacaaatgttccatggttatgttaacattagggaggctgggtgaagggtatacaggaactctgtactatttttgcaacttttctgtaaacctaacattatcccccccaaaaaaaaattttttttaaatttttatttatttttattttttgagacagggtctggctctgtcccccaggctagagtgctgtggtgcaa

SEQ ID NO: 421352 - DNA, 201 bp, Homo sapiens
ttccaggctgcagtgagcaatgactgtgtcaacgcactctagcttaggtgacagaataagactttgtctctaaacacacacacacacacacacacacacaytctctctctctctctctctctctctctctcctctctaaatgttaaactttttgacaagtattctggtactatataataaaactagaagtatgtgtctcct

SEQ ID NO: 421353 - DNA, 201 bp, Homo sapiens
ttttgacaaatgttccatggttatgttaacattagggaggctgggtgaagggtatacaggaactctgtactatttttgcaacttttctgtaaacctaacattatcccccccaaaaaaaaattttttttaaatttttatttatttttattttttgagacagggtctggctctgtcccccaggctagagtgctgtggtgcaat

SEQ ID NO: 421354 - DNA, 201 bp, Homo sapiens
caggctgcagtgagcaatgactgtgtcaacgcactctagcttaggtgacagaataagactttgtctctaaacacacacacacacacacacacacacactcwctctctctctctctctctctctctctcctctctaaatgttaaactttttgacaagtattctggtactatataataaaactagaagtatgtgtctccttga

SEQ ID NO: 421355 - DNA, 201 bp, Homo sapiens
tttgacaaatgttccatggttatgttaacattagggaggctgggtgaagggtatacaggaactctgtactatttttgcaacttttctgtaaacctaacattatcccccccaaaaaaaaattttttttaaatttttatttatttttattttttgagacagggtctggctctgtcccccaggctagagtgctgtggtgcaatc

SEQ ID NO: 421356 - DNA, 201 bp, Homo sapiens
tccaggctgcagtgagcaatgactgtgtcaacgcactctagcttaggtgacagaataagactttgtctctaaacacacacacacacacacacacacacactctctctctctctctctctctctctctctcctctctaaatgttaaactttttgacaagtattctggtactatataataaaactagaagtatgtgtctcctt

SEQ ID NO: 421357 - DNA, 201 bp, Homo sapiens
aaatgattcttgtctcaaaaaaaaaaagattcctaggtttctggcttaagcagcaaggtaaatatgttgttggtatattattaatactttaattacaagcttttttttttttttttttttgagacagagttttgctcttgttgcccaggctggagcacaatggcgcgatctcggctcactacaacctccacctcccaggta

SEQ ID NO: 421358 - DNA, 201 bp, Homo sapiens
gacgctgaggcaggagaattgcttgagcccaggaggtggaggttgcagtgagccaagattgtgtcattgcactccagcctggccgacagggcgagactctktctcacaaaaaaaaaaaaaagtccagacaaggatacggagtgcttgctttggcagcacacatactaaaatcagaaggccacagagatgagcatggccctt

SEQ ID NO: 421359 - DNA, 201 bp, Homo sapiens
agctacttgggaggctgagacaggagaatcgcttgaacccagggggtggaggttgcagtgagccgagaccatgccattgcactccagcctgggcaacagarcgagacttcatctcaaaaaaacaaacaatcaaacaaacaaaaaaaccaaaagtagccaggcatggtggcaggtgcctgtaatcccagctactcgggaggc

SEQ ID NO: 421360 - DNA, 201 bp, Homo sapiens
cagatcacctaagatcaggagtttgagaccagcctggtcaatatggtgaaaccccatctctactaaaaatacaaaattagccaggcatggtggcacatgcytataatcccagctacttgggaaggctgaggcaggagaatcgcttgaacccaggaggcggaggttgcggtgagccaagatcgcaccattgcactgcagtct

SEQ ID NO: 421361 - DNA, 201 bp, Homo sapiens
agcccgcatagccaaagcatgactaagcaaaaataacaaatctggaggcatcacactaactgatttcaaactataccataaggccatagtcaccaaaacakcatggtactggtataaaaataggcacacagaccaatggaacagaatagagaacccagaaataaacccaaatacttacagccaactgatcttcgacaaagc

SEQ ID NO: 421362 - DNA, 201 bp, Homo sapiens
cacgttgggccaaacaattcttctttgtaagaaactgcgcatttactatccttggacccctaagggttggtagtatccccaccccataccctggtgctctscggcaggaactacttcctgctatggacaatcaagttaggctcctccacgaacaagaagcaacacccccttccagcccacagctcattaacatgcacctcc

SEQ ID NO: 421363 - DNA, 201 bp, Homo sapiens; identical to SEQ ID NO: 158524

SEQ ID NO: 421364 - DNA, 201 bp, Homo sapiens
ctcagtcactcatgtcagtatagtgttttctttcttagttttcatctagttgtgaacaaacagaatgtacaattttgagtacacagtaattatcaggttcrcacgtaaggtgctgagagtgaatgaggaagcctgtgggccaggacctaaaggtgctgggtccttcagggagcccttagggttgggaaagaattcagcctc

SEQ ID NO: 421365 - DNA, 201 bp, Homo sapiens
gcttcagacgctttccacgatgctataaagagatatggaacgcttttacatttcttcctgagagaagctatacagaggttttgaaaaagaagcccaaagtraggttcactgttgacaaaaaggttgtttcttcactggagtcctaatcctcccagaagatttttgatgaattttgtaatactggtatttcatcagacatcc

SEQ ID NO: 421366 - DNA, 201 bp, Homo sapiens
ctcaatttagagatgagcaaattgagatccagtaaagttaaacaacttgccccaaatccctctttcttctagactacagtgtcttaactaaatagaagtgycttaaccccagaaatctggttttcttctggcagaatgttgaaaacaggaccagaatacccactttgcctgcctctgtacatggggtgcttaatattgttt

SEQ ID NO: 421367 - DNA, 201 bp, Homo sapiens
taaagagatatggaacgcttttacatttcttcctgagagaagctatacagaggttttgaaaaagaagcccaaagtaaggttcactgttgacaaaaaggttrtttcttcactggagtcctaatcctcccagaagatttttgatgaattttgtaatactggtatttcatcagacatcctaaaagtatatgttttctgatccag

SEQ ID NO: 421368 - DNA, 201 bp, Homo sapiens
aaggagaagccagggtccatttcatacctgccagggttccccccaggccttgggccagggctctcatctcctgggacccttactggccagatgacagagtkggtctacacggcctcaaaagtccttcccagtttttggctccatgagcctgtacacttttccatccttgcatccaaataaggtgttttgaaagataatttt

SEQ ID NO: 421369 - DNA, 201 bp, Homo sapiens
aaacataattatttccaaatctaccgagcagctgaacagtcttcagtgacgcctacagtcactggaattcaaagactcctgctcccggcagcgctgggtcyttttatgcctatgggatttatctcagctcctacctctacttctatgactacgcccttcagaacgcccgttgtacgggctagaaagtgtgcctgagctccg

SEQ ID NO: 421370 - DNA, 201 bp, Homo sapiens
gctagaaagtgtgcctgagctccgccctctgtccttatccctggtcttttcttctcttgcctccctcctgcttgaggacctgtgctcgtgcttgggtttcyccttcttcagctccctctctcggttctctgcccaaccagagtaggcagtcctggccttggggagcttccgcccctccctgggcactgacttctgagctct

SEQ ID NO: 421371 - DNA, 201 bp, Homo sapiens
tccccttcttcagctccctctctcggttctctgcccaaccagagtaggcagtcctggccttggggagcttccgcccctccctgggcactgacttctgagcyctctcctagttcttgctgctgtgcttcttagggccagggttgtcctcttcctttactgtcttgcttctgggtgacgaagaggatggttgctctgcctgta

SEQ ID NO: 421372 - DNA, 201 bp, Homo sapiens
ggagcccgcgggccgcggctgccgagacaagccggtgcgcatcaccatgcgcggcctggcttcggagccgctggacacgctgcgcgcgcgtccctgcgcgrcgagaaggctgggctcttccgctactgcgccgacgcccgcggcgagctggacctggagcgcgcgcccgtgctgggcggcagctttagggggctagagtcc

SEQ ID NO: 421373 - DNA, 201 bp, Homo sapiens
atcgagattacagtgagctatggatcggccactgcactccgggctgggcgacagagcgagaccctgtctcaaaattaaaaaaaggaaaaaaaaaaaaaaaagtctgcgctccccggggcccaaggagaggacccaggagaggagtctggctccttttgcctcagacgagtccagggcgccgggttaactggtctaaagtcc

SEQ ID NO: 421374 - DNA, 201 bp, Homo sapiens
tctttttttctttttttttttttttttttgagatagggtcttgctctgtcacccaggctggagtgcagtggtgggatcttggctcactgcaacctcctccrcctcccgggttccagcaattctcctgcctcagcccccagagtagctgggaatacagatgcatgtcaccatgcccagctgatttttgtattttgtagaaac

SEQ ID NO: 421375 - DNA, 201 bp, Homo sapiens
aaaaagggtacctgtttacagtatgagagctgaaataagaagatagagggtcactttgtttgactttggctgagaacatgcctgttaagggactcaaaaakgttcaccgctcttcggatgtccacaaatgaccacaaaggtgctgcaaatattgactctgggtttataaaaaagttttagcaagtagatgaattcacaaat

SEQ ID NO: 421376 - DNA, 201 bp, Homo sapiens
gcttggttcagtgtgccatggaaactagagacagtacaggtactttgtttacacagccttcatttctatttacgaaatctctttgtggagtttgcaaagctttttttttttttccactgctgcacctgtcgatccagctctaaccatcagccaatgaacagtaagatgtcaagccagtttctgatgggggaagtgggaggt

SEQ ID NO: 421377 - DNA, 201 bp, Homo sapiens
gggtggatcacgagatcaggagatcgagaccatcctggctaacatggtgaaaccccatctctactaaaaatacaaaaaattagccaggcgtggtggctggrgcctgtagtcccagctactcaggaggctgaggcaggagaatggcgtgaacccggtaggtggagctggcagtgagctgagatcgcgccactgcactcctgc

SEQ ID NO: 421378 - DNA, 201 bp, Homo sapiens
taatcctggcgtggtggtgcatgcctgtaatcctagctactggggaggctgaggcaggaaaatcacttgaacccgagaagtggaggttgcagtgagctgakattgcaccactgcactccaggctgggtgacagagtgagactgtctcaaaaaaaaaagaaagaaaagaaaaaaaaagtgaattttggcaggacatggtggc

SEQ ID NO: 421379 - DNA, 201 bp, Homo sapiens
aaaatacaaaaaattagccaggcgtggtggctggagcctgtagtcccagctactcaggaggctgaggcaggagaatggcgtgaacccggtaggtggagctkgcagtgagctgagatcgcgccactgcactcctgcctgggcgacagagcgaggctccatcataaaaataaaatacaataaaataaacaggtaaagaaatat

SEQ ID NO: 421380 - DNA, 201 bp, Homo sapiens
gtcaacaagccccatatgcaagccacgcccagtggcacaagcctgtagtctcaactattctagaggctgaggtgggaggattgcttgagcccaagaattaraggcctagaggccagcttgggcaacatagcaacactccgtctctttaaaaaaaaaaaaaaagccccatattttgcacttccattgagtttttactctctc

SEQ ID NO: 421381 - DNA, 201 bp, Homo sapiens
ggcaggcggatcacctgaggtcgggaattcaagatcagcctgaccaacatggagaaaccccgtctctactaaacatacaaaaattagccagtcgtggtggygcatgcctgtattcccagctacttgggaggctgagacaggagaatcgcttgaacctgggaggcggaggttgcagtgagccaagatgacaccattgcactc

SEQ ID NO: 421382 - DNA, 201 bp, Homo sapiens
cagttccttcagggttgagcatgacacatcagcgcccttcacagagttctatgccctagccaagccaggcatattgtcagaggcatttgaaccagagcgaytccatcttgaataggggctgggtaaatgaggctgagacctactgggctgcatttccaggaggttaaggcattctaagtcacaggcgataggaggttgaca

SEQ ID NO: 421383 - DNA, 201 bp, Homo sapiens
tatagactcgccctgaattctttcttgcacgaaatccaacagtgctgtcttggggtctatatggggacccctttctggtaacaatatcacagcttccttcttttttttttttttttttttttgagacggagtctcactctgtcacccaggctggagtgcagtggcgcgatctcggctcactgcaagctccgcctcccgggt

SEQ ID NO: 421384 - DNA, 201 bp, Homo sapiens
catatttgtatgtggtacagttgtcgacagtattcagtacagtaacatgctgtataggtgtatagcctaggcgcaacaggctctaccatgtagcctaggtrtgcagtaggctgtaccatctaagttcgtttgagtgcactctgtgatgttcccacaacatcaaaatcacctaatgacgcctttctcagaacatatcctggt

SEQ ID NO: 421385 - DNA, 201 bp, Homo sapiens
aaaaaaaaaaaaagaatgtaattttcctctttttctaattcaccctcagccattattaaccaattaaccaaggtggtggcatacaaggtgaacagaacaaytgagcaaattaatattactgttcttttcctttttgttttttttttatgttcccaaacatttgactattaaatatttggaaaccaaagtgaattcactgtt

SEQ ID NO: 421386 - DNA, 201 bp, Homo sapiens
cccctttctggtaacaatatcacagcttccttcttttttttttttttttttttttgagacggagtctcactctgtcacccaggctggagtgcagtggcgckatctcggctcactgcaagctccgcctcccgggttcacaccattctcctgcctcagcctcccgagtagctgggactacaggcgcccgccaccacgcccggc

SEQ ID NO: 421387 - DNA, 201 bp, Homo sapiens
ttcttttaccaatctctaatcgaaatttaagatttcctcctattatgaatataggcaataaatcctagtattattaacaacagctgtgactctacaaccamcagaaggagtcagacattttcacaagacatcccatcttgaagactttttttttttttttttttttgagatagagtttcactcttgttgcccaggctggtg

SEQ ID NO: 421388 - DNA, 201 bp, Homo sapiens
gtaacaatatcacagcttccttcttttttttttttttttttttttgagacggagtctcactctgtcacccaggctggagtgcagtggcgcgatctcggctyactgcaagctccgcctcccgggttcacaccattctcctgcctcagcctcccgagtagctgggactacaggcgcccgccaccacgcccggctaattttttg

SEQ ID NO: 421389 - DNA, 201 bp, Homo sapiens
gctgaggcaggaaaatcacttgaacccgagaagtggaggttgcagtgagctgagattgcaccactgcactccaggctgggtgacagagtgagactgtctcaaaaaaaaaagaaagaaaagaaaaaaaaagtgaattttggcaggacatggtggctcacgcctgtagtcccagcacttagggaggccaaggcgggcagctaa

SEQ ID NO: 421390 - DNA, 201 bp, Homo sapiens; identical to SEQ ID NO: 192186

SEQ ID NO: 421391 - DNA, 201 bp, Homo sapiens; identical to SEQ ID NO: 192309

SEQ ID NO: 421392 - DNA, 201 bp, Homo sapiens; identical to SEQ ID NO: 192242

SEQ ID NO: 421393 - DNA, 201 bp, Homo sapiens
cagggcatagtcaaaggcatcatcctcccaactacccacttgattatgtatttcagatccctccgtgggggccttcttctgacagagaattctttgaggtmcgcagtagtgcttttgtcagcacagactgctaatctacatcttgctgcgttctgtttgctgaggttgggcttattcatttaacacataccaaccattatc

SEQ ID NO: 421394 - DNA, 201 bp, Homo sapiens
ccatagtcagtaaaacattccccttgggctgtcatgagctaaaagcagtgtcatctccgcatgttggagcagccaagaaatagtttggtactaccgacatygtctaatccatgtcacatcctcatacaatttaattgctcaaccatgcatttaaaactcctcaagaaaggattggtactgcaactgtaggtaaactgaaaa

SEQ ID NO: 421395 - DNA, 201 bp, Homo sapiens
ggtagtcaggaaaaacattcaggaatagatttatacaccattattgttttatttttaaattttcattcactcttctgtttggatacttttgctaattaacktcctatgttaatttccaccaagctataagtccatagtcagtaaaacattccccttgggctgtcatgagctaaaagcagtgtcatctccgcatgttggagc

SEQ ID NO: 421396 - DNA, 201 bp, Homo sapiens
ggccaggctcggtggctcacgcctgtaatcccagcactttgggaggccaaggtgggcggatcacaaggtcaggagatcgagaccatcctagctaacacggygaaaccccatctctactaaaaaaatacaaaaaattagctgggtgtggtgacgggtgcctgtagtcccagctactcgggaggctgaggcaggagaatggcg

SEQ ID NO: 421397 - DNA, 201 bp, Homo sapiens
aaattatcttccaaaaaatattcgtgacagtataaaaaagagagactgggctgggcttggtagctcatgcctatagtcctagcactttgggaggctgaggygggcacaccccttgaccccaggggttccagacaagcctgggcaacgtaggagatctcatctctacaaaaaattcaaattagttgggtgtgaagtggtgtg

SEQ ID NO: 421398 - DNA, 201 bp, Homo sapiens
tccccaaagccaggtgtctgcccctgcccaggaccacagggaatactgctgatactgctcagcatgtactgtgccaagcactgtttatatttttcatatgygttaactcctgaaattatcccaataattctacaatttcaacactgttagactcccattttacagaggaagaaacaggaatcgttgaggaaaggttaaata

SEQ ID NO: 421399 - DNA, 201 bp, Homo sapiens
gactttggaatccttcccaggaagccaacatctttccttcccatcagccagccatctttcctgaaatgaccttttcttttgagatcctgttcttttggttytctcctgcctaaaccaacctttctctgtctcccctgccaaccccccaactcagaggttctcagacttgagtgtgcacctatggcgctggttaaaatcaga

SEQ ID NO: 421400 - DNA, 201 bp, Homo sapiens
tttgctatttctataaccactgtaactctgaatcttattttaatctagaaaagatactgtattcttccctaaaccccaggttaaatcagacagggttggayttctcctcattgcatggcatcatcggaatgaatcaccctaacaaagcgacatgcttgtgtccctctgtggaaaattgcatttcatgcattgtgagaaaaa

SEQ ID NO: 421401 - DNA, 201 bp, Homo sapiens
gtgtccctctgtggaaaattgcatttcatgcattgtgagaaaaaaactacatccagatttcatgtgagtgtttatcttgcagaaattcttggatacagttstgcttcatgattcattttccactctttattcatgttgagtcctctctagtgctggaatcatagcgaccagaggccatctctcttcaaatgtaaaaagtgg

SEQ ID NO: 421402 - DNA, 201 bp, Homo sapiens
cccagaccacggtgccccgtgctgagcattcagcccctctctcgccatcttgaatcacttcagctgccgcagcccagcctggcccccaagctggttacccrtgagcaccgcgtcatggcagagcccaaacaacacccgcaataggcaaatacctggagatagaactctcgttttgaagtcaatcttttgatcacacagaga

SEQ ID NO: 421403 - DNA, 201 bp, Homo sapiens
gaattctttgaggtccgcagtagtgcttttgtcagcacagactgctaatctacatcttgctgcgttctgtttgctgaggttgggcttattcatttaacacrtaccaaccattatccagaggcaccatggagagttagtcatggaataaagcactgtccttgcagatgaaaaaagtctccagagcagacttctgacaggaaa

SEQ ID NO: 421404 - DNA, 201 bp, Homo sapiens
ctcacaggcctccaggtccttatctgcagcatcctgggaccaagccccctccccagggctgggctgggtgggccatgccaggggcacctctgcccacagcytaaagcctacattgcctatgtttctttgggtcattgctgcctcttcttcccagcattagggcagctcatcaagccccagctttccctgaaagccctcctg

SEQ ID NO: 421405 - DNA, 201 bp, Homo sapiens
tgctggagagttgaagaggtgtaagaagagatcgtgccctcatttttcacttatttttttggttattcatttataataaaaggttggcattgatatggtayaacctgcaaattacttgcagttctgagtttcagataaaacattataaaacattaaattcaatacatactgctcctttgaaatttgggtaaaaaattgtac

SEQ ID NO: 421406 - DNA, 201 bp, Homo sapiens
aatatttttatgtttggaagtcacgctttctgctccctaattccagagcatagacttgttaccatggtagtgctttcacatctatctttggctttgggtgsaggcaatccagatgtgtttccagatgctgcacttggttaaagccgggatctgtatttccccctcggtgttgtcgtagccaggcttccccactcgggggca

SEQ ID NO: 421407 - DNA, 201 bp, Homo sapiens
gtgtttttgttttcccttttgtgatatttcatacttcaatatgccaaaaaaactcaacaagaagttggcaaaagaagttatacaagcatgtttcacaaatmtccaaatctttgaataaagatggtcatcacaatttcccaaacatttccacatagggctgcagagtaaggcccatcttttttgtgttatttactcatttat

SEQ ID NO: 421408 - DNA, 201 bp, Homo sapiens
tggagagcagagactgtggcctcctctcctggccctgcagaaacctcagccacttccccattctgtggtcccaggacatagcacgtgtgcacaggctaccyccagtggggcccagaggtgccaatgcctctgacacttgaggacaggaactcccctaagtgacaagcctcatcgggctgctagacactagtcaggcccagg

SEQ ID NO: 421409 - DNA, 201 bp, Homo sapiens
aaggaggtaagtctctctgtgttttttcttcctttccccaagcccactttgttaccttccttggttgctggatgagaaattagtcagagggtcagagaggrcctcaacttcatatgctttaaatagagcatatgcaattttaaaccatcctcttaaccaatttttcttttcttttcagtttttccccagttatacttccac

SEQ ID NO: 421410 - DNA, 201 bp, Homo sapiens
ctgtgacagggaagggctggtggaaggcacctcagtggtcaaaggcaaatgtcccttttgcattttctggtagcaatgcattggtcttactctgtttcctyctctctggaaatctggatgctttcttcctcagagtcctcaattctcaccgccctgacacacacacactctgctcctcctggggtcttgagaagccctgga

SEQ ID NO: 421411 - DNA, 201 bp, Homo sapiens
cttatctggagctcagcctcaatcatgtcttaacaaaatgacaggtctcagaaagggggagctcaatagctcaaaagtgacaagtccttttcacagcaccrttctcagaacacctctgagtaacgtgtttgccagtagctattctcactgatgcactgatggccctgaagaagcggatccagtcacataggaaaggaggct

SEQ ID NO: 421412 - DNA, 201 bp, Homo sapiens
tcctaaccagcctctcaccttccacttctggtctcccgaattcattctccatacagcagccagaatcaacttttaaaaatgcaagatgtagccaagcgtgrtggctcacgcctgtaatcccagcactttgggaggccaacgcgagcgcatcacttgaggtcaggagtttgagaccagcctggccaatgtggtaaaacccca

SEQ ID NO: 421413 - DNA, 201 bp, Homo sapiens
ctgggtgtggtggcacacacctgtagtcccagctactcttgagactgaggtgggaggatcagtcctgaggaggctgtcctgggaggttgaaggttgaagctgtggtgagctgtgattgtgctactgcctttcagcctgggtaacagaacaagacccagtctcaagaaaaaaagaatggggaggaaaagaaaaatataagtt

SEQ ID NO: 421414 - DNA, 201 bp, Homo sapiens
ttaggccaggctcggtggctcacgcctgtaatcccagcactttgggaggccaaggtgggcggatcacaaggtcaggagatcgagaccatcctagctaacayggcgaaaccccatctctactaaaaaaatacaaaaaattagctgggtgtggtgacgggtgcctgtagtcccagctactcgggaggctgaggcaggagaatg

SEQ ID NO: 421415 - DNA, 201 bp, Homo sapiens
gcaagctccacctcccgggttcacgccatcctcctgcctcagcctcctgagtagctgggactacaggtgcctgccaccacacccagctaattttttttgtrtttttagtagagacggggtttcaccgtgttagccaggatggtcttgatctcctgacctcgtgatccacccgcctcagcctcccaaagtgctgggattgca

SEQ ID NO: 421416 - DNA, 201 bp, Homo sapiens
gggccctctgaaccagctgtgagactgcagccacccactatggggttgtgtgaacacaaatgcaaccagtgggaaggtcttgtgcatgcccagctcacagwttcccttcattacagtaaatctatagaaatgggactggccccacatttttaaatgattaccattaacattcctaatggtttaattatatctttacttcca

SEQ ID NO: 421417 - DNA, 201 bp, Homo sapiens
aacacacagggactgtcacacacacgtgcccagcagtgtccccattctgtgttccctgaattgggacagcagaaggtggaattctcaatagcctgttgtcrggttgaggggttttttcagtgctattcctcagtgtagctcatgttgttaaaagtggcagccgtgcatctgaaaagctttcagtctcatggtcgggttcag

SEQ ID NO: 421418 - DNA, 201 bp, Homo sapiens
tctgaaaatgcctccaaacacaggaatcccaggagtggcccccccttactcaggctcgcagtaagaagtggtgggaaggacactgccttggggtgtcctcygctgggtcacagctgatctagctctaggcctctggtgctgggtatgttctagtcacttttcccagtgacgacttgatcatggtgcctgtagcagtgatgt

SEQ ID NO: 421419 - DNA, 201 bp, Homo sapiens
agaaattcttggatacagttctgcttcatgattcattttccactctttattcatgttgagtcctctctagtgctggaatcatagcgaccagaggccatctstcttcaaatgtaaaaagtggttgattttcaaacagatgataaatgtgaaatcatctaaactactaagtaataaaaattaactggtagtttatcacctttc

SEQ ID NO: 421420 - DNA, 201 bp, Homo sapiens
attacttgcagttctgagtttcagataaaacattataaaacattaaattcaatacatactgctcctttgaaatttgggtaaaaaattgtacaaccgtatawatagtcatttttgtattttttctatgttgtgaaaaccaaaattgtaattttataagtctttgattcactaaaattatataatttaaatgtattttttgta

SEQ ID NO: 421421 - DNA, 201 bp, Homo sapiens
ggtttttattgaatgctgactatcaaaaggaatttttttccagtagtaattgaataaagatgaacccttctcaatacagttgccaaaatgcagcccttctyagcatgtgggtttgaaactgaataccaggctaggttaagtatgtattggggaaagtactgaatggaaaacaaaaaagccattaaaggccttaccttgatt

SEQ ID NO: 421422 - DNA, 201 bp, Homo sapiens
aaatggtgatactatctcctgggtgactgcaaagatcaaacgagttaataccataaatcacttagaatatgcagaaaactcttcacatatactaaatcatyaaatcatcacaacaactcattttaaaatgaggaaacagacgcaggtaaaggaacttgcccaaggttactcagctaaaaaaaaaaacaaaaaacaaaaaac

SEQ ID NO: 421423 - DNA, 201 bp, Homo sapiens
ttcgatatcttatactttgtaaatacactgttgagttacttccattttacagaagagcagcaagaccaaagagttcaaaggttcacagacctcaaatgttrttttcatacaaattcccttttccacaactgtttatcttttcttttaggaggcctgtattatgcacacacacacaaacatggttttttgaaatgttttaca

SEQ ID NO: 421424 - DNA, 201 bp, Homo sapiens
tgctcttagccctgtgcccccacatatagcaatgcttttggtaaatgtttgttaaatcacaatgtgggctgttctaggatgcttgtttcttaagcattttkggggagtgaaattcacttctgtaatacacagttatggttagtatggtcttctctacaccaccactggtttcaataaagttcttctttcgtaacacatatg

SEQ ID NO: 421425 - DNA, 201 bp, Homo sapiens
  misc_feature (1)...(201): n = A,T,C or G
ctttctccttgaaatattctctcatttgacttcctggacactcgactttttttgattcttctccctttctatacttctcgccaccctctatctgtctcccntacaagctcaccttcaaggcttggttctagacctctcttcttcttaccttacagtctctccccacagatcttgtcctcatccagatattcagttcatcca

SEQ ID NO: 421426 - DNA, 201 bp, Homo sapiens
ggtgttaacagcggttggactacagacaattgcttccgggcagcgttccaaaatactggctacagcagtctcatcggcacctagttcttgtaaaatattcscaatttcttcaacataggtttcatcctctaaaagtacccatccttttaatctacgaattttcctaatgtcaactgaacatttatagagcttttccactgt

SEQ ID NO: 421427 - DNA, 201 bp, Homo sapiens
tctacgaattttcctaatgtcaactgaacatttatagagcttttccactgttcttgtattttctttgctcgactgtttatcagttgtataggtgaagcatrctaagaaaggtctgtattttggaggtgatcgcatctttctgaaagaacacagcctgcaggactgggatctcagcagcagcttccacaacatggctgcaat

SEQ ID NO: 421428 - DNA, 201 bp, Homo sapiens
ccctctctctccggccagcctccccacagtccgcagtccccgaggcctggagccgggatttcggtcctcggtctcaagaagctcccgacagttctcagcascgccaaccaggccatcagtcccttcgcccatggccaatcagggctcgggagatgaccgccaacccccgcccccccaagacacgcccccgcgtcccaacgc

SEQ ID NO: 421429 - DNA, 201 bp, Homo sapiens
cttgtattttctttgctcgactgtttatcagttgtataggtgaagcatgctaagaaaggtctgtattttggaggtgatcgcatctttctgaaagaacacascctgcaggactgggatctcagcagcagcttccacaacatggctgcaatctactagctagtttccaccgtcctgggacttaaatggactcattctatctga

SEQ ID NO: 421430 - DNA, 201 bp, Homo sapiens
gacaagaaaactgctcatgtggaatatttttaaaaatcttcctaaataaggattgcttgaacccagaagcccgaggttgcagtgagctgagattgtagcaytgcactccagacggggcaacaagagtgaaactcttaaaaaaaaaaaacctcctaaataattaattgaattgtaatacacttctccacaacttcgatatct

SEQ ID NO: 421431 - DNA, 201 bp, Homo sapiens
agtgtttcctttatagctgtgggagaatttaacaaaataaatgggttttggcttaacaattttagtagccaaactttcatgttggcctcagagccacctayatctagataactctcttggagaattcttaccatttgcttattcttctcaacaggattatgaaaaacattaggtgcagctgtcaaaagtctgctaatgacc

SEQ ID NO: 421432 - DNA, 201 bp, Homo sapiens
tttcatttagcataatgttatcaaagttcatattacagtatctgttagaacaaagcagttaatttcacgtggtcaaaggaaggtcagggaagttttccttratgatccttactgcttttaagtaccagatgatcagtaaaaattcatccattatttcctcccatatttttgtttgaactttaaaacttagctccttaagtt

SEQ ID NO: 421433 - DNA, 201 bp, Homo sapiens
cattcaatgtggaaaaattgccaacttctggaaagtataaggaaatggaaaaagtctttcacaatccccaccactgaagacaactgttcatattttggcayacatgatgatgtgtgacctgaacacatcacagttcagcttggagtaagcaggaaatgcagacagctgctgttcccttagcctcactgtgcaggagcctct

SEQ ID NO: 421434 - DNA, 201 bp, Homo sapiens
ttgcccagtcttggctatgtctttatcagcagcatgaaaaaggactaatacaagccatgagccaccacacccagccttccttatctcttttgacttctgcwgcttttagcagagttgaccactttctccttgaaatattctctcatttgacttcctggacactcgactttttttgattcttctccctttctatacttctcg

SEQ ID NO: 421435 - DNA, 201 bp, Homo sapiens
taaatgtttgttaaatcacaatgtgggctgttctaggatgcttgtttcttaagcatttttggggagtgaaattcacttctgtaatacacagttatggttartatggtcttctctacaccaccactggtttcaataaagttcttctttcgtaacacatatgccctgctgccagtttcaaattgaccaacgtttataagcaag

SEQ ID NO: 421436 - DNA, 201 bp, Homo sapiens
accacacctggctaatttttgtactttttgtagagacagggttttgccatgttgcccaggctggtctggaactcctgagctcaagcagtccacccgcctcrgcctcccaaaatgttgggattacaggtgtgagccaccacgcctggcctaaaaaatggattttaaatgcttctgtttcccaaaataactgcttataaaagc

SEQ ID NO: 421437 - DNA, 201 bp, Homo sapiens
caattgcttccgggcagcgttccaaaatactggctacagcagtctcatcggcacctagttcttgtaaaatattcgcaatttcttcaacataggtttcatcytctaaaagtacccatccttttaatctacgaattttcctaatgtcaactgaacatttatagagcttttccactgttcttgtattttctttgctcgactgtt

SEQ ID NO: 421438 - DNA, 201 bp, Homo sapiens
atatgccatttaatagtatatgagtttttgaaataatggttcaaggtaaaagttaccaaccttattaaaataaatatgatttatattttataatatggcaygagtcagaatttatctatttagagataacttaaatacaacacagaagctaagcaggttcttaaaattactggtgtctacaaactgcctgaatttttgtct

SEQ ID NO: 421439 - DNA, 201 bp, Homo sapiens
gaggtgggaggaacatttgagcttgggaggctgaggctgcagtgagctgtgatctcaccgctgcactccagcctgggcaagagtgagaccctacctctctmtatatatatgcaaacatatatatcttgtttatcacatatatcatatatgatatatatcttgtgtatcatatatatatcttatcggactcttaggagtttg

SEQ ID NO: 421440 - DNA, 201 bp, Homo sapiens
ttaaaactttttaaagtctcagtttacgctgaggtggcaaaatgagatgagataccaccacatagatttgcaatttgatgaagaagaaaaccagtttcgcrcctttgatcatcgaattccagtctatacaagaagttagagaggccaggaaaaggttgttagaaattaggggacaacttttggaaagagcttttggtgtgc

SEQ ID NO: 421441 - DNA, 201 bp, Homo sapiens
ctgagaaacatggcaaaaccccctctttacaaaaaattaaaaaattagccaggcatggtagcatgcgcctgtaatcccagctactctggaggtgatgtggraggatgacttgcacctgggaggcagaagttggaatgaccctgcatttttagcttgggcgacggagccagaccctgtctcattaaaaaaaaaaaaaaaaaa

SEQ ID NO: 421442 - DNA, 201 bp, Homo sapiens
tgatataaaaatgatagaaagttcctatgtacctactacctagcttctcataacatactacaaaatcacagtacaatattataactaggatattgacaagwttaacatggaaagtcaagatacagaagatttccatcaccacaagtatccctcatgtgacctttaaagccactcactcccctcccagttctgccccctcat

SEQ ID NO: 421443 - DNA, 201 bp, Homo sapiens
atcaggggagatagataaacaacagtttgaatagtttagaatttcctaaattttagatataaaatagtatttatgagttaacagtattttaatatcagatyttaacttcttaaaaccagattgcaacatataatggttacaaggaaaacagaaatgacacagtgtctttattttcaacagatatgcgcatgcaaataagta

SEQ ID NO: 421444 - DNA, 201 bp, Homo sapiens
ctctggaggtgatgtgggaggatgacttgcacctgggaggcagaagttggaatgaccctgcatttttagcttgggcgacggagccagaccctgtctcattaaaaaaaaaaaaaaaaaaaaaaagagagtcatttattttaagctttctagatactgagccaggatgctgagatagtgcaggaagggatacactgtgtgttc

SEQ ID NO: 421445 - DNA, 201 bp, Homo sapiens
tgtcagccaccttagtattggcatctacatattgtcatttttcatttagtttacaatcttcctggttcttggtatgatgagtgatttattgaaacctggayatttttttaataatgtcataagactctagatcttatttgtaatcttctgttttacctagcttttactggcattgctctgccaggggaagtagggatacca

SEQ ID NO: 421446 - DNA, 201 bp, Homo sapiens
tttgaggttacagtgagctatgaccatgccactgtactccagcttgggcaacagactaagatcctgtctctaaaatggtaaaaattaaacaattttttttwaattttgtaaatgaaaaatatcacatgcttgaaaagaatagtcattgtgttaaatatttgatctaggagatctggatttattttaagaagtattgtgtca

SEQ ID NO: 421447 - DNA, 201 bp, Homo sapiens
ctcaaggtatctcatgaatgatgaaatactgagagtgcccccttttaacacatttattttatatgggccctgaaactttcacagctaactgttttattttrgcttctgtctaaaaagaatatatctacaaattttagtagagcctggagtcagagacctgagtttgcatcctgactgtacagcttactgctgatgtcattt

SEQ ID NO: 421448 - DNA, 201 bp, Homo sapiens
taatggagtcacaaagcccatatactttaccatctaggcattcacccggtctgtggacttatacctgtgtgcttggttcacaggttcagtggtacctcagyccatgacagaaaagcagcagctatattgaagggcaaagaggaactgttgtttgaattttcctgagagcctgacttagtgctgggccttctcttccacctc

SEQ ID NO: 421449 - DNA, 201 bp, Homo sapiens
tacagaagatttccatcaccacaagtatccctcatgtgacctttaaagccactcactcccctcccagttctgccccctcattagaccctggcaaccattaytctgttctccattattataacgtcacttcaggaatgttatacaaatggaatcatacaataagtaaccttttggtacttggctttttaaaattcagcataa

SEQ ID NO: 421450 - DNA, 201 bp, Homo sapiens
gaaacctggacatttttttaataatgtcataagactctagatcttatttgtaatcttctgttttacctagcttttactggcattgctctgccaggggaagyagggataccacctcataatgtctgatggaagtagaagtccaggcttcccacttgccttcctgtgatacccaaaggccgggaacttcttgactctattttg

SEQ ID NO: 421451 - DNA, 201 bp, Homo sapiens
gtctattacgtctttcaatcaaccctcaaaccacacatctactttgtagtcagaagtttaattttgcttagattttgaatcaggggagatagataaacaayagtttgaatagtttagaatttcctaaattttagatataaaatagtatttatgagttaacagtattttaatatcagatcttaacttcttaaaaccagattg

SEQ ID NO: 421452 - DNA, 201 bp, Homo sapiens
attttctcctatgttttattctaaaatttttgtagtttcaccttttacatttaaatcatggtccattttgagttagtttgtgtataaggtgtgaggcttaratcaagattcttcttttttttttctacctgcagatgtccagttgcgtctgcactattagttgataaagctctctttcctgcattgaattgctctcatacc

SEQ ID NO: 421453 - DNA, 201 bp, Homo sapiens
caggagaatcgcttgaaccagggaagtggaggttgcagtgagccaagatcccaccactgcacgccagccttggtgacagagcaagactccatccccccccmaaaaaaaaaagtttcagattttaaagcatttcagattttgaattttcttatttttattttttgaaactgggtctttctctgtcacccaagctggagtgca

SEQ ID NO: 421454 - DNA, 201 bp, Homo sapiens
gttagtttgtgtataaggtgtgaggcttagatcaagattcttcttttttttttctacctgcagatgtccagttgcgtctgcactattagttgataaagctmtctttcctgcattgaattgctctcatacctttgtcaaaaatcagttcgacattgaataggcatttctccaaagaagatatacaaatggctaacaagcaca

SEQ ID NO: 421455 - DNA, 201 bp, Homo sapiens; identical to SEQ ID NO: 70059

SEQ ID NO: 421456 - DNA, 201 bp, Homo sapiens; identical to SEQ ID NO: 70060

SEQ ID NO: 421457 - DNA, 201 bp, Homo sapiens
gtagaagtccaggcttcccacttgccttcctgtgatacccaaaggccgggaacttcttgactctattttgaggaaacatagtgtacatagttgatcaaacrtgaattactgttgattttcatgacagaatagccgcttaaaagaagaacagatttggcacatacggcatctactaaaggaactgagtgaagagaaggcaga

SEQ ID NO: 421458 - DNA, 201 bp, Homo sapiens
ttttgagttagtttgtgtataaggtgtgaggcttagatcaagattcttcttttttttttctacctgcagatgtccagttgcgtctgcactattagttgatmaagctctctttcctgcattgaattgctctcatacctttgtcaaaaatcagttcgacattgaataggcatttctccaaagaagatatacaaatggctaaca

SEQ ID NO: 421459 - DNA, 201 bp, Homo sapiens
atgttgaagaagcgatgaaggaaaaatggaagtttgaaagagaccaggaaaaaaacttgagaggtgatttaggaacatagaaaactatcatagagttgtgmcaagttatttcttgaatatattaatgctttattcttccaatatgttcaaaatgctgttaagtgtattttaaacggcatcattaccaccgcagccacaaac

SEQ ID NO: 421460 - DNA, 201 bp, Homo sapiens
ggaactgcagttcaaaaccatgcagttaatggctcagtttctagctagttaatggctgagccacaactagacttcaagactcctagcacccaaatagagaycttttatatcatgcactcatgccttgatggaatcttattctgaacttctgtcattgctaatgctgttaagtaaatatctttcattttaatctacattgta

SEQ ID NO: 421461 - DNA, 201 bp, Homo sapiens
aggtatttttaagaacaaaagttttcatttctttggaataaatgcccaggagttcaattgctgggtagtatgatagttacacgttagtttttaaagaaacktgaactactttccaaactggctgtaccttttacattcccaccatcatataagagggatccagtttctcctcatcctcttcagaatttagtgatgccgcta

SEQ ID NO: 421462 - DNA, 201 bp, Homo sapiens
tgcctgagcccagggaggtcaaggttacagtgagccatgattgtgtcactgcactccagccttggtgacagagagggaccctgtctcaaaaaaacaaaacmaaaaaaaaaaacagaaaaaaacatggctataataaaggtactataaaagaaaactgtagggtgctgtttaacagtgtaactaaaggactttagtcagagg

SEQ ID NO: 421463 - DNA, 201 bp, Homo sapiens
atttatcttttgactttttatttaaccaaaccataaaacattggttctccattttaaatctctttgtcttttttcttttagattttcagagagtatgcgtrtgtaaataccatttgaaaagcacaatctcagttgttaaaattagtaattgcatatttaagatgatatactgtttttataaaatcagattaaaatgaatat

SEQ ID NO: 421464 - DNA, 201 bp, Homo sapiens
taagatgatatactgtttttataaaatcagattaaaatgaatatcaaaaaggtgctatatatgactatcgggactaaagatcaacagaaataaagtttggragcaatcaatgataattaacacaatttatccctcaaggtatctcatgaatgatgaaatactgagagtgcccccttttaacacatttattttatatgggcc

SEQ ID NO: 421465 - DNA, 201 bp, Homo sapiens
ttccagccattatttatttgagtactttttcagtcctgccctctttctctccctctaatactccagtaacatgaatcttttgttataggccaggcttgctsgctcacacctgtaatcccagcactttgagaggtcaagggagtttcagaccagcatagcaacatagcaagacctcatctctaaaaaaacaaaaataataat

SEQ ID NO: 421466 - DNA, 201 bp, Homo sapiens
atttttttaataatgtcataagactctagatcttatttgtaatcttctgttttacctagcttttactggcattgctctgccaggggaagtagggataccayctcataatgtctgatggaagtagaagtccaggcttcccacttgccttcctgtgatacccaaaggccgggaacttcttgactctattttgaggaaacatag

SEQ ID NO: 421467 - DNA, 201 bp, Homo sapiens; identical to SEQ ID NO: 70061

SEQ ID NO: 421468 - DNA, 201 bp, Homo sapiens
aatgctgttaagtgtattttaaacggcatcattaccaccgcagccacaaacacatgtaggtaaatgggcaggagagggaaataataaagtgggtagaggtratgaagccaagcaaggaggtggaagaagggtagtgatcagaaacagatgaaatttatctgactgttttttttgggatagggtgtagttcagtcacccagg

SEQ ID NO: 421469 - DNA, 201 bp, Homo sapiens
cctgcctcagcctcccaaagtgctgggatttcaggcatgagccacctcacctggccaagaaggattttagattttaaaatctaaaagaaggatttattttwaaaaatgtaccataaaagatgtatgttgtccttaacaacattcagggaaaatctgtctccttctttggagatcccaatatattcgtatgaactttttagg

SEQ ID NO: 421470 - DNA, 201 bp, Homo sapiens
gtggcgtgtgcctgtaatcccagttactggggaggctgaggtgggacaagcgcttgaacctgggagggggagtttgcagtgagccgagatcatgctgctgyactccagcctaggtgacagagcaagactctatttcaaaaaaacaaacaaacaaacaaacaatctctataatgcctaaaacaatgctgggcacctttcagc

SEQ ID NO: 421471 - DNA, 201 bp, Homo sapiens
atctggcttatagtagtactgataattgtttaatgaaaataaccaccatttgttaagagattttaaatatagtatcttgtggccaggcatggtgactcatrcctgtaatcctagcactttgggatgccaaggcgggcagattgcctgaggtcaggagttcgagaccagcctggccaacatagtgaatgaaaccctgtctct

SEQ ID NO: 421472 - DNA, 201 bp, Homo sapiens
tattaaaactttttaaagtctcagtttacgctgaggtggcaaaatgagatgagataccaccacatagatttgcaatttgatgaagaagaaaaccagtttcrcacctttgatcatcgaattccagtctatacaagaagttagagaggccaggaaaaggttgttagaaattaggggacaacttttggaaagagcttttggtgt

SEQ ID NO: 421473 - DNA, 201 bp, Homo sapiens
gcatagagttcatctccatcaatcctcttatttctggaggttaaatatccttagagaactggaaaaccagctctaaaattcaagtttcatagtatccaaaygagcttttttttgaccagtaaaggatttttttttaatgttgcattttctcattattgggaaagaaagagcctagtttttctctctaatgagtatacaatg

SEQ ID NO: 421474 - DNA, 201 bp, Homo sapiens
ccacctcataatgtctgatggaagtagaagtccaggcttcccacttgccttcctgtgatacccaaaggccgggaacttcttgactctattttgaggaaacrtagtgtacatagttgatcaaacgtgaattactgttgattttcatgacagaatagccgcttaaaagaagaacagatttggcacatacggcatctactaaag

SEQ ID NO: 421475 - DNA, 201 bp, Homo sapiens
tatattttattgagcagaagtcaatagcctcacagtatgagttttaaaggaaagagacaaaaattaagttgcttgactccccaagagtaatgcttgttggstgtaacacaaatgaggaaagggaagactgaagacagaatgatatcagcggtggttctaggcatggctcctccccacatttctctcccctgatctgtgact

SEQ ID NO: 421476 - DNA, 201 bp, Homo sapiens
ttgaattatgttatttagaccctgaagacactgaatcttaacttcaaaattttaaagttttgaaaccacatttatcttttgactttttatttaaccaaacyataaaacattggttctccattttaaatctctttgtcttttttcttttagattttcagagagtatgcgtatgtaaataccatttgaaaagcacaatctcag

SEQ ID NO: 421477 - DNA, 201 bp, Homo sapiens
ctctagatcttatttgtaatcttctgttttacctagcttttactggcattgctctgccaggggaagtagggataccacctcataatgtctgatggaagtaraagtccaggcttcccacttgccttcctgtgatacccaaaggccgggaacttcttgactctattttgaggaaacatagtgtacatagttgatcaaacgtga

SEQ ID NO: 421478 - DNA, 201 bp, Homo sapiens
accaagataggagtgtcctgaggccaggttatattagaaagagaattcacctggggcaagctaagtcagcttagccaggctggatagccagaatcatcatrgagaaacgtcaaagtcaattaagttgtaaccagggaaaaactggggaacaaacatgagatgagaagtggagaggctatagagtaggatgccgtcaggagc

SEQ ID NO: 421479 - DNA, 201 bp, Homo sapiens
cactaagtcagtccttccttagcctggaagttggtaatggagtcacaaagcccatatactttaccatctaggcattcacccggtctgtggacttatacctgtgtgcttggttcacaggttcagtggtacctcagcccatgacagaaaagcagcagctatattgaagggcaaagaggaactgttgtttgaattttcctgaga

SEQ ID NO: 421480 - DNA, 201 bp, Homo sapiens
ggaggccaaggccggcagatcactcaaggtcgggagttcgagaccaccctggccaacatggtaaaacctcgtctctactaacgatacaaaaattagccagrcatggtggcacacacttgtaaccccagctacttgggagtctgaggcacgagaactgcttgaacccgggagatggagcttgcagtgagccgagatatcatg

SEQ ID NO: 421481 - DNA, 201 bp, Homo sapiens
tggctgcccagaggcggtgggtgggagctgccattgaaagaaaaagccaaggcctgcctggtgtatgcagaaaggaacagggaaggtgggtattatggacmcagcagtagcatggttaagggaacacaaaacacacgtgtggcttatgggtctggtaaagatggagcaggtttggagaatggggtgatggaacatgagttt

SEQ ID NO: 421482 - DNA, 201 bp, Homo sapiens
tgcagagttaggagtggctgcccagaggcggtgggtgggagctgccattgaaagaaaaagccaaggcctgcctggtgtatgcagaaaggaacagggaaggygggtattatggacccagcagtagcatggttaagggaacacaaaacacacgtgtggcttatgggtctggtaaagatggagcaggtttggagaatggggtga

SEQ ID NO: 421483 - DNA, 201 bp, Homo sapiens
ggagtctgaggcacgagaactgcttgaacccgggagatggagcttgcagtgagccgagatatcatgccactgcactctagcctgcatgacagagcaagacytaatctcaaaaaacaataaaaaataaataaatgaatcagccacccgtggccagtctggcagctgaccacacatgcatgactgatgcaagaggaaaccaaa

SEQ ID NO: 421484 - DNA, 201 bp, Homo sapiens
aggcaataacggagaaaatgaacaaaaaaagacataagatgtataaaaaatatacagaaatagaaggaaatgtcatcattataaaagaaccaattaagtargaataaacaatcatcttcagtttctatgcatataacaagtttaaaatatataaaataaaatttgatagaactaaaaggagaagtaaatccacaactatag

SEQ ID NO: 421485 - DNA, 201 bp, Homo sapiens
gccggcagatcactcaaggtcgggagttcgagaccaccctggccaacatggtaaaacctcgtctctactaacgatacaaaaattagccagacatggtggcrcacacttgtaaccccagctacttgggagtctgaggcacgagaactgcttgaacccgggagatggagcttgcagtgagccgagatatcatgccactgcact

SEQ ID NO: 421486 - DNA, 201 bp, Homo sapiens
tgctttccactcaactagtctctgccgtgtgtacatttcaatagcacgttcgtcctcctcattaaactcatcttcatgatcttccagctctttcaaagccytatctttatatgttgtcaccactgactgctggaggatgcgcttctcctcttccacctcattttccaattctttcagactttccttggagggcaagatacc

SEQ ID NO: 421487 - DNA, 201 bp, Homo sapiens
ttcgcagccccaccccacgacagcagctcctccccaaggaggacctcacgaggtcaactgccgggctcaggttctcccccggagcctaggttccaccccgycccggccgtgcggcacagaactgcctctctgggcccctcaccgaacgctgcagctccccaagccaaaaagaggcgcgctcctttccgctgggatctgggt

SEQ ID NO: 421488 - DNA, 201 bp, Homo sapiens
agcaacggcaaagggagaacttaaacaagattagattgatgccacaatcgaagagtataagacctacaaatcagattctgccgggtggggaaagggccagwtcgcgaccgatcaggtgcgactagtttcccaaaagcggcaaagatgtagcttcgcagccccaccccacgacagcagctcctccccaaggaggacctcacg

SEQ ID NO: 421489 - DNA, 201 bp, Homo sapiens
tcctcggttgctccgccttcgcgcttcctcactgtctgggccacggccgctccctgactggcgccatctcctcctctttggccgttaccagggcagaaggbtctccgtggaagttgccccctcggaaacagctattaggtcgtattcaggttcctggccttttttccggtttttccacttgattctagactcttgagtcca

SEQ ID NO: 421490 - DNA, 201 bp, Homo sapiens
gcgacagcaccgatacctttggcacacttccgcctggtacactacaaacggcctccttcccggcacgcctcctcttgtctccccgccccctcccggaagtraccctgccgggccaggagccgggaagaagagccggtgttctctctgttcctcgctagcagcttgggacattagcgccgagatgtgccccatatctgagct

SEQ ID NO: 421491 - DNA, 201 bp, Homo sapiens
cattggatctctttagacttattcactaccacatgaacagtgtggaggaagctgccccaatgattcaattatctcccactgggtccctctgacaacatgtragaattatgggaactacaattcaagatgagatttgtgtggggacacagccaaacagtatcaaatggcctctcaacatagcagaaagagcatggcagaaag

SEQ ID NO: 421492 - DNA, 201 bp, Homo sapiens
gagctatgataaaatggagtcggtttactaatatcttctgatcttgtaattgaattaatgaaactaattttttactctttttgtaaacactttttttttttcctcaaaagcctattactgtggtttggtcagtttcaagtattattaatatatattgagacggagtcttgctctgtcgccagcctggaatgcaatgacggc

SEQ ID NO: 421493 - DNA, 201 bp, Homo sapiens
tggtgcaatacagtaattcctaaatgataaattacactatttaatatttcaacagagacatttgttagatatagaggtccaattttttaaatgaagagtttaaagatttgcttgcatcttaaactgaaatcctgcattaaattagtaatttgtaaacttaccatttgatttgtaagaaatatcatatattgattgtaaaac

SEQ ID NO: 421494 - DNA, 201 bp, Homo sapiens
tgacaatttagggaggagacaaaaatacgctcaataatgctcaaaataaatatgtaaccaaaaaatggaaaagtaaaaatgagcaatgctaagaaatggtrgaagaacagtatttaacctagtatgaggaagaaaagaaagttctctccaatgaaacctataaaacgatcatgaagaatgaatagattaaaaaagtgaaag

SEQ ID NO: 421495 - DNA, 201 bp, Homo sapiens
gtaaaacaaatgttatatgttgttttttagatccacttaactttcagtgttcagcaactccacgaagaatccacaacttgaaaacaaaagatgaaaaatgmtgagttcacgtacatagctgtactcttagtcccaaaccaataaatcttttgccctctttctaatttatcacatgtttgtaaaagagatttgcttctgggg

SEQ ID NO: 421496 - DNA, 201 bp, Homo sapiens
atactctgcctattgttggaacactatgtaatcttcatccaatgaatgttttatttcttaagattttaatgaaaatctccacatatatatatatatatataaacctaaaattttaaaagtcagttttctgaataaactagaatgattttgtaattgagcttattctgcaactggcagttcaatccagaatctgtgcaggaa

SEQ ID NO: 421497 - DNA, 201 bp, Homo sapiens
aatactctgcctattgttggaacactatgtaatcttcatccaatgaatgttttatttcttaagattttaatgaaaatctccacatatatatatatatatataaacctaaaattttaaaagtcagttttctgaataaactagaatgattttgtaattgagcttattctgcaactggcagttcaatccagaatctgtgcagga

SEQ ID NO: 421498 - DNA, 201 bp, Homo sapiens
tgcacacacacaggtgcattctcagataggttgatgatatcactgatgaattttggttctgtttacatagctctttctttcattatcctgagaagataaakttgttctttccatttatatatccaagcatacatttactgctcaagaacttttattaagtgggtgtgtatatgtacaatattttaaacacaaacatatgtt

SEQ ID NO: 421499 - DNA, 201 bp, Homo sapiens
aaatactctgcctattgttggaacactatgtaatcttcatccaatgaatgttttatttcttaagattttaatgaaaatctccacatatatatatatatatwtaaacctaaaattttaaaagtcagttttctgaataaactagaatgattttgtaattgagcttattctgcaactggcagttcaatccagaatctgtgcagg

SEQ ID NO: 421500 - DNA, 201 bp, Homo sapiens
agttctgccaccgcagtctgatggacggtggtgtgttagcagctcagctggccctttgcctcgttgcatggggcagctgccttccactggcaagggcaaasggccaatgtgacagcctttttggatacccatactcagtgagtcccaagctcttgaccaacatacaagaagaatgagctcacaggggcaatttaaggatgg

SEQ ID NO: 421501 - DNA, 201 bp, Homo sapiens
gcaagatattttccattgtcattaactttcatgtgatagaaaaactaatctggccccaatttagaggtttttttttgtttgttagcaattataaagtcatyaagaaagtgttcagaatgtattgaataagtgaattttaagaaagtatttgaaaccaaaaagagtaggcctgcaggggaaaaaaaaaaaggagattgctac

SEQ ID NO: 421502 - DNA, 201 bp, Homo sapiens
acggctcatcaaagcatttaaaaatacttattagatactttgaagggcaatttcttcacgtgtttggcaaggcaagatattttccattgtcattaactttyatgtgatagaaaaactaatctggccccaatttagaggtttttttttgtttgttagcaattataaagtcattaagaaagtgttcagaatgtattgaataag

SEQ ID NO: 421503 - DNA, 201 bp, Homo sapiens
aagttacaattctggttttccttaaaatctaagatatgtcacaaaataatttactgcctttgtttctcgctctggtaacatcttccctctgcacctatttmccgcctatttaaaaggtgatcgaaaaatctaacactgtctacccacttgggaccccttccatgctatggaagctttgtactgtcactctgctcaaaaaag

SEQ ID NO: 421504 - DNA, 201 bp, Homo sapiens
atatatgcttaaaatacttctaacatcagaatttgtgcacgtgttttcttccccaagaaagctataaatagcaaaaattttgctgtaagcttccctatgtyctctctccttctcccctcccctaaaactcaaaggaatgttaaaagcacgtttctctgtgagcgttggaccttatctatgctcccagttccaattccttgt

SEQ ID NO: 421505 - DNA, 201 bp, Homo sapiens
gaagcagccagagaggtgagagtacgctctgacattaaagtaggtggtaatgtgtattccaattcatttttgtctttttctagtactaacaaacttcattrctcaatgctattacttattacttcttgaaatgttgtctcctaccttctcctactaaatactccaactcaggtcagatacagtgcattttcaaagctcccc

SEQ ID NO: 421506 - DNA, 201 bp, Homo sapiens
actgatactactgtccatcaacttaccacagctacaaagctgaaattcaaatgtatttcttctcccttgtctcccatacaacttaatcacaaagacagacrtatcttgcctcattaaaaaaaaatcagtacactaatctctaatgctaatgatactgctttaaaggcttctcatcatctgtcaatcaactactgggaccca

SEQ ID NO: 421507 - DNA, 201 bp, Homo sapiens
agagccaagaataacaacattatcaatcttctctactttcaagttgaaatgtgatgtatcagtcactaatattccaaacactatgaaataaattgtctggwgctttgtggctccttctttttcctacctcctttgttttatttgctttgtggtgtataataacccttgacatgttatatttaattattttaaaacatggtg

SEQ ID NO: 421508 - DNA, 201 bp, Homo sapiens
cctttccaccctgaaccaatatacaccttacatgtattcattgatgtctgcctgtaacttctgcctccctaaaatgtacaaaataaaattgtgaccaagcygccttgtgcaaatgttctcaggacctcctgaggctgtctcatgggcatgtccttaaccttggcaaaataaacttccaaactgattgagacttgtctcaga

SEQ ID NO: 421509 - DNA, 201 bp, Homo sapiens
aataataaagttcacgtaaagcacttagaaaattgcaaggcacacattaaatttattagctggaataaaagcctaaaccattatgactttttttttttttwaaaaaagcaatattttaactaaaaaaaaagaaacaaagaagcatatctttttcatataatggttttcctgggaggcagtagcaaacatctgggataatat

SEQ ID NO: 421510 - DNA, 201 bp, Homo sapiens
attcttttttatgtttgtatagtattccatggtgtatatatgccacatttttttaatccagtctatcattgatgggcatttggtttggtttgaagtctttrctattgtaaatagtgctgcaataaacatatgtgtgcatgtgtctttatagtagaatgatttataatcctttggttatatacctggtgatgggattgctga

SEQ ID NO: 421511 - DNA, 201 bp, Homo sapiens
gtgttcttttattattattattctatatttatttttaaattttcattgttagtgtttttttaataattagagtcttatttctctctcttttttttttttttactttaagttccgggatacatgtacagaatgtgtaggttttttacataggtatacacgtaccatggtggtttgctgcatctataaacccattatctaggt

SEQ ID NO: 421512 - DNA, 201 bp, Homo sapiens
tgtgttcttttattattattattctatatttatttttaaattttcattgttagtgtttttttaataattagagtcttatttctctctcttttttttttttttactttaagttccgggatacatgtacagaatgtgtaggttttttacataggtatacacgtaccatggtggtttgctgcatctataaacccattatctagg

SEQ ID NO: 421513 - DNA, 201 bp, Homo sapiens
ctgtgttcttttattattattattctatatttatttttaaattttcattgttagtgtttttttaataattagagtcttatttctctctcttttttttttttttactttaagttccgggatacatgtacagaatgtgtaggttttttacataggtatacacgtaccatggtggtttgctgcatctataaacccattatctag

SEQ ID NO: 421514 - DNA, 201 bp, Homo sapiens
ttgcttgtttttgtcaggtttttcaaagatcagatatttgtagatgttgtgtgttatttctgaggtctctgttctgttccattggtctatatatgttttgrtaccagtaccatgctgttgtggttactgtagccttgtagtatagtttgaagtcaggtagcgtgatgcctccagctttgttctttttgcttaggattgtct

SEQ ID NO: 421515 - DNA, 201 bp, Homo sapiens
gtaatgattcataaaatatcaatactaattaagaaatacggcaaagtgaagatttattctacctcaatttcaagtatttgaagggactgagagtcaagatyatttatagtgcttctctatggtgacattattttaatggtgtcatttaaatccatttttggtgcaatacagtaattcctaaatgataaattacactattta

SEQ ID NO: 421516 - DNA, 201 bp, Homo sapiens
tatgagtatatattaaaagttttgacctttttcttatttatatggttcaaatgagtgcattgtgagccaaaaatgcaagatggatcgagaatgttcttgtycaactagaatttgttaagaggctccaaactgccgttaggaatcagagttggagagacagtgatttctatgtgtatctgaatgttactgtgttctggctgt

SEQ ID NO: 421517 - DNA, 201 bp, Homo sapiens
ggtttaaaatcaagagaccattcagaatgaagctgtgacttaaatggcaaatgtctaagagagaaagaagcgggaagtgattacagtaattgacacagcaytgtccttaaaggctatcttggcagttctgggaatgactcaacatataaagggtaagttataaaatattacgcagctcttgtgttgagaatggtattccag

SEQ ID NO: 421518 - DNA, 201 bp, Homo sapiens
aaaaaaaatatctggcaaaaaatgataggtgataaaaattctcacattcacagggaaattaacctgtttggcatttttcctatatggtgagttagcagcaytgaagttaaaataaattagatatgtaagcccaggagaagttttagatgaaatgttaattgaagttaatcatggcattcacatatatgatgtatactcttt

SEQ ID NO: 421519 - DNA, 201 bp, Homo sapiens
tacaaactatgattacatcagttcaattcttgggttgtgattttataagccttatgaaaaactatgttgatagtgagattgctcgacagtttcttttatactgtttttctttctcactttgattgttattgtgcattccaaggtaacccttttatagaagcagagccaagaataacaacattatcaatcttctctactttc

SEQ ID NO: 421520 - DNA, 201 bp, Homo sapiens
cagtttcttttatactgtttttctttctcactttgattgttattgtgcattccaaggtaacccttttatagaagcagagccaagaataacaacattatcartcttctctactttcaagttgaaatgtgatgtatcagtcactaatattccaaacactatgaaataaattgtctggagctttgtggctccttctttttccta

SEQ ID NO: 421521 - DNA, 201 bp, Homo sapiens
ctatagaatgcaaagttaagtgaaagtaaagatcaaataactagctcattttactcaagggaaaaacaaatatattatctcactattgtgatcacgcaagkatagtttcagtccccaaggataccctcccaagagctcatgtattagatagcaatgtattaagatgactataaatgataaacttgacattcttttaatgct

SEQ ID NO: 421522 - DNA, 201 bp, Homo sapiens
tccagtctctccctgcaagcgtgtctccatctggagtatctgcctttgatttctctgccttgctcaaggtccagtgtgtgatcatgccataaagcacatgsctttccagctttaacgctgtcatcaggtgacttaatttcttagcttttcaagtccattgagtaccatgtgatttgtctagcttctctatttaacagaagc

SEQ ID NO: 421523 - DNA, 201 bp, Homo sapiens
tgggaaacagtcattgtacacatcagtgaacatatgaaattcaaggaggacaaaagaacaaacccaatagtagggatcataattcaaatcaacaagtcaasaaagtctcacatcgccttttaaatttttatttacaaaaattttctcacttactaccttcagtttgctccggcctcttgttttcctttcccgtttatcttt

SEQ ID NO: 421524 - DNA, 201 bp, Homo sapiens
gtgcagcttagcatggaacacagggccttcctgggaggatctcttgacattatctcatccataaattttcactgctcccaggcttatactcaatgttctasaattatctacaatctccataactttgccatttcctcagattaaaatgactttcttacttcatcttttcagtctctgattttccaaaataaatcaggccct

SEQ ID NO: 421525 - DNA, 201 bp, Homo sapiens
aactgttctcaaatattcaaaagagaaattttgaagaactttaatactttgcatttatctatacatctacatcctatggtatattgtataaatattattgscttgcaaatataaaaaatatctcttttgttaaaagaatagtaaataaattaattatgtctaaaatacacatagcctggtttgaaattcatcataagtttt

SEQ ID NO: 421526 - DNA, 201 bp, Homo sapiens
ttctttcaattacatgaaacccttcttttgggtccatatgattatactcagtacttttctaatctttggatccatattttctagaaatgtcccttccactyacagattttaagtagctccctactacgggcgcattccaacttctacaataatcttaggagagtttaatgtctcagaaaactccttaaaaggaatgacttt

SEQ ID NO: 421527 - DNA, 201 bp, Homo sapiens
ggaaattaaccattcatccacccatagaatttgctgtttcttcagaattctgtcctaggctttcatctcttctcacttgaacacttgtgctaggtgatctycattattcccattatttctgttaccatctctatgaggctgtcttcaaaatacatctccagctcagcccaccttaatgagctccaagtccatgtatccacg

SEQ ID NO: 421528 - DNA, 201 bp, Homo sapiens
tttctgccatcaagttaaaccaaaataggctacagtggggaatctcccaactgacaaaggactgaccacctagagtcagccaataaagagagacttgtggytttaggcttaagggttgtccaatcaaggctctgatcccactcctcagccttgcagtttttgtctttataatctctaactctccaacgtccccttgaagag

SEQ ID NO: 421529 - DNA, 201 bp, Homo sapiens
acacctgtttgtgttccttaataacatataattgtctccttgtgaaatcatgcacttctagactttccagatattcctcaccttctgaacttttatattgygttttcttgaattaattattaataaagtctacaatattcttaatttttcacaaatttattatttattgtttattcccttaagtgtgacctgtctctgcct

SEQ ID NO: 421530 - DNA, 201 bp, Homo sapiens
ccaacatgtcaaatctgaaaataatgttttgagttataaagtacccaaatgacagtgtaagtgttaaggtatttgagaccagtcatatccaaccacagtcytcatcactgccatcttctttcaccgtacctctttgtttttttctcttctgtcagcgatgtgagtttaactccaagtgctttctttccctttgcagaagga

SEQ ID NO: 421531 - DNA, 201 bp, Homo sapiens
ggattgaatttttttttccttactcttttcttttgtctcttaaccatatggtcttttcctatagaccttcagagttagcaggagatgacttgtagtggtgyaacacctgtcagccttaaataacaagattcagaaaatacaattcagcatagagttttttcaaccccaaagcttgaggatggccacccaggagcatagatt

SEQ ID NO: 421532 - DNA, 201 bp, Homo sapiens
tgagtgcatacaggaaagtcaatgaaatttgttggttagcctacctaggacaaaggattgaatttttttttccttactcttttcttttgtctcttaaccayatggtcttttcctatagaccttcagagttagcaggagatgacttgtagtggtgtaacacctgtcagccttaaataacaagattcagaaaatacaattcag

SEQ ID NO: 421533 - DNA, 201 bp, Homo sapiens
ctttgtttactttcaaattccttgtaatatctggtgaacttggaagatatatctttagctgtttccagtattctctctaattttattttcatgtttattarcaattttggtatatattttttcttagcaaagatactatatgtttattcagtcttcatctttctttctaaataatatctctcaggcttcttatttatgtgt

SEQ ID NO: 421534 - DNA, 201 bp, Homo sapiens
aaactaggtaatcattatcatgatagcaatatataagattacaaggagcagatggcctaacatctttcagctttcattggaaatattttagcaaaaatatrtagttaaaatttctcagttataagagattggttttccgaaaatttatgttaatattgataaaattcaatataaaatttactaattttatcatgaatagtt

SEQ ID NO: 421535 - DNA, 201 bp, Homo sapiens
ggtcaatatttctttgacactttaatttctgtacatttttgtttttacgacgtttttatttcctctggtaaaattaataaaattcatgcgtggttgaacayttgtactctgttggaccaattaattttgaactttaaaatatgaaatgagcaccttttgttgtactgtgactatatttctataaaaattcacttactttta

SEQ ID NO: 421536 - DNA, 201 bp, Homo sapiens
taccatgatattttatattaaaattatttttagtaccaacatgtcaaatctgaaaataatgttttgagttataaagtacccaaatgacagtgtaagtgttraggtatttgagaccagtcatatccaaccacagtcttcatcactgccatcttctttcaccgtacctctttgtttttttctcttctgtcagcgatgtgagtt

SEQ ID NO: 421537 - DNA, 201 bp, Homo sapiens
ttatacgtaaacacaaatacttttataaggaagattaagtcacaccatattgtgttagttgtagctgagaatttttgtaaagcttttaagcatgcagactytattttcccttgcatccaactgctatcccaacattttacaacagaaaaaataaaatcgttgctctttctgacccacttttttcgcctcaggatatctttg

SEQ ID NO: 421538 - DNA, 201 bp, Homo sapiens
tctttagcctggctcttacatattctccacgatgctgccaagaaaagagagcagaagcatttagaacaggagttacttttaaaaagaaagttacttttgtsaaatgatgctccaacctatagacaaaatgaactctttgtggataactgagatgcttaagttaaagcaaaaccaggaggccctagcaggatggggtgggga

SEQ ID NO: 421539 - DNA, 201 bp, Homo sapiens
ctaagctttgagacagaatgaattaagcactggatttgaaagtgaccaggaccctctctaggattttctccttcaggagctcagctatggacaagttaccycttacttgtcactggcatgtatcaggggtacttttacaccatttgaaggctcaataggacaggtattaaagacttacaattatcattatagttatttacc

SEQ ID NO: 421540 - DNA, 201 bp, Homo sapiens
gtagaaattgaaggactactttaaaatgaaacatctaatagatcaaaaaacaaaggcaatttgctgaaagttccaaaatacatcaaaaatagtgaaaacayttgttgtatatataggaaaactactgactatgggtattttttaatggtaattcctaattcttcaaggatatgacaaacctaatttggaacatcaatgtgt

SEQ ID NO: 421541 - DNA, 201 bp, Homo sapiens
ttgagtgatgaaaagggctttcagtgcagaggggagttggagagggagtgggaagggcaggttatcttctccaaagtcagggtgtctcttccatgaagtcrggctttctccctctctactgactgagtctggggtctttataggcacagggaggggagtgcgtgctgattggtttgtgagtatgcaaaaaatgttaacttg

SEQ ID NO: 421542 - DNA, 201 bp, Homo sapiens
gcagtttttgtctttataatctctaactctccaacgtccccttgaagagcttttaactttgtcctgaaagctacatctccccaacctgtagattgctttcmgaaaataaggtccgtgccctctctctctctttttgtctctgcagatttcatggccttttttttaacacttttagagaatgaaaggcaatcaaacaagaaa

SEQ ID NO: 421543 - DNA, 201 bp, Homo sapiens
gggcagctatgcctcttagattttctatacattatttggaaatacattagaaaatgttcaatgatactggtgcaggatttttctcgacctctttgccgtaytcccaacaggggctctccgtctacttgacccactgcgctcagccccttgtgggaaggagcaggtgaacgagtgagtgggggatctggccagctgctctag

SEQ ID NO: 421544 - DNA, 201 bp, Homo sapiens
accatgtctactatgttttatcaaattgaatacattagtttttaatgggcatcattactctacatactattgcccacccacctgcaaatgacttgtaggaytacaattatttcaagatgtatattgagttcagagatgtagtgatttggaaaaaaaatgtgcatattacagttaatgaaatatggcagtagcagaatgggc

SEQ ID NO: 421545 - DNA, 201 bp, Homo sapiens
ccagtatatataaatgtacttcttgcacttgaactgtgccagaaatacttattgctatataggaagtgctcaagatccttgaattaagcaattgaaaaaawttgtaccaccctgtttgttcaaaagcagtgaaatttaacagactcacgagaccaagggctgtggcacagagagacatttaagtcatagatgatcttcaag

SEQ ID NO: 421546 - DNA, 201 bp, Homo sapiens
agtctggttcaccaaataaaagaatacaacaacatttaaagaaaaaatatctggaaaaatatgactaaggttatgaaatttatggtatattcatggtagasagtggtaatattttattcgcaaagatcatgctataaattcagatattgtcaaagcaaataaggaaattgaggagaaatgtctttgttaagaaattcaggt

SEQ ID NO: 421547 - DNA, 201 bp, Homo sapiens
ttaaatgttttactatttgtcataatttctttaggggtgattttctgaaggagaatggttatttgaaataatgtgtctatatgattaaattacataaaaaygtattattggaaattaagtgtttcttgtttgtttttgatgaacacagtcgaaatttgtgagggaaagtaaaaacactaagaaaaaaatgtaatagaaatt

SEQ ID NO: 421548 - DNA, 201 bp, Homo sapiens
tggtagacagtggtaatattttattcgcaaagatcatgctataaattcagatattgtcaaagcaaataaggaaattgaggagaaatgtctttgttaagaarttcaggtttattgttttgtgtgcaaaatttctcccttccacctgcaacttggctatgtaagttgtgcttaatgatgttggaagtagaaaaagctaccagt

SEQ ID NO: 421549 - DNA, 201 bp, Homo sapiens
gaatgtgtaggttttttacataggtatacacgtaccatggtggtttgctgcatctataaacccattatctaggttttaagccctgcatgcattaggtattkgtactaatgctctccctcccctggcccctcaccccccgacaggcccgcagtgtgtgttgtttccctccctgtgtccatgcgttttcattgttcaactcca

SEQ ID NO: 421550 - DNA, 201 bp, Homo sapiens
ggatacatgtacagaatgtgtaggttttttacataggtatacacgtaccatggtggtttgctgcatctataaacccattatctaggttttaagccctgcaygcattaggtattggtactaatgctctccctcccctggcccctcaccccccgacaggcccgcagtgtgtgttgtttccctccctgtgtccatgcgttttca

SEQ ID NO: 421551 - DNA, 201 bp, Homo sapiens
attggggattaatttggcattgggtgcctgcataaagtgaggatggtgtagtaattgggtatctccagttataaacacaagaagcatgatagagctgggamtgtgattgcaggaaagcaatagtcactccaaaaggagatcctcatgatatgaatacggaagaaacaatatttcctgctaatgtagtagccactgtgttct

SEQ ID NO: 421552 - DNA, 201 bp, Homo sapiens
ttttctcagacaggattagaattggggattaatttggcattgggtgcctgcataaagtgaggatggtgtagtaattgggtatctccagttataaacacaaraagcatgatagagctgggaatgtgattgcaggaaagcaatagtcactccaaaaggagatcctcatgatatgaatacggaagaaacaatatttcctgctaa

SEQ ID NO: 421553 - DNA, 201 bp, Homo sapiens
ttgttagcaattataaagtcattaagaaagtgttcagaatgtattgaataagtgaattttaagaaagtatttgaaaccaaaaagagtaggcctgcaggggraaaaaaaaaaggagattgctacttgccacagataaaatggagaatacatcaataagtatgttgtagaatgccataaaaattatgacatcttcagggcaag

SEQ ID NO: 421554 - DNA, 201 bp, Homo sapiens
tttatcatgaatagttttcagtaaatcacttcatgattttcagaaaacacagagtaccattgtctaaattattttatatgacttgaaggtttttgttttgktttaatataaacatttagaaggttttctctcagaaaaaaaaaatcaatatattcagggatatttaggcatcccaaatgctacatatcaaaatccaagtaa

SEQ ID NO: 421555 - DNA, 201 bp, Homo sapiens
cctccagaattgtgaaagggtacacttctgttgttttaacccacaaaatttgtagtaattttttatagcatccccaggatactaatgtagagtgcaaagtrggggtatggcacgtgactataaggtgaaaagtggttgggtggggaggattctagctgaatcctctaaggctaaatcctctaaggttatttaaaagtaaat

SEQ ID NO: 421556 - DNA, 201 bp, Homo sapiens
ggatatattccccgaacagccttaagaattcaatcctttattactatatctcactatacttgcaatgttgtaaatagagaaaaaataaaatggacaagatyaaaactgtaaattattgcaactacctccccccaaaataagtgcttaaacatgataagaatatttcctttgtgttttagaaacaaatgttgcactataatt

SEQ ID NO: 421557 - DNA, 201 bp, Homo sapiens
tacatattgctgcaaattatctcaaatgtagtggtttatgagaacaaacatttattatcatccaatttctgtggtcagaaatttgaagctggcttagctargcaactcaatgtctttcatttggttgcaattaggatgtcagctggggctgctgtcctcagaaggcgtgactagggctggcaccaaagagtctcactcaca

SEQ ID NO: 421558 - DNA, 201 bp, Homo sapiens; identical to SEQ ID NO: 319346

SEQ ID NO: 421559 - DNA, 201 bp, Homo sapiens; identical to SEQ ID NO: 319053

SEQ ID NO: 421560 - DNA, 201 bp, Homo sapiens; identical to SEQ ID NO: 319382

SEQ ID NO: 421561 - DNA, 201 bp, Homo sapiens; identical to SEQ ID NO: 319349

SEQ ID NO: 421562 - DNA, 201 bp, Homo sapiens; identical to SEQ ID NO: 319142

SEQ ID NO: 421563 - DNA, 201 bp, Homo sapiens; identical to SEQ ID NO: 319422

SEQ ID NO: 421564 - DNA, 201 bp, Homo sapiens
aatgaaatgttgagaagcccagccatcaattctccatagtaagctaaagggtcagcaaaacaaataaacttggctgcctacagcctgctgagtaactcctyatttttatttgcctgccacaccatgaaagactctgcagttctaaagaagctttgtagagaaaagcaaagatatcttctgtgagggtttcttagtttactg

SEQ ID NO: 421565 - DNA, 201 bp, Homo sapiens
gagttactattattatgtaagacaggctttaagtgaataaaaatttaaaaagaaaataaatgatatgacctaataatagaatatacaatccaacaagcagwttttattatcctaaatatatactcatccaacattggtgcaaacacctttataaaacaagtatttcttggcctatgaaaagatttagacagtcatacaata

SEQ ID NO: 421566 - DNA, 201 bp, Homo sapiens
gtgcccccaaaattaatatgttaaaattcttataaccaaaatgattgtattagcagacagaaccttttaggaggtgtttatgtcatgaaggcagagtcctstttaatggaattaattcttttgaaaaatatgctcacaataactcattcatctattttccccattaagacatggtgacgggttgccatcttggaggaatgc

SEQ ID NO: 421567 - DNA, 201 bp, Homo sapiens
tagaaagcatagatattgagaatgcatactctactattggtattttttttgtcaaaatgtataatttattttgaaatgttaaatagtgcttatgggctgartcatggctcattactcagaattcatttgtttgtgttctaaccccaagtacctcagaataggactacatttggagacagggccattatggaaaaaactaat

SEQ ID NO: 421568 - DNA, 201 bp, Homo sapiens
ttatgtcatgaaggcagagtcctgtttaatggaattaattcttttgaaaaatatgctcacaataactcattcatctattttccccattaagacatggtgaygggttgccatcttggaggaatgcccaataccagcatcttgatggtgaatctttcagcctcaagaactgtgacaaataaatgtttgttgtctgtaagctag

SEQ ID NO: 421569 - DNA, 201 bp, Homo sapiens
gctggtgaggctgtagagaaataggaatgcttttacactgttggtgggaatgtaaattagagctaggtctttgagattatgttgattaattgatatccaayacaaaccaagttcaaagtagatgagtagttagagagagggtaaaaaatggagagttaaaaattaataaataataaagcagtctagatggtatacacacta

SEQ ID NO: 421570 - DNA, 201 bp, Homo sapiens
cagctggaaagtaatttctatattcccaaaagggaaatctgggtgacacataatgcctgcactcaaggacattgaaaatattgaacaatattgccactctscaggcaatatttgctcagaaactgtgttcaaatatctttttaagaaagatttacctcatttcagattaacagattattaatagaataaaaacaaatatct

SEQ ID NO: 421571 - DNA, 201 bp, Homo sapiens
ttacatatttatctctaccagagaaatttatacttttacattcattcattttgctacctagtctccctcatttcaacttgaaagactcctttttgcttttytgtaggacaggtgtggtaataattaccttcttcaaccttttttaaacccgagaaaatattcaattttccattatttctgaatgacaggtttgccaaatga

SEQ ID NO: 421572 - DNA, 201 bp, Homo sapiens
acacttaaatcattgtgacattgattgacattgatatgtaccaagttagagaaagttagaaagaaagatagcattttaacaagttgtctaagaaatgggcttttttgtttcttatgctgacagttgtattctagctctgagtcctgtgagaatgtgctggtgtggccagtgaaatacagtctttatatcaatttaataatg

SEQ ID NO: 421573 - DNA, 201 bp, Homo sapiens
ttatactagaaactctttatatacaattaaattatctcttgttctggagacagccacatttacaataagcaaataacaataaatttattattcacacatamaaacacaaaatcattcatccttttctttattctcttgctttccaaaaactctattgtcaacacttaaatcattgtgacattgattgacattgatatgtac

SEQ ID NO: 421574 - DNA, 201 bp, Homo sapiens
ggagtgacctgattttccaggtgccatctgttacagcttcccttggctaggaaagggaattccctgatcccttgtgcttcctgggtgaggagatgcctggmcttgctttggctcacactccatgggttggttgcactcactgtcctgcacccactgtctgacaagccccagtgagatgaacccagtacctcagttggaaat

SEQ ID NO: 421575 - DNA, 201 bp, Homo sapiens
cgggtgtcaccatttttcattcctaacaataatgcacaagagctcctatttatatatattatcttcaatactttttgttttctgggctgtgtgtgtgtgtgggggggggggtgtgtgtgtgtgtgaatatatgtattcaaaaatattttgaggtggctaatggttatgatgtgatagttcattgtaatttaggtttacatt

SEQ ID NO: 421576 - DNA, 201 bp, Homo sapiens
ctagttgtatattttgtgttgtgtcccaattaatataaatgtaatgttacttttatgcttttctcttttaaattgcatatcagaattaaaagaaacttgtkaagcaacattaaaaacttatgggattttatatttaattacatatttatctctaccagagaaatttatacttttacattcattcattttgctacctagtct

SEQ ID NO: 421577 - DNA, 201 bp, Homo sapiens
agacacagaaaatgtacaaatttaaagttttgggagttgtttctgggatgtaatattaattaggaaatgacaaacactggataactgctgctagaacatcmattaaagaaaacatatacccacatagacatatacactaacttactcacaatgtctctctctctctctatatatatatgtatgtattttaaagtaagtata

SEQ ID NO: 421578 - DNA, 201 bp, Homo sapiens
gagcattttaatttgatatcgatataattattttcataagttcagttagaatcatttctgtgtacacggaagcaatggacatgttaattcagttgccaagrtttgacaaaaaataccatttgcgacaacatggatgaacctagaggttattatgctaagtgaattaagcaagttcaagaagaacaaatattttatgattcc

SEQ ID NO: 421579 - DNA, 201 bp, Homo sapiens
atttattttgaatttgttgtcagatatttaagcatcttcgaatctttttgtgcattattgaaacttgattggtttcttttggagatgtcatatttccctgttttttttttttttttttaacaatacttgctgtttacattgatgcctgcatatttaagaagatggccacttgattcagctttttaatgtgttatgcagtgg

SEQ ID NO: 421580 - DNA, 201 bp, Homo sapiens
taatttccgggttggggaaggcttaagaaataactagaacttagttacttacctgatagttgtttctgggtcagagaaaggctctgtatgatcacctgggwtatttgtaaaatctgaccaaagattctagccttcccctggattgtgcctcctgtactactgtagtgctggctagcccccccatcaatgtgaattccctgt

SEQ ID NO: 421581 - DNA, 201 bp, Homo sapiens
ttttaattgctgattttataaaattttagttgatggtacacttaataaagaagatttaaatgtctattctttaaaaatgatgaatacttataattcttatmtctataatcaaaagtctaattaatgtagaaaaataaagagatgcttgctctgaaagtaagatcagtatacggtttttcagtctcaatcttcgagaactgc

SEQ ID NO: 421582 - DNA, 201 bp, Homo sapiens
ttaaatgatgacatggaatgagttgccgactccctagtgaccctacaaagccagcttaattgtctagctgtggtagtccttcaaaatcagagagccctagrgttattaacaactgaaagaggaggaacctgcctcttcttaggagaagaatgttgctatttcgttaaccagtcaggaatcattactgaaaaggttaaagaa

SEQ ID NO: 421583 - DNA, 201 bp, Homo sapiens
aatatttgagaaatgtaaatcaaaactacaatgagctatgacatcataaccattagccacctcaaaacatttttgaatacatatattcacacacacgcagmcacacacacacacacacacacacagagcccagaaaacaaaaagtattgaagataatatatataaataggaactcctgtgcattgttggtaggaatgaaaa

SEQ ID NO: 421584 - DNA, 201 bp, Homo sapiens
ttaatttttgtataaggtgtgaggaaggtgtccagtttcagttttctgcatgtggttacccagttttttgatcaccatttattaaatagggaattctttcyccattgcttgtttttgtcagatttgtctaagattagatggttgcagatgtgtggtgttatttttgaggtgtcttttctgttccatcggtctatatacctg

SEQ ID NO: 421585 - DNA, 201 bp, Homo sapiens
atttaggtttacatttctctaataattagtgatgttaagcatcttttcatatgctttttggccatatgtctatattttctgaataaatgtgtattcaagtctttgaattattttaattgaatttttgctattaaattatagggaattgtcatatattttgaatataaaacacttagctgataaattatttaccaatatttt

SEQ ID NO: 421586 - DNA, 201 bp, Homo sapiens
ttttaatcaagaaaacaatttcttgattttgttgatcttttcaaaaaaagaaagcaataactcagttttgctgatttttctctattttctattgtatttakttctgctgtaatctttattacttttttctttctgataattttggtcagttctttgatatgtaaagttagattgctttagatatttcttctttttaacata

SEQ ID NO: 421587 - DNA, 201 bp, Homo sapiens
taaatgatgacatggaatgagttgccgactccctagtgaccctacaaagccagcttaattgtctagctgtggtagtccttcaaaatcagagagccctaggsttattaacaactgaaagaggaggaacctgcctcttcttaggagaagaatgttgctatttcgttaaccagtcaggaatcattactgaaaaggttaaagaaa

SEQ ID NO: 421588 - DNA, 201 bp, Homo sapiens
tattacttttttctttctgataattttggtcagttctttgatatgtaaagttagattgctttagatatttcttctttttaacataggcatttattactatmaactattttcatagtattgtttttgctacatttgtaagttcaggttccttttttcacttctttttgtgtatcttctacagcaagcttgtccaacctgcag

SEQ ID NO: 421589 - DNA, 201 bp, Homo sapiens
gatgagtacagtatttttggattaaaggtttttcaaatttttgattacttcagcatttggctatattatcccactctcttcttgcctgcaagtttgctttyttttctttctttctttttttttgttttcactgaaaattcactgaaaaccatttggtaacactattgaatgtgttatgttttgttgttgttgttttgtttt

SEQ ID NO: 421590 - DNA, 201 bp, Homo sapiens
aagtaatcgaactttgtctccttgccatccatgtactcaggatgctcatataatgtatttactttgaattgaaggagttatgttttaacttgattgatttwtctctgtatataagtatgagaaagaaacagtgactggaaaagaattatcacattgcacaaggatggctctgaaatggactacagttctgctgatacaact

SEQ ID NO: 421591 - DNA, 201 bp, Homo sapiens
aagcatcttcgaatctttttgtgcattattgaaacttgattggtttcttttggagatgtcatatttccctgttttttttttttttttttaacaatacttgstgtttacattgatgcctgcatatttaagaagatggccacttgattcagctttttaatgtgttatgcagtggtgttaaaatattactgcttaataccagag

SEQ ID NO: 421592 - DNA, 201 bp, Homo sapiens
tggatgacaccaaatataaacataaaagaaacatcaaacatccttgagtaaatatgaagtaatcgaactttgtctccttgccatccatgtactcaggatgytcatataatgtatttactttgaattgaaggagttatgttttaacttgattgatttttctctgtatataagtatgagaaagaaacagtgactggaaaagaa

SEQ ID NO: 421593 - DNA, 201 bp, Homo sapiens
gaattgtagctcccataatttccacatgttgtgggaaggatccagcaggaggtaatttaatcataggggtgggtctttcccatgttgtttttgtgacagtraataagtctcatgagatataattgttctataaaggagagtttccctacacaagctattttacctgctgctgtgtaagatgtgactttgctcctcattcac

SEQ ID NO: 421594 - DNA, 201 bp, Homo sapiens
acatagtctttaaaatttgcacatggcgtggtggcaaaattgatgttttaaaggtggcagagcaggaatgccctgtccctgttccccatgcagaaagagamttaacaacatcatatagaccaatttgccatggtgataatctcagaaaccagtgaaaaggttgcagcacctcagaaaagagcaaagccaaaaagaatttta

SEQ ID NO: 421595 - DNA, 201 bp, Homo sapiens
aatctcagaaaccagtgaaaaggttgcagcacctcagaaaagagcaaagccaaaaagaattttattttaatatctaggaaatgttgtaccatatactctcratagatccttctctagaccgtacagcattacacaatcaggaaaaaaatctttagtcataacttttcccataggagtgaaagaagcgagaaatgtggtcta

SEQ ID NO: 421596 - DNA, 201 bp, Homo sapiens
tggctagccatatgcagaagactgaaactagatatcttctttttaccatatgcaaaaaccaactgaagatgggttaaagatgtaactgtttaactaatatkgtttggctgtgtcctcacccaaatctcatcttgaattgtagctcccataatttccacatgttgtgggaaggatccagcaggaggtaatttaatcataggg

SEQ ID NO: 421597 - DNA, 201 bp, Homo sapiens
caaggcaatctgtgaaacaagttaagtagtaggcatttagaagataaatattttctaagactgagaaatgtaagcaatgttgcaaatattcagaaaaggawattattgtgatttagacaaaatattttcaaatgaaacaaagtaactgtaattgtacttaaaacatatctgtttggataaaaataaaaggaatttctacag

SEQ ID NO: 421598 - DNA, 201 bp, Homo sapiens
tgtctataaaataaaaaaaaaagtgaatgccttactttatccatcaaccaagttctatgataatggattttctaaataaagtgagaaatagctagatatawaatgataattcctatctctgttacaaggccttctttttccaagctaagggcatttcctccattgctccccagataaactttccccttccttggggcctct

SEQ ID NO: 421599 - DNA, 201 bp, Homo sapiens
atatagatgtccttcaaggattgatgcagtcctttgatctaacatggacagataccatgttgcttcttgatcagaccttaagtcctactgaaaaagaagcrgctttagcagtagcctggcaatttggggatctgtggtaccttagccatgtaaatgattgaatgaccctggaggagagggaaaaattctccacagggcaac

SEQ ID NO: 421600 - DNA, 201 bp, Homo sapiens
ccttattgtcccttttacagtaggagcaggaatactaggcaggcttgggactggaattggaggcataacctcctccacccaattctattataaattatcaygagaattaaatgatgacatggaatgagttgccgactccctagtgaccctacaaagccagcttaattgtctagctgtggtagtccttcaaaatcagagagc

SEQ ID NO: 421601 - DNA, 201 bp, Homo sapiens
cctgcctcttcttaggagaagaatgttgctatttcgttaaccagtcaggaatcattactgaaaaggttaaagaaataagagaacaaatagaaagtagacaraaaggagctttaacactcagggccctggaatatgtttaacaaatgtgtaccttggctcctcccctttctaagccctgtgacagtcatcctactattactc

SEQ ID NO: 421602 - DNA, 201 bp, Homo sapiens
tgtagcaattgttaatgggagttgattcttgatttggctctccgcttgtctattgttagggtaaaggtatccttgtgatttttgcacattgattttgtatmctgagactttgctgaatttgcttatcagtttaaggagtttgggggctgagatgacggggttttctaaatgaaaaattatgtcacctacaaacagggacaa

SEQ ID NO: 421603 - DNA, 201 bp, Homo sapiens
gctttcgggccttgcatttttaacctccttgtcaaatttgtctcctccaggatcaaggccatcaagctgcaaatggacttacaaatggaacctcaaatgarctcaactcacggcttctactgagaacccctggatccacctgctggtccctcactagcctaaaaagttcccctctggaggacaccacaactgcagggcccc

SEQ ID NO: 421604 - DNA, 201 bp, Homo sapiens
gtttctttttgtgaccagcagaccttatctatgctcccagatccaattccttgttaacacaatttgtaaaatcctgtgagattctgtctcctttgccatgyggctgcaaggttataaagtagataaaacttaagttagaattccggttttccttaagacctaaaacatgttaattgcctttgtttctcactctggtaacat

SEQ ID NO: 421605 - DNA, 201 bp, Homo sapiens
gggagttgattcttgatttggctctccgcttgtctattgttagggtaaaggtatccttgtgatttttgcacattgattttgtatcctgagactttgctgawtttgcttatcagtttaaggagtttgggggctgagatgacggggttttctaaatgaaaaattatgtcacctacaaacagggacaatttgacttcctatctt

SEQ ID NO: 421606 - DNA, 201 bp, Homo sapiens
aattgcctttgtttctcactctggtaacatcttcccaccacatgtatttcccaccttaaagagtttaaaaggtgacaaaaaaatcgaacactggctacccsctagggaccacttccacgctgtggaagctttgtactgtcactctgctcaataaagcctagggctttttttttttctcttagtcggatacgcgtctctctc

SEQ ID NO: 421607 - DNA, 201 bp, Homo sapiens
ctgcacatgtatcctggaacttgtgcgtaaaaagtaaaggaaaaaaaagaagaaagaaaagaaagaaagaaagaaagaaagaaagaaagaaagaaagaaargaaagaaagaaagaaaacagaaagaaagaaaagaaagcgaaagaaagagacttagctttatattatcaagtgctcaaaatatattttatattattgagca

SEQ ID NO: 421608 - DNA, 201 bp, Homo sapiens
tctaaatcctcagtgattggtttgtagatggttgccttccttcagtggttttacgtggactttcttctctgtgtttgtccttatgttcatataagacatcytctatatgtcctcattttatattattgttttccttaatggccctgtctccaaatgtagacctattctgaggaactgggtgttagaacacaaacaaatgaa

SEQ ID NO: 421609 - DNA, 201 bp, Homo sapiens
taaagaagataatgaaaaacatcttattagaaaaattaagatcttatgacaaactttcttacactcaactagaaatcctttccactgtatttaattgtaastgcataaattcctattctataaaattattttagaaagcttttatgtaatttgtgctatgttgcttaatttgatgatcttttccatgaagtcagctatatt

SEQ ID NO: 421610 - DNA, 201 bp, Homo sapiens
gatgatcttttccatgaagtcagctatattccactttgactattgagataagtaggctgtccaaagttcagactcagtcaccatcaattgattgagaaatkgaagcatgaaacacacttaggattaatttggcttatgagcttgctgaatttatcttaagcccagcgtaaattaaaggaagagttggtcatgaaaactgga

SEQ ID NO: 421611 - DNA, 201 bp, Homo sapiens
aggctttggacttacatacaaaaggaagaaatgggaaatatattcccctttaatttcttatcaatggtgttttcaaattcagcttatatctgtttataatraaaattatctgatatttttatgtgttatatcatttcagctgttcttgctcccttactttcccacaatataaactgatgcaaaggactaaactgcaaaaac

SEQ ID NO: 421612 - DNA, 201 bp, Homo sapiens
tctggtgtgcatagttcagagttatgtccttttgttattcctgtgattcttgttttgaatgcctaaattctaacttaaaaattaaatatttctctctaccmcatgtcattgagcattaatactattttgatttatttaatcatgattcctctgtgtcagctcacagaaatgatgcacatttaaaattctaatgaaatcagt

SEQ ID NO: 421613 - DNA, 201 bp, Homo sapiens
tgttgtgagtgcccccaacacacccacacacagactccaccagagcactacctagtggagctgggagaagtgggccaccatcctacaatctgcagtatgayacatccagaaacagtttagaccatccaactggaaaagccacagacactcaatgccagcccatgaaagcagccaacgggagggctgtaccctgcaaagcca

SEQ ID NO: 421614 - DNA, 201 bp, Homo sapiens
taaatattataattagtctttcaaaagtcatagacaaagaaagaatcttggaagcagaaaaagaaaaataaatcatgacataaatgggaactcacataatrttatcaacaagataccagcagatatcctttcaaaccaaagctaagcaacataatatattcaaagtgttgaagaaaaacaagaaaaaaacccaaccacata

SEQ ID NO: 421615 - DNA, 201 bp, Homo sapiens
atgacaaacactggataactgctgctagaacatccattaaagaaaacatatacccacatagacatatacactaacttactcacaatgtctctctctctctmtatatatatatgtatgtattttaaagtaagtatagaaatataactaagatttattaccattattttaataataatcaaaacacattagaacaatctgaaa

SEQ ID NO: 421616 - DNA, 201 bp, Homo sapiens
ttagccaggtgtggtggcatgtacctgtagtcccagctactcaggaggctgacgtgagagaatcgcttgaacttcggaagtgagggtttcagtgaccaagrtgatgctgctgctgcgctccagcctggggacagagcagagacccagtctaaaagaaaaaaaaaataacaaatcagaaatgaaagagaagacattacaatt

SEQ ID NO: 421617 - DNA, 201 bp, Homo sapiens
caatctcatgttaagcattattaccatcaaaaacaaagagtgacaaagaaagttttgtaggtgatggatatgttaattaccttcactgttataatgatagyatcatgggtgcttgtacatgtccaaactcatcaatttatatatatataaataatataaatatatatgtataaaatacttacaggtgttttttgtatatca

SEQ ID NO: 421618 - DNA, 201 bp, Homo sapiens
tcattttgttgtctgttcttttttttctgacctctcttggtacatattatcaaatgttgggtgcttccaagaagtagactctaagctgaatattttttgakggagataattagggagatttcttgaaaataacatctgtgaaaaagtaggaagcaagattggacagtggaacaaaatagtacataattcagtgcaatagtt

SEQ ID NO: 421619 - DNA, 201 bp, Homo sapiens
cacacagagcccagaaaacaaaaagtattgaagataatatatataaataggaactcctgtgcattgttggtaggaatgaaaaatgatgacagccctatagytaagagtatgaagtttcctcaaaaaaattaaaataaaattaccatatgacccaacaatgttacttctaggcatttatccaaaataattaaaagcaagatc

SEQ ID NO: 421620 - DNA, 201 bp, Homo sapiens
agatggagctgcagacaaaaagccagggacatttgtgcataggtcatttctggtggagcccaaccataagtgcccacataccacgcaaatctacctctaawaggctctggccttagctaaccaatggggagagaggagaacctactttcaaatggaactgtgacacatattctgcaggaatactggcccaccagacccctc

SEQ ID NO: 421621 - DNA, 201 bp, Homo sapiens
cactaagccagtatataaagactgggagatgtggatgtttctttaaatctcagaatttaaacaaagaaatgcaaaacatgcagacactgagaagcatgacytatttaagggaacaaaataaagctttcattccaccctcaataaacaaagatttattaatcacctgtcaaaatatattaaatacctatcaaaaatttcaaa

SEQ ID NO: 421622 - DNA, 201 bp, Homo sapiens
aaacttgcataagtaattagaaaccaactgccaagaaaatggggaaaatgtctccagggcatgtcagaggtcttcctggctgaagccctttccattacagrctgggaggcctagaaggaaaaaatggttttgtgggctaggcccagcatcttgctgctttgtgcagtctcagaactcggtcccctttgtctcagctgtggc

SEQ ID NO: 421623 - DNA, 201 bp, Homo sapiens
ttaattatttaagtaatgtaattatttataatactcaactgattttaactttgttactactataattccagaatttcacactttagatagtgctatatatraactatccaaaagatattttactttctatttagctaaaatacatcaaactcaataaaggcaagtacactaattaggaatgtgaaatcttgtaattttaat

SEQ ID NO: 421624 - DNA, 201 bp, Homo sapiens
ctggcggcagaaacttgcataagtaattagaaaccaactgccaagaaaatggggaaaatgtctccagggcatgtcagaggtcttcctggctgaagcccttyccattacaggctgggaggcctagaaggaaaaaatggttttgtgggctaggcccagcatcttgctgctttgtgcagtctcagaactcggtcccctttgtct

SEQ ID NO: 421625 - DNA, 201 bp, Homo sapiens
tctaatattgtgtctgcattattttccaagtttcttttagttttttgattatggtttatgtgattcctgaacttttcaaagagatttattttgaatttgtygtcagatatttaagcatcttcgaatctttttgtgcattattgaaacttgattggtttcttttggagatgtcatatttccctgtttttttttttttttttt

SEQ ID NO: 421626 - DNA, 201 bp, Homo sapiens
tgggcctgacccttgggggacggcctaagggaagatgagtcccaggactaaccaggattgcggacatcccggtgtgtaaaattccagatgggcaccacacyttccaaaccagacactcccttaaaatgtatcctgaataactgggacaaattcgaccctgaaaccttaaaaaagaagtggctgattgtcttctgtgccact

SEQ ID NO: 421627 - DNA, 201 bp, Homo sapiens
agtgacccatttgttgtcccctacttgaagaagaaatcaactttgagctctgggccttagaaggacaatttggaagggcaaagaatatccatccagtccamatcaagctaaaagacaccaccacttttccttatcaaaggaaatatcacttaaggcctgaagttctcaaaggattacaggatattgttagaaatttaaaag

SEQ ID NO: 421628 - DNA, 201 bp, Homo sapiens
tagacctttctatatgctcaaatatattatccaaattttttccttttctctacttctctctcaggaaggccaatgagtcagagatttggtctttttagatmatcgtattttctcagatgttctgttcatttttcttaattttttaatttatttttctgtgactggttgatttgaagaaccagtcttccagacggagcaggt

SEQ ID NO: 421629 - DNA, 201 bp, Homo sapiens
ctacagcctgctgagtaactccttatttttatttgcctgccacaccatgaaagactctgcagttctaaagaagctttgtagagaaaagcaaagatatcttytgtgagggtttcttagtttactgaaagtaggagaaccttcacattaaaaggaatcagcatgatcaagcagaaggcttggtggaggtgctaacatggttat

SEQ ID NO: 421630 - DNA, 201 bp, Homo sapiens
ttttgtaggtgatggatatgttaattaccttcactgttataatgatagtatcatgggtgcttgtacatgtccaaactcatcaatttatatatatataaatratataaatatatatgtataaaatacttacaggtgttttttgtatatcaattgtacttcagtaaagctattaaaattatatgcatctatttttgaaattta

SEQ ID NO: 421631 - DNA, 201 bp, Homo sapiens
tgtgagggtttcttagtttactgaaagtaggagaaccttcacattaaaaggaatcagcatgatcaagcagaaggcttggtggaggtgctaacatggttatstcatatccatcaagttggagtttttctagaataacttttaaattgagtgactaaaattcatgggccagacaagtactttcccaaactttccagagtcaaa

SEQ ID NO: 421632 - DNA, 201 bp, Homo sapiens
acatggttatctcatatccatcaagttggagtttttctagaataacttttaaattgagtgactaaaattcatgggccagacaagtactttcccaaactttscagagtcaaagaaacacagattcagcaggaaaaaaaaaacaaaaccaaacacacacacacacacacacagaagacattcacagttttcatgaccaactct

SEQ ID NO: 421633 - DNA, 201 bp, Homo sapiens
gacccatttgttgtcccctacttgaagaagaaatcaactttgagctctgggccttagaaggacaatttggaagggcaaagaatatccatccagtccacatyaagctaaaagacaccaccacttttccttatcaaaggaaatatcacttaaggcctgaagttctcaaaggattacaggatattgttagaaatttaaaagctc

SEQ ID NO: 421634 - DNA, 201 bp, Homo sapiens
ctggatgaataatattgaagatatatgcttaaaatattcctaacatcagaatttgtgcatgtgttttcttcccccaagaaagctataaacagcaaaacttytgctgtaagcttccctgtgtcctcactcccactctcccttccccctcccctgaaacaaaaaggaatggtaaaagccagtttctttttgtgaccagcagac

SEQ ID NO: 421635 - DNA, 201 bp, Homo sapiens
aaaggtgacaaaaaaatcgaacactggctaccccctagggaccacttccacgctgtggaagctttgtactgtcactctgctcaataaagcctagggctttytttttttctcttagtcggatacgcgtctctctctcacagggggctgccgccacaccaaatttttggcatggctaaggcaagaactttcggtgttacacaa

SEQ ID NO: 421636 - DNA, 201 bp, Homo sapiens
acagtttagaggactcagaagaaaacagaaagatgtgtgaaagtttgaaaccttctagagacttgttgaatgctttgaacaaaatgctgatagtgatatcracaataaagtcgaggcagaggtggtctcagatggagataaggaacttgttggtaactggagaaaaggtgactctgctctgttttagtgaagactggtggc

SEQ ID NO: 421637 - DNA, 201 bp, Homo sapiens
gtatttacaaagatgtggtttggaattggaacttatgttgaaaagggaagcagagcataaaagtttggaaaattcatagcctgacgatatggtataaaggaaaaaaaaaacattttctgaggagaaattcaagctggcggcagaaacttgcataagtaattagaaaccaactgccaagaaaatggggaaaatgtctccagg

SEQ ID NO: 421638 - DNA, 201 bp, Homo sapiens
gtgaaaggaaaatgtgtgttgtgagtgcccccaacacacccacacacagactccaccagagcactacctagtggagctgggagaagtgggccaccatcctmcaatctgcagtatgatacatccagaaacagtttagaccatccaactggaaaagccacagacactcaatgccagcccatgaaagcagccaacgggagggct

SEQ ID NO: 421639 - DNA, 201 bp, Homo sapiens
aaaggaaaatgtgtgttgtgagtgcccccaacacacccacacacagactccaccagagcactacctagtggagctgggagaagtgggccaccatcctacartctgcagtatgatacatccagaaacagtttagaccatccaactggaaaagccacagacactcaatgccagcccatgaaagcagccaacgggagggctgta

SEQ ID NO: 421640 - DNA, 201 bp, Homo sapiens
aaggaaaatgtgtgttgtgagtgcccccaacacacccacacacagactccaccagagcactacctagtggagctgggagaagtgggccaccatcctacaawctgcagtatgatacatccagaaacagtttagaccatccaactggaaaagccacagacactcaatgccagcccatgaaagcagccaacgggagggctgtac

SEQ ID NO: 421641 - DNA, 201 bp, Homo sapiens
ggcaccgccgtaagagaggggcttactcctttgatggcaagtagggacagaaggctagagtacagcagcggttctctcagccctggcctagaggacatctrccaccccctttaagcttactaagcctcctgttgctaattcagagatttctccttgaaggacagttttatggccaggcccacataaattgagccttagcat

SEQ ID NO: 421642 - DNA, 201 bp, Homo sapiens
taaacaagaaacatattttctcaaaattcaggaggctagaagtgtgtaatcaagtgtaatcaaggtacgattaacagtgttgtttccttctaaatcctcartgattggtttgtagatggttgccttccttcagtggttttacgtggactttcttctctgtgtttgtccttatgttcatataagacatcttctatatgtcct

SEQ ID NO: 421643 - DNA, 201 bp, Homo sapiens
gtttttctagaataacttttaaattgagtgactaaaattcatgggccagacaagtactttcccaaactttccagagtcaaagaaacacagattcagcaggaaaaaaaaaacaaaaccaaacacacacacacacacacacagaagacattcacagttttcatgaccaactcttcctttaatttacccttggtttaaaataag

SEQ ID NO: 421644 - DNA, 201 bp, Homo sapiens
tttttctagaataacttttaaattgagtgactaaaattcatgggccagacaagtactttcccaaactttccagagtcaaagaaacacagattcagcaggaaaaaaaaaacaaaaccaaacacacacacacacacacacagaagacattcacagttttcatgaccaactcttcctttaatttacccttggtttaaaataagt

SEQ ID NO: 421645 - DNA, 201 bp, Homo sapiens
ttttctagaataacttttaaattgagtgactaaaattcatgggccagacaagtactttcccaaactttccagagtcaaagaaacacagattcagcaggaaaaaaaaaacaaaaccaaacacacacacacacacacacagaagacattcacagttttcatgaccaactcttcctttaatttacccttggtttaaaataagta

SEQ ID NO: 421646 - DNA, 201 bp, Homo sapiens
aataacttttaaattgagtgactaaaattcatgggccagacaagtactttcccaaactttccagagtcaaagaaacacagattcagcaggaaaaaaaaaacaaaaccaaacacacacacacacacacacagaagacattcacagttttcatgaccaactcttcctttaatttacccttggtttaaaataagtacagcaagc

SEQ ID NO: 421647 - DNA, 201 bp, Homo sapiens
ttttaaattgagtgactaaaattcatgggccagacaagtactttcccaaactttccagagtcaaagaaacacagattcagcaggaaaaaaaaaacaaaacmaaacacacacacacacacacacagaagacattcacagttttcatgaccaactcttcctttaatttacccttggtttaaaataagtacagcaagctcataa

SEQ ID NO: 421648 - DNA, 201 bp, Homo sapiens
aaattgagtgactaaaattcatgggccagacaagtactttcccaaactttccagagtcaaagaaacacagattcagcaggaaaaaaaaaacaaaaccaaacacacacacacacacacacagaagacattcacagttttcatgaccaactcttcctttaatttacccttggtttaaaataagtacagcaagctcataagcca

SEQ ID NO: 421649 - DNA, 201 bp, Homo sapiens
attgagtgactaaaattcatgggccagacaagtactttcccaaactttccagagtcaaagaaacacagattcagcaggaaaaaaaaaacaaaaccaaacacacacacacacacacacagaagacattcacagttttcatgaccaactcttcctttaatttacccttggtttaaaataagtacagcaagctcataagccaga

SEQ ID NO: 421650 - DNA, 201 bp, Homo sapiens
gcaagcaaatgccaacagaagatagttctagtggatcagccacataagaagtccttaagggcgtgctacacatagattcaaaagaattaccccttctactrcaaaagcacacttaaacacatagtccacaggcactataaagcaaccatgcaatcatgtctgtataacaaccagctaaccataccatgacaagatcaaaat

SEQ ID NO: 421651 - DNA, 201 bp, Homo sapiens
ttgagtgactaaaattcatgggccagacaagtactttcccaaactttccagagtcaaagaaacacagattcagcaggaaaaaaaaaacaaaaccaaacacacacacacacacacacagaagacattcacagttttcatgaccaactcttcctttaatttacccttggtttaaaataagtacagcaagctcataagccagat

SEQ ID NO: 421652 - DNA, 201 bp, Homo sapiens
agtgactaaaattcatgggccagacaagtactttcccaaactttccagagtcaaagaaacacagattcagcaggaaaaaaaaaacaaaaccaaacacacamacacacacacacagaagacattcacagttttcatgaccaactcttcctttaatttacccttggtttaaaataagtacagcaagctcataagccagattca

SEQ ID NO: 421653 - DNA, 201 bp, Homo sapiens
gttgagctgcccaagaccatgggagcccacctcttacatcagtgtgacctgtatttgagacaatggagtcaaagaagatccttttggcaatgactgacccmtggattttattgccttacctggatttcagacttgcgtggggcctgtaggccctttttttggccaatttctgccatttagaaggagtgtatttaaccaaag

SEQ ID NO: 421654 - DNA, 201 bp, Homo sapiens
taccttaactatacgggtgtcaccatttttcattcctaacaataatgcacaagagctcctatttatatatattatcttcaatactttttgttttctgggckgtgtgtgtgtgtgggggggggggtgtgtgtgtgtgtgaatatatgtattcaaaaatattttgaggtggctaatggttatgatgtgatagttcattgtaat

SEQ ID NO: 421655 - DNA, 201 bp, Homo sapiens
tgaattcaatagaactttaaatgtacatcatgtatgtgagctgacatagaggaatcatgattaagtaaatcaaaatagtattaatgttcaatgacatgtgktagagagaaatatttgatttttaagttagaatttaggcattcaaaacaggaatcacaggaataacaaaaggacataactctgaactatgcacaccagata

SEQ ID NO: 421656 - DNA, 201 bp, Homo sapiens
atagcagggggatagcttcgtgtttgaactccagttctttctcaactcagcttcttgactctggcctgttgcttaggctctccgagccttagttcccccayctgaagcatgggagcagtaatcacagcctgggttggaagatgacactgaattaaataagtgtatgaaacacctcacttaaggcagggcacagagtgaaca

SEQ ID NO: 421657 - DNA, 201 bp, Homo sapiens
gatggatagattgcaaaaatgttctccaattatgtaggttgcctgttcactctgatgatagtttcttttgctgtgcagaagctcttaaattagaccccatwtgtcaattttggcatttgttgcaattgtttttggtgttttagtcatgaagtctttgcccatgcctatgtcctgaaaggtattgcctgtattttcttctag

SEQ ID NO: 421658 - DNA, 201 bp, Homo sapiens
ggtgtatatgtgctacattttctttatttggtctatcactgatgggcatttgggttgattccaagcctttgctattgtgaacagtgctccagtaaacatawgtgtgcatgtgtctttataatagaatgatttataatcctttgagtatatacctagcaatggtattattgtatcaaatggtatttctagttctagatcctt

SEQ ID NO: 421659 - DNA, 201 bp, Homo sapiens
tattaactttttagcatttccttcccctctcctttctgtgattttttttaagtaacagagattgcattgattacatacttttatgtcttgcatttttgtcwggtgacttaacaacactttccaatgacaataatcaccctttataaatgttatgtttattgtctgtacaatatttcatcatatggatgtgtcacatttaac

SEQ ID NO: 421660 - DNA, 201 bp, Homo sapiens
ccatgctgaaaaatgtcaaagtgaaacatttatcacttcttttttattgacatgatattcaacctgatgttcacctccttacgttttgaatttttttctamttttggaaggattacttgctgattatagaaactataacttggaaaacactgaagacatatgaaggagaataaattgaaaatgatgactatgatcagattg

SEQ ID NO: 421661 - DNA, 201 bp, Homo sapiens
aattctatttctgcccctgtttcttgctcatacttcgctgagcctccttcactttttcagtgcctggagcaacttttgatggaaaagtgcttgtgttgaayttgggcccctctaggttgagccaaactccatcttgaagctatagttccttttcagtaactgacagcatctgtgaaggccctatgaagggaatggggttaa

SEQ ID NO: 421662 - DNA, 201 bp, Homo sapiens
caaaattagagaagatgtctggttctgtattaggaggttttaatttgttgtttaaatatctattgagcctctttcagtctgtttgtgcagtgatctaagcytgcataaggcatctgaattattttttcagcttccccctgttttattggcaagtgaccgtgtgtatggtaattgagcaattgtgtgcttacatggatttat

SEQ ID NO: 421663 - DNA, 201 bp, Homo sapiens
atttagtagtttcatattgctgagagcctaaacattaataggtaatttttttctattttttgataagaaaatattcagtttccatttattcagtttttatkgtctgcaaaattagagaagatgtctggttctgtattaggaggttttaatttgttgtttaaatatctattgagcctctttcagtctgtttgtgcagtgatc

SEQ ID NO: 421664 - DNA, 201 bp, Homo sapiens
attgcattatatatttcaaaatagctagaagacaggattttgagtgttctcaccacacaaaaaaggtaagtatattatgtgatagatatgccaattgctcrattttatttttacacaatgtattcttgtatcaacacatcatactgttcccactaaataggtacaattaatgtatgtaagtttctttttaagcagcagaga

SEQ ID NO: 421665 - DNA, 201 bp, Homo sapiens
tctctagagacaggaaaggaccagactatagctgtatttagactattggaataattggactgcatattgatagaatggcttattttaatcatcttaatgagggtaccaaatccaatagattacacagaaacgaaagggcctaaataccaagttagtgtctgaacagctaattctatggggatgtatacattatgtgaatga

SEQ ID NO: 421666 - DNA, 201 bp, Homo sapiens
tttggattggatgcttttatttaaatacttcccaaagaataattcttcagttttttgtcaaataccacttttaatgttgtaacttgactatcacttgaatrtcacttcgaatttaactcttaattttggtggcttgctatttagtagtttcatattgctgagagcctaaacattaataggtaatttttttctattttttga

SEQ ID NO: 421667 - DNA, 201 bp, Homo sapiens
acttttatagattgctccatgaggatgcagtggtagaaaaggctgaaccaagtttgcatgtggatagctatgctcagtcttagttcagggggacattctawaacccctcttcttgtctcccactcaacttagtatcgagtgggatttcacatcaaagttcttgtcctgaaggattcagcagttccagaagacatggcaaga

SEQ ID NO: 421668 - DNA, 201 bp, Homo sapiens
ctagaagggaataagtcaaatgtttctagtataaagaaaagacaaatatttcaggtgatggatatcctaattacctttacttgattatatgaatgcttcamattatctcatgtactctgaaaatatgtacatctaataagtatcaataaatataaataaacaaacagaagcaagtgttgaactaccagtttgttataactg

SEQ ID NO: 421669 - DNA, 201 bp, Homo sapiens
atattctcttatttagtatattaagtcaattgattaaaagcagaaagcctggctaattagactgccaagatcttaatgttaactgtcagattctaaagctrtataagcctgaaaacacctttatagattacttcttctgggtgccaaatggttctaaatgctgaaaaatgtcataattgtccccccttcttctgagaaagg

SEQ ID NO: 421670 - DNA, 201 bp, Homo sapiens
ccttcttctgagaaaggtaatagatactattggatatccacttccttacagactcattcacattttttcttgtcctggatagtatccccactatcagggcrttttcatttagggccagcaataatccgtattttggttcaagcagaactagttgtagattacaatatttcaagccaaggttcccattcaaactgttttctg

SEQ ID NO: 421671 - DNA, 201 bp, Homo sapiens
atccacttccttacagactcattcacattttttcttgtcctggatagtatccccactatcagggcattttcatttagggccagcaataatccgtattttgrttcaagcagaactagttgtagattacaatatttcaagccaaggttcccattcaaactgttttctgctgctttaatcgtaaaggaaccatttactcttaca

SEQ ID NO: 421672 - DNA, 201 bp, Homo sapiens
ggccagcaataatccgtattttggttcaagcagaactagttgtagattacaatatttcaagccaaggttcccattcaaactgttttctgctgctttaatcrtaaaggaaccatttactcttacaatgctggaaattaaggatttatttttcacttaccaccattttcactggtatttcagcagtcattgaagtacctttct

SEQ ID NO: 421673 - DNA, 201 bp, Homo sapiens
taatccgtattttggttcaagcagaactagttgtagattacaatatttcaagccaaggttcccattcaaactgttttctgctgctttaatcgtaaaggaaycatttactcttacaatgctggaaattaaggatttatttttcacttaccaccattttcactggtatttcagcagtcattgaagtacctttctctcctcttc

SEQ ID NO: 421674 - DNA, 201 bp, Homo sapiens
actttaaatggtatttcacagataatgctaagaaattaggctgtaaaagaaatgtcaaggtgtatgtatttgagttccccaagcaaaatttccaaaagggktctttttttcacatatatgagcattgtgtactgtattaccactcagtttaaagaaatagaacaccagccaagagagaagagccagcaagctgctcactgt

SEQ ID NO: 421675 - DNA, 201 bp, Homo sapiens
aatttccaaaagggttctttttttcacatatatgagcattgtgtactgtattaccactcagtttaaagaaatagaacaccagccaagagagaagagccagsaagctgctcactgtgatgttgtaaatgttcagtgattagagtggataattattgatattattttgtaatttattttgcagaggatatatctatctgcaga

SEQ ID NO: 421676 - DNA, 201 bp, Homo sapiens
cctaatttctcttttaacagcacattttgcatttttgcaaacctttctgttgcaacctcacataggtaactgaaatttcacttctgttgaactcaaactcyagatatgtgaagagaagaaaggtggttgtagaatggccccaagatcctcctttctggacgcctttcctcttttctctttgctgctagcttttccttattg

SEQ ID NO: 421677 - DNA, 201 bp, Homo sapiens
atgcaagccaactcctcataataaatctctttctgtatgaacccagttggttcatttttttctgaataacactgattaatataccaccctatcctgtgttyttcctcatgaccattttctcccaagcagatctctcctgtttgacagatgtttcactttggggcatggaggttgcttcactctgatcatggaggatacttt

SEQ ID NO: 421678 - DNA, 201 bp, Homo sapiens
ctgcagaaaaccaaaggcaaagagaaaaaaccttaaaggaaggtgggggcaagggacataaagaagtggaattagaaatcaaaacttgtccactctccctwtccacctccacccaaccatgcctccttcactaacaagatagcaggcccatcagtcttacagacaagtttacttgcaaacttggtagtaccatggcctcag

SEQ ID NO: 421679 - DNA, 201 bp, Homo sapiens
tgtaagactaagagttttgtggttttgttaagagtcctgtgattgatatcagacatcatgtttcttgcataaagcccatatcatctactgaccatttcctytggagtttctttataatggagtgaaaatttcaaaacacaaaataacctgaggatagaattcggactagagattcctttaccagtagaggaaatagttaat

SEQ ID NO: 421680 - DNA, 201 bp, Homo sapiens
cacctgtaatctcagtactttgggaggccaatgcaggcagatcgcttgagcccagcagttagagaccagcctgggcaacatggcaaaaccctgtctctatraaaagtacaaaaacaattagctgagggtggtggcatgcacctgtaggtggaaggattgctcaagcctgggaattggaggctgcagagagccgagattgtg

SEQ ID NO: 421681 - DNA, 201 bp, Homo sapiens
agcagtggaagcaaaagaaaaaagcctgttttttttttaaactttcaaaatagactcttgaagtccacatcaaaaatgacagttttaaaagcaaagttttkgatcttaagagctaagttttgttgagagaagaaagggctcctgaaataaaaaataaagttcttgtaaagtcaggaatagagtttatgccataatagatta

SEQ ID NO: 421682 - DNA, 201 bp, Homo sapiens
ataaaatttaaaaaggaaaagaaaaatgagatttaatttggtgtgatattccttttcctgctaatccaaagatataaatttgaacccacaatttttttttkggttatttcatctggaatcctgagattataggatatatttcacagtagtctctaaagctcaacaaagaaatccatgtggattttccagggaggtttcccc

SEQ ID NO: 421683 - DNA, 201 bp, Homo sapiens
tccaacctgggcgaaagagtgagactccatctcaaaaaaaaaaaaaaaaaaaaaaaaaaaaaaaaaaaaagaatggaggagttggcagcattaactgtctrtttcaaagccattactagaggggatactgtagaagtagggagcaacccctggcttagtgcatgagatcaatgctggtagcagttatagcctaactctaat

SEQ ID NO: 421684 - DNA, 201 bp, Homo sapiens
taataaaacatgcgcacacacacacacaccatacctaaattagtaattgtcaaataattagagtaatttaatatatatcctgttaaacttattatataatkggatttttctgagacagggtcaccctgtctctgtctcccaagatgcaggctggagtgcagttgtggggtcatagcttacagcagcctccaactcctgggc

SEQ ID NO: 421685 - DNA, 201 bp, Homo sapiens
cattactagaggggatactgtagaagtagggagcaacccctggcttagtgcatgagatcaatgctggtagcagttatagcctaactctaataccaattttkatctcacttcttctaaacataatgtaaaagtcaggagtatattctctgccccgcttttgtgccaggccttatattgtctattgcccatacatgctggtta

SEQ ID NO: 421686 - DNA, 201 bp, Homo sapiens
acctttttaaaaccctgatttataaagcacttatttgccttcaagaattttgggggctgatttataagctgattcgccatctgtctcttcttggcaaaacmaaggagaaatggttagatactattttcacagctacattaagatattaattgtgtattttacatgagaaagaaatagagctaggattggcctcatccttct

SEQ ID NO: 421687 - DNA, 201 bp, Homo sapiens
cctaggactgcagcattaacttccttcttctatcctgtaagaagaaagtaaaatacaaatattaacacaggtccatagccctatatcaaaaccactggggycagatgtattttggaattcagaattttagaaaggcaattgggagtgagcatatgacataggagaagtcacatatataacatatgcatgacattctctgta

SEQ ID NO: 421688 - DNA, 201 bp, Homo sapiens
catgggcttggatgattttctttcttggaaacatggttgacaaagctatacaataaaaggataattttctcagcagaacaaaacacactaccctcttgtcrctgggcttttaaaaatctgaagaataggccgggcgtggtggctcatgcctgtaatcccagcactttgggaggctgaggcgggcggatcacgaggtcggga

SEQ ID NO: 421689 - DNA, 201 bp, Homo sapiens
ttggtttgtggaagggtggagctttaaccttgcttctgagacatctgagagattatgatgcgatgccctactgctggacatataatctgacaatgtctttrttgagtcaacttgaagcccaagagacattccccagtttttccattagggggtccttatttttgctgctgtacattgttgtgtcctttttttttgcttttt

SEQ ID NO: 421690 - DNA, 201 bp, Homo sapiens
cagtgtagtggagtggacataatctttttgactactaaagtgtcctgatgtgttgggtttttttgactcatttgtaagaagaagtaaataagaagtatacrttgttcaatcctgggaaaagaaaaaaatgcatgagatgaacaagggtcaaaaatgtaaggaattttaaaaagagtttactttttacatttcttttacctg

SEQ ID NO: 421691 - DNA, 201 bp, Homo sapiens
catttacatgttgtaacagttaaatatctggaacatattatccaatcatgctccaattccaagtgcagaaggaacactatattcccatgattaatattttmatgtcacatatagtatttattttcattatctctaacggtccagtggtcatgccacactgatactgtgtgattatctccattctcatgagaaagaatttga

SEQ ID NO: 421692 - DNA, 201 bp, Homo sapiens
ttgattctgttctttcaaattataggattaggtgaagggcttgctttgatgagaaaataaaatggaataattttcggcaaaagttcgttttaaaattatgyccatatttaaatatttttctttaataatcctgtcaactattaatgaattaaacattacgtatagaagtgttgtttttatttcttctgctgcaaataagtc

SEQ ID NO: 421693 - DNA, 201 bp, Homo sapiens
attcatatggatgtcactaataaggagacaataaaagacgaggaggatcaaaaggaagcttttgctgcagaaattgatggggaatgaaacttcccagcccrtgaggcaaagtggtggcaaagagctttaaaatgggtgtgtcagtcagctgggctgctgtaacagaataccacagaatgggtggcttaaacaacaaacctt

SEQ ID NO: 421694 - DNA, 201 bp, Homo sapiens
attcaacaaatatcaaggatctgtatatgtcagtccctacactaccacagagagtacaaatattaaaaaagacattattcctgcttccaaggagctttacytctagaaagacagatgtgttgatggctaaaacacactgtgacaagtgctgtactagtggaatgtatgctgggtacaggatagccagaagaaggagtgatt

SEQ ID NO: 421695 - DNA, 201 bp, Homo sapiens
atggcacatgtatacctatgtaacaaacctgcacgttttgcacatgtatcccagaacttaaagtataacaataaaaaaaaaaattggttagaactaataagtaagtttaacaatgttgtaggatacaagattaacatacaaaaatcaacagtaacttatatactaaaattaaacaattgacattaaaataaaaataatgca

SEQ ID NO: 421696 - DNA, 201 bp, Homo sapiens
tctgcttggcaaacccatttttcatagttttcatctttctttcgctatctattgcattcttccctgtttctacttgaaacttttctactttcctgtacagyccctcctccatcttcaccttctgcagaataacttggttcggattttatggaggatgttgactccatctgacgtaagtttcctggccttaccattatgctg

SEQ ID NO: 421697 - DNA, 201 bp, Homo sapiens
cttgaaacttttctactttcctgtacagcccctcctccatcttcaccttctgcagaataacttggttcggattttatggaggatgttgactccatctgacrtaagtttcctggccttaccattatgctgcttattaccttcacggtacctcactaccaccctgttataggagccagagaagtgacctcaggtctttccgtc

SEQ ID NO: 421698 - DNA, 201 bp, Homo sapiens
cccaagatgaggttggtccattcttgataaattctgtatcagattctgtgccccacctgaatccagccatgctgcaggtatagactgcagctctctgcccmagtcagactgtaggatgcctttaaattcctgagcattagtggaggtgataaaacttgcacttttgtcctgatgtggaagggaggaaaatgaaatcctgtg

SEQ ID NO: 421699 - DNA, 201 bp, Homo sapiens
taataaggaaaataaaagagccaatcctctattcctgagggctaacttatttggagtgaagattcaccaggattgcctttgacaaaatgtgagcctgaagkctcttgccacatattatatgagccttattttggagtggcttcttttatttggccaggctagatatctcctgttatcacattcaggcatttgctgctgccc

SEQ ID NO: 421700 - DNA, 201 bp, Homo sapiens
ccaataaggttgctattactattctccatttaagaggtgaggaaattgagatttatgataatatagtatttaaaacatgctttttgttatttgtgtgtgcrtgtatttttttggtaacagtttaattagatgtcattcacataccatacaattcacctattcagattgttcagttcaatggtttttcgatatattcagttg

SEQ ID NO: 421701 - DNA, 201 bp, Homo sapiens
attattaacacagaaccattgcagctcactgtggatctccaagtgatggttgtccttaagctcaggtgagaactattctccttaaacttaggagaggacartagcagtagatatagaaggtgctttacccctaaaccagcaggtgcttaatgaattcctgttgagttaatgggggtggaggggtagcagggatgattttca

SEQ ID NO: 421702 - DNA, 201 bp, Homo sapiens
atactctataaacagtagaagaactatttaatctggtcctgctgaaaatcattttcttatgtaaagagtgacatcttaatttaaccttatgttatggattkgggtgtttttcataggccaagattatttagtgtagtcctttggaatttgagattatttatttaatgtcttccctttctctgtgacagtaacacttctctt

SEQ ID NO: 421703 - DNA, 201 bp, Homo sapiens
ttatttgtgtgtgcgtgtatttttttggtaacagtttaattagatgtcattcacataccatacaattcacctattcagattgttcagttcaatggtttttmgatatattcagttgtgcaaccttcaccacaatgtattttagaacacttatatcacctcaaaaagaaccttataccctttagctctcttatgccctgagcc

SEQ ID NO: 421704 - DNA, 201 bp, Homo sapiens
tgtttttcacaatctccagagaccactaccagctaaaggaaagtgggtggattctctgtgcaatgatttctagttttcttctggtgcatttttctagtttstaatattcaagctacaggaaaaggaaataaaaaggggaagcaaagccaactgttctgttgttattttaggccatccatagcataagaaatatattggcaa

SEQ ID NO: 421705 - DNA, 201 bp, Homo sapiens
tttattcatttgtctgactgtgctaatttgccagtatcttaggaagaaaatactactacagagcaatggttttcaatcctatggtcatgacaaaagctttgagaccacacacacccactatacacaccaatcaactcttgtttcaattttttcccattatatctaggactagttggtgctttcaattgaaaatttgcaggt

SEQ ID NO: 421706 - DNA, 201 bp, Homo sapiens
gtacacaaggaccaccataacaaaaactggggggcttcaacagcagaaatgtattgtctgacagttctggaggtaagaagcctaaaatcaaggtgttgagrgggccacaccctctctgactgttctaagggagaatccttccttgtctcttgctagcttctggtggttgccagcactccttggctttccttggcttatgga

SEQ ID NO: 421707 - DNA, 201 bp, Homo sapiens
tactctgactttctccccatctagatggagttcccaatatcattaacatgcctcacatagtttcttttgaagctttggctgggttaaatcacttttacttrtgcaaagtggattgactaaaaccttttccccaaacacctgccagaccagctatttttgtttccccttgcaatggactcatagcaagtctcacgcatgcat

SEQ ID NO: 421708 - DNA, 201 bp, Homo sapiens
tttcatgacacctcacttgtgccaccaatgtgtgctacactagactgtagtggggctaaaactgttaacaaaatcctttttggtttggtctttatatatawaaaaaaaattaactgcgatttttggggggagttgggcactaagcagtacatttgcccagatgttaaaagttaatttctaagggatggggagattttgttt

SEQ ID NO: 421709 - DNA, 201 bp, Homo sapiens
cagaagaagataatagcttccttcacctacaagcataggagtaaataggtgttacatctaataaatctgaagggaatggtgcactttcatgagccaggcawtttacaactttaatgctcaaaaactttccaagatgaatatgatcatgaatctactttgttctgaggaaacagacacttggagcagctgagtatggtgtta

SEQ ID NO: 421710 - DNA, 201 bp, Homo sapiens
gcccttttttgcatgccttctttttcctccttgctttgcatccctatgacccagattcagtgtcacttttttttttttttgagatggagtctcgctctgtyacccaggccagagtgcagtggcacaatctgagatcactgcaatctccacctcccagtttcaagctattctcctgcctcaccctcctgagtagctgggatt

SEQ ID NO: 421711 - DNA, 201 bp, Homo sapiens
tagaacatgtctggctttcaacaaaaatttacaaggcatgccaaaaggcaaagaaacaaaaaacatccaaagacataaagcaagcttcagaaccatactcrgatatgacacagattttgcaattatcaagtaatttaaaataattatgtttaatttgttaaaggttctaatggaaaaagtatacaacatgcaagcctatat

SEQ ID NO: 421712 - DNA, 201 bp, Homo sapiens
ttatatgctactgacttgttatgttgtaatatctcaagaattgctcttgattgctttctaattgttacagatgtacgtgttctattatctatccctctttytcctaaagaagagagatgcttgtcaagggtggggactgcatctcctattcctttccactcctagaaacccaccacagcactggacatgtaggaggtgctc

SEQ ID NO: 421713 - DNA, 201 bp, Homo sapiens
tattaaaaataatgtggaatttacttatgatccacaataattggcagtgtaattaatggattaattaattacgagtgcagtatttttccaagacctaatcyactggctcgttagtgagaagaatcattaagcagaatagcatgaagggcttcactcagaagcagttgtttttgtaagtggcactagagtttctttaacttc

SEQ ID NO: 421714 - DNA, 201 bp, Homo sapiens
tttctaagtggaacctaaatgtcagttatgtaggcaaagaacaaaataattctctagctgctatttcttttccagctggctttatacctaccattagagasagatgaaagagacctatggaaggcagatcttacctggttttacatgcacatgtgtacctgtgtgtgtgtgcctgagtgtgtgtatgcacacacactcatg

SEQ ID NO: 421715 - DNA, 201 bp, Homo sapiens
gctccctctgcctcagcgctgctttcttcctggtcacctggctgaccgcaatttatccttgggactcagggtatctgtctcttgctctctacccctccccmcaaatccccaatctatactaaatgctgctcccttgaagtgtctacaccaccctatactgtaatgtagcacattgcacactgcactacattggatagctta

SEQ ID NO: 421716 - DNA, 201 bp, Homo sapiens
aataatgataaaaatagctatcaattattgagtgctaatatcttaactcacattttcttatttagtgttactattttcatgtttaagagatgaagaaatamggtttggggcatttggtgagccaggacgtatttctgtctcactctaaagctgctccctctgcctcagcgctgctttcttcctggtcacctggctgaccgc

SEQ ID NO: 421717 - DNA, 201 bp, Homo sapiens
gagaataaatatctgttcttttaagctacccagtttgtggtgcttggttacagcagccctaggaagctaacatgagtgcaattcagagaatagctgtgaagggtgaggttctcctaaaggagggaggaagaccccatggcagaatgaaggaccactgactcctagtgcagtactcttttcactagacaaaatggtaagaac

SEQ ID NO: 421718 - DNA, 201 bp, Homo sapiens
tgtttgagctgggccaggccacaaagtctagtcctgattttaaggttgatgccaaagaaacctggttagaccaggttttaggttgtcacttctcttgtatrttactgaaccaacagacaaatgttgcaaaggacatagaccaagtttgtatgtgagtggatctggctctttggtgtctctgtatcgctggaggaggtgccc

SEQ ID NO: 421719 - DNA, 201 bp, Homo sapiens
cacaaaatgagtaacacatcttccctcaagataggtaaggtctgtctgtcagagcacacttctgctgacttatgttctgtttttgcagtccttcatttcasttttattgatcactactgaacaatagtttcttaccctttatagctttaattttccctgcattctaggttatttgtcaagacagtaatgattgtaaaacaa

SEQ ID NO: 421720 - DNA, 201 bp, Homo sapiens
attatttatatagtttttttttaggtaaaggaaattaaattatttgaggaactgtgccctcaccttgtggctgaatctatctggtgctgctcttccttctyctttccctcactcccttacatggtcaggtcattttaaatatgtccagtcttcagaggagatgcctcctgatctcccaactatcactgaggggtggaaggt

SEQ ID NO: 421721 - DNA, 201 bp, Homo sapiens
aattcctaaggaagcatccttcaataagaaacatgtggttttatttagggctgtttttgaagtttaccttttttcagcagacatttaatgaatgtctaccmcagagaagcacagttgctctggtgaatgcaagaatggatatgacagggtgtctgcctttcgggagctcacagtttagtccctggattgcagtggaagtaa

SEQ ID NO: 421722 - DNA, 201 bp, Homo sapiens
tgttgtatttttagtagagagggtgtttcactgtgttggccaagctggtcttgaactcccaacctcaggtgatccacctgcctcggcctcccaaagtgctkggatttcaggtgtgagccactgtgcccagcctcttcgcattttcattacctattctgtgtctagtaccctggtaagtgctggagatattaagttaaacac

SEQ ID NO: 421723 - DNA, 201 bp, Homo sapiens
tttgaatggcagattagggtttagacatcagcttgtgtgcagggggaagccatcaaagctgtcttttgtttgcctgttgatttgtgtgacttgataaaatyctctactgagcatttctcatagtacccacttaatttttaaaaacaactccagagcagttaacaactccaagtagcctaaggctgtgtaactgagaagagg

SEQ ID NO: 421724 - DNA, 201 bp, Homo sapiens
ttagaaaagcctgagcttgaattgcagttctccgacccctttctgtcggtgtgacattggatgttttacctatttttcctgaccttctgtttcttaacttytaaaataggggtgatgtttttctaggtttgtgatgaaaccacgtgaatgtggtaaaataataaatgttggatactaagcacctagcacatggttaagggc

SEQ ID NO: 421725 - DNA, 201 bp, Homo sapiens
tctcctggaacatcttcagggcaagacccctgtttgttcagctctccatcccctgccatacccagtaggtgccatagcaacacatgaaatcttacattttrttctcagaacagcactgtaacattgatgttattattagcaccatttttaaaggtaagaaaactaacacacagagcattgaaaacttttctcaaggtgtct

SEQ ID NO: 421726 - DNA, 201 bp, Homo sapiens
cagtacaaagatcttttctggcacagggacttaatctgagctactaatttccattttggggctttttgccaggctatttgaggcagcatttagaagcagaraaaagtagattagcactgactatcattttttatgtttagactccaagctgataaagcaatgacatttttattatttcagcatggttttgtggatgtgtca

SEQ ID NO: 421727 - DNA, 201 bp, Homo sapiens
tgctagaattttctctctcaaagataacaagtaatgtggttcaaatgtatagtcagtctacaggctatgcattaatcttccaagccaagggccaggtagtmggtaagatttgcacttgctctttaaacatgataggtgttggtaaattgctcaagggtagaaaaggcaaggcactcatgagggcatggaagcagagagaca

SEQ ID NO: 421728 - DNA, 201 bp, Homo sapiens
ttcttttcttttcttttcttttctttgttgttgttttttgtttttttttagagacagggtcttgcacttttgcccaggctggagtgcagcggggttatctkggttcattgcaacctctgcctcccaggctcaaacaatccacccatctcagcctctctagtagctgagaacacaggtgtgtatcaccacggccagctattt

SEQ ID NO: 421729 - DNA, 201 bp, Homo sapiens
ttaatcccttagttaattctataaagcatttatttgtgtcagatactgtaattaagtgcaattttaaaaaatcccagattttttatgctctctcttagacytgcccaaatgattccatccgtatctccagaattagttactgcaagaaatttggtttcctccagacatttcctcatgtttttctctattgtatcttccact

SEQ ID NO: 421730 - DNA, 201 bp, Homo sapiens
aatccaaagatataaatttgaacccacaattttttttttggttatttcatctggaatcctgagattataggatatatttcacagtagtctctaaagctcarcaaagaaatccatgtggattttccagggaggtttcccctccccaaaggaacatgtgcagacttaagtgtggtaagtcattaatactagcctccttctttg

SEQ ID NO: 421731 - DNA, 201 bp, Homo sapiens
gaaacaactttcaggttttgctaatcttgagatatctacagttctatgactttttccatgtgtgtatagagaaggatgtgattgtgttccagttcaatctrtcttaaagagtggtccgcatggagtcagcaggtatgggtaggccaggcttctgcctttttaaaatttttattttcttcaaattttattttaagttcatgg

SEQ ID NO: 421732 - DNA, 201 bp, Homo sapiens
accttgtggctgaatctatctggtgctgctcttccttctcctttccctcactcccttacatggtcaggtcattttaaatatgtccagtcttcagaggagakgcctcctgatctcccaactatcactgaggggtggaaggtagtgcttattcctcatttgtttgatagtgctcaacaccttgggttaagatctttcctggaa

SEQ ID NO: 421733 - DNA, 201 bp, Homo sapiens
aaataagccaggaacagaaagacaaataccgcatgatctcactcacatggtgaatctaaaaaagttgatcccatagaaatagagagtagaatagtggttgycagaggcttaggataatagaggaaaggagaggataggaagagattaatcaacatgtataaagttacacttagatagaagcaataagttctagtgttttat

SEQ ID NO: 421734 - DNA, 201 bp, Homo sapiens
aactgagtgcaggctagtgggagattaataagctcctgggagttgctgtctaaggggatcttcacactttcacaggcttttccccctggaactctaccagrtgctcagtaagaggaccctcatggctctgggataggggcttgaaggggagtagccttcgtgaaacccttcctgactcttctctctaacaaagacctcatc

SEQ ID NO: 421735 - DNA, 201 bp, Homo sapiens
tctcactcacatggtgaatctaaaaaagttgatcccatagaaatagagagtagaatagtggttgccagaggcttaggataatagaggaaaggagaggataggaagagattaatcaacatgtataaagttacacttagatagaagcaataagttctagtgttttattgcacattggggtgactttggttgccagtattgcat

SEQ ID NO: 421736 - DNA, 201 bp, Homo sapiens
gcctcagccacttgagtagctggaattaaaggtgtgtgccaccacacccagctctaattgttgtatttttagtagagagggtgtttcactgtgttggccargctggtcttgaactcccaacctcaggtgatccacctgcctcggcctcccaaagtgctgggatttcaggtgtgagccactgtgcccagcctcttcgcattt

SEQ ID NO: 421737 - DNA, 201 bp, Homo sapiens
tcttttctatctataccaggcagttctaaggtaagccagaccaaagcagatgattctgtccctgcctccaccaaaatcactgttggattgtagatgagaaracaaaatgacttaaaccttggactgggacaattcattttctgacagctggaggctcttatgaacaagtgagaccaatatttgtgggttatcttggatttg

SEQ ID NO: 421738 - DNA, 201 bp, Homo sapiens
tgctggagaggatatggagaaataggagtgcttttacactgttggtgggagtgtaaattagttcaaccattgtggaagacagtgtggtgattcctcaaggwtctagatccagtgagccaaataatgctagaaatattactaagaaatttactagacatatacattttacccagcaatcccattactgtgtatatacccaaa

SEQ ID NO: 421739 - DNA, 201 bp, Homo sapiens
tgtttacaagacaaaagcacctcacagtaaaagaaaaacctgtgtgtaaatgtgaatttttggacttgttatttaagttgcctcttggaattttagtcatrtctattatttccaaagtcagaagaattatctgtgcccagggttattccagataactgatgtttaacattttgagtggcatataacacacacaaaaaagat

SEQ ID NO: 421740 - DNA, 201 bp, Homo sapiens
taatatgagagttgagttttaagagactctctggtttgattggagagtgccagaagaggcactgaaggcaacaccccagacctgggaaaggttaaagattytggttttcattcactgcaatgatcctaaacatgactcccgtgctatttccactttacaagcttcacaatgatgacttcaacactcagtgcaccccaggct

SEQ ID NO: 421741 - DNA, 201 bp, Homo sapiens
gagttttaaatgtattgttgtgtgtgttagtttatagttataataaaaatatccaatgggttatcagccctatcatcatttttcaaatgaggatactgagrtgtgggataatttcttaaaaatagagctgtgcttcacaaatacccaggaaataaacacttgttcagtcactaagttctgactccatgttgtgtattttgt

SEQ ID NO: 421742 - DNA, 201 bp, Homo sapiens
aggcactcagtaaatgtttgttaatttaattggaattagcagtgttctcacttgtgtgtgtgtgttgggtggggttgtgcagagagagatgaagggatagagagagatatcaaatccatcagccaccatcttattatattttcacaccttctatctgtctttagcatttcatcttttttctttgagacccttttttagttg

SEQ ID NO: 421743 - DNA, 201 bp, Homo sapiens
tattggaaggtaatgattatgtccaggccataaatacagtgtaaattctcttcaatagacattaaaaagatgactttcaattggaagcagctttttaaagrgcttaaaggatactgaggtataaattttcagacctgtacagtctgtacgtgtaagactaggaagaaatgagtgaaacccaatacaggctcatgcatggga

SEQ ID NO: 421744 - DNA, 201 bp, Homo sapiens
ggcactcagtaaatgtttgttaatttaattggaattagcagtgttctcacttgtgtgtgtgtgttgggtggggttgtgcagagagagatgaagggatagagagagatatcaaatccatcagccaccatcttattatattttcacaccttctatctgtctttagcatttcatcttttttctttgagacccttttttagttga

SEQ ID NO: 421745 - DNA, 201 bp, Homo sapiens
cacaggtgaaaatttctttttatttaatatgtcatttttattggaaggtaatgattatgtccaggccataaatacagtgtaaattctcttcaatagacatkaaaaagatgactttcaattggaagcagctttttaaagggcttaaaggatactgaggtataaattttcagacctgtacagtctgtacgtgtaagactagga

SEQ ID NO: 421746 - DNA, 201 bp, Homo sapiens
aacttcatccacataccagtaatgatctgctgaccattttgtttgggctgtctatttttttgtccttgggtcactgatgaacaatagatgtggatatactytaggatgctaccctggctttttttcattgtgggatcctagggtcagagggaaggtgaaacagttcaaaagaacctacatatgctgtgaaaagctggctgt

SEQ ID NO: 421747 - DNA, 201 bp, Homo sapiens
aaacagtagcactttataaaatattagaaagctttgaaaaacacaaataaatagaaagcatccccttgtggcttcaggtagtgcatgttaaagagtttgtmcccctgtactctgtcttcctgtgggctgagtactgggatgtggcaaagtctcccctggaattgactggcagaccactttgctgggggtggatggggaaag

SEQ ID NO: 421748 - DNA, 201 bp, Homo sapiens
tttttttgtagcgacaggatttttccatgttgttcaggctggtctcgaactcctgggcccaagcatcctgccctcctcagcctcccaaagtgctgggattrcaggtatgagccactgcacccagacttaaacattttttaattgactgaaatacaactaaaatgttcagtgacttgcctaaggtcatgggccaaatacagc

SEQ ID NO: 421749 - DNA, 201 bp, Homo sapiens
gatcgagaccatcctggctaacacggtgaaaccccatctctactaaaaatacaaaaaattagccgggcgtggtggcgggcgcctgtagtcccagctactcrggaggctgaggcaggagaatggcatgaacccaagaggcagagcttaccgcgagccgagatggcaccactgcactccagcctgggcgacagagtgagactc

SEQ ID NO: 421750 - DNA, 201 bp, Homo sapiens
catttcccaagggttctggtttatcaaggttttgtgatccctctgtctctggaacctggactgcttagaactacaaagaggaaaagtagcagcactttgcrttctttgattgacatgggcaaacaatttttttttttctgagacggaatctcactctgtcacccaggctggtgtgcagtggcgcgatctcggctcactgca

SEQ ID NO: 421751 - DNA, 201 bp, Homo sapiens
ccaaatggccgcccagctttgtcttgaaacccagggccctaatggtgtaggcacccaagggaacctcctggtctgcaggttgcaaagacagtgggcaaagygtagtatctaggctggatagctctgtccctcatggcacagtccctcacggctttccttggctaagggagggagttccctgaccccttctacttcctgggt

SEQ ID NO: 421752 - DNA, 201 bp, Homo sapiens
actgcccccatgatccaaccacctcacaccagggtccctccctcaacatgtggggattataattccagatgagatttggttggggacacagagccaaaccrtatcatgtggctactatcatctacttagggataatgcatttggcccataatagtcactcaataaaatatcattattgttaattttggaatggaggatgta

SEQ ID NO: 421753 - DNA, 201 bp, Homo sapiens
gggggcttccttattctgtggtaggaacagagagttcttatcagggagtagggtgaacagtcgatgtttaggtgtctgtggtacaggttggcctgagcagrtctcggtgttgcacaaactggacctggaaagagaattgtaatgcactttggaaagattttttaaatcaaaaatagaaaattaaaaaaacaaaacaaagcc

SEQ ID NO: 421754 - DNA, 201 bp, Homo sapiens
aacattttactcactgttactctcttgctcttattttttttttccacaaatgggactttttatctaccactattaaaagtctgaactttaaaaagattttkgggctggtgatccatatccatcagctcattcaacttagcaccactttcattcccagtagcttttccagaacttctgccttctccatgaagctccatgagt

SEQ ID NO: 421755 - DNA, 201 bp, Homo sapiens
ctgtttccatgggctgcaatcagtactcatttcccctccttgatctggggagctatttcttcattccaaaagagtagagctctggtggtagtgtccttcakatgctcacaggaaggtagctgatcttcagtgaggtctgcatacctgccatccttactgatgttgctgtagaaaggatggttgggcttcattagaggtggt

SEQ ID NO: 421756 - DNA, 201 bp, Homo sapiens
taattatgtcttcattgtgtatcaggcttgagctgctattgtctctgtataactagtaaatgataaaaataatgacagtcataaagaggtaatccaaatakgttggcaaacctacaacctggaaacttgtgtggtcttttctctgtatgcaatcttccttttatatttaataatagacattttcaatggcttaccggccca

SEQ ID NO: 421757 - DNA, 201 bp, Homo sapiens
atcaccatggcacatgtatacctatgtaacaaacctgcacgttttgcacatgtatcccagaacttaaagtataacaataaaaaaaaaaattggttagaactaataagtaagtttaacaatgttgtaggatacaagattaacatacaaaaatcaacagtaacttatatactaaaattaaacaattgacattaaaataaaaat

SEQ ID NO: 421758 - DNA, 201 bp, Homo sapiens
acccgggaggtggagtttgcagtaagccgagattgcgccactgcactcctgcctgggcgacagagggagactcagtctcaaaaaaaaaaaaaaaagaagarccatcactgtggattgagagggttgaacttcagaggatgctgatcagaggagaagagtgtctcatctcataatggattaactatggcttagttaatccac

SEQ ID NO: 421759 - DNA, 201 bp, Homo sapiens
tcaccatggcacatgtatacctatgtaacaaacctgcacgttttgcacatgtatcccagaacttaaagtataacaataaaaaaaaaaattggttagaactaataagtaagtttaacaatgttgtaggatacaagattaacatacaaaaatcaacagtaacttatatactaaaattaaacaattgacattaaaataaaaata

SEQ ID NO: 421760 - DNA, 201 bp, Homo sapiens
tgctgatcagaggagaagagtgtctcatctcataatggattaactatggcttagttaatccaccatgaggctagtggatccagcactcaaagaactcctaktccgggaaagtaaggtagtagtgaaatggaaattgccttgcttggggtgttcatgttcctcattgacagtgacccctagcaaggaggatgaaggcagact

SEQ ID NO: 421761 - DNA, 201 bp, Homo sapiens
catagtttatgtgttggtagactggctacccccactttaggcgacttaggaggaagaaatcctcttcaaaagtgtgtgtgctgtaagaatacctcaaattytacctttaagtattgattactcctaggatagacatttcctttctctattaaaattggaggagatagcttattaaaatattggatgtctttagttttttaa

SEQ ID NO: 421762 - DNA, 201 bp, Homo sapiens
actatattatttaagttctataaaattctagaaaatacaaagttatttataatgacagaaaggtaatctgtggttacctgggggtagaaagagttgagagyaagggattgaaaatgagaaagaggctactttggaggatgatggatatgtttgttgttttgattgtggtgatggtttcatgaaaatcaaaacttaccaatt

SEQ ID NO: 421763 - DNA, 201 bp, Homo sapiens
gaagtattcttccatataaaacttttagatgcatgttcttagcagctttatttgtaatggttaaaaactgaaagcaactcaaatattcaccaattggtcartggttaaaaaaataatgctgtaccgacacaatggaatattactaagaaatgaaaaggaattaactattgttatacacaaaataacatggatcaatctcaa

SEQ ID NO: 421764 - DNA, 201 bp, Homo sapiens
catttacctttctttgcactgaggctcttgaaacatttctccagcatatctgagcacagaatgctctttattccaaatgttttgatagacctagcagagasttaggagacctaatgtacactttgaattcagatagacaaaccgaaaaggtatttgagacacattaattactgtcaagctaatttctatatattgtgaaca

SEQ ID NO: 421765 - DNA, 201 bp, Homo sapiens
aaataaacttagatctatatctttcaccataaagaaaactcaaaatggatcatagatataaatacaacacctaagactattagaccagaagaaaacacagracaaaatttttatgactttggattaggcaaggatttctaagatacaataccaaaacatgacctataaaagaaaaattgataaattgtatatgaaaatata

SEQ ID NO: 421766 - DNA, 201 bp, Homo sapiens
tgttattgtccttcttttccagtccagcatgccatcataaccttgttacacatatgtatttgtcagatttttctgggttattgctatataacaaacaattktgaaacttcactggcttatggaaatatttttttcttgccccagactctgggggaacagctgaaacagcactgtggcagactggattgacttaggatctga

SEQ ID NO: 421767 - DNA, 201 bp, Homo sapiens
caccatggcacatgtatacctatgtaacaaacctgcacgttttgcacatgtatcccagaacttaaagtataacaataaaaaaaaaaattggttagaactaataagtaagtttaacaatgttgtaggatacaagattaacatacaaaaatcaacagtaacttatatactaaaattaaacaattgacattaaaataaaaataa

SEQ ID NO: 421768 - DNA, 201 bp, Homo sapiens
agacaaatacataaagataaataccatttttatggatcagtagactcaaagctgtcaagatgccagttcttaccaaattgatttataggttaaatctaatyccaatcaaaatcctagtgggtttcctaagtgtcttatggattttaaagatgattctataatttatatagaaatgcaaatcacctgggttagcctaaacaa

SEQ ID NO: 421769 - DNA, 201 bp, Homo sapiens
tcttattctttgacacaacagggattcatatttttgactactcagaggttttacaccattttagaaagagcacagtatatatctcaaaatgtaattttctrtaaatattttggaaggtacaaacttgatcaatggtttcaccctttctatttatctggttaattaaagaaatatttaattgagatgaaaaatttccaattg

SEQ ID NO: 421770 - DNA, 201 bp, Homo sapiens
ggggggaagttagcaaatcacttatctgataaagactcttatccagaatatataaagaactcttgaaattcaagaaaacaacccaaatttaaaaataggcmaaacatttgaacacttaacctacgataacttctttatcttagagaagatattcaggtgaaaaataagcacttttaaagatgcttaacatcataaagatgc

SEQ ID NO: 421771 - DNA, 201 bp, Homo sapiens
ctggggctgataattaccaactcatgaactgaggttcagagaagacatagaatgtggagcctactttcaaacttagctttgtgtaactgcagtataccttkctctcacacatctaaagataagttggaatttccctgcatgtacccaactacactgaaatttggtgttgagctaaaatctgtaagtcaataaagtattaaa

SEQ ID NO: 421772 - DNA, 201 bp, Homo sapiens
tctaaagtcatttgtctgaaatagttacatcaatataacatttttcagtaatgaagctggatgtgtagctaaccagtgtgtagatagatagatagatacayagatagatacatagatacatagacagaggcatactaaccagtatatttaggaaagatttatgctttagatttttttctcaaatggatgttgactctagta

SEQ ID NO: 421773 - DNA, 201 bp, Homo sapiens
gacagatcttatttaattcttccaacagcaccatgagctggggctgataattaccaactcatgaactgaggttcagagaagacatagaatgtggagcctaytttcaaacttagctttgtgtaactgcagtataccttgctctcacacatctaaagataagttggaatttccctgcatgtacccaactacactgaaatttgg

SEQ ID NO: 421774 - DNA, 201 bp, Homo sapiens
cagtaatgaagctggatgtgtagctaaccagtgtgtagatagatagatagatacatagatagatacatagatacatagacagaggcatactaaccagtatwtttaggaaagatttatgctttagatttttttctcaaatggatgttgactctagtaaactaagctttcatttcctcctctgctgtacagttggaattttta

SEQ ID NO: 421775 - DNA, 201 bp, Homo sapiens
tgtgccaagagtgttgtttcacctcttttaaatggtcaacagtggaaaagtaaagggatgttaggacactaaaatagaatgacaaatgaggttgcatttgktgcagagacgacgcacatagatgctttttcttaggatgttctggtttgttagaagatctgtttataaactaacagctgtggtttccagtgggagtcctgg

SEQ ID NO: 421776 - DNA, 201 bp, Homo sapiens
ggccggtgttcacttgcctctttgggtgagcaggaatgttgcttccttccagttcgctcagtcgcccaggctggagtgcattggcacgatctcggctcackgcaagctccgcctcccgagttcacgccattctcctgcctcagcctcccgagtagctgggactacaggcgcctgccaccacacccggctaattttttgtat

SEQ ID NO: 421777 - DNA, 201 bp, Homo sapiens
gaggaaaccttactttatttacaaatatagggatttaaagaaaaaaaaaaaaggtgaggtacaagggtccaaatattggtgcttgtttttcagtgaacatkgcggaaatctattgttgttttttgttctttgtttctttcgggatggcagagcccctcctaataaaaagctaaattctcctgaatgggtagaaatggctgc

SEQ ID NO: 421778 - DNA, 201 bp, Homo sapiens
atttacaaatatagggatttaaagaaaaaaaaaaaaggtgaggtacaagggtccaaatattggtgcttgtttttcagtgaacattgcggaaatctattgtkgttttttgttctttgtttctttcgggatggcagagcccctcctaataaaaagctaaattctcctgaatgggtagaaatggctgccggatgatgagttgat

SEQ ID NO: 421779 - DNA, 201 bp, Homo sapiens
aatatagggatttaaagaaaaaaaaaaaaggtgaggtacaagggtccaaatattggtgcttgtttttcagtgaacattgcggaaatctattgttgtttttkgttctttgtttctttcgggatggcagagcccctcctaataaaaagctaaattctcctgaatgggtagaaatggctgccggatgatgagttgatattcata

SEQ ID NO: 421780 - DNA, 201 bp, Homo sapiens
taatgctgatttaaattacttttgaaattaaaatgttaatggaataaataggctgtcctcccggcttcccccacattctttgaattctctacattgtatcrtctctgtctgctcctgtttctccacctcatcttagactctagaactatttttatttagtgttggtttacttttatctgtggctgttttggcagcaggaat

SEQ ID NO: 421781 - DNA, 201 bp, Homo sapiens
attaaggttcttatgggacctttttttctggcaataatgaatggttataatatttattggttgttttaggaaggaaagcctctgagaacatgagtgaggasatgtaaaataaatccatcacattagaaacagactattaaaagcagaaaacgctcagcctctgccaatgaccatttttaaatgtgtggcctttgcagatac

SEQ ID NO: 421782 - DNA, 201 bp, Homo sapiens
tagattcatatgtgcacgtgttgtgtttatgtgtgtgtgtgtgtgtgtgtgtgtgtatgcacgtgtgtgtttaagctgctgagtacttaaaacctgctttwgtattgtgatggttatttctagtaggaaataaggctgtccaatttatctctggcactgagcaagccctatttgtctctggcatgaagcaggcttagctca

SEQ ID NO: 421783 - DNA, 201 bp, Homo sapiens
ggcattggtttgggcaaagaatttttggataagaccctaaaacacaggcaacaaaaacaaaactagacacattggattatgtcaaactaaaagcttctgcmcagaaaaggagacaacagagtaaaaagaaaacttaaagaatgtgagaaaatatttgtaagctatgcatctaataaggggctaataaatagggtatattag

SEQ ID NO: 421784 - DNA, 201 bp, Homo sapiens
atttattttagtaactatagaaaatgtttatttaggtaagagggaattttccattcctgaagataagctcttgcttaactagcattcaattacttttcaartggtctcagaagccaaagtgtgagtgtggtatgtgatagattcatatgtgcacgtgttgtgtttatgtgtgtgtgtgtgtgtgtgtgtgtgtatgcacgt

SEQ ID NO: 421785 - DNA, 201 bp, Homo sapiens
ttcctgacactgaattctcataatcctttggttctctttttctgtttacatgcctccctacccattgaaaagctgtggtgatttgttaattaattcatgtrttcatcttctgatatcagaaatatctgtgaggccctacactgagcgcggtactctccaaggtgctggaatactacaaggaacctttgtttcatgaacatg

SEQ ID NO: 421786 - DNA, 201 bp, Homo sapiens
ggaaagatgaatagttaagaggcttctctcccaatctaagtaattactgcatgttcttgttttaaatgagagagttgtgaggctaggggttatatcttcartcaccccaaatgacacctccttgttcacaaaacgaattcaattagattaatttccccagatgatcctattaggtgagacgattcacataatacgtaaggt

SEQ ID NO: 421787 - DNA, 201 bp, Homo sapiens
atagtgaagcacaaataaaattgcccttcttttgaatattaagcttccaacttggggatgcaaattatattcttgttgtttggattcattatttttcaatsaggctcttttagtgggtggggaacgggggctaccagtgagaacaatcagaaagaactccgctaactaactgcttgttggcctgccctgaacagtggaaag

SEQ ID NO: 421788 - DNA, 201 bp, Homo sapiens
aattctcatttcttcatgtgccccttccctgctttatttctttttatcgctcatcactatctaacaaggtatatatgtgacctatttattttgttgatctyttattttttcacagactggaagagccagggatacagagtttttgtccttttgttcaccattggatatagtttcttgaactgtgactagccaatagtaggt

SEQ ID NO: 421789 - DNA, 201 bp, Homo sapiens
ctcactcctctttgccctcctcatgtccccaagcactcaggcacactcttgccccaaggctgttgctgttcctgctgcctgaacctctcttcttcttgatrtccatgtaactggtcccctagttctcttcaaggccttcctcagtgtcacctctaacaagatcttccttggttacccaatccaacattgcaattctcattt

SEQ ID NO: 421790 - DNA, 201 bp, Homo sapiens
atggtgccctcctacctctgtgaaactgtcattttattatgtttgattttaatgcgatttgatatgtggggggagaaagcaggtaattatttggaaaatgyccgttacttttataaataggagaaatacgggagttggtctttgctaatagaaatcataatagtaattgcagtcatgattattatatggtgcttcacacta

SEQ ID NO: 421791 - DNA, 201 bp, Homo sapiens
aattaagagatcattaatctctttttaaactggtttaccccacattctcaaagtgctttgggaattgcagtatcaagtttgtgccaggtcttaaacattarctgaaatggttaaagacttgggcatggttaacacagtgccatggtgccctcctacctctgtgaaactgtcattttattatgtttgattttaatgcgattt

SEQ ID NO: 421792 - DNA, 201 bp, Homo sapiens
attaggggaaaatttgtgctcaggcacaggatatgaagacatgggtagaagatagccaagaagagaagccacagaagaaacgaaatctgctgacctgacaytgtgatcttggacttttaacctcccaaactatgagaaaataaaatacgttatttaagaaactcagtctatggtactttgttatggcagcctaagcaaact

SEQ ID NO: 421793 - DNA, 201 bp, Homo sapiens
taaagaatcttttcttgaaaatcgatgaataatcaatctgattaaatgccttgaaagtctctgatatatactacatactcatgttttgtgagtgcctgctrtaaaccaggtacaatgctaggcacagggtgtacaaggatgaataaaacaaggactttacccctttaagacctcacagttcagaataatttcaccatgcac

SEQ ID NO: 421794 - DNA, 201 bp, Homo sapiens
tgctaattaatcttcattcatcagccttttctcttacattccaaccctttcatcattttcattgctcttgtctgggctttccctaaatttttcagatttcyccaaagatataaagaaccaaactaaacctggtgctgtgttgatatctttacctctgcaggagtagatgggcatcttatcccccacatgttattattatta

SEQ ID NO: 421795 - DNA, 201 bp, Homo sapiens
gtgtgtgtctgtctctgtctaaatgtcaccttttcacacctgtaatccaagcactttgggaggctgaggcgggtggatcacctgaggtcaggagttcaagmccagcctggccaacatggcaaaactccgtctctactaaaagtacaaaaattagccaggcatggtggtgcatgcctgtaatcccagctacttgggaggctg

SEQ ID NO: 421796 - DNA, 201 bp, Homo sapiens
taaatattaaaatgtttaaatttctaaagtgatgttaactgggagaagctgatatcttttcagagatatatattgaagagagattgattaatggttacaartatgcacttagatagaagaaataagacctggtgttcgatagattgtagggtaactatagttaacagtaatcaattgtacatttcaaaatagctagaaggg

SEQ ID NO: 421797 - DNA, 201 bp, Homo sapiens
tgaggcaggagaattgcttgaacctggtaggcggaggttgcagtgagctgggatgatgccattgtactccagcctgggaaaaagagtgtaactccgtcccaaaaaaaaaaaaaaaaaaaaaagtcatctttttataaggacacaagtcatattgaattggagcccaccctattaattttatttttaacttgattgcctcta

SEQ ID NO: 421798 - DNA, 201 bp, Homo sapiens
cttataacaattttcaaagcattttgtaattttaaaaattaatttgtacaaagtacttggcacatagattattggctaagtttccctagaaacctatagcagtgtaacttttatgaatcacctcagtaaaagatctttctgaaaaagtcttttgttttgctttgtttttgacttgggaaggtagggaagaagtgagagagg

SEQ ID NO: 421799 - DNA, 201 bp, Homo sapiens
gttaccagcaattggcaagctattacccaaatctcctgccaagtgaaagctaggacttttagaattaccttgttcctttcacctggttgccacatttatctttttttttttttttttttaaaagagagtgttttgtgtgcaagtgtacttctttataggcttcatgctaaaatgtccctggcatgggtatatttgggtctt

SEQ ID NO: 421800 - DNA, 201 bp, Homo sapiens
ttaccagcaattggcaagctattacccaaatctcctgccaagtgaaagctaggacttttagaattaccttgttcctttcacctggttgccacatttatctttttttttttttttttttaaaagagagtgttttgtgtgcaagtgtacttctttataggcttcatgctaaaatgtccctggcatgggtatatttgggtcttt

SEQ ID NO: 421801 - DNA, 201 bp, Homo sapiens
taccagcaattggcaagctattacccaaatctcctgccaagtgaaagctaggacttttagaattaccttgttcctttcacctggttgccacatttatctttttttttttttttttttaaaagagagtgttttgtgtgcaagtgtacttctttataggcttcatgctaaaatgtccctggcatgggtatatttgggtcttta

SEQ ID NO: 421802 - DNA, 201 bp, Homo sapiens
cttggttgcatttaaaatatggggcctcattctcctctgccttccatctgattgcaacttgggcctaggtgatcttggtcccatgttttttttgttttgttttgtgtgtgtgtgtgtgtgtgtgtgtgtgtgtgtgtgtgtgtgtgttttctcatcaataaacttttcttcaagccttctgctgaaatttggattaactca

SEQ ID NO: 421803 - DNA, 201 bp, Homo sapiens
ttggttgcatttaaaatatggggcctcattctcctctgccttccatctgattgcaacttgggcctaggtgatcttggtcccatgttttttttgttttgttttgtgtgtgtgtgtgtgtgtgtgtgtgtgtgtgtgtgtgtgtgtgttttctcatcaataaacttttcttcaagccttctgctgaaatttggattaactcaa

SEQ ID NO: 421804 - DNA, 201 bp, Homo sapiens
tggttgcatttaaaatatggggcctcattctcctctgccttccatctgattgcaacttgggcctaggtgatcttggtcccatgttttttttgttttgttttgtgtgtgtgtgtgtgtgtgtgtgtgtgtgtgtgtgtgtgtgtgttttctcatcaataaacttttcttcaagccttctgctgaaatttggattaactcaat

SEQ ID NO: 421805 - DNA, 201 bp, Homo sapiens
tttaaaatatggggcctcattctcctctgccttccatctgattgcaacttgggcctaggtgatcttggtcccatgttttttttgttttgttttgtgtgtgtgtgtgtgtgtgtgtgtgtgtgtgtgtgtgtgtgtgttttctcatcaataaacttttcttcaagccttctgctgaaatttggattaactcaattttcatag

SEQ ID NO: 421806 - DNA, 201 bp, Homo sapiens
ttaaaatatggggcctcattctcctctgccttccatctgattgcaacttgggcctaggtgatcttggtcccatgttttttttgttttgttttgtgtgtgtgtgtgtgtgtgtgtgtgtgtgtgtgtgtgtgtgtgttttctcatcaataaacttttcttcaagccttctgctgaaatttggattaactcaattttcataga

SEQ ID NO: 421807 - DNA, 201 bp, Homo sapiens
agctattccctgatgtcagttgctgcacaattttgttaaagagtggaagaaggaagcctttaggtttggtaagtaggggagatatcagggaaagatatttrtctttataagtcatgttattgctgggagttttcatcgatgctatttggatgttggccatcactttttatctttcatttgtgaaattttgtggatcaaaat

SEQ ID NO: 421808 - DNA, 201 bp, Homo sapiens
gatccccagtcaggagagaggctcaggaaagaagagctattccctgatgtcagttgctgcacaattttgttaaagagtggaagaaggaagcctttaggttkggtaagtaggggagatatcagggaaagatatttgtctttataagtcatgttattgctgggagttttcatcgatgctatttggatgttggccatcactttt

SEQ ID NO: 421809 - DNA, 201 bp, Homo sapiens
tgaggcaggagaatcacctgaatccaggaagcggaggttgcagtgaggcgagatcgctccattgcactccagcctgggcgacagggtgagactccatctcaaaaaaaaaaaaaagaaagaaagaaaaaaaaccttccacgttaacatcaatcaatgataattaatttatatgacactcaagttagtgtattttatacattg

SEQ ID NO: 421810 - DNA, 201 bp, Homo sapiens
caatgttaagggccctcaagatgtgattttggcattccttggtcaatcttaaaagtgagatttgattgataaaagaggtaatgtggatttacattcttagytgtgactatgttgactatcattagctataagaggataggtatgcagaaatgctatcactggacatcagtggtgttagcatgattaatattgagtcttgga

SEQ ID NO: 421811 - DNA, 201 bp, Homo sapiens
tgttgttttgattgtggtgatggtttcatgaaaatcaaaacttaccaattgtttgttttagacatggacaggttattgtattccaaatacctcaatttttwaaaaaagtaataaagaatgcattgtggttgtcacaatgttaagggccctcaagatgtgattttggcattccttggtcaatcttaaaagtgagatttgatt

SEQ ID NO: 421812 - DNA, 201 bp, Homo sapiens
attggttagaactaataagtaagtttaacaatgttgtaggatacaagattaacatacaaaaatcaacagtaacttatatactaaaattaaacaattgacaytaaaataaaaataatgcattttataatatgtcaaaaacatgaaatgtttagggataaatttgacaaaagatatgtaagctttgtataccgaaactataaa

SEQ ID NO: 421813 - DNA, 201 bp, Homo sapiens
catggaatactatgcagccataaaaaggatgagttcctgtcttttgcagagataggatgaagctggaaaccatcattctcagcaaactaacacagaacagraaaccagaccctgcacgttctcactcataagtgggaattgaacaatgagaacacatggacacagggagggtaacatcacacaccagggcctgtcaaggag

SEQ ID NO: 421814 - DNA, 201 bp, Homo sapiens
gaaatcttggcctatgatatactaggaacctagaaatgttctgaatttaataaggaaaataaaagagccaatcctctattcctgagggctaacttatttgragtgaagattcaccaggattgcctttgacaaaatgtgagcctgaaggctcttgccacatattatatgagccttattttggagtggcttcttttatttggc

SEQ ID NO: 421815 - DNA, 201 bp, Homo sapiens
aagctaaatgagcagtgtgtgggtgtatattttttctctactcttttgaatgttctgaaatgctatatttaataacaatcatatgaacaacttttactttyagcagtactgtaagtggctatcagttccccataccctgaccaacactgactgccccacttctgatggctctttggtaacctggtttctgcagctttattt

SEQ ID NO: 421816 - DNA, 201 bp, Homo sapiens
agcacctaaaattaagcattgtatattctagtggggatgttgcacttaaaacggtctaacatatcacacatgatgcatgttttccttgattattatcaagygctaagcagaaaaataatgcaattgaaggatcaataaattgtacaggtggtggtgggttccaagaaggcctcactagggagagacaacctctggataaag

SEQ ID NO: 421817 - DNA, 201 bp, Homo sapiens
aaggaaaggaaaagaaagaagggctagctatgtagatgcaacagcagctcagtgtctatctctgattcctttccaaaggttaaattagatgaggaagacaygttttctgggcatcagctttacctccgagtacatgggggatctgttccagtatctttgttcttttgtggttcaaagctttgaataatgtatgttttgatg

SEQ ID NO: 421818 - DNA, 201 bp, Homo sapiens
gggattacaggcgtgtaccaccacacccagctaatttttatattttcagaagagatggagttttgccatgtttgccaggctggtcttgaactcctggcctsaggtgatccacctgcctcggcctaccaaagtgctgggattatagacatcagccactgcgcttggctacctcttgctgattttagacacctcatctcatca

SEQ ID NO: 421819 - DNA, 201 bp, Homo sapiens
gtgacaccccttctctactaaaaatacaaaaccattagctaggcatggtggtatgtgcctgtagtcccagctactcaggaagctgaggtggaaggatcgcttgagcctgggaatttgaggctgcagtgagtgccactgcactccagcctatgctggaaagaaagaaagaaaggaaagaagttaaaagtgagaaaataaact

SEQ ID NO: 421820 - DNA, 201 bp, Homo sapiens
taaaatatggggcctcattctcctctgccttccatctgattgcaacttgggcctaggtgatcttggtcccatgttttttttgttttgttttgtgtgtgtgtgtgtgtgtgtgtgtgtgtgtgtgtgtgtgtgtgttttctcatcaataaacttttcttcaagccttctgctgaaatttggattaactcaattttcatagac

SEQ ID NO: 421821 - DNA, 201 bp, Homo sapiens
tactcaggaagctgaggtggaaggatcgcttgagcctgggaatttgaggctgcagtgagtgccactgcactccagcctatgctggaaagaaagaaagaaargaaagaagttaaaagtgagaaaataaactcatcctttctaccaccactcagaaataaccattcttattattttgggtcaacaaccaagaggcagttttgt

SEQ ID NO: 421822 - DNA, 201 bp, Homo sapiens
aaaatatggggcctcattctcctctgccttccatctgattgcaacttgggcctaggtgatcttggtcccatgttttttttgttttgttttgtgtgtgtgtgtgtgtgtgtgtgtgtgtgtgtgtgtgtgtgtgttttctcatcaataaacttttcttcaagccttctgctgaaatttggattaactcaattttcatagacc

SEQ ID NO: 421823 - DNA, 201 bp, Homo sapiens
acaatgaaggaacctgggccttgggcccttggccacactgggagcagacctaaactctagggagcattgatgggaaaattgtagacataaattctagaatctccctcccttccttccttccttccttccttcctttttcgttgtttctttctttctccctttctctctctctttctctctttctttctccttccttccttc

SEQ ID NO: 421824 - DNA, 201 bp, Homo sapiens
ctgttctacaaggatgcccttttttgcatgccttctttttcctccttgctttgcatccctatgacccagattcagtgtcacttttttttttttttgagatrgagtctcgctctgtcacccaggccagagtgcagtggcacaatctgagatcactgcaatctccacctcccagtttcaagctattctcctgcctcaccctcc

SEQ ID NO: 421825 - DNA, 201 bp, Homo sapiens
gaaggaacctgggccttgggcccttggccacactgggagcagacctaaactctagggagcattgatgggaaaattgtagacataaattctagaatctccctcccttccttccttccttccttccttcctttttcgttgtttctttctttctccctttctctctctctttctctctttctttctccttccttccttccttct

SEQ ID NO: 421826 - DNA, 201 bp, Homo sapiens
gaggcaggagaattgcttgaacctggtaggcggaggttgcagtgagctgggatgatgccattgtactccagcctgggaaaaagagtgtaactccgtcccaaaaaaaaaaaaaaaaaaaaaagtcatctttttataaggacacaagtcatattgaattggagcccaccctattaattttatttttaacttgattgcctctac

SEQ ID NO: 421827 - DNA, 201 bp, Homo sapiens
ttttatgcctggataatgtttgtatctttagtagagacgggatttcaccatgttggccaggctggtctggaactcctgacctcaggtgatctgcccacctyagactcccaaagtgctgggattacaggtgtgagccaccgtgtccagctccctgtttctttgttattgtgagatgcagggcaggataggatttggttcagg

SEQ ID NO: 421828 - DNA, 201 bp, Homo sapiens
aagtttatattatggagtgttacaaaacaagtatgggggccgggtgcagtggttcgcacctgtaatccaaacactttgggaggacaaggtgggaggatcaygaggtcaggagatggagaccatcctggctaacatggtgaaaccccgtctctatgaaaaatacaaaatattagctggacatggtggtgggtgcctgtggtc

SEQ ID NO: 421829 - DNA, 201 bp, Homo sapiens
tctatagtttgaacagtagtttatccattgattgtgagaacttaaagtccagttttagtattgttaccactttatattctgatcttgtccttttttgtcayctttgagtgattttgttcttagcttcttgacattcttataaaagtgtgtaagtgttttaaaaatccataaactttattaatattgaggtagattattctg

SEQ ID NO: 421830 - DNA, 201 bp, Homo sapiens
ttattgtgagatgcagggcaggataggatttggttcagggaagaaagaaaatgaatggaggaggccgggcgcagtggctcatgcctgtaatcccagcactrtgggaggccgaggcgggcagatcacaaagtcaggagatccacaccatcctggctaacacggtgaaaccctgtctctactaaaaatagaaaaaattagcca

SEQ ID NO: 421831 - DNA, 201 bp, Homo sapiens
gagttcaagataaagattccagcagtgttcagtttctggtgagggctctccttctggctgctagatggctgctttgtcctcatgtggcctttccactgatyacatgcgaagaccagcatgagagatctgaggtgtctcttttcctaaggacactaatcctatcagaccaagaccccactcttatgacctcatgtaacctta

SEQ ID NO: 421832 - DNA, 201 bp, Homo sapiens
tgtgagaacttaaagtccagttttagtattgttaccactttatattctgatcttgtccttttttgtcacctttgagtgattttgttcttagcttcttgacrttcttataaaagtgtgtaagtgttttaaaaatccataaactttattaatattgaggtagattattctgggaaagcatatggaactttaacaataaaatta

SEQ ID NO: 421833 - DNA, 201 bp, Homo sapiens
aactgacagacggacagacaacagacaaactctgataggcattactgaaactcagctatgctccttgcatttaaattccctaatatacccttgtaataatratacgtaattttgctgtcaacgtttgaaatagatttccctttatttaagaaaaatatcttaacagactctaactggatccccagtcaggagagaggctca

SEQ ID NO: 421834 - DNA, 201 bp, Homo sapiens
ccagctgtgtaccacatgcatgtatgtagagaccccaggcccacactctgctctgtccctcatcaacagccatccttctgccaaccttctgccctgggtaktatgaggcacgggctgccctagagataatggatcatgtgaagagacccacttggccctgaaacagagtaggtgggcatttgagcagataatttcagaatt

SEQ ID NO: 421835 - DNA, 201 bp, Homo sapiens
agaaaagggagcagcaaagaaaggaaattcgcaaaatgatgttgcttaaacctcaaaaagttcatgccttttccctgaactgatgatgataacttttcaamttttagggcacttataacaattttcaaagcattttgtaattttaaaaattaatttgtacaaagtacttggcacatagattattggctaagtttccctaga

SEQ ID NO: 421836 - DNA, 201 bp, Homo sapiens
aaagttcatgccttttccctgaactgatgatgataacttttcaacttttagggcacttataacaattttcaaagcattttgtaattttaaaaattaatttrtacaaagtacttggcacatagattattggctaagtttccctagaaacctatagcagtgtaacttttatgaatcacctcagtaaaagatctttctgaaaaa

SEQ ID NO: 421837 - DNA, 201 bp, Homo sapiens
atttaaaccaaagcttatctgaagtgataagactggttatttgtgtggaatttaaaatttaataaagaagtgagagaagttggcatttgcagtttttattrgccaacagtgtcaaccatgtattgttggcatcaagcttatattctcttatttagtatattaagtcaattgattaaaagcagaaagcctggctaattagac

SEQ ID NO: 421838 - DNA, 201 bp, Homo sapiens
tgaaggaacctgggccttgggcccttggccacactgggagcagacctaaactctagggagcattgatgggaaaattgtagacataaattctagaatctccstcccttccttccttccttccttccttcctttttcgttgtttctttctttctccctttctctctctctttctctctttctttctccttccttccttccttc

SEQ ID NO: 421839 - DNA, 201 bp, Homo sapiens
tttgcagtttttattggccaacagtgtcaaccatgtattgttggcatcaagcttatattctcttatttagtatattaagtcaattgattaaaagcagaaarcctggctaattagactgccaagatcttaatgttaactgtcagattctaaagctgtataagcctgaaaacacctttatagattacttcttctgggtgccaa

SEQ ID NO: 421840 - DNA, 201 bp, Homo sapiens
tattaagtcaattgattaaaagcagaaagcctggctaattagactgccaagatcttaatgttaactgtcagattctaaagctgtataagcctgaaaacacmtttatagattacttcttctgggtgccaaatggttctaaatgctgaaaaatgtcataattgtccccccttcttctgagaaaggtaatagatactattggat

SEQ ID NO: 421841 - DNA, 201 bp, Homo sapiens
gttcttagatggatatttgctggtttaaatgttatctatagtgttctataaaaattgccaacaattctattaagtgtattattctattttagacaattctkcttatctttaacctgttgaacaagatctgcatgataaacacctgttttctcagaattttaccctgtgaaattcaccagtacacccacaagaaggatggaa

SEQ ID NO: 421842 - DNA, 201 bp, Homo sapiens
gtcaggagagaggctcaggaaagaagagctattccctgatgtcagttgctgcacaattttgttaaagagtggaagaaggaagcctttaggtttggtaagtrggggagatatcagggaaagatatttgtctttataagtcatgttattgctgggagttttcatcgatgctatttggatgttggccatcactttttatctttc

SEQ ID NO: 421843 - DNA, 201 bp, Homo sapiens
acactgctttagctgtgtcccagagattctggtacattctgtctttgttctcattggtttcaaagagcttatttatttctacctcaatttcattatttackcagtagtcattcagcagcagattgttcagtttccatatagttgtgcagttttgagtgagtttcttaatcctgagttctaatttgattgcaccgtggtctg

SEQ ID NO: 421844 - DNA, 201 bp, Homo sapiens
aaggaacctgggccttgggcccttggccacactgggagcagacctaaactctagggagcattgatgggaaaattgtagacataaattctagaatctccctyccttccttccttccttccttccttcctttttcgttgtttctttctttctccctttctctctctctttctctctttctttctccttccttccttccttctt

SEQ ID NO: 421845 - DNA, 201 bp, Homo sapiens
tattcatgattttagcacagatgttaataaatgtcaccacagtatatttgctttctttgttaacctgaatcaatgaagctttcgtgtgtgtgtgtgtgtcgtgtgtgtgtgtgtgtatgtgtgtatataaacacacgagtagagcctgaacagcaacacttttaaagagataagcatatttttctccctttgtacttgaga

SEQ ID NO: 421846 - DNA, 201 bp, Homo sapiens
attcatgattttagcacagatgttaataaatgtcaccacagtatatttgctttctttgttaacctgaatcaatgaagctttcgtgtgtgtgtgtgtgtcgtgtgtgtgtgtgtgtatgtgtgtatataaacacacgagtagagcctgaacagcaacacttttaaagagataagcatatttttctccctttgtacttgagaa

SEQ ID NO: 421847 - DNA, 201 bp, Homo sapiens
gtctcttaggcaaggaaacagggtaaaatgtatataatatatatataaatatatataaatatatgagaactatatagattatatatattatatataaaaawatatatatttatatattatatattatatatataaattatatatatataatatatatataaatatatgagagatgataaaatcagtgaaggcctctaggca

SEQ ID NO: 421848 - DNA, 201 bp, Homo sapiens
taggcaaggaaacagggtaaaatgtatataatatatatataaatatatataaatatatgagaactatatagattatatatattatatataaaaatatatatatttatatattatatattatatatataaattatatatatataatatatatataaatatatgagagatgataaaatcagtgaaggcctctaggcaagttag

SEQ ID NO: 421849 - DNA, 201 bp, Homo sapiens
atatatataaatatatataaatatatgagaactatatagattatatatattatatataaaaatatatatatttatatattatatattatatatataaattwtatatatataatatatatataaatatatgagagatgataaaatcagtgaaggcctctaggcaagttagactgaccttacttttctaggaaaaaagttaaa

SEQ ID NO: 421850 - DNA, 201 bp, Homo sapiens
tccagaagacatggcaagaatcagctctcagtcagcttttcaactccttgatgggggggttaagagtagagagaactatccatcataactaaatctttactaataatttaaattctacagattccaggactatggcatcttgactcagtaaatctttcttgcctttcctttttttaaaacaagggaaaaatatacaaacag

SEQ ID NO: 421851 - DNA, 201 bp, Homo sapiens
ccagaagacatggcaagaatcagctctcagtcagcttttcaactccttgatgggggggttaagagtagagagaactatccatcataactaaatctttactaataatttaaattctacagattccaggactatggcatcttgactcagtaaatctttcttgcctttcctttttttaaaacaagggaaaaatatacaaacaga

SEQ ID NO: 421852 - DNA, 201 bp, Homo sapiens
cagaagacatggcaagaatcagctctcagtcagcttttcaactccttgatgggggggttaagagtagagagaactatccatcataactaaatctttactaataatttaaattctacagattccaggactatggcatcttgactcagtaaatctttcttgcctttcctttttttaaaacaagggaaaaatatacaaacagat

SEQ ID NO: 421853 - DNA, 201 bp, Homo sapiens
aaaagccacttcctttttcttattttttttaatttttatacttaagttctgggatacacgtacagaacgtgcaggtttgttacataggtatacatgtgccrtggtggtttgctgcacccatcaacccgtcatctacattaggtatttttcctaatgctatccctccccttgcccccacccccaacaggctccagtgtatga

SEQ ID NO: 421854 - DNA, 201 bp, Homo sapiens
taaggtgtgttgctattccataatacttctcaagtgttttgtgtttcaactttcgggtttctttaagaaaacaaaaacaaaaacaaagaaaactccatcargttagaatagaatgtgagaaatttggtgtataagataaatctgtctttatgtttctccaggcaaataatgttttatactagagcaggcttcctgcctttg

SEQ ID NO: 421855 - DNA, 201 bp, Homo sapiens
aagagcacttttcagcttcttctcattcctaagccaaaaaaacaaaacaggtttttcaaggagtaatatcaccaccttatggccttttacaataatgctgsgaaaaattaatattccagttgtatttttgcaactataaacatcaattctttactcttagatcaaaggtcacatcttgttcatatataagatattttctat

SEQ ID NO: 421856 - DNA, 201 bp, Homo sapiens
tataaacatcaattctttactcttagatcaaaggtcacatcttgttcatatataagatattttctatcttttctttttgaagtaataataagcccaatatyaggtatcacaaatgtttgcagagttcctgcttagtgccaaaagatgtatctcacatctctacttcattagatacaaagatgaataaggcacaagtattag

SEQ ID NO: 421857 - DNA, 201 bp, Homo sapiens
gacagagtgagacacgttcaaacaaaaaaaaataaaagaaaagaaaaaagaattggaaatatggaaggaaatagaggaaatatggaaggaaatagaggaakatagagacagaaagaaaaaaaagaaattgagagacagaaaaacaagagcacttttcagcttcttctcattcctaagccaaaaaaacaaaacaggtttttc

SEQ ID NO: 421858 - DNA, 201 bp, Homo sapiens
aggcacttagttgtcaggatgcttattccaggaagcttaattacaaaccactgataggaatttattttagtaactatagaaaatgtttatttaggtaagarggaattttccattcctgaagataagctcttgcttaactagcattcaattacttttcaaatggtctcagaagccaaagtgtgagtgtggtatgtgatagat

SEQ ID NO: 421859 - DNA, 201 bp, Homo sapiens
taaaaacttacagtaaaaagaaaaaaaaaaagaattgttagccaggcatgatggcacgtgcctgtaatcccagctacaggggagtctgaggcaggagaatygcttgaaccccagaggtggaagttgcagtgagccgagatcgtgccactgcactccagcctgggtgacagagtgagacacgttcaaacaaaaaaaaataaa

SEQ ID NO: 421860 - DNA, 201 bp, Homo sapiens
cacctcaaaaagaaccttataccctttagctctcttatgccctgagccccaagcaacaactaacctactttctctttatatatatttcttatgctgggtgmttgtttacttattttcctttttttttttttttttttgaaacagggtcttgctctgttgcccaggctggaatgcagtggcatgatcatagctcactgcaat

SEQ ID NO: 421861 - DNA, 201 bp, Homo sapiens
agcatggaatgttcttccatttgtttgtatcctcttttatttcgttgagcagtggtttgtagttctccttgaagaggtccttcacgtcccttgtaagttgkattcctaggtattttattctctttgaagcaattgtgaatgggagttcactcatgatttggctgtttgtctgttattggtgtacaagaatgcttgtgattt

SEQ ID NO: 421862 - DNA, 201 bp, Homo sapiens
tgaggtgttcttaatcactcatttctactcccactcagcatgcacttatgaatggacagaggtcctatcctattgaatcagagacagagatcagagtgaasaaagaacctatatggcacacgaggaaggaattcttagactggagaagaaaagcccagcaaagaaatcgttatcttttgatactgaaagagctgtcacaga

SEQ ID NO: 421863 - DNA, 201 bp, Homo sapiens
tttattaattagggaatcctttccccattgcttgtttttgtcaggtttgtcaaagatcagatggttgtagatatgtggtgttatttctgaggcctctgttmtgttccgttggtctatatatctgttttggtaccagtaccatgctgttttggttactgtagccttgtactatagtttgaagtcaggtagcatgatgcctcc

SEQ ID NO: 421864 - DNA, 201 bp, Homo sapiens
agatgaaagatgcctaatcaatgggcatcctcatgaggaggagggaacagagtagaacaaaagtgtccagggtggaggcaaatctgtggatgagagcccayctagagcgccttgctggcgctttatctggggcctgaaggcactgattctggcagcctgcagtgtgtacctgtgggcagggcaccatttaagtgcatgata

SEQ ID NO: 421865 - DNA, 201 bp, Homo sapiens
cattctccttgaagagatccttctcatcccttgtaagttgtattcctaggtattttattcactttgtagcaattgtgaatgggagttcactcatgatttgrctctctgtctattattagcatataggaatgcttgtgatttttacacattgattttgtatcctgagactttgctgaagttgcttatcagcttaaggagttt

SEQ ID NO: 421866 - DNA, 201 bp, Homo sapiens
actaaagttattaatgcggaaagatgttccatgtacaatggtgagaatatattaaggaatggtaaaaactgcagttacttttgcacctaaataaaactacrgataaatatactgctttggggtgaaaataatatagaacaaaggcaatgcaacaaagacaccaacagttattatctctggatcatgacataatcagcactt

SEQ ID NO: 421867 - DNA, 201 bp, Homo sapiens
cacgcacaccctgtgtgtgtttgcatgtgcgtgtataccccctataaccgaatcaaccaaacctaattactgtaccaaagtatgacattggctatgtgatwgtgtcaacactggtcaaaggaaaaggcagtttggtgagatttaacctaaaaggatgaaagaaaatagacattctgtagggcacttttcccatcgtaggct

SEQ ID NO: 421868 - DNA, 201 bp, Homo sapiens
gattttggtggcctttggatggggtttttttttaatatatactttaagttttagggtacatgtgtacaacgtgcaggttagttacatatgtatacatgtgycatgttggtgtgctgcacccattaactcatcatttaacatcaggtatatctcctaatgctatgcttccccgctccccccaccctacaacaggccccggtg

SEQ ID NO: 421869 - DNA, 201 bp, Homo sapiens
tcttatgctgggtgattgtttacttattttcctttttttttttttttttttgaaacagggtcttgctctgttgcccaggctggaatgcagtggcatgatcrtagctcactgcaatctcgaactcctggattcaagggatacccctgcctcagcctcttgagtagctgggactataggcatgcaccgccatgcccagctact

SEQ ID NO: 421870 - DNA, 201 bp, Homo sapiens
tgtgccatgttggtgtgctgcacccattaactcatcatttaacatcaggtatatctcctaatgctatgcttccccgctccccccaccctacaacaggcccyggtgtgtgatgttccctttcctgtgtccatgttttctcattgttcaattcccacctatgagtgagaacatgcgatgtttggtttttttgtccttgcaata

SEQ ID NO: 421871 - DNA, 201 bp, Homo sapiens
ccaccctacaacaggccccggtgtgtgatgttccctttcctgtgtccatgttttctcattgttcaattcccacctatgagtgagaacatgcgatgtttggtttttttgtccttgcaatagtttgctgagaatgatggtttccagcctcatccatgtccctacaagggacatgaactcatcattttttatggctgcatagta

SEQ ID NO: 421872 - DNA, 201 bp, Homo sapiens
ggttccatatgaactttaagtagttttttccaattctgtgaagaaagtcattggtagcttgatggggatggcattgaatctataaattaccttgggcagtrtggccattttcacaatattgattcttcctacccatgagcatggaatgttcttccatttgtttgtatcctcttttatttcgttgagcagtggtttgtagtt

SEQ ID NO: 421873 - DNA, 201 bp, Homo sapiens
cctcctttttgttgatgttcatgctatagctttctgtttgttagtttttcttctaacagtcaggcccctcttctgcaggtctgctggagtttgctggaggygtactccagaccctgtttgcctgagtgtcaccagtggaggctgcagaacagcaaagaatgctgcctgctccttactttggaagatttgttccagagggtc

SEQ ID NO: 421874 - DNA, 201 bp, Homo sapiens
gcaggtctgctggagtttgctggaggcgtactccagaccctgtttgcctgagtgtcaccagtggaggctgcagaacagcaaagaatgctgcctgctccttmctttggaagatttgttccagagggtcacctaccagatgccagccagagctctcctgtatgaggtgtctccctgtcaggaggcacggggtcagggacccac

SEQ ID NO: 421875 - DNA, 201 bp, Homo sapiens
ctcctggtctgcaggttgcaaagacagtgggcaaagcgtagtatctaggctggatagctctgtccctcatggcacagtccctcacggctttccttggctargggagggagttccctgaccccttctacttcctgggtgaggcgatgccccaccctacttttgctcaccctccgtgggctgcacccactatgtaaccagtcc

SEQ ID NO: 421876 - DNA, 201 bp, Homo sapiens
ttctgtgtctagtaccctggtaagtgctggagatattaagttaaacaccattcgtaatgttaaatcatccatgtggccaattagttgtcacgttactaacrtatatacacatgaattaaagcacatgtgatgatgctctctcattcatctgtgcacatcctaacaattcacaggccagaagggctctttattctctcttta

SEQ ID NO: 421877 - DNA, 201 bp, Homo sapiens
cattgactcaagatcctgtttttttgtacaatacaccgtggatagagagattaatgatacccaacattttttagtaataggaacgctttacatatatactstcatttcatttcattccaataagccagaggagggcattatgattagctgcattttataaacaagggtactgaagctcagagagttttagaaatgggccat

SEQ ID NO: 421878 - DNA, 201 bp, Homo sapiens
tgcatgttatctgcttcacattatgagcagtgcttaaataaatgttcttacaaaggggaaaaattatcatgatttttcttccccggcttgaagaaactgcrtatcaatttgtttgcaaatctcaataatttgttctaaaactaacattgacctgtattggtatttacacagcttacgatcactaagcacatttaaatatag

SEQ ID NO: 421879 - DNA, 201 bp, Homo sapiens
tctctacagcccagcaattagatggagcctcggatgaggtggtttgtaatctttaatatcggtagcatacttctgggggagacttttctgcaagcgaaacmggcataaacacaagagaatctggttttcagatcccttttatgttgactcaacagatatttatgatagtctttgttgttccaaattcacatgctgaggcct

SEQ ID NO: 421880 - DNA, 201 bp, Homo sapiens
agtctcttctctctacagcccagcaattagatggagcctcggatgaggtggtttgtaatctttaatatcggtagcatacttctgggggagacttttctgcmagcgaaacaggcataaacacaagagaatctggttttcagatcccttttatgttgactcaacagatatttatgatagtctttgttgttccaaattcacatg

SEQ ID NO: 421881 - DNA, 201 bp, Homo sapiens
atgaaggaatccagcttgtggtcagttttgtaaggtctcacttaaaagcaaatttggaggagagagggcttttctaagtctcttctctctacagcccagcmattagatggagcctcggatgaggtggtttgtaatctttaatatcggtagcatacttctgggggagacttttctgcaagcgaaacaggcataaacacaaga

SEQ ID NO: 421882 - DNA, 201 bp, Homo sapiens
tgcagccccacggtgttagatttgcaaatcactttaggaaaggaggaaaggggttatgttttataatatgagagttgagttttaagagactctctggtttkattggagagtgccagaagaggcactgaaggcaacaccccagacctgggaaaggttaaagattctggttttcattcactgcaatgatcctaaacatgactc

SEQ ID NO: 421883 - DNA, 201 bp, Homo sapiens
cagcagtgggctgcaagaatgacctagtggaatgagcagaagctacacagacctgagagaagtcttaattctgtcatttaacagctgtatgatctcatgcmaattgtgtaagttatctgattctatttttttttttttggtaaaaatgtgatgttttggtttgttttcacactgctataaagaaatacctgagaatggcag

SEQ ID NO: 421884 - DNA, 201 bp, Homo sapiens
ccaggagatacaggagtttctgaggctgaacaggaatcagcagtgggctgcaagaatgacctagtggaatgagcagaagctacacagacctgagagaagtyttaattctgtcatttaacagctgtatgatctcatgcaaattgtgtaagttatctgattctatttttttttttttggtaaaaatgtgatgttttggtttgt

SEQ ID NO: 421885 - DNA, 201 bp, Homo sapiens
gtaacaatgcagcatgagttgatggctcaaacttcattctattagtacccctgggaatgaaccacatgggaagtgaagacaccaggagatacaggagtttytgaggctgaacaggaatcagcagtgggctgcaagaatgacctagtggaatgagcagaagctacacagacctgagagaagtcttaattctgtcatttaaca

SEQ ID NO: 421886 - DNA, 201 bp, Homo sapiens
ggctagtggtaacaatgcagcatgagttgatggctcaaacttcattctattagtacccctgggaatgaaccacatgggaagtgaagacaccaggagatacmggagtttctgaggctgaacaggaatcagcagtgggctgcaagaatgacctagtggaatgagcagaagctacacagacctgagagaagtcttaattctgtc

SEQ ID NO: 421887 - DNA, 201 bp, Homo sapiens
cagtactcccacgtcagcctccctattagctgggactacagacatgtgccaccatgcctggctaatttttaaaatttttttctagggacagggttttgctrtgtttcccaagctggtctccagctcttggactcaagcgatccacctgcctcagtctttcaaaatgctgggattacaggcgtgagccactgtgcttggcct

SEQ ID NO: 421888 - DNA, 201 bp, Homo sapiens
ggacccaaggccagattcattgactcaagatcctgtttttttgtacaatacaccgtggatagagagattaatgatacccaacattttttagtaataggaaygctttacatatatactctcatttcatttcattccaataagccagaggagggcattatgattagctgcattttataaacaagggtactgaagctcagagag

SEQ ID NO: 421889 - DNA, 201 bp, Homo sapiens
tcacagtttagtccctggattgcagtggaagtaaatatattaatacatgtcactatcctcctactagacctgctaaaggccaggcatggtggcttacaccygtgatctcagctctttgggaggtggaggcaggaggatccattgagcccaggagtttgagaccaacctgggcaatatagggagaccctgtctctacaaaaa

SEQ ID NO: 421890 - DNA, 201 bp, Homo sapiens
tgaggcgggagggtcacttgagctcaggatgtcgaggctgctgtgagcgttgatcgcaccactgcactccatcctggatgagagagtgagaccctgtctcmaaaagaaagaaaaagaaaagaaagaaaaaaaaaaaacctgctgaagctggcaggtatcaaagtgaagcctgctattaaagagatacacaacattctccct

SEQ ID NO: 421891 - DNA, 201 bp, Homo sapiens
catttctctaatgaggtctcctattgaagccctaaaataaatgacttcctttttaagtgcaaaacttaagaaatatatattttatatatatatatatatatttttttttttttttttttttttttttttgagatggagtctctctctgttgcccaggctggagtgcagtggcttgatcttggctcactacaagctctgcct

SEQ ID NO: 421892 - DNA, 201 bp, Homo sapiens
tttatttagagtccatctcagacgtaggaggacatatccaccaagctcccaagaaggaaaatactttaatgatattaatggatattactgggggggggggraaacatacagtttatattattttcttagaagcacactaatttttaggactagatggatcagttttatagcagtcaggacatctgattgtggcagctgtca

SEQ ID NO: 421893 - DNA, 201 bp, Homo sapiens
gtaactgaaaatgatacacgtgtgtgccatatgtgtgtatgtatgtgtacatatgtgtgtgtatatgtgtgttcatatatatgtgtatgtatatgtgtgcktgtgtgtgtgtgtgtgtgtgtgtgtgtgtgtacagtggtttcaagcacatttttcagagttaggctgacttagaccaaaattcttgctccacttttcact

SEQ ID NO: 421894 - DNA, 201 bp, Homo sapiens
gaatgtttcattttccccaaactgaactacagtaattgtacaaagtaaggtaacacctgtatatttgaggacaatgatggtaacagcacaaatgaaatttccctggtcttacttagaagcgcttttcttttgctgaatctttgtgaggttcccctgtgtcctgatgtgagcaagaccacctactgctgtgcgccaagacca

SEQ ID NO: 421895 - DNA, 201 bp, Homo sapiens
aatgtttcattttccccaaactgaactacagtaattgtacaaagtaaggtaacacctgtatatttgaggacaatgatggtaacagcacaaatgaaatttccctggtcttacttagaagcgcttttcttttgctgaatctttgtgaggttcccctgtgtcctgatgtgagcaagaccacctactgctgtgcgccaagaccag

SEQ ID NO: 421896 - DNA, 201 bp, Homo sapiens
gcaggcactcagtaaatgtttgttaatttaattggaattagcagtgttctcacttgtgtgtgtgtgttgggtggggttgtgcagagagagatgaagggatagagagagatatcaaatccatcagccaccatcttattatattttcacaccttctatctgtctttagcatttcatcttttttctttgagacccttttttagt

SEQ ID NO: 421897 - DNA, 201 bp, Homo sapiens
caggcactcagtaaatgtttgttaatttaattggaattagcagtgttctcacttgtgtgtgtgtgttgggtggggttgtgcagagagagatgaagggatagagagagatatcaaatccatcagccaccatcttattatattttcacaccttctatctgtctttagcatttcatcttttttctttgagacccttttttagtt

SEQ ID NO: 421898 - DNA, 201 bp, Homo sapiens
agagaaggaagcaaaagggactaacagacgtgctgaaggctagtggtaacaatgcagcatgagttgatggctcaaacttcattctattagtacccctgggratgaaccacatgggaagtgaagacaccaggagatacaggagtttctgaggctgaacaggaatcagcagtgggctgcaagaatgacctagtggaatgagca

SEQ ID NO: 421899 - DNA, 201 bp, Homo sapiens
tccacactcaaggatgggcttgaatgttccttctaggcctcaactgggaggactctgcttcttcccatgtgtcacatagcacttgtaatacttacagtgtrtgtccccagcaagatttttgagttcctaggtgacaggagctatgaagagtcaatctgctctgaatcctttaggatgtggcctagtgcttataattaagga

SEQ ID NO: 421900 - DNA, 201 bp, Homo sapiens
tttctttacattttctacaatttacagagattcttctctccctcaaacttaagtagatttcaaacgacttgtcattctcaaggtgaaatttatttttatgytttcttctctaagtctagtcaagatgtttctcatagatgggtttgacctttgatggagatgtctcaaacctgcctgcaccattctccagaaatgaatatt

SEQ ID NO: 421901 - DNA, 201 bp, Homo sapiens
ctgtaattaagtgcaattttaaaaaatcccagattttttatgctctctcttagacctgcccaaatgattccatccgtatctccagaattagttactgcaakaaatttggtttcctccagacatttcctcatgtttttctctattgtatcttccactctattctctaagtctttgtctggctttgcatggctaaaagcccat

SEQ ID NO: 421902 - DNA, 201 bp, Homo sapiens
aaacacagcagaattgtcctttagggggcttttactatggattggttagttactttattgactgtgtattaacactctctgaactacgtgttctgcctgtwtttttactaaattatactttccaatctaggcagatggtggtgtctgctttggaggcacattttgttgtcctttttttttacacgtgtctgctatttcctg

SEQ ID NO: 421903 - DNA, 201 bp, Homo sapiens
aagggtaaagccatgaacctagatttcatacagagagctatacatgaacaaaggaatttttaggttggcactgtacactataggtaggagatatgggaaaratatgaataatttccatgaattcctctaaggactcatatgtgaaatagaggagaggctgctggggttttttttttttttttttttttttttttggtagac

SEQ ID NO: 421904 - DNA, 201 bp, Homo sapiens
ttttatctgttatttcttttttttttcttttctttttcttttattttttgaggcagagtctcgctctgtctcccaggctggagtgcaatggcgcgatctcrgctcactgcaacctctgcctcctgggttcaagtgattctactgcctcagcctcctgagtagctgggattacaggtttttctgttatttctaagcaaagct

SEQ ID NO: 421905 - DNA, 201 bp, Homo sapiens
accacaactgcattggtgagtttttttctggaatgcaactcatagggtgaaaggcaagaggaacagctgactttgtgttccactaccctagtgagcttacrtgaaacaaatcttctagttctctctgacattagtagcaaaatgtaatatgtccattctcagcagcattctatgatgcatgtggcttttcctgggagatca

SEQ ID NO: 421906 - DNA, 201 bp, Homo sapiens
atgagacctttttaaaaccctgatttataaagcacttatttgccttcaagaattttgggggctgatttataagctgattcgccatctgtctcttcttggcmaaacaaaggagaaatggttagatactattttcacagctacattaagatattaattgtgtattttacatgagaaagaaatagagctaggattggcctcatc

SEQ ID NO: 421907 - DNA, 201 bp, Homo sapiens
gaatgaatactctcagggctagagccacactctggaggcctattcccgatcattatgcattttttccatctggttggaatgcactttcctctgtatttagyccccgaatgtacttatcctttcgccctgctcttcactcaattgtggtgagatcttatggagagtctgttaggttggtccttggtctgggattgcagtggc

SEQ ID NO: 421908 - DNA, 201 bp, Homo sapiens
ggttgatgccaaagaaacctggttagaccaggttttaggttgtcacttctcttgtatgttactgaaccaacagacaaatgttgcaaaggacatagaccaastttgtatgtgagtggatctggctctttggtgtctctgtatcgctggaggaggtgccctggaaattctgtagccaaagcagcctttgaagaataagaaatc

SEQ ID NO: 421909 - DNA, 201 bp, Homo sapiens
aaaaataaaaacttttgtcatcaatgatactaatgccacttacattttgacattgctttgtgacttaaaaacctctttcctataaacattaactcctttgwgttgaagagtagctaagtgagtttataaggtcacataggctttaaaggatataagctgtatcttgaacccacatctcctcaatcctaatccattgccctt

SEQ ID NO: 421910 - DNA, 201 bp, Homo sapiens
gctttaacctctctaagatgcaatttccacatctttaaaatggagatcataataattagcaaggttgtattctgtaccagagataatacgtgaataatctraaacagtgatgtattagtagtagtagatttgctaaataaatggtagctttattattattgctactatgacaatgatgatgacagtgtccagagcacttta

SEQ ID NO: 421911 - DNA, 201 bp, Homo sapiens
acccagaccaaaaggatgctaaccattgaggctttccatagatgggcatttgtatttgatcatcatgatgtacttattgtgctgaggttctcaagatgtgyggaatgatcatgaatgcaaatcctgcttctatcatttgcgtgatgtaaccttgaaaaggttactaaaactttaaaatctgtttcctcatttctaaaatgg

SEQ ID NO: 421912 - DNA, 201 bp, Homo sapiens
cagtgaattttgacatgtgcaaattaataatcattcagtccaaatgaatacagtgacctctgtgcccacatgatgtactaaaaggagaggatgccatgctyatgaactcgaggagttcacaacttaatgagaggagcaaaaatgcacgcgcgcgtgtgtgtgtatttccacctgtctctaataggctgtcaagttataata

SEQ ID NO: 421913 - DNA, 201 bp, Homo sapiens
aggttttgtgatccctctgtctctggaacctggactgcttagaactacaaagaggaaaagtagcagcactttgcattctttgattgacatgggcaaacaatttttttttttctgagacggaatctcactctgtcacccaggctggtgtgcagtggcgcgatctcggctcactgcaagctctgcctcccgggttcatgccat

SEQ ID NO: 421914 - DNA, 201 bp, Homo sapiens
tgtcaactctttatgatggattgggttcagggaagcaacatgtgccagtcgttgcctttgaacctgtacttcagatatgtggcattttattttctctcctscctcttggcttatcatcaattctagcagtgaattttgacatgtgcaaattaataatcattcagtccaaatgaatacagtgacctctgtgcccacatgatg

SEQ ID NO: 421915 - DNA, 201 bp, Homo sapiens
tgtggctgagctattgtcttaaactggtattcctagagtgccttttaccaattaatggtaatatactactgggaaatcatgttgccttgtggaagcctgtraatagcaaagccctaataggctgtctattaatagcaatacagagtcagagacctaatgccattaaatggcggtattcatgtgtgaaagccgtctagtaac

SEQ ID NO: 421916 - DNA, 201 bp, Homo sapiens
ttgctggacatggagctatctccctggtttagaggaattccattctagttgggagcataaaacattcacgcagagaaagtggtagtatgctgacctgtttrataaaacatgcgcacacacacacacaccatacctaaattagtaattgtcaaataattagagtaatttaatatatatcctgttaaacttattatataattg

SEQ ID NO: 421917 - DNA, 201 bp, Homo sapiens
ggttgtaaaatattgcagagaatttcccaggcacactttgctttgtggtctaggtcagcaaatgcaattctgttttaattgtggctgagctattgtcttaractggtattcctagagtgccttttaccaattaatggtaatatactactgggaaatcatgttgccttgtggaagcctgtaaatagcaaagccctaataggc

SEQ ID NO: 421918 - DNA, 201 bp, Homo sapiens
agttgggagcataaaacattcacgcagagaaagtggtagtatgctgacctgtttaataaaacatgcgcacacacacacacaccatacctaaattagtaatygtcaaataattagagtaatttaatatatatcctgttaaacttattatataattggatttttctgagacagggtcaccctgtctctgtctcccaagatgca

SEQ ID NO: 421919 - DNA, 201 bp, Homo sapiens
ttccaaatagctgctttgcacctggctggaaaactgtactcctcggcgacaaagagctaacttttggaacccttccaggggtccaattctttaccttcatkcacctctgagccccattcaatgtgggtcaaggaggatttttagagggtattaatatcagtgaaaagtctttggtgcatagtaacactgagccagaatgat

SEQ ID NO: 421920 - DNA, 201 bp, Homo sapiens
atcaagtacttttatgatctataaggtatttttttcttctaggaatggttttgtgttggagattaaaaatacctgtatttatcaggacaagattgatgccmtaaaatgctggctaacgtaattaggctgattgtaaaagaaatttgaaggaggaaaaatatgatgaaatgtttcaaaatagtgacatctgttacatcagtg

SEQ ID NO: 421921 - DNA, 201 bp, Homo sapiens
tctctggttatcatactactcagcaggggtaatttgttttgttttatttctgtcccgaaaggtaattaataatacaaggacaaaattgtttgtgtagtgtytttatatttttgattacccaaagaagtatttttcaggagcctttccaaatagctgctttgcacctggctggaaaactgtactcctcggcgacaaagagct

SEQ ID NO: 421922 - DNA, 201 bp, Homo sapiens
agagattcttctctccctcaaacttaagtagatttcaaacgacttgtcattctcaaggtgaaatttatttttatgttttcttctctaagtctagtcaagaygtttctcatagatgggtttgacctttgatggagatgtctcaaacctgcctgcaccattctccagaaatgaatattttttccccaatcctagcttgaattc

SEQ ID NO: 421923 - DNA, 201 bp, Homo sapiens
tgtgtgtgtgtatgcacgtgtgtgtttaagctgctgagtacttaaaacctgcttttgtattgtgatggttatttctagtaggaaataaggctgtccaattyatctctggcactgagcaagccctatttgtctctggcatgaagcaggcttagctcatctggtgctgtctctggttatcatactactcagcaggggtaattt

SEQ ID NO: 421924 - DNA, 201 bp, Homo sapiens
cttctgattaaatacaaggacattcttaggcttccctttcagtccttgaattatctttttatttttcataagaaaagggagcagcaaagaaaggaaattcrcaaaatgatgttgcttaaacctcaaaaagttcatgccttttccctgaactgatgatgataacttttcaacttttagggcacttataacaattttcaaagc

SEQ ID NO: 421925 - DNA, 201 bp, Homo sapiens
cttcctcactagcttttttgtatccacagcccctgtatccatctgcgtggtctatattccaaagtagtttgatggggcagcatgcagaagtgtgttcttaygcagtaatatagtggtactcagtgtgttcttatgcagtaattgctctccagccaaagcaatttgctagacctaggtgattctgaactaatttgtaattat

SEQ ID NO: 421926 - DNA, 201 bp, Homo sapiens
tattggtttatatatgtgtccaatactttctctctgaaaatggtggcacagtataggtgttaaataaatgctgaagattaaagacttctgcatatgtgccstccgcctcatttgcttattgacagatttcattttaaaagaccttagggagactgaagtgccccaagcgccctgaacaaagtctggaagacagttgtctgc

SEQ ID NO: 421927 - DNA, 201 bp, Homo sapiens
tgcatttatgtattaaattcttcaaaataagcaaactgattcttaggattattaactgacttgctcagtcactggtagaactcaagttgcaattaccaggwctgccataatgccatttcccactagattgcccactagttattatgattgtggtacactcacatgagggtgctatgtcacatgtcacaatcagtgttaatg

SEQ ID NO: 421928 - DNA, 201 bp, Homo sapiens
aagataaataagaagaggaggaagaggagatcataatgatgccttataaattgtttatttttcatcatttacaaaatggctttatgttttagaatctaatytaaaacttaaaacaccccagtgggagaactgatatcacaagtgaggaaactcagtttcttggacagtgtttcctatgcatcatatagcttaaaagagagc

SEQ ID NO: 421929 - DNA, 201 bp, Homo sapiens
tggtgtctgtgatgtgctggtgtcctgtactcacagatgtgctcacacctgttcaggtatccaaccctcagagccctccttctctggttcttaatgtcatrttgacaattgactctgtctgagagaccaaaatagatggtcctttatcaactaagatgaatcctaaggttaaaaaacagagtagcttctgggttgacggtt

SEQ ID NO: 421930 - DNA, 201 bp, Homo sapiens
gggtaactaatatttgcagccggggtacaataatggcaaggaaaaaaatttgcagtattactgtggacaggagaaaggtgctgaatcaatttatttttccygtacatgtgaaaactactaattgaaagctaatggaattgcattttaaatgttgagtatcttgctagacattggttagcattgtgccagaaagttcatatt

SEQ ID NO: 421931 - DNA, 201 bp, Homo sapiens
tgtttctcatatagggtaatttggggcttccccagacccacattctgctcccattagcagggttttcttcagcctgagggaagctcagggaacaactgtcrtggcatggatgcctcagcagaagggcatatagggccccttaaatggtctgcatgggaacagcataggaaataatgctgttgcatgtgataatcgtacatt

SEQ ID NO: 421932 - DNA, 201 bp, Homo sapiens
gaagtttattttgctttgctattaccttcacagaggagcaaatatttataaccagactcaaaagatgtctaataatgtgtggtattgaccaatttatatamtgttccttgactataattgctggcatgctctcattttgtatcagtcttgtctgaacaagtgagaggcagatattctttagcaaattattgaatcgttagt

SEQ ID NO: 421933 - DNA, 201 bp, Homo sapiens
agaagtttattttgctttgctattaccttcacagaggagcaaatatttataaccagactcaaaagatgtctaataatgtgtggtattgaccaatttatatmctgttccttgactataattgctggcatgctctcattttgtatcagtcttgtctgaacaagtgagaggcagatattctttagcaaattattgaatcgttag

SEQ ID NO: 421934 - DNA, 201 bp, Homo sapiens
ttataggagccagagaagtgacctcaggtctttccgtctcccaggattcccctgcacctgtgactcccactgtgcccgggctgatgacctgtaataaagcraagacttaaagagagtttgttgaatccctttccaaggagctgttcagattacttaccttagactgacaagatttcgtggtgcagtggctccatacattgt

SEQ ID NO: 421935 - DNA, 201 bp, Homo sapiens
ggggtgacagcatcatttgatgtgctttggaagcatgctagagtgagaagtttattttgctttgctattaccttcacagaggagcaaatatttataaccakactcaaaagatgtctaataatgtgtggtattgaccaatttatatactgttccttgactataattgctggcatgctctcattttgtatcagtcttgtctga

SEQ ID NO: 421936 - DNA, 201 bp, Homo sapiens
actaccaccctgttataggagccagagaagtgacctcaggtctttccgtctcccaggattcccctgcacctgtgactcccactgtgcccgggctgatgacytgtaataaagcaaagacttaaagagagtttgttgaatccctttccaaggagctgttcagattacttaccttagactgacaagatttcgtggtgcagtggc

SEQ ID NO: 421937 - DNA, 201 bp, Homo sapiens
cccacccttgatactgcagatagcagtctgctgaaaaagagctttggagatcaggaaagctcttcgcagtatccattgggagtcttaggatcagaatctcrtactctgaatgcatgaatatttttttgtggtatacattttcttcagttacttctctgtctccttaaagaaaatactgcctcatctcagctttaaggaatt

SEQ ID NO: 421938 - DNA, 201 bp, Homo sapiens
taccattatgctgcttattaccttcacggtacctcactaccaccctgttataggagccagagaagtgacctcaggtctttccgtctcccaggattcccctscacctgtgactcccactgtgcccgggctgatgacctgtaataaagcaaagacttaaagagagtttgttgaatccctttccaaggagctgttcagattact

SEQ ID NO: 421939 - DNA, 201 bp, Homo sapiens
ctgctcagtttccatggtggtgtggagcattgtgactgttttagagataaatggcttttcactggcttttccaatgacatttttacatggtgagcttttayagcctgtaatatactatagagaaaaatgacaagaggcagcacaattttgcttgatcttggccctgagcaggctgtgaggcagggatgggaccagtcctac

SEQ ID NO: 421940 - DNA, 201 bp, Homo sapiens
gaattgctaatcagctccattacatattattcctcgaaaatgctccatgattgcccaattacaacactcataacaccctaaaatgtaacgtaccatttacrtatctgtctcccagctctgccctgagctcctgacactgcctcatttgtttatgcccctgatctaaacctggcttagagtagggattcaatgaatatttgt

SEQ ID NO: 421941 - DNA, 201 bp, Homo sapiens
attgcaatttgtcctggagagtcaagattattctctgggtacagctttagtttatccatgccttgcaattttaaacatgatgactctctctgttcccagamattgtggctctgacaagctcctgctgcagtcacttcattaatcttactctaccagggcacctgttcactattgtgcggtgtcggctgatatcatatggta

SEQ ID NO: 421942 - DNA, 201 bp, Homo sapiens
aaaaaggtcacagaattgctaatcagctccattacatattattcctcgaaaatgctccatgattgcccaattacaacactcataacaccctaaaatgtaaygtaccatttacatatctgtctcccagctctgccctgagctcctgacactgcctcatttgtttatgcccctgatctaaacctggcttagagtagggattca

SEQ ID NO: 421943 - DNA, 201 bp, Homo sapiens
atattttaattttacttatggtaggcctttgagttgatcttccatgttttagaactctgataggcatttggatgtggctgaaaaatattgagacttattaratggaaccactggattggactttgaagggccagtgaaattttaaatgcagtatcattagagtagacgtgtgtgcatgtgtttattaggtaatagataatg

SEQ ID NO: 421944 - DNA, 201 bp, Homo sapiens
acatgcctccctacccattgaaaagctgtggtgatttgttaattaattcatgtattcatcttctgatatcagaaatatctgtgaggccctacactgagcgyggtactctccaaggtgctggaatactacaaggaacctttgtttcatgaacatgcttaagtttccacacgcaatttatcatgctgtaactctgggtccctg

SEQ ID NO: 421945 - DNA, 201 bp, Homo sapiens
agctctgagaagtccttcactaaagaaatgtactttatttaaactcaagcttttactaactatattcaacaagataaaataacttttattaagactctatkgtttttggcattattttattgcctacccatcgttttttcccccaagtaacaactgttaattgtctaggtgaaatgcaaaactatcaaataaatgttcata

SEQ ID NO: 421946 - DNA, 201 bp, Homo sapiens
gagaatgttcttgactttcttagagctctgcgaatcaaaccatacctttgaaattctttgctatgcacaagcatttaatatatgtttaataatgttcacartaaatggattaaatgggggcctccccaactatagtggatttgatcacaatttaaatcactagtctggaagatgcaatttaatcatatttttccttcacaa

SEQ ID NO: 421947 - DNA, 201 bp, Homo sapiens
tttaataatgttcacaataaatggattaaatgggggcctccccaactatagtggatttgatcacaatttaaatcactagtctggaagatgcaatttaatcrtatttttccttcacaaagaatgcattcttattctttgacacaacagggattcatatttttgactactcagaggttttacaccattttagaaagagcacag

SEQ ID NO: 421948 - DNA, 201 bp, Homo sapiens
caattcattttctgacagctggaggctcttatgaacaagtgagaccaatatttgtgggttatcttggatttggcgtactcatctcttcacagtcaggagcrgtcttcagagatgtgatcaaaaacatcattaagtactagggtgaaaaatccatctttttacatttgggtttgaactttatgtttgtcactgtttcagaat

SEQ ID NO: 421949 - DNA, 201 bp, Homo sapiens
ctgggcaatgatgatatttaaattatatataatttgaaaaatatgtttctaaagaatatctacctctttatattatttattgggatgctagagtgatattyctagctttgcattattcccaaaatcaaattccaaagcttttggaaaaaaaaactattcaggataagctatatggttataggaaacataaattcaagaaaa

SEQ ID NO: 421950 - DNA, 201 bp, Homo sapiens
ctatgatgcatgtggcttttcctgggagatcagagaggctccagggttatgaaagtggaagcaatgcacattttttttgtgtgactgtaagtgaacatcartgcttagttataagcattggggagttgtccagttgctgattttggctttagtggaatacttccattggatgctgcatgaccagaaatgtctaaatgaatc

SEQ ID NO: 421951 - DNA, 201 bp, Homo sapiens
gagaaataggtattattctaaaccaggaacacaagagtagcatttgcaaagattaggcagagtgagagaactgggaggtgcatacagcatggctagagctctgagctgcagagaggcacgaaggttctttcttttagtggtgagtgggagtggttacattaaatggttttaaagctgggagtgacaagatcaaatctgcat

SEQ ID NO: 421952 - DNA, 201 bp, Homo sapiens
ttgcccatatcaggtatatttcctgtgactttctcctctacttgcatatttgttcttccaccatgaccaccacgtgaagctttgatttgtgtagacagttrtttaattccgtccagactgccagaagccaatggtggtaatggaaaacataaatagtgtcttttaattgtgttggaaattcctccatatgctaccttttag

SEQ ID NO: 421953 - DNA, 201 bp, Homo sapiens
tcacattaccttgtggaaaatcaggggcattttaggcaggagcagagtaggtgggaggcacgtctgtagaaaagcagtggaagcaaaagaaaaaagcctgttttttttttaaactttcaaaatagactcttgaagtccacatcaaaaatgacagttttaaaagcaaagtttttgatcttaagagctaagttttgttgagag

SEQ ID NO: 421954 - DNA, 201 bp, Homo sapiens
gtttagtgatttatgagacagctcaagtgagagatcacctccctttcaaggttcacatgtctaatggagacactgggctggccagcagtgagtgtgtgagwgtgtgtgtgtgtgcgtgtgtgtgtgtatacaagtgtgtgcaggggaagggagagagtgtcagggctgggtgggtggacagtaaagaggtctaccaaatac

SEQ ID NO: 421955 - DNA, 201 bp, Homo sapiens
acttaagttaaataccaactcttaaagccagggtcccaatcaccatgtacagaagaggactttggtcagcaaaccctctcacagagaaaaagaccttgtgwacacagggactagcaagaaactcagaatgcttttatttttcacatagttaaatgaagatactattcctacactgctagcccagaatgattttggcacttc

SEQ ID NO: 421956 - DNA, 201 bp, Homo sapiens
atcttaaggcgtcaatacagactgaaatagattggattttaggacatattcctgtgtgaatgtttgataaatctctcccaatgtttgtgagacatttgctytctctgcttttggacttaagttaaataccaactcttaaagccagggtcccaatcaccatgtacagaagaggactttggtcagcaaaccctctcacagaga

SEQ ID NO: 421957 - DNA, 201 bp, Homo sapiens
aaacagagtagcttctgggttgacggttcagggcccagctggcatggcagatttctaaattcctacaggaaaaaccacactcctactagactctctaacartaagtgctaccaggcaaattgtcctaactttgatttacaacccagaccactaaaactctggttggacagaggatttgtctcacaaacattactttctgat

SEQ ID NO: 421958 - DNA, 201 bp, Homo sapiens
aagcccagtgtctgtttgaaagttattcttttggaatgtttaagtatttctagcacattaagcttatctggctttgctgtgcttataacaaataaaaacgytctgggacctgtttgagaggaccatgccatttaaactctgtgagctaatgagaaggccaaagcatacatttgataagctttgtcatctttttgtctgcag

SEQ ID NO: 421959 - DNA, 201 bp, Homo sapiens
tttccatttagattatttgagattaacttttgtcccatggcctaccactatgcagagttctttggtgaataacatagcagctgaaatttcaacatcaatcmggttatcaccctttaaatattttatctgtcttgagtttgaggaaattttgagtattccagcctaactgtttctggacagatgccctcctctctccccgtt

SEQ ID NO: 421960 - DNA, 201 bp, Homo sapiens
tccatcctcactctcctcccaccctccacccttgagtatgtcctggtatctatcgttcccttctctgtgtccatgtgtactcgctgttttgctcccacttstaagtgagaacatgtggtatttggttttctgttcctgcgttaatttgcttaggataatggcctccagcaagctttaaagaaattttatctaaagttttaa

SEQ ID NO: 421961 - DNA, 201 bp, Homo sapiens
tagaagaactatttaatctggtcctgctgaaaatcattttcttatgtaaagagtgacatcttaatttaaccttatgttatggatttgggtgtttttcatakgccaagattatttagtgtagtcctttggaatttgagattatttatttaatgtcttccctttctctgtgacagtaacacttctcttttttgtctcaggggt

SEQ ID NO: 421962 - DNA, 201 bp, Homo sapiens
tctgttcccagacattgtggctctgacaagctcctgctgcagtcacttcattaatcttactctaccagggcacctgttcactattgtgcggtgtcggctgrtatcatatggtaattatgttgttaattcatgggctgatgttttccaggctgaagcatggcttcttacaggtagtgatctgggcaatcaaactgagcagac

SEQ ID NO: 421963 - DNA, 201 bp, Homo sapiens
tatccttctcccctggactttgtgtatacatgactaataaactgctgtccatctcgtctatccagtgtgggtgtcatgtggtcagccaaccctacagtgcyacggtgggaatccctccctcaccaacagggtgaataagaagcaattaaaacagtgccaaggctgggcgcggttgctctcacctgtaatcccagcactttg

SEQ ID NO: 421964 - DNA, 201 bp, Homo sapiens
attggaaataacttaaactgtgtgccttaaaattagttttaaattgaaatgggaagctgtggttatttgaagatgtttttcttttttattaagccaagtgmcctctgggataacagtttgcgtacctctaactcctgggccaaatctagtttttctttaaggcttgtattggtttgttcattcaggtgtgtctaggccacc

SEQ ID NO: 421965 - DNA, 201 bp, Homo sapiens
ctacaagcagtactagcttgagcacttgatttatagaatatttgttccagatgagaccttagagtgttttattaatcccaaggcctcagtatacgcagaasgatcctgtctgatgagaaatagaagaattacaggctttttagtcagatatatctgaacttaatccatagtccagtcatttaccatgttggtgacttgtta

SEQ ID NO: 421966 - DNA, 201 bp, Homo sapiens
tctcctaatgaactactaatctagttgatggtcgtttctcctgcctatgtttgttaaacagaaacatgtagctgacctcaagtattttataaatgtcagaytcccattaatataatgaaagagaatgtcagggtttaagaaagaaaattattgattttctctaattatgagtggatcaatcattttgttaagcagactttt

SEQ ID NO: 421967 - DNA, 201 bp, Homo sapiens
taacagtgttgaatcgggatttgacttgtattttattgtaagacaaagagagtagtaattatcagtatctgttgaggcctgcttgtacttgcagaagaggrctcagatttggagccttggcccaacctttcagagccccattaagtagataaaattctccatgcttctgcggaacaggcctccaactttcctgggaagccc

SEQ ID NO: 421968 - DNA, 201 bp, Homo sapiens
ccccgttgctgtacttggcagtttgcttatgcagggtctataggctaagttatatgcctaatttagacaaaagtttaacaggaatacagaggatagagaaytcagggcagaactggagaactgtttcttgactcttttcacaatgtcttttatagtataaggatttacatgaatttcacgctttctatgagcctcctgact

SEQ ID NO: 421969 - DNA, 201 bp, Homo sapiens
tgtctaaagaaatatatagcataccttgtagtttccagacacatgataagaaaatactgcttttttatccatttattcaatcaccaaccacttattgtacytattacttttcaagtaagatctaataaagagggttataaacttaagatatggtcccagccttagggacccaaacttatatgaacttaacaaatacttatg

SEQ ID NO: 421970 - DNA, 201 bp, Homo sapiens
gcctggcctgaaaagagtacatatgaaatacaaagggtaatgatgaactcctataaaaagcctcaagccactgcacctaaaataattctgggcttgggagkggtaggaagggcacagactctaccttaactggttgtaattcatgtatcaaatgtgttcagtgtgctgggcatacaggaaggggaaggggatggatgtcat

SEQ ID NO: 421971 - DNA, 201 bp, Homo sapiens
gttttcaccagcttcatgaacttaccagcttcatgaccttggggaaattattgaacctctcttaaatgtagtttttagtgagtaaaaatagttgcaaggartataggagtcctcaccagaaatcctttgcacagtgcctggtgcattgaaatcccacaaaaaaagctgataccccattctaactactttactgtagttaca

SEQ ID NO: 421972 - DNA, 201 bp, Homo sapiens
tcagaaactagaaggtggagtgggagttaccaagtaaagaggtgaagggaagagtgtttctttggatttaggtaatgccaggggtataggctgatgtcacrttactcccaggccagtgataaaagagaattaagaaggtggacagtggggaaaatactagagatggctaaaaatgtgcttggctatctttctaatctcttt

SEQ ID NO: 421973 - DNA, 201 bp, Homo sapiens
tttatttacaaatatagggatttaaagaaaaaaaaaaaaggtgaggtacaagggtccaaatattggtgcttgtttttcagtgaacattgcggaaatctatkgttgttttttgttctttgtttctttcgggatggcagagcccctcctaataaaaagctaaattctcctgaatgggtagaaatggctgccggatgatgagtt

SEQ ID NO: 421974 - DNA, 201 bp, Homo sapiens
gtgaatggaagacacataaatgcattgactcttatcaaaacctaataaatgggctgtgtgaaaagtcctgatctctgcaagaacaaaaagctttataaackaagacactcagagtgcttggggaaagaaatcaacatggagagaaaagggagcctcacatttacttaaatgcagtgggtactatgaatactctgtattaga

SEQ ID NO: 421975 - DNA, 201 bp, Homo sapiens
atacttattgtgaatgtaagtaccaacttcagagtttctcaacctcgatactgtggatgtttttggtcacataattcttcgtcgtggggagctgttctatrtgttatataagatgttcagcagtatccctggcctctgctagatgccagggtcaccccttgcttcagttgtgacaaccaaaatatcaccagacattatcat

SEQ ID NO: 421976 - DNA, 201 bp, Homo sapiens
cataaggcaaaaaatataaggattcattaactgttagctgtcataatctacgtatctcaaaggctgaatggtcagtttttctctctccaacatttttctcyctctttttttcatgattgcatctgaacttatgtgcatttctatttaagaggtgacacttgccagtgtgtggttttctgggtgcagacaaatgtatggcat

SEQ ID NO: 421977 - DNA, 201 bp, Homo sapiens
agaagacatactaccattttcttgaatataaggagattctgtaatacatgtttccacgcattaaattgtaaagatatctatatgcctataggctatattcrtaatcccaccctaatggaaaaacaggatcttctagtttttgacctgttggtgtctttgtatcattgaaagtggaaatgagtatttttaatattaagtttt

SEQ ID NO: 421978 - DNA, 201 bp, Homo sapiens
ttggattttctaaccaatatcaagttagaataagcttctcaataaaaaaaaaaaatcaaaaccacaacttatgaaataaacatttttcaaggtgattgatycctttacaaaattttattttcacttaaaagaagacatactaccattttcttgaatataaggagattctgtaatacatgtttccacgcattaaattgtaaa

SEQ ID NO: 421979 - DNA, 201 bp, Homo sapiens
gtttttggattttctaaccaatatcaagttagaataagcttctcaataaaaaaaaaaaatcaaaaccacaacttatgaaataaacatttttcaaggtgatkgattcctttacaaaattttattttcacttaaaagaagacatactaccattttcttgaatataaggagattctgtaatacatgtttccacgcattaaattg

SEQ ID NO: 421980 - DNA, 201 bp, Homo sapiens
ccgcagatcgggaggggtgagtatgaccaactggaactccacagtgtgtgctggcctttaatatcaggctttagctgcttgattcatttcattgctctctrtcaatacctggagaatctgctgtctgtcccactgatttaaaactaaaaacaaaacaaaacaaaacaaaaaaactaaacaattagaggagtctctgtttaa

SEQ ID NO: 421981 - DNA, 201 bp, Homo sapiens
aaaccaccttttctaggaaaagaggaggaaaccttactttatttacaaatatagggatttaaagaaaaaaaaaaaaggtgaggtacaagggtccaaatatkggtgcttgtttttcagtgaacattgcggaaatctattgttgttttttgttctttgtttctttcgggatggcagagcccctcctaataaaaagctaaattc

SEQ ID NO: 421982 - DNA, 201 bp, Homo sapiens
gccaggcgtttgtgcctgtggttctagctattcaggaggctgaggcgggagggtcacttgagctcaggatgtcgaggctgctgtgagcgttgatcgcaccmctgcactccatcctggatgagagagtgagaccctgtctcaaaaagaaagaaaaagaaaagaaagaaaaaaaaaaaacctgctgaagctggcaggtatcaa

SEQ ID NO: 421983 - DNA, 201 bp, Homo sapiens
ctagacctgctaaaggccaggcatggtggcttacacctgtgatctcagctctttgggaggtggaggcaggaggatccattgagcccaggagtttgagaccmacctgggcaatatagggagaccctgtctctacaaaaacttcaaaaaggaaaattagccaggcgtttgtgcctgtggttctagctattcaggaggctgagg

SEQ ID NO: 421984 - DNA, 201 bp, Homo sapiens
agtgattaaaagttgaaagaattaaaataaaaggccaagcacagcagctcatgcctataatcctagctctttgggaggccaaggcaggaggattgcttgaktccaggagttcatgactagcctgggcaacaaagtaagatcccatctctaccaacaaaatataaaaataaaaaatttagctgggcatggtggcatgcacct

SEQ ID NO: 421985 - DNA, 201 bp, Homo sapiens
ttcttccttctctcatttccacatttatcatgcacctgttctctgttgttatggagctttgcactgaagaggatgtatagatgatttttaattgcatatcmttcctttattatactgatctggaaaaaggatttagtacagttatgctcaaatgaacactgggcctgtgtggcagggccaagcaactagaatatgattcag

SEQ ID NO: 421986 - DNA, 201 bp, Homo sapiens
agttttccacagagtagcttctggctctgttcattttagcctaatttctcctccaaaactgctgtaattctagtgccacccacctcaggttatattcatayggtggtaccagtttttgtcttaattccatgctaaaatgctgggtgtctcagtgcaatggatagtgggagtggttttggaagccatttctacactggaatg

SEQ ID NO: 421987 - DNA, 201 bp, Homo sapiens
gcaagaaactggtctattctgtgtggaaagatggctatttctcagcgagtacctcacttcaaatcatttgttctgaagtgtcatggtgtaatgaaaataakaagaagcatgaggagatggttacgaaggaggaggtaggaggaggagtgaggaggaggagaagaagataaataagaagaggaggaagaggagatcataatg

SEQ ID NO: 421988 - DNA, 201 bp, Homo sapiens
ttaagtcgccaagactagtctggcagaaagtatgtattttatttttgtccttaaacattacattttgagttatctcctgaagagattttgcaagaaactgrtctattctgtgtggaaagatggctatttctcagcgagtacctcacttcaaatcatttgttctgaagtgtcatggtgtaatgaaaataataagaagcatga

SEQ ID NO: 421989 - DNA, 201 bp, Homo sapiens
tctcagtgcaatggatagtgggagtggttttggaagccatttctacactggaatggctaacaacagtatgtttgtgtgtatacatatatatatatatacayacatacacatatatatatacacacatatacacatatatatacacacacacatatatatatacacatatatatatacacacatatatatatactgttgtta

SEQ ID NO: 421990 - DNA, 201 bp, Homo sapiens
tcaatcactttgcaaatttaagagtgagggttgtggtggagggagagagagaacaaaaacaaaaacaaacaatgtcacagtaaagaagttgaggccacagrtatcttcacatttcacaacccagtggagcctgaaataccccagtcagattctgcttcttccatcttgatcccattgctacttgagtcattaatggtaggc

SEQ ID NO: 421991 - DNA, 201 bp, Homo sapiens
tgtgcaggtccggcttcatcactctgtttatctgcctgaattgaatgtgctttaatgtgtttatatttgcctgctagtctggtgtccaaaggaccatatcrtcacaacccccaaacaggacattgtctatgtcttgtgtactgaaaggaaccccaaatgacaggttcatttttttttatgctacctattagttgagataca

SEQ ID NO: 421992 - DNA, 201 bp, Homo sapiens
aatggctaacaacagtatgtttgtgtgtatacatatatatatatatacacacatacacatatatatatacacacatatacacatatatatacacacacacatatatatatacacatatatatatacacacatatatatatactgttgttagccattccagtatgtgtgtatgtgtatatatatgtatggaattgaagatga

SEQ ID NO: 421993 - DNA, 201 bp, Homo sapiens
accatggaaaccccatagtacagggctgacatgccagtgtttagtagagaactcaataaatgttaactattacgatcatcatcatcatcccgtatttcccmctagaaaaaaagtctgtgtaagctacaagcacactgctcctggaccccactatcttgaggaagacatttctgaaaggcagccatgtcttgccttagcaat

SEQ ID NO: 421994 - DNA, 201 bp, Homo sapiens
atggctaacaacagtatgtttgtgtgtatacatatatatatatatacacacatacacatatatatatacacacatatacacatatatatacacacacacatatatatatacacatatatatatacacacatatatatatactgttgttagccattccagtatgtgtgtatgtgtatatatatgtatggaattgaagatgag

SEQ ID NO: 421995 - DNA, 201 bp, Homo sapiens
gatgatgatgttgctctctcctgagagcctgattagcaaggttctatatgaaacaaatgagggaggtaacaaggtgcccagagacacctgaggacaagacmgcaaactttatgagttaccccaacatcttacggggctgaggtttgagagttaattcagtcacccactcccaaaatcaactcccatatccttacttatact

SEQ ID NO: 421996 - DNA, 201 bp, Homo sapiens
gattttaagtctaaaatattagaatagtgtgatcttatttaaaaaatatgtgtacttgagaggagttatttcttcattcaaagaagtccagaaagggtatraatcaaaatgttaaacaatagttatccttgggtggttgtgtcacagaggattctttttattgtagtaaaatatacatagcattacatttactattttaac

SEQ ID NO: 421997 - DNA, 201 bp, Homo sapiens
atctgggtatctcttaatccagtcaagttagcacctaaaattaagcattgtatattctagtggggatgttgcacttaaaacggtctaacatatcacacatkatgcatgttttccttgattattatcaagcgctaagcagaaaaataatgcaattgaaggatcaataaattgtacaggtggtggtgggttccaagaaggcct

SEQ ID NO: 421998 - DNA, 201 bp, Homo sapiens
ttcagccatgaaaggagcccttgtcctatagaacattaaattgtgttcatttaatccaacaagtccagtagaacaaatcgggcttatgcagatttatcacrggggttatttaaattcagcggtgacctttgcatccacgtgaatgtgctccacatgaacaaggacaaagggaacttttctgcattgtcattatgtccccag

SEQ ID NO: 421999 - DNA, 201 bp, Homo sapiens
tcactcacatggtgaatctaaaaaagttgatcccatagaaatagagagtagaatagtggttgccagaggcttaggataatagaggaaaggagaggataggwagagattaatcaacatgtataaagttacacttagatagaagcaataagttctagtgttttattgcacattggggtgactttggttgccagtattgcatta

SEQ ID NO: 422000 - DNA, 201 bp, Homo sapiens
ccctagcaaagcaccctgtgcaaaatgaaatgactgacaattgagatgtgatggcatataactataactattatatgtaatacgtgtgtatgtatgtgtayatatatatgtacacataaatattattaataataaaatgaaatacctagagggaaggaatgttacacaaagaggccttgctaagtttctcccagtttatta

SEQ ID NO: 422001 - DNA, 201 bp, Homo sapiens
ttccaaataaaatgttttcctaggccttgaaaacacagtttcaaagatcaagatatttatttcaaagaaactgtcttcagctggtaaccgaattcatcacyttgcccctcttgtaagccagttttgctcttgaatttaatcttactacggatgacaacatcattttcccagtcacccagacttaacatattagagtcattt

SEQ ID NO: 422002 - DNA, 201 bp, Homo sapiens
attctttgttttataggtgtgttaggggttgaattgttacccaaaaagacacacaactcccagcccacacttgtgaatgtgaccttatttggtaaggaagrtctttgtagatgttaccaagttaaaataaattcatattggatgtgtgtgggccctaattcagtgactggtgtcctcataaacagagagaaatttggacac

SEQ ID NO: 422003 - DNA, 201 bp, Homo sapiens
tggaaattactgagaattatttgggagggtgatagagtcatgtaaatagagcagatgatggagctgtatttatgtgttaaaaaaaagagagattgattaargtcataaatttctcttttatttcttctatctgggcattatttccacagcagtaatttactacattgctttattactttcttctgttctgtgggaaacagt

SEQ ID NO: 422004 - DNA, 201 bp, Homo sapiens
tcagtgactggtgtcctcataaacagagagaaatttggacacagagacacagacccagaaggaagacaacgtgcagagaaaaagtaacattttcgtcacckaagacaagattcatgcctgaagtacctgtaacaaaaggcaggctaacaagagaaaaacatacaaatgtatttaactgaagccacataagacagaggagtc

SEQ ID NO: 422005 - DNA, 201 bp, Homo sapiens
taaataaataattaatgatcctagaactttgtggggaaagtctttcagatgattaagcacacattctttgttttataggtgtgttaggggttgaattgttmcccaaaaagacacacaactcccagcccacacttgtgaatgtgaccttatttggtaaggaaggtctttgtagatgttaccaagttaaaataaattcatatt

SEQ ID NO: 422006 - DNA, 201 bp, Homo sapiens
tactcccacgtagacatcattaatcaattataatggcctttcatacatgctcatgctttgcatccatttcaacctaaccctgagcgggagctggttttgcraaatgacatttatttgccattgagggccctgagaccgtctctatctctgacagtctttgagtctatatatgagaatggtattgaagtgaagggaaaaagg

SEQ ID NO: 422007 - DNA, 201 bp, Homo sapiens
tttaaaagaaataagagggtaaggtcagagatacctttatgcttctgtagttttctcagtttcctttagcttaaaatactccgtatgccaaggtgctgtayttgaggttattgtgttggaggccccaacaacagccctgagaagatggaagcagagactggagttagaagcagagattggagtgatggtgccacaagccaa

SEQ ID NO: 422008 - DNA, 201 bp, Homo sapiens
tattattgggattcagagataatttctgggtgtggtggaattgtggagttataaacctgagaactgtagggtgcctatgtgcatgaagcaactgacagacrgacagacaacagacaaactctgataggcattactgaaactcagctatgctccttgcatttaaattccctaatatacccttgtaataatgatacgtaattt

SEQ ID NO: 422009 - DNA, 201 bp, Homo sapiens
gttggaggccccaacaacagccctgagaagatggaagcagagactggagttagaagcagagattggagtgatggtgccacaagccaaggaattccaaggaytgccagaagctaggaaaaaacagggaaggatgcttccctagggtcctgatagggaccatgaatctgccaacaacctgattgtgaactttcagccttcaga

SEQ ID NO: 422010 - DNA, 201 bp, Homo sapiens
atagagacagaaagaaaaaaaagaaattgagagacagaaaaacaagagcacttttcagcttcttctcattcctaagccaaaaaaacaaaacaggtttttcmaggagtaatatcaccaccttatggccttttacaataatgctgcgaaaaattaatattccagttgtatttttgcaactataaacatcaattctttactctt

SEQ ID NO: 422011 - DNA, 201 bp, Homo sapiens
tggttataatatttattggttgttttaggaaggaaagcctctgagaacatgagtgaggagatgtaaaataaatccatcacattagaaacagactattaaargcagaaaacgctcagcctctgccaatgaccatttttaaatgtgtggcctttgcagatacatcagttaaccaagacaaatccaattttacctcccaccact

SEQ ID NO: 422012 - DNA, 201 bp, Homo sapiens
ctgcatatgtttagaaatattagagatgttttcagtagaactctatcaatcttttgctgggttgtaatagctagtaaatgacttaaattattttgtgcttkcatccaactctgatttaataagcctttacggatttgggattgtgtacataggtgtgggaggaacacaaaaaacaggaaacttctcaggcctaaagaacga

SEQ ID NO: 422013 - DNA, 201 bp, Homo sapiens
tcctaactgcttttgtttaaactcctgtttgacatttgaactgttttcaaaatgtcatctctggattcacttgcctctgaggaattgaaggaaattttatrttgacatagtctgcaagttgtcagaattcacatagtactagaaatttcataagtattcataaaagaaaattaagagatcattaatctctttttaaactgg

SEQ ID NO: 422014 - DNA, 201 bp, Homo sapiens
ctcactcacatggtgaatctaaaaaagttgatcccatagaaatagagagtagaatagtggttgccagaggcttaggataatagaggaaaggagaggatagraagagattaatcaacatgtataaagttacacttagatagaagcaataagttctagtgttttattgcacattggggtgactttggttgccagtattgcatt

SEQ ID NO: 422015 - DNA, 201 bp, Homo sapiens
acatgtggttttatttagggctgtttttgaagtttaccttttttcagcagacatttaatgaatgtctaccacagagaagcacagttgctctggtgaatgcmagaatggatatgacagggtgtctgcctttcgggagctcacagtttagtccctggattgcagtggaagtaaatatattaatacatgtcactatcctcctac

SEQ ID NO: 422016 - DNA, 201 bp, Homo sapiens
ttcaataagaaacatgtggttttatttagggctgtttttgaagtttaccttttttcagcagacatttaatgaatgtctaccacagagaagcacagttgctytggtgaatgcaagaatggatatgacagggtgtctgcctttcgggagctcacagtttagtccctggattgcagtggaagtaaatatattaatacatgtcac

SEQ ID NO: 422017 - DNA, 201 bp, Homo sapiens
agccagaactctccctataagataagaagaaaaattcctaaggaagcatccttcaataagaaacatgtggttttatttagggctgtttttgaagtttaccytttttcagcagacatttaatgaatgtctaccacagagaagcacagttgctctggtgaatgcaagaatggatatgacagggtgtctgcctttcgggagctc

SEQ ID NO: 422018 - DNA, 201 bp, Homo sapiens
gatcatggtcagtcttgaatgccagaacatggaaagtagatttcaatcattagtctggggatcagcatgggggtcactgatggctttaattggtgggagaragagagacacagtgacagagacagagacagttagacctgagctaaggaagggtaattggatgatggcatacaagagagaaaggcccttgtttttaaaagt

SEQ ID NO: 422019 - DNA, 201 bp, Homo sapiens
agagaaggacatggagaaatccactctgagctaggcttcaaaaaaggaatcaattttcaacaggtgtcagtgatgggttaggatattccagtaaagaagasacagaggcagagaattgagggtcttaatgggaacactgggggtaatccagcttggcttttccgtgtagtgcatgaatcgaagtagtaagagacgagatct

SEQ ID NO: 422020 - DNA, 201 bp, Homo sapiens
aagcaacatgtgaaatatttaagctactcttaacatcttgtggaatatcagagttgaatatgttttggtagtaatttaacccaccttcattcattttaaaygtgagaaaaggccaagttagtttttgcccagtattaattacacagtattaattgtcagcagaagagccgaattcaaatccatctctccttattcgctgca

SEQ ID NO: 422021 - DNA, 201 bp, Homo sapiens
ttcttggactagtggttcatatccatcagttcgttcaactttagcacctgtcttgtccccagtggcttttccaaaactattaccttcaccacgaacctccrtaagttttcccaattcaaactagggcttcctcagcatttttacttttctaacgaagacatcacagagaggataaatagattggcaagccttttctatgtc

SEQ ID NO: 422022 - DNA, 201 bp, Homo sapiens
tcagacagattcttggactagtggttcatatccatcagttcgttcaactttagcacctgtcttgtccccagtggcttttccaaaactattaccttcaccamgaacctccgtaagttttcccaattcaaactagggcttcctcagcatttttacttttctaacgaagacatcacagagaggataaatagattggcaagcctt

SEQ ID NO: 422023 - DNA, 201 bp, Homo sapiens
acagattcttggactagtggttcatatccatcagttcgttcaactttagcacctgtcttgtccccagtggcttttccaaaactattaccttcaccacgaasctccgtaagttttcccaattcaaactagggcttcctcagcatttttacttttctaacgaagacatcacagagaggataaatagattggcaagccttttct

SEQ ID NO: 422024 - DNA, 201 bp, Homo sapiens
tcctgtctctattaaaaatacaaaaattagccaggtatggtggcacgtgcctgtagtcctagctactcaggaggctgaggcaggagaattgcttgaacctrggaggtagaggttgcagtgagccgagatggtgccattgcactctagcctgggcaacagagcaagactccgtctcaaaaaaaaaaaaaaaaacaaaaactg

SEQ ID NO: 422025 - DNA, 201 bp, Homo sapiens
tggccagagaaatgggacagggtctttgacacccaggtgggaagctcctcagcatctctgggagaccaggcgcacctccaggagatgctgctcacccgcamtggggaaggtgggcccttggcgacccctctctacctcccgcagtgccctcccccagggatgagctgtatagtttagctgtgtgctcgctgtacttgtcat

SEQ ID NO: 422026 - DNA, 201 bp, Homo sapiens
ccattttctctgagcaactccaaagcaatgtccctggctcaaacaggattatgcctctgatccaggaattaacatacggagttcagagccagaaagctcgkgtggccttttctatgacccagagcctatgtaaggaggtaaaattccaatttgggccatatcaccttccttctttttccctgtgatgccccctctagtagt

SEQ ID NO: 422027 - DNA, 201 bp, Homo sapiens
acaccttcacctcacccacaccccaaactgtccctattccagcactgcctgctcccctgcttaccccttggccagagaaatgggacagggtctttgacacycaggtgggaagctcctcagcatctctgggagaccaggcgcacctccaggagatgctgctcacccgcactggggaaggtgggcccttggcgacccctctct

SEQ ID NO: 422028 - DNA, 201 bp, Homo sapiens
ttggcacacagccctccatactcactggctgcttactagctgcctcatgctaagtccccagcatgggccggggggctgtggcatttcctgttggctggagsagggcccctttggcggtctcatctcccagcgcttctcagacgcagcctgtgtgtttgcagataacactgaataaatacaaccagcaataccacaagctgt

SEQ ID NO: 422029 - DNA, 201 bp, Homo sapiens
atgggcatggtggggctgttagggaaaggtgtcctcatgaagcccccttcctgatatgggcctgtttttccctagcaaccaacaaatgcacagaaagacarcttctctgaacagtcctgtgtcctgcaaagagaaaccagacagagttgaggagcccccggactacaggtgaggacccctttcccagtcagagatacacac

SEQ ID NO: 422030 - DNA, 201 bp, Homo sapiens
atttccggtgaacttccagaaatgctctttctgtggaagaaatatttaactccgtattgcccctttcttcaggatctgcttcctggtcatgtcctcatccyacctggcgttccgtatttctcggctagagcagcagttatgctccttgagttgggatgacccagtccctgggcacaggtgaggccttttctctttctaatg

SEQ ID NO: 422031 - DNA, 201 bp, Homo sapiens
aacctctgcctgcgctgctgcctctgaactgtgacattttcagtgtcaccctcaatatcagggccagtcttgggtgggggccagaggcagcggccatgggmatggtggggctgttagggaaaggtgtcctcatgaagcccccttcctgatatgggcctgtttttccctagcaaccaacaaatgcacagaaagacagcttct

SEQ ID NO: 422032 - DNA, 201 bp, Homo sapiens
gggtcatcatcatgacctcccagaggaggcacaggaaggaccaccatggctggtgagagagagggtaggatgactgatctggctgtctggccagagctccmcccagagctcagctgaagggcccagagctctagctgggctgtaaggacacttccatggggacaagtctgaagacccctacatggtgtctgggaagaaaga

SEQ ID NO: 422033 - DNA, 201 bp, Homo sapiens
ttccccatggtggccatgctgggctcacagctgggtccctaggcagggagcaaagggaccacgtccttgggggttagtcctgagagaagcatccctctccytctcaggtggtcattcctgtggtgtctgtgcaaatgatcaaaaaacacaagatggcacggctccttcccaatggactggccatcaccaccaacaccagcc

SEQ ID NO: 422034 - DNA, 201 bp, Homo sapiens
ttgcctggaccctctggagcaagggtggagaaggaagaaacatccagcaggctggtggagtggaggagcagtcaggagaaggacccttcgacgctggggawtggactgtttggggtttggggcctgcggtggggaagggggagtctgaggaagacaggtcctgaggctggactgtggactccagaacgtgaggacccaggt

SEQ ID NO: 422035 - DNA, 201 bp, Homo sapiens
cccttggcaggtctcagtttcataatctgtacaatggtatggtgggagcgggtgaggctgaatcaatctctgagggtcctggcagatcttgggctgaggcraaaactctgttcttgaagaagagaactttggctggcctcagtcacagagcggagggtgactgagcattgagatttgtaggttccaggctccagctcctaa

SEQ ID NO: 422036 - DNA, 201 bp, Homo sapiens
cctggcgttccgtatttctcggctagagcagcagttatgctccttgagttgggatgacccagtccctgggcacaggtgaggccttttctctttctaatgcytttgatattgagggttgaggacaggagccaagaacctcaggccaggctgcctggctggacttggtcctgttttgagctggcttctgaccctaagcaaggt

SEQ ID NO: 422037 - DNA, 201 bp, Homo sapiens
gctgttcactgtaggaccggacacagcctgtcccttggcaggtctcagtttcataatctgtacaatggtatggtgggagcgggtgaggctgaatcaatctytgagggtcctggcagatcttgggctgaggcgaaaactctgttcttgaagaagagaactttggctggcctcagtcacagagcggagggtgactgagcattg

SEQ ID NO: 422038 - DNA, 201 bp, Homo sapiens
ccccactatttccggtgaacttccagaaatgctctttctgtggaagaaatatttaactccgtattgcccctttcttcaggatctgcttcctggtcatgtcmtcatcctacctggcgttccgtatttctcggctagagcagcagttatgctccttgagttgggatgacccagtccctgggcacaggtgaggccttttctctt

SEQ ID NO: 422039 - DNA, 201 bp, Homo sapiens
gggaggctgggcctgagctgaagttgggtcgtgcctccgagcccatggtggtgggaggcagtcactgggtgtggcccaggtgtagagagggccttgccgcrgctggttccttggactgtagtcccagtggaaagattcaggcatggaggacatgtatggagctttctgggtgcctttgaggcccagtggtacccctgtctt

SEQ ID NO: 422040 - DNA, 201 bp, Homo sapiens
aaagggaggctgggcctgagctgaagttgggtcgtgcctccgagcccatggtggtgggaggcagtcactgggtgtggcccaggtgtagagagggccttgcygcggctggttccttggactgtagtcccagtggaaagattcaggcatggaggacatgtatggagctttctgggtgcctttgaggcccagtggtacccctgt

SEQ ID NO: 422041 - DNA, 201 bp, Homo sapiens
cagaaagacagcttctctgaacagtcctgtgtcctgcaaagagaaaccagacagagttgaggagcccccggactacaggtgaggacccctttcccagtcakagatacacacagactagagggtgggaagccctcaggaagtgacctgtttgtaagaggacctcaaggcagagccggggcccctttgcaggtctgtgaggtc

SEQ ID NO: 422042 - DNA, 201 bp, Homo sapiens
ggcaaggaagggcaccctcctcgggacgccccgcatggcccatctccgcctcgccactctgttcatcctttcatttattcattcatcattcgttgcccgcrgtatcgactcccagtcctaattgcccccgacccaaaggttggatttccctgcgtcccctggagggccagactgtttcctctcgccgccgaatccgtattg

SEQ ID NO: 422043 - DNA, 201 bp, Homo sapiens
actcgcttaagccagaaatctggagtcatacttgacaccttcttgtttttacctctcatccaattcatcaccatgtcagattgattatatttggaaatacrtattccaaatccatccctggccctccatcaccactgccacccagtccaagacatcatctctctgctgagctacagcctttcacctgatctctctccatgg

SEQ ID NO: 422044 - DNA, 201 bp, Homo sapiens
tttgcatttcctcagatccggaatcagccatttccccaaggagctgcttaattagaggagtattttctatcatttgggggtcataggctacgttgagagtstaataaaagtgaaatgctctcttcccagaaacatactcctttgttcagacccaacaattttgcccaaagttccaggagttcacagatccaccctccaact

SEQ ID NO: 422045 - DNA, 201 bp, Homo sapiens
gtatattagaaaggttaactcagtctttagtcttataatggggaataatgaatgactatttttcacatccttggtaatactgagcactataattttagtgyttactgataaaataggtaagatagattgttttctaaattgcttgttcatattctttgctcacttttctattaggttatttacctatttttattgacttgg

SEQ ID NO: 422046 - DNA, 201 bp, Homo sapiens; identical to SEQ ID NO: 239222

SEQ ID NO: 422047 - DNA, 201 bp, Homo sapiens
tgccccctcctctcctgccctgtctccccattcttgacatctccctgtgctggtgccatccctgccctctggcagcttctcaggctggggagctccctacytgcctcatgatgtgaaaagctcagggagtattttttgctgcatggggctggagagcaggcagacacctcctgtgccctctagggaggggccttcctgcct

SEQ ID NO: 422048 - DNA, 201 bp, Homo sapiens
aaatttagagcctggccttttgtgttgcttgcaccaaatctgtatgtctcaggtgaaactcactgttccatgaatggtcatccttttttttttttttttttggaaccagcccctttcaccctttcatccgtcttttttttttaggaaaataacccttcttgcttcagcacttctccctggtccttgctgaaagacagagat

SEQ ID NO: 422049 - DNA, 201 bp, Homo sapiens
tatccctgaagaacccagacagacttattttagatttgccaaagttccagaagtttcctttggcagctggggccctgggtaggcagaactgagtttctagrgcagggatggcgtagaaatgaccctggggtgtttgaaggctcctttagtaactattagtgtttagccaagcatgtgatatgcataataccatgtgccgga

SEQ ID NO: 422050 - DNA, 201 bp, Homo sapiens
cagggcatctcctaaacctgccacaccataatgcagagccaccagggcctcagcagataggctttcttttctttcttttttggacgacagagtcttgctaygttgcccatgctgcagtgcagtggcaccatctcatctcactgcaacttccacctgctgggttcaagtgattctcctgcctcaccctcccaagtagctggg

SEQ ID NO: 422051 - DNA, 201 bp, Homo sapiens
aattgctggaacccaggaggtggaggtttcagtgagccaagatcacgccactggactccagcctgggcgacagagagagactccatctcaaaaaaaaaaaataaaaaagccagaaaaaatttatacaaatgaagaaagaacttcaatacaaatgaagaaagaatttcacctgtgaattgtctataagacaatgaacttcca

SEQ ID NO: 422052 - DNA, 201 bp, Homo sapiens
ttttaatttaaagagacttgaaagttggccgggtttggtggctgagcctggtctgaaggcaggaaagctcctccctggagttgtcgtgagcgcctgctgcrtgctcagcactggactcaggggattcaatgaaggaccaggcagagtctgtgagcccctggagatgcacagtcatggcacacagacacagtgtgacagatg

SEQ ID NO: 422053 - DNA, 201 bp, Homo sapiens
acatatcgccatgtctggctaatttttgtatttttagtagagatgggatttcaccctattggccaggctggtctccatctcctgaccatgtgatctgcccmcctcggctcccaaagtgctgggattacaggcgtgagccaccgcgcccggccaagagttcttttagaacagttttaaattgtagttaagaaaaaaaaaaac

SEQ ID NO: 422054 - DNA, 201 bp, Homo sapiens
actcccctgctccatacctctcctgacagaaattaggtagttttttatggcttccaggactcctgacatgaattccacagctggggcatggggatgggacrggactggatgggacagagcgggaggagatgtggttcacaacccacagggcatgaacacctagcgcgacaaaaagtctgtgagtagagtctacagcggctg

SEQ ID NO: 422055 - DNA, 201 bp, Homo sapiens
ctgccgatctcaggtgattcacctgcctcggcctcccaaactgctgggattacaggcgtgagccaccatgcccgggtttgttgttgttgttgttgttgttktttttaatggagacatggtctcgctctgtcgcccaggctggagtgcagtggcgcgatctcagctcactgcaagctccacctcccgtgttcacgccattct

SEQ ID NO: 422056 - DNA, 201 bp, Homo sapiens
aacccaggaggtggaggttgcagtgagccgagatggcgccactgtactccagcctgggtgatagagcgagactctgtctcaaaaaaaaaaaaaaattaaayaaataaataaaagaaaaagaaaagaatttgtatttcttaaggcatttgatgtatattagaaaggttaactcagtctttagtcttataatggggaataatg

SEQ ID NO: 422057 - DNA, 201 bp, Homo sapiens
aatgagtggtgagggctgccatgaccctgtgaggggagccagcctcctgccccacgggcatgcctcaaagtcatgcctatctctctgcgtgctgggcccckggtgaagccccttgctggttggatgcgcagcttcgaggcatcccatccagtgtccaggaaagtagtcctgccccttcaaaaacaggggcccaatctggac

SEQ ID NO: 422058 - DNA, 201 bp, Homo sapiens
ggagagtggcaggatcagacccgggccccagctggccctctgggcagtgtgcatgtgggagagaggcagtgtgtacccgcacagccggaggcagttttggycagggagctgttgccagcatctgggaaaaggattgtggcctgggcttgcgtggtgtagtgggaatgagaaaagagatggttttatgggttatcttggggg

SEQ ID NO: 422059 - DNA, 201 bp, Homo sapiens
cgcttgaacccaggaggtggaggttgcagtgagccgagatggcgccactgtactccagcctgggtgatagagcgagactctgtctcaaaaaaaaaaaaaaattaaataaataaataaaagaaaaagaaaagaatttgtatttcttaaggcatttgatgtatattagaaaggttaactcagtctttagtcttataatgggga

SEQ ID NO: 422060 - DNA, 201 bp, Homo sapiens
cctagagcttctaatcctaagtgtttacccacggaagtgaatacttgcatgcacaagactggtactacaattttcatagcactttcataagaggcaaaaastggaaactgcctaaatgtccatcagtagtaaaacgaataaataaattgtggtctatccatatttcaaatgcattgctgagtaaaagcagacacatacacg

SEQ ID NO: 422061 - DNA, 201 bp, Homo sapiens
ggacaaggttgaataacagtggcgagagcaggcattcctaaggagcgttcccgcagttagacaatctggggttctccctggaggaggaggtcccaggaccyagcaagctcctcaagacgaggtcattggtcaggaatctgagccctcggccgagcccagcctgggggagccgagttggcaggagcctgggcagggcgcgca

SEQ ID NO: 422062 - DNA, 201 bp, Homo sapiens
actctgacatctggtgtgagcctgaacaccagaaaataatttttctcccttccaggaaagtgaaaatgatttccctcaattctgcagccatctctgatgcragtgtgagtttcacttgaggtcggccttggccactgtgcgctattcacctggacttcagggcatcagtctgtcaccacctgtcatcaccaacctttgaag

SEQ ID NO: 422063 - DNA, 201 bp, Homo sapiens
gactccatctcaaaaaaaaaaaataaaaaagccagaaaaaatttatacaaatgaagaaagaacttcaatacaaatgaagaaagaatttcacctgtgaattstctataagacaatgaacttccagtggttaataattatttggaaaaaactgttcaacctaccagtaagcagaaatacaaatgaagacaacgtattttcacc

SEQ ID NO: 422064 - DNA, 201 bp, Homo sapiens
cagtatcgactcccagtcctaattgcccccgacccaaaggttggatttccctgcgtcccctggagggccagactgtttcctctcgccgccgaatccgtatygtagcggcccgcggctgcggggaggcagctcggagctgtctcagcacgacgcggcctcccccgggcgccaggcccatcccggtcgggcgggctggggccg

SEQ ID NO: 422065 - DNA, 201 bp, Homo sapiens
tttaattcttccaactgcaggggtagcttggtccccactatttccggtgaacttccagaaatgctctttctgtggaagaaatatttaactccgtattgccsctttcttcaggatctgcttcctggtcatgtcctcatcctacctggcgttccgtatttctcggctagagcagcagttatgctccttgagttgggatgaccc

SEQ ID NO: 422066 - DNA, 201 bp, Homo sapiens
cactcccctgccccacttccatgggattacttggaaacaaattattaacacacaaagttgatagtatactttcctgtttaaatctctacattggttccccrttgcttttaagataatgaccaaaaccattatagaggcccatgggccctgcatgatctggccctgccaacccctccagccttgttgtttaccacttcgctg

SEQ ID NO: 422067 - DNA, 201 bp, Homo sapiens
aacaacaatttaagaaatctatagttatttaaatgctattcccagatattctgatttaactggtttgagacagagctcaggcatcatttttttttttttttaaaggactgcaggctgagcacagtggctcatgcctgtaatccgagcactttagaaagccgaggtgggagaattgcttgaggccaggaccagcctgggcaa

SEQ ID NO: 422068 - DNA, 201 bp, Homo sapiens
agctgcctgtcaggacctagcagcaccaggagacaagctgtgcttggcacacagccctccatactcactggctgcttactagctgcctcatgctaagtccscagcatgggccggggggctgtggcatttcctgttggctggagcagggcccctttggcggtctcatctcccagcgcttctcagacgcagcctgtgtgtttg

SEQ ID NO: 422069 - DNA, 201 bp, Homo sapiens
ttcgacgctggggaatggactgtttggggtttggggcctgcggtggggaagggggagtctgaggaagacaggtcctgaggctggactgtggactccagaaygtgaggacccaggtcctggggcttcctgggctgaccttgcttatggccattttctctcctgtgacatcctagtgtgttcctgtgccctccagagggactt

SEQ ID NO: 422070 - DNA, 201 bp, Homo sapiens
tgggggaccccatcagctcctgtccagcctgtcccctcctttcctgctgggtgtgtcattctctgcgccccctcactcttactgccttgctttttcctctscttctcccttttggggtgttatctctttttccctgtctctccttcattcattcagcaaacactgggtgctggctgtatgctggggatacagagatgtacg

SEQ ID NO: 422071 - DNA, 201 bp, Homo sapiens
cctggagctctgaggcttctgggcctcctaggggggcccacaatgcagaactggggcaccaggctcaagagtcagtggccatgctatgccagggcatctcytaaacctgccacaccataatgcagagccaccagggcctcagcagataggctttcttttctttcttttttggacgacagagtcttgctatgttgcccatgc

SEQ ID NO: 422072 - DNA, 201 bp, Homo sapiens
acaggtggatcccctgaggtcaggagttcaagaccagcctggccaacatggtaaaaccccatctctactaaaaatacaaaaatgagttaggtgtggtggtrtgtgcctgtaatcccagctacctgggaggttgaggctggagaatctctggaacctgggaggcagaggctgtagtgagctgagatcacgcaactgcattcc

SEQ ID NO: 422073 - DNA, 201 bp, Homo sapiens
tatgtgagactgttcattcacaatatgttgatcaacattagatagtattaactttaagcctttaaaatctaaaaagttaggaaaaaaagatattatggccmggtacagtgactcactcacacctgtaatcccagcactttcagaggctggctgaggctggcagatcacttgagcccaggaatttgagactagcctggccaa

SEQ ID NO: 422074 - DNA, 201 bp, Homo sapiens
cccagccattgcctgccctttcttgcctgccctctttatatatcagtaagttgtattgtttttgtatttttaggctttgaaatcaacttcatcaagtctcrgagcagcaacatgctgacgccctatgactactcctctgtgatgcactatgggaggtgaggaccctgccttcttctccctctgcttcccccagcctctccc

SEQ ID NO: 422075 - DNA, 201 bp, Homo sapiens
atttctgtacacccagttagaaaacacaattgttagtaaacataccattataatagcaatcataaaggtcccaaggaataaatctgacagctgtatcaaayatttgaggaaaaatgaacctttattaaaatcgttaaataatacttaaatatagataaatctgttattgaaaggaaggcaatgttataaaaattcagtctt

SEQ ID NO: 422076 - DNA, 201 bp, Homo sapiens
gcactatgggaggtgaggaccctgccttcttctccctctgcttcccccagcctctcccgtggtgatctggactcaggggtctcccgctgggttccaggctygccttcagccggcgtgggctgcccaccatcacaccactttgggcccccagtgtccacatcggccagcgatggaacctgagtgcctcggacatcacccggg

SEQ ID NO: 422077 - DNA, 201 bp, Homo sapiens
ggaaagtgggactggtaccagaagcagcatggtggctgtgggctcagcccctcagcttgggtgagttatgagctcccagaagactctcccagccattgccygccctttcttgcctgccctctttatatatcagtaagttgtattgtttttgtatttttaggctttgaaatcaacttcatcaagtctcggagcagcaacatg

SEQ ID NO: 422078 - DNA, 201 bp, Homo sapiens
agaatggtgaacctgagactagagcccagagtggggcctgcctgttgggagtttgtctatcttgtgttgtgtggggagggagagcccaggtctgtatgtcyggagggatctgggctggcacttaccccacttgctctcatcaccctgcaggtgcttctcgagtgtggggcgcagtggagggatgcaggtggtctccctggc

SEQ ID NO: 422079 - DNA, 201 bp, Homo sapiens
cagccggcgtgggctgcccaccatcacaccactttgggcccccagtgtccacatcggccagcgatggaacctgagtgcctcggacatcacccgggtcctcmaactctacggctgcagcccaagtggccccaggccccgtgggagaggtgagtggcatggcaggaaggtgacttgaacctggagaaggcgcctgtgctctaa

SEQ ID NO: 422080 - DNA, 201 bp, Homo sapiens
ttggaggcactgtcggcggaatccaggagccccgaccccagtggttccagtgcgggaggccagcccgttcctgcagggcctggggagagcccacatgggtkggagtcccctgccctgaaaaagctcagtgcagaggcctcggcaaggcagcctcagaccctggcttcctccccaagatcaaggcctggagcaggtgccccc

SEQ ID NO: 422081 - DNA, 201 bp, Homo sapiens
ctaattgtaaaactagaaagattcataaattcaactacattaattataactttgtccaaaggcaccaaaaagaaagtgaaaatacaggttacaaatagactttttttttttttttttgagacagtttcactctttttgcccaggctggagtgcaatggcacgatcttggctcactgcaacttctgcctcccaggttcaagt

SEQ ID NO: 422082 - DNA, 201 bp, Homo sapiens
ggagtgcaatggcacgatcttggctcactgcaacttctgcctcccaggttcaagtgattctcctgcgtcagcctcccttgtagctgggattacagtcacgcaccaccatgcctggctaattttgtatttttattagagatggggtttcaccatgttggctaggctggtcttgagctcctgacctcaggtgatccccctgcc

SEQ ID NO: 422083 - DNA, 201 bp, Homo sapiens
cacagagctctccagggttattctagaagtcagctcctggggggccaaggggaggcctcctgaaggccctggaagcagagggcctgcctggcagaagatargtgttgtgccccaggcctacttgtcttggggtgggggtaggctgtaagtccccactccagcctggtcaggcagggagtcatccaggctgagcccattgtc

SEQ ID NO: 422084 - DNA, 201 bp, Homo sapiens
taaatacagttaatataaaaatcatatttctgtacacccagttagaaaacacaattgttagtaaacataccattataatagcaatcataaaggtcccaagraataaatctgacagctgtatcaaacatttgaggaaaaatgaacctttattaaaatcgttaaataatacttaaatatagataaatctgttattgaaaggaa

SEQ ID NO: 422085 - DNA, 201 bp, Homo sapiens
accgaaagcttctcctattcagaaattgaaaaaaacaacaaaactttctttcagctctggagttaaagtacagcaattctaaaaaaaaatcatgaaagacwagaaaagccaatggttcacagctaaagcaatgctcagagaaaatgtgtagacttacgtatcagtaaacagaacaaattgagcatgtcaacccaagttaaa

SEQ ID NO: 422086 - DNA, 201 bp, Homo sapiens
aaagaactacacattaatataagaacaaaccagctgagtgtgatggctcatgcctgtaatcacagcactttgggaggctgaggtgggtggatcgcttgagcttaggagttcaaaaccagcctggacaacatatagtaagaccccgtctcttaaaaaaaatacaaaaattagtgggatagtggtgtgcacctgtggtcccac

SEQ ID NO: 422087 - DNA, 201 bp, Homo sapiens
cttgctaacagaaaagggaacactgtgcccaggatggcagccatgtgtttcaggcaactgcgaatggcagaaggctcctgaataggacagtgacccagggraaggcaagactgtcctgttggaggctgccactgacggcacagcctctggctgggcaggagagccagaggctggcccaaggctgcccgggaactccggggg

SEQ ID NO: 422088 - DNA, 201 bp, Homo sapiens
ggggttcaacttcattcttcatgtaactagccagttgttccagcaccattctttcccctacactttttttactgtactaaacatctaaaaaaaaaaatccytaaaggacagatgtggtgagaaatttgtgcgtaatttcttttgttgagatggagtcttgtgcacctcagcctcccgagtagctaggattagaggtgagca

SEQ ID NO: 422089 - DNA, 201 bp, Homo sapiens
cttggccattgtctaaaatgtattcctgggcccatcctccagggctcagtctccctgcccaccctgaggggtctgccaagtgtgagctggacctccagggyggaatgtgggaaagggatgggaacggtgctagaccctccatttacaaagccctcctctcccgggggactccatgaggtggtgaggagaggaggttttgcg

SEQ ID NO: 422090 - DNA, 201 bp, Homo sapiens
cagtgacccaggggaaggcaagactgtcctgttggaggctgccactgacggcacagcctctggctgggcaggagagccagaggctggcccaaggctgcccrggaactccgggggcagggcagaccctctgggttatgcagtgagtgctcgggcaggtggtgtgcgaccacccggagcagaatcaaatgcctccagccgatg

SEQ ID NO: 422091 - DNA, 201 bp, Homo sapiens
gggccgaccgggaccgctatatccgtgtcaactggaacgagatcctgccaggtgagccaggccacacgcaggacaggctggtgccggggaggggacagcayggcttgggcccaagtcgcctggtccccatgggtgaggctatccatcctccccatcacctgcctgcttcctgtggggaaggtgggggtctcacttctgtct

SEQ ID NO: 422092 - DNA, 201 bp, Homo sapiens
agcccgttcctgcagggcctggggagagcccacatgggtgggagtcccctgccctgaaaaagctcagtgcagaggcctcggcaaggcagcctcagaccctrgcttcctccccaagatcaaggcctggagcaggtgcccccggtgttgctcaggagcagtcctggctggccggagtgtccaccaagcccacagtcccatctt

SEQ ID NO: 422093 - DNA, 201 bp, Homo sapiens
gtggggagggagagcccaggtctgtatgtccggagggatctgggctggcacttaccccacttgctctcatcaccctgcaggtgcttctcgagtgtggggcrcagtggagggatgcaggtggtctccctggcgcccacgtgtctccagaagggccggggcattgtccttcatgagctcatgcatgtgctgggcttctggcac

SEQ ID NO: 422094 - DNA, 201 bp, Homo sapiens
gaaactatttgtaaataagcctttcttataattaccatttgtaataggtatcaaagacaaagcagaatgaggctcttgtacgaatgctacttgatgctggygtcgaagttaatgctacagattgtgtaagtttatacttttagccattttgaaaaaatattcaaaatggtatttgtaggtagcgtatttgtcatctgtaca

SEQ ID NO: 422095 - DNA, 201 bp, Homo sapiens
ctcactattttcaaagagtaaatttcttactagtccattatcatgctaacaaaaggcatgggtcaccagggacatcttttatgattgttttcacaacattwtgtagcaatggctcatgctcactgcagggaagctggactggatgaaggctgcaagattttgttattccttgacaacttttatgcttattcttcagctaaa

SEQ ID NO: 422096 - DNA, 201 bp, Homo sapiens
aataggcaaaagcttgaattctcactattttcaaagagtaaatttcttactagtccattatcatgctaacaaaaggcatgggtcaccagggacatcttttrtgattgttttcacaacattttgtagcaatggctcatgctcactgcagggaagctggactggatgaaggctgcaagattttgttattccttgacaactttt

SEQ ID NO: 422097 - DNA, 201 bp, Homo sapiens
atttataggagagagaaaagaactttaattcactaataaaaatataatctgctcatatcctcgaagaattctttaaaaattcattatgtatttagcacatrgcatttaaatacatgtattttgggggcagggagaatctgttatttatttacaaacatttttagagattctaaaggtaaaaattacaactgtgattagaag

SEQ ID NO: 422098 - DNA, 201 bp, Homo sapiens
agtgggtataagaatctgtcttctgatgagctctgctgtgtacatttcacctttgttgactcccaggagcccttccctagcttttcctttacactggaccragttctctgttctgctccatggaaagccgcattcagtaatcagatgtatcccacaggaaaagatgtcatgggtaccggaaaaacaaaaagcacaaactaa

SEQ ID NO: 422099 - DNA, 201 bp, Homo sapiens
ccctgatctgtgcttgcaggcgagggcatgtgagaatcgtttccttccttttaagaagaaatgctaatgtcaacctcaaaaaccaggtgaggtcatgacaygaatggagagtgtaattgttcatgataattcttttctctttgaatcactagaagtggtgcatgtcattttttaaattgcttgcagctcctaatacgaaca

SEQ ID NO: 422100 - DNA, 201 bp, Homo sapiens
attggtctaagctacgtacgagatcttgggcactctattggaaataactgtatatttttcccccctcagcatggtgagagctcactggatattgcacggakattaaaattttcccagattgaattaatgctaaggaaagcattgtaatccttgtgaccacaccgatggagatacagaaaaagttaacgactggattctatc

SEQ ID NO: 422101 - DNA, 201 bp, Homo sapiens
aattcctcatggctgagaaggcctcacaatctggcaaaaggcaaatgaggagcaaagtcaatcatggcagctggcaaaagagagcttgtgtaggggaactcccctgtataaaactatcagatctagtgagacttattcactatcatgagaacagcatgggaaagacccacccctatgattcaattacttcccactgggtcc

SEQ ID NO: 422102 - DNA, 201 bp, Homo sapiens
atcttagcctactttagaaagactgacacataccaaggacattttattaggctaaacagcaaaataaaacatagttcaatcagcaggcataatttgtgataaattatgtctttttacctctggttcacttatttggctggatagagcttctttcttttccttcttcctctcttcatcctcctctttcttcctctcccctct

SEQ ID NO: 422103 - DNA, 201 bp, Homo sapiens
tgcaatcattatgactgtcctgtacccacttatatgcattcaaggcgagaaaacactggaaatccccccttgccccttctaagtcatttggagactagctcatcaggagtaacaatgtattatcagaaaattgatcattactggacttttttatttatgcttactatttttggtttggttgcgattaaaagcaagtcatgc

SEQ ID NO: 422104 - DNA, 201 bp, Homo sapiens
gcaatcattatgactgtcctgtacccacttatatgcattcaaggcgagaaaacactggaaatccccccttgccccttctaagtcatttggagactagctcatcaggagtaacaatgtattatcagaaaattgatcattactggacttttttatttatgcttactatttttggtttggttgcgattaaaagcaagtcatgcc

SEQ ID NO: 422105 - DNA, 201 bp, Homo sapiens
tcaattatttacatcatttcggttttgcctatgctggtatcatgtttaaatgcaggcagttgtgtgtgtgtgtgtgtgtgtgtgtgtgtgtgtgtgtgtgwgagagagagagagagagagagcaaaagaaaataactttatgaaatttatattcccttttatttcaaatagaacttttggataaatttgtattgacagtta

SEQ ID NO: 422106 - DNA, 201 bp, Homo sapiens
aattatttacatcatttcggttttgcctatgctggtatcatgtttaaatgcaggcagttgtgtgtgtgtgtgtgtgtgtgtgtgtgtgtgtgtgtgtgagwgagagagagagagagagagcaaaagaaaataactttatgaaatttatattcccttttatttcaaatagaacttttggataaatttgtattgacagttact

SEQ ID NO: 422107 - DNA, 201 bp, Homo sapiens
ggttcctcatgggctaattcttgatctagacttaaagctaggcataactgagaccaaaaaatctcacctgcaaagcaatatattacaattttaaaacattwaaattttaatgtattgggttatgacttttttttcgtttttgtggtttaattatgccagtatttcaaaacctgcttttgtttttcccgacccagcccatct

SEQ ID NO: 422108 - DNA, 201 bp, Homo sapiens
tacagataaataagacaaaggtcaaagaaaaatcccactgatggtaagagcagtgataacaacagtagcagcatccgctcacttcttcctgtttatgagcrtaaggtgttgttttcactttcacctctgtgctcttgcactcatctttctttctcaatgatcacagaaagacaaaagtttatttctatggtgttttgctta

SEQ ID NO: 422109 - DNA, 201 bp, Homo sapiens
acttctatgagtttgagcaagttgtaaacttattttactttcagtgtcctcatcggtaaaatggggatatggataatacttatctcattgggcttgttcaygtaaagcacttagcacatgctcagaatgtagtaagtgctcattgaatggcaacagctgccactgcagccaaaatcccaacccactgatgagaggccccgt

SEQ ID NO: 422110 - DNA, 201 bp, Homo sapiens
gtacatactatgtttcaggcatcttctagttcctggtgtatatatgtatatatatatgtatatatacatatatacatatatacatatatatatatacacgyatatatgttgggcatccctaatctgaaaatttgagtggaagtgctccaaaactccaaatttttgagcacaaacatgaaacaagtagaaaatttcctactt

SEQ ID NO: 422111 - DNA, 201 bp, Homo sapiens
ttcaagggatttgagaggaagtcatttaacctctctgagtcacagttttaatattacaaaacaagagagctgaatgagatctggtttcacatttaacatcrtgtcattctgtgatatgagaaaggctaggcagagacaatggggaaaaaattgcattctcacaatcttcccagctctctccatctaccttgtttatgtatg

SEQ ID NO: 422112 - DNA, 201 bp, Homo sapiens
tacttttacttgtattggaagtaacttattagaatcaaatggatttttaatgatgtttcaagaaagtacaagcaaggaatgtttagacaagagtacaagargtgtaatgatgtcattatacataatttactctctctctcctctgacacaattaactggttaatctgcatttcattgcagatgctcaggggaaccttcttg

SEQ ID NO: 422113 - DNA, 201 bp, Homo sapiens
tgattatctactaattatcctcttaatgcctgttctgcttattgggtatttcctcatggtgagtacaacacttgtagagcaaagggcaaatgtggagatcratggtgtgactcattgactcttgccaggccagtgagatgttgaaaagaaataaaaacaaaaaaagcctttggtttgtattctgtaattgacatgttcaac

SEQ ID NO: 422114 - DNA, 201 bp, Homo sapiens
attaatcatcctcattaaggaatgaagttatcctattactattaggactgattgccttttaaagcccttgccaacacagagagtcaattggtctaagctaygtacgagatcttgggcactctattggaaataactgtatatttttcccccctcagcatggtgagagctcactggatattgcacggagattaaaattttccc

SEQ ID NO: 422115 - DNA, 201 bp, Homo sapiens
ttataggttcacttacatgctagtcctctaatccaaattctttaactgaatttaaggggattttagtaattttgttaactctgcagatgctggggaaggtktgtcgtataacatgatacagaatgtgatgaatgctattatgtacctcttgtgagtatctactgggttttcatcatctctgtatccctagagcctagcaca

SEQ ID NO: 422116 - DNA, 201 bp, Homo sapiens
tagttgtttttataggttcacttacatgctagtcctctaatccaaattctttaactgaatttaaggggattttagtaattttgttaactctgcagatgctkgggaaggtgtgtcgtataacatgatacagaatgtgatgaatgctattatgtacctcttgtgagtatctactgggttttcatcatctctgtatccctagag

SEQ ID NO: 422117 - DNA, 201 bp, Homo sapiens
tttaggaggtgacacaagagggaagcctaaggagagagaactggatggagcttcccaggtgatgacagggttgaactccagggctatacccagctgagcarggagagctttgcctcttcaggagactggaagttggggaagactccaacaggcttgtggtcagaagctcaggagactgggaaggaaaagtgaatttctgag

SEQ ID NO: 422118 - DNA, 201 bp, Homo sapiens
gagcccttccctagcttttcctttacactggaccgagttctctgttctgctccatggaaagccgcattcagtaatcagatgtatcccacaggaaaagatgycatgggtaccggaaaaacaaaaagcacaaactaaactttttgagatggccatctgaataaattttgaattgaaatgctttattagtaaagaatccttttc

SEQ ID NO: 422119 - DNA, 201 bp, Homo sapiens
cacatctcccacaacccttggaagctgacatctattacctgataagtattcacatatttgaagaataaaattgagttatatgcattcttctagactatgcrcatgaaggaacatgaaaaacagccatgtggttaagagttttcctatgaacaaaccacaaaatggataatcgtacacatggtagatgattaagggataact

SEQ ID NO: 422120 - DNA, 201 bp, Homo sapiens
cattttgggaggccaaggtggaaggatagtttgagaccaggagttcaagacctgcctaggcaacatagcaagacccccgcatctctacacaaaataataayaagtaaaaaattatccaggtgtggtggcacatgtttgtagtcccagctactttggaggctgaagttgaaggatcgcttgagaccaggaagtcaaggctgc

SEQ ID NO: 422121 - DNA, 201 bp, Homo sapiens
gaagaagaggatctgagttatcttctgaaacagcgttctcccttcccagttgtatcactcttataaaaagactgtccagtctatgtcatgccctaggagayaaactgttcctcccagccccctttgagtattgagcagaagaatcaaattattaaatacgtatgtttgtacagaatggtatttgtgtatgtgtgtgggctt

SEQ ID NO: 422122 - DNA, 201 bp, Homo sapiens
aacttaggaaaatgtaggaggttcctcatgggctaattcttgatctagacttaaagctaggcataactgagaccaaaaaatctcacctgcaaagcaatatrttacaattttaaaacatttaaattttaatgtattgggttatgacttttttttcgtttttgtggtttaattatgccagtatttcaaaacctgcttttgttt

SEQ ID NO: 422123 - DNA, 201 bp, Homo sapiens
tgtgccaagaaaacttaggaaaatgtaggaggttcctcatgggctaattcttgatctagacttaaagctaggcataactgagaccaaaaaatctcacctgmaaagcaatatattacaattttaaaacatttaaattttaatgtattgggttatgacttttttttcgtttttgtggtttaattatgccagtatttcaaaacc

SEQ ID NO: 422124 - DNA, 201 bp, Homo sapiens
gtattttgtctttagtaaagataaagataaaggtattttgtctttagtaaagataaagataaaggtattttatctttagtaaagaaaatgaatgcttttcygacaggcccacctacctgtaagcactatacatagtttccttactgagttgaatttgtagtatttcatttatttattcatccatttgatggacataagtgt

SEQ ID NO: 422125 - DNA, 201 bp, Homo sapiens
ctttttaaaagacatcatctgaagattagtctaaaaatattcagtgtttgcctcccatgtgctgagtgctgtgttgaatgctggagaaatagcagtaaatmaaatggggtttacggcctgaacttcagtgccttccttctcagcactgcctcaaacctctcctgattcatgctagccctaaatacatgattgtacataatt

SEQ ID NO: 422126 - DNA, 201 bp, Homo sapiens
cttttaagaagaaatgctaatgtcaacctcaaaaaccaggtgaggtcatgacatgaatggagagtgtaattgttcatgataattcttttctctttgaatcrctagaagtggtgcatgtcattttttaaattgcttgcagctcctaatacgaacaattatcttagcctactttagaaagactgacacataccaaggacattt

SEQ ID NO: 422127 - DNA, 201 bp, Homo sapiens
aaacaacactaaaaagtgggggtaatttgggggaagctttgcttttaaagacatccatagtggtacaagttgttcagatgtttctacactattaaaataayaacaaatattttttcagctgtgatatctattgtacttagagcagtgcaaaatattattaagtaatacatacagttaatcatcaacatgctgattatttta

SEQ ID NO: 422128 - DNA, 201 bp, Homo sapiens
ggtctaagctacgtacgagatcttgggcactctattggaaataactgtatatttttcccccctcagcatggtgagagctcactggatattgcacggagatwaaaattttcccagattgaattaatgctaaggaaagcattgtaatccttgtgaccacaccgatggagatacagaaaaagttaacgactggattctatcttc

SEQ ID NO: 422129 - DNA, 201 bp, Homo sapiens
ctatggtctgtggagggcccgacttatgagctgaagttttggccctttgtgtttcagtatggctgtaccgcattacattatgcctgtgaaatgaaaaaccmgtctcttatccctctgctcttggaagcccgtgcagaccccacaataaagaataaggtaagggagggtggaccgtggtctgaggttcctctagcagcagca

SEQ ID NO: 422130 - DNA, 201 bp, Homo sapiens
gcaggcgagggcatgtgagaatcgtttccttccttttaagaagaaatgctaatgtcaacctcaaaaaccaggtgaggtcatgacatgaatggagagtgtarttgttcatgataattcttttctctttgaatcactagaagtggtgcatgtcattttttaaattgcttgcagctcctaatacgaacaattatcttagcctac

SEQ ID NO: 422131 - DNA, 201 bp, Homo sapiens
aactcaggagtttgaaagcagccagggcaacacagcgagaccctgtctcaaaaaaaaaaaaaaaaaaaaaaaaaaaaaaaaaaaaaaaaaaaagccctggkgttccaaactcagtctttcctgaagaagaggatctgagttatcttctgaaacagcgttctcccttcccagttgtatcactcttataaaaagactgtccag

SEQ ID NO: 422132 - DNA, 201 bp, Homo sapiens
tctatcaattatttacatcatttcggttttgcctatgctggtatcatgtttaaatgcaggcagttgtgtgtgtgtgtgtgtgtgtgtgtgtgtgtgtgtgwgtgagagagagagagagagagagagcaaaagaaaataactttatgaaatttatattcccttttatttcaaatagaacttttggataaatttgtattgaca

SEQ ID NO: 422133 - DNA, 201 bp, Homo sapiens
ttacaatgtgtgaaatgttactgatatttttttcctgtcattatttttccaagtatgtgaaacatttatagttgtttttataggttcacttacatgctagycctctaatccaaattctttaactgaatttaaggggattttagtaattttgttaactctgcagatgctggggaaggtgtgtcgtataacatgatacagaat

SEQ ID NO: 422134 - DNA, 201 bp, Homo sapiens
aaagcttagtaaagggaagacttcaggataacagaataggtgatttgtgaaattgtgcatttctagtgaaacttaaagcccatgtatcatgttcatttcakttttaaggtacagaagtttgcctttaattgctgctgagttaattttctgttaggatgtttctttcatgagtaggcctttaggtttaagagtataacatag

SEQ ID NO: 422135 - DNA, 201 bp, Homo sapiens
atcgttatgttcctctctagtttctaaaatttttttacagaaaatataaatgccttcatattagaaaaacaaaaagtgttcttatttaggtacagtgcctygcataagtggaaactaacctcctttctttctcttgggctccctctcctcttactgatttgattggtattccaattaccaccttctgttttgccttatatt

SEQ ID NO: 422136 - DNA, 201 bp, Homo sapiens
gtgaattgtccacagtcaccggggaaggtagtaacagagccacaattacatcctgtttttctgacatgagacaagtgtttcaactgccccagtcctttctrcatcagccacacagtatgctgagacactgaagtgcccaactgttggaaagcttagtaaagggaagacttcaggataacagaataggtgatttgtgaaatt

SEQ ID NO: 422137 - DNA, 201 bp, Homo sapiens
cgaatatgaaaacccaagggaacttctgccttactccttcatttaatgactgaggacactgagatacagtagggaagtgaattgtccacagtcaccggggraggtagtaacagagccacaattacatcctgtttttctgacatgagacaagtgtttcaactgccccagtcctttctgcatcagccacacagtatgctgaga

SEQ ID NO: 422138 - DNA, 201 bp, Homo sapiens
aaaactttctcttttttttctttctttttttttctttttttgaggcagagtttcgctgtgtcgcccaggctggaatgaagtggcgcgatttcggctcactsccgaatcaagcgattctcctgtctcagcctccagagtagctgggattataggcaccagacaccatgccctgctaatttttttatttttgtatttttaata

SEQ ID NO: 422139 - DNA, 201 bp, Homo sapiens
aataacacacatacctttatttagatcaagggtgtggataagacagtggtaggagatgaagttgtaaaaacggcatatggaacacgtgagattgaaagaaktgtgtgcaatagtcttggtgagaatgatgaagatctgaagcagtactttagcagtgaggatggacagaagggttctgagactattaggggatagagttat

SEQ ID NO: 422140 - DNA, 201 bp, Homo sapiens
ggtcaggttggagaaggagtctggatgtataaccagtataaccagcaagtcagtgccacaagtggacagatcaatatcccgaatacagactgtagcttaaytttggacacaaatatcaaatgcgaagtcttgtagccagaagacattttgaaggctgatttttaagactaaagtgattggagatagaatgtacgcattctg

SEQ ID NO: 422141 - DNA, 201 bp, Homo sapiens
taattcttcatagacaatgtgctcaggcctctgtattcttccttcagccccatcactgtatgaaaattggcctctgcatggctgctaatgatcacattcartgatctttgtcttccttcttgaaactttcacttctttgcctttgagtcttaacgtttttctgtttcttctgcagactctctgatgacacttcttatctct

SEQ ID NO: 422142 - DNA, 201 bp, Homo sapiens
gtccaaataacatagctgttaagtcacagagttgagattggaacccagagagtttgtttccagagcctggatttgtaaccacttgatgacaccactttgcytacaaacgtgtggaacgttggctggacactgctacccccctctttgaagtctctagctttccctaacagctttttcactgccaaactgactacaattcct

SEQ ID NO: 422143 - DNA, 201 bp, Homo sapiens
tctttctgaaacttataaagaaggcatgattatcaaaagcagaaggaaacttagcatgaagagtctaggtaacttgtccaaataacatagctgttaagtcrcagagttgagattggaacccagagagtttgtttccagagcctggatttgtaaccacttgatgacaccactttgcttacaaacgtgtggaacgttggctgg

SEQ ID NO: 422144 - DNA, 201 bp, Homo sapiens
tgaggtctaaatggatttgtctggcccagagattcttcaagcctggtctccattataacttactttaacggaaatatatgccagttcctgttgctggtgtrttggagcaggctggagctggcttgagtcagcttgaactggtttgtgaaagccaattttgctcaactctgagttcgttgctctctcttttgtaggttgaaa

SEQ ID NO: 422145 - DNA, 201 bp, Homo sapiens
aaatagctgaagttaagttttggttatgtttgcaaattgagcaaggttaaggtcacttatgaggtctaaatggatttgtctggcccagagattcttcaagyctggtctccattataacttactttaacggaaatatatgccagttcctgttgctggtgtgttggagcaggctggagctggcttgagtcagcttgaactggt

SEQ ID NO: 422146 - DNA, 201 bp, Homo sapiens
gctggaaagtctctatgtaagttaggcttctgattagttaacttggtttcatttttctttaatatagggatttataagaaatagctgaagttaagttttgsttatgtttgcaaattgagcaaggttaaggtcacttatgaggtctaaatggatttgtctggcccagagattcttcaagcctggtctccattataacttact

SEQ ID NO: 422147 - DNA, 201 bp, Homo sapiens
ccagtggatggtggtgctgatgagatgggaacactcagagaggggcagaaggaaagacacatttcagggttctatttggacatggtactttagcgatatcsatgagacatctaggtggggatggaagatgaatacaggaaatgtacctttaaggagaggctcgggcaagagataataatttaggagttgtctgcatataca

SEQ ID NO: 422148 - DNA, 201 bp, Homo sapiens
acaatggggaaaaaattgcattctcacaatcttcccagctctctccatctaccttgtttatgtatgaactcctagcaagattttggtattcaacaacataygcaagaagagcatcaggcgttttcatcccaactggttttctaattctttccttgtatattgaaagtaattttacaaattaaaatgttgtgctaagtcaca

SEQ ID NO: 422149 - DNA, 201 bp, Homo sapiens
gcaatatatatttttaagaaagaaggagagaatgagggaggatcccagagagctggtcctgaaatctgcactagaggataagcttagagctcagtgagagrccctaattttgaataagtaactccaactgcgtaagatggacttttaaacaaggctgattcatttaaacccttatcaaaggtatttgttcataatatttac

SEQ ID NO: 422150 - DNA, 201 bp, Homo sapiens
aaaaagcgtttcttgaaaatcatatcttaaatgatgtattcctttaaacattgggaagttctcattataaggctgtaagtaaaaggatgcacacacacccmcacacacacacacacacacatgcacatgcacacacacaaacttaaaattaatcctttggcaatggatatgtttttcagagaagctgatgttactacagaa

SEQ ID NO: 422151 - DNA, 201 bp, Homo sapiens
ccatccatttgtttaatcaaccatatttattgagtacatactatgtttcaggcatcttctagttcctggtgtatatatgtatatatatatgtatatatacwtatatacatatatacatatatatatatacacgcatatatgttgggcatccctaatctgaaaatttgagtggaagtgctccaaaactccaaatttttgagc

SEQ ID NO: 422152 - DNA, 201 bp, Homo sapiens
atttgtttaatcaaccatatttattgagtacatactatgtttcaggcatcttctagttcctggtgtatatatgtatatatatatgtatatatacatatatmcatatatacatatatatatatacacgcatatatgttgggcatccctaatctgaaaatttgagtggaagtgctccaaaactccaaatttttgagcacaaac

SEQ ID NO: 422153 - DNA, 201 bp, Homo sapiens
ctggcttacatatgatgcccattaagactgaatttaatggtaaaccactctcctctcatttctcttgcctgacagacatgtttcctaatccttgctcttgscctcttcactttctgtactcttccctcatctaggtttgctgaagaaaatcacaaactcacatggcaggctcagtcaactctatcttcttactgtgtttct

SEQ ID NO: 422154 - DNA, 201 bp, Homo sapiens
tcagtattagtatgatccaaaatggagtaaaaactatttgcaaatatattattgaaactgcaaatcacagtagacctataaaatttcctgtaagcaagaaytggcaagtaacaattcataacactatgtctattattaccacattacaatgtgtgaaatgttactgatatttttttcctgtcattatttttccaagtatgt

SEQ ID NO: 422155 - DNA, 201 bp, Homo sapiens
ctcgctggaggtgaaggatcttctgctttcccctggtcctcatgacctcagagtttctgatgtcctggagtcagaagtgtggcaatggggtttttttagcytcctggcaaggaacataacttcatgttctcaaacagacctttcaggataaagagtagaaaacatagatcaatatgtgccctgcttctatttccccttctg

SEQ ID NO: 422156 - DNA, 201 bp, Homo sapiens
cttgatacatagctcccctaatcttaaagttattaagattagaaataccttttttggaaaactgaaaaagagatgagaatgggaggcgtttactatttggraacccataaagtactatttaatacaacaaaatggtttacatactaattaactgggaagtcttaacactaactttctaaactgaaggtagattttgtcaaa

SEQ ID NO: 422157 - DNA, 201 bp, Homo sapiens
aaggcgagaaaacactggaaatccccccttgccccttctaagtcatttggagactagctcatcaggagtaacaatgtattatcagaaaattgatcattacyggacttttttatttatgcttactatttttggtttggttgcgattaaaagcaagtcatgcctgtgctgaatggaacagatatgcaacatcgtggactataa

SEQ ID NO: 422158 - DNA, 201 bp, Homo sapiens
cattgactcttgccaggccagtgagatgttgaaaagaaataaaaacaaaaaaagcctttggtttgtattctgtaattgacatgttcaacatacatccaatrctataactgaagtacagcaagaagaaagctagcaaaaatagttaatcaatggtaacataatccatgcaatgttgatttagaaaaataatttaaccttaac

SEQ ID NO: 422159 - DNA, 201 bp, Homo sapiens
tcttgccaggccagtgagatgttgaaaagaaataaaaacaaaaaaagcctttggtttgtattctgtaattgacatgttcaacatacatccaatactataaytgaagtacagcaagaagaaagctagcaaaaatagttaatcaatggtaacataatccatgcaatgttgatttagaaaaataatttaaccttaactaagact

SEQ ID NO: 422160 - DNA, 201 bp, Homo sapiens
ttccatgtgcttttccccaaatgtgactttattaatttagccatgtgagaatggtgtccttagatcaatcagtgtaaatataaaacattttcgtaaacagyatgttatcagcagtgaacataggtgtgggtgtttcgcataaaggatgttgtatatgctgttgccaatgcttgtaatgcagtaactaaagacagttgtgca

SEQ ID NO: 422161 - DNA, 201 bp, Homo sapiens
ccagagcactcaacacttatagaaaaacaagctgattgatggcaggttattggttaactatgcctattttttagaaaattaggccgggcgtggtggctcaygcctgtaatcccagcactttgggaggctaaggcaggcggatcacgaggtcaggatattgagaccatcctggcaaacatggtgaaaccctgtctctaataa

SEQ ID NO: 422162 - DNA, 201 bp, Homo sapiens
ggcaggcggatcacgaggtcaggatattgagaccatcctggcaaacatggtgaaaccctgtctctaataaaaatacaaaaaaattagccaggcatggtggygagcacctgtagtcccagctactcaggaggctgagccaggagaatggcgtgaacccaggaggcagcagagcttgcagtgagcggagatcacgccactgca

SEQ ID NO: 422163 - DNA, 201 bp, Homo sapiens
aatgtctccagtgaaggaggttatggttctagaaatgcgcaatgcatgacctgtgttatcacatgtacctctaggacagattgcctttattatttatatgytttaatgtcagcaggcaagtcagggactctgcttggaagaggcttaaatagaaaaatcctcctacattaaggaatgcatataagaatatattcagataag

SEQ ID NO: 422164 - DNA, 201 bp, Homo sapiens
taatgctatattagaaactattcatttaatgcaaaagaaagcagtaaatgtcaggcctctgagcccaagctaagccatcatatcccctgtgacctgcacgtatacatccagatggccagaagcaactgaagatccacaaaacaagtgaaaatagccttaactgatgacattccaccattgtgattcgtttctgtcccaccc

SEQ ID NO: 422165 - DNA, 201 bp, Homo sapiens
ccagtgaaggaggttatggttctagaaatgcgcaatgcatgacctgtgttatcacatgtacctctaggacagattgcctttattatttatatgctttaatktcagcaggcaagtcagggactctgcttggaagaggcttaaatagaaaaatcctcctacattaaggaatgcatataagaatatattcagataagtagagtc

SEQ ID NO: 422166 - DNA, 201 bp, Homo sapiens
gggctcagtttttcttgcctcatgtttaattataaactaaatatttttcatggttatctatgagaactctgtgttagaaaaaggaaaaaaaaaaaggatgrgggggggggcctgtcaggttagaagcaagttgaagtctgtcatattagattattcttattatcattctgcaaaaggctgggcacagtggctcagtccttt

SEQ ID NO: 422167 - DNA, 201 bp, Homo sapiens; identical to SEQ ID NO: 283832

SEQ ID NO: 422168 - DNA, 201 bp, Homo sapiens; identical to SEQ ID NO: 283871

SEQ ID NO: 422169 - DNA, 201 bp, Homo sapiens
gtgaaccatgctactgtgaacagggcatgtaagtatctgttcaaacccctgctttcagttcttttggatacatacccagaagtagacctgttggatcgccsaggctggagtgcagtgacgtgatcttgactcactgcaacctctgcctcccaggttgaagcaattctcctgcctcagcctcccaagtagctgggattacag

SEQ ID NO: 422170 - DNA, 201 bp, Homo sapiens
agacgaacttagctttggtcaaccggcaacagcaaggcaggctggttgtagggaaggtgggctcagacgtggccccagaggtacccctcacccagcatccycagccgtggctgactcttccctgggagttgtgatcagaaatggggtggagcccagcgcggtggctcacgcctgtttccagcactttgggaggctgaggtg

SEQ ID NO: 422171 - DNA, 201 bp, Homo sapiens
cagagagcatcactgctctgatgaccggacccaggctgcaggttctggagtctgtagccacttccccttcctcccaggcagagatgaacgtgacagggatsagatgtacatggcaatttcagatgggagttgaagaatgctgagctctgtagaaaatgtaggggaaatttagcaaagcaagccacgcgtcatggatttcaa

SEQ ID NO: 422172 - DNA, 201 bp, Homo sapiens
gatttccctttgctgagcagaggggttccctctgagtgaaaccccagatgtgggtgcaggggttggtcttcctggtcaacactgagtccgggtggacatgkatggccagggagcccgggttgtccatgatgttgaggccctgggctgtaagccccaagcacagggctgctgtggggagaacagttgaagagacagcgtgtt

SEQ ID NO: 422173 - DNA, 201 bp, Homo sapiens
tagtagagacggggtttcaccatgttggccatgctggtcttgaactcctgacctcaggttatctgtccacctcggcctcccaaagtgctgggattagaggygtgagacactgctcccggcctcatttggtcattctgtgtttaattttttgaggatttgccagattgttttccacagcggctgcagcattttacattccca

SEQ ID NO: 422174 - DNA, 201 bp, Homo sapiens
tgaagttttttttttcctttttactatataagcagtataactcagggtagaaagcctgcaatgtacctaaaattagcaagtctgttctcattgccccaggyaatttctgttgacacctttgcaccctcctctgtctcgcctgggtgtaccgtgttgtcatagtggcacaatcatatggttttgcgtctcttcttccctgaa

SEQ ID NO: 422175 - DNA, 201 bp, Homo sapiens
ccatggggtaggtgttgtctctgatactgtcgcaggtgtggagctgctccgcttaccccgggtcttccgacaggcctctccagactcaagtagtgctttgycctctggggagagctatgggcagaccagggtgggagggagtgagacctgagcagtggagacggagcccaggacggggtactatgaggacaggagcaaggc

SEQ ID NO: 422176 - DNA, 201 bp, Homo sapiens
ggggaagggtcccaggcatggccggtgtgctgtcgcagggaagggtgtgaagggagtggaggtagaggggtgctgtgcctcaggcctgtggccagtactcrgctcttctgggtggccctggagctgtgctgggggctactgtctgctgctaagtgggtgggctgtgtggatgtcacccttggcaccggtggcaggaggagc

SEQ ID NO: 422177 - DNA, 201 bp, Homo sapiens
ttcagtgtacctcagtgacgtattaaaaagctaaagcagtgtttttgagttgaaaaatagtgagctttgtatggcccctgacagttcccagagctattttrcacaatggtatgttccagcccaagaccaccctctgccatgctgcccggggcctggcacagggagagctcgccaagaggttgcagggcaccagtgttatgc

SEQ ID NO: 422178 - DNA, 201 bp, Homo sapiens
gtgaggggtataggtggggcagtcagtgagtgcttccagcaggtgacacggagctgcagtctgctgggggaagggtcccaggcatggccggtgtgctgtcscagggaagggtgtgaagggagtggaggtagaggggtgctgtgcctcaggcctgtggccagtactcagctcttctgggtggccctggagctgtgctggggg

SEQ ID NO: 422179 - DNA, 201 bp, Homo sapiens
gaggatcccttgaggtcaggagtttgagaccagcctggacaatatggtgaaaacctgtctctactaaaaatacaaaaaaattagccaggcgtggtggtgcrtgcctgtaatcccagctacttgggaggctgaggcaggagaatctgggagatggaggttgcagtgaaccgagatcgcaccactgcactccagcctgggtaa

SEQ ID NO: 422180 - DNA, 201 bp, Homo sapiens
gtgagccatcgtgcctggcctagtttttgttgttgttgttgttgttttttgagacagagtttcactcttgttgctaggctggagtgtaatggtgttatctyggctcactgcaacctcagcctcccaaatagctgggattacaggcatgcaccaccatgccctacaaattttgtacttttagtggagacggggttttaccat

SEQ ID NO: 422181 - DNA, 201 bp, Homo sapiens
agaaatgtatcttagcacaccactttgggtacagtgagggtttttttttttttgagatggagtcgcggtctgtcgcccaggctggagtgcagtggcgcgatctcggctcactgcaacctccgcctcccgggttcacgccattctcctgcctcagcctcccgagtagctgggactacaggtgcctgccaccacgcccggcta

SEQ ID NO: 422182 - DNA, 201 bp, Homo sapiens
cagtctcctgagtagctggggccacaggtgtgcaccactgcacctggctaagttttaaatttttttgtagagacggggtctcactatgttgccaaggctgrtttcaaacgccggggctcaagtgatttccctgcctcagcctcccaaagtgctgtaattacaagagtgagccatcgtgcctggcctagtttttgttgttgt

SEQ ID NO: 422183 - DNA, 201 bp, Homo sapiens
ccacgaccccctggccgatgtcagcaatgacctgggccacagcggccgagactgtgagcacggagaggcggctgccccagcccccactgtgcgcctcggcytgcccctgctgacggactgtgcccagcccagcaggccacacggcagcccctcgcgcagcaagcccaagaagaagtccaagaagcacaaagacaaggagag

SEQ ID NO: 422184 - DNA, 201 bp, Homo sapiens
cagtggcccctctctcctgtttcaggaagtacgcagccatctcctcttcggagcagcgccagagctacaagaacgacttcaatgccgagtacagcgagtaycgcgacctgcacgcccgcattgagcgcatcacgcggcggttcacccagctcgacgcccagctccggcagctctcccagggctccgaggagtatgaggtag

SEQ ID NO: 422185 - DNA, 201 bp, Homo sapiens
cacctgccacacagtcatcccctctgctatccctctatgtccctccagcagcaaagtgtacagttttcatgcatgtccccatcctggcgtgcttcctgccraccggtgccatgggcgcagactcaggaggtatgtgtttgctctcgtaggtttaaacggaacctgcagcgtttccagtgttcccacgtccacgtcggagac

SEQ ID NO: 422186 - DNA, 201 bp, Homo sapiens
ttggggctgcaatgagccatgattgtattacactccagcctgggtgacagagcaggatcctgtctcaaaaaacaaaacaatccttccccccccgccccccrcccaaacacacacacacacacacacacacacacagcccactagagtgatcaggtgatttcatacacgcacacacacattgcccaccagagtgatcaggtg

SEQ ID NO: 422187 - DNA, 201 bp, Homo sapiens
cacctcagcctcccaaagtgctgggattataggcgggagccaccgcgcctggccagctgcttcactttagtgggctgttagctttggggctcttggtcctsggccatgctgccggcagcctgccacagagcctgcactgggctcatcgttgtcggaacgccccctggatggtgttccttcatggatccagtcagccagcat

SEQ ID NO: 422188 - DNA, 201 bp, Homo sapiens
tatttttagtagagatggcattttgccatgttggccaggctggtctcaaactcctggcctcaagtgatctgctcgcctcggcttcccaaagtgttgggatwacaggcgtgagccaccacacctggcctcgtgttttgcttaagcacttaatgggtttgctctcaccttgctaaatattatttggggtcattgatgcagttt

SEQ ID NO: 422189 - DNA, 201 bp, Homo sapiens
taaggaattatgaagctaagaaaagttttgtgttttgggggttggtggacaaagttctagctgattaaatatggtctaacttattgatactatttttttttcttttaatgttgtactgtggagaaaaactattttgagccatggggttggtgtttacaagaactttccacttttgccaaaatgttacaattgaaaggcatc

SEQ ID NO: 422190 - DNA, 201 bp, Homo sapiens
gagtgggccatggacgtgttgcaccatggacagtggtggcttgcgccgtgaatcgtgctcgctgtggagtgggcccatgtatttgttgaggggtggcgtgyttgagaagcatggggcagtttctggggcatcacggcctgggtggtgttagcgtgcaggggcaccatccctctgttctcccctaaacagcagaatccttgg

SEQ ID NO: 422191 - DNA, 201 bp, Homo sapiens
aaagtgctgggattacaggcgtgaccaaccgtgcccggcctatttttagtttttaattgtgaagaggcttttacaaattcaggtgtggcaggggctagaarggaacttgctgtggaactttctctgtggctcccaggagcaggtaatcctagctctgggaacagcccaggtagaagccctcctgttttctctccccagagg

SEQ ID NO: 422192 - DNA, 201 bp, Homo sapiens
gctctagacgagccccccttgtcgcagtagcacagtggcccttgtgactgcagcagctgtttcctggtcttggaacaggacaagggagtgggccatggacrtgttgcaccatggacagtggtggcttgcgccgtgaatcgtgctcgctgtggagtgggcccatgtatttgttgaggggtggcgtgtttgagaagcatgggg

SEQ ID NO: 422193 - DNA, 201 bp, Homo sapiens
tcagcttcttttagattagctgctctgatgggtacagagctatctcagtgtggttatgtttttttttattttttaaaatatttttatggctatcaatctargtcactatggttacagtttgcatttccttgatgagtaatggcatccggtgtcttttcacaccttaattggtccctataggtctctttttcatgtctgtgt

SEQ ID NO: 422194 - DNA, 201 bp, Homo sapiens
gaatttcttccccctgtttcgtttccaccactctcccggtgcccaccccttccgtgcttcttcccatgtctttgggcaatttcctccctgtcccggtgtckcagttttccccttcatggaatgaggatttcatttttttttgaaagagcaagttcgcaccttgtcaaaaagactccccaagatgaggctaaggcgcccctg

SEQ ID NO: 422195 - DNA, 201 bp, Homo sapiens
tgggctactgccgctttttggattctctaaataattctgctataaatgttcaggtgtaagtttttgtacggaagtgtgtttttgtgggtgtatacccgggagtggaattgctgggtgtgtttaaccctttgtttaaccttttagaaaactgccaggtggcttccacagtggctgagccttgtccactcccgcccacgacgg

SEQ ID NO: 422196 - DNA, 201 bp, Homo sapiens
agcaccccgccggctcttgaggtcaccctgccacctctggcccagggttgagatgtgccccattgaaaccatattgcctgagatggtgttgacagagtccrttttccaggccaggtggtgggctgggggcttgggccctcaacggatcctccctgcattgtcccagctgctgaccccagctcctggccttgtcttgcagtc

SEQ ID NO: 422197 - DNA, 201 bp, Homo sapiens
cccccgtctgtgctgggtcagaagttgcagatgaccagtggtcaggtcccgaggggaagtggtttaggaaccttgtaactccttttctggaaattgggggyttcattgccctaaagggagtgggggtgggtctagtctcgggctcagagagccctgctccctgcgtgtgtgtgtgtttgtgtatactgttgatggtggggg

SEQ ID NO: 422198 - DNA, 201 bp, Homo sapiens
gttttgaccctctaccctcgcccggctgcagccactccccactcccacctccagccctggacacctgctggtcggctttctgtctctttggttttgccttwcctggggatttatagaaatggagtcatacagcctgtggcatgacgtgcagccttctttcacttggcatggtcctctgtattccattgtttgattctctct

SEQ ID NO: 422199 - DNA, 201 bp, Homo sapiens
tttccatctggggccggggcagcgccgttggtgggggtgactgtgtctgtcctcctgggaagcagcgatcgtctgggtgcccggcagggggtggtcagcgrggcacttgtgggggtctgttctgtctgggtggaaggctttgcagctgggggctggctttgacgcgttccgatgaagccactcaggttgggccactttggt

SEQ ID NO: 422200 - DNA, 201 bp, Homo sapiens
gccattctgccttggtgcttcctttgctccgtgtggttcttgtgtcttacgccagttccctttcactcgtgcattgaaaatggttaacggacaggactctmctccgtctgttccagaactcgccgtgtgtgtgtcagagaatgttgctcctgtgccctgagtcaacaaagacggcccctgtgagctcaagggcagttggga

SEQ ID NO: 422201 - DNA, 201 bp, Homo sapiens
tttgtgggggctccctgagtggggtgggctgggccattctgccttggtgcttcctttgctccgtgtggttcttgtgtcttacgccagttccctttcactcrtgcattgaaaatggttaacggacaggactctcctccgtctgttccagaactcgccgtgtgtgtgtcagagaatgttgctcctgtgccctgagtcaacaaa

SEQ ID NO: 422202 - DNA, 201 bp, Homo sapiens
caccctcagccttgcacagctggggctgccctggcacagttccttgggggggttgtgcaccctaactggttcctgtcccttgtcaccctaactggcctcascatcatcactgttttctgagccctcatccctggctcacagctgcacatgcagaggcctcgcatggacagtagacagggtgcttgtgttagccccgggccg

SEQ ID NO: 422203 - DNA, 201 bp, Homo sapiens
catccctccactgcagtgcatactgccccagagtggccactcgtacagggggcagggggactggcttctgctcactcagccagggcttgtggctcctcctyttctcctcagtggggcagccactgccgcctgtcactctgcctaccagccctgtctccgcaggctctcggccctcctccttcagctgcagtgggagctggg

SEQ ID NO: 422204 - DNA, 201 bp, Homo sapiens
tcatgcggggcgctgcttccaagaagcctttagggtcctcctgacgcctgaagcaaggaagttgcaagctgtgctactcagggcagctgggtgggtgttgygccctccctgatggggatgcgagtgagtgggtgggaatggtggggcccaccaactcctgcttgggctttttgctgctgttgccagttcctctccacaccc

SEQ ID NO: 422205 - DNA, 201 bp, Homo sapiens
aggggcacagtgtggcaaagtctccagccggccctcaaatggttcaagaagcaagtgtgttgctacatctaagtatgtggataataggcgtgggtgggggsgaggggcaggtggcagaaacgtcacagaatatggctgttctttgtactgttcttgcaggttttttgtaagttgagattgttttagattgcgtccaggaga

SEQ ID NO: 422206 - DNA, 201 bp, Homo sapiens
cgggcccccatgtggatacaggcctggggcccctaggccccctcagcaccttctgacctagccctgcctctccttcgcaggaagctgtgccagccacagarcactggcagcctccttggagaccctgctgcctccagccccccaggcgagcgtgggcgctcggcctcgcccccacaggtaagtgaggcatgcctggggtga

SEQ ID NO: 422207 - DNA, 201 bp, Homo sapiens
tggtagtgccacacagtcatgtcactgccccaaaaatcctccaagctctacctactcatccccttcctcccctctgcccgctggcatccaccgatgctctyactgtctccatagttttgtttttctccagcgtgttctgtagttggaactgtgcagtgtgcagcctttctagactggctgatttagtcgtatgcttttaag

SEQ ID NO: 422208 - DNA, 201 bp, Homo sapiens
cgcacgtttccagtgcctctgggcaaataccaaggcgtgcaattattgcattggatggtgagagtatgttagtttagtttttcaggaatctgttgaggccrcaccattttgcatgtccaccggcagtgaatgaggttcctgttgccccatgtcctcaccagcacttggtgctgtctgttctgagttttgggcattctaata

SEQ ID NO: 422209 - DNA, 201 bp, Homo sapiens
ggtcccaccgtgaagggacctagctggctctgcctgtctgcagccgacactcacctcctgggcccttgattggcttgtcagggcactgcaccccagctgcwttctgtgttttttctcatcccccccacccagtccttgtgttctcatcaccatctatttagcaccccacattcaaaaccccagcctcactaccgtaattta

SEQ ID NO: 422210 - DNA, 201 bp, Homo sapiens
tgcagcctgaggccaaccccaaagcttctaaggcagcagggaaatcacctgtgctacagtctgttcctgaccctctgtcctgcttcatagatgaggtaacraggcgcttggcccccctgacaagggttcggccatgacaccacgcatgttggctctggagggagcagccagaagagggtgtggtgggccacatgctgtcag

SEQ ID NO: 422211 - DNA, 201 bp, Homo sapiens
tgcaggtgtcatgtgctactgagttaccccgttatttaattaatgcagcctgaggccaaccccaaagcttctaaggcagcagggaaatcacctgtgctacrgtctgttcctgaccctctgtcctgcttcatagatgaggtaacgaggcgcttggcccccctgacaagggttcggccatgacaccacgcatgttggctctgg

SEQ ID NO: 422212 - DNA, 201 bp, Homo sapiens
tgtcaggccagctgtggcggccctaccaggctccccagctcccacctggggccctggcctgaagtacagcagcgggggtgactttgtatctcaggagctcscagttccatacctcatgctgggtaatgaaagttggatttttgccactcgagggcctgagaggacttgtgggggtgatgacccctcagagggtctacagag

SEQ ID NO: 422213 - DNA, 201 bp, Homo sapiens
cagcctgggacaatctgaacatgaagactttaagggcagtgtcgtgctccaggccatttgcaaaaggtagcctgtgagtctgtattggtcagggctctcamaacagaatctaaagggagtgtgtgtatatgtatatttagagagaagagaggtaggtaggtaaatataaagtcatctttattttatttattttttagactg

SEQ ID NO: 422214 - DNA, 201 bp, Homo sapiens
tagagcccccccgctgcctactgtgccctggctctggcgggagccagggcccacttgggcgcgcaccatcgccaccacgagcctagtggcctgcttggtggccccagagtctggcccttccccaggcagcgcttctccccctggtgcactccatgcagcaaccccatggttctggcccggccctggggtcctgttgtggga

SEQ ID NO: 422215 - DNA, 201 bp, Homo sapiens
ccttgggggaggtgttggccaggtggatcccaggaggatctagactgcagtaggcacaggggtcacacagcactgagtgtgagtaccatgaaggggccagygtgggctgctgggggctgcagggctaagcctgccggccttatcaggcagctggggtgtgcagggagtgatccaatagatacttgggtaagattcccctct

SEQ ID NO: 422216 - DNA, 201 bp, Homo sapiens
gtagagcccccccgctgcctactgtgccctggctctggcgggagccagggcccacttgggcgcgcaccatcgccaccacgagcctagtggcctgcttggtggccccagagtctggcccttccccaggcagcgcttctccccctggtgcactccatgcagcaaccccatggttctggcccggccctggggtcctgttgtggg

SEQ ID NO: 422217 - DNA, 201 bp, Homo sapiens
ggtagagcccccccgctgcctactgtgccctggctctggcgggagccagggcccacttgggcgcgcaccatcgccaccacgagcctagtggcctgcttggtggccccagagtctggcccttccccaggcagcgcttctccccctggtgcactccatgcagcaaccccatggttctggcccggccctggggtcctgttgtgg

SEQ ID NO: 422218 - DNA, 201 bp, Homo sapiens
ggcagatgcaaaaggtggaataataagggggaaaggcaaagttaaggtgttggcaggagggcttgtgccaggcatgggttgcatggctctgagatgcactstcctggaagcaggcctgggccatgcctggagattgacccatggaggtgcaggcagggtgggcagggcaggcagggtgcttgtccctcccttggagggaga

SEQ ID NO: 422219 - DNA, 201 bp, Homo sapiens
gaagcgacctgcccgccttggcctcccaaaatgctgggattacaggcgtgagtcaccgcacctggcctgtttctttatttttatttctttatttttgagayggagctttctgctctgttgcccagactggagtgcaatcacgtgatcacagctcactgcagcctcaacatcctgggctcaagcgatcctcccacctcagcc

SEQ ID NO: 422220 - DNA, 201 bp, Homo sapiens
gaggtagagcccccccgctgcctactgtgccctggctctggcgggagccagggcccacttgggcgcgcaccatcgccaccacgagcctagtggcctgcttggtggccccagagtctggcccttccccaggcagcgcttctccccctggtgcactccatgcagcaaccccatggttctggcccggccctggggtcctgttgt

SEQ ID NO: 422221 - DNA, 201 bp, Homo sapiens
atgaggtagagcccccccgctgcctactgtgccctggctctggcgggagccagggcccacttgggcgcgcaccatcgccaccacgagcctagtggcctgcttggtggccccagagtctggcccttccccaggcagcgcttctccccctggtgcactccatgcagcaaccccatggttctggcccggccctggggtcctgtt

SEQ ID NO: 422222 - DNA, 201 bp, Homo sapiens
caccttgggctggggagacctaggagacccttccagaactttcttagctcggggcaagtgccgtgtgcagattagattctttgttagataccagtggcttraaagactcagaggaggacttcctgagcagttctctgccaaggggctgtgggtctgtggccaggctctggcagcagacttggcctgttttcactcttctta

SEQ ID NO: 422223 - DNA, 201 bp, Homo sapiens
tatgaggtagagcccccccgctgcctactgtgccctggctctggcgggagccagggcccacttgggcgcgcaccatcgccaccacgagcctagtggcctgcttggtggccccagagtctggcccttccccaggcagcgcttctccccctggtgcactccatgcagcaaccccatggttctggcccggccctggggtcctgt

SEQ ID NO: 422224 - DNA, 201 bp, Homo sapiens
attcacctctccttactttgctttcctgtccgtggggtgttttggggttcagggagctgtgtcccaggacatcaggggaacacaagccgcatcccgtggcycccactcctctcccgtcctcttctcccctcccctgtgtgtgcctggtgccttaggtggcttgcaaggcgccagtcacacactgtttcctttcccggctta

SEQ ID NO: 422225 - DNA, 201 bp, Homo sapiens
cccctcccctgtgtgtgcctggtgccttaggtggcttgcaaggcgccagtcacacactgtttcctttcccggcttagccctttcccatcacagaaaccccrgctctctcccaggctatctcatagtaaggagcctgcgttactgagggctgttgaagcaccaaaacctaggaaactctggatgaggtgaagagcatgtgtg

SEQ ID NO: 422226 - DNA, 201 bp, Homo sapiens
gctgtgaaggtggtaggagaagtggacctcttgaagggcacttggtacagcccagtggggttcatttacaaacccacgatatgcacaggaagcctcatggycacacctgtctcaggagtgaggaaggcgggaacaggaacgtggctggtggtctcactttttttttttttttttttgagacggagtcttgctctgtcaccc

SEQ ID NO: 422227 - DNA, 201 bp, Homo sapiens
agggggaccagcagctgctgaagcgggtgctcgtccggtaatgccgcctcccatcccccagcatgtccccacccgcatgaaggcagccagagcttacccasaggatgctggggtggtcttgtgtggtcctgaaggccacagggcttgggagcaggatggaagggtccaagtaggcctctctggccatcctccctactgccc

SEQ ID NO: 422228 - DNA, 201 bp, Homo sapiens
tgctgcccagggcccagggcaagcccctcagggccgcagcacagagcccatcttttctggaaggtgtgggcacagcttccccctggcctggtgggccactstggtgacagcggcccttcttttcaccagggtttctgaattgccctgatgggatccccagccccattcctttattatctcagacaaatccctggacttgta

SEQ ID NO: 422229 - DNA, 201 bp, Homo sapiens
ttcatttggaggggaggaatcatgagaggagtgggggaatgaacttgtcctagcttttcctggtgtcatcgcagcctggccagtgggacttcacggccccmtttttccagaagagaaaactgaggctcagagaggctcactcatccacccaaggccatgccgcttagagggcagtggagctgggcctgggcctggctgctg

SEQ ID NO: 422230 - DNA, 201 bp, Homo sapiens
aaagagcagctgagatttcagactccagctccctccggctgtcaggcaaggctcctccacaccccctgcaggtgggatgacggaagtcggtctgcagatgyagggacccgcgcctgcacagcttcagttcaggactctggtcagccggtccaggacgcatgacctgcgcctgtgaagagtcagtttgtcagtttggaagga

SEQ ID NO: 422231 - DNA, 201 bp, Homo sapiens
gcccagccacacaagctgtggaggtgcgggggaccaactcccactctgcccttggaccacaaccctccttgctgggcaccaagcccaggtttttggtttgrgggggacactggcctgcttacagcggggagcagcacccagggcggctctgtcctgagcatgactgtgctgtcccacagaccaacaccaactacagccagg

SEQ ID NO: 422232 - DNA, 201 bp, Homo sapiens
gtctccaggtgaggcgccgccccaccccagagcaccccgccggctcttgaggtcaccctgccacctctggcccagggttgagatgtgccccattgaaaccwtattgcctgagatggtgttgacagagtccattttccaggccaggtggtgggctgggggcttgggccctcaacggatcctccctgcattgtcccagctgct

SEQ ID NO: 422233 - DNA, 201 bp, Homo sapiens
ccattgtcatcaaggctggaggccgctacctgggtgagcagtgggtttggcagggctgtagggcagccgggcagctgccagtgtcgggagacatttggggyctgtccaggctgggcactggctgtgccctgcacagaaatgatgggtcaaccgaggagtcggtccctgagcaggacgtgcctggaccagagtctgggttgg

SEQ ID NO: 422234 - DNA, 201 bp, Homo sapiens
ttttgtatgtttttgtagagatggggtttcaccatgttgcccagggtggtcttgaacttctgagctgaagcgacctgcccgccttggcctcccaaaatgcygggattacaggcgtgagtcaccgcacctggcctgtttctttatttttatttctttatttttgagacggagctttctgctctgttgcccagactggagtgc

SEQ ID NO: 422235 - DNA, 201 bp, Homo sapiens
gagtatgaggtagagcccccccgctgcctactgtgccctggctctggcgggagccagggcccacttgggcgcgcaccatcgccaccacgagcctagtggcctgcttggtggccccagagtctggcccttccccaggcagcgcttctccccctggtgcactccatgcagcaaccccatggttctggcccggccctggggtcc

SEQ ID NO: 422236 - DNA, 201 bp, Homo sapiens
ggagtatgaggtagagcccccccgctgcctactgtgccctggctctggcgggagccagggcccacttgggcgcgcaccatcgccaccacgagcctagtggcctgcttggtggccccagagtctggcccttccccaggcagcgcttctccccctggtgcactccatgcagcaaccccatggttctggcccggccctggggtc

SEQ ID NO: 422237 - DNA, 201 bp, Homo sapiens
ccgaggagtatgaggtagagcccccccgctgcctactgtgccctggctctggcgggagccagggcccacttgggcgcgcaccatcgccaccacgagcctagtggcctgcttggtggccccagagtctggcccttccccaggcagcgcttctccccctggtgcactccatgcagcaaccccatggttctggcccggccctgg

SEQ ID NO: 422238 - DNA, 201 bp, Homo sapiens
tccgaggagtatgaggtagagcccccccgctgcctactgtgccctggctctggcgggagccagggcccacttgggcgcgcaccatcgccaccacgagcctagtggcctgcttggtggccccagagtctggcccttccccaggcagcgcttctccccctggtgcactccatgcagcaaccccatggttctggcccggccctg

SEQ ID NO: 422239 - DNA, 201 bp, Homo sapiens
gctccgaggagtatgaggtagagcccccccgctgcctactgtgccctggctctggcgggagccagggcccacttgggcgcgcaccatcgccaccacgagcctagtggcctgcttggtggccccagagtctggcccttccccaggcagcgcttctccccctggtgcactccatgcagcaaccccatggttctggcccggccc

SEQ ID NO: 422240 - DNA, 201 bp, Homo sapiens
ttttgggcaatctgcatatttttgtctacaagatttctgaaaaacccttttccataagctttctatgcaccttcgtgaatgcagatagaaatatctgctgygggctgggtgcggtggctcacacctgtaatcctggcactttgggaggctgagtctgtcgagttgcttgaacctaggagttcaagtccagcctgggcaaca

SEQ ID NO: 422241 - DNA, 201 bp, Homo sapiens
caacagagtgaggccctgtctcaaaacaacagcagcagcagcaacaacaacaacaacaacaacaacaacaacaacaacaaaaaccaaaaagatgggaggarctaagacacaaaatcaagacccacccataaaagaaaaaaattgaaaaattccactccatcaaaattaagaacttctgtattttgagagatactgttaaga

SEQ ID NO: 422242 - DNA, 201 bp, Homo sapiens
ttgagcccaggagtttgagaccagcctgggcaacacagggagacccccacctctacaaaagagttaaaaaaacaacgtagctgggcatggtggcacagctrcttggggataaggtgggaggattcttgagcccaggagactgtggctgcagtgagctgtgatagtgccactgcccactgcctgggcaacagagtgaggccc

SEQ ID NO: 422243 - DNA, 201 bp, Homo sapiens
tcagacactgcagagtgcgctagaggggacagaggggcctgacactgtggcccaggtgcccatggagtgtacttgtgcagcaggtgcccacatacgacagygtctttccctgtttgaagaaaggcagatgcaaaaggtggaataataagggggaaaggcaaagttaaggtgttggcaggagggcttgtgccaggcatgggt

SEQ ID NO: 422244 - DNA, 201 bp, Homo sapiens
catggtcactgttgtctgggggaaagcagttgttatctggcaccgcagaccatgggcagaaggcaggtttggtgagagggcagtttctcgaaggccttcckttcaaaattcctaggtccagtacctgttgttggtgagttttagtgaatgattaaaaagaaaaacaaaaccccaccaaactcttgcactcctcttgaggag

SEQ ID NO: 422245 - DNA, 201 bp, Homo sapiens
caggttgtctacgtggcccctggaggtgtgctgcttgctgcccacaggcatagctggcgagaacagtgtcgtggcccgctcgttcttctcctgggtgtgcrcccacatgcttgggatgggacggcattgcctctcctgctgtgagttttggcccaagttcggtggttggaggttggcctgcttccctgcaggttctgctct

SEQ ID NO: 422246 - DNA, 201 bp, Homo sapiens
cgcactccagcagcctctgggggtgacgcctggttcctgatcgtgtgtcttctgaccccaaaccaccctcatgaggccccaggacctgcccgccaggcccyagtgtttcttcctcttcctcttgactgtgttcagggccttcttttggaaagggctgtcctggtcactggtgcccatgctgcctcccctccttcctgccca

SEQ ID NO: 422247 - DNA, 201 bp, Homo sapiens
ctctgtgggacgcactccagcagcctctgggggtgacgcctggttcctgatcgtgtgtcttctgaccccaaaccaccctcatgaggccccaggacctgccygccaggccccagtgtttcttcctcttcctcttgactgtgttcagggccttcttttggaaagggctgtcctggtcactggtgcccatgctgcctcccctcc

SEQ ID NO: 422248 - DNA, 201 bp, Homo sapiens
aaaggtgcagctgcgttctgagggcgtggggaatgggcaggtggcctctgctggtctctggctctacgtttaggcacccctttccccagcctctcctcctygggcagggtctctgctccagcaagcaaacagggtggcccaggtggctattttgagaactccagctggtgcccccagacagctgctcagagccaagggggc

SEQ ID NO: 422249 - DNA, 201 bp, Homo sapiens
cctcctcctcagcctcacccctccagcctctctgtgccgtccctggcctgttggcacaagtggctgaggaggccaaaatgaagtgatgcatgcttagcagrggtgccagcacagttgacccctgcatccgccgtgacagcccgcagatcctctgcacgctgcagccaccaggcgaggcctccctggatgccgaggagtcag

SEQ ID NO: 422250 - DNA, 201 bp, Homo sapiens
gggttcagcctcctgtctcgccagaagactcctaggcccttggggtggcgcgcctgccttttctagttttatacaaagacagccacttttagctactgctratgagacttgagtctatttttgtacaaaagagaagcaaaatcttttttctaaacctgtgcctccctctcctcggacacccagggtctagccgctgccctg

SEQ ID NO: 422251 - DNA, 201 bp, Homo sapiens
gctgcaatgagccatgattgtattacactccagcctgggtgacagagcaggatcctgtctcaaaaaacaaaacaatccttccccccccgccccccgcccamacacacacacacacacacacacacacacagcccactagagtgatcaggtgatttcatacacgcacacacacattgcccaccagagtgatcaggtgatttc

SEQ ID NO: 422252 - DNA, 201 bp, Homo sapiens
ggggctgcaatgagccatgattgtattacactccagcctgggtgacagagcaggatcctgtctcaaaaaacaaaacaatccttccccccccgccccccgcmcaaacacacacacacacacacacacacacacagcccactagagtgatcaggtgatttcatacacgcacacacacattgcccaccagagtgatcaggtgat

SEQ ID NO: 422253 - DNA, 201 bp, Homo sapiens
attttgatctcatgcaaactcaaaatgtttctcagcccgcatgggagtccctgggttttccgggagtttttctcagggactgcatcaatcctgacatagcytccagtgggaaccggcctctttatttgtgacctgtatgtgacctttgaaacaaaacacagtcatgtgcagcctggatgggaagggctggcttgtgtgtcc

SEQ ID NO: 422254 - DNA, 201 bp, Homo sapiens
tttttcgtggcagggtcttgctctgttgcctaggctggagtggagtagcttgatcacagctcactataaccttgaactcctgggctcaaacgatcctcctrcctcagtctccaaacagaaacttttttttgtggcgattcactctgggcagtggagaggaggagtgaggttggaataagggagaaagacctggagatatct

SEQ ID NO: 422255 - DNA, 201 bp, Homo sapiens
ctgagcggcacctgggacctgacttggtgctcgggcgcccccatgtggccagcgtgggccttgcaggcggcgttgggttttctagccaggccaggggattkcctgttgctgctcagccactctgtgctcccctctaaaatgatctctgctcctctccagaagcggctgcagcctcctgatttcatcgaccccctagccaac

SEQ ID NO: 422256 - DNA, 201 bp, Homo sapiens
cggctgtcaggcaaggctcctccacaccccctgcaggtgggatgacggaagtcggtctgcagatgcagggacccgcgcctgcacagcttcagttcaggacwctggtcagccggtccaggacgcatgacctgcgcctgtgaagagtcagtttgtcagtttggaaggagaaaagacacattctgacatagcagggtgccattg

SEQ ID NO: 422257 - DNA, 201 bp, Homo sapiens
gggattacaggcgtgatccactgtgcctggcctaactcatcatgttcttatttaatggaaaggatgtctttttctttctttctttctttttttttttttttggagagggactctcaccctatcgcccaacctggagtgcagtggcgcaatcttggctcactgcaacctctgcctccccggttcaagcaattctcctgcctc

SEQ ID NO: 422258 - DNA, 201 bp, Homo sapiens
cacacacacacacacacagcccactagagtgatcaggtgatttcatacacgcacacacacattgcccaccagagtgatcaggtgatttctcacacacacayactgcccaccagagtgatcaggtgattacatacacacacacacacacacacacacacacacacacacacacactgcccaccagagtgagagtgatcaggt

SEQ ID NO: 422259 - DNA, 201 bp, Homo sapiens
atcccctctgctatccctctatgtccctccagcagcaaagtgtacagttttcatgcatgtccccatcctggcgtgcttcctgccgaccggtgccatgggcvcagactcaggaggtatgtgtttgctctcgtaggtttaaacggaacctgcagcgtttccagtgttcccacgtccacgtcggagacgcctgactacttgctg

SEQ ID NO: 422260 - DNA, 201 bp, Homo sapiens
cagaagtttggggctgcaatgagccatgattgtattacactccagcctgggtgacagagcaggatcctgtctcaaaaaacaaaacaatccttccccccccsccccccgcccaaacacacacacacacacacacacacacacagcccactagagtgatcaggtgatttcatacacgcacacacacattgcccaccagagtga

SEQ ID NO: 422261 - DNA, 201 bp, Homo sapiens
tccaggagttcaagaccagcctaggcgatataggcaagcctcctcatctctactaaaaagtaaaaaaaaaaaaaaaaaattcgccaggtgtggtggttcaygcctttaatcccaacgctttgaaaggccagttcaggaggattgcttgaggtcaggagtttcagaccagcctgggcaacacagtgagaccccatctctaca

SEQ ID NO: 422262 - DNA, 201 bp, Homo sapiens
gtcatcaaggctggaggccgctacctgggtgagcagtgggtttggcagggctgtagggcagccgggcagctgccagtgtcgggagacatttggggcctgtycaggctgggcactggctgtgccctgcacagaaatgatgggtcaaccgaggagtcggtccctgagcaggacgtgcctggaccagagtctgggttgggaaga

SEQ ID NO: 422263 - DNA, 201 bp, Homo sapiens
ccacagagcactggcagcctccttggagaccctgctgcctccagccccccaggcgagcgtgggcgctcggcctcgcccccacaggtaagtgaggcatgcckggggtgactgtcccaagcacctgcagggcactctgtgctgcatcagtaacccttgtcaccttcctcaccagctctttggagcatgagctgctccaagttg

SEQ ID NO: 422264 - DNA, 201 bp, Homo sapiens
ctccttggagaccctgctgcctccagccccccaggcgagcgtgggcgctcggcctcgcccccacaggtaagtgaggcatgcctggggtgactgtcccaagyacctgcagggcactctgtgctgcatcagtaacccttgtcaccttcctcaccagctctttggagcatgagctgctccaagttgagccgcctccctccgccc

SEQ ID NO: 422265 - DNA, 201 bp, Homo sapiens
ggttcaagcaattctcctgcctcagcctcccaaatagctgggactataggcgtgtgctaccacgcccggctaattttttgtatttttagtagagatggggyttcaccgtgttaaccaggatggtctcaatctcctgacctcgtgatccgctcgtcttggctctcaaagtgctgggattacaggtgtgagccaccgcgcccg

SEQ ID NO: 422266 - DNA, 201 bp, Homo sapiens
gcagggtgccattgcctcgtcattttgggagagtcctgtgtttcagctcaagccctgccacttactgagctggtggccttaagcaaggcacctggcttccctgagcctcagtctcctcctttgcttaaagttggcccccaagatgcgcagccctgtccatagaaggtccctgtgatcaggctttcctttgcttgaagttgg

SEQ ID NO: 422267 - DNA, 201 bp, Homo sapiens
tggacttgtgccaaaccccaaccctactccacgcctccaacccatgatctctgtagctcctgccaaactatatgtttctaataaggtaaaaaaaaaaaaaagttgttacctgcacttgacctggttttatttattctcgagcccaggaagacaggctctgttaccacaggaagtagaggaagcactctgggtgcagtgtga

SEQ ID NO: 422268 - DNA, 201 bp, Homo sapiens
gatctcactcttttgcctaggctggagtcagtagcataaccatagctcactgcagccttgatctcctaggcttaggtgatcctcccaccccagcctcccgkgtagctgggaccacaggtgtatgccaccatgcccagctaatttaaaaaaaatttttttagacagtcttgctgtgttgctcaggctggtctgaaactctgg

SEQ ID NO: 422269 - DNA, 201 bp, Homo sapiens
ggcatgagccatcacatctggctgacatctttttttttttttttttttttttttgagatgagatctcactcttttgcctaggctggagtcagtagcataaycatagctcactgcagccttgatctcctaggcttaggtgatcctcccaccccagcctcccgggtagctgggaccacaggtgtatgccaccatgcccagcta

SEQ ID NO: 422270 - DNA, 201 bp, Homo sapiens
gcttgagaatgagtggcctagggtggcgtgcaggagggagccagcctttagctttgtccctagtgcacacatttgtgtgggtttttgttgttgttgttgttttttggagaaggagtctcgctctgttgcccaggctggagtgcagtggtgtgatctcgactcactgcaacctctgcctcctggtttcaagcgattctcctg

SEQ ID NO: 422271 - DNA, 201 bp, Homo sapiens
ggcttgagaatgagtggcctagggtggcgtgcaggagggagccagcctttagctttgtccctagtgcacacatttgtgtgggtttttgttgttgttgttgttttttggagaaggagtctcgctctgttgcccaggctggagtgcagtggtgtgatctcgactcactgcaacctctgcctcctggtttcaagcgattctcct

SEQ ID NO: 422272 - DNA, 201 bp, Homo sapiens
gggcttgagaatgagtggcctagggtggcgtgcaggagggagccagcctttagctttgtccctagtgcacacatttgtgtgggtttttgttgttgttgttgttttttggagaaggagtctcgctctgttgcccaggctggagtgcagtggtgtgatctcgactcactgcaacctctgcctcctggtttcaagcgattctcc

SEQ ID NO: 422273 - DNA, 201 bp, Homo sapiens
catcctgggctcaagcgatcctcccacctcagcctccccagtagttgggactacaggcatatgctatcacactcaactaattttttttcttttttttttttgagacggagtcttactctgtcgcctagactggagtgcagtggcatgatcttggctcactgcaacctctgccccctgggttcaagcgattcccctgcctca

SEQ ID NO: 422274 - DNA, 201 bp, Homo sapiens
ttagtagagacagggtttcaccgtgttagccaggatggtctccatctcctgaccttgtgatccgcccgcctcagcctcccaaagtgctgggattacaggcrtgagccactgggcccagcctgaactcctgttttaaaagcatcctgtgaagttttttttttcctttttactatataagcagtataactcagggtagaaagc

SEQ ID NO: 422275 - DNA, 201 bp, Homo sapiens
gaggatccttgaggccaggagctcgagaccagcctatgcaaaatactgagatcctatctatacaaaaaattagctgggtatgatagtgcatgcttatagcycacctacttgggagactgaggcaagaggatcgcttgagcccaggagtttgcagctacagtgaaccttgatcacaccactgcactccagcctggaagaaat

SEQ ID NO: 422276 - DNA, 201 bp, Homo sapiens
ctggtctctccggtagcaggcacctacacaaagtgatcctcctctgggctcagggggacagtgagtggggaagtcctcctttgggtgaagtcgggggcagratggcctcaggcccaggctcctgtgaccccttggccctgctctggatttgggaggaggggggtcccttccttgaggcatctccaccgggcccccatgtgg

SEQ ID NO: 422277 - DNA, 201 bp, Homo sapiens
tagtgggccatcctctttcctctcctctgtctctgtctgtctcccactgtctctgcacaccctcccaaacccactatcagatcttttttctctagtccccygtctctctcaggattcccacaaagtgatggctggctctgtcttgcaggtggccaacatgagtgctaaggacggcacgtgtacactgcaggactgcatgta

SEQ ID NO: 422278 - DNA, 201 bp, Homo sapiens
tctggccatcctccctactgcccacgtggtgccccagggtgtcccgtggtgggggaaggccacgctcacagagtgggacggaggtgtgagtcactggcccsgaccttggaatcttcagacaaaaggcctcagtctgctgagaccctcctcagctgtccccaacttcccttcatgcttccctccacaacctgggcatcccca

SEQ ID NO: 422279 - DNA, 201 bp, Homo sapiens
ggaactgttcttgtcttgggagcagggactggcactgggctgggtgcagccatggcttcccttgtgtgtccaaacactaccccaggggacaagtcccagtsaaggccacacagcagggccggggattggtgctcctccacgtgtctggtggcaggagccccgtcctgtctcacaggtgaggcacaggcaggcaaagcctcc

SEQ ID NO: 422280 - DNA, 201 bp, Homo sapiens
gccgcctccagctcccctgattcaaggctcatgttccgtctgctgagtgagcttgctgggctcatgccagccccttggcactctgctttcactctgggccrgcatggggatcagcactgccttcacaagcttccactagcgtgcagggggcagggttgatgtccctgggccataaccacatagaaggtgacctgcggtgcc

SEQ ID NO: 422281 - DNA, 201 bp, Homo sapiens
gggctcttgacgtcccagcaggagtgagtggtggttgggggaaccaggggctaacatgagggggatgggagcacccggggcggccagcccgaggtctgccyaggcctgcatgactttctctaaatctgtccgcggtcaagtggttgtctgacctggctgaacttcagcattctcttgaaacttctggaattgtgctagcgt

SEQ ID NO: 422282 - DNA, 201 bp, Homo sapiens
atcctagctggtgaagatcttggggcatgtcaaatgaggtaatgttgaccagcctgacacatggcagttatctgttgtagaatacccacggagtccactgygtggcgggagcatgggcttggccttcgcagctgcgccttgcctctcacttccttctggcccggaccagggtcagacccattcaatacatgcccattgagt

SEQ ID NO: 422283 - DNA, 201 bp, Homo sapiens
ttcctggtttctttagcaattttcccactggaaagcccacagcactgtcagagggagctggggccccctgtacttccaccttctccatcaggccccctccrgtggtatggtgggtggtgggcagtgggcagggaaccagactgatgtcctgtggtgtggatggaccacatcgtgctcatccattcctctgtccatgggcat

SEQ ID NO: 422284 - DNA, 201 bp, Homo sapiens
atggagttttgctcttgttgcccaggctggagtgcaatggcgcgatctcggctcacagcaacgtccgtctcctgggttcaagccattctcctgcctcagcmtccagagtagctgggattacaggcatgcgcaccatgcccggctaattttgtatttttagtagagatggggtttctccatgttggtcaggctggtctcaaa

SEQ ID NO: 422285 - DNA, 201 bp, Homo sapiens
agctgtcctgtgcccgtgcccaggacaagcaagtagagagacgtgggctgtgaaggggagagatggggagaggagctgctgtgggggtgttctccggggcsccgaagcagggaccagcttggccggccccacacagccagagcttgagtaggagtcgggggccgctgaggtttgccaagggctggactttgaaggtcccac

SEQ ID NO: 422286 - DNA, 201 bp, Homo sapiens
ggcaaagagatggggtttcaccatgttctccagactggtcttgaactcctgacctcaagtgatctgcctgcctcagccacccaaagcactgggattacacrtgtgagccaccatgcaaggcctattatttctagtttctaagagtcttccccattgcgttttcgtaggagcatgttcttttttttttttttttcctgagac

SEQ ID NO: 422287 - DNA, 201 bp, Homo sapiens
attatagctttgcgttgctcagagggccatgccccgtcccctgctgtggctggagagcaggtcctcacaactgtggctgggtcttactggataggaaggargactttcggggttgggtcagccctgcctcgtgctgggcttcccacctcccgtgggactgcatgtgggggccgacggggagaaggtggccttactccctgg

SEQ ID NO: 422288 - DNA, 201 bp, Homo sapiens
cttccactagcgtgcagggggcagggttgatgtccctgggccataaccacatagaaggtgacctgcggtgcccctctgcatagctgtttttttttttttttcctatttagcaccccatccctaagaaagccccatttatagcagtttttgacaccatggcttcgtgtatatcaaagcagggccttggagtatttgttacca

SEQ ID NO: 422289 - DNA, 201 bp, Homo sapiens
gatgaggtttcaccgtgttagccaggatggtctcgatctcctgacctcgtgatccacctgcctcggcctcccaaagtgctgggattacaggcgtgagccaycgggcccggcctctaaggatgttttttaaagaataacagctttattcagatacagttcatgtaacacaagtcatccatttaaagtgagcagctcagtaac

SEQ ID NO: 422290 - DNA, 201 bp, Homo sapiens
gcggtggctcacgcctgtaatcccagcactttgggaggccgaggcaagtggattacgaggtcaggagatcgagaccatcctggctaacatggtgaaaccccatctctactaaaaatacacacacaaaaaaattagccgggcgtggtggcgggtgcctgtagtcccagctactccagaggctgaggctggagaatggcgtga

SEQ ID NO: 422291 - DNA, 201 bp, Homo sapiens
gccaacctgaaaaaaactgcacacagtaatgtctgtttatgctacagagaaactggcagcagtttgggggtgggatattactcaactgttaaaaatgctcmccatgggctgggcgcggtggctcacgcctgtaatcccagcactttgggaggccgaggcaagtggattacgaggtcaggagatcgagaccatcctggctaa

SEQ ID NO: 422292 - DNA, 201 bp, Homo sapiens
ctgtgacctgcaggtgcagtgaatgacagagatggccatgacatgtggttattttgtcactttgcttttttttttttttttttttttgagatggagtctcrctctgttgcccaggctggagtgcagtggtgtgatctcagctcactgcaaactctgcctcccaggttcacgccattctcctgcctcagccttctgagtagc

SEQ ID NO: 422293 - DNA, 201 bp, Homo sapiens
ctggtccctgcctggaggttcgtacagagccggtgggagactccagatcactcatctaacctggtatgattgagcctctggtcagtgcccatggctcagggcgggatacccaccagtgattgagatgggcccctcatgtcacgagctgacattctagtggcaggagacagaattcatgaacaggaaggatggcacagaaat

SEQ ID NO: 422294 - DNA, 201 bp, Homo sapiens
tgactgtcccaagcacctgcagggcactctgtgctgcatcagtaacccttgtcaccttcctcaccagctctttggagcatgagctgctccaagttgagccrcctccctccgcccagggaccaagggggaagctgtcgggttggggttgggggcagattcctgccagtgtggccgcagcaccccagtgtcacagtgcggaac

SEQ ID NO: 422295 - DNA, 201 bp, Homo sapiens
ctagtgaatcctggctgtcctcgtgtgcactcgtgagtagccggcccctggcttggcccccgtctcatccgcctggctctgagctggctgtgccgtggacsagtgtcttgctcccttctgccagtggcccctcactccaaggccccggctggcctggaagagctgccttgaagtgtgaggcacgttggagggtctgcctca

SEQ ID NO: 422296 - DNA, 201 bp, Homo sapiens
gcccaggcaagccagccctattcagggagaggcagcacaggtgcagatgggcagatcctggtgggagagggatagcacctggacctctgtaggcaccgtgcgactgttgtggactgtaggtttctgctgtggggacagggcctggcaggctgggattggggagccaggagacctgggcggctccgagaccacagcccaggc

SEQ ID NO: 422297 - DNA, 201 bp, Homo sapiens
tggcctcccaaagtgctgggattataggagtgagccttcgtgcctggcctagtttttctcttttcttttcttcttcttctccttcttttttttttttttttgagacaaggtcttactctgtcacccaggctggagtacagtggtgtgatcatagctcactgcggccttgaactcctgggcttaagtgatcttcccacctca

SEQ ID NO: 422298 - DNA, 201 bp, Homo sapiens
gtggaccagtgtcttgctcccttctgccagtggcccctcactccaaggccccggctggcctggaagagctgccttgaagtgtgaggcacgttggagggtcygcctcattgttgaggcgtgggcccctcctcgccaacagtgggcccatcccaggccctttcccacgttctctcgctcagcagggtttttgattcctcttaa

SEQ ID NO: 422299 - DNA, 201 bp, Homo sapiens
cttaggacacggcagcgccctctctgttccctaaagcttggattcttgttgcaggcaagaaggttcagtttcggaaaccagccccaggtgcaacagacgckgtgccctcccggaagcgggcaacccccatcaacttggcgagtgccatcaggaagagtggtgccagtgccgtgagtgggggcagcggggtgtcccagaggc

SEQ ID NO: 422300 - DNA, 201 bp, Homo sapiens
agcgtggtggaaggtaaaggcgcagcagtacacatagctgctggccttctcactctaccttggactttgtgcagtttttctttccttttttttttttgagrcagggtcttgccctgtcgcccaagctggattgcgctggcgtgatctcagctcactgcaacctccgcctcccgggttcaagtgattctcctgcctcagcct

SEQ ID NO: 422301 - DNA, 201 bp, Homo sapiens
tctggtaatttaagtggcttggccactttctttctttctttctttcttttttttttttttttttgagatggagtttcactctgctgcccaggcttcattgmggtggcgcgatcccggctcactgcagcttctgcctcccgggttcaagcgattctcctgcctcagcctcccgagtagctgggactacaggcacgtgccacc

SEQ ID NO: 422302 - DNA, 201 bp, Homo sapiens
tggggtgattcaaacttggatttttctcaaaaagctgtctggtaatttaagtggcttggccactttctttctttctttctttcttttttttttttttttttgagatggagtttcactctgctgcccaggcttcattgaggtggcgcgatcccggctcactgcagcttctgcctcccgggttcaagcgattctcctgcctca

SEQ ID NO: 422303 - DNA, 201 bp, Homo sapiens
gcaggccgttagcctagtgcaggccgtgagacagatgggatgtgggggcccaagtcactgcaggagcctccccagctgagctggcaccacatgtggctttkgggggtggtttctccactcatgttctctttgttcatgatgtccaaacccgatctgtccctggtatccaaatctcctctcatcactgtccatgggtcaggg

SEQ ID NO: 422304 - DNA, 201 bp, Homo sapiens
ttggggtgattcaaacttggatttttctcaaaaagctgtctggtaatttaagtggcttggccactttctttctttctttctttcttttttttttttttttttgagatggagtttcactctgctgcccaggcttcattgaggtggcgcgatcccggctcactgcagcttctgcctcccgggttcaagcgattctcctgcctc

SEQ ID NO: 422305 - DNA, 201 bp, Homo sapiens
ccccaaccctgtgctggtccacagagccaggggctggccaggtacctactctgggatggtgggcaccacggcccccgcaggctgaaaacttgccttatccrtctatccgtccttctgtcctgtgtgtggtagtggaaaggcctatcctactgcacaccacctcaaactgctcttggcaggctgctagagtctgtcctcctc

SEQ ID NO: 422306 - DNA, 201 bp, Homo sapiens
tttggggtgattcaaacttggatttttctcaaaaagctgtctggtaatttaagtggcttggccactttctttctttctttctttcttttttttttttttttttgagatggagtttcactctgctgcccaggcttcattgaggtggcgcgatcccggctcactgcagcttctgcctcccgggttcaagcgattctcctgcct

SEQ ID NO: 422307 - DNA, 201 bp, Homo sapiens
agtgggggggcccctcatccccaacccccatctcagcgagcccgtcagatgacacactgcagcctggccatggccgaagcacacagtggtgtccttgcgtkcagcatgccatgtgccttgacctggagcctaataacatgtgtagcaggggcccaagtcactgagagagacctggggtggctacacagctaacctccttct

SEQ ID NO: 422308 - DNA, 201 bp, Homo sapiens
gctggctggattatattttggggtgattcaaacttggatttttctcaaaaagctgtctggtaatttaagtggcttggccactttctttctttctttctttcttttttttttttttttttgagatggagtttcactctgctgcccaggcttcattgaggtggcgcgatcccggctcactgcagcttctgcctcccgggttca

SEQ ID NO: 422309 - DNA, 201 bp, Homo sapiens
aactactaatctgctttctgtctctattgatttgcctgttgtggacatttcagatcaatggaattatacgctgtgtggctgacatgtaatctgtggaaacytgtagctgtgaggaatgttgaatcaggaccgggcgtggtggctcatgcctataatgtcagcactttgggaggcttaggtgggaggattgcttgagcccaa

SEQ ID NO: 422310 - DNA, 201 bp, Homo sapiens
ttacggcaggagtagggtgccgggcttcagggaggagggagatggctcagagcagacgacagccttgatggctttttgagttttatctttaagaaaaggcrggggcatttcaattcctctctctcctccttccgaagaaagcacgtgatttccctttgctgagcagaggggttccctctgagtgaaaccccagatgtgggt

SEQ ID NO: 422311 - DNA, 201 bp, Homo sapiens
gatggggtttcaccgtgttaaccaggatggtctcaatctcctgacctcgtgatccgctcgtcttggctctcaaagtgctgggattacaggtgtgagccacygcgcccggcccatccccgtagctttcccagtgactgtgaatgtggcacgaatttgggcaagggataccctctgcctccaaccaccaggcctcatggggca

SEQ ID NO: 422312 - DNA, 201 bp, Homo sapiens
tgcacacctgtggccccacctacctgggaggctgacgtgggagggtcgcttgagcacaggaggtctaggctatagtgagctaagatcttgtatcaaaaaargaaaaaaagcaggctagaggggccagggggcaggtgatggggtctcagtactgcaggtggtagccctcccctttttggagccagcctggccccagcacct

SEQ ID NO: 422313 - DNA, 201 bp, Homo sapiens
caggaggagccttacttcagcctgtgatccattctcacagcagggccccagaggcccgacttatcttcccttcccggtgggcaccccccttggttctgagsagggcagcttcttgccagccctgcctgcttttcagagaaggccttctttagagacctagtgctagtgctgcccctgttggccctgggctagacccccatc

SEQ ID NO: 422314 - DNA, 201 bp, Homo sapiens
gggggtgggagacatcacggatcggtagtgggccatcctctttcctctcctctgtctctgtctgtctcccactgtctctgcacaccctcccaaacccactrtcagatcttttttctctagtcccccgtctctctcaggattcccacaaagtgatggctggctctgtcttgcaggtggccaacatgagtgctaaggacggca

SEQ ID NO: 422315 - DNA, 201 bp, Homo sapiens
accctttctgagttccagattctcttcctcttgggaggagaataacctgacccctcttgtgctctgagcccttagtgaatggacccagagctggctcctgsggggctggtccctgcctggaggttcgtacagagccggtgggagactccagatcactcatctaacctggtatgattgagcctctggtcagtgcccatggct

SEQ ID NO: 422316 - DNA, 201 bp, Homo sapiens
aggtgcgagccaccgtgcccggctgtcactttgctttttaatgaaaaaagctggtgtccaaataaaccatccgcagggagactattctcccagataaaagygtcctagagacctcccgcctccatctgacctggcagtgggccccagagtctgatgctaattatatcctccagggctggaccctcctgaccaagtggagac

SEQ ID NO: 422317 - DNA, 201 bp, Homo sapiens
tctttttgtgtcctcaaggaaactgaggcctataggctctgcccagggtcactgctatagttgcttatccccacaacaaggcttgctgccttgttaggacrcggacagagtgggctgtagtgtgatctttttcagcagcaaccctagagactatagcgtgttggtaaactgtggccaaagggctgggtctggcctgccacc

SEQ ID NO: 422318 - DNA, 201 bp, Homo sapiens
ggtggctgttcttgtggatctcccggtttgctctgatgagtgatttctgggagaggggagagtggaagcatggacacaccccctccttccaggacagtgtyactcacctgcttggaaaagtagcctctggtcagtctgaggaagtgaccctcccaggggcacttgggttgtagttcatcattaggtgtttgcatgggctct

SEQ ID NO: 422319 - DNA, 201 bp, Homo sapiens
aaaaaaactgcacacagtaatgtctgtttatgctacagagaaactggcagcagtttgggggtgggatattactcaactgttaaaaatgctccccatgggcygggcgcggtggctcacgcctgtaatcccagcactttgggaggccgaggcaagtggattacgaggtcaggagatcgagaccatcctggctaacatggtgaa

SEQ ID NO: 422320 - DNA, 201 bp, Homo sapiens
taagtgatcttcccacctcagctgcccagagtgccgggactacaggcatgagccattgtgcctggcccagtttttttctttttcttttaattaaaaaaaawttttttttgtagagatggggtttccccattttgcctaagctggtcttgaactcctgggcttaagggatcctcctgtgtcggcctcccaaagtgctgggct

SEQ ID NO: 422321 - DNA, 201 bp, Homo sapiens
tgccctagggtcccgtcaggtcctgctactatgaagcccttctcgaaatctaattttaggtcagaaatagttttagtgatccgggttggctctggccaatrctgagcaaagttgagtggaaggtagagttcctatatacttctccccgcctccccgcacctgcagcctcccccattctcagtgtcccatccaccccacaga

SEQ ID NO: 422322 - DNA, 201 bp, Homo sapiens
tccatctgcctcagcctcccaaagtgctgggattataagcttgagtcgccacgctgggccccctttttttttttttttgagacagggttttgctccattgyccaggctggagtgcaatggcatgatcatagctcactgcagcctcgaactaccaccctcctgcttcagtctcctgagtagctggggccacaggtgtgcacc

SEQ ID NO: 422323 - DNA, 201 bp, Homo sapiens
gcgatcctcccgccttggcttcccaagtgccacaggcatgagccaccacacccagctttctgtgttcttaacccagcctgtctacccatccgggggcagcratgtcctgagaggccagcccagctgctggtcattggggagggtctcacagggtccctgaagctaaaccggaccttctgtcctggtcgtgacactgccgat

SEQ ID NO: 422324 - DNA, 201 bp, Homo sapiens
gagtgcagtggtgcgatttttcgtgttagccaggatggtttcgatctcctgactttgtgatctgcccacctcggcctcccaaagtgctgggattacaggcrtgaccaaccgtgcccggcctatttttagtttttaattgtgaagaggcttttacaaattcaggtgtggcaggggctagaagggaacttgctgtggaacttt

SEQ ID NO: 422325 - DNA, 201 bp, Homo sapiens
cttctgatctcagttcttgggccccaagatagaagttttgctttcacttcccagcagctgctggtggcccttgtgtcattcctgttgagccctcccatccytgctgggatgagtgaagtgtgctgctgggatctccagctaggagaggtcgttgacactgcctcaagagctgcctcagctttaaggctgaggccaggcttc

SEQ ID NO: 422326 - DNA, 201 bp, Homo sapiens
cagaagtctgggctgatgctgcaccccagaggcacaggagctttggatccctttccccctgggggagagggtaacttgccacagtctgctctgaagcagcmcgggtgtccctccactgtgggaggcggcttaggagcaggcgcaccttgagggtggcccaggcaggtcgctggagggtgcgggagacagggcccaggcctg

SEQ ID NO: 422327 - DNA, 201 bp, Homo sapiens
catatacatgttaataaatctgtgggtccttcagccaaaaacttgatcagaaatgtatcttagcacaccactttgggtacagtgagggtttttttttttttgagatggagtcgcggtctgtcgcccaggctggagtgcagtggcgcgatctcggctcactgcaacctccgcctcccgggttcacgccattctcctgcctca

SEQ ID NO: 422328 - DNA, 201 bp, Homo sapiens
cgggaagctgggcgtgcccaatggccgtgaggccttgctgcccaccccgggcccaccagccagcacggacaccctcagctccagcactcacctgcccccgyggctggagcccccgagggcccacgaccccctggccgatgtcagcaatgacctgggccacagcggccgagactgtgagcacggagaggcggctgccccagc

SEQ ID NO: 422329 - DNA, 201 bp, Homo sapiens
gtgagcacggagaggcggctgccccagcccccactgtgcgcctcggcctgcccctgctgacggactgtgcccagcccagcaggccacacggcagcccctcrcgcagcaagcccaagaagaagtccaagaagcacaaagacaaggagagggcggctgaggacaagccccgggcccagcttccagactgtgcacctgccaccc

SEQ ID NO: 422330 - DNA, 201 bp, Homo sapiens
ggcctgcccctgctgacggactgtgcccagcccagcaggccacacggcagcccctcgcgcagcaagcccaagaagaagtccaagaagcacaaagacaaggwgagggcggctgaggacaagccccgggcccagcttccagactgtgcacctgccacccatgccacccccggagccccagcagacaccccaggtaggtgccca

SEQ ID NO: 422331 - DNA, 201 bp, Homo sapiens
ctcaccctcatggggtgtcgagggggctcaagctgtagaagccaggggaggggaccctgttgccccaggccccatcagatttgccctgtgtgcctggcacytggcaccctatgttcctgcacctggtcctctccctgcctgtctggagtgcccggtgccacttgcagtcaatgtgccaggccagcactgggggccggaggc

SEQ ID NO: 422332 - DNA, 201 bp, Homo sapiens
cggggtacatggatccccacatgtttgagcgcctggggtcctctcacagcctaggacacagggctcttggtacctgtgccaaaccctcaggagactccgcrgctgagctctgtccagcaccctggggcccatccatgctgccacaactatagcagggggaggtgacaggtccctgtggtcctgggaatcaggactcctgtg

SEQ ID NO: 422333 - DNA, 201 bp, Homo sapiens
ggtgactttggttcagtgcctcctgggagcaggcctggccagcatctgcaggcagattgtcccttcctgtgccactgtgacttcccctggacagctcgtcygcttcttgcttctatattcattatgcagctgcttccccccaagcagctgtgggggtcagcaggacactgttggcttgtagaagaggagggggatgtgcct

SEQ ID NO: 422334 - DNA, 201 bp, Homo sapiens
tactggataggaaggaagactttcggggttgggtcagccctgcctcgtgctgggcttcccacctcccgtgggactgcatgtgggggccgacggggagaagrtggccttactccctgggcagcctctctgaccagggccatgctcagggcaggactcctgattcccaggacacacccacaccccacagccagacctgggcca

SEQ ID NO: 422335 - DNA, 201 bp, Homo sapiens
gtggaaaggcctatcctactgcacaccacctcaaactgctcttggcaggctgctagagtctgtcctcctcttcctggttttcatctcttttttttttttttgtgatggagttttgctcttgttgcccaggctggagtgcaatggcgcgatctcggctcacagcaacgtccgtctcctgggttcaagccattctcctgcctc

SEQ ID NO: 422336 - DNA, 201 bp, Homo sapiens
tttgttagcagtctgggagacgaacttagctttggtcaaccggcaacagcaaggcaggctggttgtagggaaggtgggctcagacgtggccccagaggtasccctcacccagcatccccagccgtggctgactcttccctgggagttgtgatcagaaatggggtggagcccagcgcggtggctcacgcctgtttccagcac

SEQ ID NO: 422337 - DNA, 201 bp, Homo sapiens
tggggatagaggggaacctgctctccccagggctctgggcacagccacgcctgccagaggagagcttgaccaggcctaaggctggggtgccacttgcaccycagggtcttcagagcagctgctgaaagtggctccgacatctttactgactttagaaaaacaaaaatggcagccacatggggccagcataggactctgaag

SEQ ID NO: 422338 - DNA, 201 bp, Homo sapiens; identical to SEQ ID NO: 415651

SEQ ID NO: 422339 - DNA, 201 bp, Homo sapiens; identical to SEQ ID NO: 415685

SEQ ID NO: 422340 - DNA, 201 bp, Homo sapiens; identical to SEQ ID NO: 415647

SEQ ID NO: 422341 - DNA, 201 bp, Homo sapiens; identical to SEQ ID NO: 415652

SEQ ID NO: 422342 - DNA, 201 bp, Homo sapiens; identical to SEQ ID NO: 415686

SEQ ID NO: 422343 - DNA, 201 bp, Homo sapiens; identical to SEQ ID NO: 415687

SEQ ID NO: 422344 - DNA, 201 bp, Homo sapiens; identical to SEQ ID NO: 415683

SEQ ID NO: 422345 - DNA, 201 bp, Homo sapiens
actttggccaagcatggtggctcactcctgtaatcccagcacttcgggaggccgaggcaggtggatcacttgaggtcaggagtttgagactagcctggccsacatggtgaaaccccatctctaataaaaatgcaaaaattagccgggagtggtggtggtcgcctgtagtcccagctacttgggctgaggcaagagaactgc

SEQ ID NO: 422346 - DNA, 201 bp, Homo sapiens
tgaggcaggagaatcacttaaacctaggaggtggaggttgtagtgagccaagatcgcaccattgtacttcaccctgggcaacagagtgagactctgtctcaaaaaaaaaaaaaacaaacacagaagaagaagaagtaatggaggccaggtccagttgtggctcacgcctgtaatcccaactacctgggcaggctgaggtgg

SEQ ID NO: 422347 - DNA, 201 bp, Homo sapiens
gatgagctgggaatcaattagggaaaattatgttttgggggtggaatacggaggacctctccagctccagctccatcagctttcttttttttcttttctctttttttttttttttttgagacagattcttgctctgtcgcccaggctggagtgcagtggcagtgatctcggctcactgcaacctccacctcccaggttcag

SEQ ID NO: 422348 - DNA, 201 bp, Homo sapiens
gttacctgacccagtcattctactccaaaaacttgtacatgaatgtccgtagtagctattcataatagccaaaaaatggaaagaagccaaatgcccagctsctgaatggataaataaaatgtgtgtgtccatgcaactgttcagccacaaaaaggaatgaagtaatgatatatgctacagcacgaacttgaaaacattatg

SEQ ID NO: 422349 - DNA, 201 bp, Homo sapiens
ctatagtaaattaatgtcgtaagatacatcattattagaaagagaaataagtgaatgtaaaaaaatgggaaaaaaaaaacagcgttggcaaggatgtggamaaattggaagcctcatgcaatgctggtggaaatgtaaaatggtacagctcctgtggaaaaatgcttgatagttcctcaaaaagttaaacatatagttacc

SEQ ID NO: 422350 - DNA, 201 bp, Homo sapiens
gaagaacattagaaatgagagtctcggccaggcgcggtggctcacgcttgtaatccctacactttgggagcctgaggtggagggattacttgcgatcaggmgtttgagaccagcctggacaatatggtgaaacctcgtctcaactaaaaatacaaaaactaaccgggtgtggtggcacgcgcctgtagtcccagctactca

SEQ ID NO: 422351 - DNA, 201 bp, Homo sapiens
cgttcccaaattttattccaggaggcatttttccctaaggcagcccagctgccccggactgctttagattggccttgttattcccatctgtgctctacacrccacattcctgagtgtagtttattattgctttgtttcccatgtctgcctcttcatccattgaagtttatttcttctacatcttgtacactcaagatcagg

SEQ ID NO: 422352 - DNA, 201 bp, Homo sapiens
tcattcagatgagtagccgtaggggcatcacctctgcgatcctttctctttatttttgtttggcaatgttaatctcatctaatgtcaggtatgcagatgcraccaaatgtaaccactgttcttttttaatttcagtttgaacacacagctgtgcaagggccttcatttttgaatgaggattattttcaccttcatgaaact

SEQ ID NO: 422353 - DNA, 201 bp, Homo sapiens
ccaactgaaaaaaaaaaaaaagacactcaacattgttttgagattgatgcatatagacccagttcattcatttctgtttctgtatggtagcagattgcatrcctatctacagtttgtttatccattccactactgatgagtgtcaggttatttccacttctggagccattctttaatacatttatttaattttgttttttt

SEQ ID NO: 422354 - DNA, 201 bp, Homo sapiens
ctcccgaccagataaaagcagtgatctctcagtctcgacgagtccttaaatgcgtttgcaagaggtgttttacataactggagcccagttaattgtaaaacaaacaaacaaacaaaaaacactagatcaatggctagtgagtatctactaataaaattttataatagttgctgctttttattgagcgccttctgtggggag

SEQ ID NO: 422355 - DNA, 201 bp, Homo sapiens
aggcatgagccaccatgctcagcccttaaaatgcattttgaagttaagggacccagttacaaaagtaacaacttcattttctttcttttctttgctttgctttttttttttttttttttttttgtgacggagtcttactctgttgcccaggctggagtgcagtggcgcaatcttggctcactgcaacctccgcctcctggg

SEQ ID NO: 422356 - DNA, 201 bp, Homo sapiens
tgcccaattatataagaacttaaactgtaaactatagtaaattaatgtcgtaagatacatcattattagaaagagaaataagtgaatgtaaaaaaatgggaaaaaaaaaacagcgttggcaaggatgtggaaaaattggaagcctcatgcaatgctggtggaaatgtaaaatggtacagctcctgtggaaaaatgcttgat

SEQ ID NO: 422357 - DNA, 201 bp, Homo sapiens
ctttacgaccctggttcttcctgttgcctttgagcctgaaaggtcacaaatggagccaaggcagcagctgcagtcgcagcagatacttctagggcctaagyctactgtcagaaggaatggaaagatctagattgtcactgctctgtttgagctgtcttggtgggaaatctgaaattcagtattttttgaagtgctgattat

SEQ ID NO: 422358 - DNA, 201 bp, Homo sapiens
tggccaggctggtctcgaactcctgacctcaggtgatccacctatctcggcctcccaaagtgctgggattacaggcatgagctactgtgttcagcctaaattttttttttttttttaattcacaggttctcaagaaaaaaaaaatcagagaatgatattcaggttaagaaaatctttgtatatttcttttgtgtgtgtgag

SEQ ID NO: 422359 - DNA, 201 bp, Homo sapiens
aatgatagactggataaagaaaatgtggtacatatacaccatggaatactatgcagccataaaaaagaatgagatcatgtcttttgcagggacatggatgragctggaggccattatccttagcaaactaacacaagaacagaaaaccaaataccacatattttcacttataagtgggagctaaatgatgaaaacacatgg

SEQ ID NO: 422360 - DNA, 201 bp, Homo sapiens
aggaggctgaggcaggagaatcgcttgaacctgggaggcggagattgcagtgatcggagatagcactgctgcactccagcctaggcaatagagcgagactccgtctcaaaaaaaaaaaaaaaaactaaaaaggcctaatagttgtgtcattagagcgccagagaagaggagaaataattcagtgcagaaaaacaatttgaa

SEQ ID NO: 422361 - DNA, 201 bp, Homo sapiens
aaagaaaaaggctacttccatggtaaacctgtggttatgggcagagggcagtttctaagaaatgagtcagaaaataagtagaatatactcatgaacaatakgttctcagtacaaggacctgctattttttgcccttgacacacatttctctagggcttctaacaggctactcaaaaatattttctaggtttattgacttta

SEQ ID NO: 422362 - DNA, 201 bp, Homo sapiens
tgaggcaggagaatcgcttgaacctgggaggcggagattgcagtgatcggagatagcactgctgcactccagcctaggcaatagagcgagactccgtctcaaaaaaaaaaaaaaaaactaaaaaggcctaatagttgtgtcattagagcgccagagaagaggagaaataattcagtgcagaaaaacaatttgaaatagtgg

SEQ ID NO: 422363 - DNA, 201 bp, Homo sapiens
gcgaaccagttcagcagtgcctcaggtaagaggacttagttctcccgctgcagcgaagtaaaagaggaaggaggtctgtaccgcgagccgctcccagctcytggtgcggtgcgctgcgtgccgtagaaatttagtaaacgtggttagatgtagagaaggccgagctgctgccggggccacgggagtctttgtgcggtcagc

SEQ ID NO: 422364 - DNA, 201 bp, Homo sapiens
acgcgtagccgcctcggccccttcggccgcctctcagtgcgcaagcgcagcccacgcttctccccgcccatcgagggggggttgctagcccgctcgagcgrcccgtcccccgacactgctgttgtccaatcggcgtggatcaggcaacactaagtcccgccttccagctctcttcgtcgcttcatttgctagcgtcaaaat

SEQ ID NO: 422365 - DNA, 201 bp, Homo sapiens
caggacagaaggagcatgttgattcgggtggatcccttcctccttgaccagcttatccccatgtccctcttctcagggcgtcttcatcctattgtttggtygcctcatggacaggaaggtaagtctgcccacctaaccccctgcctcacttgcagcccgcaggccggggccgtggctggcataagcagagcatttacctct

SEQ ID NO: 422366 - DNA, 201 bp, Homo sapiens
tgatccacccgcctcggcctcctaaagtgattacaggtgtgagccactgcgcctggccacacatacttttttattacatacagaacacttacaaaagctgwccataagctggcccataaaacggacctcaaaaatattaaagattgataatcataaagatgatcttctctgacaagaatgcaatcaagctaaaggcagtaa

SEQ ID NO: 422367 - DNA, 201 bp, Homo sapiens
ctgccatgggatgacagagcaggaaggccctcaccaggtgtgagcccctcaaccttggacttctcagcctccagagctgtaagaaataaatgccttatttaaaaaaaaaaaagttacccagtctgtggtattctgttattgcaacacagaacagactcagacgtactgatacagcatccttggtttttctgagcatgtatt

SEQ ID NO: 422368 - DNA, 201 bp, Homo sapiens
ctaaaggcacgtgccattgtgaccagcttatactcacgtcttatccatattcgtatctatatcaatatctggttttggatagatatccacacgcacacgcmggtgcatatagacagggctcaggtctgtgacacagtgagcccctccatatttcctggaggaaggactgccatgttctctctccttgggccagctccatcc

SEQ ID NO: 422369 - DNA, 201 bp, Homo sapiens
ttttgcagatttggaaactattggcttagaggatgggagagaatctgaggaaagacatcagagtctagagggtgcctttccatctgtgttctcctcaatasatagctatatctatggctatgtctatatgtcactaagcctaaatctatctctattgctaaatttaaatctatctttatgtaaatatatatctgtatctgt

SEQ ID NO: 422370 - DNA, 201 bp, Homo sapiens
tttttttttttttttttgagacagattcttgctctgtcgcccaggctggagtgcagtggcagtgatctcggctcactgcaacctccacctcccaggttcargcgattctcctccctcagcctcccaagtagctgggattacaggcacgcaccaccacacccagctaattttcatattttagtagagatggggtttcaccac

SEQ ID NO: 422371 - DNA, 201 bp, Homo sapiens
ctactgtcactattagtcatgaactcaaagtggttaagatgagagatgagctgggaatcaattagggaaaattatgttttgggggtggaatacggaggacytctccagctccagctccatcagctttcttttttttcttttctctttttttttttttttttgagacagattcttgctctgtcgcccaggctggagtgcagt

SEQ ID NO: 422372 - DNA, 201 bp, Homo sapiens
tttatcaatagttttgaacaccttggacaccttagctttatttgaactaggaatatgttgctctcatttctactgtcactattagtcatgaactcaaagtkgttaagatgagagatgagctgggaatcaattagggaaaattatgttttgggggtggaatacggaggacctctccagctccagctccatcagctttctttt

SEQ ID NO: 422373 - DNA, 201 bp, Homo sapiens
cagaggttgcagtgagccgagatcgtgccattgcactccagcctgggcaacaagagcgaaactccgtctcaaaacaaaacaaaacaaagttgaataagacrtggtccccaagcagggagaagttattattgcactctgaaaatgaccagcatcatccagtgctctggctcatcattttactctctctctctttgttttttt

SEQ ID NO: 422374 - DNA, 201 bp, Homo sapiens
agcaagaggggcatagtgaggaggctctgtggggctgacggagtctgggggccggtccacagcagctgcacagatgcgaggctcctggccttgttcactaraaccaaggtgaagcttccaccctgctgcccacgtgccccctccacggcccaccctagcctctctaggacccagcttgcagacccttttccccaaggccca

SEQ ID NO: 422375 - DNA, 201 bp, Homo sapiens
tcccttcttcgttttgccttcagcttcctccttcaacgagtcaggctctcagtgctttgtgctggctgttcagcgctgcccgatggctgacaccacgtacrcttgtgacctgcagagcctgggcctggctccactcagggtccccatctccatcaccatcatccagggtacgcagggcctggggcccagtgggctggtccc

SEQ ID NO: 422376 - DNA, 201 bp, Homo sapiens
taaggggaacagagagggatttctgaccagagaaccagaatatatccttctgataaggatatattctggtaagacttggagaatgagctctgggtgccccrtcttttgaagtggccagtcctccatacttgtcctcagctccccgtccccagacaggtagacctggagatgccttgctgtgccagtgactgagttagtgaa

SEQ ID NO: 422377 - DNA, 201 bp, Homo sapiens
gctacttgggctgaggcaagagaactgcttgaacctgggagacggaggttgcagtgagccaagattgtgccatctcactccaacctgggtgacagagagasactccatctcaaagaaaaaagaaaaaggctacttccatggtaaacctgtggttatgggcagagggcagtttctaagaaatgagtcagaaaataagtagaa

SEQ ID NO: 422378 - DNA, 201 bp, Homo sapiens
ggtgtgagccactgcgcctggccacacatacttttttattacatacagaacacttacaaaagctgaccataagctggcccataaaacggacctcaaaaatrttaaagattgataatcataaagatgatcttctctgacaagaatgcaatcaagctaaaggcagtaacaaaaatataaccagagaatttcttttgtttagaa

SEQ ID NO: 422379 - DNA, 201 bp, Homo sapiens
tagagacagggtctcactctgttgcccaggttggcctcaaactcctggactcaagcaatcctcccaccttggcctcccaagtagctgggactacaggtgtkcatcaccatacctggccatatttctatctttttttcatcctcctgtctacctctcttctccgttttttaaatccactgtgaaggtgtggaatattttgtc

SEQ ID NO: 422380 - DNA, 201 bp, Homo sapiens
tgtagctgagagcaaaatttctaggattcctgcagcacaggcaggagtgcatgtgagaaagtaaaacagatacaacctcttcaagggagagttgacaatamtaataactgccctgcaattgggccttcccaccccttcctaggccacaaatgaaggctgcatcttggaacacagcaaaggaggaagcgacactgccaggtg

SEQ ID NO: 422381 - DNA, 201 bp, Homo sapiens
attaaccaaaactggtaaagggaaagtggccagatttctatccaaaggaatcgtttcaatttttgaagggaaagcagaggtttaaaacgggaaaacttgayaaggaaggcatgtgagaattgtgctgagtacaatgtgggtcttgttctggtggctctcttgggtcctaatccacctggaatgcgggctgatgtcatctca

SEQ ID NO: 422382 - DNA, 201 bp, Homo sapiens
gacatgggcacagccagaagctgagagaagattggggttgttttttagaatgaacagttttccggttccagctccccaccagtggaatgagcagcctggtyagagcagtcaggatcagggtcctgggttcctgattatcacctggactcctgctgactctcttttctctggtttctccatctaaaaatctgcctccagtta

SEQ ID NO: 422383 - DNA, 201 bp, Homo sapiens
ccatgtccctcttctcagggcgtcttcatcctattgtttggttgcctcatggacaggaaggtaagtctgcccacctaaccccctgcctcacttgcagcccrcaggccggggccgtggctggcataagcagagcatttacctctcccgcagatacaagaagctttgcgcaaacgcttctgccgcgcccaagcccccagctcc

SEQ ID NO: 422384 - DNA, 201 bp, Homo sapiens
caggtctctgtggaccctggcccaagcccggaagccctgggcaggctcgactctcctgctggctgtggagaccctggcatgcagcctgtgcccacaggacyaccccttcgccttcagcttacccaatgtgctgctgcagagccagctgtttggacccacgtttcctgctgactacagcatctccttccctactcggccccc

SEQ ID NO: 422385 - DNA, 201 bp, Homo sapiens
tggtgacccatgagctgcagccaaaagtgtaacaaagggcaatgatattacacaccgtttatgcctgggaatacatggcatgtgtgaatgcacagacatgmgtgtggccgtcgcctccaggacacggtgccctctaccactgctggtcaccattcctagctttgcagacctggaggggccaaagaatgggagaagtcccct

SEQ ID NO: 422386 - DNA, 201 bp, Homo sapiens
gctctctgtatgggcatccattggtgacccatgagctgcagccaaaagtgtaacaaagggcaatgatattacacaccgtttatgcctgggaatacatggcmtgtgtgaatgcacagacatgcgtgtggccgtcgcctccaggacacggtgccctctaccactgctggtcaccattcctagctttgcagacctggaggggcc

SEQ ID NO: 422387 - DNA, 201 bp, Homo sapiens
agggggtgaaaggtcaatttcccagcgggctttgctcccggtcccgggggaaggtgggatttctgtggtatccgcacttgcgtggtgatctggggtatacygttttagtcttgggggtagagtgactgcttgcgaaccagttcagcagtgcctcaggtaagaggacttagttctcccgctgcagcgaagtaaaagaggaag

SEQ ID NO: 422388 - DNA, 201 bp, Homo sapiens
atacattcttttagctgcaagtaacagaaagctgctctatccagctcaaagggaaataatgaaaggaagtcaggttctctgaaggaactaaagatcaagastgcaaatgaacatcagggataaactgaatttgaagaggaactcacctcatgtttgtctgtttctgtatccacattagttttacttttccttggagctcag

SEQ ID NO: 422389 - DNA, 201 bp, Homo sapiens
tgctgggctcacctaaatcggctctctgtatgggcatccattggtgacccatgagctgcagccaaaagtgtaacaaagggcaatgatattacacaccgttyatgcctgggaatacatggcatgtgtgaatgcacagacatgcgtgtggccgtcgcctccaggacacggtgccctctaccactgctggtcaccattcctagc

SEQ ID NO: 422390 - DNA, 201 bp, Homo sapiens
tgtctcccgaccagataaaagcagtgatctctcagtctcgacgagtccttaaatgcgtttgcaagaggtgttttacataactggagcccagttaattgtaaaacaaacaaacaaacaaaaaacactagatcaatggctagtgagtatctactaataaaattttataatagttgctgctttttattgagcgccttctgtggg

SEQ ID NO: 422391 - DNA, 201 bp, Homo sapiens
ggaatgtcaccaaggctggccacgtggcacaggccccatgtcctgagagcaagaggggcatagtgaggaggctctgtggggctgacggagtctgggggccsgtccacagcagctgcacagatgcgaggctcctggccttgttcactagaaccaaggtgaagcttccaccctgctgcccacgtgccccctccacggcccacc

SEQ ID NO: 422392 - DNA, 201 bp, Homo sapiens
gtctcccgaccagataaaagcagtgatctctcagtctcgacgagtccttaaatgcgtttgcaagaggtgttttacataactggagcccagttaattgtaaaacaaacaaacaaacaaaaaacactagatcaatggctagtgagtatctactaataaaattttataatagttgctgctttttattgagcgccttctgtgggg

SEQ ID NO: 422393 - DNA, 201 bp, Homo sapiens
tgggaagggggctgagagtgaatgaacataggctcccgggcctcctgcagccagcttgcctgagactctgtgagcccctctgtatttcctggaggaagggytgcctggttctgtctccgtggcccagctccttcctcacctccctaccagacagacccttccttgcctgccacatccccctatcttctaactttggctgat

SEQ ID NO: 422394 - DNA, 201 bp, Homo sapiens
taaagtgctgcatcagttcaacctgtgcttttttgtttctcacattcgtgtctcccttttacaaggacccttgtgattacattgggcccacacagattatscgtgataatatccctctcaatattcataatttaatcacatctgcaaaatcccttttgacatatacatttacatatccagaagttctagggatttgcacat

SEQ ID NO: 422395 - DNA, 201 bp, Homo sapiens
acacgcacacgcaggtgcatatagacagggctcaggtctgtgacacagtgagcccctccatatttcctggaggaaggactgccatgttctctctccttggsccagctccatcctcacctccctaccagacagacccttccctgcctgccccatccccctatcttctagctttggccgatggcccaagggccagacaatgtg

SEQ ID NO: 422396 - DNA, 201 bp, Homo sapiens
gtttcacggtgttgcccatgctggtcacgaactcctgagctcaggcgatctgcccgcctcggcctcccaaagtgctgggattacagacttgagccatcatkcccggctggtgggatttattctttagttctgagatacaggtccaaactaatcctaccccagatttaagaggagaggttggtacccaatctcatttttatg

SEQ ID NO: 422397 - DNA, 201 bp, Homo sapiens
tctcccgaccagataaaagcagtgatctctcagtctcgacgagtccttaaatgcgtttgcaagaggtgttttacataactggagcccagttaattgtaaaacaaacaaacaaacaaaaaacactagatcaatggctagtgagtatctactaataaaattttataatagttgctgctttttattgagcgccttctgtgggga

SEQ ID NO: 422398 - DNA, 201 bp, Homo sapiens
ctcacgagtagctgggattataggcgcctgccaccacgaccaggtacttttttgtatttttagtagagacggggtttcaccatgttagccaggctggtctygaactcctgacctcaggtgatccgcctgccctggcctcccaaagtgctgggattacaggcgtgagccagggcaccaggccacatgtcataagtttttaat

SEQ ID NO: 422399 - DNA, 201 bp, Homo sapiens
ttagtagagacggggtttcaccatgttagccaggctggtctcgaactcctgacctcaggtgatccgcctgccctggcctcccaaagtgctgggattacagrcgtgagccagggcaccaggccacatgtcataagtttttaatgaaacagcttcacccatccagctgtcttggaatttgttcttttgctgatgcctaaggtt

SEQ ID NO: 422400 - DNA, 201 bp, Homo sapiens
aagaagacataaaaatggaaggtgtagaaccaaattcatcgtggtccttgatccaatatgcttatacaacctgccttgaattaaaagaagataatactgaktgcctgctatctacagcttgccttcttcagctttcacaggctgtagaagcatgttgtaagtttttgtttgtttgtttgttttgagacagagtttcgctct

SEQ ID NO: 422401 - DNA, 201 bp, Homo sapiens
tggaatttgttcttttgctgatgcctaaggttgtacagatttgcataaagtggctcacaattatactattgagcatttcatgaaagtaatcagaaaccagkaatttgtattattaccagccagcaaaattgcaaagttcttgactagtgatgacatgaacattcctgatgagacagtattgactccacttcttacttgggt

SEQ ID NO: 422402 - DNA, 201 bp, Homo sapiens
tttcatgaaagtaatcagaaaccaggaatttgtattattaccagccagcaaaattgcaaagttcttgactagtgatgacatgaacattcctgatgagacartattgactccacttcttacttgggtctgtcatgatttggaacagagatggaaagatctaagtaaacttttggcttatattaggatacctcttcttgcacc

SEQ ID NO: 422403 - DNA, 201 bp, Homo sapiens
aagtggctcacaattatactattgagcatttcatgaaagtaatcagaaaccaggaatttgtattattaccagccagcaaaattgcaaagttcttgactagygatgacatgaacattcctgatgagacagtattgactccacttcttacttgggtctgtcatgatttggaacagagatggaaagatctaagtaaacttttgg

SEQ ID NO: 422404 - DNA, 201 bp, Homo sapiens
gaaagtaatcagaaaccaggaatttgtattattaccagccagcaaaattgcaaagttcttgactagtgatgacatgaacattcctgatgagacagtattgmctccacttcttacttgggtctgtcatgatttggaacagagatggaaagatctaagtaaacttttggcttatattaggatacctcttcttgcaccacagtt

SEQ ID NO: 422405 - DNA, 201 bp, Homo sapiens
tgtttaccctcacatcctcaccacctgcttctttgtttgatcaccaataaatagtgtgggctcccagagctcggggcctttgcagccttcaatctagtgcyggccctctggacccactttatgcacttttaacttatcttttcacattcctctgaccccgccagactttgtagcccccacggcctggtgttaggcctgatc

SEQ ID NO: 422406 - DNA, 201 bp, Homo sapiens
cttatacaacctgccttgaattaaaagaagataatactgagtgcctgctatctacagcttgccttcttcagctttcacaggctgtagaagcatgttgtaartttttgtttgtttgtttgttttgagacagagtttcgctctgccgcccagtgtagatctcagctcactgcaacctccgcctcccaggttcaagcaattctc

SEQ ID NO: 422407 - DNA, 201 bp, Homo sapiens
ccctcacatcctcaccacctgcttctttgtttgatcaccaataaatagtgtgggctcccagagctcggggcctttgcagccttcaatctagtgctggcccyctggacccactttatgcacttttaacttatcttttcacattcctctgaccccgccagactttgtagcccccacggcctggtgttaggcctgatcacccca

SEQ ID NO: 422408 - DNA, 201 bp, Homo sapiens
ctcacatcctcaccacctgcttctttgtttgatcaccaataaatagtgtgggctcccagagctcggggcctttgcagccttcaatctagtgctggccctcyggacccactttatgcacttttaacttatcttttcacattcctctgaccccgccagactttgtagcccccacggcctggtgttaggcctgatcaccccaac

SEQ ID NO: 422409 - DNA, 201 bp, Homo sapiens
agttgctggtgatggcagaattccagctcacagattggtgctctcctctggctcagactattttgctgccatgtttactaatgatgtcagagaagcaagayaagaagacataaaaatggaaggtgtagaaccaaattcatcgtggtccttgatccaatatgcttatacaacctgccttgaattaaaagaagataatactga

SEQ ID NO: 422410 - DNA, 201 bp, Homo sapiens
gtttactaatgatgtcagagaagcaagataagaagacataaaaatggaaggtgtagaaccaaattcatcgtggtccttgatccaatatgcttatacaaccygccttgaattaaaagaagataatactgagtgcctgctatctacagcttgccttcttcagctttcacaggctgtagaagcatgttgtaagtttttgtttgt

SEQ ID NO: 422411 - DNA, 201 bp, Homo sapiens
gatggtatccacaggccgagaccgccagaccaaccactcctacatcaccatcctcaacaccatccagggagaggtggaccccacccaggtccacaagagcytgcagaggatccgggaatggaagttggccaacttcatcctgttgggccccaccagcatccaggtggccctgtcgaggaagtctccttacctgcccttggc

SEQ ID NO: 422412 - DNA, 201 bp, Homo sapiens
ggacctggagccccaggtgatccactccatcctcaactccccctgtgccaagctctacaacccagagaacatctacctgtcggagcatgggggaagagctrgcaacaactgggccagcagattctcccagagggagaagatccatgaggacatttttaacatcacagaccaggaggcagatggtagtgacaatctagatgg

SEQ ID NO: 422413 - DNA, 201 bp, Homo sapiens
caaccacaccagcatctcctcactcttctagagaacctgtcgccaatatgacaagctgcggaagtgggaggccttcctggagccgttccgcaaggaggacrtgttcaaggacaactttgatgagatggacacaacacatctagggagattgtgcagcagctcatggatgagtaccacatggccacatggccagactacatc

SEQ ID NO: 422414 - DNA, 201 bp, Homo sapiens
gagttcgctactgagggcactgaccacaaggacatctttttctaccaggcagacgatgagcactacatcccccgggctgtgctgctggacctggagccccrggtgatccactccatcctcaactccccctgtgccaagctctacaacccagagaacatctacctgtcggagcatgggggaagagctggcaacaactgggcc

SEQ ID NO: 422415 - DNA, 201 bp, Homo sapiens
ctggcacgcggcagcgttgcgggtgggagcggctgcaactctggtgcctgaggagcgataccaagagaaatcatcacccacaattgggccagtgcagcaaycagattgggttcgagttctggaaacagctgtgcactgagcatggtatcagccccaagggcaccatggaggagttcgctactgagggcactgaccacaagg

SEQ ID NO: 422416 - DNA, 201 bp, Homo sapiens
accgccagaccaaccactcctacatcaccatcctcaacaccatccagggagaggtggaccccacccaggtccacaagagcctgcagaggatccgggaatgsaagttggccaacttcatcctgttgggccccaccagcatccaggtggccctgtcgaggaagtctccttacctgcccttggcccaccgggtcagtgggcgca

SEQ ID NO: 422417 - DNA, 201 bp, Homo sapiens
tacctgcccttggcccaccgggtcagtgggcgcatgatggccaaccacaccagcatctcctcactcttctagagaacctgtcgccaatatgacaagctgcrgaagtgggaggccttcctggagccgttccgcaaggaggacatgttcaaggacaactttgatgagatggacacaacacatctagggagattgtgcagcagc

SEQ ID NO: 422418 - DNA, 201 bp, Homo sapiens
gggggaggggaggggacaggactgaggtcggatgcctgtgtttcagcccgggcagtgagtgtggatggcttggcaggtgagcctgccagagctggaggacyggcttcagtgtcccatctgcctggaggtcttcaaggagcccctgatgctgcagtgtggccactcttactgcaagggctgcctggtttccctgtcctgcca

SEQ ID NO: 422419 - DNA, 201 bp, Homo sapiens
ctctgtgatctccctcccagccccggagcctctcaagttggaccctgccactgcccacccactcctggagctctccaagggcaacacggtggtgcagtgcsggcttctggcccagcggcgagccagccagcctgagcgcttcgactacagcacctgcgtcctggccagccgcggcttctcctgcggccgccactactggga

SEQ ID NO: 422420 - DNA, 201 bp, Homo sapiens
gcggaaactggggcccaaggtcatgtgggttaggactgggatccaggactcaaagtgtttcctctaaaattctggtgctccttagggttgagggtggtggrtgagtgctggacagggggaggggaggggacaggactgaggtcggatgcctgtgtttcagcccgggcagtgagtgtggatggcttggcaggtgagcctgcc

SEQ ID NO: 422421 - DNA, 201 bp, Homo sapiens
gtagacacacacacacacacacacacacacacacacacacatatcttcaagggaccagtttttttcactgcagtcttttgttttacagctgcggaaactgrggcccaaggtcatgtgggttaggactgggatccaggactcaaagtgtttcctctaaaattctggtgctccttagggttgagggtggtggatgagtgctgg

SEQ ID NO: 422422 - DNA, 201 bp, Homo sapiens
gtaaaaaatgtagacacacacacacacacacacacacacacacacacacatatcttcaagggaccagtttttttcactgcagtcttttgttttacagctgyggaaactggggcccaaggtcatgtgggttaggactgggatccaggactcaaagtgtttcctctaaaattctggtgctccttagggttgagggtggtggat

SEQ ID NO: 422423 - DNA, 201 bp, Homo sapiens
gggatactcccaagaaggtgatccaaggagctgagaaggggagggatcagctgctcatggggccatggcctgttgcctccaggaggagctcgcagccctcwtctctgagctgaagcaggagcagaaaaaggtggatgagctcatcgccaaactggtgaacaaccggacccgaatcgtcgtgagtgccccttccctctgccc

SEQ ID NO: 422424 - DNA, 201 bp, Homo sapiens
ccacttctgactctgtgcctgctgttccctgctgggaagaaggaaagccagtgatgctggcttgaggctgtagtgggaggcccagcggattgtgagaagcyaggtattccaatgtcgggctcccccgggggctgctggtgctgcttctgtctcattgacaagctttcataggggagcaggtgggagatcagggtagaggcc

SEQ ID NO: 422425 - DNA, 201 bp, Homo sapiens
ggtcttcaaggagcccctgatgctgcagtgtggccactcttactgcaagggctgcctggtttccctgtcctgccacctggatgccgagctgcgctgccccrtgtgccggcaggcggtggacggcagcagctccctgcccaacgtctccctggccagggtgatcgaagccctgaggctccctggggacccggagcccaaggt

SEQ ID NO: 422426 - DNA, 201 bp, Homo sapiens
agtaataataatacctggctggctgttatatatataaaacacctgttataaaacacgtgactgggtggcttatgcctataataacagcactttgggaggcygaggtgggtggatcacttgagtccaggagtttgagaccagcctgggcaacatagtgagaccctgcctctacaaaagtttcaaaattagccttgttggcca

SEQ ID NO: 422427 - DNA, 201 bp, Homo sapiens
tctccctcccagccccggagcctctcaagttggaccctgccactgcccacccactcctggagctctccaagggcaacacggtggtgcagtgcgggcttctsgcccagcggcgagccagccagcctgagcgcttcgactacagcacctgcgtcctggccagccgcggcttctcctgcggccgccactactgggaggtggtgg

SEQ ID NO: 422428 - DNA, 201 bp, Homo sapiens
cctgagactcaggtcccaggaccaacccggtcaggaaggccctggggacaccgaggccagccagacagagcctggcagctcggctgtgactctgcagtgascagccctccctgtcccagaatgagtcggatgtcttcagctgggtgatccgccgcgagttccaggagctgcaccacctggtggatgaggagaaggcccgct

SEQ ID NO: 422429 - DNA, 201 bp, Homo sapiens
aggcagtggtgcaggcgtccagctgcatttcccacttctgactctgtgcctgctgttccctgctgggaagaaggaaagccagtgatgctggcttgaggctrtagtgggaggcccagcggattgtgagaagccaggtattccaatgtcgggctcccccgggggctgctggtgctgcttctgtctcattgacaagctttcata

SEQ ID NO: 422430 - DNA, 201 bp, Homo sapiens
ggactgaggtcggatgcctgtgtttcagcccgggcagtgagtgtggatggcttggcaggtgagcctgccagagctggaggaccggcttcagtgtcccatcwgcctggaggtcttcaaggagcccctgatgctgcagtgtggccactcttactgcaagggctgcctggtttccctgtcctgccacctggatgccgagctgcg

SEQ ID NO: 422431 - DNA, 201 bp, Homo sapiens
ccctgtcctgccacctggatgccgagctgcgctgccccgtgtgccggcaggcggtggacggcagcagctccctgcccaacgtctccctggccagggtgatmgaagccctgaggctccctggggacccggagcccaaggtctgcgtgcaccaccggaacccgctcagccttttctgcgagaaggaccaggagctcatctgtg

SEQ ID NO: 422432 - DNA, 201 bp, Homo sapiens
ctccttccctcttccctcttccctcttcctctccctctccctctctcctttcttttttttctttctttttggagacagcgtctcactctgttgcccaggcyggagtgcagtggtgtgatcatggctcactgcagcctccaactcctaggctgaagcaatcctcccacctcagcctcccgagcagctggggctacaggtgca

SEQ ID NO: 422433 - DNA, 201 bp, Homo sapiens
cctgtgtctgcttgaccttgccagcctgtcatggtgccctcccagtacctgggtgctcaggcgtggagaggctggcagccctgggccctggctgatctccygaagtgagaggcacatggggctgggagccatagtgccccggccctggaggtggctgtgaaacagaaacaggagccgggcaagatccaggagcactcagcc

SEQ ID NO: 422434 - DNA, 201 bp, Homo sapiens
acccttgcgcagcaggcagtatcagccctgcctgaaacttgctctgcagattgtgggaagagagtggatccatgttctagacccaacaaacgaacacgtgyagttcccaagccttcctcactccctgtttatgggagactccgtgtttctcacatttcttttagtcttagagacaatttggtcagaagacatgggtttaaa

SEQ ID NO: 422435 - DNA, 201 bp, Homo sapiens
ctgtgctccagcctgggcaacagagtgagaccctgtctcttaaaaaaaaaaattaaaacaggccaaaacagagcctctccatttgaaacgggagctggggycaccctccccacggccaccgccagggctccccatgcatggggtgaactccctgcccggcgccaggccatgcagcctcccctgagactcaggtcccaggac

SEQ ID NO: 422436 - DNA, 201 bp, Homo sapiens
gatgcagtcagggaccccactttacacacaggcacaggcaggaagacagccagcttgatgggacccatgttgcgtggagtcaccaccagctgagccttcctttttttttttttttttttgagacagagtctctgtcacccaggctggagtgcagtggtgtgatctcagctcactgcaacctctggctcctgggtacaagtg

SEQ ID NO: 422437 - DNA, 201 bp, Homo sapiens
aacactgtttttgccttgggtggatgcaatcagtctgtgattgatcttccttatgtaaaacttcattcattcattcattcattcattcattcattcattcaagggagcagccctgtactggccccttctagaccctggggctagagagatgaggaagacacagcccctctccttggggagttcagggcctccatcagcttc

SEQ ID NO: 422438 - DNA, 201 bp, Homo sapiens
actgcaaatgaccctgcagatggcccctttcatgcttgtctccaaatttgagtaaaaaatgtagacacacacacacacacacacacacacacacacacacrtatcttcaagggaccagtttttttcactgcagtcttttgttttacagctgcggaaactggggcccaaggtcatgtgggttaggactgggatccaggactc

SEQ ID NO: 422439 - DNA, 201 bp, Homo sapiens
gggttaggactgggatccaggactcaaagtgtttcctctaaaattctggtgctccttagggttgagggtggtggatgagtgctggacagggggaggggagkggacaggactgaggtcggatgcctgtgtttcagcccgggcagtgagtgtggatggcttggcaggtgagcctgccagagctggaggaccggcttcagtgtc

SEQ ID NO: 422440 - DNA, 201 bp, Homo sapiens
atgatcatgccactgtgctccagcctgggcaacagagtgagaccctgtctcttaaaaaaaaaaattaaaacaggccaaaacagagcctctccatttgaaaygggagctggggtcaccctccccacggccaccgccagggctccccatgcatggggtgaactccctgcccggcgccaggccatgcagcctcccctgagactc

SEQ ID NO: 422441 - DNA, 201 bp, Homo sapiens
cagctccactggttcctccattcggtttaaccagcgcctcccaagcagctgcccacagctggctctataactgagcctgggaaaaacagaggaaagtcatrtccctgccttcaagggtctcgtagatgggtggggaggcagatggtgaactgtgggtacctagaacagcagaagttcactcaagctacagaaatactagag

SEQ ID NO: 422442 - DNA, 201 bp, Homo sapiens
acacccgtggcctggtggcctccctggacatgcagctggagcaggcccagggaacccgggagcggctggcccaagccgagtgtgtgctggaacagttcggmaatgaggaccaccacaagttcatccgggtgagtggacagggaggcgtcccatccccatacccgccagggccttccccttcccaacagtgccctagcttcc

SEQ ID NO: 422443 - DNA, 201 bp, Homo sapiens
taagtgtagagttctgggtctcactggagaccccctgaagaagatcctttgaaggtgggcctctagaatctctattacacctatgctttcaacagtttccygaaagtttgggaactgatctagaaggtggggagcttgcctaggttttgctgttcagttctaggtccggatgcatgctggggctggaccttgcattattag

SEQ ID NO: 422444 - DNA, 201 bp, Homo sapiens
cgttaggactggctccaagttggcttttgccctctgtgtccttgagactgagataacccaggacttgagtctcagggggtaaacagctcaaagcatgggcrtgactcctccgcccctgtgccacctgtgtctgcttgaccttgccagcctgtcatggtgccctcccagtacctgggtgctcaggcgtggagaggctggcag

SEQ ID NO: 422445 - DNA, 201 bp, Homo sapiens
caacccagttgtcgttaggactggctccaagttggcttttgccctctgtgtccttgagactgagataacccaggacttgagtctcagggggtaaacagctsaaagcatgggcatgactcctccgcccctgtgccacctgtgtctgcttgaccttgccagcctgtcatggtgccctcccagtacctgggtgctcaggcgtgg

SEQ ID NO: 422446 - DNA, 201 bp, Homo sapiens
gtccagctgcatttcccacttctgactctgtgcctgctgttccctgctgggaagaaggaaagccagtgatgctggcttgaggctgtagtgggaggcccagyggattgtgagaagccaggtattccaatgtcgggctcccccgggggctgctggtgctgcttctgtctcattgacaagctttcataggggagcaggtgggag

SEQ ID NO: 422447 - DNA, 201 bp, Homo sapiens
gagctcatcgccaaactggtgaacaaccggacccgaatcgtcgtgagtgccccttccctctgcccctgcctgggaccggccaccttcactttcctgtagarctcagttctcattggtcctttacagaaaaccatgccttccatataaagccagaactcaaagcattcccagggcggggtggggaaagcgcaaatcctctca

SEQ ID NO: 422448 - DNA, 201 bp, Homo sapiens
gggccatggcctgttgcctccaggaggagctcgcagccctcatctctgagctgaagcaggagcagaaaaaggtggatgagctcatcgccaaactggtgaamaaccggacccgaatcgtcgtgagtgccccttccctctgcccctgcctgggaccggccaccttcactttcctgtagaactcagttctcattggtcctttac

SEQ ID NO: 422449 - DNA, 201 bp, Homo sapiens
ggagctgagaaggggagggatcagctgctcatggggccatggcctgttgcctccaggaggagctcgcagccctcatctctgagctgaagcaggagcagaaraaggtggatgagctcatcgccaaactggtgaacaaccggacccgaatcgtcgtgagtgccccttccctctgcccctgcctgggaccggccaccttcactt

SEQ ID NO: 422450 - DNA, 201 bp, Homo sapiens
ccactcttactgcaagggctgcctggtttccctgtcctgccacctggatgccgagctgcgctgccccgtgtgccggcaggcggtggacggcagcagctccytgcccaacgtctccctggccagggtgatcgaagccctgaggctccctggggacccggagcccaaggtctgcgtgcaccaccggaacccgctcagcctttt

SEQ ID NO: 422451 - DNA, 201 bp, Homo sapiens
taaacagctcaaagcatgggcatgactcctccgcccctgtgccacctgtgtctgcttgaccttgccagcctgtcatggtgccctcccagtacctgggtgckcaggcgtggagaggctggcagccctgggccctggctgatctcccgaagtgagaggcacatggggctgggagccatagtgccccggccctggaggtggctg

SEQ ID NO: 422452 - DNA, 201 bp, Homo sapiens
tgcgctgccccgtgtgccggcaggcggtggacggcagcagctccctgcccaacgtctccctggccagggtgatcgaagccctgaggctccctggggacccrgagcccaaggtctgcgtgcaccaccggaacccgctcagccttttctgcgagaaggaccaggagctcatctgtggcctctgcggtctgctgggctcccacc

SEQ ID NO: 422453 - DNA, 201 bp, Homo sapiens
accagtttttttcactgcagtcttttgttttacagctgcggaaactggggcccaaggtcatgtgggttaggactgggatccaggactcaaagtgtttcctmtaaaattctggtgctccttagggttgagggtggtggatgagtgctggacagggggaggggaggggacaggactgaggtcggatgcctgtgtttcagcccg

SEQ ID NO: 422454 - DNA, 201 bp, Homo sapiens
gcctgctgttccctgctgggaagaaggaaagccagtgatgctggcttgaggctgtagtgggaggcccagcggattgtgagaagccaggtattccaatgtcrggctcccccgggggctgctggtgctgcttctgtctcattgacaagctttcataggggagcaggtgggagatcagggtagaggccttgtaggttccaggct

SEQ ID NO: 422455 - DNA, 201 bp, Homo sapiens
ggaccagtttttttcactgcagtcttttgttttacagctgcggaaactggggcccaaggtcatgtgggttaggactgggatccaggactcaaagtgtttcytctaaaattctggtgctccttagggttgagggtggtggatgagtgctggacagggggaggggaggggacaggactgaggtcggatgcctgtgtttcagcc

SEQ ID NO: 422456 - DNA, 201 bp, Homo sapiens
gatcagggtagaggccttgtaggttccaggctctctagaattacctgggagtgtcacctataagtgtagagttctgggtctcactggagaccccctgaagmagatcctttgaaggtgggcctctagaatctctattacacctatgctttcaacagtttcccgaaagtttgggaactgatctagaaggtggggagcttgcct

SEQ ID NO: 422457 - DNA, 201 bp, Homo sapiens
caggcagtggtgcaggcgtccagctgcatttcccacttctgactctgtgcctgctgttccctgctgggaagaaggaaagccagtgatgctggcttgaggcygtagtgggaggcccagcggattgtgagaagccaggtattccaatgtcgggctcccccgggggctgctggtgctgcttctgtctcattgacaagctttcat

SEQ ID NO: 422458 - DNA, 201 bp, Homo sapiens
ctgcatttcccacttctgactctgtgcctgctgttccctgctgggaagaaggaaagccagtgatgctggcttgaggctgtagtgggaggcccagcggattstgagaagccaggtattccaatgtcgggctcccccgggggctgctggtgctgcttctgtctcattgacaagctttcataggggagcaggtgggagatcagg

SEQ ID NO: 422459 - DNA, 201 bp, Homo sapiens
ttgatacactttaacttcttataatttctctatattttataatactaaatgataaaatagactatatatgttttatgcattcataatatacctaatttttwcttttcctttttttgatgtttcaagactacatgattcatctgcaagttttttcaaattgtcacaaatctccaaaaaaatttccaacatatttattgaaaa

SEQ ID NO: 422460 - DNA, 201 bp, Homo sapiens
actattttatagtaaagttattgaaatggaaatgaaaacagccagtaacttatgtttcagaatgtttgtaacacacttcatggtgttcccataggctttgmtgtctagtcttatagtttgaggtttttttggtctgcatttttctttttgattacaaaatttataatttaataaatactagagtttatcaaaaacagtttg

SEQ ID NO: 422461 - DNA, 201 bp, Homo sapiens
cctgtttataaggtgtctgtctgaaatgatgggtaactgcagctgcagacccatctagggtgtgtaccaggtaatttaacttcttgtaatggcatgacttttcttggcttcttgggagcacttctagcatcactagtggcacttcacatgggtcccatggtgttattcaaggtttatggtattgtactaaacatgatgaaa

SEQ ID NO: 422462 - DNA, 201 bp, Homo sapiens
ttccatatgaatttgaggattgcttttccatttctgcaaaaaaggttgttggaattgtgataggaattatgttgaatctgtagatcactttgggtagtattgtcattttaatatgttaagtcttccaatccatacatcacttgtctatttacttagctcttctttaatttctttcagtaatgctttatagttttctgtgta

SEQ ID NO: 422463 - DNA, 201 bp, Homo sapiens
ctgtttataaggtgtctgtctgaaatgatgggtaactgcagctgcagacccatctagggtgtgtaccaggtaatttaacttcttgtaatggcatgacttttcttggcttcttgggagcacttctagcatcactagtggcacttcacatgggtcccatggtgttattcaaggtttatggtattgtactaaacatgatgaaaa

SEQ ID NO: 422464 - DNA, 201 bp, Homo sapiens
gccagaagaatgcaagcagcgaagtcgccgctccccacaggcaagagagtaccggcagacagcggcgcgagacaggggcagaacgatgaggcgccggagtkagctcgccggtgcgggtgcgggtgcgcggcgcgtcgcggcccctcctccgcgacgcgccgggtggtcacgtgacggccgcgcgcgttcccggcagctgcg

SEQ ID NO: 422465 - DNA, 201 bp, Homo sapiens
taactcctaggctcaagccatcctcctgtgtcactacccacaaagtgctaggattacagatgtgaggcaccatgccctgcctctttttattattaatgtgrctaatagaaaatttgaaattgcatacgtggcttgcatcatatttctattagataatacgtgaccttttctgtgagagacaatacattgtagaaagacatt

SEQ ID NO: 422466 - DNA, 201 bp, Homo sapiens
tcccaggtagtgctgatagtactagttgggaatcccagtttgtttgtatagctaggatctagagcattatgttagttttaattcattttccttccccagcrtttatccagttagtctgcactttgaaaaaattattcatgaggatatagaaattgaaaaagtcaccaaagcatgcaagatttactaaaattatatgaactg

SEQ ID NO: 422467 - DNA, 201 bp, Homo sapiens
cagttaacttagattcctttaagaatcaacttttgtttcagagataaaatatttatggataagacctaagtaaagtaagtgaatagagaggaataaattarattggttacagataatgtgtaaatgcattcaggagataaggagaattagaaacaaggacattttttgtgtatttcttaggaataaaatggtaccttctac

SEQ ID NO: 422468 - DNA, 201 bp, Homo sapiens
aagtttttggaaactcaaaagtttacatggaattttgactgcgcagggtgtagacattcttaactcctcacattgttcaagggtcaactgtataaattctsagagttaataggtgatgggtcagtttggcagaattggggctacctaaacccattaactttgattataacagaatatgcagttttcttttttaatgtgtct

SEQ ID NO: 422469 - DNA, 201 bp, Homo sapiens
caattctatatcattggtgtatttatctatcctatgccagcaccaaactgtcttgttaccttagctttgtagtaagttttgacattggatttttcaagatkgggttacttagggtcctttgcaattccatatgaatttgaggattgcttttccatttctgcaaaaaaggttgttggaattgtgataggaattatgttgaat

SEQ ID NO: 422470 - DNA, 201 bp, Homo sapiens
caagggttctgttaagaagtaaaaaagattgggttccagaatgggcaggaaaggaaatgagatcaggaactggataaaggaaaggagatggtcaagagatsgtaggtccccatgaaattgaagagcaggtgtgggaatgagtaggctggaagaaccagagcttgtgatctgagagtcggattaagatttcagagaggcagc

SEQ ID NO: 422471 - DNA, 201 bp, Homo sapiens
tgtgtcttatttatctttagacccatcagtacttagtattgtatctggaacatggcaggtgtttagtaaatgtttatctgaatcaataaggcagaaattayaaattttatgtcagtgtttaagctagatacatccaatttgacaaatcttttttcttcttcctcttcaggggatcttcaatattcatgttattttctcctt

SEQ ID NO: 422472 - DNA, 201 bp, Homo sapiens
atttttatacattcccaaggtatgtacaagtagatgcttacaaaaaattttcatcggttggagagtttttcctctactttcatcttcatatccccattgtstagtatgtggcttgcatataatgcacatcataggtggttagtgttttcataattgttaaattaagatattgcaagaattaaaacatgactttaatattat

SEQ ID NO: 422473 - DNA, 201 bp, Homo sapiens
gagaatagacatagttttacttcctccttacccgtctgtatgcctttatctcttttccctaatttgctctgctagaacttacagtcatgttgaatagcagyggtaaaagcatgcatcttgtctttaatttttcccacttttaagataaagttttccactgaattttttgaaaggattatacataattaactgattctcttg

SEQ ID NO: 422474 - DNA, 201 bp, Homo sapiens
cattttatgtgtggcccaagacaattctttttcttccagtgtggcccagggaaaccaaaagattagacacccctgacttagaactttccataggttaggaraaagttgtactttcttgatgtctataacctagaatttctggtaaaggaattgattggaaatgttattaaaagttgaaaataatttggaaattaaacattt

SEQ ID NO: 422475 - DNA, 201 bp, Homo sapiens
gactttaatattatatgtattttttcttaggatggctggctgtggtgaaattgatcattcaataaacatgcttcctacaaacaggaaagcgaacgagtccygttctaatactgcaccttctttaaccgtccctgaatgtgccatttgtctgcaaacatgtgttcatccagtcagtctgccctgtaagcacgttttctgcta

SEQ ID NO: 422476 - DNA, 201 bp, Homo sapiens
tttgaaaggattatacataattaactgattctcttgatcttaattactctttttttcttttgcagcacaaagaatgaaccagcagtggaagagaaaatacygtaagctggctgactgctggtgaagaaaatgctttatttttgtggcaggcatctgtgggatctgtaatagaaatgtaagtgtagcatcatggtttttttc

SEQ ID NO: 422477 - DNA, 201 bp, Homo sapiens
tcagaccccatttagttgaaatgagttttgtctgaagtttccaagtatgacctatgctttttcttagctaatttttagcaggagatgatgagggctaaaarttgagacattagggcatttagttacatctctcaatttgtgactggtttataaaaaatactaagatgtgtctgctaactcacacctgatttatctactcct

SEQ ID NO: 422478 - DNA, 201 bp, Homo sapiens
tatgagtttattaagtattagcttacacgatcacaaagtcccacaacaggctgtctgcaaggagcaaggagagctagtccgagtcccaaaactgaagaacytggagtctgatgttcgagggcaggaagcatccagtacaggagaaagatgtaggctgggaggctaggcccatctttctttttcacatttttctgcccgctt

SEQ ID NO: 422479 - DNA, 201 bp, Homo sapiens
atggtaccttctacacatctcaattattaaagtacaaatagtgattgaacgaaatttttagaagaaatgttttaattgaatcttcacactagaggttttamcattcaatcaattaggttctgagaaggatggattggtacatcttaaaagacttgtaagatagcgaaggataggcagtgctaatgaccaacagcaacactc

SEQ ID NO: 422480 - DNA, 201 bp, Homo sapiens
cccattgagtagacttgacacccttttggaaaatcagttggctattgatgtatgagtttatttctggactctcaattctatatcattggtgtatttatctrtcctatgccagcaccaaactgtcttgttaccttagctttgtagtaagttttgacattggatttttcaagattgggttacttagggtcctttgcaattcca

SEQ ID NO: 422481 - DNA, 201 bp, Homo sapiens
aacaaataggcattcataagctgtaaaagggaatagatcgtaccaggcaggaggaaatacagagctacaaagggaggtttgcaggactatgagtaattttrtacaactagattattaatctatgggtggttgttgaagataaaaaagactagagactaattatttacagtttagatctttaaaaccttttaatgttgtcct

SEQ ID NO: 422482 - DNA, 201 bp, Homo sapiens
accacctgtgcttacttacggactatctttagttttcatggcgtgttaccttttgggttaattcaaatccaaaatgttgttaacggactgctaattaaagyatttagaacttagaattacagaattatagagtaggatgagataacaaaagactgggggttatgacttgaccaaggtcacacagataatttgccaaagagc

SEQ ID NO: 422483 - DNA, 201 bp, Homo sapiens
gacagaatttatggtgtggttggttggggtgggggagcagggggctgtgtggtgagagaaaggactttctctttttctccatgaacacaaagtagttaagrcatgaaacctgagatgtcatattgtaagaattatgcagaaatgggggtttgtaaaatgtgtgtatatgagataaagatatgagggggccaagggttctgt

SEQ ID NO: 422484 - DNA, 201 bp, Homo sapiens
tgagaaatagaacatgcatacaaatatagtaattcataataaaccataattatcaaacggactagacatcacactgaagatgcttggtcagtacattcgtmtattcatagctgatactgttaatttcctaaggctgggacagaagaacattattttaggattaggtcaaatcactttaaatttgtagggctggaacaggta

SEQ ID NO: 422485 - DNA, 201 bp, Homo sapiens
tcccaagagattaaacaatttcagggagatgcacgtgtaatcctcaagaaagcacaaatggaacaagaactgacaattgttgtataaaggttttctgttayatttaatctggagttcctggatgatcagagggaaaagaccttcctaaaactaggccttttccacaaaccacgcccttggtgtctgtgaagcagcagcatc

SEQ ID NO: 422486 - DNA, 201 bp, Homo sapiens
caccacaagatggaacgcaggaggacaggggcttgggagagccacttcactgtcgggtaaaacaacggagcaagatgagtgcctccggatgcttggtttcyccaccctccagtgtctgcttgctcttcaagtacctccaccaagctaatgacagtccactttaggacatcacgggcctcgaggttacaactttcccaggta

SEQ ID NO: 422487 - DNA, 201 bp, Homo sapiens
ctgggtggttgggaacaggaagcatatggcatcttgcaggctataggcaccacaagatggaacgcaggaggacaggggcttgggagagccacttcactgtygggtaaaacaacggagcaagatgagtgcctccggatgcttggtttccccaccctccagtgtctgcttgctcttcaagtacctccaccaagctaatgacag

SEQ ID NO: 422488 - DNA, 201 bp, Homo sapiens
catgttcttatatacaaaaaacagtggcttaattgttttgagtaccaggcacctgaagtaaaacaagtactaacctcagtcaggattttgcaaacaggtaytaactagaacttagggataaccatgccagtgactcagacttctttccactgctgtccttcctcctcaaatggttcacttgggctatgtgcctggcactgt

SEQ ID NO: 422489 - DNA, 201 bp, Homo sapiens
atgttcagctgtgccctgaaacactccattctgtccctccccatccacgtgcaggctgcgagagccaccatggtcctggcgtgtgttctgtctgctttggrgatctgcacttccacagtaggaatgaaatgtactcgcttaggaggggacagagaaaccaagagccatgcttcctttgctggaggagtctgtttcatgtct

SEQ ID NO: 422490 - DNA, 201 bp, Homo sapiens
aacttaagacaacagaagggctagtggaaaaaaaaaaaaagaccacagggaataatcagtaagactttaaagaacaacatataagaaggattcaaagttcraagtgggatgatcacgggcagacctgggtggttgggaacaggaagcatatggcatcttgcaggctataggcaccacaagatggaacgcaggaggacaggg

SEQ ID NO: 422491 - DNA, 201 bp, Homo sapiens
ggcctcccaaagtgctgggattatgggcgtgagccaccacacctggccgtagaatatggtgcttcttgatgaaagggtcagctgaggcagccatctcatarctgttgaagtaaacctaaaatatagagacaaatctccaaattcaatgttttatttgggaagcaagaattgtaaattagggcctacacacagaccaggtgg

SEQ ID NO: 422492 - DNA, 201 bp, Homo sapiens
tttggggaacaatcctagttgcttgggaaagtatcacacagtcaactcaaatcctggagattaaattcactagaagtgcagctagagccctgtgacacccmcaaagccagcctgagtccctgctggatacagctcaccaggggggatgaaaagccagatacaaacttccccagtctcgctcacagttaagaatgaccaaat

SEQ ID NO: 422493 - DNA, 201 bp, Homo sapiens
catcattgttaaacatcaggattttctaagaggacagacttaacagtaacatcatggcctcagcaggactccagctccttgctttcatcctggccttatcyggggtctctggagtgctcacagccactctgctgcccaactggaaggtgaatgtggatgtggactccaacatcataacagccattgtacagctgcacgggc

SEQ ID NO: 422494 - DNA, 201 bp, Homo sapiens
gctactcgggaggctgaggcaggagaatggtgtgaacccgggaggtggagcttgcagtgagccaagatcgctccactgcactccagcctgggtgacagagygagactccatctcaaaaaaaataaaaataaaaaataaaatcatttgaaaaacctataatgctattaaaattctttatcagatactatagctggaatttca

SEQ ID NO: 422495 - DNA, 201 bp, Homo sapiens
gaccctgccaaatccccctctgcgagaaacacccaagaatgatcaattaaaaaaaaaaaaaagaaaaaagaaaaaaaattaaaaaattaaaaaaaaaaaaagataaatgaaaacattctaaagaagaaagatggactgcaatcactcaacccacagtggactttgcaggactgagaagtaaatgctgatatgtaaagctac

SEQ ID NO: 422496 - DNA, 201 bp, Homo sapiens
taattatcaaacggactagacatcacactgaagatgcttggtcagtacattcgtatattcatagctgatactgttaatttcctaaggctgggacagaagarcattattttaggattaggtcaaatcactttaaatttgtagggctggaacaggtaactattttatcttactctgaactgtcattattttcaagattgaatg

SEQ ID NO: 422497 - DNA, 201 bp, Homo sapiens
ccttattatgtattgagtattttcattaaaaataaaatcatttgggcgaggcgtggtggctcacgcctgtaatcccagcacttcgggaggccgaggtgggyggatcacgaggtcaggagatcgagaccatcctggctaacagggtgaaaccccatctctactaaaaatacaaaaaaaaaaaaaattagccgggcatggtgg

SEQ ID NO: 422498 - DNA, 201 bp, Homo sapiens
agtactgcagtatttcagaaaccattacatttttctcaaataaggcagtaagcagtgccagatgggctagataggggaacaggaatagaaagatggaatcsaaagcctttttgtttcttaaaacacagccaagccacaaagtaggtggtcttttccttcctcttaaaaataaacaaagaaaataaagggttaatttatttc

SEQ ID NO: 422499 - DNA, 201 bp, Homo sapiens
aggggaaaggatgcgggatgaccctgtgaggtaggaggggtggagagagatctggacgctgcaggttggctgctgaagactgtatgacatggggtgatatyctatctgaacattctgacctgaaaaaacaaggatgcttgagattgtctgtctgaggtttctttcagctccaagattctatgaaaataaatcagcccaagg

SEQ ID NO: 422500 - DNA, 201 bp, Homo sapiens
tctatgaccttacccccaacccggtgctctctgaaacatgtgctgtgtccactcagggttaagtggattaagggcggtgcaagatgtgctttgttaaacaratgcttgaaggcagcatgcttgctaagagtcatcaccactccctaatctcaagtacccagggacacaaacactgcggaaggccgcagggtcctctgccta

SEQ ID NO: 422501 - DNA, 201 bp, Homo sapiens
tacactgattttggctgtctgtaattgatcactgccagtacttgttaatcatgatgaacaaactgtcttcatgtctgaaatatactgaaagttataaaatrtatcagttaatgggaagaaaaggattataattggtaagctgaacatagattgacaacaaaggttattcagtcaaagtagaaagaaagagagagggagaga

SEQ ID NO: 422502 - DNA, 201 bp, Homo sapiens
ggatagtaatgttgataaactatatttctatttacacttctactttcctagctccttttttatataagaaattctgccttcattaaaggtctatagctaaygaaagttgcttccagttcagaagttttccttctaaagcaggcaattaatattttataggattattgttttcatcaaggcaaaaaaataatcaacatgttt

SEQ ID NO: 422503 - DNA, 201 bp, Homo sapiens
tttaagctgaggggtcataagacttacctaggagagtctctggacttaaaagattaatatccctttaatgtccacatcagaagtggatagtaatgttgatraactatatttctatttacacttctactttcctagctccttttttatataagaaattctgccttcattaaaggtctatagctaacgaaagttgcttccagt

SEQ ID NO: 422504 - DNA, 201 bp, Homo sapiens
aacctgggaagaccgtggggagaacagtttgggaatggtcaggaattcagttttgtgccatgacaggtctgagctatccatcagtgacgccaagtcagcaracagaaacacaacttgggagttcaggggagagggctgggcaagagatttaagctgaggggtcataagacttacctaggagagtctctggacttaaaagat

SEQ ID NO: 422505 - DNA, 201 bp, Homo sapiens
ttacttctctgtagcttagttttcttttcttttcttttctttttttttttttttttgagatggagtctcgctctgtcacccaggctggagtgctatgacaygatcttggctcaatgcaacttccgtctgctgggttcaagcgattctcttgcctcagcctcccgagaagctggggctaatggcatgtgccactacgcctgg

SEQ ID NO: 422506 - DNA, 201 bp, Homo sapiens
caaaaggaaggttgggagttttattagagaaatgttatgtgttgttttgaaagaaagctcattggcactagagaagcttttgggtgtggacaagctctgaytggtgagtgacgacagcaggtaaaaccagtcttagagtcacagtaggtggtcccagcagctactagctaaaactggtcttggtgttacagcaggccattt

SEQ ID NO: 422507 - DNA, 201 bp, Homo sapiens
agcttttctcctccagcctacagcatcctcatctgcttgggggctggagaagggggatactcagatgtgttcttggctcctactctaaagggaagcctttygtttacttactttctttcgctcaatcctggttttgccttttttccttaggctttgttatttggttctctactgcacagaaatagatagaattctgacagc

SEQ ID NO: 422508 - DNA, 201 bp, Homo sapiens
tttttctctttcttcttgggatcataaaaaaagaacagattttaaacagtcacatagtgtttcctctcagagcagatgtggtaggaagaactgaggccaaragaatgacagcaaactcagatcacaagagaaataagactaagaaatgtggtgagggggatgaagagtttttttactgtgtaaattatgtaaatgtacata

SEQ ID NO: 422509 - DNA, 201 bp, Homo sapiens
ctaatggcatgtgccactacgcctggctaatttttgtatttttagtagaggcaaggtttcaccatgttggccaggctgctcttgaattcctgacctcaggygatccgcctgcctcagcctcccaaagtgttgggattacaggtgtgagccaccacgcccggccagttttcttgtctataaaattcttcttatctgctaggt

SEQ ID NO: 422510 - DNA, 201 bp, Homo sapiens
tgtgctttgttaaacagatgcttgaaggcagcatgcttgctaagagtcatcaccactccctaatctcaagtacccagggacacaaacactgcggaaggccscagggtcctctgcctaggaaaaccagagacctttgttcacttgtttatctgctgaccttccctccactattgtcctatgaccctgccaaatccccctctg

SEQ ID NO: 422511 - DNA, 201 bp, Homo sapiens
acattttttttaaaattcagaaccccaacttttcattagaattaaatggacagcatttgaaaaatacaaggatggggctccatcccagaaaattaaataaragccactgggttgggcctgagcctcttggggcttttccaaagccctcgtgtgggcagaaatgagaatcacaggtttggggaacaatcctagttgcttggg

SEQ ID NO: 422512 - DNA, 201 bp, Homo sapiens
agccagatacaaacttccccagtctcgctcacagttaagaatgaccaaatgaggccgggcgcggtggctcacacctgtaatcccagcactttggaaggccraagcgggcgaatcatgaggtcaggagatcgagaccatcctggctaacacggtgaaaccccgtctctactaaaaaatacaaaaaattagccaggcgtggtg

SEQ ID NO: 422513 - DNA, 201 bp, Homo sapiens
tgggcgtgagccaccacacctggccgtagaatatggtgcttcttgatgaaagggtcagctgaggcagccatctcataactgttgaagtaaacctaaaatayagagacaaatctccaaattcaatgttttatttgggaagcaagaattgtaaattagggcctacacacagaccaggtggtcttcagtatgtccaaagaacaa

SEQ ID NO: 422514 - DNA, 201 bp, Homo sapiens
ctaaagtaatttctgcttaaagataaatgaaaacatgatctatgaccttacccccaacccggtgctctctgaaacatgtgctgtgtccactcagggttaartggattaagggcggtgcaagatgtgctttgttaaacagatgcttgaaggcagcatgcttgctaagagtcatcaccactccctaatctcaagtacccaggg

SEQ ID NO: 422515 - DNA, 201 bp, Homo sapiens
ccctgaaacactccattctgtccctccccatccacgtgcaggctgcgagagccaccatggtcctggcgtgtgttctgtctgctttggggatctgcacttcyacagtaggaatgaaatgtactcgcttaggaggggacagagaaaccaagagccatgcttcctttgctggaggagtctgtttcatgtctgcaggaatctcta

SEQ ID NO: 422516 - DNA, 201 bp, Homo sapiens
tactaaaaatacaaaaaaaaaaaaaattagccgggcatggtggcgggcgcctgtagtcccagctactcgggaggctgaggcaggagaatggtgtgaacccrggaggtggagcttgcagtgagccaagatcgctccactgcactccagcctgggtgacagagcgagactccatctcaaaaaaaataaaaataaaaaataaaa

SEQ ID NO: 422517 - DNA, 201 bp, Homo sapiens
tacaactaatgatgtggttatttctggtatgtatttttgagatctgccatcactacttctgaattgttcagaatagccggcttcatttgggccaggaaatkattctggtcccaattagaaaggacctcatgttcttatatacaaaaaacagtggcttaattgttttgagtaccaggcacctgaagtaaaacaagtactaac

SEQ ID NO: 422518 - DNA, 201 bp, Homo sapiens
actgagcctggtggtgctggaaggctgcacagtggaactggccgaggctcccgtgcccgaggagtttgcctttgccatctgctttgatgcccctggagtgygcccacacctgctggctgcagaagggccggcggcccaggaggcctgggtgaaggtgctgtcccgggcaagctttggctacatgcgcctggtggtacgcga

SEQ ID NO: 422519 - DNA, 201 bp, Homo sapiens
ccgaggagtttgcctttgccatctgctttgatgcccctggagtgcgcccacacctgctggctgcagaagggccggcggcccaggaggcctgggtgaaggtkctgtcccgggcaagctttggctacatgcgcctggtggtacgcgagttggagagccagttgcaggacgcacgccagagcctggctttgcaacgccgctcat

SEQ ID NO: 422520 - DNA, 201 bp, Homo sapiens
atcatcacgctcatgaactacaaaaggatcaagaattacctcttgaagccacttgctatgtggctctagagtgacaccaagtagccataaaatgctgtacmctggacaccctatagttcataccctatagttcaacaatgtatagccaatcactaatcaatgttatttctttttttttttttgagatggagtttctctctt

SEQ ID NO: 422521 - DNA, 201 bp, Homo sapiens
ggggagccactcaaaatgtgaggaacaggataggccctaagtctgggccctttgagtcaggaaaccagggccagttctttttcaggagttaaatgtttacscatttccaaggttgcgttttgggaggggacatgggttctctccttcctgctatttaggcattctccaggttcgagatccacccgtgtgtctggaagggac

SEQ ID NO: 422522 - DNA, 201 bp, Homo sapiens
tggaaggctgcacagtggaactggccgaggctcccgtgcccgaggagtttgcctttgccatctgctttgatgcccctggagtgcgcccacacctgctggcygcagaagggccggcggcccaggaggcctgggtgaaggtgctgtcccgggcaagctttggctacatgcgcctggtggtacgcgagttggagagccagttgc

SEQ ID NO: 422523 - DNA, 201 bp, Homo sapiens
agccgctgtaagccccaggctcctaaccaccgagctgcgggcctggagaatggccactgcctctccaaggacagcagccctgtgggcttggttgaagaagsgggcagcaggtctgcagggtgggggttggctgagtgggagctgcagggccctgccagcctcctcctaggcaaggggcagagccctgtgtcccctgagacc

SEQ ID NO: 422524 - DNA, 201 bp, Homo sapiens
gggctccccgcagtggccactggcccggcggtcccgcacccccagcccgcctctcctccaacaaaagaatccaggaagacgctggggcgggcgggaggccsggtgtgcggtggcctggcccccctactggtggagaggagggagcgcccttccccagacgcgggggaggggaggggtcatggccccacgggctgcccaccc

SEQ ID NO: 422525 - DNA, 201 bp, Homo sapiens
ctggggtccaggttgcctctggagccggtgctgttccccaggagggcacggaaccacctccctctctgatctgctgccatctctcttgcctcacagttccygtgggagccatgaagctgaacgagaggagtgtagcccactatgcactcagcgactccccagcggaccacatgggcttcctgcgcacctgggggggcccag

SEQ ID NO: 422526 - DNA, 201 bp, Homo sapiens
gagggatttgggagacgaagctctgcgtctcattggccatgtaaccttgggcaagttcccctcactgcgctgggccttggttttccatgagtaaggacagytggactaagtgccgttcatgatgctgggggcacccacattcaatggctgtggttagctcttctcagctgtaccctgggtttgtgccacactcttgtgtac

SEQ ID NO: 422527 - DNA, 201 bp, Homo sapiens
tagggcgacaaccgggttggggctccccgcagtggccactggcccggcggtcccgcacccccagcccgcctctcctccaacaaaagaatccaggaagacgstggggcgggcgggaggccgggtgtgcggtggcctggcccccctactggtggagaggagggagcgcccttccccagacgcgggggaggggaggggtcatgg

SEQ ID NO: 422528 - DNA, 201 bp, Homo sapiens
tctgcctgtaggtcaataagattcaacagctatatgcaaataagaggccagtagaggcccaggagggtcatggaaaccctggaagcttggcctcagagttsgagttgagaggaccccagatgaggggatagtttaagcacagtggtttcgatgggtctggggtccatttcagctcagctggggcctgtttctttggatttt

SEQ ID NO: 422529 - DNA, 201 bp, Homo sapiens
tcaacagatccctcctgagggcctctctgagccctgcacggtgctgggtattggggttctcctgggaacttagctgagccccaccctagacattctggggmtgggaacagtgctgtaaacacatatgacatcgtcgtgggatgaaggaaacaaaccagaaatgggggggtctactggtcaggtgaccttaggtcaggccac

SEQ ID NO: 422530 - DNA, 201 bp, Homo sapiens; identical to SEQ ID NO: 267647

SEQ ID NO: 422531 - DNA, 201 bp, Homo sapiens; identical to SEQ ID NO: 267649

SEQ ID NO: 422532 - DNA, 201 bp, Homo sapiens; identical to SEQ ID NO: 267645

SEQ ID NO: 422533 - DNA, 201 bp, Homo sapiens
gttccttttgattgctgggtgataatgcattgtttgaatgtatcacgattgtttacgctgttagtagctgttaggtattccagtggttcctatcgtttggytatttttaataatgctatcaaatgctatcaacagtcacatgagggtctttgtgtggacatatgtttttatttctcttgggtaaatatctagacatgagat

SEQ ID NO: 422534 - DNA, 201 bp, Homo sapiens
catttttctctctacatgtacaaattattttaatacttgaagttttacgctcagacttacagaatagaaaattttctggagcacaaaagttgacttgaggrgaagaaaggcagtttttttttttttttaaacattttttaaaagaatgaacatctttgcacccagagaaaaaaaactggtattttaatatatatttatata

SEQ ID NO: 422535 - DNA, 201 bp, Homo sapiens
aacctggccaacatggcaaaaccccatctctactaaaaatataaaaattagcccagcatggtggcaggcacctataatcccagctacttggggggctgagrcaggagaatcgcttgaacccgggaggcggaggttgcagtgagccgagatcgcgccattgcactccagcttgggcaacaagagcgagactccatctttttt

SEQ ID NO: 422536 - DNA, 201 bp, Homo sapiens
aaagaccacactttcctcctccccaaaagtggctggacctgtgaacactaattactcatgtgtaaggagtgctttgcaatctgtaaagcactttccattcyggtgtcgtagataattcgtcacaatgaacttgccaagtaagcgttttttttatttaccttttttacagatgaagaaattttgtcccagagacgtttatta

SEQ ID NO: 422537 - DNA, 201 bp, Homo sapiens
gttagtcaccgtgcccagcctccttcctatttaatgacttctgcccctacttcctgctttcatcattgcagtaagaatgcactggtctaacacttcaaccyggctgtctttagccagaggcagagctttgaaacctgggaatttactgcttggaaatgggatggaattctaaacatttcccttttgagggtttattcacat

SEQ ID NO: 422538 - DNA, 201 bp, Homo sapiens
taaccttgacctcctggtctcaagtgatcctcctgcttcaccctcccgagtagctgggactgcaggcctgcaccaccaggctgggctaattaaaaaaaaawtttttttggctgggtgcagtggcttatgcctgtaatcccagcactttgtgaggctgaggcaggcggatcacctgaggtcaggaattccagaccaggctgg

SEQ ID NO: 422539 - DNA, 201 bp, Homo sapiens
ggcctagttttgtatttttagcagagacggggtttcaccatgttggccaggctcgtcttgatccacccatcttggcttcccaaagtgttgcgattacaggygttagtcaccgtgcccagcctccttcctatttaatgacttctgcccctacttcctgctttcatcattgcagtaagaatgcactggtctaacacttcaacc

SEQ ID NO: 422540 - DNA, 201 bp, Homo sapiens
tcagggtgtctgtctcacacagtttatttaacaataggtaataagaaatcaaatttaacagtctatacagtgatccaaagttcatatttataagtaatcamctttaattgcatgatttacaacagttgagggtttttgctattttcaagttttatagaaagtgtgtgtgtgtgtgtgtgtgtgtgtgtgtgagtggggggt

SEQ ID NO: 422541 - DNA, 201 bp, Homo sapiens
tgggtggctggagttgctgctgtggttgctgctggggcaggccagccctctgaacgcccgcctgcattggattcatgttctgcatggctggattggagtgraccccctgctgacctggcatggtaggtggctgtagccctggctgcccctggggcatgccaggctgcccagggatgggttgtggattagagttggcatact

SEQ ID NO: 422542 - DNA, 201 bp, Homo sapiens
tcatgttatctggaccttgaaaatggaatgttcagaaacacatgtgcaagggacctgtgccaagctcatgtcacgaacaggcctcctgatgaagcttctcmgcgagcagcaggaagcaaaggcatccaaggcagaatggtctgtagaccaatggaaaactgatgagactccatcttaaaaaaaaaagaaaaaaaaaatggc

SEQ ID NO: 422543 - DNA, 201 bp, Homo sapiens
actggcacctgcctctgctcccaaggcctggggaagctggcctatctgtcccatatttccttgttgcatctgttgcatgtgatgctgcatccgctgctgckgctgtggtgggtagccaactccttggggttgctggaactggttatggttggccattccagggcctattcctggccctgctccctgttgctgctgctgttg

SEQ ID NO: 422544 - DNA, 201 bp, Homo sapiens
atgttttaactcttccataaagtgaggaaaatagggaaaaatgtcaaccatctgcaccagtaaataataactattaatattacatatgttcattaatttawaaaaaataataaaacctattggaggtgcaaggcaggagcatattgtttggcttcacaggcctcagcctcctcccagtgcacacttgaaccacacacacaa

SEQ ID NO: 422545 - DNA, 201 bp, Homo sapiens
cgcctcctgggttcacgccattctcctgcctcagcctcccgagtagctgggactacaggcgcctgccaccacgcctggctaattttttgtatttttagtasagatggggtttctccatgttagccaggatggtctcgatctcctgacctcgtggtctgcctgcctcggcctcccaaaagtgctgggattacaggcgtgagc

SEQ ID NO: 422546 - DNA, 201 bp, Homo sapiens
ctgggactacaggcgcctgccaccacgcctggctaattttttgtatttttaatacagacgggttttcaccatgttagccaggatggtctcgatctcctgasctcgtgatcccaaagtgctgggattacaggcgtgagccaccgtgcctggccttttttttttttttttttttgatactgagtcatgctcttgtcacccagg

SEQ ID NO: 422547 - DNA, 201 bp, Homo sapiens
tatatgttctttggagaaatatctactaaaatcctttgcccatttaaaaaactatattactccttttttaattgttgagagtaagtttgtttttctttttytttttttttttttttttttttgagggggagtcttgctctgtcccccaggctggagtgcagtggcgagatctctgctcatgcaagctccacctcccgggtt

SEQ ID NO: 422548 - DNA, 201 bp, Homo sapiens
cagcctcccgagtagctgggactacaggcgagtgccaccatgttgggctaattttgtatttatagtgcagacggggtttcgccatgttggccaggctggtyttgaactcctgacctcaaatgatccgtccgcctcagactcccaaagtgctgggattacaggggtgagccaccgcacctggcctgaattgcttatactttt

SEQ ID NO: 422549 - DNA, 201 bp, Homo sapiens
accatcaagccccaaactcaaacatcctgtgatttcatcatcagagctcctggcttagggcacaattcttggctggatctgcctgccactccccagctacmaacaaccgtatctcggcaacacaaccaccctggcacagcacttttaattatttgttaaatgtttcttactgggttgggctaaaccaactgtgaggagtcc

SEQ ID NO: 422550 - DNA, 201 bp, Homo sapiens
gttcaagcgattcttgtgcctcagcctcccgagtagctgggactacaggcgagtgccaccatgttgggctaattttgtatttatagtgcagacggggtttygccatgttggccaggctggtcttgaactcctgacctcaaatgatccgtccgcctcagactcccaaagtgctgggattacaggggtgagccaccgcacctg

SEQ ID NO: 422551 - DNA, 201 bp, Homo sapiens
gatctcggctcactgcaacctccctctcccgggttcaagcgattcttgtgcctcagcctcccgagtagctgggactacaggcgagtgccaccatgttgggstaattttgtatttatagtgcagacggggtttcgccatgttggccaggctggtcttgaactcctgacctcaaatgatccgtccgcctcagactcccaaagt

SEQ ID NO: 422552 - DNA, 201 bp, Homo sapiens
tttaattttttgagagggaatctcactctgtcatccaggctggagtgcactgctgcgatctcggctcactgcaacctccctctcccgggttcaagcgattyttgtgcctcagcctcccgagtagctgggactacaggcgagtgccaccatgttgggctaattttgtatttatagtgcagacggggtttcgccatgttggcc

SEQ ID NO: 422553 - DNA, 201 bp, Homo sapiens
tccaaggaaaattgtcttttaggctacgaaagattcaaaaaaattgttttcagtacaaaaagtcttgttaagagaaaataatttttttgctcccaaaatahaaggtgtctctagtgtatgtctagtgtactctgtgagaggtttgaattcaagtctgagttatcggtgctgagtcccaggtccgtggcgcttgcaccatgg

SEQ ID NO: 422554 - DNA, 201 bp, Homo sapiens
ttaaaagacccaaaattgtttatgtttagaataatggtagttaatttggtgatgttatttctggatgtataaggttaattggcaagtgcttatcaaatgcrtgtgtgtgtgtgtgtgtgtgtgtgtgtgtgtgtgtgtgtgtgtgtgagatacggagtctcattcactctgtcagccaggctgaagtgtggtggcacaatc

SEQ ID NO: 422555 - DNA, 201 bp, Homo sapiens
gctgcccagggatgggttgtggattagagttggcatacttggcagcccgctgcttgatgaatgcagccaacagctgggggttggcgtgaaggatactaagyacctgttgctgctgcaggggagagctgggagacctgagagtccgcaaaaggttttgtaaggcttgttgagacacagtgcctggtttgagtgggctgatac

SEQ ID NO: 422556 - DNA, 201 bp, Homo sapiens
ttagaatacataccaaacaatgcctacctgcattgccaaattgggtgctgctatagggcaaaagtcttccaagtaatgaatctaagagagaatggaatgtrtgggaaaagaaagttactggaactaataggacacgctgtggctcatctgaagaaagctgatgaggccaatgataatctcttccgtgtctgttccattctt

SEQ ID NO: 422557 - DNA, 201 bp, Homo sapiens
aatcgtgaattcaaagccacaatgtgcaacctactggcctatctaaagcacctcaaagggcaaaacgaggcagccctggaatgcttacgtaaagctgaagmgttaatccagcaagagcatgctgaccaggcagaaatcagaagtctggtcacctggggaaactatgcctgggtctactatcacatgggccgactctcagac

SEQ ID NO: 422558 - DNA, 201 bp, Homo sapiens
ctgtggctcatctgaagaaagctgatgaggccaatgataatctcttccgtgtctgttccattcttgccagcctccatgctctagcagatcagtatgaagamgcagagtattacttccaaaaggaattcagtaaagagcttactcctgtagcgaaacaactgctccatctgcggtatggcaactttcagctgtaccaaatga

SEQ ID NO: 422559 - DNA, 201 bp, Homo sapiens
ctctgaagcttcataagatgcgtgaagaaggtgaagaggaaggtgaaggagagaagttagttgaagaagccttggagaaagccccaggtgtaacagatgtwcttcgcagtgcagccaagttttatcgaagaaaagatgagccagacaaagcgattgaactgcttaaaaaggctttagaatacataccaaacaatgcctacc

SEQ ID NO: 422560 - DNA, 201 bp, Homo sapiens
aaagcgattgaactgcttaaaaaggctttagaatacataccaaacaatgcctacctgcattgccaaattgggtgctgctatagggcaaaagtcttccaagyaatgaatctaagagagaatggaatgtatgggaaaagaaagttactggaactaataggacacgctgtggctcatctgaagaaagctgatgaggccaatgat

SEQ ID NO: 422561 - DNA, 201 bp, Homo sapiens
gttcagatttatgtagacaaggtgaaacatgtctgtgagaagttttccagtccctatagaattgagagtccagagcttgactgtgaggaagggtggacacsgttaaagtgtggaggaaaccaaaatgaaagagcgaaggtgtgctttgagaaggctctggaaaagaagccaaagaacccagaattcacctctggactggca

SEQ ID NO: 422562 - DNA, 201 bp, Homo sapiens
tgtgctttgagaaggctctggaaaagaagccaaagaacccagaattcacctctggactggcaatagcaagctaccgtctggacaactggccaccatctcakaacgccattgaccctctgaggcaagccattcggctgaatcctgacaaccagtaccttaaagtcctcctggctctgaagcttcataagatgcgtgaagaag

SEQ ID NO: 422563 - DNA, 201 bp, Homo sapiens
caggcagaaatcagaagtctggtcacctggggaaactatgcctgggtctactatcacatgggccgactctcagacgttcagatttatgtagacaaggtgaracatgtctgtgagaagttttccagtccctatagaattgagagtccagagcttgactgtgaggaagggtggacacggttaaagtgtggaggaaaccaaaat

SEQ ID NO: 422564 - DNA, 201 bp, Homo sapiens
ggaaaaaattccctgtgacttgtgaacagtctcacagttgttgattgctgctgactagggaacagaaagggcatcacacatataccacacacacccacacmctcatgttacaaggaaccaaaaagaatttttgccagtggagaacaccagtttagtccctccttcactgaaacctcctacccgttgctcttctgggaatac

SEQ ID NO: 422565 - DNA, 201 bp, Homo sapiens
ccctgacctctctccccgcttccctgtcttacttaagcctggaacagctcttaagcctggcacctctgcagctgtgactcattgcaaatgctttgcattcygggatgttcttcagggttttgggtctcccttgtggctcaaagaaccatgcaagttgaaagggaggagaaaaagaggccctgcagctgccaaaacattgca

SEQ ID NO: 422566 - DNA, 201 bp, Homo sapiens
gtgcaatggcacgatctcagcccactgcaacctccgccttccattccaggttctcctgcctcagcctcctgagtagctgggattacaggcacgcaccaccmtgcccagctaatttttgtattttagtagagacggggtttcaccatgttggccaggctggtctcgaactcctgacctcaagtgatccacctgcctcggcct

SEQ ID NO: 422567 - DNA, 201 bp, Homo sapiens
ggacacagtgattagttgagaccagaacatgtcttttttaatataatgaaaatagcaaattattatcacttcttattagctcattgagttttgaaataacwtgaatcaaattgggtctccaaaaggaatctatgtaagtgtatctcactccaaacaaaactaatggaaatatatttgtagttaaaactgtaagctttttaa

SEQ ID NO: 422568 - DNA, 201 bp, Homo sapiens
ctcaccgccggcttgagacgccggaagtgacgctatcgttggcggaaacgcgttttgccagttatgcgaaaacatggctgcggccggtttggcccttcttkgtaggagagtttcatccgccctgaaatcttcccgatcgttaataactcctcaggtccctgcctgcacagggtaagtgatgtataaagtaggtttgcccac

SEQ ID NO: 422569 - DNA, 201 bp, Homo sapiens
ctctcacctcggcctccctaagttgggattacaggcgtgagccactgcacctgtccatgacataacttttaaaataatgtatgagaatgtatcaatccagyatcacttttacaggttttatacatattctaatgattttgtttttgaaactacctttttaagcctcaccttcagaatgtagcatcatcatcttaatattaa

SEQ ID NO: 422570 - DNA, 201 bp, Homo sapiens
ctgggaccacaggtatgcaccaccacacccagctaatttttttgcgttttatggagagggagtctccctatgttacccaggctgctctcactggggctcargtgatcctcctacctcagcctcccaacatcctgggattacaggcatgagccactgtgcccagccattggttatatttaaaattctctcctttttattaca

SEQ ID NO: 422571 - DNA, 201 bp, Homo sapiens
tttcacacagaaaatattatttttgtcggctcttgaataatgagacctgtgatttggcaacaccggccctgcattcctacatggcaacaacttggctggtstgtggagcaactgccccttctagatggagcagggacacaccacttctcggccaccctgtggttctttcactatgtctacttccttcataattgttatctg

SEQ ID NO: 422572 - DNA, 201 bp, Homo sapiens
accctggaacacagtcctattttatattctctcaactgacgctcctggcactgagaaacttatagaaaagaaggctctttgaggttgacttgttttcaatraggtatatctaaataatacttttgattttccttcacatttcttggcatgaacttctgaatgttaattctgtggacttggtagccatttactttctatctt

SEQ ID NO: 422573 - DNA, 201 bp, Homo sapiens
aattctcatgcctcagcctctcaagtagctgggattataggctcatgctgccatgcccagctaaatttttgtatttttagtagagatggggtttcaccacrttggccaggctagtcttgaattcctgacctcaagtgatccgcctgccttggcctcgcaaagtgctgggattataggcatgagccaccgtgcccagccaac

SEQ ID NO: 422574 - DNA, 201 bp, Homo sapiens
gcataaatattcataagttttctgtagcagaagtgtttatacattctcttttttgggaattttgtagtagatgattgttgaaattgtatctttctattctyttttcaggtagtagattccatggatgcattagataaagttgtccaggaaagagaagatgccctaaggcttcttcagactggtcaagaaagagctagacct

SEQ ID NO: 422575 - DNA, 201 bp, Homo sapiens
ggtcctactaacatgtttatactagcaatttcagttaattaataaaatgaaacagagaatagttggtggcttttgtttttttctttgagacaaggtctcgytctgttgcccaggctggagtgcagtggtacagtaacggcttactgcagccttgacctcctgggctcaagtgatcccccacctcagcctcctgagtatctg

SEQ ID NO: 422576 - DNA, 201 bp, Homo sapiens
gaatgtaaggactatgttttatgcctctttgtagctctcttagcacttaatacatgtggcaaatggaaggtttattgaacacatggataagcaaagatagtttatgtataatggattattctttgtaatcatattctatatattgagatttctaatatgtcttttttttttttttgaagcaagatctcactttatccccag

SEQ ID NO: 422577 - DNA, 201 bp, Homo sapiens
ggttcataatatctggacattctttctagtcaggaaatagggatagttggtatagggtttcagatgctcttgacttgtgtaggtttacagtgattactatkcaagtttaataatatatataacacaccaaatacagggactggcatgtttgaagctttgatgtaattgatttatgcatattttgatagtattgaataacaa

SEQ ID NO: 422578 - DNA, 201 bp, Homo sapiens
ggctgctctcactggggctcaagtgatcctcctacctcagcctcccaacatcctgggattacaggcatgagccactgtgcccagccattggttatatttaraattctctcctttttattacattttcatgatctgtaatctttagtgtatttgctttggaaaggtgtgttggaggatgcatttaattgagaatttaggtag

SEQ ID NO: 422579 - DNA, 201 bp, Homo sapiens
aatggaaggtttattgaacacatggataagcaaagatagtttatgtataatggattattctttgtaatcatattctatatattgagatttctaatatgtcttttttttttttttgaagcaagatctcactttatccccaggctggagtatagtagtgtgatcttagcccactatagcctcaaattcctaggctcaagcaat

SEQ ID NO: 422580 - DNA, 201 bp, Homo sapiens
attgctggcttatatgataaatctatatttagcattttaagaaaccgccaaactgtattctaaagtagctataccactttacatttgtagttctggtttamccatttccttagtaactagatcagttttttactgctttttaaaataactgtggtaaaaatcacataacataaaatttactgtcttgaccatttttaagtg

SEQ ID NO: 422581 - DNA, 201 bp, Homo sapiens
ctccttgtttctcctacattcaaatcccagagtcttgtcagcctttgggaaaggatctggtaatcagccttcatgctgaggtgtaaataactgagaagacmtggtgtaaataaacctccttcggtggggaggctgttcaacccaaaggtaaataaacctcccctcagaaagaggtttatttacctttgggctgaacaacca

SEQ ID NO: 422582 - DNA, 201 bp, Homo sapiens
agcttttgctataatggtgctgttacagaacttttgaacttcaaccgtggattatctgctttaaatatgtatttcagaggtgaacttcagcccagtaggtyatatgtactgcactttctcaatcagtagaacccaaaataataaaagtttactccagagaagctgaaagtgaccataattttttcaaacttcatatacatc

SEQ ID NO: 422583 - DNA, 201 bp, Homo sapiens
gccaccacgcctggctaatttttgtattcttagcagagacagggtttcaccatgttggccaggatggtcttgatctcttgacctcgtgatcctctcacctyggcctccctaagttgggattacaggcgtgagccactgcacctgtccatgacataacttttaaaataatgtatgagaatgtatcaatccagtatcactttt

SEQ ID NO: 422584 - DNA, 201 bp, Homo sapiens
ggaaggaaaatttagagagaaagaaagcaaaaattcttttaaaaaagtttccacatcttgctgaagcccaaaagtcaagtcttgtctaagatgtctgaacyattaaatttaccattttgtttttcttgaatagtctgtgtacaggagtaaatatgttaagtggtttataaagaaattctgtttttagtcaagtgactttac

SEQ ID NO: 422585 - DNA, 201 bp, Homo sapiens
ctttgatgtaattgatttatgcatattttgatagtattgaataacaaggaaatatttttgtataaattgctgttacgctttttttattctagactggaacrtgagaaacgagcccgcatcaaagcacggaaggaaaatttagagagaaagaaagcaaaaattcttttaaaaaagtttccacatcttgctgaagcccaaaag

SEQ ID NO: 422586 - DNA, 201 bp, Homo sapiens
gagcccgcatcaaagcacggaaggaaaatttagagagaaagaaagcaaaaattcttttaaaaaagtttccacatcttgctgaagcccaaaagtcaagtctygtctaagatgtctgaactattaaatttaccattttgtttttcttgaatagtctgtgtacaggagtaaatatgttaagtggtttataaagaaattctgttt

SEQ ID NO: 422587 - DNA, 201 bp, Homo sapiens
aaaaacaaacaaacaaacaaaataggtaaaaaagaaaattgaagtcatatataagctcaccttcagaaatagccacagtcagccaagcgtgttggctcatkcctgtaatcccagcactttgggaggccaaggcaggcagattacttgaggtcaggagtttgagaacagcccggccaaagtgacaaaaccccatctctacta

SEQ ID NO: 422588 - DNA, 201 bp, Homo sapiens
cccgcatcaaagcacggaaggaaaatttagagagaaagaaagcaaaaattcttttaaaaaagtttccacatcttgctgaagcccaaaagtcaagtcttgtytaagatgtctgaactattaaatttaccattttgtttttcttgaatagtctgtgtacaggagtaaatatgttaagtggtttataaagaaattctgttttta

SEQ ID NO: 422589 - DNA, 201 bp, Homo sapiens
ctcaccttcagaaatagccacagtcagccaagcgtgttggctcatgcctgtaatcccagcactttgggaggccaaggcaggcagattacttgaggtcaggrgtttgagaacagcccggccaaagtgacaaaaccccatctctactaaaaatacaaaaattagccggccatggtagcatgtgcctgtaatctcaactactta

SEQ ID NO: 422590 - DNA, 201 bp, Homo sapiens
ggccatcttaagtgagggcaagttttctattctcctcaccgccggcttgagacgccggaagtgacgctatcgttggcggaaacgcgttttgccagttatgsgaaaacatggctgcggccggtttggcccttctttgtaggagagtttcatccgccctgaaatcttcccgatcgttaataactcctcaggtccctgcctgca

SEQ ID NO: 422591 - DNA, 201 bp, Homo sapiens
gtccaatcaagtattgcttcctggctaattttcctcaagactttttttttttttttttaatcacatcaggccttttcagaaacatacaacagcttcttgtytacaggacaaaatcttaaactcttttcctcccagtattcctgcaagtcttagctacctacctttcatcgaagtcagaactcttgccttgtttcctaagtg

SEQ ID NO: 422592 - DNA, 201 bp, Homo sapiens
aagtcaagtcttgtctaagatgtctgaactattaaatttaccattttgtttttcttgaatagtctgtgtacaggagtaaatatgttaagtggtttataaaraaattctgtttttagtcaagtgactttactaatcagttgttctaagtgtgaatatggcatgctaattagctaatttggtagaagctaatttgcttctaaa

SEQ ID NO: 422593 - DNA, 201 bp, Homo sapiens
tatatttatggaacccccccccccgccccgcccaaccatcgttctaggattatatatccagtttaggaattatttagatgtttcctttttcagttttcttkgagactgtctactagagaaaattaaagggacaatataatagtagagttaattgttccttggcagattggcaagatggttagataaggaataggctgaaat

SEQ ID NO: 422594 - DNA, 201 bp, Homo sapiens
agtattcctgcaagtcttagctacctacctttcatcgaagtcagaactcttgccttgtttcctaagtgttccttgcttattttccactgttgcttcttctrttgctacagcttttaaatctttgctattcacatttaagacctagttgagatgctaagcaactgaagaaatctgaccactttttctctgagattgctccaa

SEQ ID NO: 422595 - DNA, 201 bp, Homo sapiens
ccagtcttgtctgagggagtcatgattaaggaagcctccttaggctttgttcagcttcctgggtgagaaggaagataggtagctccgctttgcagataacytcaggagttctttccgaatctccagaattgtcacgatcctttttttacatttgtttgtgtgctagcagtgagtgtctgtagtctgaagaagcaagacatc

SEQ ID NO: 422596 - DNA, 201 bp, Homo sapiens
gctttcttaccaatagtttgtgacaaatgtgtaacaaaatttgccatcactaaagtcttttttagctgatggaatgaattgttgtcttggggcgctgacamagatggtgaaatcctgccctgcctttgtttaaaatactcctcaaaggtccacaatgatacccttgtgtttggttggcaggatgagacaggagcctatctg

SEQ ID NO: 422597 - DNA, 201 bp, Homo sapiens
cggagttttacaacatcgcgtcccttgtgcggctggttaaggaaaggatacgggacaatgagaacagaacttcacaagtaatgtatttggaactgttaagragggttgtttcaagtgggcttctgtcggtcggtctgtgatttgaaaaggatgcctttacccttagagctggaggtgtgtgtggaacaccgtttgcagtgc

SEQ ID NO: 422598 - DNA, 201 bp, Homo sapiens
tcttctctaagaaatctcagattgatggaaacctatcctgccctaactttaaagagatttcaaaacccttgcttataaaggaattatttttatctactctrtatcctccttgtggtaatagaagccagtttcttcttgttccttttactgtaaagatgagtaggattaaagctgctcagagccaagtcctggcagtaccga

SEQ ID NO: 422599 - DNA, 201 bp, Homo sapiens
tcttaccaatagtttgtgacaaatgtgtaacaaaatttgccatcactaaagtcttttttagctgatggaatgaattgttgtcttggggcgctgacaaagayggtgaaatcctgccctgcctttgtttaaaatactcctcaaaggtccacaatgatacccttgtgtttggttggcaggatgagacaggagcctatctgattg

SEQ ID NO: 422600 - DNA, 201 bp, Homo sapiens
tgggattacagacatgagccaccgcgcccgacctttttttttttttttttttttttggcgacagagtctccctctgttgcccaggctggagtgcaatggcrctatcacagctcactgcgacatccacctcccgggttcaagcgattttcctgcctcagcctcctgagtacctgggattacaggtgcatgccaccacgcctg

SEQ ID NO: 422601 - DNA, 201 bp, Homo sapiens
ctctctcaaaaaaaaaaaaggaaaaaaaaataaaaaattagctgggcgtagtggcacatgcctgtaatcccagctactcgggaggctgaggcaggagaatygcttgaaccagggaggtggaggttgcagtgagccaagatcaccccactgcactccagactgggcaacagagcgagactccatctcaaaaataataataag

SEQ ID NO: 422602 - DNA, 201 bp, Homo sapiens
tccaggcaaagattgcaaattccagccagtaagtaaacgcctaaatgagtatgactgtctgtaacaccctacctaagatgatcttaatgtacaagatacawaaagctatagctttcttaccaatagtttgtgacaaatgtgtaacaaaatttgccatcactaaagtcttttttagctgatggaatgaattgttgtcttggg

SEQ ID NO: 422603 - DNA, 201 bp, Homo sapiens
gtctcactcccgttgcccaggttggagtgcagtggcgtgatcacagctcactgcagccttggcttcccaggctcaggtgattttcctacctcagcctaccragtagctgggactacagctgcaagctaccacacctggctaattttttgtattttgggtagaaacgagccttgttggccaggctggtctcaaactcctgaa

SEQ ID NO: 422604 - DNA, 201 bp, Homo sapiens
tagtattttttgtaggtgattgatcctggtgcatttgagagcacaagtggtttactttggaagggagaaaaaagaggcagtataatggcatcttaaatacytgggactttgacagctgtggccaacatcacagatcttttgtgatactctgaattttgtacttatacaattggtttccaaaataagtggttacaaccaatt

SEQ ID NO: 422605 - DNA, 201 bp, Homo sapiens
gaacctgggaggcagagcctgcagtgagccaagattgcaccattgcactccagcctgggcgacagagcgagactccgtctcaaaaataaataaataaaatwataataataataaataataataattttaccttatttttgacttggggaaatggattaaatctaagtttgttggcatagttgctcaagcattcatccctct

SEQ ID NO: 422606 - DNA, 201 bp, Homo sapiens
aatttttgtaagtacctagtaggtgtatatatttatggggtacatgagatttttcttttttttttcttcgctcaggctggagtgcactggcacaatcttgrctcactgcaacctcagcctcctgggttcaagcgattctcctgcctcagcctcccaagtagctgggattacaggcgtgcaccaccatgcttgactaatttt

SEQ ID NO: 422607 - DNA, 201 bp, Homo sapiens
atcgcttgaactcgggaggcggagattgcagtgagctgagatggtgccattgcactccagcctgggcgacagagcgagactctctcaaaaaaaaaaaaggaaaaaaaaataaaaaattagctgggcgtagtggcacatgcctgtaatcccagctactcgggaggctgaggcaggagaatcgcttgaaccagggaggtggag

SEQ ID NO: 422608 - DNA, 201 bp, Homo sapiens
gttttacaacatcgcgtcccttgtgcggctggttaaggaaaggatacgggacaatgagaacagaacttcacaagtaatgtatttggaactgttaaggaggrttgtttcaagtgggcttctgtcggtcggtctgtgatttgaaaaggatgcctttacccttagagctggaggtgtgtgtggaacaccgtttgcagtgcaggg

SEQ ID NO: 422609 - DNA, 201 bp, Homo sapiens
cacgaggtcaggagatcgagaccatcctggctaacacagtgaaaccccgtctctactaaaaaatacaaaaaattagccgggcgtggtggcgggtgcctgtwgtcccagctacttgggaggctgaggcaggagaatggcgtgaacctgggaggcagagcctgcagtgagccaagattgcaccattgcactccagcctgggcg

SEQ ID NO: 422610 - DNA, 201 bp, Homo sapiens
atattgtaaaggattaaaacacaatgctaagtatttttgtatctaaacataaaaaggtacagtaaaaatatagtataaaagataaaaatgatacacttgtrtatcatttacttaccatgaatgaagcttgcaggactggaagttgctctgggtgagtcagggagtgagtggtgagtgaatgtgaaggcctaggacattact

SEQ ID NO: 422611 - DNA, 201 bp, Homo sapiens
tcatgggggcagtttcccccttgctgttctcatgatagtaagtgagtcctcaggagatctgatggtttaaaagtggcacttccctctttgctctctctctstctctcctgccagcaggtgaagaaggtctttgcttcccctttgctttctgccatgattgtaagtttcctgaggcctccccagccatgtggaactgtgagt

SEQ ID NO: 422612 - DNA, 201 bp, Homo sapiens
ttaccatgaatgaagcttgcaggactggaagttgctctgggtgagtcagggagtgagtggtgagtgaatgtgaaggcctaggacattactgtacactaccstagacttcataagcactgtacactttggctacactacatttattttaaatttttttcttcaataataaatgaaccttagcttactgtaacttcttaacct

SEQ ID NO: 422613 - DNA, 201 bp, Homo sapiens
cgccaggcggcggtttccaggcaacgaccgaacacagacgcgggctagacgctggcgctgagcaacctgaggcctgcagactccgactgggcccctgggckggcgggacggaccgcggccaaggcgggggcgctggacggtggcggcatggaggacgacgaggaggagaccaccgcgtccacgctgcggggcaagcccagg

SEQ ID NO: 422614 - DNA, 201 bp, Homo sapiens
cactgctaataaagacatacccaagactcggtaatttataaaggaaagaggtttaactgactcacagttcagcatggctgggaaggactcaggaaacttayaatcatggcagaaggagatgtaaatatgtccttcacgtggcagcatgaagaggaatgagtgcacagtgaagaggcaagacccttataaaaccatcaggtc

SEQ ID NO: 422615 - DNA, 201 bp, Homo sapiens
ctccctctggggtctgtctgcggcaggcccaggctagcaaggaaagaaggccttgctgccgggactacgcccggatggtccagggcgcgggaaaccctcttgccctcctgcaaaccgaagaccagaaggaatagctggcgagccgcctgcagggagggctggactgagagtggtccctctgttctgtcctggccacaccgg

SEQ ID NO: 422616 - DNA, 201 bp, Homo sapiens
gaacaaatgaggaatgaataatcggaaagccaatttttaaaacaaagggataagtcaccgacttacaaaatttgcttcttaagagtaacttgggggtttcrgtttggattatctgctgctttgcttatccctgtcctcgttctcctcctctggtatcgtcaatggcagtgggctatagtttcttctctacttctctagttg

SEQ ID NO: 422617 - DNA, 201 bp, Homo sapiens
gggttggtcggggggctgagcccaaggcccagtttcccttgcaaacccatttatgagagaggaatgagtgaaaggggaggcaggcatgttctagtggagasctttcacatggtacgaaacaccgagagtgaggaatccatgttccaatgaatcaaaactcctgtgtgagcatgtgctctgtgtcttttcattgagtgcatg

SEQ ID NO: 422618 - DNA, 201 bp, Homo sapiens
gctctgtgtcttttcattgagtgcatgtttgtcgagatacgtatctaatgttttttatacaagaacatattcacacacagatcacacaaatatggacacayatattgcagcttgcccttttcatttaataacatatcttagtttttcaaaatcaccccgttttaaggggtacaagcaaatgacacaagaaaagagacaaca

SEQ ID NO: 422619 - DNA, 201 bp, Homo sapiens
acctccaaggagatgctctggatttattagaagtaaattgaggccctgatgaatcaaaggaaactgttttggatcaccttgggggttttcagttttaaaaktaggttgtttatccctggacaagcaaactcacggaaagcctcaagatgaggaggtcatagtgctgtggcttctgaggacaggaaatgaggtagcccactc

SEQ ID NO: 422620 - DNA, 201 bp, Homo sapiens
gggagcgggagccactaggtgtcaggatccctcaaaagcacagtggctctgtcgggacagcagggcgctctttctgcccagggtctggagggggtcgcggkaagccggggccgcccagcgggctgggcgcggctccctctggggtctgtctgcggcaggcccaggctagcaaggaaagaaggccttgctgccgggactacg

SEQ ID NO: 422621 - DNA, 201 bp, Homo sapiens
tgaatttattagccagtgagtggggagagagggtttggaggactgcctgagagttttttatggaccaggactagaagtagtatttactggagtcacccacrttcctggccccagcctacttgtggggcaaactgggaaatgcatcttctgcttgttctggaagaggtagtatgtttgatgagcacatagcattacccctgc

SEQ ID NO: 422622 - DNA, 201 bp, Homo sapiens
gggagtaagagtgcttctcaggttgggaggagtcatggggcacgatggctacttcttgccaagtgtgtttgcctgggctaccataaaatgtaccacggacytggtggcttaaaacaacagaaatttcttctctcttagttttggaggctagaagcctgaaatctgggtgtcaccaggattttttttttctaatttccaact

SEQ ID NO: 422623 - DNA, 201 bp, Homo sapiens
cttggaggacacaagtcagctgaccacatccagtgaggttgttcggcagtggttctaagtacagcagtgtggtgcagtctcccatctcaccttcagtcacmtgcacttcctaccctcagcccaagcaattgcccatcattcattcttttctgctactgtactttgtgcacacctctcttattccatttatatttttctgtg

SEQ ID NO: 422624 - DNA, 201 bp, Homo sapiens
acaagcagtgagattcctagtaaacactaagatgtagaagactgttggcaactaatccagggattgtgaggcaggcatggctgctcatagtggttactttyatagtgtttcaggagacctgattagaatgagaagaaataggcattttctctgtaaagttgcatattacactgggcttcttcaatatagggaacaaaatga

SEQ ID NO: 422625 - DNA, 201 bp, Homo sapiens
ctatgtgtttgcatgtctgtggttaccgcagagagctgtgtagatttggcagagaccatgtgacctgcaaagcccaaaacagttactacctggccctttamagaaaaagtttcccaccccctgctctaatgtatcactaccttctggaaggtaggtatggaacttagaacaaattaatgcaaagtggatttttgaaaaaac

SEQ ID NO: 422626 - DNA, 201 bp, Homo sapiens
ccactctgagggggctgtccctcagacctgggtgatatggtttggctgtgtcgccacccaaatctcatattgaattgtaactcccacaattcccatgtgtygtgggaggaacccagtacaaggtgattgaattattggggtgggtctttcctgtgctgttactgcgttagtgaatgagtctcatgagatctgatggtttta

SEQ ID NO: 422627 - DNA, 201 bp, Homo sapiens
aggctgggcggctgggcggctgggcggctgggcaggggcgggcggccgcggaggggcgggggagaagggatcaccccagcggaagggtcttggggcggggytctccctcggagggagggcgtaggggcggggttcaccttagggaaaggggcctgggggcggggctcaccttaggggcgggggcctaggggcggggctcac

SEQ ID NO: 422628 - DNA, 201 bp, Homo sapiens
tgtttgcatgtctgtggttaccgcagagagctgtgtagatttggcagagaccatgtgacctgcaaagcccaaaacagttactacctggccctttacagaawaagtttcccaccccctgctctaatgtatcactaccttctggaaggtaggtatggaacttagaacaaattaatgcaaagtggatttttgaaaaaacaattt

SEQ ID NO: 422629 - DNA, 201 bp, Homo sapiens
ggcttcactaccaggggtgggttccgaggggcggggctggacagcctgtggagggggccgggtgggagcgtgcggagatgaagggggcgcggcagggtcasctggggagacagggagggtgagctcccgccaaggcgcctgggccccaaagagtacagctcaggcgactaccagtgtcagctgaacccctgggacgaggat

SEQ ID NO: 422630 - DNA, 201 bp, Homo sapiens
gtgtttgcatgtctgtggttaccgcagagagctgtgtagatttggcagagaccatgtgacctgcaaagcccaaaacagttactacctggccctttacagawaaagtttcccaccccctgctctaatgtatcactaccttctggaaggtaggtatggaacttagaacaaattaatgcaaagtggatttttgaaaaaacaatt

SEQ ID NO: 422631 - DNA, 201 bp, Homo sapiens
tcctaaatgtccccggtttgtcttgctcaagatgcaggggcaggggagtcattactgaaaaggagcattcattgaggaccctcagcctgcaggcgtaactrggacaggtctttctaattctagctgtcctggtggcttgagtgggtagagagggatatagattagccaggtgtctagggggaaggagatcgttcccttatg

SEQ ID NO: 422632 - DNA, 201 bp, Homo sapiens
gaaaacgatgctacagaaatgttaacatctaaattaaaacagcctcgaaacaacaagaataacaaaagcattttgaagcccatttgacaaatagctaccartggtaataatccactcctcaggatgatatgaactgggatttaatcagctgcaggaccaaagaaactgattctctgacctagagactatttggaataaaga

SEQ ID NO: 422633 - DNA, 201 bp, Homo sapiens
tgtgtttgcatgtctgtggttaccgcagagagctgtgtagatttggcagagaccatgtgacctgcaaagcccaaaacagttactacctggccctttacagraaaagtttcccaccccctgctctaatgtatcactaccttctggaaggtaggtatggaacttagaacaaattaatgcaaagtggatttttgaaaaaacaat

SEQ ID NO: 422634 - DNA, 201 bp, Homo sapiens
atgtgtttgcatgtctgtggttaccgcagagagctgtgtagatttggcagagaccatgtgacctgcaaagcccaaaacagttactacctggccctttacaraaaaagtttcccaccccctgctctaatgtatcactaccttctggaaggtaggtatggaacttagaacaaattaatgcaaagtggatttttgaaaaaacaa

SEQ ID NO: 422635 - DNA, 201 bp, Homo sapiens
acctatgtgtttgcatgtctgtggttaccgcagagagctgtgtagatttggcagagaccatgtgacctgcaaagcccaaaacagttactacctggcccttwacagaaaaagtttcccaccccctgctctaatgtatcactaccttctggaaggtaggtatggaacttagaacaaattaatgcaaagtggatttttgaaaaa

SEQ ID NO: 422636 - DNA, 201 bp, Homo sapiens
tatgtgtacctgtgtgtatatatgtgtgcatgtgtttgtgtatatgcatgtgtgtatgtatctattatatatgtgtgtatatgtgtgtgcatgtgtgtgtgcctgcttgtgaatgtgtgtaaatatgtgtatagatgcatgcatatgtgcatatgtaggtggatgtgtatatattatgtgtgtatatatgtgtgaatacat

SEQ ID NO: 422637 - DNA, 201 bp, Homo sapiens
ttattagaagtaaattgaggccctgatgaatcaaaggaaactgttttggatcaccttgggggttttcagttttaaaagtaggttgtttatccctggacaarcaaactcacggaaagcctcaagatgaggaggtcatagtgctgtggcttctgaggacaggaaatgaggtagcccactcataggttgattagcatattagac

SEQ ID NO: 422638 - DNA, 201 bp, Homo sapiens
atatgtgtacctgtgtgtatatatgtgtgcatgtgtttgtgtatatgcatgtgtgtatgtatctattatatatgtgtgtatatgtgtgtgcatgtgtgtgtgcctgcttgtgaatgtgtgtaaatatgtgtatagatgcatgcatatgtgcatatgtaggtggatgtgtatatattatgtgtgtatatatgtgtgaataca

SEQ ID NO: 422639 - DNA, 201 bp, Homo sapiens
ctggcttgtatgactcacaaaagccaactgttagcatttcttctaagctctgcatttaactggtagcctaaaattgaccatgaccgaagtatttacaccayagaaatcatcaaatactacaaatcagatttttttctctccagaaagtgggttgttaaacataggtgcaccaacgggcttaacataataaccatgacatca

SEQ ID NO: 422640 - DNA, 201 bp, Homo sapiens
tgtgtgggcatatgtgtaatatgtgtacctgtgtgtatatatgtgtgcatgtgtttgtgtatatgcatgtgtgtatgtatctattatatatgtgtgtatatgtgtgtgcatgtgtgtgtgcctgcttgtgaatgtgtgtaaatatgtgtatagatgcatgcatatgtgcatatgtaggtggatgtgtatatattatgtgtg

SEQ ID NO: 422641 - DNA, 201 bp, Homo sapiens
tctcacacctatgtgtttgcatgtctgtggttaccgcagagagctgtgtagatttggcagagaccatgtgacctgcaaagcccaaaacagttactacctgrccctttacagaaaaagtttcccaccccctgctctaatgtatcactaccttctggaaggtaggtatggaacttagaacaaattaatgcaaagtggattttt

SEQ ID NO: 422642 - DNA, 201 bp, Homo sapiens
gtgtgtgggcatatgtgtaatatgtgtacctgtgtgtatatatgtgtgcatgtgtttgtgtatatgcatgtgtgtatgtatctattatatatgtgtgtatatgtgtgtgcatgtgtgtgtgcctgcttgtgaatgtgtgtaaatatgtgtatagatgcatgcatatgtgcatatgtaggtggatgtgtatatattatgtgt

SEQ ID NO: 422643 - DNA, 201 bp, Homo sapiens
gtctcacacctatgtgtttgcatgtctgtggttaccgcagagagctgtgtagatttggcagagaccatgtgacctgcaaagcccaaaacagttactacctrgccctttacagaaaaagtttcccaccccctgctctaatgtatcactaccttctggaaggtaggtatggaacttagaacaaattaatgcaaagtggatttt

SEQ ID NO: 422644 - DNA, 201 bp, Homo sapiens
tttgtgtgtgggcatatgtgtaatatgtgtacctgtgtgtatatatgtgtgcatgtgtttgtgtatatgcatgtgtgtatgtatctattatatatgtgtgtatatgtgtgtgcatgtgtgtgtgcctgcttgtgaatgtgtgtaaatatgtgtatagatgcatgcatatgtgcatatgtaggtggatgtgtatatattatg

SEQ ID NO: 422645 - DNA, 201 bp, Homo sapiens
gtttgtgtgtgggcatatgtgtaatatgtgtacctgtgtgtatatatgtgtgcatgtgtttgtgtatatgcatgtgtgtatgtatctattatatatgtgtgtatatgtgtgtgcatgtgtgtgtgcctgcttgtgaatgtgtgtaaatatgtgtatagatgcatgcatatgtgcatatgtaggtggatgtgtatatattat

SEQ ID NO: 422646 - DNA, 201 bp, Homo sapiens
catatgtttgtgtgtgggcatatgtgtaatatgtgtacctgtgtgtatatatgtgtgcatgtgtttgtgtatatgcatgtgtgtatgtatctattatatatgtgtgtatatgtgtgtgcatgtgtgtgtgcctgcttgtgaatgtgtgtaaatatgtgtatagatgcatgcatatgtgcatatgtaggtggatgtgtatat

SEQ ID NO: 422647 - DNA, 201 bp, Homo sapiens
catgtcttaaaatgtttttttaaagttttcattttatttgataagcagatgtctaatttgtatgtagtcaaagtgattgatattttctgacatttttcctrttgttttcatgtgtacgagttttctaatgggttttctttttctcctatttttctcatcatccagaatttacttttggctataatgtgatgtgaaggtcca

SEQ ID NO: 422648 - DNA, 201 bp, Homo sapiens
acatatgtttgtgtgtgggcatatgtgtaatatgtgtacctgtgtgtatatatgtgtgcatgtgtttgtgtatatgcatgtgtgtatgtatctattatatatgtgtgtatatgtgtgtgcatgtgtgtgtgcctgcttgtgaatgtgtgtaaatatgtgtatagatgcatgcatatgtgcatatgtaggtggatgtgtata

SEQ ID NO: 422649 - DNA, 201 bp, Homo sapiens
tatgggtacatagctatagggtaggttgccatcaggagacatgaaggccagggtggtttgacatgaacacatccagaagttgagtgagagtgaagacaatrataagagatgcttgtgtctggtgaactcataaaatggccagcagaggcacagaggcagaagccacagctcctggttggaggttgctttcctccttcaagc

SEQ ID NO: 422650 - DNA, 201 bp, Homo sapiens
gacataccaggatcccgcagtggctggccaggggccttacacatgttactgttggaattcttatgaatcttaaagtaataattcttaaagaccatgttgtktccttactagacggctcattgagtgaggacagtagccacgtctgagttatcttctaaattccctcagcaggagcacagcatgtttcacatgacagatgat

SEQ ID NO: 422651 - DNA, 201 bp, Homo sapiens
gttgtacatatgtttgtgtgtgggcatatgtgtaatatgtgtacctgtgtgtatatatgtgtgcatgtgtttgtgtatatgcatgtgtgtatgtatctattatatatgtgtgtatatgtgtgtgcatgtgtgtgtgcctgcttgtgaatgtgtgtaaatatgtgtatagatgcatgcatatgtgcatatgtaggtggatgt

SEQ ID NO: 422652 - DNA, 201 bp, Homo sapiens
cccacccctggttcttgtctctcaatcttgtctctcccaaagcacttgatgaagttggtctctaaagttcgcttatctgcctgaagtctagactcaccaargaagaaaacaatgacccctggtaccttccctgagttttcattaactgcattcatgtcatgggaagacaggttgaagtctgttaagacacctggacagact

SEQ ID NO: 422653 - DNA, 201 bp, Homo sapiens
tggacatctgagccaggatctgggtggtgggaagggaccagcagcagcaggagctgggaaatgaccaggaagagcacagggacaaacgggtagagcaaatkgtccggcacagtttcccaacatgtccaatgaatacaccagccagccttctagcaaattcaacggttccctgccataggctacttccctgtgaagcccctg

SEQ ID NO: 422654 - DNA, 201 bp, Homo sapiens
atatgttgtacatatgtttgtgtgtgggcatatgtgtaatatgtgtacctgtgtgtatatatgtgtgcatgtgtttgtgtatatgcatgtgtgtatgtatctattatatatgtgtgtatatgtgtgtgcatgtgtgtgtgcctgcttgtgaatgtgtgtaaatatgtgtatagatgcatgcatatgtgcatatgtaggtgg

SEQ ID NO: 422655 - DNA, 201 bp, Homo sapiens
ccctggtaccttccctgagttttcattaactgcattcatgtcatgggaagacaggttgaagtctgttaagacacctggacagacttttgtcatagaccatyatctgctctgtgggccaaacagactttctcccagaccattgtatcttctccaagcccattgtatccccctaaaaataacttactacctccctaaaatcat

SEQ ID NO: 422656 - DNA, 201 bp, Homo sapiens
gctggggaggggaggggtcagggaggacctggacatctgagccaggatctgggtggtgggaagggaccagcagcagcaggagctgggaaatgaccaggaaragcacagggacaaacgggtagagcaaatggtccggcacagtttcccaacatgtccaatgaatacaccagccagccttctagcaaattcaacggttccctg

SEQ ID NO: 422657 - DNA, 201 bp, Homo sapiens
ctccctgctccacgtcacagctggttctgcttggtgaggtgaactttcctaccacatactcaccacatgcacctccagcctcccttgggaaagaactggcmtctgtgctccatcgggcctcaatgacccagccttcaaattaacccatggctttctttctcttttttttcctagacaggaattatttccctctatgattgt

SEQ ID NO: 422658 - DNA, 201 bp, Homo sapiens
gccttcaaattaacccatggctttctttctcttttttttcctagacaggaattatttccctctatgattgtatttttaagaggcgcctagattatgatcasaagttgcaccgagatgacagagaacatgcaaaaagcctgggacttcatgttaacgaagaggtaatattaagacagaatattaacaagttgtcaacagatt

SEQ ID NO: 422659 - DNA, 201 bp, Homo sapiens
cacctatgtgtttgcatgtctgtggttaccgcagagagctgtgtagatttggcagagaccatgtgacctgcaaagcccaaaacagttactacctggccctwtacagaaaaagtttcccaccccctgctctaatgtatcactaccttctggaaggtaggtatggaacttagaacaaattaatgcaaagtggatttttgaaaa

SEQ ID NO: 422660 - DNA, 201 bp, Homo sapiens
tcttaaaatagtgataaaaaatataataaatacataaaccagtaacatagtcatttattattattgtcaagtactatgagctgtacataattgtatgtacyatgttttatatgactggccgcacagtaggtttattttcaccaacatcacccaaacacattaggaatgtgttgcactatgacatgacaacagttatgacat

SEQ ID NO: 422661 - DNA, 201 bp, Homo sapiens
acacctatgtgtttgcatgtctgtggttaccgcagagagctgtgtagatttggcagagaccatgtgacctgcaaagcccaaaacagttactacctggcccyttacagaaaaagtttcccaccccctgctctaatgtatcactaccttctggaaggtaggtatggaacttagaacaaattaatgcaaagtggatttttgaaa

SEQ ID NO: 422662 - DNA, 201 bp, Homo sapiens
ttgagtaaaatgtcatgtggcacatgactgtatgtgtatatgtgtatgcatgtatataggcatacatgtgtgtacatgtgtgtatgtatatatgtgtgtayatgtatgtacagatatgtatatttgtatatgttgtacatatgtttgtgtgtgggcatatgtgtaatatgtgtacctgtgtgtatatatgtgtgcatgtgt

SEQ ID NO: 422663 - DNA, 201 bp, Homo sapiens
ctcacacctatgtgtttgcatgtctgtggttaccgcagagagctgtgtagatttggcagagaccatgtgacctgcaaagcccaaaacagttactacctggscctttacagaaaaagtttcccaccccctgctctaatgtatcactaccttctggaaggtaggtatggaacttagaacaaattaatgcaaagtggatttttg

SEQ ID NO: 422664 - DNA, 201 bp, Homo sapiens
gacataatgctattgcacactcaatatactatagtatagtgtaaacgtaacttgtatatgcactggaacaccaaaacgtttgtatgattcacttaatagtratatttattgccgtggtttagaaccaaacctgcaatatctctgaggtatgcttgtacgtgtgtgtgtgtgtgtttggtgcggggtgtatgtacagtcatg

SEQ ID NO: 422665 - DNA, 201 bp, Homo sapiens
aggcaagacccttataaaaccatcaggtcctgtgagaactaactcactatcacgagaacaggatgggaggaactgcccccatgattcaattatctccagayggtccctcccaggacatgtgggaattatgggaactacaattcaagatgagatttgggtagggacacagccaaaccatatcagggaggatgatgtaaaggg

SEQ ID NO: 422666 - DNA, 201 bp, Homo sapiens
cagcgagaaggtggcatctggagcctcctttccccttctcatgacgcctaggagcttggctatgcctgtgttgcatctctacagtgggacacatgaacacrttagcagcccccctcaggttgctgggttaggagcctgaccaacaacacctttagtacatgtgaagagtctctgatgtgatgattttcagctggaattatt

SEQ ID NO: 422667 - DNA, 201 bp, Homo sapiens
catagtctcacacctatgtgtttgcatgtctgtggttaccgcagagagctgtgtagatttggcagagaccatgtgacctgcaaagcccaaaacagttactwcctggccctttacagaaaaagtttcccaccccctgctctaatgtatcactaccttctggaaggtaggtatggaacttagaacaaattaatgcaaagtgga

SEQ ID NO: 422668 - DNA, 201 bp, Homo sapiens
acatagtctcacacctatgtgtttgcatgtctgtggttaccgcagagagctgtgtagatttggcagagaccatgtgacctgcaaagcccaaaacagttacyacctggccctttacagaaaaagtttcccaccccctgctctaatgtatcactaccttctggaaggtaggtatggaacttagaacaaattaatgcaaagtgg

SEQ ID NO: 422669 - DNA, 201 bp, Homo sapiens
aaatggtccggcacagtttcccaacatgtccaatgaatacaccagccagccttctagcaaattcaacggttccctgccataggctacttccctgtgaagcmcctggcttcagcgtggaggttccctcttggtctaccatggtgggacccaggcagaaaaagctcccaggacccaggctgatggatgcacgggtgagctgtg

SEQ ID NO: 422670 - DNA, 201 bp, Homo sapiens
acaggcataacacaggtacccagtgtgtgccccacccagtgccccgtcatcacagcaatgacttgactttaaacagtcttctttttggaagcagtcgcttrtaacctaagttggaaatacttactttggagataatttgaaacttacccaagtattaaagtatcatcagctacatttttaatgaatggatcccttggaaga

SEQ ID NO: 422671 - DNA, 201 bp, Homo sapiens
ataggcatacatgtgtgtacatgtgtgtatgtatatatgtgtgtacatgtatgtacagatatgtatatttgtatatgttgtacatatgtttgtgtgtgggyatatgtgtaatatgtgtacctgtgtgtatatatgtgtgcatgtgtttgtgtatatgcatgtgtgtatgtatctattatatatgtgtgtatatgtgtgtgc

SEQ ID NO: 422672 - DNA, 201 bp, Homo sapiens
ccttccagcatgtgaggatacagggagaagacaccacctgtgaatcataaattgagccctcacctgacacccaatctcacagggccttgaacttggacttygcagcctccaggactgtgagaaatacactgctgttgcctataagtcacccagtctatatggtattttgttacagcagcctgaatggactaggacacattt

SEQ ID NO: 422673 - DNA, 201 bp, Homo sapiens
tctgcaggccagcagcaaattagcttctgtaccaacagctgcctatgttatggatattaaagatatcgagatttctctatcatgtcttaaaatgtttttttaaagttttcattttatttgataagcagatgtctaatttgtatgtagtcaaagtgattgatattttctgacatttttcctattgttttcatgtgtacgagt

SEQ ID NO: 422674 - DNA, 201 bp, Homo sapiens
catgtgtgtctattgagaagtgtctgttcatgtcctttgcccaatttttaacggggtttttttttcttgtaaatttgtttcttgtagatgctggatattaracctttgtcagatacattggttgcaaaaattttctcccattctgtaggttgtctgtttatgcagttcgtagtttcttttgctgtgcagagctctgaagtt

SEQ ID NO: 422675 - DNA, 201 bp, Homo sapiens
agtctcacacctatgtgtttgcatgtctgtggttaccgcagagagctgtgtagatttggcagagaccatgtgacctgcaaagcccaaaacagttactaccwggccctttacagaaaaagtttcccaccccctgctctaatgtatcactaccttctggaaggtaggtatggaacttagaacaaattaatgcaaagtggattt

SEQ ID NO: 422676 - DNA, 201 bp, Homo sapiens
tgtgttgcccaccccccatgtgtccctatgtttttatcatttagccctcacttgtaagtaagaacatgcgggatttggttttctgtttctgtgttaatttkttaaggataatggcctccagctccatccatgtccctgaaaaggatgtgatctcattcctttttatggctgcatagtattctgtggtgtatatgtaccaca

SEQ ID NO: 422677 - DNA, 201 bp, Homo sapiens
atagtctcacacctatgtgtttgcatgtctgtggttaccgcagagagctgtgtagatttggcagagaccatgtgacctgcaaagcccaaaacagttactasctggccctttacagaaaaagtttcccaccccctgctctaatgtatcactaccttctggaaggtaggtatggaacttagaacaaattaatgcaaagtggat

SEQ ID NO: 422678 - DNA, 201 bp, Homo sapiens
catgtgtgtatgtatctattatatatgtgtgtatatgtgtgtgcatgtgtgtgtgcctgcttgtgaatgtgtgtaaatatgtgtatagatgcatgcatatrtgcatatgtaggtggatgtgtatatattatgtgtgtatatatgtgtgaatacatgtatatatcatgcacatgtgtgtatattgtatgcatgtacatgtgt

SEQ ID NO: 422679 - DNA, 201 bp, Homo sapiens
caggctgatggatgcacgggtgagctgtgctggcgaatgcagtggtgctgactatgtgctttgataactttcaccaggaacaggagaggccggttggagtrctgacgtcttctgtctatgggaagcgcatcaatcagcccattgagcccctaaaccgggactttggccgtgccaaccatgtgcaggctgacttctacagga

SEQ ID NO: 422680 - DNA, 201 bp, Homo sapiens
agtggctggccaggggccttacacatgttactgttggaattcttatgaatcttaaagtaataattcttaaagaccatgttgtttccttactagacggctcwttgagtgaggacagtagccacgtctgagttatcttctaaattccctcagcaggagcacagcatgtttcacatgacagatgatctgtgaatgatttgctaa

SEQ ID NO: 422681 - DNA, 201 bp, Homo sapiens
ctctgacactctggcctcaagaagaaggctcaagttttctctgaccaccccctacccccacccctggttcttgtctctcaatcttgtctctcccaaagcasttgatgaagttggtctctaaagttcgcttatctgcctgaagtctagactcaccaaagaagaaaacaatgacccctggtaccttccctgagttttcattaa

SEQ ID NO: 422682 - DNA, 201 bp, Homo sapiens
gcacctccagcctcccttgggaaagaactggcatctgtgctccatcgggcctcaatgacccagccttcaaattaacccatggctttctttctcttttttttcctagacaggaattatttccctctatgattgtatttttaagaggcgcctagattatgatcagaagttgcaccgagatgacagagaacatgcaaaaagcct

SEQ ID NO: 422683 - DNA, 201 bp, Homo sapiens
tggcctcaagaagaaggctcaagttttctctgaccaccccctacccccacccctggttcttgtctctcaatcttgtctctcccaaagcacttgatgaagtyggtctctaaagttcgcttatctgcctgaagtctagactcaccaaagaagaaaacaatgacccctggtaccttccctgagttttcattaactgcattcatg

SEQ ID NO: 422684 - DNA, 201 bp, Homo sapiens
cctgtggcctggcaagtttgcacagcgagaaggtggcatctggagcctcctttccccttctcatgacgcctaggagcttggctatgcctgtgttgcatctstacagtgggacacatgaacacgttagcagcccccctcaggttgctgggttaggagcctgaccaacaacacctttagtacatgtgaagagtctctgatgtg

SEQ ID NO: 422685 - DNA, 201 bp, Homo sapiens
ggcaaccttcagaaggcagagaagacgtctgcccttggctcctgcactagcgacttaaaggatgactcctgttaagtttcattatcctagtatgtaggtaytgtttgtttttcaaagaagctcaggcttattatagagaatttgagaacacaagacaagtagaaatgaaggaaaagtacacacatatataaccttagaaat

SEQ ID NO: 422686 - DNA, 201 bp, Homo sapiens
cagctggttctgcttggtgaggtgaactttcctaccacatactcaccacatgcacctccagcctcccttgggaaagaactggcatctgtgctccatcgggmctcaatgacccagccttcaaattaacccatggctttctttctcttttttttcctagacaggaattatttccctctatgattgtatttttaagaggcgcct

SEQ ID NO: 422687 - DNA, 201 bp, Homo sapiens
aaagtatttacaaattaggatctgtacatttttcagacataatgctattgcacactcaatatactatagtatagtgtaaacgtaacttgtatatgcactgsaacaccaaaacgtttgtatgattcacttaatagtgatatttattgccgtggtttagaaccaaacctgcaatatctctgaggtatgcttgtacgtgtgtgt

SEQ ID NO: 422688 - DNA, 201 bp, Homo sapiens
ttcccttcaacggataaaacaagtctctgcttaacctctgagtcctggctttcataatttttctagaaaagttggtcttgcggagcagaaattgcacacaygagaacatttcttccaagtttagttaccaagccaccataaccagcacatgtggtgcattctaagttgatgcaaagttattgtcttcctcaggagaaaact

SEQ ID NO: 422689 - DNA, 201 bp, Homo sapiens
ctacttccctgtgaagcccctggcttcagcgtggaggttccctcttggtctaccatggtgggacccaggcagaaaaagctcccaggacccaggctgatggrtgcacgggtgagctgtgctggcgaatgcagtggtgctgactatgtgctttgataactttcaccaggaacaggagaggccggttggagtgctgacgtcttc

SEQ ID NO: 422690 - DNA, 201 bp, Homo sapiens
gcggggttaccttaggggaggcagcctgggggcggggttcaccttagggactggggccttggggcagggttcaccttaggggagggggcctgggggcaggkatgcgccgccggggactggagagaggagctcacaacgaggaggggccctgggaggggctgcaccgctagggatcggggacagagctcacagagtagaggg

SEQ ID NO: 422691 - DNA, 201 bp, Homo sapiens
acatgcgggatttggttttctgtttctgtgttaatttgttaaggataatggcctccagctccatccatgtccctgaaaaggatgtgatctcattccttttkatggctgcatagtattctgtggtgtatatgtaccacattttctttatccagtctatcattgatgggcatttaggttgactccatatctttgctattgtga

SEQ ID NO: 422692 - DNA, 201 bp, Homo sapiens
tgcaaaaatggactaatacacatgctaactgtccagaggcacaaaggggaatctctgaaggacctgacagtatgcagacagtgctcaatatgagcctcccyaggtcctccctctatgggtcctgtctgcttaggaaccaagcacctttaccacacacactcagccactccaagggggctgtgtggggaaggtgaactcagt

SEQ ID NO: 422693 - DNA, 201 bp, Homo sapiens
atccctcaaaagcacagtggctctgtcgggacagcagggcgctctttctgcccagggtctggagggggtcgcgggaagccggggccgcccagcgggctggscgcggctccctctggggtctgtctgcggcaggcccaggctagcaaggaaagaaggccttgctgccgggactacgcccggatggtccagggcgcgggaaac

SEQ ID NO: 422694 - DNA, 201 bp, Homo sapiens
ccagggtctggagggggtcgcgggaagccggggccgcccagcgggctgggcgcggctccctctggggtctgtctgcggcaggcccaggctagcaaggaaasaaggccttgctgccgggactacgcccggatggtccagggcgcgggaaaccctcttgccctcctgcaaaccgaagaccagaaggaatagctggcgagccgc

SEQ ID NO: 422695 - DNA, 201 bp, Homo sapiens
tgaatggtattatcacccttgttaaagagactccagagagctccctcgcccctcccagcatgtgaggacacaatgagaacgtgtcatgtagcaaccagaaratgctccctcaccagacaccaaatctgccagcgccttgatcttggactgcccaaccttgagaaccttgagaaataagcatctgttgtttataaatcaccc

SEQ ID NO: 422696 - DNA, 201 bp, Homo sapiens
agtggaagaggaaaaacaattgactccacaatcaccaagtttccaactggtgacaagttgagcacatagatgaatgtagaactctctgaatcagaacactsttagaatttgacacagacacaagatcagagggaggaattatcttgacttcagtctgatggtaaaatatccagattatttgaaaatttataagaatttcta

SEQ ID NO: 422697 - DNA, 201 bp, Homo sapiens
tattggctccatgttgaccagccatgtggacctgccacattaacacacactgtttcactctacccacctttgaggcaaatggtgccaatttcatagagctmttatatgaatgactttaattaatcaatgcaaagtagcacatagtaagcccaatgcaagtatagctattattatgatttgcctttgttagtgattattaga

SEQ ID NO: 422698 - DNA, 201 bp, Homo sapiens
gcagttctttatagcagtgcaaaaatggactaatacacatgctaactgtccagaggcacaaaggggaatctctgaaggacctgacagtatgcagacagtgstcaatatgagcctccctaggtcctccctctatgggtcctgtctgcttaggaaccaagcacctttaccacacacactcagccactccaagggggctgtgtg

SEQ ID NO: 422699 - DNA, 201 bp, Homo sapiens
tctcatagttggaactccataaatacctgttgcatgaacaaatgaggaatgaataatcggaaagccaatttttaaaacaaagggataagtcaccgacttasaaaatttgcttcttaagagtaacttgggggtttcggtttggattatctgctgctttgcttatccctgtcctcgttctcctcctctggtatcgtcaatggc

SEQ ID NO: 422700 - DNA, 201 bp, Homo sapiens
catcaatcagcccattgagcccctaaaccgggactttggccgtgccaaccatgtgcaggctgacttctacaggaagaacgacatccccagcctcaaggaayccggctttgggcacattgctccatcctgaagcatccccgtggcccacagggcatgtccgataccctgtggcctggcaagtttgcacagcgagaaggtggc

SEQ ID NO: 422701 - DNA, 201 bp, Homo sapiens
gcctcaaggaacccggctttgggcacattgctccatcctgaagcatccccgtggcccacagggcatgtccgataccctgtggcctggcaagtttgcacagygagaaggtggcatctggagcctcctttccccttctcatgacgcctaggagcttggctatgcctgtgttgcatctctacagtgggacacatgaacacgtta

SEQ ID NO: 422702 - DNA, 201 bp, Homo sapiens
tgaggtgcagttgcttttcccacgagttaggggaactcctgctgcctgaacacaaacaaccctgacatgttcccttctccaagaggagatgtgatgacaaytgtcttttggcacaattgaactctagaaactccatttttgtttttccagaggtctgaatcccaaataacagaattttgtgcagtagggaccaggagccct

SEQ ID NO: 422703 - DNA, 201 bp, Homo sapiens
tctggttgctgcattttctagatttgtgttctagggcaagtcatatcatctacatgagcagacatttcctcatatttaaagtggaatttccaaacctagargagttcatgcgggaggcaatgagctgctggagcacaggcataacacaggtacccagtgtgtgccccacccagtgccccgtcatcacagcaatgacttgac

SEQ ID NO: 422704 - DNA, 201 bp, Homo sapiens
cggcgcctggaccccaaagagcacagctactactaccgcccggcgcgggtgaggaccgcggactgggcgcggagaccggaaggctgggcggctgggcggckgggcggctgggcaggggcgggcggccgcggaggggcgggggagaagggatcaccccagcggaagggtcttggggcggggctctccctcggagggagggcg

SEQ ID NO: 422705 - DNA, 201 bp, Homo sapiens
actttggctacactacatttattttaaatttttttcttcaataataaatgaaccttagcttactgtaacttcttaaccttataaactttttaattttaaaracttttatgactcttttgtagtaacgcttagcttaaaacacacattgtacagctgtacaaaaatattttctttctttagatctttatgtctatttttaat

SEQ ID NO: 422706 - DNA, 201 bp, Homo sapiens
ccactaggtgtcaggatccctcaaaagcacagtggctctgtcgggacagcagggcgctctttctgcccagggtctggagggggtcgcgggaagccggggcsgcccagcgggctgggcgcggctccctctggggtctgtctgcggcaggcccaggctagcaaggaaagaaggccttgctgccgggactacgcccggatggtc

SEQ ID NO: 422707 - DNA, 201 bp, Homo sapiens
cagaactgtgcaaccattaacactagttaatactagaacacattcattattccaaaagaaatcccatacacatcagtgttcactctccagtcttctcttcyccccaacccctggcaaacactaatctacctcctgtttctatacatttgcctattctagacatttcatataaattgaattatgtaatatgtaacctttaat

SEQ ID NO: 422708 - DNA, 201 bp, Homo sapiens
agggaaaaacagtgattactgagcagaactggggaagtcccaaagtaacaaaagatggtgtgactgttgcaaggtccattgacttaaaggataaatataaraatattgcggctaaacttgttcaagatgttgccaataacacaaatgaagaggctggggatggcactaccactgctactgttgccaaggaagtcttcaaga

SEQ ID NO: 422709 - DNA, 201 bp, Homo sapiens
gtgggcggatcacgaggtcaggagattgagaccatcctggctaacacggtgaaaccccgtctctactaaaaatacaaaaaattagccgggtgtggtggcakgcacctgtagtcccagctactcaggaggctgaggcaggagaattgcttgaacccaggaggtggaggttgcagtgagccgagattgtgccactgcactcca

SEQ ID NO: 422710 - DNA, 201 bp, Homo sapiens
ccgtctctactaaaaatacaaaaaattagccgggtgtggtggcatgcacctgtagtcccagctactcaggaggctgaggcaggagaattgcttgaacccasgaggtggaggttgcagtgagccgagattgtgccactgcactccagcctgggtgacagagtgagactccatctaaaaaaaaagaaaaaaaaaaaagaaatt

SEQ ID NO: 422711 - DNA, 201 bp, Homo sapiens
tggagaaactctaagtacactcattttgaataggcgaaaacttggtcttcaggttgtagcagtcaaagctccagggtttggtgacaatagaaagaaccacyttaaaggtatgacaattgctactggtggtgcagtgtttggagaagaggagttgacctcaaatcttgaagatgttcagcctcatgacttaggagaagttgg

SEQ ID NO: 422712 - DNA, 201 bp, Homo sapiens
tctactaaaaatacaaaaaattagccgggtgtggtggcatgcacctgtagtcccagctactcaggaggctgaggcaggagaattgcttgaacccaggaggyggaggttgcagtgagccgagattgtgccactgcactccagcctgggtgacagagtgagactccatctaaaaaaaaagaaaaaaaaaaaagaaattattga

SEQ ID NO: 422713 - DNA, 201 bp, Homo sapiens
gagaagtgtgatgttagctgttgatgctgtaattgctgaacttaaaaagcagtctaaacctgtgaccacccctgaagaaattgctcaggttgctacaattyctgcaaatggagacaaagaaattggcaacctaatttccgatgcaatgaaaaaggtcagaagaaagggtttcaccacagtaaagatggaaaaacgctaccg

SEQ ID NO: 422714 - DNA, 201 bp, Homo sapiens
taggcccttacagtatgtgcaaagacaaccatcccaggcctcagcccgaagtggtgcaaaccccacccacaggccctctgcagaggtaaggcccgtcatcygcactggggagatgacacactcctcggtcattcctccgctggccccgggagttcggagggtgtctctaggctatgagtcttccccaagtggttccctgcc

SEQ ID NO: 422715 - DNA, 201 bp, Homo sapiens; identical to SEQ ID NO: 233913

SEQ ID NO: 422716 - DNA, 201 bp, Homo sapiens
cacgggcgcagtcccaggcactctgcctggtggcataacctccagccttcccccgggctccaccatccgaggcatgggtcacagccttcccgcaggctctrtgtccagttgggtggctcccagtctgatggcagacagaaagaagccaagtctatctgtaagaccctccgctagcttagctgctccaaacttgctcccagg

SEQ ID NO: 422717 - DNA, 201 bp, Homo sapiens; identical to SEQ ID NO: 233915

SEQ ID NO: 422718 - DNA, 201 bp, Homo sapiens
tgggggacatcctggagagcctgttatgtctctttattattatttttttaaataaatagagacatgttgcccaggctgttttcaaactcttgggctgcagygatcctcccaccttggtcccccaaagtgcttggattacgggcaggagccactgcgcccagctgagcctgttgtgtctctttggcaacctgaggatggtga

SEQ ID NO: 422719 - DNA, 201 bp, Homo sapiens
aggagtcaccgtggagacggcaggactcctatagcccccagaatcctgccgttagtcacaaggcatccctgaactccactatactccagggccccgcggaygctggtgtggttggtggccaatcgtggaaccgcgcatgggagccagccaggggtgctgcgtcctgggacacctggcgcaacaaggcggtggtgcctccca

SEQ ID NO: 422720 - DNA, 201 bp, Homo sapiens; identical to SEQ ID NO: 233916

SEQ ID NO: 422721 - DNA, 201 bp, Homo sapiens; identical to SEQ ID NO: 233917

SEQ ID NO: 422722 - DNA, 201 bp, Homo sapiens
cagccgcatcgccaggacaaagcggccacagccatccagtccgcctggaggggctttaagatccgccagcagatgaggcagcagcaaatggcagcgaagayagttcaagccacctggcgaggccaccatacccggagctgtctgaagaacacagaggcgctcttgggaccagcagacccctcggccagctcacggcacatg

SEQ ID NO: 422723 - DNA, 201 bp, Homo sapiens; identical to SEQ ID NO: 43489

SEQ ID NO: 422724 - DNA, 201 bp, Homo sapiens; identical to SEQ ID NO: 43490

SEQ ID NO: 422725 - DNA, 201 bp, Homo sapiens; identical to SEQ ID NO: 43483

SEQ ID NO: 422726 - DNA, 201 bp, Homo sapiens
gccacaccagacggtcaccatcagatttccctgcccagtgagtctggacgcaaaatgccagccatgcctgctgaccagaaccatcagaagcacctgcctcrtccacatagagggtgactcagtgaagaccaaacgtgtaagtgcccggaccaacaaagccagggctccggagacaccattgtccagaaggtatgaccaggc

SEQ ID NO: 422727 - DNA, 201 bp, Homo sapiens
ggtggtgggagggctgcccatgttcaccagccttacctcacctgtgggggcctgccttggtgtcagtcctcaggggtacatcgtggtctctaccaaccctyagtggccagaggccagcagcaggcatccagggcttccagggagagcctggggaggaggtatcagcccccaaatcgcaaacaggcccccccgggtactagg

SEQ ID NO: 422728 - DNA, 201 bp, Homo sapiens
ggcctcttatctatcgaccagggagggcagggtggcctcgggtaggcttccttgcagcgtgggtggtgggagggctgcccatgttcaccagccttacctcrcctgtgggggcctgccttggtgtcagtcctcaggggtacatcgtggtctctaccaacccttagtggccagaggccagcagcaggcatccagggcttccag

SEQ ID NO: 422729 - DNA, 201 bp, Homo sapiens
cccagtttgctcaagctgtcccacatgcagccacccccgagtctgtggcagcctctcattgccaactgtgtgggcccaagcatgaaccagccctctgtgayctatggcacagccccgagctgccacaggccacatgtggtcagcagggtggcctcttatctatcgaccagggagggcagggtggcctcgggtaggcttcct

SEQ ID NO: 422730 - DNA, 201 bp, Homo sapiens; identical to SEQ ID NO: 43485

SEQ ID NO: 422731 - DNA, 201 bp, Homo sapiens; identical to SEQ ID NO: 233930

SEQ ID NO: 422732 - DNA, 201 bp, Homo sapiens; identical to SEQ ID NO: 233933

SEQ ID NO: 422733 - DNA, 201 bp, Homo sapiens
tgccggggaagaccactcaggggggaccatgcccggcagcctgtgaggtccagggtatgctggtgccgccgatggcacccaccggccattccacatgcaaygttgagtcctggggagacaacggagccacacgtgcccagccatcaatgcccggccaggcggtgccctgccaggaggacacggtaggctccctgctggcct

SEQ ID NO: 422734 - DNA, 201 bp, Homo sapiens
ctcaagttcgtcccaagacatctgtctgtggacaggggaggaatcgaacacagggttctgtgtctgccctgctctgcccccagaagctagcaacagaccaycagccatccatcctcggtgagccagtaggtggtttgccacaggatcgagacggtgacctggccaggagcttctcccagggctttgtgacctacagtcagg

SEQ ID NO: 422735 - DNA, 201 bp, Homo sapiens
agacagacccagccacagccccacggacacgtgccggggaagaccactcaggggggaccatgcccggcagcctgtgaggtccagggtatgctggtgccgcygatggcacccaccggccattccacatgcaacgttgagtcctggggagacaacggagccacacgtgcccagccatcaatgcccggccaggcggtgccctgc

SEQ ID NO: 422736 - DNA, 201 bp, Homo sapiens
acagaaaagtagccagccaggcatggtggcgtgcacctgtaatcccagctactcgggaggctgaggcaggagaatcgcttgaacccaggaggcggaggttktggtgagccaagatcacagcattgcactccagcctgggcaacaagagcaaaactctgtctcaaaaaaaaaaaaaaaaagaaaagaaaaaagaaaagcagg

SEQ ID NO: 422737 - DNA, 201 bp, Homo sapiens
ggcacatgcattggcctggcatctaggaccctggctccctgcagtggggacttcgtgggaggcactcatggctctctgggtctaatgaataaagtcctccmcagcctagatcttgggtgatgtgttctgggttaatggaagtggcttgggtatagtgggggaatctggaacatcccagagggaagagaactctgaagttac

SEQ ID NO: 422738 - DNA, 201 bp, Homo sapiens
ttgacagtgtcccagctctctctgcatcctagttacttctgaaagccacagtcaccactttttcttccttctttccatccttccatatgccatttacctayccatcccctaatccacccacccacccatccacccatcagtctacctcctgttgggttatctcttcaccagtctttccagctctctttaatttccctccct

SEQ ID NO: 422739 - DNA, 201 bp, Homo sapiens
ggctccagccctcgcacctgtcatacctgtggacgcacacagcccacccgtgtggtgcagggcatgggccagggcactgagggccccggggcagtgtcttkggcctccgcctaccagctggctgccctgagtcccaggcagccgcatcgccaggacaaagcggccacagccatccagtccgcctggaggggctttaagatc

SEQ ID NO: 422740 - DNA, 201 bp, Homo sapiens; identical to SEQ ID NO: 233918

SEQ ID NO: 422741 - DNA, 201 bp, Homo sapiens; identical to SEQ ID NO: 233920

SEQ ID NO: 422742 - DNA, 201 bp, Homo sapiens
tagagggtgactcagtgaagaccaaacgtgtaagtgcccggaccaacaaagccagggctccggagacaccattgtccagaaggtatgaccaggcagttacragaccatccagagcccaaacccagggccctgtgaaagcagagacccccaaagcccccttccagatatgtccagggcccatgatcaccaagactctactcc

SEQ ID NO: 422743 - DNA, 201 bp, Homo sapiens; identical to SEQ ID NO: 233921

SEQ ID NO: 422744 - DNA, 201 bp, Homo sapiens; identical to SEQ ID NO: 233926

SEQ ID NO: 422745 - DNA, 201 bp, Homo sapiens
aaaacagacatggcatttaagaccagtgtggcagtggaaatggctggggctccatcctggacaaaagttgctgaggaaggggacaagccacctcacgtgtwtgtgcctgtagacatggctgtcaccctgccccggggacagctggctgccccactgaccaatgcctcatcccagagacatccaccctgcctgtcccagaga

SEQ ID NO: 422746 - DNA, 201 bp, Homo sapiens
tgaggggaagatcaggtgcctggctcaaccacatccgggaactggggtccccagggctgcagctgagcttcctttggaagccgagaaaatcaagactggcmcccagaaacaggcgaaaacagacatggcatttaagaccagtgtggcagtggaaatggctggggctccatcctggacaaaagttgctgaggaaggggacaa

SEQ ID NO: 422747 - DNA, 201 bp, Homo sapiens
agtctggacgcaaaatgccagccatgcctgctgaccagaaccatcagaagcacctgcctcgtccacatagagggtgactcagtgaagaccaaacgtgtaastgcccggaccaacaaagccagggctccggagacaccattgtccagaaggtatgaccaggcagttacgagaccatccagagcccaaacccagggccctgtg

SEQ ID NO: 422748 - DNA, 201 bp, Homo sapiens
cctctgcagaccccagtcgtcccccctcctgcagcccccagcagctcagggtaccccagagccctgtgtgcagggtcctcatgctgccagagtccgggggstggccttcctgccacaccagacggtcaccatcagatttccctgcccagtgagtctggacgcaaaatgccagccatgcctgctgaccagaaccatcagaag

SEQ ID NO: 422749 - DNA, 201 bp, Homo sapiens
ggtaatcaaggcaatgcagccggccgcctagctacagttcacgagccagttgtcacccagtgggcggtgcatcctccagcccccgctcaccccagtctccyggacaaaatggagaaagcgcctccacagccccagcacgagggcctcaagtccaaggagcatcttccgcaacagcctgccgaaggcaagacggcgtcccgc

SEQ ID NO: 422750 - DNA, 201 bp, Homo sapiens
aatacagtgttaaacatccttgaacatacttctgtattcatttgtagcagaacctctaccaatcactgttttggttatttccagttgttttgtttgatttstagctacaaaataacactggaataaatttcctcatctttgcacatttttttttttttttagaatttagcttttttagaatttagaaattttagaatttag

SEQ ID NO: 422751 - DNA, 201 bp, Homo sapiens
aggttgcagtgagccaagatgctgagtgccgctgcactccagcctgggggacagagtgagactctgtctcaaaaatcataaataaataaatgataataaaygaacagagcccccacggtggcccatacacattgaaggcctcctgccccagcaacacttaggtttccagtgcacatccagagcaccaactgttgataacct

SEQ ID NO: 422752 - DNA, 201 bp, Homo sapiens
ctggccagtagggtagccccaaacctaggccaggcatcagggttcagtaggctggccccaagcctatcccagcatatagcatccagtaaggtatccccaargctaacctgcccatctatgggtaattgggtgaccccaaggctaccacactcctctgtgcctaatagagtgacaccaagaccagcacagccatctgtggtg

SEQ ID NO: 422753 - DNA, 201 bp, Homo sapiens
caacgtgccaggaacaagatctgggcctggggggccagtgtccaccccagccaggagacctcttgtttgcaggacctgctacaccctgaccaccccctgcygcccccacaggcagagctgacctgtccggtaatcaaggcaatgcagccggccgcctagctacagttcacgagccagttgtcacccagtgggcggtgcatc

SEQ ID NO: 422754 - DNA, 201 bp, Homo sapiens; identical to SEQ ID NO: 43484

SEQ ID NO: 422755 - DNA, 201 bp, Homo sapiens; identical to SEQ ID NO: 43486

SEQ ID NO: 422756 - DNA, 201 bp, Homo sapiens
catccctctggaaccacagggatggcccccagcccctctctggcttcagtgcccaacagactggccgtgactcagtctaatctttccctgaacagcatggrccccagcagctcccagatcagtgtggttattccaaaaaacatagactgctggcacccttctgaggcatccatggtcccacccagttaccagcagagagat

SEQ ID NO: 422757 - DNA, 201 bp, Homo sapiens; identical to SEQ ID NO: 233922

SEQ ID NO: 422758 - DNA, 201 bp, Homo sapiens
gccacagacatatccagcgtccacgatgaccaccaccccacccaagactagcccagttcccaaagtaacaataatcaagaccccagcccagatgtatccgrggcccacagtgaccaaaactgcacctcacacatgccccatgcccacaatgaccaagatccaggtacaccccacagcctccagaactggcaccccacggca

SEQ ID NO: 422759 - DNA, 201 bp, Homo sapiens
gccctcaccccagacccgcctgccagccatgataaccaagaccccagcccagttacgctcggtggccaccatcctcaagactctgtgtctggcctctccarcagtggcaaatgtcaaggctccaccccaagtggcggtagcagccggaactcccaacacctcaggctccatccatgagaacccacccaaggccaaggccac

SEQ ID NO: 422760 - DNA, 201 bp, Homo sapiens
tggtctctaccaacccttagtggccagaggccagcagcaggcatccagggcttccagggagagcctggggaggaggtatcagcccccaaatcgcaaacagkcccccccgggtactagggaggtgatagacaagggggccccaagtcccttgcaggtcaccatggtgaccaaaactcaggcatccaagactcatggtctgtt

SEQ ID NO: 422761 - DNA, 201 bp, Homo sapiens
accatcctcaagactctgtgtctggcctctccaacagtggcaaatgtcaaggctccaccccaagtggcggtagcagccggaactcccaacacctcaggctycatccatgagaacccacccaaggccaaggccaccgtgaatgtgaagcaggctgcaaaggtggtgaaagcctcatccccctcctatttggctgaggggaag

SEQ ID NO: 422762 - DNA, 201 bp, Homo sapiens
ttgaacccaggaggcggaggttgtggtgagccaagatcacagcattgcactccagcctgggcaacaagagcaaaactctgtctcaaaaaaaaaaaaaaaaagaaaagaaaaaagaaaagcaggtaagtggtcgggcattcaggtgtcatacactgtgtgccaagatgaagtggccgtagggtgatgagaggtggatataag

SEQ ID NO: 422763 - DNA, 201 bp, Homo sapiens
cttgaacccaggaggcggaggttgtggtgagccaagatcacagcattgcactccagcctgggcaacaagagcaaaactctgtctcaaaaaaaaaaaaaaaaagaaaagaaaaaagaaaagcaggtaagtggtcgggcattcaggtgtcatacactgtgtgccaagatgaagtggccgtagggtgatgagaggtggatataa

SEQ ID NO: 422764 - DNA, 201 bp, Homo sapiens
tactcgggaggctgaggcaggagaatcgcttgaacccaggaggcggaggttgtggtgagccaagatcacagcattgcactccagcctgggcaacaagagcraaactctgtctcaaaaaaaaaaaaaaaaagaaaagaaaaaagaaaagcaggtaagtggtcgggcattcaggtgtcatacactgtgtgccaagatgaagtg

SEQ ID NO: 422765 - DNA, 201 bp, Homo sapiens
ggagaatcgctggaaaccgagaggtagaggttgcagtgaaaggagatcgcgccactgcactccagcctgggcgacaagaacaaaactcaaaagagagagaraaaaaaaaaaaggccaggcgcggtggctcacgcctgtaatcccagcactttgggaggccgaggcaggcgaatcacctgagatcaggagtttgagaccagc

SEQ ID NO: 422766 - DNA, 201 bp, Homo sapiens
ctactaaaaatacaaaatattaactgggcgtggtggcaggcgcctgtagtcccagctactcaggaggctgaggcaggagaatggcgtgaacccgggaggcrgagcttgcagtgagccgagatggtgccagtgcactccagcctgggagacagaacgagactccgtctcaaaaaaaaaaaaaaagtgagcacaatgctaaga

SEQ ID NO: 422767 - DNA, 201 bp, Homo sapiens
cacttcagcctgggcaacagagcaagattccgtccatctcaaaaaaataaaaataataaatatatgtgtgtcaattatccatgcattgcctcttgtctccraatggaccctttcaatatgtgataaacaaaggaatttctttcgttatgtcttgtttaaagtgagcacaatgctcggccaggcgcggtggctcacgcctgt

SEQ ID NO: 422768 - DNA, 201 bp, Homo sapiens
gtttgaaaagcaggccgggcgcggtggctcacacctgtaatcccagcactttgggaggctgagtcaggtggatcacccgaggtcgggagttcgagaccagyctggccaacatggtgaaaccccgtctttactaaaaatacagaaaagtagccagccaggcatggtggcgtgcacctgtaatcccagctactcgggaggctg

SEQ ID NO: 422769 - DNA, 201 bp, Homo sapiens
ccgggcatggtgactcatgcctgtaatcccagcactttgggaggccgaggcgggcggatcacttgaggtcaggggttcgagaccagtctggccaacatggygaaaccccaactctactaaaaatacaaaagttagccaagtgtggtggcaagtgcctgtaatcccagctactcgggaggctgagacaggagaatcactttg

SEQ ID NO: 422770 - DNA, 201 bp, Homo sapiens
gagccaagatggcgccattgcactccagcctgggcaacaaaagtgaaattccgtctcaaagagaataataataataattaggccgggcatggtgactcatrcctgtaatcccagcactttgggaggccgaggcgggcggatcacttgaggtcaggggttcgagaccagtctggccaacatggcgaaaccccaactctacta

SEQ ID NO: 422771 - DNA, 201 bp, Homo sapiens
aaccaggagtcaccgtggagacggcaggactcctatagcccccagaatcctgccgttagtcacaaggcatccctgaactccactatactccagggccccgyggacgctggtgtggttggtggccaatcgtggaaccgcgcatgggagccagccaggggtgctgcgtcctgggacacctggcgcaacaaggcggtggtgcct

SEQ ID NO: 422772 - DNA, 201 bp, Homo sapiens
tgagccaagatggcgccattgcactccagcctgggcaacaaaagtgaaattccgtctcaaagagaataataataataattaggccgggcatggtgactcaygcctgtaatcccagcactttgggaggccgaggcgggcggatcacttgaggtcaggggttcgagaccagtctggccaacatggcgaaaccccaactctact

SEQ ID NO: 422773 - DNA, 201 bp, Homo sapiens
tgcgtcctgggacacctggcgcaacaaggcggtggtgcctcccaggcggtccggggagccaatggtgtccatgcaggctgcagaggagatccgcatcctcrcagtgatcactatccaggcgggcgtccgtggctacctggcgcgtcgcaggatccggctgtggcaccggggggccatggtcatccaagctacttggcgcgg

SEQ ID NO: 422774 - DNA, 201 bp, Homo sapiens
tgcagtgagccaagatggcgccattgcactccagcctgggcaacaaaagtgaaattccgtctcaaagagaataataataataattaggccgggcatggtgrctcatgcctgtaatcccagcactttgggaggccgaggcgggcggatcacttgaggtcaggggttcgagaccagtctggccaacatggcgaaaccccaact

SEQ ID NO: 422775 - DNA, 201 bp, Homo sapiens
accaacatggagaaaccccatttccactaaaaatacgaaattaggtgtggtggcgcatgcctgtaatcctagctatttgggaggctgaggcaggagaatcrcttgaacctggaggcagaggttgcagtgagccaagatggcgccattgcactccagcctgggcaacaaaagtgaaattccgtctcaaagagaataataata

SEQ ID NO: 422776 - DNA, 201 bp, Homo sapiens
gtggctcacgcctgtaacgccagcactttgggaagccaaggcgggcagatcacctgtgatcaggagttcaagaccagcctgaccaacatggagaaaccccrtttccactaaaaatacgaaattaggtgtggtggcgcatgcctgtaatcctagctatttgggaggctgaggcaggagaatcgcttgaacctggaggcagag

SEQ ID NO: 422777 - DNA, 201 bp, Homo sapiens
acaatcccgtttctcaccccttctggttgagttcctctaaagagctgcaccgtttggttgatgaaacctcagcccctggaatgggcccattcagctcccaragctgctgtctcccgggttcaagtgattttcctgcctcaggagttcgagaccagcctgacccatatggtcaaaccccatctctactaaaaattcaaaaat

SEQ ID NO: 422778 - DNA, 201 bp, Homo sapiens
ggcgaggccaccatacccggagctgtctgaagaacacagaggcgctcttgggaccagcagacccctcggccagctcacggcacatgcattggcctggcatytaggaccctggctccctgcagtggggacttcgtgggaggcactcatggctctctgggtctaatgaataaagtcctccacagcctagatcttgggtgatgt

SEQ ID NO: 422779 - DNA, 201 bp, Homo sapiens
gcggacgctggtgtggttggtggccaatcgtggaaccgcgcatgggagccagccaggggtgctgcgtcctgggacacctggcgcaacaaggcggtggtgcmtcccaggcggtccggggagccaatggtgtccatgcaggctgcagaggagatccgcatcctcgcagtgatcactatccaggcgggcgtccgtggctacctg

SEQ ID NO: 422780 - DNA, 201 bp, Homo sapiens
ctggcgaggccaccatacccggagctgtctgaagaacacagaggcgctcttgggaccagcagacccctcggccagctcacggcacatgcattggcctggcwtctaggaccctggctccctgcagtggggacttcgtgggaggcactcatggctctctgggtctaatgaataaagtcctccacagcctagatcttgggtgat

SEQ ID NO: 422781 - DNA, 201 bp, Homo sapiens
gccccggggcagtgtcttgggcctccgcctaccagctggctgccctgagtcccaggcagccgcatcgccaggacaaagcggccacagccatccagtccgcstggaggggctttaagatccgccagcagatgaggcagcagcaaatggcagcgaagatagttcaagccacctggcgaggccaccatacccggagctgtctga

SEQ ID NO: 422782 - DNA, 201 bp, Homo sapiens
gttcggagggtgtctctaggctatgagtcttccccaagtggttccctgccacccctttttaaccaggagtcaccgtggagacggcaggactcctatagccyccagaatcctgccgttagtcacaaggcatccctgaactccactatactccagggccccgcggacgctggtgtggttggtggccaatcgtggaaccgcgca

SEQ ID NO: 422783 - DNA, 201 bp, Homo sapiens
accttatcacgccccacagcaggtgcgcttccagcatccggaagagaaccgccttctgtccccgcccatcatggtgaacaaggagacccagttcccttccygtgacaatctggtcctctgcagaccccagtcgtcccccctcctgcagcccccagcagctcagggtaccccagagccctgtgtgcagggtcctcatgctgc

SEQ ID NO: 422784 - DNA, 201 bp, Homo sapiens
tcctccgctggccccgggagttcggagggtgtctctaggctatgagtcttccccaagtggttccctgccacccctttttaaccaggagtcaccgtggagayggcaggactcctatagcccccagaatcctgccgttagtcacaaggcatccctgaactccactatactccagggccccgcggacgctggtgtggttggtgg

SEQ ID NO: 422785 - DNA, 201 bp, Homo sapiens; identical to SEQ ID NO: 43488

SEQ ID NO: 422786 - DNA, 201 bp, Homo sapiens
gggaagatcaggtgcctggctcaaccacatccgggaactggggtccccagggctgcagctgagcttcctttggaagccgagaaaatcaagactggcacccwgaaacaggcgaaaacagacatggcatttaagaccagtgtggcagtggaaatggctggggctccatcctggacaaaagttgctgaggaaggggacaagcca

SEQ ID NO: 422787 - DNA, 201 bp, Homo sapiens
gccgctgggacgccatgggccctaaaaattcctacagatccgtgcatggtaggattgttccagaactgctagaaagttctgtggccagggttaggcccttmcagtatgtgcaaagacaaccatcccaggcctcagcccgaagtggtgcaaaccccacccacaggccctctgcagaggtaaggcccgtcatccgcactgggg

SEQ ID NO: 422788 - DNA, 201 bp, Homo sapiens
ggaagatcaggtgcctggctcaaccacatccgggaactggggtccccagggctgcagctgagcttcctttggaagccgagaaaatcaagactggcacccaraaacaggcgaaaacagacatggcatttaagaccagtgtggcagtggaaatggctggggctccatcctggacaaaagttgctgaggaaggggacaagccac

SEQ ID NO: 422789 - DNA, 201 bp, Homo sapiens; identical to SEQ ID NO: 233928

SEQ ID NO: 422790 - DNA, 201 bp, Homo sapiens
catgctagtggcatggtccctgtccctttccaggccccgggtttagccactaagtccccctcagtttatcaacaggggtctgtcactcacgtcataccccmaaatcactctcagggtacagtggcttctaatgtagtctcaggatcaccccagctggcccgtggcagtactgaggctttcagattgctttcagtgtctgtg

SEQ ID NO: 422791 - DNA, 201 bp, Homo sapiens
ctcacacctgtaatcccagcactttgggaggctgagtcaggtggatcacccgaggtcgggagttcgagaccagcctggccaacatggtgaaaccccgtctytactaaaaatacagaaaagtagccagccaggcatggtggcgtgcacctgtaatcccagctactcgggaggctgaggcaggagaatcgcttgaacccagga

SEQ ID NO: 422792 - DNA, 201 bp, Homo sapiens
gacagaagctgtccccaatccactccagaaaacagtgtctggaaacatggctccgagcagccgctgggacgccatgggccctaaaaattcctacagatccrtgcatggtaggattgttccagaactgctagaaagttctgtggccagggttaggcccttacagtatgtgcaaagacaaccatcccaggcctcagcccgaag

SEQ ID NO: 422793 - DNA, 201 bp, Homo sapiens; identical to SEQ ID NO: 233929

SEQ ID NO: 422794 - DNA, 201 bp, Homo sapiens
actgcaaatgatgggtcagctccttggcccctcacagcaggggctctagggacctctaaagccttgatggtggatttgttcacctgtgatgggggacatcmtggagagcctgttatgtctctttattattatttttttaaataaatagagacatgttgcccaggctgttttcaaactcttgggctgcagcgatcctcccac

SEQ ID NO: 422795 - DNA, 201 bp, Homo sapiens; identical to SEQ ID NO: 233931

SEQ ID NO: 422796 - DNA, 201 bp, Homo sapiens
tgccagggattggccagaacttggctttgagtcacaaagctgctgcggcaccagggctccaagactggccgttcagactgctaggtttagcttcaggggcrggtgagtggggctggtggctttgggggcgggtgagtggggctggtggcttcaggggcgggtgagtggggctggtggaggacttgtttgcgagggttcgtg

SEQ ID NO: 422797 - DNA, 201 bp, Homo sapiens
gccggccgcctagctacagttcacgagccagttgtcacccagtgggcggtgcatcctccagcccccgctcaccccagtctcctggacaaaatggagaaagygcctccacagccccagcacgagggcctcaagtccaaggagcatcttccgcaacagcctgccgaaggcaagacggcgtcccgccgcgtcccacgcctccgg

SEQ ID NO: 422798 - DNA, 201 bp, Homo sapiens; identical to SEQ ID NO: 233934

SEQ ID NO: 422799 - DNA, 201 bp, Homo sapiens
ggcagcaggggaggcgagctgacctgcccccattccagtggtgggccccttcgcggttccctctggctcaggggccaagccctggtgtcttcctttcccaycaggaaaaagtctagtaaaatactgtatctggcttagggttggtcagactagtaagatggggaggctggtctgagaccaattctggctccttgaccctat

SEQ ID NO: 422800 - DNA, 201 bp, Homo sapiens
ccagatctcggcggccggtggccggtgacgccttgccgcggccgctgccgcactcgcggaggctggccggcgccgggtgcgcataggccggcggggcgcasggctcggggccggggcgccgggagggcagggccggtggcggaggtggcggcggcggcggcgggagcagcttctgcgcctcttcgtgtgcacggttgcagc

SEQ ID NO: 422801 - DNA, 201 bp, Homo sapiens
acatggcagctgttttgtcttccttggcccggacaaccccctctacacctcccctcacgtggtccgagggtcctggcttcccactgggcctcacttttttyttttcttttcttttttttttttgagacggagtctcgctctgtgacccaggctggagtgcagtggcgcgatcttggctcactccaacctccgcctcccagg

SEQ ID NO: 422802 - DNA, 201 bp, Homo sapiens
tgcccacacggcccctgtgtgcacggctcatgctgggcacagggacactcggggaagccatggccagtaaagtgaccaggaccttgagtgctagggagacmccccgcctggcctgagagagcactgatggctccgagggctggaatgttctctgtgaagtctgaactgggaggcaggtccctgcaggagagccctggggta

SEQ ID NO: 422803 - DNA, 201 bp, Homo sapiens
cccacggcctcccgctgcacctgccagggaacaagtccccacaccgggaccctgcaccccgaggaccagctcgcttcctgccactaccaggcctgcccccsgcacccccggagccacccggaatcctggccccccagccccccgatgtgggctcctcggaccctctgagcatggtgggaccttcccagggccgaagcccca

SEQ ID NO: 422804 - DNA, 201 bp, Homo sapiens
aattctaaaccactcagcttctccgagctcacaccccggagatcacctgaggacccgagccattgatggactcggacgagaccgggttcgagcactcaggrctgtgggtttctgtgctggctggtcttctgctgggagcctgccaggcacaccccatccctgactccagtcctctcctgcaattcgggggccaagtccggc

SEQ ID NO: 422805 - DNA, 201 bp, Homo sapiens
ggcctcccgctgcacctgccagggaacaagtccccacaccgggaccctgcaccccgaggaccagctcgcttcctgccactaccaggcctgccccccgcacycccggagccacccggaatcctggccccccagccccccgatgtgggctcctcggaccctctgagcatggtgggaccttcccagggccgaagccccagctac

SEQ ID NO: 422806 - DNA, 201 bp, Homo sapiens
cctgaggctcaggttattgggagtctcgtgattcagtaacccctgctcctgcccacacggcccctgtgtgcacggctcatgctgggcacagggacactcgrggaagccatggccagtaaagtgaccaggaccttgagtgctagggagaccccccgcctggcctgagagagcactgatggctccgagggctggaatgttctc

SEQ ID NO: 422807 - DNA, 201 bp, Homo sapiens
ccccggagccacccggaatcctggccccccagccccccgatgtgggctcctcggaccctctgagcatggtgggaccttcccagggccgaagccccagctaygcttcctgaagccagaggctgtttactatgacatctcctctttatttattaggttatttatcttatttatttttttatttttcttacttgagataataaa

SEQ ID NO: 422808 - DNA, 201 bp, Homo sapiens
atgtgggctcctcggaccctctgagcatggtgggaccttcccagggccgaagccccagctacgcttcctgaagccagaggctgtttactatgacatctccwctttatttattaggttatttatcttatttatttttttatttttcttacttgagataataaagagttccagaggaggataagaatgagcatgtgtgagtgt

SEQ ID NO: 422809 - DNA, 201 bp, Homo sapiens
tgtgggctcctcggaccctctgagcatggtgggaccttcccagggccgaagccccagctacgcttcctgaagccagaggctgtttactatgacatctcctstttatttattaggttatttatcttatttatttttttatttttcttacttgagataataaagagttccagaggaggataagaatgagcatgtgtgagtgtc

SEQ ID NO: 422810 - DNA, 201 bp, Homo sapiens
gaggggctggggatctgggcccctgggtctgagggaggaggggctgggtctggacccctgggtctgagggaggaggggctgggggtctggactcttgggtktgaaggaggaagggctggggtcctggactcttgggtctgagttgggagggggctttggcttgggcttctcctgggtctgagggaggaggtaggctgtggg

SEQ ID NO: 422811 - DNA, 201 bp, Homo sapiens
caccccttaggtctcctgcagctgaaagccttgaagccgggagttattcaaatcttgggagtcaagacatccaggttcctgtgccagcggccagatggggmcctgtatggatcggtgagtttccaggaccctcctcaccacccaccatgctcctcctatatgtcgccctcacagcctggggtgccttgtcttgctcatccc

SEQ ID NO: 422812 - DNA, 201 bp, Homo sapiens
tgggtttctgtgctggctggtcttctgctgggagcctgccaggcacaccccatccctgactccagtcctctcctgcaattcgggggccaagtccggcagcrgtacctctacacagatgatgcccagcagacagaagcccacctggagatcagggaggatgggacggtggggggcgctgctgaccagagccccgaaagtgag

SEQ ID NO: 422813 - DNA, 201 bp, Homo sapiens
tttattaggttatttatcttatttatttttttatttttcttacttgagataataaagagttccagaggaggataagaatgagcatgtgtgagtgtctgagrgaagacatggcagctgttttgtcttccttggcccggacaaccccctctacacctcccctcacgtggtccgagggtcctggcttcccactgggcctcactt

SEQ ID NO: 422814 - DNA, 201 bp, Homo sapiens
tcaccccttaggtctcctgcagctgaaagccttgaagccgggagttattcaaatcttgggagtcaagacatccaggttcctgtgccagcggccagatgggrccctgtatggatcggtgagtttccaggaccctcctcaccacccaccatgctcctcctatatgtcgccctcacagcctggggtgccttgtcttgctcatcc

SEQ ID NO: 422815 - DNA, 201 bp, Homo sapiens
ctggaaccccgggtctgagggaggagaggctggggcctggaaccccgggtctgagggaggaggcgctgggggcctggactcctgggtcggatggaggagaractagggtctggacccctgggtctgagggaggaggcgctgggggcctggacccctgggtctgagggaggcagggctggggcctggatcctgggtcttaca

SEQ ID NO: 422816 - DNA, 201 bp, Homo sapiens
ctggggatctgggcccctgggtctgagggaggaggggctgggtctggacccctgggtctgagggaggaggggctgggggtctggactcttgggtttgaagraggaagggctggggtcctggactcttgggtctgagttgggagggggctttggcttgggcttctcctgggtctgagggaggaggtaggctgtgggcttgga

SEQ ID NO: 422817 - DNA, 201 bp, Homo sapiens
ataaataaataaatataaaaataaaatgaaagagcaggacttctttctacaacccctcaacttgtgtgagcgttgtgtaactatttcatagagctacctcrataacaggggagcttttacgaggtgacacagcacactcacatcctcatgggagatgtagttttctggcatcatttagcagcaggaatgagatctgttggg

SEQ ID NO: 422818 - DNA, 201 bp, Homo sapiens
ctcttgggtctgagttgggagggggctttggcttgggcttctcctgggtctgagggaggaggtaggctgtgggcttggactcccagggctgggacagagcyggatggtgggacagagtcgggtggtgggacagtcccgggtgggagaggtcctcgaaccaccttatcgctttcaccccttaggtctcctgcagctgaaagc

SEQ ID NO: 422819 - DNA, 201 bp, Homo sapiens
ggctcaggttattgggagtctcgtgattcagtaacccctgctcctgcccacacggcccctgtgtgcacggctcatgctgggcacagggacactcggggaarccatggccagtaaagtgaccaggaccttgagtgctagggagaccccccgcctggcctgagagagcactgatggctccgagggctggaatgttctctgtga

SEQ ID NO: 422820 - DNA, 201 bp, Homo sapiens
ggaaccacggatcctccgcagggtcaagccccccagctctggatgcttccagacctgcgtccagactcagctcccggcaggttgtacaggatgagctgcarggtgtgggcggtgagggctgccatatgcacccggagaactgcaagaccttgctcactgatattgacagaacccacactgagaagccggtctgggacggga

SEQ ID NO: 422821 - DNA, 201 bp, Homo sapiens
gttctgcgtgatctgcatagatggtccaagaggtggtttttccaggagcccagcacccctcctccctccgactcaggtgcttgagaccccagatccttctstctgagactcaggaatgtgggcccccagcccctttcacctgggtcccagctaacccgatcctcccctccctcatcccctagacccaggagtctggccctc

SEQ ID NO: 422822 - DNA, 201 bp, Homo sapiens
tacacctcccctcacgtggtccgagggtcctggcttcccactgggcctcacttttttcttttcttttcttttttttttttgagacggagtctcgctctgtsacccaggctggagtgcagtggcgcgatcttggctcactccaacctccgcctcccaggttcaagcaattctcctgcctcagccacccgagtagctgtgatt

SEQ ID NO: 422823 - DNA, 201 bp, Homo sapiens
aattctgtagctcctgccaaatgggtcaaatatcatggttcaggcgcagggagggtgattgggcgggcctgtctgggtataaattctggagcttctgcatstatcccaaaaaacaagggtgttctgtcagctgaggatccagccgaaagaggagccaggcactcaggccacctgagtctactcacctggacaactggaatc

SEQ ID NO: 422824 - DNA, 201 bp, Homo sapiens
aggtggattgcctgaggtcaggagttagagcagcctggccaacacagtgaaaccccatctctactaaaaatacaaaaactagccagacgtggtggcgggcrtctgttgtcccagctactcggggggggggctgaggcagaagaatcacttgaacctgggaggtggaggttgcagggagccgagatcgtgccactgtcctcc

SEQ ID NO: 422825 - DNA, 201 bp, Homo sapiens
gatctgcatagatggtccaagaggtggtttttccaggagcccagcacccctcctccctccgactcaggtgcttgagaccccagatccttctctctgagacycaggaatgtgggcccccagcccctttcacctgggtcccagctaacccgatcctcccctccctcatcccctagacccaggagtctggccctccattgaaag

SEQ ID NO: 422826 - DNA, 201 bp, Homo sapiens
gtgattgggcgggcctgtctgggtataaattctggagcttctgcatctatcccaaaaaacaagggtgttctgtcagctgaggatccagccgaaagaggagycaggcactcaggccacctgagtctactcacctggacaactggaatctggcaccaattctaaaccactcagcttctccgagctcacaccccggagatcacc

SEQ ID NO: 422827 - DNA, 201 bp, Homo sapiens
tgagggaggaggggctgggggccttggcccctgggtctgagggaggaggggctggggatctggactcctgggtctgagggaggaggggctggggatctggrcccctgggtctgagggaggaggggctgggtctggacccctgggtctgagggaggaggggctgggggtctggactcttgggtttgaaggaggaagggctgg

SEQ ID NO: 422828 - DNA, 201 bp, Homo sapiens
ggagttagagcagcctggccaacacagtgaaaccccatctctactaaaaatacaaaaactagccagacgtggtggcgggcgtctgttgtcccagctactcggggggggggctgaggcagaagaatcacttgaacctgggaggtggaggttgcagggagccgagatcgtgccactgtcctccagcctgagtagtacagcaag

SEQ ID NO: 422829 - DNA, 201 bp, Homo sapiens
atcctgtttttgtcccctagctccactttgaccctgaggcctgcagcttccgggagctgcttcttgaggacggatacaatgtttaccagtccgaagcccayggcctcccgctgcacctgccagggaacaagtccccacaccgggaccctgcaccccgaggaccagctcgcttcctgccactaccaggcctgccccccgcac

SEQ ID NO: 422830 - DNA, 201 bp, Homo sapiens
ccctgcaggagagccctggggtaaaaaacaaaacctgccttgctgttttgtttcctagaggaggggctgggggcctggactcctgggtctgagggaggagrggctgggggcctggacccctgggtctgagggaggaggggctggggcctggaaccccgggtctgagggaggagaggctggggcctggaaccccgggtctga

SEQ ID NO: 422831 - DNA, 201 bp, Homo sapiens
gagttagagcagcctggccaacacagtgaaaccccatctctactaaaaatacaaaaactagccagacgtggtggcgggcgtctgttgtcccagctactcggggggggggctgaggcagaagaatcacttgaacctgggaggtggaggttgcagggagccgagatcgtgccactgtcctccagcctgagtagtacagcaaga

SEQ ID NO: 422832 - DNA, 201 bp, Homo sapiens
gggacagatgaggttgaggttggcccacggccaggtgagaggcttccaaggcaggatacttgtgtctcagatgcggtcgcttctttcatacagcaattgcygccttgctgaggatcaaggaacctcagtgtcagatcacgccctccccccaaacttagaaattcagatggggcgcagaaatttctcttgttctgcgtgatc

SEQ ID NO: 422833 - DNA, 201 bp, Homo sapiens
tttttttatttttcttacttgagataataaagagttccagaggaggataagaatgagcatgtgtgagtgtctgagggaagacatggcagctgttttgtctyccttggcccggacaaccccctctacacctcccctcacgtggtccgagggtcctggcttcccactgggcctcacttttttcttttcttttctttttttttt

SEQ ID NO: 422834 - DNA, 201 bp, Homo sapiens
acctctgtctcctgggcttaagcgattctcagctctggagtagctaggattacaggcaccaccactatgcccagctaatttttgtgtttttagtagagacrgggtttcaccatgttggtcaggctggtctcaaattcttgacctcaagtgatctgcccaccttggcctctcaaagtgctgggattacaggcgtgagatact

SEQ ID NO: 422835 - DNA, 201 bp, Homo sapiens
acttgagataataaagagttccagaggaggataagaatgagcatgtgtgagtgtctgagggaagacatggcagctgttttgtcttccttggcccggacaaycccctctacacctcccctcacgtggtccgagggtcctggcttcccactgggcctcacttttttcttttcttttcttttttttttttgagacggagtctcg

SEQ ID NO: 422836 - DNA, 201 bp, Homo sapiens
cctgatgggggggtcagagacccagagatagggagacagagacccagagagagagggagagtcccagagagagggagacagagacccagagagagagggcracagagacccagagagagagggggacagagacccagagagagagggagacagagacccagagagagagggggacagagacccagagagagagggggacag

SEQ ID NO: 422837 - DNA, 201 bp, Homo sapiens
gataagaatgagcatgtgtgagtgtctgagggaagacatggcagctgttttgtcttccttggcccggacaaccccctctacacctcccctcacgtggtcckagggtcctggcttcccactgggcctcacttttttcttttcttttcttttttttttttgagacggagtctcgctctgtgacccaggctggagtgcagtggc

SEQ ID NO: 422838 - DNA, 201 bp, Homo sapiens
tgagtgtctgagggaagacatggcagctgttttgtcttccttggcccggacaaccccctctacacctcccctcacgtggtccgagggtcctggcttcccaytgggcctcacttttttcttttcttttcttttttttttttgagacggagtctcgctctgtgacccaggctggagtgcagtggcgcgatcttggctcactcc

SEQ ID NO: 422839 - DNA, 201 bp, Homo sapiens; identical to SEQ ID NO: 226715

SEQ ID NO: 422840 - DNA, 201 bp, Homo sapiens
atcccgagggcagtgcccgcgggcaaggttcgaaactgttggcattgggactgactccagcctctgctccgggaggccctcccgggctgcctgacctcccrggaccatgcagaaggcctcccacaaaaacaaaaaaggtaactggggagaaggaagcgggtgaagaagccctggggaccaagccttcgtcaatgttcctcc

SEQ ID NO: 422841 - DNA, 201 bp, Homo sapiens
tgttgcccaggctctaatcactttatacttctgctagcccccaggtgggcttactgaaggatgcagactcctgcactgagcaattcttgttctttatggcttttttccgcacagcatcaggatttgataagacttgaggttggcaaagaggctgaactaggcaggcaggtgccagacagccttaggctttttcactgcagg

SEQ ID NO: 422842 - DNA, 201 bp, Homo sapiens
tttaatttttaattttaaaagtcttatttttgagacagggtctcactctgtcactcaggctggagtgtagtagcacgatcacaactcacaatcaaatcctrctcagcgactcctacactggagggcacgactctaaaagcctgggctcatgtgattacataacaactatgttctaagcattttcattacatggaggagttt

SEQ ID NO: 422843 - DNA, 201 bp, Homo sapiens
ctggtatgttgctagcatttgagacaggagattgcatgtatttacttgctccaagaaaatctacatccaacttcactttgtcaaggtttttttctctctctttttttttttttttttttttttttgagatggagtcttgctctgtcacccaggcttgtagctgggattacaggcatgcaccaacatgcccagataattttt

SEQ ID NO: 422844 - DNA, 201 bp, Homo sapiens
agaggcgaaaacccacaaacaataccaagcacctgctgattccctttcttaattaggcaaagtacccatatctgaggcattttagtaacttatgtataacrcggcagggaaagaagaaggaaaaagatgctttcacaaagctagtataaacttttccaggagaaaatggcactgggtatacacactggagaaattctccat

SEQ ID NO: 422845 - DNA, 201 bp, Homo sapiens
aggccaaattcccagtaacaaggtaaatagttcattttaggaactctttgttataatacagaatcccagggcctgtgaggcatagatggtttaatgtgacmattatcaaatgataaggatcatgacaggaggactggtgacactgtcagagtaatttcctgggtttctggtattagatctgtaggatctaatatgagaaag

SEQ ID NO: 422846 - DNA, 201 bp, Homo sapiens
tcccagggcctgtgaggcatagatggtttaatgtgacaattatcaaatgataaggatcatgacaggaggactggtgacactgtcagagtaatttcctgggyttctggtattagatctgtaggatctaatatgagaaagcacgatgaagtcaacctggagttaaaaaacaagtcatcggttgggaattttgtccccatgcct

SEQ ID NO: 422847 - DNA, 201 bp, Homo sapiens
agacttcaatattatagatatccgtggtcaactgtgcatcaccctgcaaggagaccaatatccatctccagagactggcatggatataagaagaagaaccmtactattagtgtaggaaaagacattaattgtgacgtgatgattcacagagacgacaagaaagaagtgagggccccttctccatactggataatggtgaag

SEQ ID NO: 422848 - DNA, 201 bp, Homo sapiens
ttactgcaacccccgccttccaggcgggttcaagcgattcttgcccctcagcctccagagtagcttggattacaggcgtgaaccaccacgcctggctgatytttgtgttttcagtagcaacggtgtttcaccatgctggccaggctggtctcgaactcctgaccccaagtgatccgcccaccctcagcctcccaaagtgct

SEQ ID NO: 422849 - DNA, 201 bp, Homo sapiens
ccacgcctggctgatttttgtgttttcagtagcaacggtgtttcaccatgctggccaggctggtctcgaactcctgaccccaagtgatccgcccaccctcrgcctcccaaagtgctgggattacaggtgtgagccaccatgcccagcctaaatagaagagatgaggtgtcactatgttgcccaggctctaatcactttata

SEQ ID NO: 422850 - DNA, 201 bp, Homo sapiens
tcatcatcatcatcatcatcatcatcatcatcatcatcatcatttgagaaggagtcttgctttgtcccccaggctggagtgcagtggcgcgatctcagctsactgcaacctctgcctcccaggctcaagtgattcctctgccttagcctcccgagtagctgggattacaggtgcctgccaccatgcccagctaatttttta

SEQ ID NO: 422851 - DNA, 201 bp, Homo sapiens
tgattaaagtgcgctatgatcgggaaatgaaggattatgaaccagctaagggaggcaagaagaaggatcctaatgcccctaaaaggccaccgtctggattsttcctgttctgttcagaattctgcgcctagatcaaatccacaaaccctggcttctctattggagacgtggcaaaaaagctgggtgagatgtggaataact

SEQ ID NO: 422852 - DNA, 201 bp, Homo sapiens; identical to SEQ ID NO: 120514

SEQ ID NO: 422853 - DNA, 201 bp, Homo sapiens; identical to SEQ ID NO: 120474

SEQ ID NO: 422854 - DNA, 201 bp, Homo sapiens
gtatatacccagtaatgggattgctgggtcaaatggtatttctggttctagatctttgaggaatcaccacactgtcttccacaatggttgaactaatttayattcccaccaacagtgtaaaagcattcctatttatccacagtcttgccagcatctgttgtttcttgactttttaataatctctattctaactggcatgaa

SEQ ID NO: 422855 - DNA, 201 bp, Homo sapiens
gaaaattgaaacgtatgaaaattaaagaacacacttctaaataaccaatgggtaaaaaaaaaaaaacaaaaaaacaaaacaacaacaaaaacgaaacaaaacacacacacacacacacacacaaaattacaacataacataattgaaatgaatgaaagtaaaaacccaacacaacaaaccttagccagtcacagtggccca

SEQ ID NO: 422856 - DNA, 201 bp, Homo sapiens
aaaattgaaacgtatgaaaattaaagaacacacttctaaataaccaatgggtaaaaaaaaaaaaacaaaaaaacaaaacaacaacaaaaacgaaacaaaacacacacacacacacacacacaaaattacaacataacataattgaaatgaatgaaagtaaaaacccaacacaacaaaccttagccagtcacagtggcccat

SEQ ID NO: 422857 - DNA, 201 bp, Homo sapiens
aaattgaaacgtatgaaaattaaagaacacacttctaaataaccaatgggtaaaaaaaaaaaaacaaaaaaacaaaacaacaacaaaaacgaaacaaaacmcacacacacacacacacacaaaattacaacataacataattgaaatgaatgaaagtaaaaacccaacacaacaaaccttagccagtcacagtggcccatg

SEQ ID NO: 422858 - DNA, 201 bp, Homo sapiens
aattgaaacgtatgaaaattaaagaacacacttctaaataaccaatgggtaaaaaaaaaaaaacaaaaaaacaaaacaacaacaaaaacgaaacaaaacacacacacacacacacacacaaaattacaacataacataattgaaatgaatgaaagtaaaaacccaacacaacaaaccttagccagtcacagtggcccatgt

SEQ ID NO: 422859 - DNA, 201 bp, Homo sapiens
agaaaattgaaacgtatgaaaattaaagaacacacttctaaataaccaatgggtaaaaaaaaaaaaacaaaaaaacaaaacaacaacaaaaacgaaacaaaacacacacacacacacacacacaaaattacaacataacataattgaaatgaatgaaagtaaaaacccaacacaacaaaccttagccagtcacagtggccc

SEQ ID NO: 422860 - DNA, 201 bp, Homo sapiens
atcacctgaagttaggagctccagaccagccttgccaaaatggtgaaacccctgtctctactaaaactccaaaaattagccaggcatggtgattggcctgyagtcccagctacttgggagcctgaggcaggagaattgcttgaacccaggaggtggaagttgcagtgagccaagatcgtgccattgcactccagcctgggc

SEQ ID NO: 422861 - DNA, 201 bp, Homo sapiens
aaatctgaccttccttggttctctttgtggtctaaggtgaaaactagtgtttctgctgctgcgtcagtgagtgcaactattccgatcagcagggtccaggraccattgcaggttcttgggtaggggttgtttctgctgctgtgttggtgagtgcaactattctatcagcagggtccagggactgttgtgggttcttgggca

SEQ ID NO: 422862 - DNA, 201 bp, Homo sapiens
tggattgatgtggggaaaacacttttcccttctagttttgagagacttactcttggctcccaggagggattccgcgactttgacacatatggccaccttgrcacaaaagccttgtggtatggaaaaacaaaatcatttttatctctcttctcccttcccatctatcagcacagacttaactcccttaagcccagacatctg

SEQ ID NO: 422863 - DNA, 201 bp, Homo sapiens
attttcggtagtccattgaagaaggtagttaagtttgaaagttgttgtgtactgttaatgactgtctgcccatgttctgcctgaaataccacgactgtttmtggaaagtatctttaataaagctggatacagtttggcttggaaaaaaaaaaaagagtggttgatttgcacagtgggattgcggggacttttttttttctt

SEQ ID NO: 422864 - DNA, 201 bp, Homo sapiens
catttttatctctcttctcccttcccatctatcagcacagacttaactcccttaagcccagacatctgttgggacctgacctccagtcattggttaccagygtgtcaggcaatctggacttttccgggatgccactgagatggcacctgtcaaaagagcagtggttccgtttctagattgtggatcttcagataaattctg

SEQ ID NO: 422865 - DNA, 201 bp, Homo sapiens
cctgatagtcagggtcagcttgtgaaaagttgttaaacaacatgctaaatgtgacatgtcaaccctcactctaaactttgcctgttcagagcatcagatgmagacttcattgggttttatagtggctttctgattttcggtagtccattgaagaaggtagttaagtttgaaagttgttgtgtactgttaatgactgtctgc

SEQ ID NO: 422866 - DNA, 201 bp, Homo sapiens
taataggcattgaataaataactgctaaaaaatgaatgagttaaaaatttggtgaactctctgtttatacagacgtcttacagaaaagctgtcagcataaytgaattttctattaatagtttgcttttttctcttactatatcacgagcatttttccatgacagtagtcttctttttttttttttcagctacaccaaaatt

SEQ ID NO: 422867 - DNA, 201 bp, Homo sapiens
ttaagatgtaataccaatactttagaagtttggtcgtgtcgtttgtatgaaaatctgaggctttggtttaaatctttccttgtattgtgatttccatttaratgtattgtactaagtgaaacttgttaaataaatcttccttttaaaaactggaaaaaatcttgaactgattgatttttattatgttctgtcatatgggca

SEQ ID NO: 422868 - DNA, 201 bp, Homo sapiens
tttgtatatctgtctgtctgggccggtctcgggggacccctaagggtgaccgtaaggcgaaaaacgtttgaaaaccacggccctgagttaagaaaaacagrtactgaaaatagtggtctgagtgctggtctatccattcaggcactcagtctccactgcctgattgtctgtaaggggaggccccaagtgaattttatctgt

SEQ ID NO: 422869 - DNA, 201 bp, Homo sapiens
acactccactcagagggtcatggcaagtataatgtatatttgcatttacatctttaataatgacattcggtgctcctgtaggaccataagcccattctggrcttattgattcttgtatgccagagccgaatattggacatggcaactaaaaaatgtttctaaaatgaatgtgtgaattcccaataatgtctttttttcatt

SEQ ID NO: 422870 - DNA, 201 bp, Homo sapiens
tgtttatggatccctgggcagattagtctgtttcatttaaccatttggcctccaaccaatagaactgatcaactagtccctctttgatactatgcttacaytccactcagagggtcatggcaagtataatgtatatttgcatttacatctttaataatgacattcggtgctcctgtaggaccataagcccattctgggctt

SEQ ID NO: 422871 - DNA, 201 bp, Homo sapiens
tagaatgggagggatgtttagtatatccagtatgattggtaaatgggaaatataattgattctgatcactcttggtcagcttctctttctttatctttctktctccttttttaagaaaacgagttaagtttaacagttttgcattacaggcttgtgattcatgcttactgtaaagtggaagttgagattattttaaaactt

SEQ ID NO: 422872 - DNA, 201 bp, Homo sapiens
tggttaataggaaaactgttatcactgcagatgcagtgtgctaggcacataatcggcaatcagtaaatgtttgttaaatcgtttcctcagtgtagttttawggccgttattacactttgtactttgtttccaagaggcccagtgctcccagaccatttcagataaaccatccacatacaaaattagaaaattttataaaat

SEQ ID NO: 422873 - DNA, 201 bp, Homo sapiens
aatagaatgggagggatgtttagtatatccagtatgattggtaaatgggaaatataattgattctgatcactcttggtcagcttctctttctttatctttytttctccttttttaagaaaacgagttaagtttaacagttttgcattacaggcttgtgattcatgcttactgtaaagtggaagttgagattattttaaaac

SEQ ID NO: 422874 - DNA, 201 bp, Homo sapiens
tgtcactgagaccttaggatggttaataggaaaactgttatcactgcagatgcagtgtgctaggcacataatcggcaatcagtaaatgtttgttaaatcgkttcctcagtgtagttttatggccgttattacactttgtactttgtttccaagaggcccagtgctcccagaccatttcagataaaccatccacatacaaaa

SEQ ID NO: 422875 - DNA, 201 bp, Homo sapiens
tgaccgtaaggcgaaaaacgtttgaaaaccacggccctgagttaagaaaaacagatactgaaaatagtggtctgagtgctggtctatccattcaggcactsagtctccactgcctgattgtctgtaaggggaggccccaagtgaattttatctgtagagtcacatctaggcaaatgcgtgcttgacaaaggcgcccaataa

SEQ ID NO: 422876 - DNA, 201 bp, Homo sapiens
atttgtgggagttgaatagaatgggagggatgtttagtatatccagtatgattggtaaatgggaaatataattgattctgatcactcttggtcagcttctytttctttatctttctttctccttttttaagaaaacgagttaagtttaacagttttgcattacaggcttgtgattcatgcttactgtaaagtggaagttga

SEQ ID NO: 422877 - DNA, 201 bp, Homo sapiens
tgtctgtctgggccggtctcgggggacccctaagggtgaccgtaaggcgaaaaacgtttgaaaaccacggccctgagttaagaaaaacagatactgaaaayagtggtctgagtgctggtctatccattcaggcactcagtctccactgcctgattgtctgtaaggggaggccccaagtgaattttatctgtagagtcacat

SEQ ID NO: 422878 - DNA, 201 bp, Homo sapiens
gttatggaggtcctgctagccagcagctgagtggtggttatggaggtggttatggtggtcagagcagtatgagtggatatgaccaagttctgcaggaaaaytccagtgactatcagtcaaaccttgcttaggtagagaaggagcactaaatagctactccagatataaaagctgtacatttgtgggagttgaatagaatgg

SEQ ID NO: 422879 - DNA, 201 bp, Homo sapiens
agtgccctaattgcagaagtattactgaaattgctccaactggcattgaatctttacctgttaattttgcactaagggctattattgaaaagtaccagcamgaagaccatccagatattgtcacctgccctgaacattacaggcaaccattaaatgtttactgtctattagataaaaaattagtttgtggtcattgcctta

SEQ ID NO: 422880 - DNA, 201 bp, Homo sapiens
ttggaagtgttgagttggacagccctcatctctaggcaatactttcataaagtggaaaaacgggggaagaggacgaaggctagggagagacgcagggatcyacccaacccagtcctgagtttcccactcgctcttggagttgagtacaaagagcgctccaaagccccttctcctgtgctcagcccagtgctccggtgggtc

SEQ ID NO: 422881 - DNA, 201 bp, Homo sapiens
gcttgggacctgcactcattccctcttgtcccatactggagtttggggagccactttcccgtccctccactgtggagctgcgttcctgtgagggaggaggycctctgtggtggcgagggtgagctgagcggacgccgccgagtcggtcagtcccgcggggttggggacgggcgggtgccgaggtggaggcgcgttaggagg

SEQ ID NO: 422882 - DNA, 201 bp, Homo sapiens
gcttttctgaaaacacgatgaagcatcgtgaagataaatatcaaagacagtgaactaacaaccatttttatgacatgagacaataaattgaaaacattaargataacattattttaattttagaataagaataaaagattctggaggagttggagaagagtgtattcagcccccaaaccacgagatcaacaaagtaggtaa

SEQ ID NO: 422883 - DNA, 201 bp, Homo sapiens
tcctgtgagggaggaggccctctgtggtggcgagggtgagctgagcggacgccgccgagtcggtcagtcccgcggggttggggacgggcgggtgccgaggyggaggcgcgttaggagggaggcctgggagagtggagctttgagaaggggaagggaagagtactgccattttgagcccctttgtgggaggtgctcgcagga

SEQ ID NO: 422884 - DNA, 201 bp, Homo sapiens
cttaatgatacattagaacagaaaaaaaaaagtttcctaacggctctctgtgatgttggcaatctaattaatcaagaatatactccacaaattgaaagaaygaaggaaatacgagagcagcagcttgaattaatggcactgacaatatctttacaagaagagtctccacttaaatttcttgaaaaagttgatgatgtacgc

SEQ ID NO: 422885 - DNA, 201 bp, Homo sapiens
gggccgcgccgtccaccgtttactttcgaacgagcccagcaatagttcccattggccgatgccttgcagttgaatgttgcctgcagactgcgcctgcgctrcgaggctccgcgaggccccgcccggtctgggcacctgaagcccttcggggcagaggagggcggggactcggggcggctctcagcatccgcctggagctcg

SEQ ID NO: 422886 - DNA, 201 bp, Homo sapiens
ttctccagtattttaaggagcttaatgatacattagaacagaaaaaaaaaagtttcctaacggctctctgtgatgttggcaatctaattaatcaagaatayactccacaaattgaaagaatgaaggaaatacgagagcagcagcttgaattaatggcactgacaatatctttacaagaagagtctccacttaaatttcttg

SEQ ID NO: 422887 - DNA, 201 bp, Homo sapiens
gaggttaatgcctagaatgttaaataatatgtacaggtgtctctatgtaaacttaaaatacatttttctcttgacaggaaatgcacaattttgaggaagarttaacttgtcccatatgttatagtatttttgaagatcctcgtgtactgccatgctctcatacattttgtagaaattgtttggaaaacattcttcaggcat

SEQ ID NO: 422888 - DNA, 201 bp, Homo sapiens
agttttctgcaagcatagaataggggtttggatagaaaagttagattctgttttaggactagttttgctacttaaacaattgaatagctccagtaatattraatctagattaaatgtacgtcgactgctcaaattttatttcctacaaagtgttattctgtttattccttcaatgtgaattctgacatcactgaaatactc

SEQ ID NO: 422889 - DNA, 201 bp, Homo sapiens
agggaaaagggtcctatagaacgagggaagacaaaaatgttttattcctggctaagcctgcccaggggaaggttctgacatttctcgagataagaagggtkggggggtgggtgggaacagggagggaatttggcaggaggacatgctcctgcttataatatatgcctggggtgagggagtggtaaggggaaaagattattg

SEQ ID NO: 422890 - DNA, 201 bp, Homo sapiens
caggggaaggttctgacatttctcgagataagaagggttggggggtgggtgggaacagggagggaatttggcaggaggacatgctcctgcttataatatakgcctggggtgagggagtggtaaggggaaaagattattgagtcccagaaaaggaagggggagacagttcttgcatgctggcgaaatgagactgcaagtatg

SEQ ID NO: 422891 - DNA, 201 bp, Homo sapiens; identical to SEQ ID NO: 258779

SEQ ID NO: 422892 - DNA, 201 bp, Homo sapiens
atgggattctttctctgtgctttggaactcagaggattaataaaaagaattattaatatgtatttaaaattattgttcaaactgatttatatcctcctcarataaaattctgaactgacattttgtctgcattttggggccataaatgaatagcttacaaggtaatttaaaaatctacccattttggccatttttgtggct

SEQ ID NO: 422893 - DNA, 201 bp, Homo sapiens
gtgaaacaagcattatgaaatcaagcttatttagcacttggcatatgtttatgatattatttacattttacatatatagcctgatatatatagatatataygcacacacacacgcacatgcacacacacacacatatatatcctgtttcttcaaccaggttaataaattccttaagaacataaaacataacttataagtct

SEQ ID NO: 422894 - DNA, 201 bp, Homo sapiens
aaagtaattctgtaccaacaaaaccaaaaacaggaacgacacagaaggacaaaagtctgaacgaaaccttaagtaaaaattgatcttttgggtaggaaatrtaccactttaacaattctattccacacaactcccatctttttatctttctcagtcctcatatgctctttattacacatctcttctgcctcttttggatat

SEQ ID NO: 422895 - DNA, 201 bp, Homo sapiens
gagtgcaatggcacaatctcggctcactgcaacctctgcttccccggttcaagggattctcctgcctcagcctcccaagtagctgggattacaggcatgcrccaccatgcccagctaattttgtatttttagtaatggtggggtttcaccatgttggtcaggctggtctcgaactcctgacctcaggtgatccgccctcct

SEQ ID NO: 422896 - DNA, 201 bp, Homo sapiens
cataatctctttatgtcatcagatgtattcattatcccatcctgcactatgtcattcacaaaatcaataatcctgccttctatagaaggcttcatccaaakaactgatttaaaatgttgatcaagaaggtttacatagagaaccctagagacataacagaaaatgtcctcttaattaatactgatccacttaattatatta

SEQ ID NO: 422897 - DNA, 201 bp, Homo sapiens
tttctatctggccatcaaaacccttataagacaaggtaaaatgtcctgctcagttttggtttagctttgcttgttgcatttccatgatctgccaatctacwaagcttttcaaagaagtgagatagaagtgagatagtctgacatcacttgattttagtgaacacatggtagcatcaaacaacttgtacatcttctctcaga

SEQ ID NO: 422898 - DNA, 201 bp, Homo sapiens
cagtaatgggattgctgggtcaaatggtatttctggctctaggtctttgaggaatcgccacactgtcttccacaatggttgaactaatttacattcccacygacagtataaaagcattcctatttctccatagccttgccagcatctgttgtttcttgaccttttaataattgccattctgaatggtgtgagatggtatct

SEQ ID NO: 422899 - DNA, 201 bp, Homo sapiens
gatgatcactctgcccaggaaaggattcttgcaaatcaaagcattgactggttcagaagcaggaacatctggccaccatttctagtccccaccagttccayttccagattcaaagtagccttctgtctcctgccaccctagaggacacactgggtgtgactgagtaggcaacacagcattcttggttgttaggcctctagg

SEQ ID NO: 422900 - DNA, 201 bp, Homo sapiens
ctgtactttgtgtctctgtgtaagcatttttagcaataaaatattttaattacagtatgtacattttaaaaggcataatgctatcgcacttagtaaactayagtatagcataaacataactcttttatgcactaggataccaaaaaaattgtgactcactttattccaatatttgctttatttcagtggtttagaaccaaa

SEQ ID NO: 422901 - DNA, 201 bp, Homo sapiens
gaggttgaagtgagctgagatcatgccactgcactccagcctaggcgaccgagtgagactccatctcaatcaatcaatcaatcaatcaataaaatcaaccmaagttgggtgctattgcttgcaactaagaactccaacacaataagacagtaactagcaggtagcagatattaaattaatctaaatctatcaaattggcag

SEQ ID NO: 422902 - DNA, 201 bp, Homo sapiens
tattaagtaaaagaacctacttttcttaaagtatgtgttagtgcacattttttgcataatatctgaatacaaaatatactaagttatcacagaatagtgasaattttagaatttcttgatgtatatattgcttaaaaatatgaaagctaaattataattgttaccataactatgtctaagtgatattttaaagcagtcatt

SEQ ID NO: 422903 - DNA, 201 bp, Homo sapiens
aagtatgtgttagtgcacattttttgcataatatctgaatacaaaatatactaagttatcacagaatagtgacaattttagaatttcttgatgtatatatwgcttaaaaatatgaaagctaaattataattgttaccataactatgtctaagtgatattttaaagcagtcattctatttccagccagttcattgatcaact

SEQ ID NO: 422904 - DNA, 201 bp, Homo sapiens
agtgtggtttctgaaatacaaagtataaataaccaagaggtaattctaggcaaattataaacacatcagtcagtattgctatttcctttgctttaatttaraattcagtgactttttgaaaactagcctctagtttcaaaaatgggacatgctattatttaaaaaatattactccaaatgatgaaagtagatctagcaagc

SEQ ID NO: 422905 - DNA, 201 bp, Homo sapiens
cctcagtccccaaatccccacctcagacaccccatgaaatatgtctgaggaacagaatataaaaaccagaaatgaactctttcaagtctcttccagctctraaagtctaggatttcattattttatactccatatcattagccattagagaaatgtaaattaaaacctcaacgaaatatcactatatacctatcaaaataa

SEQ ID NO: 422906 - DNA, 201 bp, Homo sapiens
aagcatgagtggggagagaaggcatatataatgagttacttttggagaaggtaggcagtgttaaccaaacagcagctaggagtacaacattagtggaggtstgaagctctttacacagtcaacagcactgggcataaaacatttccacattataaaatctcaggcaagtcctactttgaaagagataatacaaaaactgag

SEQ ID NO: 422907 - DNA, 201 bp, Homo sapiens
ctgtttcccagagaacatcagcttggggaaggccaaccaaggacctcaatgtccacatttacaatgtcaactctccctaactcagtgtcctcttccttctsttaaaagatgctgggatggtttgcaccttgcttggtgattcctgtggtcaatggcgctccctccaggtgggctgcactaatactataaccaccctctccc

SEQ ID NO: 422908 - DNA, 201 bp, Homo sapiens
aaagcaacccatgtcaatcaacagatgaatgaatatgcaaagtgtgggatatacatacaatggaatattattcagcctttaaaaggaaggaaattctgacrtatgctctaatatagacgaaccttgaaaacattaggctaagttaaataagccagtcacaaaaagagaaatactgaataaatccacctatataaggtactt

SEQ ID NO: 422909 - DNA, 201 bp, Homo sapiens
aataaaatcaaattgattaaaatacacatgatgtgagacgactttttttttgctctagtgttcaacatcttaattagaaacacctgctcaattaagaaaamtagattgaatggagaaatctcaaaaagtcattcagtctatgaccctgctcttgggtcacgggttaactaaagcatctctaaaatgtaattgcctatatta

SEQ ID NO: 422910 - DNA, 201 bp, Homo sapiens
tattcactgaagaacttaaagctttaattacttctttgtccactgtccaaattctttctgacaacttggcctagaacaaatactccagcttatatttaggyagtcaacaagcatttaaaattcaaggtagtggggggattcccaaaaattaaagatacccaggaggaaaactagcatataaacaaaccaggatagaaaaaa

SEQ ID NO: 422911 - DNA, 201 bp, Homo sapiens
ttaattacaaaaacccattcttttacatttcccaacaaactataatagaggtatcagaacgcattactagatggtagaaagtattatctttcggctgggcrcgatggctcacgcctgtaatcccaggactttgggaggccgaggcaggctgatcacgaggccaggagattgagaccatcctggctaacgcggtgaaacccc

SEQ ID NO: 422912 - DNA, 201 bp, Homo sapiens
tctctacaaattttactttgcaccaagctggcttttacattgtgatcagctggtgcttttttttttttaatgaaaaaatgtttttcacaaacactactacrgtatgatgtgagttttacgggctgaagaagtttgcttccatacatacaacaaccagattagcaatgggacagagatagctatagggaaaacatgcttctg

SEQ ID NO: 422913 - DNA, 201 bp, Homo sapiens
gaactgacagagatggaaaggggctgataaagtgtcccttgcaacctcatctcacttaaccagaggcagagcctctgaaacgtggctgaggcagaagctgyggatgtgctttcagacaagtaccattgggtccctcaacttgttagtttcctgaaggttctcccacatgtggtatttcagtggctgagcagcaacagatgt

SEQ ID NO: 422914 - DNA, 201 bp, Homo sapiens
attagcaaaatacaaatgagataccaccacaaatacataccattacaaacacaaaagagatacagctactggaatggctaaagtgaaaaagactgaccctrccaagtgttggcaagcatttgtgcaggtactagaactctcatacattgctggtgagaatgtaaacatcataataatggttactaatcagggaaagaaggg

SEQ ID NO: 422915 - DNA, 201 bp, Homo sapiens
gaggcaggagaatggtgtcaacccagaaggcagagcttgcagtgagccgagatcgcgccactggcaatctggcctgggcgaaagagcgagactccgtctcaaaaaaaaaaaaaaaaaaaagcctaccatgtgcaaagcattctacaaacattatctctaatgctaacaacaatctcacaaggaaagtttctattaacccca

SEQ ID NO: 422916 - DNA, 201 bp, Homo sapiens
gtagataggttttgacatatgatacttgagaataaaatattgacataaaattttaaaaagtaactggatctctaatcaagtgagaaaacattctatagcawttctaaaccataaacccaaacttaatcataaacacatttggttagaaaaactaatttaatcactttttttatttttaagaccagatcttggtctgttgcc

SEQ ID NO: 422917 - DNA, 201 bp, Homo sapiens
gtgtggtttctgaaatacaaagtataaataaccaagaggtaattctaggcaaattataaacacatcagtcagtattgctatttcctttgctttaatttagaattcagtgactttttgaaaactagcctctagtttcaaaaatgggacatgctattatttaaaaaatattactccaaatgatgaaagtagatctagcaagca

SEQ ID NO: 422918 - DNA, 201 bp, Homo sapiens
cgctgaccccacatcctaatgtttctctccctatactgtcctcggaaacttttatcttactttgcattatagtaattgtatatttgttctatcctctgcctttttttttttttttttttttgagatggagtctcactctgtcgccaggctggagtgcagtggcacaatctcggctcaccacaacctctgcctcccgggttc

SEQ ID NO: 422919 - DNA, 201 bp, Homo sapiens
ggtcaacatggcgaaaccctgtctctattaaaaatacagaaattagccaggtgtggtgacttgagcctacagtccgagctactggggaggctgaggcaggrgaatcacttgaacccaggatgcggaggttgcagtgagtcaagattgcgccactgcagcctgggcgacagagcaagtctccgtctcaaaaaaaaaaaaaaa

SEQ ID NO: 422920 - DNA, 201 bp, Homo sapiens
aataaaataaaataaaataaaataaaataaaataaaataaaataaaataaaatgtttgccaatgccattgccagatataaagcatttcagcttagtgcccrgcccataatatgtactcaataaaatgttagatactattgtgatattattgctgtcttctattatcattaatggttatgttccttgaataattttttaatt

SEQ ID NO: 422921 - DNA, 201 bp, Homo sapiens
aagactttacatttttaacttttccacttagaagtagtctgctgttaactcagcctctaatgctctttacgcatccccatgccatttttgcttttggcaatttttttttttttttaggagacagcgtttccatctgtagcccaggctggagtacaatggcacaatcatagctcattgtaacctcaaactcctgggcttaca

SEQ ID NO: 422922 - DNA, 201 bp, Homo sapiens
aaaatcctacaaaatttgtaaaactgtcagatgaaagtacacaattatattaaaaacctccaaaaataacatgaatggagaaatatattatgttcacaaayatgaatacttgatggataaccacatcaattctcttcaaattatgccaaaaaaaatcaatattctacaaggaaattttacagaagttgacaagttcattct

SEQ ID NO: 422923 - DNA, 201 bp, Homo sapiens
ggaaacaaatcccagaggaaaggcaggcagaagtacaaggaacttaaccacaaggaagggaaattcaatgccaaataagaaaacctacatgcagcttatargtttgatactttagccagggttgttaggctaaatatatgtagaaaataaaaactatttcattttttccataggaaaaaagtaatacagctagttctccta

SEQ ID NO: 422924 - DNA, 201 bp, Homo sapiens
cactgcagcctccaactctggggctcgagcaattattccaccttagcctcccaagtagctggaactacagcagcatgccaccacacctaattttttttttwattatttttggtagagacagcggtctcactatgttgcccaggctggtctcaaactcctggactcaagcaatcttcccacctcagcctcccaaagtgttgg

SEQ ID NO: 422925 - DNA, 201 bp, Homo sapiens
gaacacaaccctttattaccttgcagtggtagaaaaatgtgttgcatcttccaaatgtccttaggccaatcactttgcattaaaatcctaataaacactgycttctttctcctcttctagggtaacacatgccattatatttcagttttgcaatgttatggttgagacaaccttgcaatcaataatggttttacatatcaa

SEQ ID NO: 422926 - DNA, 201 bp, Homo sapiens
ctgccttctttctcctcttctagggtaacacatgccattatatttcagttttgcaatgttatggttgagacaaccttgcaatcaataatggttttacataycaaggaacaaaacgaaatcatttgaaattgaaaaacaatataagtaacagataattcttgttaaaatggctgtgtaggttcatactttgaggtcacacac

SEQ ID NO: 422927 - DNA, 201 bp, Homo sapiens
agactgtcctggcactggtgtctacaggagtgggtctggaccatgggtctgctgaagcaggtttggattctgggtccactggaggttgggtctatggggaytggcctggagcctggggccagcctggtattagggcaggaatgaagcttggatctgtaggggctggtctggagcctgggatcatgggtactggcatggtac

SEQ ID NO: 422928 - DNA, 201 bp, Homo sapiens
caccacacctaattttttttttaattatttttggtagagacagcggtctcactatgttgcccaggctggtctcaaactcctggactcaagcaatcttcccrcctcagcctcccaaagtgttggaggcatgagctactgtgcccatcctaacctttttacatttttttattatgcaatagttatagatacacaaaattgcaa

SEQ ID NO: 422929 - DNA, 201 bp, Homo sapiens
tgctgcaggtgctcatttaattctctacttatactcttcctggacaagtttctataggttaaggctgcttgctttttatgccttaggatggtcccattccygcatctaccttcccttttctttctttgagaaagcattggagttagttaactcctacctatactctggcttctgtaagcttttctaagagagggcggtgcc

SEQ ID NO: 422930 - DNA, 201 bp, Homo sapiens
aagacatcatgtagagtgaataattaagatggatctaccaaatcaagctcgtcttcactctgcttcccacagcgaaatgccacacggtgtgtgggagagartgagtgagcacttctctgcctctcactgttccaactcccaccttccacaggcttcagcaggatgtggatgcaaaccttttgccccttactcactgatcac

SEQ ID NO: 422931 - DNA, 201 bp, Homo sapiens
caacctgaggctcagaaaggtcaagtgtgtgtaacctattatttttttgaatatatctaagagaatctgaattttgtctttcaggtttttcttggtcttayttatgatacagtgtatactccccttttcttaattaaagaagcactaaatgtcattccaaataatgactcatttgtgcatacactaggacccagaatataa

SEQ ID NO: 422932 - DNA, 201 bp, Homo sapiens
ggtcaagtgtgtgtaacctattatttttttgaatatatctaagagaatctgaattttgtctttcaggtttttcttggtcttatttatgatacagtgtataytccccttttcttaattaaagaagcactaaatgtcattccaaataatgactcatttgtgcatacactaggacccagaatataagataagctgcccatgtag

SEQ ID NO: 422933 - DNA, 201 bp, Homo sapiens
aagagttttattggtcaccagggtctagggtcttaaaaaggaatggaagacctgcttcatttgctaggatagacatatgaattggcgatttgctgtcttakgggaaacaccattctccctgcaacatgggaatggagatgctttagtacccttcaaatttcccagctgcataagaaaaccactgaggtggttggcctaagc

SEQ ID NO: 422934 - DNA, 201 bp, Homo sapiens
ttttgtctgtcacatctgagccagaagcctcctcctgttttcctgctgcaaaggcaaaggatcaggtgagacccctctgggtccagctcaattagcttctccacaaagagcagcttccggcgatgagcgcaggatcctcctggctgatgaactaaacacgggagcattgtcaatgttttcaatctctgactttttcataag

SEQ ID NO: 422935 - DNA, 201 bp, Homo sapiens
atcacctaccaaaaaacaacaattagactgacagcaaacacttcatcagcaataatggatgccttgaagatagtggagttataagtttaaaatgttaggaraaaagaactctcaagctaggattccatgcccagctaagccatcataaagaatgtaggcaaaataaaaacattttaaaacctacaatgaccatgttacact

SEQ ID NO: 422936 - DNA, 201 bp, Homo sapiens
atgaactctttcaagtctcttccagctctaaaagtctaggatttcattattttatactccatatcattagccattagagaaatgtaaattaaaacctcaaygaaatatcactatatacctatcaaaataactttttaaaaaaatgttaataacaccaagtgctggtaaggacacaaagtatctagaattctcatatattgc

SEQ ID NO: 422937 - DNA, 201 bp, Homo sapiens
tgcaatcccatttcttccaattctatcatctatgaaaatgaagatttaccatcatctaccttttatttattcttttatagataatatccacaggtagttawgtcagcctttttaaagggagtatcttcccctatcatccctttaaaaaactgatttatataacgttttataatttgcaaagtacatattcacaaaaatcct

SEQ ID NO: 422938 - DNA, 201 bp, Homo sapiens
ttttcgagacagggttttgccatgttgtccaagttggtctcgaattcctggactcaagcaatctgctcacctccgctgggagaccttggcctctcaaagtyctggggttacaggcgtgagccaccctgcccagctggtaaatgctttttaaaaggaagattcattgctttacattctatactcaagttcttattagtactc

SEQ ID NO: 422939 - DNA, 201 bp, Homo sapiens
aacctctgcttccccggttcaagggattctcctgcctcagcctcccaagtagctgggattacaggcatgcgccaccatgcccagctaattttgtatttttagtaatggtggggtttcaccatgttggtcaggctggtctcgaactcctgacctcaggtgatccgccctccttggcctcccaaagtgctgggattacaggtg

SEQ ID NO: 422940 - DNA, 201 bp, Homo sapiens
gacacacatttttttggctctggaattaaaatacaatgttggtgtaattacttttccaagaatagcaatggtcactataatttttctaagcagttcctaayctttttacattttagtgtttgcaaattcttggaaacaccacaatacataatgtaatacatttggaagttatataaggatagccaagttcaacttccctta

SEQ ID NO: 422941 - DNA, 201 bp, Homo sapiens
atctggccattgtgacccctctttctacttagagcaaagcagactttgttattttgcacttggggctctccatgattggtcatttacttatcttttcagtrccatatcccatcggccactgccttagtccttttctgttgcttataacagaatatctgaaactgggtaatttataaagaaaggaaatttatttcttacaat

SEQ ID NO: 422942 - DNA, 201 bp, Homo sapiens
ctggaattttcctcctcattttccagctgctgtggctatcccaagctgtggcctctgtgggtttgatagaaactgtgggtttctataagtttatttatttwttttttttttttttgatagagggggggtttcaccatgctgcccaggctggtctcctcctgagttcacgtgatctgcccaccttagccttccaaagtgctg

SEQ ID NO: 422943 - DNA, 201 bp, Homo sapiens
ctaagttaaaaaaaaatcttattgagaagccagaatagaaaaagaaaaaaatcacaaaaataattttttaatccaactatacactgcttatgagacatgtytaagccaaaatgatgcagaaagtttgaaaatagacagtgaaaaatatatcaggaaggtgcaaaagaaagctggtataacaacattaacagacaaaataga

SEQ ID NO: 422944 - DNA, 201 bp, Homo sapiens
atagaaaaagaaaaaaatcacaaaaataattttttaatccaactatacactgcttatgagacatgtctaagccaaaatgatgcagaaagtttgaaaatagmcagtgaaaaatatatcaggaaggtgcaaaagaaagctggtataacaacattaacagacaaaatagaacttaagataaaaaacaaatttggaataaaaaaa

SEQ ID NO: 422945 - DNA, 201 bp, Homo sapiens
gggtgtacagagaggtactcaggactgaagttaagaggagagaaaacaatactggaggctatcagttattcattccataccatatgccaggcactatgatrtactttatatatgtgctctcctttaattgtcacaataactctgggagacaaaaactactagtatcttcattttacaaaggaggaagctgagatttagaaa

SEQ ID NO: 422946 - DNA, 201 bp, Homo sapiens
aaaccaagcacagtaattttggaaggttttgtactagaaattggattcctgaagaaaagataacctcattttttagtcagtacagctaactcatgaaaaaygacttagtttccatatactacttttcaatgtaaaagaaaatttttaaaatatttatgacttcaacaaatcttggtcagaagagtttttatcataattctt

SEQ ID NO: 422947 - DNA, 201 bp, Homo sapiens
aaaagtaagcaaagaaagtattaagttttcagattagctgtgctgcttagttggttcagtgttttatgttctgtagctacaccaagcaaactcctctcctrgtttttttaaaacctatttcacatgtactagaatctgaagctgggcatagtttgaagaagttgcattccagtactgggacttccttatgtttttatcaga

SEQ ID NO: 422948 - DNA, 201 bp, Homo sapiens
tttgttatcacgtttgctcttccctcaccccagtattgtagcagcataggtctgttgtcctcaatttacagatgagaaattgagacactgagaagttatayatcttcatttgttcaacagctaggcacttttctaggtgccagatttacagtgatgaacaagacagagttcctgctcctaggatgcttactcagtagtgtg

SEQ ID NO: 422949 - DNA, 201 bp, Homo sapiens
tgtagccactctgttgtgctatcaaatactaggtcttattcattctttctaacaactttttgtgcccattaaccattcccgcttcccctcctccccacttytacctttcccagcctctagtaatcatcttactagctttttgaccttgaaaaagtcacttatattctctgatcatcagtttctttgtttttaaaaatggga

SEQ ID NO: 422950 - DNA, 201 bp, Homo sapiens
agcctctagtaatcatcttactagctttttgaccttgaaaaagtcacttatattctctgatcatcagtttctttgtttttaaaaatgggaatcacgacacmctcgcagataactgacacagggtctgaactggataaaacaacatgatatatgtgaactttatttgcataactatgaaatattaaacaaacaccagattaa

SEQ ID NO: 422951 - DNA, 201 bp, Homo sapiens
gtaagattccatcttaaaaaaaagaaaaaggctgggcgtggtgcctcatgcctgtaatcccagcactttgggaggccaaggcgggcggatcatgaggtaargagttcgagaccagcctggccaacatggtgaaaccccgtctgtactaaaaatacaaaaatcagccacgtgtggtggcgggcatctgtaatcccagctact

SEQ ID NO: 422952 - DNA, 201 bp, Homo sapiens
gattttcctttctctttttttaaaggcaggatcttgctctatcacccaggctggagtgcagtggcgcaatcactgctcactgcagcctcgacctcctgtgstcaaatgatccacccacctcagcctcctgagtaactgggactacaggttcatcccaccatgctaaattttttaaatgttttattttattaaatttaactt

SEQ ID NO: 422953 - DNA, 201 bp, Homo sapiens
cagcactgtcactcccagaggctgcaccccctttccccgcttttccagaaccactttttcctttgggcggcatcttggaagcttgttgttgaactctgaaytctgggcctggtttttaccccagtttgaaagaatctgaattccaaactacccctgatgcagagctgggaccacggtttgagtctcaagtctgcctgttgg

SEQ ID NO: 422954 - DNA, 201 bp, Homo sapiens
gctccaaattccatgatgctttatagtttgttatttacgtgtttgcaatccctaagttgtaagcccttcgacaacaggggccttgacttttcctttccccyagtgcgtcaagttgtgaacaaaatttatttttaaaaaatatacaaatatacaataatctactgtttttaggtcaggagagacaaaaaatactaaccaata

SEQ ID NO: 422955 - DNA, 201 bp, Homo sapiens
caaccaggttctgagggagttgagtctttcaggtgactgtgccactggatggaaaatgcagtttaatgcagacaaatatcaaacaatctcagggagcgggscagggcaacataccaaagagagagaacagattacatggaacagtcatgcagcgtactgaccaggaaaggggcttaggggttattgtagaaaaatccttga

SEQ ID NO: 422956 - DNA, 201 bp, Homo sapiens
ggccactggagctcaggcaaaaataatgagggcctgaaataagacagaggcagaagaaatggagaagggccagatttaagacagatttcaaagatagaacygacaaaacatgataagagattaatgtataggtgggatagaagaagaattatagaataagtactagatttggcttgggtaactagaaggataaggaagaat

SEQ ID NO: 422957 - DNA, 201 bp, Homo sapiens
caattttattttgggtggtgaacacaactgtaactatattagtaatgacaagaacaattacttgatgtaaaaacttttctttaacaactctactttctgaragtgaaaataataaactgtatctttattgtccaatcagagttcaggaatcaacttaaatgtatgttagcgttaaaactgtaggtacatctatatttaggg

SEQ ID NO: 422958 - DNA, 201 bp, Homo sapiens
catttgtcccctaattccagtctctctctgaggcccagctgctcccattcttaggtctggcaacctctacatccttataataaacccctctttctgctaargctagctcgagttcttctcagacacctacaacccattagtcctaactaggacataaacgttttattgagccaccaaactcccactaaacagtgtgttgga

SEQ ID NO: 422959 - DNA, 201 bp, Homo sapiens
tgtacttcctttgtccaagatacttataacctaaattaaaattaaaaggaatttctaaataaaacagcagttttcaatcactaataaattttccctcactytcaaaaccactcagcctttaaaggtttgctttgaggaattagagcaaggactaaaaactagtcagttaatctggattccatttctttcttttttactttt

SEQ ID NO: 422960 - DNA, 201 bp, Homo sapiens
aataagacagaggcagaagaaatggagaagggccagatttaagacagatttcaaagatagaactgacaaaacatgataagagattaatgtataggtgggawagaagaagaattatagaataagtactagatttggcttgggtaactagaaggataaggaagaattccccaaaagtagggattattgggaagagtggatttt

SEQ ID NO: 422961 - DNA, 201 bp, Homo sapiens
attctagaattgcaagaagcattgtcccaaaaatgtaataagcaaaggaatcacagactttatcccagggctatggaactgtaacaactttgtcctgtttytgaagaatccagtgaggagtgatggcaattcctctgattatgtctttatcctgtcatctatatctcagaggcactttttttttaatttaaaataaacaaa

SEQ ID NO: 422962 - DNA, 201 bp, Homo sapiens
aatcaacaaaacaataaatcaagccctgatttgtagtgtttgttgatttcagtggtgtaagtacttctatcacaggtaatttcaagctatcaacatgaaaycactgaactcagagttggcgaaaaaatgcagtggtacaccattacataagatttccatcatttagatataatagatacaaatatctcaagagaatagata

SEQ ID NO: 422963 - DNA, 201 bp, Homo sapiens
aaggtttgctttgaggaattagagcaaggactaaaaactagtcagttaatctggattccatttctttcttttttacttttttttttttttttttttttttkccactgttctttacagggagaaacatttcaaagactaatgaagcttgctaggggtagtgattgaggaggatacatgtattccagtaattctcttctaatt

SEQ ID NO: 422964 - DNA, 201 bp, Homo sapiens
aggtttgctttgaggaattagagcaaggactaaaaactagtcagttaatctggattccatttctttcttttttacttttttttttttttttttttttttgscactgttctttacagggagaaacatttcaaagactaatgaagcttgctaggggtagtgattgaggaggatacatgtattccagtaattctcttctaattt

SEQ ID NO: 422965 - DNA, 201 bp, Homo sapiens
ggcttggccgtttgcacccaggcagcctgcctgaccagccttgtggagcctgtcttggcacaggcacagttaaggattctccagaggaatgagccctggamtctgggttatgaatgagtaggacaatggggagagagggtgggggcaaaggcagggcacctgccatctagttacgctccccattgcgtcacggctcatata

SEQ ID NO: 422966 - DNA, 201 bp, Homo sapiens
tatttattgaattaaaactatgtaaggcatcgaactagatgtgataattcttagggtttatgatttatagctttctcttaatctattataaactctagagygcctggcaagcacagggctcaatacatttgttctctccctccctctctcaccctagctaccacagctactaagtggttgagccacaatcaaatccaaata

SEQ ID NO: 422967 - DNA, 201 bp, Homo sapiens
tttaaagcactttgattttatctttcagtaactccacaaggtagtgagggcaagaggttatctgaagtcatgtggttggcagttaatggcaaaaccaaggwtagaatccaagccgctttctagttcatgatcctgctgatcatatctattaagtcctcatgttgtcaacaggttcctggaaaccatgactttaagccaaat

SEQ ID NO: 422968 - DNA, 201 bp, Homo sapiens
atgccacatcatttcataagcaataatagcaccttgaacaatcccaattgttcccaatctcatatgaagagagcagttctccaaactgcttcaaatgcaayagatgcagatgaaggccaccgcaagaccctgacacccggtatccgcaggggcagatgacagctgggatgtttgcaacttgcctctggcacatgaggctca

SEQ ID NO: 422969 - DNA, 201 bp, Homo sapiens
caagaccctgacacccggtatccgcaggggcagatgacagctgggatgtttgcaacttgcctctggcacatgaggctcagcaatcagtgtggaagggactmgaattacagtgggaaatctcacatctgtactggcatgaaaatacaagcaggcagccacactgacaccttccctggaacttctccagattcttctatctga

SEQ ID NO: 422970 - DNA, 201 bp, Homo sapiens
gaggacacggcgtggagcctgcgtgctcaggctgtggagaagccacaatgttctgggcctgattaagtgccacgtacctcagttccgtcttgtgaatctcrgcaattttcctttccagcttctctgaatgtttagggaaaaactggaacttggagctgtagccttcagggtgtttccctgagtcataatccccaatctccg

SEQ ID NO: 422971 - DNA, 201 bp, Homo sapiens
gtgatctgcccacctcggcctcccaaagtgctaggactacaagcgtgagccacagcacctggcctagataatgtttagattcaagaaggagtcatcagtgstaactgaaaataatgtaatcagtacttggcatgaaaagcaaacttatcctgtcaaaagtcattaccttgaaggatgtaagctgctaacaaggcagcatcc

SEQ ID NO: 422972 - DNA, 201 bp, Homo sapiens
ataatgagggcctgaaataagacagaggcagaagaaatggagaagggccagatttaagacagatttcaaagatagaactgacaaaacatgataagagattmatgtataggtgggatagaagaagaattatagaataagtactagatttggcttgggtaactagaaggataaggaagaattccccaaaagtagggattattg

SEQ ID NO: 422973 - DNA, 201 bp, Homo sapiens
tgggcgcaagtgatccacttacctcagcctcccaaagtgctgggattacaggtgtgagccactgtgccaggctggggtgctctttttcatttgtcagagakgcttagaaaagcaccaggcgcggtggctcatgtgctcccagcgctttgggaggcaaggcaggcggatcaccttaggtcaggagtttgggaccagcctggc

SEQ ID NO: 422974 - DNA, 201 bp, Homo sapiens
acccctccctggacagttggaggtttccattgtttctgttttcgggctgaagaatgaaacagaggattccttgtccacttgatcatgtaaaaatgctcaasaggaagagggctgttgacagtgcaacttctaggaggtggtaggaaggggtcctagcaggtaactctgagaggcttgggcttgaagattcaagcaattaac

SEQ ID NO: 422975 - DNA, 201 bp, Homo sapiens
tagtgacatgtaagtagaagctttggtaaaaaataaaaatttcattaaaaaatcgtaacaaaccttgaaatactcagacattattttaaccaaatgtaagstatttacttaaggaaagagacaaactgttaatggtaaaagaaggcataaataaattaaaagttatacgtcaagtagataagactaagttttgaaaagata

SEQ ID NO: 422976 - DNA, 201 bp, Homo sapiens
ctgtgaactctggaaagcactggaggctcctggagagttttttccagaagatcctttggccttaccttcccttcaaatagattctttgccactggcttccyctatttactatttcctttttcctgactataattatgtttagtacgtcttcctccccaatattagactgtaagctccttgaagtcagagactatgttttat

SEQ ID NO: 422977 - DNA, 201 bp, Homo sapiens
cctcgtgatccgcccaccttggcctcccaaagtgctaggattacaggcgttagccactgttctggcaaaaatactcacatttcaatatggtaagtgctatragtcccccaaggcactgcccagcaacaatggggagggagtctaccctggaacaagaaggctggtgatccatgcagtgagaaaaggtgcatacagaagatg

SEQ ID NO: 422978 - DNA, 201 bp, Homo sapiens
actctcacccagaagaggacagggctcttctgcccactagcatgaagcagcagaagagaaccctcatatatttagggccaacttatactcagaacagtggraaattatatatgtagatcaaaacttgagataagtgggaggtttcgtcccaccctccccaggggtgtggcttgagtcttttcatggagaatacttacatct

SEQ ID NO: 422979 - DNA, 201 bp, Homo sapiens
aagcaattacataagggcgacacctaaaattcactcataagtggtcaaagagagaaaaagataaattttgaaaaagaaaatacaaatgggaatcatctgaraaaatactatgttagaaattaaagaaatgctaattaaaatagctttaaagtactaccgcttaactagcaagatgtaaattacaaaatctgaggctgactg

SEQ ID NO: 422980 - DNA, 201 bp, Homo sapiens
aatactgaataaatccacctatataaggtacttacactagttaaaatcatagagacagacagtagaacggtggttgccagagtgtggtgggagaataaaayggtggttgccagagtgtggtgggagaataaaatggagaagtattgtataatgcagtggtccccaacatttttgacaccagggactggtttcatggaagtc

SEQ ID NO: 422981 - DNA, 201 bp, Homo sapiens
gggctgcaggtaggagagaaataggagtgactgctaagtgggtttccttttggggtgatgaaagtattctggaactagtgagtgatgaggttacataacaytgtaaatgtacttaatgccactgaatgatacactaaaaatggttacattggtaaattttatattatgtgtatttaccacaatttttaaaaggtgaatatt

SEQ ID NO: 422982 - DNA, 201 bp, Homo sapiens
aatcacttcagcccaggaattcaagtccagcctaggcaacatagcaagatcccgtttcttaaaaacataaaaattccttaggatattacatgcctaagcaygtaaatgactccttcagtatactgagttcaaagatattagttatcttttcattttttaattttccctattttctccaaataacaaagtaagctgataaat

SEQ ID NO: 422983 - DNA, 201 bp, Homo sapiens
ttctccacagatgtaggtgtccaggttcttgttttcaatttaaatcaaaataattcaagaaatactcaattcaataaatcaattcaagaaatacctactasctctactagctctgggtggctgctggagaggtccacagataggtaagtctctgccttcacagaattcacaatctactttcaaaagctataatacgaggtc

SEQ ID NO: 422984 - DNA, 201 bp, Homo sapiens
ctctttctctaccctcatggatctttggcagcagtcagcacttatgcccagagctggtttcgaggggagggagaaaagggaaagtgaggagaaggctgaastgagcacggagtcagcagagaccagctgctctcatacactacccagtgtctttctcacacaccgctattttccgcgattgagcactgtcagcaaaaataa

SEQ ID NO: 422985 - DNA, 201 bp, Homo sapiens; identical to SEQ ID NO: 385341

SEQ ID NO: 422986 - DNA, 201 bp, Homo sapiens
gtcaggctggtctcaaactccagacctcaggggatccacccacctcggcctcccaaagtgctgggattacaggcgtgagccaccgcacccggcctttcttstgttatgatcaatgttcttacctgcttggttcaagtctaacaaaacaagaatcttagtggcacctcctgcctagagtatttggaatcctttggaaatcct

SEQ ID NO: 422987 - DNA, 201 bp, Homo sapiens
aggtatgcaccaccacacccagttaattttttttattttttgtagagacagggtcttaccatgctgcccaagctggtgtcaaactcctgctgggctcaagmaatcctcccacctcggccttccaaagtactggaattacaggtgtgagccactgcacctggccactaatattttttaaatcacactcattaatttattacc

SEQ ID NO: 422988 - DNA, 201 bp, Homo sapiens
tctttgaacatgacttagaaaacaggtgttagaccagtacaggtaaggattttggtaagatggcagagtaagaagtaccaggaatctgttgccccacctaracaacaaatctgtctgatgtaactattttggaactctggagtctactgaaggcttccaacttccaggggaaggcttggatggtaaagtgtggttaatttt

SEQ ID NO: 422989 - DNA, 201 bp, Homo sapiens
ttactggtccctccttgagttaacaataaatgtagacagagatgcctccatctgtgctcatgttgttccttccacccatgtcccacagctccctcaatttytattcccaaccaactcctacttattcaaaaaagttcaactgctgcttcctccagaaagtcttctctaaccatgctcatcttgagtcaagtggtcccaaag

SEQ ID NO: 422990 - DNA, 201 bp, Homo sapiens
caccctgagggagcaggggagctcagctcctccatccctaccatgaatcagtggactaaggacaactctctacaggtccccatttccctacaaccctcagwtactgtctcaagcctctctgctctccttaacccctcccgcaaggcacagaattacacaactttcagaggctatcagttatacattcagcatggaatctca

SEQ ID NO: 422991 - DNA, 201 bp, Homo sapiens
tgagggagcaggggagctcagctcctccatccctaccatgaatcagtggactaaggacaactctctacaggtccccatttccctacaaccctcagttactstctcaagcctctctgctctccttaacccctcccgcaaggcacagaattacacaactttcagaggctatcagttatacattcagcatggaatctcagaaac

SEQ ID NO: 422992 - DNA, 201 bp, Homo sapiens
ccctacagctacataaaaaagacctttttctggttacttttcagcacctggtgaatccccctgctcccccgccgtgaagacatagttccctcaagttcccrtttaccagttaccagtgttagatgcattgttttgagctgcagggctcttgcatagactaatgaagagaagcatcttcctttgctctttctccaaggctgg

SEQ ID NO: 422993 - DNA, 201 bp, Homo sapiens
gccaggtgcagtgctgcagggagccctgttggcagtcctcacttgggtcagagaactggctttgctcatcgccacatggtgtgacacgcaggatgtgcacrtggggtggggaaatcacattcagtctggaacatggaggtcaccgtgcgcaaggaaatgtcatgggagggaggactaagtgttctgtcagcacagatggcc

SEQ ID NO: 422994 - DNA, 201 bp, Homo sapiens
gtaggaaacacagtcaccaaggtggaaaaatggcatcactattgttaattctcacattcccacctctttgtattattatcatttaggaatagggatgtagkttctctttgactacttcctgctcactgggggtggtgcatgggggaggtggccttcctctggtgatgaggtcattcattgttgctatagcaggaatgcctc

SEQ ID NO: 422995 - DNA, 201 bp, Homo sapiens
agtgcgataaggaagaggaggaaagatgatttattaggggagatggaataatgtttcagaatatatctatatacaactatatatattttatatacatatayaactatatatattatatatatatagagagagagagagagggagagttttgttttgttttgtttttaagagacagggtctggctgtttcactctttgccca

SEQ ID NO: 422996 - DNA, 201 bp, Homo sapiens
attgcactccagccaggtgacaagagtgaaactccatctcaaaaaaaaaaaagtgatatggcatagggttaaagaaaagtgaccctcaaggaatatgatakacaagtttatttggtactattttcgtatataaacaagctggaaatcaatagcaactcaatgttgggtaaaggaatcaccacttgggaattgttgggataa

SEQ ID NO: 422997 - DNA, 201 bp, Homo sapiens
aactagtatatgggactcaaatccacgctgccttgctccaaagctcacattctttccaaacgctagactcttattttttgattttctcatatagctgctgyagaagcaacctacagctccatccttctatgcagctttgggttgcctttatagtcctctgactatatttataaattggtagctatgcacatatatacagcc

SEQ ID NO: 422998 - DNA, 201 bp, Homo sapiens
tctctacaaaaaatacaaaaaattagccaggtgtggtaacgtgtgcctgtagtcccagctacccaggaggctgaggtgggaggatcgctgtgttgcccacrttggggtgtagtgactgatcatagcttactgcagccacaaactcctgggcttatgtgatcctgccacccagcctcttgagtagctagcactacaggtggg

SEQ ID NO: 422999 - DNA, 201 bp, Homo sapiens
tcactaaggtaggaaacacagtcaccaaggtggaaaaatggcatcactattgttaattctcacattcccacctctttgtattattatcatttaggaatagrgatgtaggttctctttgactacttcctgctcactgggggtggtgcatgggggaggtggccttcctctggtgatgaggtcattcattgttgctatagcagg

SEQ ID NO: 423000 - DNA, 201 bp, Homo sapiens
taaatctgtacttcctggaacagaattcctggcataactttaggcagactaaatgggaatgaacatgtgtgatcattacaacactgattttttttttttamaaaattaatttttgttgaactggggtgaggggtgagggaaggaggggaaattggtgctctaataagatttacgtatccaaatcccatacccagagtcaga

SEQ ID NO: 423001 - DNA, 201 bp, Homo sapiens
caaacctctatttggttttagagaaacttatataccattggcttatatccaatttgcggatatctagaatgccatttcaaacattctcctactaagtcagkcctcctcaatcttctacttgtacagtttaactgctggaactagatgcaggatttaggcctagtaaatttcttcttgttgattttagcccactgtttcagt

SEQ ID NO: 423002 - DNA, 201 bp, Homo sapiens
acaactgtacagtcctaatctcagggctatggttttctagcctccacgtgcatgacagagagctcaccacctcatacaggtagtcccattcacctttgaasagttttgtggcaagttcttaataataagtaaggtctcctaggtaacttctagtgtgcaacttctacccactgaccctagctctgctttccgaaggataag

SEQ ID NO: 423003 - DNA, 201 bp, Homo sapiens
gggactatccttggcttcatatgatcgactggttccagaaccactgaaattgtgtgacacatctatgatcagtgtcaagactagggagggcagaagagaaytgccaagtgaagtggcacctggatctgatgtactatctgcagtagcccttcctccctccccagctctcttattaagggtcaaagacttctccccatccct

SEQ ID NO: 423004 - DNA, 201 bp, Homo sapiens
ctactaaaagtacaaaaattagccaggcgtggtggtgcacacctgtagtcccagctactcaggaggctgaggcaggagaattgcttgaatccggaaggtaraggttgcagtgagccgagatcgcactactgactccagcctgggagacagagtgagactctgtctcaaaaaaaaaaaaaaaaaaaactacaaatcaaaggc

SEQ ID NO: 423005 - DNA, 201 bp, Homo sapiens
cttgaacaatgaacattctgaattctgtaaaatgggataggagttagagaagagggactaagcttcatgactgctgggtcccttccagttccagcgctttrtgatccttaggaattaaaaacctcaaagcctcaaataacccattagaaaatgggtcagtgtgaaaaccatggagtcctatatatcccaattcatttgacc

SEQ ID NO: 423006 - DNA, 201 bp, Homo sapiens
gtctgtcattaaaaagtaataatcatggcttttatgaaacatttgtattataaaagggatactgaccttaaaataaagcagtactatggaaaggatttccrttcactgtaaaaatcatcatcattcatggtcttgataatataagggcaacacaggacaacaatggctttatctgttagaaacagataaagaggtagtctc

SEQ ID NO: 423007 - DNA, 201 bp, Homo sapiens
gttcccggtttacagataatctccaacagaaaaagactaacaccttgccttcccaccagttcataggacccaaagaagcattatctcttgcttcaaaaccyagccacttatcagttatgcaaatgaacctcctggttctctcatcctctacagagcaatctaattaaacagcaacatctgcaaacccagaatgctgacaaa

SEQ ID NO: 423008 - DNA, 201 bp, Homo sapiens
taccagtaataaccaacttagaaaatgtaattttttaaaaaaaaccaattacaatagcaataaacactacagggtaactgtggaaaaaatcctacaaaatktgtaaaactgtcagatgaaagtacacaattatattaaaaacctccaaaaataacatgaatggagaaatatattatgttcacaaatatgaatacttgatgg

SEQ ID NO: 423009 - DNA, 201 bp, Homo sapiens
gggagtatgatgacaattcaccaaggcacagaaaagatgttttctcagtatcataaactatatgacaaaaaggaggcaagtactgttaaagtacttgggatttttttttttttataaatacggacatacctggttttattgtgcttcacttcattgtgctttgtagatattgtggggtttttgttttttttttaaataaat

SEQ ID NO: 423010 - DNA, 201 bp, Homo sapiens
gttacagtgtataaacacaaatatatacacacacagaaccgtctatctgtgtcttggagattcagactagtaatttgtctaatgtgtgcaaactccttccrtgggcagaaggactgctactgtgtgcccagatgggtacataggacaaattatgtttactcaacttcagagaaaccatgccaaaatgttcttcccaaacaa

SEQ ID NO: 423011 - DNA, 201 bp, Homo sapiens
agattgcgccattgcacttcagcctgggcaacagagcgagactccacctcaaaaataataataataataataaaataatctattccttataagcagggcayggtggtgcacttctgtagtcccaactacttgggaggctgaggcgagagaatcacttcagcccaggaattcaagtccagcctaggcaacatagcaagatcc

SEQ ID NO: 423012 - DNA, 201 bp, Homo sapiens
ggcagctgtagcaatctggcttttcaacattttcccttttgcttatgcttccatttttaattatttaacttatttagcagctatgccaagagagaggaagrtaaaatttcgcccccaccgtacagacagaatcatggcagttacatttcaatgaagcttctgagaaaaaaagcaatcttcaaaaaatgcccaaaagagcaa

SEQ ID NO: 423013 - DNA, 201 bp, Homo sapiens
gtggaactaaggtattgtcatcagggatataacgatcatagctgcttacaggtggtatatgatctgaagctatgattccttctccacaaaatggggataaractatcgccttttagttctgctatcaagattaaatgagataatagatacataactttgtaaattgcaaagtggtctacaagatttagatatgcttattat

SEQ ID NO: 423014 - DNA, 201 bp, Homo sapiens
accaaaacttctggaaaaagaaaataagctgtaatcatcaaatgctagggataggaaacaaacagacgataatttcattcctcagctgttaacactgtttyttctctcttcacaagttgctttcatttttatttttttttcagacggagtctccatctattgcccaggctggagtgtggtggtgtgatctcggctcactgc

SEQ ID NO: 423015 - DNA, 201 bp, Homo sapiens
tcttctaggatttttatggtttcaggtcttatgtttaaatctttaatccattttgagtttatttttgtgtatggcataagataaagatccaattttattgttttttttttttttgagacaaaaatcactttgtcattcaggctggagtccagtggcatgaacacagctcactgcagcctccgcttcccacactcaagtgat

SEQ ID NO: 423016 - DNA, 201 bp, Homo sapiens
agctagttctcaaaggcacctgatttttttagtggagagtggcatttaaaaacttacatctgggtgttgtgtgatcattgttattggaggctcattcgtcrcaggccttctcagtaatgaagttaagaaagtatgtttgagggtgtatatttatatccatttctgtatctcaatgttaaaaaccatgggtttacactaata

SEQ ID NO: 423017 - DNA, 201 bp, Homo sapiens
tcccagaagatgtggggtcaggttttatatgggtttccttaacaacagcagatttctggggacccttgctttatcacctctcatcaaaatatgtgagctcyaatatgatacaataacaaaacaaggaagtttttagccccaaatgatagctatttatatataatttctgagaatataaaattcagttagactacctgaata

SEQ ID NO: 423018 - DNA, 201 bp, Homo sapiens
agtgtaataaaaacaagcagcaagaaatgagactgtgttgtaggacagctcctctccaagatcttaggtgctttccctgaatcaggaaatggcatctgtgrcccaccctttccctgatgttttggtcatggagaaaggcttgcttggtggggtagacttctaaactgtcatgacagcctatctgagagaactctctccatc

SEQ ID NO: 423019 - DNA, 201 bp, Homo sapiens
aggcaggagaatcacttgaacccggtaggtggaggctgcagtgagccgagatcacgccattgcactccagcctgggcaaaaagagtgaaactccatctcaaaaaaaaaaaaaaaaaaaaaagaaaaaagaaatatctgagagtgggtaatttacaaagaaaagaggtttaattgactcagttctgcaggctataaaggaaa

SEQ ID NO: 423020 - DNA, 201 bp, Homo sapiens
ctaacatactttgcattttcctagtatctacaaggccagatatttttatcttttaattttttgaatttttaaaatctaatttttttaattaattaactaatttttttttttttttttttttttttgagacagagtttcgctcttgttgcccaggctggagtgcaatggcgtgatcttggctcaccgcaacctccatctccc

SEQ ID NO: 423021 - DNA, 201 bp, Homo sapiens
ttgcactctagcctgggtgacagagtgagactgtctcaaaaaaaaaaaaaaaaaaaaaaaatccaaaagaatttacaattaaaataaagaggattcagcarggttgctggatataagatcaacttgtaaaaactgacagtgttctcttacataccagtaataaccaacttagaaaatgtaattttttaaaaaaaaccaatt

SEQ ID NO: 423022 - DNA, 201 bp, Homo sapiens
ggctttgctttagaaaacagattttgtggagggttttataaccctcttctcccaaaaaatgcatttaaccttactcatctggaacaatggaagacagcaamagacagggagaaggctgggattagtatttagtgatatcttaattttaaatgtttacagtgaaatgaaattcttgttactatcaatgacaacacataagag

SEQ ID NO: 423023 - DNA, 201 bp, Homo sapiens
tgctgagttagaggtgctggaatgaacccaagtagagacatgtagcaggaaattgggtatacataccttgtgcttaggaacacagcctgaactcagtcaayttataaatttagtagtcgtcagtgtttaagtggtagtggaaattgaggccacaggtaaaatcaatcagaaagaaaacacagagtgagaaatgagaagttc

SEQ ID NO: 423024 - DNA, 201 bp, Homo sapiens
tttttgatagagggggggtttcaccatgctgcccaggctggtctcctcctgagttcacgtgatctgcccaccttagccttccaaagtgctgggattacagscatgtgccatagcgcccggcaggtttctatgagtttatatgacaccagataggacatctccttaatctaaaagccattaaaaaatgggaaacttacccac

SEQ ID NO: 423025 - DNA, 201 bp, Homo sapiens
aactcctgacctcaggctatacagctgcctcagcctcccaaagcgctgggattacaggtgtgagccactgtgcccagcctcatactaaagtttctataggrgaggggttggggaagtgctagcaggttggaactgcagggggctggggaaggatgtggtaagggccaggctttgttgtggtcagggttgttactctctgtt

SEQ ID NO: 423026 - DNA, 201 bp, Homo sapiens
aagcactgtgcatgtattctttaatcatcacaacaaccttatgaggtaggtaccacaatcccgcccacttaaaaaagggaaaatcaaagtacagagaaagyaggcaaacttgcttagtaagtgactgagctgggaattgaacccaagcagtttaattatagaacctgaatatataatcattgtgccatatggcattttcca

SEQ ID NO: 423027 - DNA, 201 bp, Homo sapiens
tccctcacaaccacttccctcacaacaataaaaacctcacaccttagctataatttacactcctgtgccaacagagagtgataacaggtttccacaaggtwcttgtcatctgttacctccatgggtggtattatttgcacttaattgtgttaatagttaagactctagtaataaaaataaccttcaaaaggtattctcagc

SEQ ID NO: 423028 - DNA, 201 bp, Homo sapiens
ggctcactgcagccttaacctcctgagctcaagctgtcctcctacctcagcctcccgagtagctggggactacaggcacatgccaccatgcctggctccctttttttttttttttttttttggtagagatatggtcttgctatgttgtccagcctggttttgaactcttgggttcaagtgatcctcatgcttcagcctccc

SEQ ID NO: 423029 - DNA, 201 bp, Homo sapiens
ataattttaaaaagatgttcttagacatgctatttaaaacagtgaaaaactagaaatcatccaagtatccctcagaaagagaacggttataaaaattaggwtatatgaataagacagacttcaaaacaacaattaagaacatatccagaagccaggtgtggtggattgagcagaagaggacgggaagatcgcttgagccca

SEQ ID NO: 423030 - DNA, 201 bp, Homo sapiens
cacattaatcatgcattaggagtcctaaattgaataacacaatatccaggaaaataccctggacacaaggcatccattacagacagaagtgatctctcaaktcgtgctgcatacatatttggagagtaagtgcacttcagggagttctgctaacttaaaaaaaaaaggatgaaagaagaagacatttgcatgctgcatgga

SEQ ID NO: 423031 - DNA, 201 bp, Homo sapiens
ggattgagcagaagaggacgggaagatcgcttgagcccaggagttccagaccagcctgggcaatatagtgagatctcatctcaaacaacaacaaaaatccwctgacaaataagaacaattaatttggaaaaatgtaaataaagttttgtttttattgtattgtagtccttttttctttgaagttacttcagttcatgaaaa

SEQ ID NO: 423032 - DNA, 201 bp, Homo sapiens
tctatagaacagaacatgtttcatatagtcatttaataaacgttcttttgaaatggagtctcgctctgtcgcccaggcttgagtgcagtggtgcaatatcrgctcactgcagcctccacctcccaggctcaaggaagttcacgcaattctcatgcctcagcctcccaagcagctgagattacagacattcaccaccacacc

SEQ ID NO: 423033 - DNA, 201 bp, Homo sapiens
tggaatggtgcagcctctgaagaaacccattcagatctctgccctagaggccatgtgtattagatgtgcttctgtacaaccgggaaggtggataggtgaasgaaggagtagggtgtgaccaaggagggacatatgcctcctttaatgagatcctaaattcaatcctattttcctcaataaaaagggagcaggccattgtct

SEQ ID NO: 423034 - DNA, 201 bp, Homo sapiens
gatggaaaataatcagatggccaaagcaagacatgcaaaagactggcaaatactttgtttttttttttgagacagggtctcactctgttgcccaggctggrgaagtgcagtggcacagtcatagctggaactcctgagctcaaactatcctcctgcctcagcctcctgaacagctagaactacaggtgtgcatcaccacgt

SEQ ID NO: 423035 - DNA, 201 bp, Homo sapiens
caatttggggattagaaacactgtaaacgccaaaccactggatctgcatcagcaaaatgaatgctctgtgccctaccaccctctccccactgactcaattytgaattcaaatctcatgcaagtaaatatgattaatggaatcggaatcatatcaggaactctagaggtaaggaagcctaactagtactttttactttccag

SEQ ID NO: 423036 - DNA, 201 bp, Homo sapiens
actgagcctctcttaacctcagtttcacctgcagctcctaaataatgtgggcagaggccaagcgttcccattcaatggatctgagtccccagagtgagctyagcttgggacctggcatcctgagatgatgaagagaattttgacaataaggcacagctgggacatccttaccagcgacagcaaaccccagattctaaaatg

SEQ ID NO: 423037 - DNA, 201 bp, Homo sapiens
gtctgggagaaaggacctgcagcagcatgaacctggcctgaccctgtgttatgtgcatcagcaagagccaaatgcctaaagcagccagaaagtaatgccaygctcccaaaagttcagagtgacaaaacaaaaaaaaaaaaactaaacaacaacaacaaaaaactaaataaaaagtccaagcttcaatgattatgttactct

SEQ ID NO: 423038 - DNA, 201 bp, Homo sapiens
cccaagtcctcattctatgaaaaagttctgtgctacctgggtagaatgatcattacaagagaaatctgccagagctgagctgcacgtgagggaaagcaagmtacctggccaagccctgtcgatgcccagattcaattaaatatcatcaggaaagggctattcagtttgtgcatttctcatctcttctgctctcacgctttc

SEQ ID NO: 423039 - DNA, 201 bp, Homo sapiens
tgaacctggcctgaccctgtgttatgtgcatcagcaagagccaaatgcctaaagcagccagaaagtaatgccatgctcccaaaagttcagagtgacaaaamaaaaaaaaaaaaactaaacaacaacaacaaaaaactaaataaaaagtccaagcttcaatgattatgttactctctgtcacctgactcttcaatgaacagg

SEQ ID NO: 423040 - DNA, 201 bp, Homo sapiens
tgttaaaattggctgtttatctttttcttattgctttgcaggagttgtttatatattgtggatctgacttctttattaaactgtactgcaaatattttctaaaaaaaaaaagtaaacgggcaaagatcttgaatagacatttcttcaaagaagatatacaaatggccaataagcacatgaaaagatgatcaacatcactaa

SEQ ID NO: 423041 - DNA, 201 bp, Homo sapiens
tgctcagtcccaggatacaaggaaagaattcccaagtcataccacagcagaagactgaactcttgatcttttgttccaaatggggtccacccacagcctaycccatttcagttgatggcaactccatccttctagttgctcagataaaaaaccctggaatcatcctggagtctttactctctctttcatactacacatcta

SEQ ID NO: 423042 - DNA, 201 bp, Homo sapiens
atcacgatcagtgacaaatcacgtcacttctttcacagtctgtcggtgactagtcactgtgcatctgttattcagttaatgcacaaacaacaaagtgtgcrgtggggttgcctccttgtcttccaatgatgaaacccaaaaatgataactgaaagagggaactggctaacgaagatgaaaatgcagcaaagtaacaaaaag

SEQ ID NO: 423043 - DNA, 201 bp, Homo sapiens
tactgtgattcagaatcaagagaatgagtggtagagaaaggcaggactgaagagctaagaagaaagaagaaaatattcctgcttgctcagtttctgaactyacctttgtagagaatctgagtaatgggcaaggaatcgagaaaaattagagaataagccaaaaagactaagtctgcccatctaataaagagttggggagga

SEQ ID NO: 423044 - DNA, 201 bp, Homo sapiens
ttttttttttttttttgagactggctctgtggcccagcctggagtgcatggtgcgatctcggctcactgcaagctccgtctcccgggttcacgccattctyctgactcagcctcccaagtagctgagactacaggcgcccgccaccatgcccagctaaatttttttttgtatttttagtagaaacagggtttcaccatgtt

SEQ ID NO: 423045 - DNA, 201 bp, Homo sapiens
aggagaatcacttgaacctcggaggcagaggttgcagtgagctgagattgcaccactgtactccagcctgggcaacagagcaagactctgtccccactccmccagaaaaaaaaaaaaaaaaaaaaaaagagggcaggtaatcatgaatattcttacacttgaataattttaaaagaaaaaaagctcatgagattgccaaaa

SEQ ID NO: 423046 - DNA, 201 bp, Homo sapiens
ttgcctcacccgggaagcacgaggggtcaggggatttcccattcctagccaagggcagccttgagagactgtaccgggaggaacagtgcactgcggcccaratattgcacttttcccatggtcttcacaaccggcagaccatgaaattccctccagtgcctggctcggcaggtcccacccccatagagccgagcaagctaa

SEQ ID NO: 423047 - DNA, 201 bp, Homo sapiens
agtgcctggctcggcaggtcccacccccatagagccgagcaagctaagatccactggcttgaaattcttgctgctagcacagcagtctgaggtcgacttaraatgctcaagctttgtagggggaggggcatccaccattgctaaggatggagtaggtggttttgccctcacagtgtaaacaaagcctctcgtaagtctgaa

SEQ ID NO: 423048 - DNA, 201 bp, Homo sapiens
atctcatctgcaaagacacacgtaggctcaaaataaagggatggaggaatatttaccaaggaaatggaaagcaaaaaaaaaaaaaaaaaaaaaaaaaaaaagcaggggttgcaatcctagtttctgataaaacagactttaaatcaacaaagaccaaaagtgacaaagaagggcgttacataagggtaaagggatcaatgc

SEQ ID NO: 423049 - DNA, 201 bp, Homo sapiens
aaaaaaaaaaaaaaaaaaaaaaaaaaaagcaggggttgcaatcctagtttctgataaaacagactttaaatcaacaaagaccaaaagtgacaaagaagggygttacataagggtaaagggatcaatgcaacaagaagagatagctatcctaaatatacatgtacccaatataggagcacccaggttcataaagcaaagttc

SEQ ID NO: 423050 - DNA, 201 bp, Homo sapiens
ttttaaaaatctatgttttatattttatgtttatatatcataaaacttgagtagccccatgctactttgaggcatttaagaaggtgacatcaggtactttktattcatcagctgggaggtttttattttgtcctgaagccaactaactagaatgactaaaaaatgttatacatgtgctcctgacagatcttcctcgtagta

SEQ ID NO: 423051 - DNA, 201 bp, Homo sapiens
catttttgtaacttgtttggagaaatgtctattcaaatcctttgcccttttgttattgggctatcttttcattattgagttgtaagagttcttcatatatyctggatatgagtcccttatcagttacatgatttgcaaatattttctcccattttgtgggttgtctttttactttcttggtgacatttgcagcacaaagtt

SEQ ID NO: 423052 - DNA, 201 bp, Homo sapiens
gtgcatcaccacgtccagctttacaaatacttacaaaagaatatctggaaggtgaaggcccaaaatgagctaaggctcatgaaaaatatggagggcaataktaacagcgcttcttagaggcatagaaagtgaggagagtaagggtgtggtaattgtttaaaaaataaagctaggtaagaggatagagaggtatattttatt

SEQ ID NO: 423053 - DNA, 201 bp, Homo sapiens
aaacttgagtagccccatgctactttgaggcatttaagaaggtgacatcaggtactttgtattcatcagctgggaggtttttattttgtcctgaagccaaytaactagaatgactaaaaaatgttatacatgtgctcctgacagatcttcctcgtagtaaactctctctgaaggcactgcttggatgaactaagtgagaaa

SEQ ID NO: 423054 - DNA, 201 bp, Homo sapiens
agaatatctggaaggtgaaggcccaaaatgagctaaggctcatgaaaaatatggagggcaatagtaacagcgcttcttagaggcatagaaagtgaggagartaagggtgtggtaattgtttaaaaaataaagctaggtaagaggatagagaggtatattttatttttattcttttgagacagggtctcgctctgtcaccca

SEQ ID NO: 423055 - DNA, 201 bp, Homo sapiens
cagcctccacctcccaggctcaaggaagttcacgcaattctcatgcctcagcctcccaagcagctgagattacagacattcaccaccacaccgactaattyttgtatttttggtggagacagggtttcgccatgttggccagcctggtctcagactcctgacctcaagtgatctgcccgccttgatgtcccaaagtgctgt

SEQ ID NO: 423056 - DNA, 201 bp, Homo sapiens
ggcggatcatgaggtaaggagttcgagaccagcctggccaacatggtgaaaccccgtctgtactaaaaatacaaaaatcagccacgtgtggtggcgggcayctgtaatcccagctactcaggaggggaggcaggagaactgcttgaacttgggaggcagaggttatagttagcagagatcgtgccactgcactccagcctg

SEQ ID NO: 423057 - DNA, 201 bp, Homo sapiens
tccgcccgcctcagcctcccaaagttctgggattacaggcgtgagccaccacacctggcctgaaattttaaacatagtggttctacccttactcacctacmtaaagccttagggtgtctatgatttggatggatttggttttctgaagcaaagcaagagccacctccacttccacatagatgagcagagcctggggcttct

SEQ ID NO: 423058 - DNA, 201 bp, Homo sapiens
gatcaggcacattgtaggatatttaaacaaacaaaaggatatactatgaacagtaagtctcccttccaccctggccaccctgtgccccagttcctctcccyagaagcaactgttatcagcttcttgtatatcctttttttttttttttttttgagatggagtctcgttctgtctcccaggctggagtgcaatagcgcagtc

SEQ ID NO: 423059 - DNA, 201 bp, Homo sapiens
ttgtttgactcaactataccagagtaagtcagataaacatactaaagaaaaaaactaaagactttacatttttaacttttccacttagaagtagtctgctkttaactcagcctctaatgctctttacgcatccccatgccatttttgcttttggcaatttttttttttttttaggagacagcgtttccatctgtagcccag

SEQ ID NO: 423060 - DNA, 201 bp, Homo sapiens
aaaggatatactatgaacagtaagtctcccttccaccctggccaccctgtgccccagttcctctccctagaagcaactgttatcagcttcttgtatatcctttttttttttttttttttgagatggagtctcgttctgtctcccaggctggagtgcaatagcgcagtcttggctcactgcaacctccaccacctgggttca

SEQ ID NO: 423061 - DNA, 201 bp, Homo sapiens
aaaatggtgaaaagctaggccgtttataacccataaccttctacttcagagacctgcctggatgccaagggtgaagtgggaggagaatgacttgcaggaamctgtcaaaacatctggagcctgcacagcatccatcgctggcctgtccccagtggtctctgcagctcagttcagatgatcatctctggcgggtctatgtct

SEQ ID NO: 423062 - DNA, 201 bp, Homo sapiens
ttaggagacagcgtttccatctgtagcccaggctggagtacaatggcacaatcatagctcattgtaacctcaaactcctgggcttacaaaatcctcccacytcagccccctcatgtagctaggactacaggtatacaccaacatgccagcctaaattttaaattttttgtagagacaaggtcttgctatgttgcccaggat

SEQ ID NO: 423063 - DNA, 201 bp, Homo sapiens
cttcactaagatgaagttagtaaggcatatataccagaaaaagatctgaatgtcagagtagataactgaccaggaatcagaaaattagcagtgggcctgarggaatgcaggaattgactgaggttgtcctcactttgcatggttcttagatgaaagaatgtcagtccccaaacaacagggttgaaatttcagttgccatgg

SEQ ID NO: 423064 - DNA, 201 bp, Homo sapiens
acctggttcaaatttcatctcctttgaaaaacaattattaattttggaatccctccccatttcccaaactccaacccaaatctgcattgccacaacatatmcccttgtcttagctccaaattccatgatgctttatagtttgttatttacgtgtttgcaatccctaagttgtaagcccttcgacaacaggggccttgactt

SEQ ID NO: 423065 - DNA, 201 bp, Homo sapiens
tatttgaacagttgtttcataaatgcagtgttcttgtaccagtgaaactgacagggattaattgctggtatcactaagaaagtttagaggaagaggatttkgggttctaaactaaggtttgacaggaaaaattaaatgcaaacttagattaaacatacatttcaaaacacaaaatttggaagtaaaatccgttttggtgta

SEQ ID NO: 423066 - DNA, 201 bp, Homo sapiens
gggagttttttggttcagggctagctccagaagcccaaagggtctcttttttccccttcttccaggacatgaagcagtccaaaggtctctcttaaaaaggkgttagtaacctttcagaagcagtgtgtcccatcttccttggctccctcatggcttggccgtttgcacccaggcagcctgcctgaccagccttgtggagcc

SEQ ID NO: 423067 - DNA, 201 bp, Homo sapiens
atcttatgcaaatagaaaaagctttacagaatagtatattcaacccctacccaaacccgcatccccatcttctcctctatacactgcctccggaaacaagsactgtgtgcacaagtcaaacagatacctaagcccccagtggacagcagcttaggcaccagtgggcaggcacagagcaggcagagggtaagcactggagca

SEQ ID NO: 423068 - DNA, 201 bp, Homo sapiens
taaaggtgtgagccaccatgcccagccctcttgtatatcctttatgtgatgttttatacacaggcaaacctacatacatatacatctcctcttttaaaaayacattttgtaacatatttttaagctcttttctcccacttagggtatcctgcaaatccttctatggcaatatatatagatatgcctcacagtttttaactg

SEQ ID NO: 423069 - DNA, 201 bp, Homo sapiens
ggtgataaaaatgttttaaaattagatatcttgatggttgcacaactctgaaaagatactaaaaactgttgaaatgtacaccttaaacagatgaactttayggtatgtaaattgtatctcaaaaaagcattatgctaagtgaaagaagccagactcaaaagattacatattgtatgattccatttataacactgtggaaaa

SEQ ID NO: 423070 - DNA, 201 bp, Homo sapiens
gcagtataggagggttctagtttctccacatcctcacaagcaaggcttgtctatccatttaattatagccatcctaatgggtatgaggtggtatctcactrtcgttttgattttaattttccctatgactaatgatgtggaacatcttttcatgtgcttattggccatttttgtaacttgtttggagaaatgtctattcaa

SEQ ID NO: 423071 - DNA, 201 bp, Homo sapiens
tacaccatggaatactatgcagccataaaaaagaacaaggtcatgtcttttgcaggaacatggatggagctggaggctattattcttagaaaaataacacrgttacagaaaaccaaataccacatgttcttacttataagtggtagctaaatgataaaatataattttgctaattatagctaaattataagaacctataaa

SEQ ID NO: 423072 - DNA, 201 bp, Homo sapiens
ctgctctgaggttaaagaaaaagaaccttgttaattcagtgcatggacacatttggtaggcacttaagaattgagtactggctactagaattgcctggctrtattaagtcttggtctctctcttttttaaaatctttaataccttctctttgcctttggtctctggattccagtcagagatagtgcttcaaactcctccac

SEQ ID NO: 423073 - DNA, 201 bp, Homo sapiens
gctatataaacactaaagcaatcgtagtagcataagcccactcatttaacaacctaaaacaaatgctacagtgtattactgaaggatcaatctagtacggkgtatcttttttttttttttttttagacagagtcttgctctgttgcccaggctggagtacaatggtgtgatcttggttcactgcaacctccgcctcctggg

SEQ ID NO: 423074 - DNA, 201 bp, Homo sapiens
taggagtggttagaaagggcattcagagtgtaaggaaggggcagaaggagaagagcagaaaggagaaatgtagtatttgtcacccattctctttgataagygaatacaatgctgttgtatcctaaatatgagaacagctgactttaatatcaggtcaaagcactatctgactaataggaaatgcagttattccttcagctc

SEQ ID NO: 423075 - DNA, 201 bp, Homo sapiens
aaataaagaaaccagaaaatcaacttttataaaaagcaacacaacacattgagaaaactgacaaaagtttcttgtccaaaaatgtaaaagaaaacaaacawgcaattacataagggcgacacctaaaattcactcataagtggtcaaagagagaaaaagataaattttgaaaaagaaaatacaaatgggaatcatctgaga

SEQ ID NO: 423076 - DNA, 201 bp, Homo sapiens
acataagggcgacacctaaaattcactcataagtggtcaaagagagaaaaagataaattttgaaaaagaaaatacaaatgggaatcatctgagaaaatacwatgttagaaattaaagaaatgctaattaaaatagctttaaagtactaccgcttaactagcaagatgtaaattacaaaatctgaggctgactgggctatat

SEQ ID NO: 423077 - DNA, 201 bp, Homo sapiens
tttataagtagataggttttgacatatgatacttgagaataaaatattgacataaaattttaaaaagtaactggatctctaatcaagtgagaaaacattckatagcaattctaaaccataaacccaaacttaatcataaacacatttggttagaaaaactaatttaatcactttttttatttttaagaccagatcttggtc

SEQ ID NO: 423078 - DNA, 201 bp, Homo sapiens
taaatgcttagaatagtgcctgaagcatagaaagtgctcagtaaatatcagctgctatcatcatcatcatcatcatcatcatcatcatcatcatcatcatyccaggcattgaagaaggagtaaattgcatttaggaataaaatttggtgttccagcccagcaatgttcaaactctttggggaatgcaaataaaatcaaaat

SEQ ID NO: 423079 - DNA, 201 bp, Homo sapiens
tcgactcactgcagcttccacctcccgggttcaagtgattctcctgtctcagcctctcaagtagctgggactacaggcatgtgccaccacacccggctaawttttttttttttttaagtagagagggggtttcaccatgttgtccaggctggtcttgagctcctgacctcaggtgatccacccgccttggcctcccgaagt

SEQ ID NO: 423080 - DNA, 201 bp, Homo sapiens
agtagctgggactacaggcatgtgccaccacacccggctaatttttttttttttttaagtagagagggggtttcaccatgttgtccaggctggtcttgagytcctgacctcaggtgatccacccgccttggcctcccgaagtgctgggattacaggcatgagccatcgtgccaggccaactaatagcttcttaatcacagt

SEQ ID NO: 423081 - DNA, 201 bp, Homo sapiens
aggcataccagaaggaggttaaaacagatgctaaattagcccatctatcatacatgccatatccatcaaaatgacaataaattatatgattatatgatagyaattatttagaataaatatttccaaggactataaatggaacagaaacagaaagcagtcagtgaagcctaatgggttccatatctgaaagcaagcaaagat

SEQ ID NO: 423082 - DNA, 201 bp, Homo sapiens
cgatgtcccaggctcaagtgatcttctcacctcagcctcttgagtagctgggaccacaagcgcgcaacacctcgcccagctaatttttgtattttttgtaraaacagggttttgccatgttgcctaggctggtgtctaactcatgggctcaagtaatacacctgcctcagcctcccaaagtgctgagattacaagtgtgag

SEQ ID NO: 423083 - DNA, 201 bp, Homo sapiens
ataaaaaaaataaggccaggcgcggtggctcatgcctgtaatcccagcactttgggaggccaaggcaggcggatcacctgaggtctggagttcgagaccarcctgaccaacatagagaaaccccgtctctactaaaaatacaaaattagccgagcgtggtgggtgcatgcctggaatcccaactactcaggaggctgaggc

SEQ ID NO: 423084 - DNA, 201 bp, Homo sapiens
agttacctacaggaaccagatggaggcaaccacaaaactgataggctgggtaggatatgatgatattggttaacaactgtcattcgagttaagctttcaarccaaaattccaaatacatgaaaaaaattaacaccacgattaccaataaaatcaactatttggtagatgaattcactcaagacaaaatgaaaataataaaa

SEQ ID NO: 423085 - DNA, 201 bp, Homo sapiens
ttaaatatgtcacctattatcttctggtttgcaaggtttctttctcttctttccttctttctttgcttccttttttatttctttttagttaataaattttkttttttttaagagcaatttggggttcacagcagaattgagcagaaagtacagagttcccatatactcccctaccccctacatgaaacccacccccaacta

SEQ ID NO: 423086 - DNA, 201 bp, Homo sapiens
tataatgctacttccaaaggaaaaccaaattaaacttaagaaaaccacttccatttaattaaaatgccttttccagaaattcaacctgctgtaaatatgasgttctcctatgaactacaaaatctttcctttcttattttaactctcatgtatacatatatatgtaacatacatatatgtgtgtgcttctatatatatgaa

SEQ ID NO: 423087 - DNA, 201 bp, Homo sapiens
taggaagaaaaggttgatgtcttcctgttcctggctgatactgcttccttcagatcagcttgccagttggttttactggtgatactggaccctctccagtratggaaagagagaggcagaaatgtggagaaactgaggtagagaccaggagtgtcaaagcaacagggacaggaggtaacgtgaagggccacagccacagag

SEQ ID NO: 423088 - DNA, 201 bp, Homo sapiens
ataacagtcgtccaccataaaaagaccatttgagttcctctagcccaagtccaataaggtaattaggtatttcagaaaaaaaaatgacatatataaagacrtaacctaatgatactgaaattcatataaagaatgtattaacagaagacagtagtataaatggagtttttagaaagaaggagggggttataaaaagaattt

SEQ ID NO: 423089 - DNA, 201 bp, Homo sapiens
tgaagggaaagtgatataaatacaatcaggggacctagcagctgggtgtacttcctttgtccaagatacttataacctaaattaaaattaaaaggaatttytaaataaaacagcagttttcaatcactaataaattttccctcactctcaaaaccactcagcctttaaaggtttgctttgaggaattagagcaaggactaa

SEQ ID NO: 423090 - DNA, 201 bp, Homo sapiens
ctgactacttaccatgttcacatattattggtcattttttttttgcagatgcactattctgcaaattaaaatcagcctaaggatcagggaccacatagaaratagattgtgacatactcataaatagcaccatacaataacagaaattaatgatgttagcctattcactagcaagataagaggcaacagacagtaaatttt

SEQ ID NO: 423091 - DNA, 201 bp, Homo sapiens
tgatgaatactaactactgtgatttgacattcagacaaaataaaaactcttatttctgaagaagaaaagaggactaagaagataataaaaatcagtttttyttaacagtcttccaaattccgacatcatttttatgacctcttgtggtatttttaatgtgtcaatgatcactgaatacagcactcatcaccaatcttgcca

SEQ ID NO: 423092 - DNA, 201 bp, Homo sapiens
gaatagtgacaattttagaatttcttgatgtatatattgcttaaaaatatgaaagctaaattataattgttaccataactatgtctaagtgatattttaargcagtcattctatttccagccagttcattgatcaacttgttcaaactgcccaatttgctagttatgaatctttctcgtctactgagtattcaacactaca

SEQ ID NO: 423093 - DNA, 201 bp, Homo sapiens
aaatgttatacatgtgctcctgacagatcttcctcgtagtaaactctctctgaaggcactgcttggatgaactaagtgagaaatgtatgctgacctaagaraagcctctggccagagaaactgcgtcatatgtcacaaaaattaaaggaacaaatcctaacgcagcattgcccataatatgtactgagagggcacttgtca

SEQ ID NO: 423094 - DNA, 201 bp, Homo sapiens
aataatgaatatacagtacttagtatagtgtctaccccttagtaagcactcaataaatattaaggattatcactattggtactactgaataattataatgstaaagaggtcctggtaggactagggtttacaaaaatatatggcacagtttctcagctttcaagaacttacaatttagaaatcaattcaaaaagcccaaaa

SEQ ID NO: 423095 - DNA, 201 bp, Homo sapiens
tctcctcctcaatgctgcaggtggctccattgatctgccgggaaagcaacatcagctccaggctgtgctcagccacaggggtgggcagcacgctgtctgcrgggctgtaggcctcgtctgcaatcacagctactcgctcattgctatctgtccggctgcttctcacgtgaggcaggaaggtgtccccatgggaagtggaac

SEQ ID NO: 423096 - DNA, 201 bp, Homo sapiens
acctatcgacctcgtaagttcttttttaaagattctaaaacttaacagtttctaagtatgacgtacaacagtcaaaataaggaacagggtatgcctctcartgtgttggaactgcctgatagaaaagaacccactccacactaccatataaatgtttgtacctttttgctacttgttataacagcaaatgattctcccttg

SEQ ID NO: 423097 - DNA, 201 bp, Homo sapiens
tcagaatcatagaagcccccccaaagtaataattgggcctggaagttatttttatttcaaaaagcttatttgttacacaaatatcttttttttcttttttytgagctgcagctaaccaactgtaattttctcatattgaccagaagtcctggttggctttggtcagtaaaattaggaaacaaatgaattattatttaatca

SEQ ID NO: 423098 - DNA, 201 bp, Homo sapiens
tcatccaagtatccctcagaaagagaacggttataaaaattaggttatatgaataagacagacttcaaaacaacaattaagaacatatccagaagccaggygtggtggattgagcagaagaggacgggaagatcgcttgagcccaggagttccagaccagcctgggcaatatagtgagatctcatctcaaacaacaacaaa

SEQ ID NO: 423099 - DNA, 201 bp, Homo sapiens
ggtgttttcttaggttgtcaataagaatgttgtgcaagtcaaaatcaaaaccttactaaaactaggaaagaataactagctgggcattgtggttcatgccrataatcccagctactcaggacactgaggcgggaagattgcttgagtcctggcatttgagactgtagtgagctaggatcatgccactgcactccagcctgg

SEQ ID NO: 423100 - DNA, 201 bp, Homo sapiens
agaaaggggaaaaaatagaacagaagggagaaaaaaattgttgtgaccttaagccctgtctagtaccttgactcattccaatgtcttttcactgattttcyatccaatagcaccaaaataataagacttccagttccttctttcttttgtacctcataacctgacaaataaaacagtcttggaaactgttctggatattta

SEQ ID NO: 423101 - DNA, 201 bp, Homo sapiens
aagccaccgcatcaggcccatttgcattatttaataatcattttttcagagctaatacttttattcatacacatctacaatcaacatatattaagcccctyggtgacaccttagttactagctgtacaaagatatctctgctcttcaaacagttcacagtacactgagagacagacatgtgagaaaatattcacatttcat

SEQ ID NO: 423102 - DNA, 201 bp, Homo sapiens
ggagtctcgctctgtcgcccaggctggagtgcaggagtgcaatctcggctccgcctcccgggttcacgccattctcctgcctcagcctgccaaacagctgsgactacaggcgcctgccaccacgcccagctaattttttttttttttgtatttttaatagagacggggtttcaccgtgtcagccaggatggtcttgatctc

SEQ ID NO: 423103 - DNA, 201 bp, Homo sapiens
ggagtgcaatctcggctccgcctcccgggttcacgccattctcctgcctcagcctgccaaacagctgcgactacaggcgcctgccaccacgcccagctaattttttttttttttgtatttttaatagagacggggtttcaccgtgtcagccaggatggtcttgatctcctgacctcgtgatccgcccgtctcagcctccca

SEQ ID NO: 423104 - DNA, 201 bp, Homo sapiens
tcactgtaacacatgaaatatatttattcaaatcacattcctaaattatagtgacatgtaagtagaagctttggtaaaaaataaaaatttcattaaaaaawcgtaacaaaccttgaaatactcagacattattttaaccaaatgtaaggtatttacttaaggaaagagacaaactgttaatggtaaaagaaggcataaata

SEQ ID NO: 423105 - DNA, 201 bp, Homo sapiens
aaattatagtgacatgtaagtagaagctttggtaaaaaataaaaatttcattaaaaaatcgtaacaaaccttgaaatactcagacattattttaaccaaaygtaaggtatttacttaaggaaagagacaaactgttaatggtaaaagaaggcataaataaattaaaagttatacgtcaagtagataagactaagttttgaa

SEQ ID NO: 423106 - DNA, 201 bp, Homo sapiens
tttgggaggccaaggcaggcagatcacttgaggtcaggagttcaagaccagcctgggcaacgtggcaaaaccttgtctctacgaaaaatacaaaaaaaatyagccaggcatggtggtgcatgcctgtagtcccaggtgcacttgggctgtactgtgtggtctgaggcaggaagatcgcttgagcctgggaggcagaggttg

SEQ ID NO: 423107 - DNA, 201 bp, Homo sapiens
cactttgggaggccgagatgggtggatcgcttgaggtcaggagttccagaccagcctggccaacgtggtgaaaccccatctcaactaaaaatacaaaaatyagccgggcctggtggcacatgcctgtaatcccagttacttggtgggctgaggcaggagaatcgcttgaacccgggaggcggaggttgcagtgagctgaga

SEQ ID NO: 423108 - DNA, 201 bp, Homo sapiens
tcaagaccagcctgggcaacgtggcaaaaccttgtctctacgaaaaatacaaaaaaaatcagccaggcatggtggtgcatgcctgtagtcccaggtgcacytgggctgtactgtgtggtctgaggcaggaagatcgcttgagcctgggaggcagaggttgcagtaagcagagaccgcaccagcctgagcaacagagtgaga

SEQ ID NO: 423109 - DNA, 201 bp, Homo sapiens
cctataatcccagcattttgggatgccgaggggcccaacccaggctgagggcagatcacgaggtcaggagatggagatcatcctggctaacacggtgaaamcccgtctctactaaaaatacaaaaacaaaattagccaggcgtggtggcgggcacctgtagtcccagctactcaggagaatggcgtgaacccgggaggcag

SEQ ID NO: 423110 - DNA, 201 bp, Homo sapiens
gcaaggcaaatgctgcttcttgaaatggtcccaccatggaccctctggtcatccaacccaagacgcccccttgcctggctttatcttcactatattgtgtrgccacttcattgaatctcatcccagactttaacttttccatggcttccatgattttgccatgtttttcccatagaatgtgtctgacctttactgcattgc

SEQ ID NO: 423111 - DNA, 201 bp, Homo sapiens
aacccaggctgagggcagatcacgaggtcaggagatggagatcatcctggctaacacggtgaaaccccgtctctactaaaaatacaaaaacaaaattagcyaggcgtggtggcgggcacctgtagtcccagctactcaggagaatggcgtgaacccgggaggcagagcttgcagtgagctgagatcgtgccactgcactcc

SEQ ID NO: 423112 - DNA, 201 bp, Homo sapiens
ctgttgagcattaccgtattgttggcgtttttcctaagtcgccgattcttcctggccacttccaagccccaaatcgctgggacttgttgctaaatctttayctcacgtcccctagaaccgcccaacacaataaaatttggggatcaaaaggcgggagggggcctaaatctctaaaacccagaggactgggcttccttcaat

SEQ ID NO: 423113 - DNA, 201 bp, Homo sapiens
atgtcagaggaccacctggagccacatcatactgggagctgttggtgctctcattaaacaagataatggatagataggcatttctttttttttttcttttyttttttttttttttttttgagatggaatctcactccatctcattgcccaggctggagtgcaatggtgcaatctcggctcactgcagcctccgacccccgg

SEQ ID NO: 423114 - DNA, 201 bp, Homo sapiens
gctcttacacataataccaagctaaacgttagatgatttattccagtttctttctaaatgctgaggttaaagctgattttaaaattcctttgctttacctmagggcctatggaattgaggctaaagcctcagctacaatttctgagatcatgaaattcttagacatgagacgggtggcctgatgaatactaactactgtga

SEQ ID NO: 423115 - DNA, 201 bp, Homo sapiens
gccagcactttgggaaactgaagcgagaggatcacttgagctcaggagtttgaaatcagccagggcaacatggcgaaacctcatctctacaaaaaaatacraaaattagctgggcatggggcacacctgtagtcccagctacttggaaggctgaggtgggagggccgcttgagcctgggaggttgaggctgcagggagttg

SEQ ID NO: 423116 - DNA, 201 bp, Homo sapiens
tatagtgggatatagcaagcacaaatccaataagtcctatttaactcaaaaatattttttttctaaatggtaataaaaactacccacaattataataccartcaagcaacctcaaaggttccactaactgggaaaaaaataactatttgcctcactgcaatactttaaaaccacaaggttaacaatcatttctagcgaaat

SEQ ID NO: 423117 - DNA, 201 bp, Homo sapiens
gatgctttatagtttgttatttacgtgtttgcaatccctaagttgtaagcccttcgacaacaggggccttgacttttcctttcccctagtgcgtcaagttstgaacaaaatttatttttaaaaaatatacaaatatacaataatctactgtttttaggtcaggagagacaaaaaatactaaccaataaatacaacagcatc

SEQ ID NO: 423118 - DNA, 201 bp, Homo sapiens
cctttaacactgtatatagaataatatgttacagtgtataaacacaaatatatacacacacagaaccgtctatctgtgtcttggagattcagactagtaayttgtctaatgtgtgcaaactccttccgtgggcagaaggactgctactgtgtgcccagatgggtacataggacaaattatgtttactcaacttcagagaaa

SEQ ID NO: 423119 - DNA, 201 bp, Homo sapiens
aatactccagcttatatttaggcagtcaacaagcatttaaaattcaaggtagtggggggattcccaaaaattaaagatacccaggaggaaaactagcatayaaacaaaccaggatagaaaaaatctgaagtaatatttaaatgaaagagagtagggcaaatacagtgaaaataaactctaaatagccagagcagcagaaat

SEQ ID NO: 423120 - DNA, 201 bp, Homo sapiens
ggtataaccacaagagaaacattaaactactactgtgagaacttagtagcagttctacttttaagaattgttcccatctattttctgttctaaagaaaggrgaaaaaatagaacagaagggagaaaaaaattgttgtgaccttaagccctgtctagtaccttgactcattccaatgtcttttcactgattttccatccaat

SEQ ID NO: 423121 - DNA, 201 bp, Homo sapiens
agatgacagtagagcaagctggagcatccagatacatgttcggaggtggaggcagcagtgtcctctcagactggctctgtagtagtattctgggtcctggstgctccctagcctccctttttgttgtccactttctaagcccatttctgcctgcaccctgcttataaaatttctgagctacccaatgtccttgcaataaag

SEQ ID NO: 423122 - DNA, 201 bp, Homo sapiens
agaaaaatcagaatgatcatgcacgccacaagaaacaattaacagtttcagtccatatgacttgtgttgtttccaaacaaccacaataaaaccataatgasaacaaaaatatatgttcttcaatgttcatgacattgagatctccggtctacttccagtaggcctcttaaaggcctctttttcctgtcttaaaaaaagtta

SEQ ID NO: 423123 - DNA, 201 bp, Homo sapiens
gtgttctgtcagcacagatggcccaaagcagactcaacaagggcaattaagaccctctgagcagaacttcaaacctgctgttgtacagcttgtaagagcarggctaacaagagggccagtcttattgagatatcagtggtgatgcttcaagagacaaggtgtctcatttctatatgaaatctttgtaccctgtgaagtgtc

SEQ ID NO: 423124 - DNA, 201 bp, Homo sapiens
attgagaattttacagccatgcacattcattcattcattcggtcatttatttaacagatatttactcaacacctaccatgcccagttctatgtgtgcttcygagcatataataatgaataagagagatatggtccctctcccatgggtggaacttcttcatataaattggtggaatttctatatataaatattgcaatctt

SEQ ID NO: 423125 - DNA, 201 bp, Homo sapiens; identical to SEQ ID NO: 84586

SEQ ID NO: 423126 - DNA, 201 bp, Homo sapiens
tggaaaataatcagatggccaaagcaagacatgcaaaagactggcaaatactttgtttttttttttgagacagggtctcactctgttgcccaggctggagragtgcagtggcacagtcatagctggaactcctgagctcaaactatcctcctgcctcagcctcctgaacagctagaactacaggtgtgcatcaccacgtcc

SEQ ID NO: 423127 - DNA, 201 bp, Homo sapiens
ataaagctaggtaagaggatagagaggtatattttatttttattcttttgagacagggtctcgctctgtcacccagactggagtgcagtggcatgatctcrgctcactgcaacctccgcctcccaggctcaagagattctcctgcctcaacctcccgagtagctgggattacaggcgcgcgccactatcgtctggctaatt

SEQ ID NO: 423128 - DNA, 201 bp, Homo sapiens
gactttctatggacagtagggactgaacaggagggaagtgtgaccatgccaaagtctcccgagtatattcaggagaagaaaggctgccgattcagtgaatmcttggttctggtataaacacataatgggaattaagtaattcagaatgcctgtctaagaaacagcttctggggctgtggccctggcaactgggaggaccca

SEQ ID NO: 423129 - DNA, 201 bp, Homo sapiens
ggagtgcagtggcatgatctcggctcactgcaacctccgcctcccaggctcaagagattctcctgcctcaacctcccgagtagctgggattacaggcgcgygccactatcgtctggctaatttctgtatttttagtagagacagggtttcaccatgttggccaggctggtcttgtactcccgacctcaaatgatccaccct

SEQ ID NO: 423130 - DNA, 201 bp, Homo sapiens
ttgcccttgcctctggaattcccatatacacgaaagaaaaagagccttcctttgcatttcctggaggtaaagatctcttgagtggaagctctgggtgtcartagcatccctgaggaagtcctgtgctccagggccttcccgctccttcatattgtacctccaggtcctgaccttggtcttggcttagtatgtgggtagctt

SEQ ID NO: 423131 - DNA, 201 bp, Homo sapiens
tctctgtgttgtgactctgacatcagtttttaaataactacaaattgggtcaggcatggtggctcacgcctgtaattccagcactttgggaggccaaggcrgtggggatcacaaggtcaggagttcaagaccagcctggccaatggtgaaaccccatctctactaaaagtacaaaaattagccaggcgtggtggtgcacac

SEQ ID NO: 423132 - DNA, 201 bp, Homo sapiens
gtggaggttgcagtgagccaagattgtaccaccacactccagcctgggtgacggagtgagactccatctcaaaaaaacaaaacaaacgaaaaaacaaaaamaaaaaaaaacattttatggtatgtgaattacatcttaaaaggctgttattaaagagtgggggagttgttatccactttcataatagtcctataacactgg

SEQ ID NO: 423133 - DNA, 201 bp, Homo sapiens
cattaaaatcctaataaacactgccttctttctcctcttctagggtaacacatgccattatatttcagttttgcaatgttatggttgagacaaccttgcartcaataatggttttacatatcaaggaacaaaacgaaatcatttgaaattgaaaaacaatataagtaacagataattcttgttaaaatggctgtgtaggtt

SEQ ID NO: 423134 - DNA, 201 bp, Homo sapiens
ctgcagtctcagctactcaggaggctgaggcaggagaatcgctggaacctgtgaggcagagaggttgcactgagctgagactgtgccactgcactccagcycgggtgacacagcgagactccgtctcaaaaaaaaaaagaaaaaagaaagaaagaaaaagaataaacgtgttcaaaatccagataagttataaaactcagc

SEQ ID NO: 423135 - DNA, 201 bp, Homo sapiens
gctcacgcctgtaatcccaggactttgggaggccgaggcaggctgatcacgaggccaggagattgagaccatcctggctaacgcggtgaaaccccgtctcyactaaaaatacaaaaaattggccaggcgtggcggcacgcacctgttgtcccagctactcgggaggctgaggcaggaaatcgcttgaacccaggaggcgga

SEQ ID NO: 423136 - DNA, 201 bp, Homo sapiens
atgtatctttataacagaaagatttatattcattgggtatatacccagtaatgggattgctgggtcaaatggtatttctggctctaggtctttgaggaatygccacactgtcttccacaatggttgaactaatttacattcccactgacagtataaaagcattcctatttctccatagccttgccagcatctgttgtttct

SEQ ID NO: 423137 - DNA, 201 bp, Homo sapiens
gtattgcctagattttcttctagggtttttatagttttgagttttacatttaagtctttaattcatcttgagttaatttttgtataaggtgtaaggtcagrgtccggtttcgattttctgcatatggctagccagttttcccagcaccatttattaaatagggaatcctttctctgttgcttgtttttgtcaggcttgtca

SEQ ID NO: 423138 - DNA, 201 bp, Homo sapiens
ccatatccctcctctcttcatttctaccaaattacccattgcggggccctagctttggatttgttatttagattgactttgcctcggttcctctgacattratgtggcaccacaaaattatgtagcatgtgatccagaggagttttcaaagcaggcattttctctgatatctcactgaaagtgccagccatgtaaacgttg

SEQ ID NO: 423139 - DNA, 201 bp, Homo sapiens
ggaggtgggaggattgcttgagcccaggagtgcgaggtttcagtgagctatggtcacagccctacactccaccctgagtgacagaatgagaccctgtctcaaaaaaaaaaaaaaaaagaatgcaaggcttagctagatattgtgattttaaaagaaaagtcagagatactgatttttatgtggtatttcacaatttaaaat

SEQ ID NO: 423140 - DNA, 201 bp, Homo sapiens
atatttttttaaagctgtaatgtattataatgacaacataacttttttttatttttaattttttgagacagggtctcgctctgtggcccaggctggcatgsagtggtgcaattccagctcactgcaacctccacctcccaggttcaagtaattctcatgcctcagactcctgagtagctgggatacaagcgtgtgccacca

SEQ ID NO: 423141 - DNA, 201 bp, Homo sapiens
tcctgggttcacgccattctcctgcctcagcctcccgcgtagctgggactacaggcgcctgccacctcgcccggctgattttttgtatttttagtagagayggggtttcaccgtgttagccaggatggtctcgatctcctgacctcgtgatccgcccgccttggcctcccaaagtgctgggattacaggcgtgagccaccg

SEQ ID NO: 423142 - DNA, 201 bp, Homo sapiens
tctttgcataacaattctacttggtagtccacaggcactctcccacacccagctctgttctgcagtgggggaactaggctcagagataaaacaacctgttmcagaaagtgcatggcagagctcctagtcagaccttggcttcctgatcagaactctgcactgtgcttgctgccggcctgtaaacgctttagtctctttcaa

SEQ ID NO: 423143 - DNA, 201 bp, Homo sapiens
aatgggtatgaggtggtatctcactgtcgttttgattttaattttccctatgactaatgatgtggaacatcttttcatgtgcttattggccatttttgtawcttgtttggagaaatgtctattcaaatcctttgcccttttgttattgggctatcttttcattattgagttgtaagagttcttcatatattctggatatga

SEQ ID NO: 423144 - DNA, 201 bp, Homo sapiens
attttacaaatggagcaatgaagatactcaagtaacttgatggtgtttgtctagccggggttctcaacctctagaccatagggagttacatactagacttyggtaacatggaatctcacactcacagtgacacatcctaaaatcctaaacacaaattagatctcagggaaacagcagagtgatagccttcctaacgtgagc

SEQ ID NO: 423145 - DNA, 201 bp, Homo sapiens
tcatcattgagtaggttagggtattcctagatatgtgcttacctaagcaaactggtaccattattcaaaaataaaatagtcatacagtaaataatatgackactttcaggagctcttctaccatcccctcaacatcattcttcctttaaactgaagatgataggaatcagaaggaattaagactgaatttttaagatttga

SEQ ID NO: 423146 - DNA, 201 bp, Homo sapiens
ggctctgtagtagtattctgggtcctgggtgctccctagcctccctttttgttgtccactttctaagcccatttctgcctgcaccctgcttataaaatttytgagctacccaatgtccttgcaataaagtccccttctgttaaaatcaaccaaagtcggccaggagcggtggctcacacctgtaattccagcactttggga

SEQ ID NO: 423147 - DNA, 201 bp, Homo sapiens
tcctaggcccagggacttttgcaaagaaagcaagctgagtctctgaaccctgccagccacttttgatggagttttttcccttagataagccactggctttygtctgctactccacaaggcgttaccttacccagttggttatactacaacacctataacatgaaaactctaaattgagttatatattactttaatttatac

SEQ ID NO: 423148 - DNA, 201 bp, Homo sapiens
tcaagtgattctcctgcctcagcctcccaagtagctgggattacaggtacccaccaccacatccagctagtttttgtatttttagtagagacagggtttcmccattttggccaggctggtctcgaactcctgacctcaggtgatccacccacctcggcttcccaaagtgctgggatgacagacatgaaccaccacacccgg

SEQ ID NO: 423149 - DNA, 201 bp, Homo sapiens
aattccaattcaaactcaagcctaaagcaggaaatcttcataaaccagccagtcaaaatctcagattcaaccagatcccccgatgggattcgaaaggtatratacacagctttgtatggaatctgttctctaagattttcctttctctttttttaaaggcaggatcttgctctatcacccaggctggagtgcagtggcgca

SEQ ID NO: 423150 - DNA, 201 bp, Homo sapiens
aaaggaaacacaggaaattagggtgaggagaggcaggagacagtgctgagctcccatgctccacaacagctgtctgtccatagggtgatgaccaggaaaaygaaagatgctgaaaaaggcagagatcagctccggctccaggccatctgaaggggcctttggcatcaccccttcccactgcctctttagcaggtgtgttga

SEQ ID NO: 423151 - DNA, 201 bp, Homo sapiens
ctctgcctcccgggttcacgccattctcctgcctcagcctcccgagtagctgggactacaggcgcccgccacaacgcccggctaattttttgtatttttarttgagacggggtttcaccgtgttagccaggatggtctctatctcctgacctcatgatccgcccgcctcggcctcccaaagtgctgggattacaggcgtga

SEQ ID NO: 423152 - DNA, 201 bp, Homo sapiens
aacctaaaagtccatcaacagatgaatgaataagcaaaatgtggtatatacatataatgaaggattattcagactttaaaaggaaggaaactctgacatargctttaacataaataaaccttgaaaaaactatgctaagtgaaataagccagtcacaaaaagacaaatactgtatgattccatttatatgaggtatagacg

SEQ ID NO: 423153 - DNA, 201 bp, Homo sapiens
tcctccacattgtgatacatcactcactgtctggaatccagaggcttttagcacctggaaggagcccaagaacccttcccaccacaaagatgtcagagaartcagggtagagtcaggtaagcccagttcccatctcaaatgcacagagagctttcttaaactgtgggtgtagggaatgtcagtgtggaatacagcaataat

SEQ ID NO: 423154 - DNA, 201 bp, Homo sapiens
tcggctcactgcaacctctgcttcccaggttcaggtgattctcctgcctcagcctccctagtagctgggactacaagcaggcgccaccacgcccaaccaaytgttgtatttttagtagagacggggtttcaccatattggccaggctggcctcaaactcctgatctcaagtgatccacccacctcagcctcccaaagtgct

SEQ ID NO: 423155 - DNA, 201 bp, Homo sapiens
ctggcctgaccctgtgttatgtgcatcagcaagagccaaatgcctaaagcagccagaaagtaatgccatgctcccaaaagttcagagtgacaaaacaaaamaaaaaaaactaaacaacaacaacaaaaaactaaataaaaagtccaagcttcaatgattatgttactctctgtcacctgactcttcaatgaacaggaagca

SEQ ID NO: 423156 - DNA, 201 bp, Homo sapiens
tacatttacgaaatttcttttagacctgctacctgatttccattcaatgctagcatgtgatcaagagctaatttgcatagctgataggaagctgagtccartcatttattcacagcaggcatagtgctagaagctaaggatgcagagataaaagactcagtcagactcttcattcaaagacctcaaagtctagtggaagaa

SEQ ID NO: 423157 - DNA, 201 bp, Homo sapiens
gccattctcctgcctcagcctcccgcgtagctgggactacaggcgcctgccacctcgcccggctgattttttgtatttttagtagagacggggtttcaccrtgttagccaggatggtctcgatctcctgacctcgtgatccgcccgccttggcctcccaaagtgctgggattacaggcgtgagccaccgcacccggccgag

SEQ ID NO: 423158 - DNA, 201 bp, Homo sapiens
ttgcaggatagaacagaacctgaaaggtggggaggagagggacggataagttgtaatcattttgaaatgcaaatggaacctcttgtatgattccagattamtaaagcctacagcttaccagtttataaacattttagcaaaagcaaaacattgctcatactgtttgtatactgctttattgtaattaacaatatggtgagc

SEQ ID NO: 423159 - DNA, 201 bp, Homo sapiens
gaatttttgtatttttagtggagacggggttttgccatgttgcccaggctggtcatgaactcctgggctgaaacaatccgcctgccttagcctcccaaagwgctgggattacaggcatgagccagtgcacacagccagccttcctttttaaggataaaagtttggaccaaacaaagaaacaccatcattacctctctactt

SEQ ID NO: 423160 - DNA, 201 bp, Homo sapiens
ctaacacagtgaaaccccgtctctactaaaaatacaaaaaaattagcaggcgtggtggcgggcgcctatagtcccagctactcgggaggctgaggcagcaraacagcgtgaacccgagaggcggagcttgcagtgagccgagattgcgccactgcactccagcctgggcgacagagcgagactccgtctcaaaaaaacaaa

SEQ ID NO: 423161 - DNA, 201 bp, Homo sapiens
ccttttcccaagaattttcttgaatattccaccccttggttaaagaaacccataaagacagaaaccccaaaccccactgaatgactctctcaagtatgccyacgctcccttttcttgaatgtgtactttgccctttgcaataaatctcaataaatctctgttcttttactattttctgactcttccttgaatttcttgaaa

SEQ ID NO: 423162 - DNA, 201 bp, Homo sapiens
gcacacaagcacctcacaagcaagtgcaaacgaagtagagtctagcagagggtaagagtgattccaacttcctcctggctacatgctatgaccttggttcrcaatctgttaaagggtagctggccttggtttcacgggcccttagagaaggcagaggtaaaatggagggattacagaaagtgggcacccgtagcccaaagt

SEQ ID NO: 423163 - DNA, 201 bp, Homo sapiens
tgggaggccgaggtgaaaggattgcttgagctggggaggctgaggctgcagtgagccatatgccactgtactccagcctgggcgacagagtgagaccctgyctcaaaaaaataaaaataaaataaatctatcaaattaatatttcccactcagcctctgagtattaaaagaggtataattaacatacatgtttcaatatgt

SEQ ID NO: 423164 - DNA, 201 bp, Homo sapiens
tctgtgacaggtgtgtcctacttgtttctagccaaacattccctctaacagggacctcacccaacagctactctggttggaatgtggatctgggccctctwaagaatatcaaatagcccagatgtatccaggcagcagagaccccacactaggagggctgaggcctgatcctgctcattgcctttttctgaaaagcatttt

SEQ ID NO: 423165 - DNA, 201 bp, Homo sapiens
tgtttggcaaaatctgggaatttctggggttttagggagtatcctggatggccagggtcaggagaaatatgataaactcactggtcctcataactctttgattatttccctcctcttcacaaaaaaattgtttactggccagtgccaacatatgtgatggatcctgaggtagacacatttcattagcaaacaggtcaggat

SEQ ID NO: 423166 - DNA, 201 bp, Homo sapiens
tttggcatattggctgcaaatttttctcctaaatttttactcactttctagctattggctttgatgtttctgacataaagagatttttaatttttatgtgktatatctttggatctttttcttttttatttctctcgttatctttacacttagaaaattctcatgtacgccaggtgcgatggctcatgcctgtaaccctag

SEQ ID NO: 423167 - DNA, 201 bp, Homo sapiens
attggaaagccatgtgtctgtggtgctctcactggctgctccctctcatccccactgttggtccagtgaggtggacaacaaagacgtgttaggtttgctcygatatgtagacaggagtaccaactttggggtctgccctggcaccagtacctcttttagcagagacagacagaagttcagagctaaggcaaacactctgga

SEQ ID NO: 423168 - DNA, 201 bp, Homo sapiens
tccttttcaactctcctatcaggttacttatgttccttagaagttgaggcacagggagcagaaaggggaggagctctgggaaggcaaaggctttgagaacsagcactaagtagacttagagtcaaggccctggtctgccacttctcagcttgtgatctcagacccatcccttaatgtactcaagcttcagcttccttatct

SEQ ID NO: 423169 - DNA, 201 bp, Homo sapiens
gcccgctgagataaaggaaaggcctaggaaggagaggtggagggatggaaatgaagccttgggcctgcaggaggctactggacagcttgaaataacggaargaagtagggaagggagttgggagggaaggcaggggagggaggcagcggagggcccccctctgcttcttccactctggctcatatgggcagtgacaggcag

SEQ ID NO: 423170 - DNA, 201 bp, Homo sapiens
tgtacaaagctggcacagacagactctcaataaatggtatcttcaagactcttaacaacaaggctgggcatctgtaacaggcctcactactccatgaaccrtaacaggacatctccgtaagttgggcccaggaggccaaagtacagtgctgcaggagacccaggccaaaccaccagtctcagggctacctggatggagcaa

SEQ ID NO: 423171 - DNA, 201 bp, Homo sapiens
cttcttcttacccaaggctatttttttcctgatcagaagagtagaaaatttcaaatatatgtaatcaaaccaaatcccctcagaagcctggcagcctctartcagtgccacagagacaaaggcagagcttctgtgacaggctcctgacatgctccctagaaaggaggagctgaataaggggaataagatatgacacaattc

SEQ ID NO: 423172 - DNA, 201 bp, Homo sapiens
caccaagtgctggtaaggacacaaagtatctagaattctcatatattgctggtgggaatgcaaaatgatatagccactttggaaaacagtttggcagtttyttataaaggtaaacagacacacatatacaactagtaactctacttctaggtatatacctaagtaaaatgaaaacctatatttatataaaaacctgtatgt

SEQ ID NO: 423173 - DNA, 201 bp, Homo sapiens
aactatgacagaataaatttgttgtttcaagccagtttgtgattgctatggcagccctagaaaatgaatacaacctctccttcagggcaaaagttccacaytgtccatgaagtctttccttaccaaatctggccattgtgacccctctttctacttagagcaaagcagactttgttattttgcacttggggctctccatga

SEQ ID NO: 423174 - DNA, 201 bp, Homo sapiens
accgtaacaggacatctccgtaagttgggcccaggaggccaaagtacagtgctgcaggagacccaggccaaaccaccagtctcagggctacctggatggarcaagatggtggctcctgaagttggagtgctgtcagggccagggaacagatatagcaatggactgccagtggtttgcttcattctcctcctccagcagctg

SEQ ID NO: 423175 - DNA, 201 bp, Homo sapiens
gcttgcagatgcatggaggctcctgcagagcaaggactgacatcggatggatgtaagtgctgggttcagactgtcttgagacccagggaaagaggtttatwttaggcccttacaccctgagggagcaggggagctcagctcctccatccctaccatgaatcagtggactaaggacaactctctacaggtccccatttccct

SEQ ID NO: 423176 - DNA, 201 bp, Homo sapiens
tcaagcgattctcctgcctcagcctcccaagtagctgggactacaggcacccgctaccggctgggttccttggagtctgtcccacgcatacatagttaaarggtcagtcagatatttgggcaggatttatgcacagaatttggggcttcccatttgcctctctcctttctggaattttcctcctcattttccagctgctgt

SEQ ID NO: 423177 - DNA, 201 bp, Homo sapiens
attgggttggtatggcacctttggtgaggcctttcctaaccagtacaatgtgcttcagcctgcttactagaaagtgggcaggagaggctcaccctgtgacytgggctccgagaccacaactccagcccagctgctctgcctccaactttgtgcaaatcatttaagctccctagcctgccatttcagcaactgtaaaatgac

SEQ ID NO: 423178 - DNA, 201 bp, Homo sapiens
tgggttacaacttagatgttatttaacaatctttgagaaaagcacatcaagactgagattccttttaaattccttctggatgctggactgtgcttctttgyatgcaattctgcagagatggcccacctgggccttagcatttatgaaggctaaggccttagagaggccagaggaggttgaagggaaagtgatataaataca

SEQ ID NO: 423179 - DNA, 201 bp, Homo sapiens
ctttctgtctccatggatttgcctatgcagttatgcagctcatacaacattttggtcaacaatggatctcatatatgacagtggtcccataagactaaaakgaagctgaaaattcttattgcctagtggtgtcatagccatcataatgtaatgcgttactcatatgtttgtgatgatgctggtgtaaacaaacctactgca

SEQ ID NO: 423180 - DNA, 201 bp, Homo sapiens
ataatatttgaccaagagaactgagcaatctagtgggaattataccactgaagtgttttactaagaaaccatcagagtccttataaggtagttaatatttrtatatacgaataatgtatttcttcattataccctgaaacaggccatagggatgcagcaatggcattgtggaaactaccatttctggcaaatgaagacttg

SEQ ID NO: 423181 - DNA, 201 bp, Homo sapiens
accaccatgcctggctacatttttaccttttggtttttacagagctggggtctcattatgttgcccagatgggtctcaaactcctggtctcaagtaactcytctgtcttggcctcccaaagtgctggaattataggtgtgggcaaccgtgcctggccctgaaggtattttaatagtgcattttcttctaataatgagaaga

SEQ ID NO: 423182 - DNA, 201 bp, Homo sapiens
ggtcattcattgttgctatagcaggaatgcctccttgatgtgttccgttatggtggtctgagcaactgaggttactctttctaaaataaacttttgaaaamaatttcatcaagcagggtaaaaacattaatattaagcagatgacaatgaaaggaccaattaaagggagtgcccaatggaggaaataactgaaaaagtcag

SEQ ID NO: 423183 - DNA, 201 bp, Homo sapiens
actataggcatacaccactacatccggctaatttttgtatttttagtagagacggagttttgccatgttagccagactggtcttgaactcctgacctcggkgatccacccacttcggcctccaaaagttctgggattacagatgtgagccatcatgcctggctgatgtgggcatatatttctaatgcatttatgattgcct

SEQ ID NO: 423184 - DNA, 201 bp, Homo sapiens
tagcagctgggtgtacttcctttgtccaagatacttataacctaaattaaaattaaaaggaatttctaaataaaacagcagttttcaatcactaataaatyttccctcactctcaaaaccactcagcctttaaaggtttgctttgaggaattagagcaaggactaaaaactagtcagttaatctggattccatttctttct

SEQ ID NO: 423185 - DNA, 201 bp, Homo sapiens
gaaagagacttgctcagggacacatgtgaaatggaagagccagccctgactctagaccatctgagtagtctagcactatttccacagctgcataccgtttytcatatagtcaagtaactatcagattaatgttacaaagttttgggttatatgcatttgttacagaatggcttcaggtagatcagaaaaatgaccctggag

SEQ ID NO: 423186 - DNA, 201 bp, Homo sapiens
atattgtatgattccatttataacactgtggaaaaggcaaaactgtaaggacagaaatcaggtttgtggctgccagaagctggagaaagaggagaggactratcacaaaggggcataagagaaatttacagggtgctgaaaatattccatacaaggtagttacacaacttgcatatatttgtcaaaattcatagaactgta

SEQ ID NO: 423187 - DNA, 201 bp, Homo sapiens
ggtgatactccatctcaaaaataaataaaataaaaaaattaaaaggcaagtttacatttaggagatacagaaaactatatttggaaacttgagatcaaaasaatagtggaaacctttgaaatataccagaactcacccttactgagttctataactaagaggagcatgcctcctacgtataccgtcaagtttatatattgc

SEQ ID NO: 423188 - DNA, 201 bp, Homo sapiens
ggctgagggaggagaatcgcttgaacccagaaggcagaggttgcagtgagccaagattgcaccactgtactccagcctgggcaacaagagtgaaactctgycttgaaataaataaataaataaataaataaatacccaagtctaatcaaagtaaacagtatcatgtagactgggatgtacctttaaaaaaataagaaaagg

SEQ ID NO: 423189 - DNA, 201 bp, Homo sapiens
tggaattttcctcctcattttccagctgctgtggctatcccaagctgtggcctctgtgggtttgatagaaactgtgggtttctataagtttatttatttattttttttttttttgatagagggggggtttcaccatgctgcccaggctggtctcctcctgagttcacgtgatctgcccaccttagccttccaaagtgctgg

SEQ ID NO: 423190 - DNA, 201 bp, Homo sapiens
aacagacactgcattccagcctggacaagatagtgagactccatctcttaaaaaaaaaaaaaaaaaaaggcaaaaaaggcaaaaaaagaaaacaactctgyagtcacacagatgtaagttcaaatcccagcttcccgacttactactcctgggacattaagttatttcacttgtctaagcctcattgcactcatctgtaat

SEQ ID NO: 423191 - DNA, 201 bp, Homo sapiens
gactgtccctatcatcctgcaaagcctcagatgaaatctaccttacatgagataagtgatataaagtgctacagtgcttagtacagcacctagcactcttygtttaacagctatttcttgtatgtgctagatgatatgctgagcattttacatagtaaataatcagaaaatggaagctattataataattattatctaaag

SEQ ID NO: 423192 - DNA, 201 bp, Homo sapiens
tcacacagatgtaagttcaaatcccagcttcccgacttactactcctgggacattaagttatttcacttgtctaagcctcattgcactcatctgtaattayagacaatatcattttttatcttatagataagattaaatgaaagaatgcatataaagcacttagcacagagcctggaacaaagaactcaataattttttaa

SEQ ID NO: 423193 - DNA, 201 bp, Homo sapiens
aaaagagcctctttcattgattattaattcaactaccagtctgcttttattcttaatcatttttcctgtgtttccttgttgctagcaagcaagtcagtatscttgcatacttacttaatttactcttcctccttaacacacagaccacttactgagtctttactgtgggcgagacactatgcttatgtcattttcacataa

SEQ ID NO: 423194 - DNA, 201 bp, Homo sapiens
tacagagtacagaggcagggcttgaaggaacgggcagagacttttcctgattcttctctatatttactgcattctatctcctgagagttaaaaacaactaygatcattcactttgatgacctgtcaaaaccatctgatgtgcactaggatgatatctgccttttactgatgacgtgtcagggactgtacatacactgcgcc

SEQ ID NO: 423195 - DNA, 201 bp, Homo sapiens
atttcaggtcttgggcctgtgggcctttgctaatttttctggctcccacaataccacttcacagcaagcccccttaatctctccaataaagtggagtgtcygtattgtcagtcatcccctattcatcagtctttagactatcccttctttttctccttttccagagcaaaataacctattagcattggcattctgccgaac

SEQ ID NO: 423196 - DNA, 201 bp, Homo sapiens
ggatttgaatccaggtatgtgtaacaagtaagactgcacctaatttcccaccatgccaccctctaaaagatgccatgcaaaattaatcttttaaaaagtcttttttttttttttttttttttgagacagagtttcactcttgttgcccaggctggtgtgcaatggcacaatctccgctcaccacaacctctgcctcccagg

SEQ ID NO: 423197 - DNA, 201 bp, Homo sapiens
gatttttagggattgatagaatctagacagggagaaaagtagtactggattccaagaggagaaatggggaacaaaaacaccagaaagaaagccttttgctyagagccaaaggtttagaacatgaatggttgtgaggtagctggaaaggcaggttagagaccaagcactggagactttgaagggtaggttaagtaaattaga

SEQ ID NO: 423198 - DNA, 201 bp, Homo sapiens
cacctctccctctccctcacattttacatccagtcaatcaacacttgtccattttacctactaaatatctctgtaacccagtagtagtgattctcaaaccycagcaagcctaagaatcacctggaagacttgttaaacagactgctgaactccatccccggagtttttgattcactaggtctgggatggggtcaagaattt

SEQ ID NO: 423199 - DNA, 201 bp, Homo sapiens
aggagctgggattacaggtgtgtgacagacaccacacttggctaattcttttgtacttttagtagaggcagggtttcgccatgttggccaggctgatctcmaagtcctgccctcgagtgatatgccttggcctcccaaagtgctgggattacaggcgtgagccaccgtacctgccataccccatctatttctgaagttcat

SEQ ID NO: 423200 - DNA, 201 bp, Homo sapiens
ctgagtctccatgtgtttttgtaatcaaaaagattcacccaggctggagtgcagtggcgcaatattggctcactgcaaccttcacctcccgggttcaagtkattctcctgcctcagcctcccaagtagctgggattacaggtacccaccaccacatccagctagtttttgtatttttagtagagacagggtttcaccattt

SEQ ID NO: 423201 - DNA, 201 bp, Homo sapiens
agtaaactttaggagggcagaagacccacggtactttccacacccaggtcagaatccagctttttccacgtgaagctctccacagggaggatggtgggtakgacaaaagaaagaggaggggccagctactctgtgggtgccctttttccttcccaggtgagagccacaaccacttcagatgtgaagtcttgagggaggaga

SEQ ID NO: 423202 - DNA, 201 bp, Homo sapiens
ggggccagctactctgtgggtgccctttttccttcccaggtgagagccacaaccacttcagatgtgaagtcttgagggaggagaaatattaagaggaaaasgtgccctcctcccatggctgaatattgtacttgggacttgtactttttcactacaaacctactcactgtatcttccaaattacttgggaacttctactgt

SEQ ID NO: 423203 - DNA, 201 bp, Homo sapiens
gacagtttcgaggagtactagtcaagtattttgtagaatgtctctcagtggggatttgtctgatgttttcctcatgattaactgagcttataggtttttakaaggaggaagaacttatagggaggaagaactacagagataaagtgccatttttatcacatcatatcaagggtaatactatgaacatttatcactgttaat

SEQ ID NO: 423204 - DNA, 201 bp, Homo sapiens
gggtgggtagctggggtggaagttgtttgtgtcttattttatttttttacttggcccaggattaatgactctggcaccttatagactagtagtagcactgyagaagcatcaaacacaagaacaattatttggactccagaaaaacactggagtcttttataacttgatttgagtttagatagtagtctatgtttttacgac

SEQ ID NO: 423205 - DNA, 201 bp, Homo sapiens
agaagttataaatacaagaatatttcaaaaaaacaaatatcaagcagtatcaagtgaaggaagccagtcacaaaagaccacacatggtaggtataattatrtttatatgaaatgtccagcattggcaaatctatagagacagaaagtagatttgtggtttgcctcagaccggaagctggggaactgtggagtgactgctaa

SEQ ID NO: 423206 - DNA, 201 bp, Homo sapiens
agctgaggacagagaggcaaagccaaggaagagtggtaataaagtagtataaacatcaccagtcttaggaaaaataataaagaagctaaaagtaattctgyaccaacaaaaccaaaaacaggaacgacacagaaggacaaaagtctgaacgaaaccttaagtaaaaattgatcttttgggtaggaaatataccactttaac

SEQ ID NO: 423207 - DNA, 201 bp, Homo sapiens
cttgctctgccacccaggctggagtgcaatggtgctatctcggctcactgcaagctccacctcccgggttcaagcaattctcctgcctcagcctcccgagyagctgggattacaggcatgtaacagcacacacctggctaatttttgtatttttagtagagacgggggttttaccatgttgaccaggctggtctcaaactc

SEQ ID NO: 423208 - DNA, 201 bp, Homo sapiens
tatcttatttaactgcacaatttaacctggctgcttaatccattattttaatatgtctctcagtaaaatcaaattcatttctagagtagctcacctttcastaatcacaaaaaactgattaacatttctgacttgaaaataggtattttttcaacacatatttctattagaaatgttgcaatatatattctcataatttat

SEQ ID NO: 423209 - DNA, 201 bp, Homo sapiens
tgactccttcagtatactgagttcaaagatattagttatcttttcattttttaattttccctattttctccaaataacaaagtaagctgataaatgtggtaaatatatatatatatatatatatatatatatatatatgtatctccataaatgaaacagatgaatgaaaaacagatgagtagaccagatctgcatttacga

SEQ ID NO: 423210 - DNA, 201 bp, Homo sapiens
gactccttcagtatactgagttcaaagatattagttatcttttcattttttaattttccctattttctccaaataacaaagtaagctgataaatgtggtawatatatatatatatatatatatatatatatatatatgtatctccataaatgaaacagatgaatgaaaaacagatgagtagaccagatctgcatttacgag

SEQ ID NO: 423211 - DNA, 201 bp, Homo sapiens
ctccttcagtatactgagttcaaagatattagttatcttttcattttttaattttccctattttctccaaataacaaagtaagctgataaatgtggtaaatatatatatatatatatatatatatatatatatatgtatctccataaatgaaacagatgaatgaaaaacagatgagtagaccagatctgcatttacgagga

SEQ ID NO: 423212 - DNA, 201 bp, Homo sapiens
ccttcagtatactgagttcaaagatattagttatcttttcattttttaattttccctattttctccaaataacaaagtaagctgataaatgtggtaaatatatatatatatatatatatatatatatatatatgtatctccataaatgaaacagatgaatgaaaaacagatgagtagaccagatctgcatttacgaggaaa

SEQ ID NO: 423213 - DNA, 201 bp, Homo sapiens
attggcaagcagtttccaggttctcttcacaaagttgcttccaggatttccaactaagagttcaaattcttttggggaaacttcatgattttagtgctgtsgtccaaaatgatccagtagtaatggcagtttcaggcctagggactaagaggaatctaggaagcggcacttaagtgtctctgcatctcaggagaaggggac

SEQ ID NO: 423214 - DNA, 201 bp, Homo sapiens
gatcaggtgagacccctctgggtccagctcaattagcttctccacaaagagcagcttccggcgatgagcgcaggatcctcctggctgatgaactaaacacsggagcattgtcaatgttttcaatctctgactttttcataagggaggagagagggctgtgactgcattcccgggaaagactactactcctgacgtgcacac

SEQ ID NO: 423215 - DNA, 201 bp, Homo sapiens
aggtggaagcaggatatcaaaaacaagagcaaatagtagctgacatgtattgagcacttacgatctgccagtccaggtgttacacactttacatgcaatawcttatttaattctcacatgacactttgagataggtactgttattatccccattattacagatagagaagctgaggctttagtgattttctcatggacgta

SEQ ID NO: 423216 - DNA, 201 bp, Homo sapiens
ttacgatctgccagtccaggtgttacacactttacatgcaataacttatttaattctcacatgacactttgagataggtactgttattatccccattattmcagatagagaagctgaggctttagtgattttctcatggacgtacaactaagtgaaagagccaggattcaacttcagcactgtgagacccctaaacttggc

SEQ ID NO: 423217 - DNA, 201 bp, Homo sapiens
gcaccctcaaatccacaaccctcctgcttagatacccacacccctttaccctgtacccagctaatattcccatccactggataaaacctcctacttgccastggaggcccttttccccaagagacatgctgccatcactaatgcaaattagcctcttttcaaggtcccagatcacaacttggaggaccccagtggtcacct

SEQ ID NO: 423218 - DNA, 201 bp, Homo sapiens
aacctgatccaacagcaccacagagtttatccattttgattttaaatcttcagtatctcccagcttatctttcagtgttatgcctttggcattttccaagyatatccattagaccacttgaatctatttgcaacctccgaaataagcagcaacatagctctctccaaaaatgtccacagtggcaacatcataggtaaaaga

SEQ ID NO: 423219 - DNA, 201 bp, Homo sapiens
agcagcagaagagaaccctcatatatttagggccaacttatactcagaacagtgggaaattatatatgtagatcaaaacttgagataagtgggaggtttcrtcccaccctccccaggggtgtggcttgagtcttttcatggagaatacttacatctcaattgtttcaccacagactttgtaaattccagccaatgctgaaa

SEQ ID NO: 423220 - DNA, 201 bp, Homo sapiens
ctcaaatgtcccctcttcagagaggcctttccctatagtacagcccttcccagttactttccatctcattttgccatttatgtccttcatagcacttataycaatctgtaattatcttgttgatttgtttagttatctatttactatctgcttcctttctagactgtaattttcatgaggtcagaatccttcccccagaac

SEQ ID NO: 423221 - DNA, 201 bp, Homo sapiens
ggtcctcaataattatttgttgaataaattactgaatgaatagaagggaaaaggtttgctaaaagatttcacaaaatggtgaaaagctaggccgtttatarcccataaccttctacttcagagacctgcctggatgccaagggtgaagtgggaggagaatgacttgcaggaacctgtcaaaacatctggagcctgcacagc

SEQ ID NO: 423222 - DNA, 201 bp, Homo sapiens
cttgttaaaatacagattctgattcagtaggtctagagtggggcctgagattatgaaatcctaacaaactcccaggtaatgctgctgctgcttctgctgayccatggaccacattttcaacagtaagacaatctaccatgacctctcttggaggtggtaatgtccaagtaatctctttgacacacatgaattcccatcata

SEQ ID NO: 423223 - DNA, 201 bp, Homo sapiens
gggcggatcacttgaggtcagtagtttgagaccagcctggccaacatggggaaaccccgtctctaccaaataaatacaaaaattagccaggcgtggtggcrcatgcctgtaatcccagctacttgggaggctgaggcagtagaatcattggaacctgggaggtggaggttgcagtgagctgagatcctgccactgcactcc

SEQ ID NO: 423224 - DNA, 201 bp, Homo sapiens
ggaagtggaattccctcttgttttatgaaagaatttcagaaagattggtattaatttgtctttgaatgtttgatagaattcactgtgaagtcatctggtcytgggcttttctttgttgagaggtttttgattacttcgttaatctccttattattggtctgtttaggctttctgcctcttcttgattcaatcttggtaagt

SEQ ID NO: 423225 - DNA, 201 bp, Homo sapiens
ctagagacttaatgcacagaggaggtctatagttaatattattgtattgtatattaaaattttggtaagagtagattgtaggtgctcttacacacacaaaggataactatggaaggtgttgggtatgttaacttgctcactgtagaaatgatttcactatatataggtatatgaaaatatattgtatgtatatgaaaatat

SEQ ID NO: 423226 - DNA, 201 bp, Homo sapiens
aactgttagagtagaataagaaaagttttttgaagaaacaaattaggctattcaggatcttaaaaagaatgtaaaaatcattctaaggttatagaaatctrtaagtatattagcatatagaagtagataaatgtaaagtgtgtattatactagtaattattttacaactagatctgcttatttgtctattatgtactaatt

SEQ ID NO: 423227 - DNA, 201 bp, Homo sapiens
tctgcgttttttcctaagagttttatggtttcagttcttacatttaagtctttaatccatgttgagttgatttttgtatatggtgtaaggtgagagttcarttccattattctgcatctggatatccagtttttccaacactatttatggcagagactttttttctcattgtgtgttcttctcacttttgttgaaaatcaa

SEQ ID NO: 423228 - DNA, 201 bp, Homo sapiens
gtaccaaatacattatagggcttttaagctgtgcagtaaaaccacaaaatttctaatcaaatattaatagctatctatcctgcttatatgtattctccttrtgatttaaaatcattgctaagccacagtttaacttcttaaaattttactttgtagaaaattttaaaattgaatatataaagaagcaagtaaatgccctca

SEQ ID NO: 423229 - DNA, 201 bp, Homo sapiens
cataaattgccatataaatgaatttttcattattaattttttttgtaattaagaaaccatatagaaacaaatgctttttttttgcactattacagctacasagatggtaacaaaaataccagcttgaaaacttggaataaaaatgattttaagcctcaatgtaaacgaacaaacttagtggcaaatgatggaaaaaattct

SEQ ID NO: 423230 - DNA, 201 bp, Homo sapiens
acagtagatattgccaaagaatttttcaaaggattgtgtcaatttaagtactcacaggcaatgtaggagagttatggttgctctgcattcttacgaacgcytagtattgtcgatcttttttattataacaattctgatgagtaaatttagtgttatctcatttctttacaattccctagtgagtaatgaggttgagtacct

SEQ ID NO: 423231 - DNA, 201 bp, Homo sapiens
caggcatttgtcaaaattgcagatgttgagatgcagtattatattaatgtgatgaatgaaacttaagtagtgataaaaggaagtttagcataaattatagyagttttctgttattgcttaatttaccatctccatagttttatagctactattgtatttcacttgttgaattaaagtatttgaattcttttaaatgtggaa

SEQ ID NO: 423232 - DNA, 201 bp, Homo sapiens
ttttttttttttaattctctattttatttatttctactctagtcttattattgcctttatatgcttattttgggcttagtttgttattctttttctaattyctttaagtgtgaagttaggatgcttatttgagatctttttatttccacttgggcattcattgctataaactccccttagtactgcttttgctttcccata

SEQ ID NO: 423233 - DNA, 201 bp, Homo sapiens
tgcctttatatgcttattttgggcttagtttgttattctttttctaatttctttaagtgtgaagttaggatgcttatttgagatctttttatttccacttrggcattcattgctataaactccccttagtactgcttttgctttcccataagttttggtatgttatgttttgtttctgtctcaataattttaagattttct

SEQ ID NO: 423234 - DNA, 201 bp, Homo sapiens
tttctttctttgcaggtctagtgggacaatgtcatattataaatttggaatgctgaatagaaaattatagattttgatattgaaggaaatgaagcgaagcstaaatgaaaattcagctcgaagtacagcaggtattgaacaactttttatttttaaattttctgtatagcatataaagcttgtatagtttatagatataac

SEQ ID NO: 423235 - DNA, 201 bp, Homo sapiens
gtattccgttatctctttatgatacatttgttagtccatttatctgtcacttgcattgtttacgtatcttggaatttttttttttttttttttttttttgkgaagtttcgctcttgttgcccaggcagtggcaacaagacaatgtgagtgcaatggtgtggtcttggctcactgcaacctccacctcctgggatcaagtga

SEQ ID NO: 423236 - DNA, 201 bp, Homo sapiens
tccgttatctctttatgatacatttgttagtccatttatctgtcacttgcattgtttacgtatcttggaatttttttttttttttttttttttttgtgaartttcgctcttgttgcccaggcagtggcaacaagacaatgtgagtgcaatggtgtggtcttggctcactgcaacctccacctcctgggatcaagtgattct

SEQ ID NO: 423237 - DNA, 201 bp, Homo sapiens
acatttgttagtccatttatctgtcacttgcattgtttacgtatcttggaatttttttttttttttttttttttttgtgaagtttcgctcttgttgcccargcagtggcaacaagacaatgtgagtgcaatggtgtggtcttggctcactgcaacctccacctcctgggatcaagtgattctcctgcctcagcctctcgag

SEQ ID NO: 423238 - DNA, 201 bp, Homo sapiens
ggaatctggctcttagtccatgctcttaatcattatgctatcagtatatgtcatattggcacaaagagtttagggaaattgcccaagatcatactctgaarttgtaattcaaacctactttgaagtcataattcaagacctaggcggtctgattccagagcccacataattctcccagcctttcatcagagactgttcaca

SEQ ID NO: 423239 - DNA, 201 bp, Homo sapiens
ttgataatatatcattgtagttttgatttgcattttcctgctgattagtgatgttgagtacctttttatatacctgttggccatctgtgtgtcttctttasaaaaatgtctatttaggttctttgcccatctttaaattgtgttgttttttgttactgagttctgtgaattccttaaatattttggatattaactacttaa

SEQ ID NO: 423240 - DNA, 201 bp, Homo sapiens
tttttgaacttcttttcccttcgagttccctaagtttcaaagtttatattttgtgacttttgacctgaattgagatcctagatccgccatctggaggaatyggtagtagtatttattctcatttggactggatattattactctttaaggcattctcaaaatgatccacaaaatatataattacagatacccgaggtgctt

SEQ ID NO: 423241 - DNA, 201 bp, Homo sapiens
attgtagggttgttgtgatgtatttggaatttctcagtagttagttataaagtgctttctaagtcataaattgccatataaatgaatttttcattattaattttttttgtaattaagaaaccatatagaaacaaatgctttttttttgcactattacagctacagagatggtaacaaaaataccagcttgaaaacttggaa

SEQ ID NO: 423242 - DNA, 201 bp, Homo sapiens
tttatttctgggctctctattctgttgatctatgtgcctgttttaataccagtaccatactgttttgattactgtagcttttaggtataacttgaaatcargaagtgtgatggctgcagctttattctttctcaagattgttttggctattcagagtcttttgtggttccatatgaattttaggattgttttttctatttc

SEQ ID NO: 423243 - DNA, 201 bp, Homo sapiens
aaatgggagaaaattttcgcaacctgctcatctgacaaagggctaatatccagaatctacaatgaactccaacaaatttacaagaaaaaaaaaccccatcraaaagtgggcaaaggatatgaacagacacttcttaaaagaagacatttatgcagccaaaagacacatgaaaaaatgctcatcatcactggccatcagaga

SEQ ID NO: 423244 - DNA, 201 bp, Homo sapiens
ttctctgcgttttttcctaagagttttatggtttcagttcttacatttaagtctttaatccatgttgagttgatttttgtatatggtgtaaggtgagagtycagttccattattctgcatctggatatccagtttttccaacactatttatggcagagactttttttctcattgtgtgttcttctcacttttgttgaaaat

SEQ ID NO: 423245 - DNA, 201 bp, Homo sapiens
tagaattcactgtgaagtcatctggtcctgggcttttctttgttgagaggtttttgattacttcgttaatctccttattattggtctgtttaggctttctrcctcttcttgattcaatcttggtaagttgcttgtttctaggtatttatccatttcttctgtgttatccaatttgttgtcatataatgttcataatagtcc

SEQ ID NO: 423246 - DNA, 201 bp, Homo sapiens
agttagttataaagtgctttctaagtcataaattgccatataaatgaatttttcattattaattttttttgtaattaagaaaccatatagaaacaaatgctttttttttgcactattacagctacagagatggtaacaaaaataccagcttgaaaacttggaataaaaatgattttaagcctcaatgtaaacgaacaaact

SEQ ID NO: 423247 - DNA, 201 bp, Homo sapiens
tgtagttctcaaatatttccttttgcttttgttgactgtgcttttggtgtcatattaaaaaaagtcatttgcaagaccagtgtcaaggagcttgttctctrcgttttttcctaagagttttatggtttcagttcttacatttaagtctttaatccatgttgagttgatttttgtatatggtgtaaggtgagagttcagttc

SEQ ID NO: 423248 - DNA, 201 bp, Homo sapiens
cttgctgttcccactgtcctcattcaacaacccacttaaaataataacccccatctctctctctttccatttaccttgtgtgtttttttcctaaaaaaaargtacatttcctgacattctgttatatgtttatttattttttaaatcctccactagacaataaaatcttcgaggacagatatcttgactgttttgtccatg

SEQ ID NO: 423249 - DNA, 201 bp, Homo sapiens
atagattgccttttcactctgttgattatttcctttactgtgcagaagctctttagtttgatgtagttctcaaatatttccttttgcttttgttgactgtrcttttggtgtcatattaaaaaaagtcatttgcaagaccagtgtcaaggagcttgttctctgcgttttttcctaagagttttatggtttcagttcttacat

SEQ ID NO: 423250 - DNA, 201 bp, Homo sapiens
gccaaaattttctcccatgctatagattgccttttcactctgttgattatttcctttactgtgcagaagctctttagtttgatgtagttctcaaatatttmcttttgcttttgttgactgtgcttttggtgtcatattaaaaaaagtcatttgcaagaccagtgtcaaggagcttgttctctgcgttttttcctaagagtt

SEQ ID NO: 423251 - DNA, 201 bp, Homo sapiens
attagattggggatgaaatgtgttaaggggctaaacgtgcaaaattacaagagaaattctattgtaaaagaagaaaactaaggaaaaacttgtttcacttkttgaagttgtggaaatggagtggaaacttgtcattacaattattctagatatgaagggaggacttagtcttttttttttttttttttttttgagatggag

SEQ ID NO: 423252 - DNA, 201 bp, Homo sapiens
actatttatggcagagactttttttctcattgtgtgttcttctcacttttgttgaaaatcaattaaatgtaaatgcatgggtttatttctgggctctctaytctgttgatctatgtgcctgttttaataccagtaccatactgttttgattactgtagcttttaggtataacttgaaatcaggaagtgtgatggctgcagc

SEQ ID NO: 423253 - DNA, 201 bp, Homo sapiens
caaaaatgtctatttaggttctttgcccatctttaaattgtgttgttttttgttactgagttctgtgaattccttaaatattttggatattaactacttawcagttacatagtttgccaaaattttctcccatgctatagattgccttttcactctgttgattatttcctttactgtgcagaagctctttagtttgatgta

SEQ ID NO: 423254 - DNA, 201 bp, Homo sapiens
ttttagatctccttcaacttgctcaggatggccaaagatatgaggaatattttcttttggactttatttgcctctggaacactctcttgacagtctcatcyttgttaacagttctgactgcagttgaatattgtatttctattgttatcttaaaaaaattttaattagggccagatgcagtggctcacacctgtaatcccg

SEQ ID NO: 423255 - DNA, 201 bp, Homo sapiens
atttttgaacagaaaaaagccatttcaccttttttgagtcttatgtctttatccatgggaaaaaaattgaactagatgatatctaaggttccttcagtgckcaatatatattgtggataaaacacacagttctgatgtatttatataactttgtgctgtcttgtctatcattaccaagaaaacccttgattaaggatttta

SEQ ID NO: 423256 - DNA, 201 bp, Homo sapiens
aagaaaattattcatagttgcactgatccagagttaatcattaatttatttttgaacagaaaaaagccatttcaccttttttgagtcttatgtctttatcsatgggaaaaaaattgaactagatgatatctaaggttccttcagtgctcaatatatattgtggataaaacacacagttctgatgtatttatataactttgt

SEQ ID NO: 423257 - DNA, 201 bp, Homo sapiens
gctctgtcgcccaggctggagtgcagtggcgtgatctcggctcactgcaacctccgcctcccgggttcaagtgattctcctgtctcagcctccagggtagytgggattacaggcacgcaccaccatgcccggctaatttttgtatttttagtagagacggggtttcacgttgttggtcaggctggtcttgaactcccgacc

SEQ ID NO: 423258 - DNA, 201 bp, Homo sapiens
cgtgatctcggctcactgcaacctccgcctcccgggttcaagtgattctcctgtctcagcctccagggtagctgggattacaggcacgcaccaccatgccyggctaatttttgtatttttagtagagacggggtttcacgttgttggtcaggctggtcttgaactcccgacctcaggtgacccacttgccttggcctcccg

SEQ ID NO: 423259 - DNA, 201 bp, Homo sapiens
gtgatctcggctcactgcaacctccgcctcccgggttcaagtgattctcctgtctcagcctccagggtagctgggattacaggcacgcaccaccatgcccrgctaatttttgtatttttagtagagacggggtttcacgttgttggtcaggctggtcttgaactcccgacctcaggtgacccacttgccttggcctcccga

SEQ ID NO: 423260 - DNA, 201 bp, Homo sapiens
caggaatattttctaaagggtccatctcttctacccagcttcaagcctaagatgtggaaacaaaacagaggcagcacctgacctcgtgtttcccaagttgtttttttttcttttttttttgagacggagtctcgctctgtcgcccaggctggagtgcagcggcacgatctccgctcactgcaacctccgcctcccgagttc

SEQ ID NO: 423261 - DNA, 201 bp, Homo sapiens
ggaatattttctaaagggtccatctcttctacccagcttcaagcctaagatgtggaaacaaaacagaggcagcacctgacctcgtgtttcccaagttgttwttttttcttttttttttgagacggagtctcgctctgtcgcccaggctggagtgcagcggcacgatctccgctcactgcaacctccgcctcccgagttcat

SEQ ID NO: 423262 - DNA, 201 bp, Homo sapiens
ttctaaagggtccatctcttctacccagcttcaagcctaagatgtggaaacaaaacagaggcagcacctgacctcgtgtttcccaagttgtttttttttcttttttttttgagacggagtctcgctctgtcgcccaggctggagtgcagcggcacgatctccgctcactgcaacctccgcctcccgagttcatgccattct

SEQ ID NO: 423263 - DNA, 201 bp, Homo sapiens
gcttcaagcctaagatgtggaaacaaaacagaggcagcacctgacctcgtgtttcccaagttgtttttttttcttttttttttgagacggagtctcgctcygtcgcccaggctggagtgcagcggcacgatctccgctcactgcaacctccgcctcccgagttcatgccattctcctgcctcagcctcacgagtagctggg

SEQ ID NO: 423264 - DNA, 201 bp, Homo sapiens
cagaggcagcacctgacctcgtgtttcccaagttgtttttttttcttttttttttgagacggagtctcgctctgtcgcccaggctggagtgcagcggcacratctccgctcactgcaacctccgcctcccgagttcatgccattctcctgcctcagcctcacgagtagctgggaccacaggtgcctgccaccacgcccggc

SEQ ID NO: 423265 - DNA, 201 bp, Homo sapiens
gagacggggtttccctctgttagccaggatggtcttgatctcctgatctcgtgatccgcccgtctcggcctcccaaagtgctgggattacaggcgtgagcmactgcacccggcctgtttcccaagttttatttttacaaacgatatttgaaagttaacacctcggcctgacttgcattattgcttagttgtgtatgtgtcg

SEQ ID NO: 423266 - DNA, 201 bp, Homo sapiens
attaataaagcatgtttcacagtggttctcaatcttatgtttccttgtactcaagaattatatgacataatcaccttagtaacagtggtttactgtggccwtcatcaacaggaggcatgttagaatcttcgttaagcgggggaagagggaagaaactacctgtattttgaaaaaaggtcccatcatatgttcttcacaacc

SEQ ID NO: 423267 - DNA, 201 bp, Homo sapiens
tttcatccagctatcctaattgtcatctgatgagctgttttgagtcacccagtctgctgcctactgaaagtggaactctgggaatctgataaaagagtggrtaatttcatgtgtcattacactggggattattcagtctttgatgaagcaacaacttgctagcttgtaagagccctaccaagtgagggtctttcctctgtt

SEQ ID NO: 423268 - DNA, 201 bp, Homo sapiens
ctctgatattggatgtatatatgttcacaatttttatgtcttcctattgaatttacccatttatcattatataatgactttctttgtctttagaaacaacttttaacttaaagtctattttgtctgacataaacttagccacccctgttttcttttggttgctgtttgcatggaatatctttttccatccctttattctca

SEQ ID NO: 423269 - DNA, 201 bp, Homo sapiens
atcctgtattgtttctagcagcctagtctatactttcttggggcatggagttttcaagagcaaagtacactcctattcttatagatactgtgttattagayacattatcaatatagatttcattcaccagtattaggatatggacaattagtaagattagtaaggatgagcttctttgccaaagcccctacaattggcttt

SEQ ID NO: 423270 - DNA, 201 bp, Homo sapiens
ttcaggtctgagtgggggtggttactagaatctcttttccttggacgcctaagattccatttttttgtttcccacctatacaagtctgtgaaatctctgcycagtttcttagactctcaaatgcttttctgtaatttgcagacatctcagggagaaagcacaccccaaaccaggtttcatctgagactcccatactatcct

SEQ ID NO: 423271 - DNA, 201 bp, Homo sapiens
gaagatcttttgaaccagttaaaggactaatcttcaggtttagagtccaggctacagttgccagatttagcaaataaaaataaaggatgcccagttaaatytgaatttcaggtaatcaggaattttttagtatgtgtcacagccaatatttgggacatacttataccaaaaatttgttacttacttgaaatgcaaatttaa

SEQ ID NO: 423272 - DNA, 201 bp, Homo sapiens
agtttgtaatcccaggtagaatggtacagaaatgttacactgtgatatggtgaatggcttggtggagctaggtatgtgcagggtgctagagaagtaggtargaaggaaggggcagatcagggaaagattttcaaagaaggtggtaacttatcctagatctttaaggactaataagaatcaactaagccaaaatgtgttggg

SEQ ID NO: 423273 - DNA, 201 bp, Homo sapiens
gaactttttatatagttgttaataaatacattgaaataatatctttatttaaaaattagttttgattttattattcatgctagtttccccaggaccagtcygtcagtttcttcataacaaggccttaaaactaggcctgttcagtggtttgggatggttcttagagacattgttccaactgcaggagctagaagaaaatcc

SEQ ID NO: 423274 - DNA, 201 bp, Homo sapiens
gtgacacatgactgtgtcagtgtgtatcacacatattaaggataagatttgatgaagttttatattcttttttctcctctctatctctgtctcacacatayatcatgcatgtatatgttctgagttatgatgtatttctttctgtgggtgagattttaaaagttcagtaaacattggattagatgaaattcatgttacaaa

SEQ ID NO: 423275 - DNA, 201 bp, Homo sapiens
catgttgttgctcaaaaagtttcaaattttggagcatttcgagttttggattttcagatttagaatgcccagcctgtaactatgtttgaatagaagtggtragagtgggcatccttgcgtcgtactggatctttgaaaaaaaactttcagttttcccccattatgatgttagctgtgggaattttgcaaatgacctttatt

SEQ ID NO: 423276 - DNA, 201 bp, Homo sapiens
ataatgtcatagcacagtttatttttttttataaatgtagcctaaatgtatggtgtgtttagtgtacagtagtgtatacagtaatgtcctaggccttcgtwttcactcaccacttaatcactaactcacccaaagcaactttcagtcctgcaagctccatttatggtaagtgccctcttaggtgtattggtttttatcttt

SEQ ID NO: 423277 - DNA, 201 bp, Homo sapiens
tcataatgtcatagcacagtttatttttttttataaatgtagcctaaatgtatggtgtgtttagtgtacagtagtgtatacagtaatgtcctaggccttcrtattcactcaccacttaatcactaactcacccaaagcaactttcagtcctgcaagctccatttatggtaagtgccctcttaggtgtattggtttttatct

SEQ ID NO: 423278 - DNA, 201 bp, Homo sapiens
ttagctgaggtttggtgggtgctgggaggtcttaatggttgttgttgactttttactttcctctggaagaggaatgggcaggcagacattctgaagtataygtggtacatgctggttatatacatttacattttgggggcacattttaaaaattaataggatcttatatagctagaatttaaaaatatctctgatgtagca

SEQ ID NO: 423279 - DNA, 201 bp, Homo sapiens
tcatccagttggcttccttacagcttcaactggcacatgagctaagttgcccttcctgtgagtttgcataaccttttagttctagttctcagaggtcaccrgtagactgccctctggatctcttaattcacatcctagagacagcttgtgattcagctcatcttttaagtaaggccactgaaatcctggcttaggtttggg

SEQ ID NO: 423280 - DNA, 201 bp, Homo sapiens
aagtcatgagggcagagccctcatgaatgagattagtgactttataaaaggtatgagggagcttttccgtccttctgtcatgtgaggacacagtaagaagmcttgacttcccagcctccaaaactgagaaatacatttatcatatttgtaaataacccgttctaaagtattttgttatagtagagtccaaagggactaaga

SEQ ID NO: 423281 - DNA, 201 bp, Homo sapiens
ttgtaagagccctaccaagtgagggtctttcctctgttacagggtaccaatatgtgaataactatcattgtcttgttagcagtggggccctgactcacgtraaggaattatagcattttgaggtggcacatgtttagttgatcacataaatatttaaaaaattgaaattcagatgaagtaataactattttttgatactta

SEQ ID NO: 423282 - DNA, 201 bp, Homo sapiens
acttggaataaaaatgattttaagcctcaatgtaaacgaacaaacttagtggcaaatgatggaaaaaattcttgtccagtgagttcgggagctcaacaacraaaacaattaagaatacctgaacctcctaacttatctcgcaacaaagaaaccgagctactcagacaaacacattcatcaaaaatatctggctgcacaatg

SEQ ID NO: 423283 - DNA, 201 bp, Homo sapiens
ttgtacttcaaaggtcccctgcagtcgatatggtaacaggcaagcacaggagggggataaggaaaacaaaaagtggatttggaaaggttgggggatgaggkgggagatgggaattacttccatatgggaggaattaaaactgttagagtagaataagaaaagttttttgaagaaacaaattaggctattcaggatcttaaa

SEQ ID NO: 423284 - DNA, 201 bp, Homo sapiens
cctgtattgggtaagagataggactgcatcagtgttgtttttttttgttttttaaatttttatttttattgatcattcttgggtgtttctcacagaggggsatttggcagggtcataggacaatagtggagggaaggtcagcagataaacaagtgaacaaaggtctctggttttcctaggcagaggaccctgcggccttcc

SEQ ID NO: 423285 - DNA, 201 bp, Homo sapiens
ccacctccctcccggacggagcggctggccgggcagaggggctcctcacttcccagtaggggcggctgggcagaggcgcccctcacctcccagaccgggcrgctggccgggtggggggctgacccccccccacccccctcccagacggggtggctgccgggcggagacgctcctcacttcccagacggggtggctgccggg

SEQ ID NO: 423286 - DNA, 201 bp, Homo sapiens
tcacctcccagaccgggcggctggccgggtggggggctgacccccccccacccccctcccagacggggtggctgccgggcggagacgctcctcacttcccrgacggggtggctgccgggcggaggggctcctcacttctcagacggggcggctgccgggcggaggggctcctcacttctcagacggggcggttgccgggcg

SEQ ID NO: 423287 - DNA, 201 bp, Homo sapiens
cgggaagaggcgcttctcacttcctagatgggacggcggccgggcagagacactcctcactttccagactgggcagccaggcagaggggctcctcacatcycagacgatgggcggccaggcagagacgctcctcacttcccagacggggtggcggccgggcagaggctgcactctgggcactttgggaggccaaggcaggc

SEQ ID NO: 423288 - DNA, 201 bp, Homo sapiens
ttcccagacggggtggcggccgggcagaggctgcactctgggcactttgggaggccaaggcaggcggctgggaggtggaggttgtagcgagccgagatcaygccactgcactccagcctgggcaccattgagcactgagtgaaccagacaccgtctgcaatcccggcacctccggaggccgaggctggcggatcactcgcg

SEQ ID NO: 423289 - DNA, 201 bp, Homo sapiens
aggccaaggcaggcggctgggaggtggaggttgtagcgagccgagatcacgccactgcactccagcctgggcaccattgagcactgagtgaaccagacacygtctgcaatcccggcacctccggaggccgaggctggcggatcactcgcggttaggagctggagaccagcccggccaacacagcgaaacccgtctccacca

SEQ ID NO: 423290 - DNA, 201 bp, Homo sapiens
ggccgaggctggcggatcactcgcggttaggagctggagaccagcccggccaacacagcgaaacccgtctccaccaaaaaaatacgaaaaccagtcaggcrtggcggcgcgcgcctgcaatcgcaggcactcggcagggtgaggcaggagaatcaggcagggaggttgcagtgagccgagatggcagcagtacagtccagc

SEQ ID NO: 423291 - DNA, 201 bp, Homo sapiens
ataatgttgtagactgttctggggatttaaccactctgtactacacattctaaggaaaaagtttcagatggccatttattgtcaattgtatgagcttggcmtataatctgttcctaagttggagagagtcagaagttttgttttcctacctataaaactgcctgagaaatatcttctcttcttaaaatgtcttctttattg

SEQ ID NO: 423292 - DNA, 201 bp, Homo sapiens
aggctggcggatcactcgcggttaggagctggagaccagcccggccaacacagcgaaacccgtctccaccaaaaaaatacgaaaaccagtcaggcgtggcrgcgcgcgcctgcaatcgcaggcactcggcagggtgaggcaggagaatcaggcagggaggttgcagtgagccgagatggcagcagtacagtccagcttcgg

SEQ ID NO: 423293 - DNA, 201 bp, Homo sapiens
ctgacccccccacctccctcccggacggagcggctggccgggcagaggggctcctcacttcccagtaggggcggctgggcagaggcgcccctcacctcccrgaccgggcggctggccgggtggggggctgacccccccccacccccctcccagacggggtggctgccgggcggagacgctcctcacttcccagacggggtg

SEQ ID NO: 423294 - DNA, 201 bp, Homo sapiens
cggatcactcgcggttaggagctggagaccagcccggccaacacagcgaaacccgtctccaccaaaaaaatacgaaaaccagtcaggcgtggcggcgcgcrcctgcaatcgcaggcactcggcagggtgaggcaggagaatcaggcagggaggttgcagtgagccgagatggcagcagtacagtccagcttcggcttggca

SEQ ID NO: 423295 - DNA, 201 bp, Homo sapiens
cgtcacaattctctaaacatagcatacactctgtgctttggtttatattcttccctatacctgtatctcaactgtacttcctctctacgctcagtgctctrattgctctttgtaaatgttatttatatattatgtgtgctggttattcctcatctctgctccctggccccttggcccacttgattcttcacctgcccttct

SEQ ID NO: 423296 - DNA, 201 bp, Homo sapiens
ccggccaacacagcgaaacccgtctccaccaaaaaaatacgaaaaccagtcaggcgtggcggcgcgcgcctgcaatcgcaggcactcggcagggtgaggcrggagaatcaggcagggaggttgcagtgagccgagatggcagcagtacagtccagcttcggcttggcatgagagggagaccgtggaaacagagggagaggg

SEQ ID NO: 423297 - DNA, 201 bp, Homo sapiens
caaatgatggaaaaaattcttgtccagtgagttcgggagctcaacaacaaaaacaattaagaatacctgaacctcctaacttatctcgcaacaaagaaacygagctactcagacaaacacattcatcaaaaatatctggctgcacaatgagagggctagacaaaaacagtgcactacagacacttaagcccaattttcaac

SEQ ID NO: 423298 - DNA, 201 bp, Homo sapiens
gattttaagcctcaatgtaaacgaacaaacttagtggcaaatgatggaaaaaattcttgtccagtgagttcgggagctcaacaacaaaaacaattaagaayacctgaacctcctaacttatctcgcaacaaagaaaccgagctactcagacaaacacattcatcaaaaatatctggctgcacaatgagagggctagacaaa

SEQ ID NO: 423299 - DNA, 201 bp, Homo sapiens
taacaaaaataccagcttgaaaacttggaataaaaatgattttaagcctcaatgtaaacgaacaaacttagtggcaaatgatggaaaaaattcttgtccartgagttcgggagctcaacaacaaaaacaattaagaatacctgaacctcctaacttatctcgcaacaaagaaaccgagctactcagacaaacacattcatc

SEQ ID NO: 423300 - DNA, 201 bp, Homo sapiens
ttgtgacttacttgttaaaaatatttccggaagcacttctgtctttctaatagcttctcctatcatttttgctttcccaatttattagtataaagacagayggcaaggatgatgagaaccaggggaatgatgatgcataatgaagataatagtaactattatttatggtggattaactgtattcaagacattaattatata

SEQ ID NO: 423301 - DNA, 201 bp, Homo sapiens
agcatctagcataatgttctggtcagctgatataacacacttaatgttgctgacaaatgctgtaccaaatacattatagggcttttaagctgtgcagtaaraccacaaaatttctaatcaaatattaatagctatctatcctgcttatatgtattctccttgtgatttaaaatcattgctaagccacagtttaacttctta

SEQ ID NO: 423302 - DNA, 201 bp, Homo sapiens
gatcacttgagcccaggagtttgtggccagcttgggcaacgtggtgaaaccctgtctctacaaaaaataacaaaaattagctgggcatagtggcactcacstgtagttccagctactcaggaggctgaggtgggaggatcgcttgagcctgggagattgatgctagagtgagctgtgttcttgccattacattccagcctg

SEQ ID NO: 423303 - DNA, 201 bp, Homo sapiens
aagcttcagacctcataaaacttggatttgttcctggtcagcagtgtacctagacctctttttggattatttacctaagtaggggatgggttgtattggtkgccctcttgtgatacttgtggtatttccaggaaaattactgagaattaagaatttgtgggctgggaatggtggcttatgcctctagccccagcactttgg

SEQ ID NO: 423304 - DNA, 201 bp, Homo sapiens
tcgcccaggctggagtgcagtggcgtgatctcggctcactgcaacctccgcctcccgggttcaagtgattctcctgtctcagcctccagggtagctgggaytacaggcacgcaccaccatgcccggctaatttttgtatttttagtagagacggggtttcacgttgttggtcaggctggtcttgaactcccgacctcaggt

SEQ ID NO: 423305 - DNA, 201 bp, Homo sapiens
acctctgttgtacttcaaaggtcccctgcagtcgatatggtaacaggcaagcacaggagggggataaggaaaacaaaaagtggatttggaaaggttggggratgaggggggagatgggaattacttccatatgggaggaattaaaactgttagagtagaataagaaaagttttttgaagaaacaaattaggctattcagga

SEQ ID NO: 423306 - DNA, 201 bp, Homo sapiens
ctaaggttatagaaatctataagtatattagcatatagaagtagataaatgtaaagtgtgtattatactagtaattattttacaactagatctgcttattkgtctattatgtactaatttattggtacattcaatttaggctgtttgcctgttccgttgttcaatcagaaaaagaggaacagacagccattaacttctaat

SEQ ID NO: 423307 - DNA, 201 bp, Homo sapiens
tggtgtaaagaaatgctcctgatttttgtatgttgattttgtatcctgcaattttactgaattcattttttagttctaacagtttcttaatggagtttttrgggttttctacatacaagatcatgtcatctgcaaacagagacatttacttcatcctttccaatttgcgctccttttatttccttttcttggctaattgat

SEQ ID NO: 423308 - DNA, 201 bp, Homo sapiens
ggatttggaaaggttgggggatgaggggggagatgggaattacttccatatgggaggaattaaaactgttagagtagaataagaaaagttttttgaagaarcaaattaggctattcaggatcttaaaaagaatgtaaaaatcattctaaggttatagaaatctataagtatattagcatatagaagtagataaatgtaaag

SEQ ID NO: 423309 - DNA, 201 bp, Homo sapiens
cacttaaaataataacccccatctctctctctttccatttaccttgtgtgtttttttcctaaaaaaaaagtacatttcctgacattctgttatatgtttayttattttttaaatcctccactagacaataaaatcttcgaggacagatatcttgactgttttgtccatgaatttttcctaaatagctatgtttggcatgta

SEQ ID NO: 423310 - DNA, 201 bp, Homo sapiens
aaaaatacgaaaaccagtcaggcgtggcggcgcgcgcctgcaatcgcaggcactcggcagggtgaggcaggagaatcaggcagggaggttgcagtgagccragatggcagcagtacagtccagcttcggcttggcatgagagggagaccgtggaaacagagggagagggagaccgtggggagagggagagggagaggcaga

SEQ ID NO: 423311 - DNA, 201 bp, Homo sapiens
cactgttggtgggcatttgggtttctggattttttgctgttatgcataatgttctatgaacattcttatctatgtctcttatgcatttgcatgtatttctrtttgatatatactcagaagtaaaattgctgggtcatagagcatgtgtatattcaaatacagtagatattgccaaagaatttttcaaaggattgtgtcaat

SEQ ID NO: 423312 - DNA, 201 bp, Homo sapiens
tacgaaaaccagtcaggcgtggcggcgcgcgcctgcaatcgcaggcactcggcagggtgaggcaggagaatcaggcagggaggttgcagtgagccgagatsgcagcagtacagtccagcttcggcttggcatgagagggagaccgtggaaacagagggagagggagaccgtggggagagggagagggagaggcagagggag

SEQ ID NO: 423313 - DNA, 201 bp, Homo sapiens
taagaatacctgaacctcctaacttatctcgcaacaaagaaaccgagctactcagacaaacacattcatcaaaaatatctggctgcacaatgagagggctrgacaaaaacagtgcactacagacacttaagcccaattttcaacaaaatcaatataagaaacaaatgttggatgatattccagaagacaacaccctgaagg

SEQ ID NO: 423314 - DNA, 201 bp, Homo sapiens
acgaaaaccagtcaggcgtggcggcgcgcgcctgcaatcgcaggcactcggcagggtgaggcaggagaatcaggcagggaggttgcagtgagccgagatgrcagcagtacagtccagcttcggcttggcatgagagggagaccgtggaaacagagggagagggagaccgtggggagagggagagggagaggcagagggaga

SEQ ID NO: 423315 - DNA, 201 bp, Homo sapiens
gcgcgcctgcaatcgcaggcactcggcagggtgaggcaggagaatcaggcagggaggttgcagtgagccgagatggcagcagtacagtccagcttcggctyggcatgagagggagaccgtggaaacagagggagagggagaccgtggggagagggagagggagaggcagagggagaggcagagggagagggagagggagag

SEQ ID NO: 423316 - DNA, 201 bp, Homo sapiens
caatcgcaggcactcggcagggtgaggcaggagaatcaggcagggaggttgcagtgagccgagatggcagcagtacagtccagcttcggcttggcatgagrgggagaccgtggaaacagagggagagggagaccgtggggagagggagagggagaggcagagggagaggcagagggagagggagagggagagggagaggga

SEQ ID NO: 423317 - DNA, 201 bp, Homo sapiens
gcactcggcagggtgaggcaggagaatcaggcagggaggttgcagtgagccgagatggcagcagtacagtccagcttcggcttggcatgagagggagaccrtggaaacagagggagagggagaccgtggggagagggagagggagaggcagagggagaggcagagggagagggagagggagagggagagggagagggagag

SEQ ID NO: 423318 - DNA, 201 bp, Homo sapiens
ctgttaagtgctttgatatgttatttcaataatccttacaacaaccatatgaagttaatactattctcatttttattatataaagatatcgtatttttttwaaagggggaactttttatatagttgttaataaatacattgaaataatatctttatttaaaaattagttttgattttattattcatgctagtttccccagg

SEQ ID NO: 423319 - DNA, 201 bp, Homo sapiens
tgcatcccagaaataaatcccagttaatcatggtgtataattttgttaaaaaatatttcaactttcactttaaatataagcggtacatgtgcagatttgtytacatgggaatattgtgtgatgctaaggtttgaagtatggatcctgtcacctcacccatgaagtgaacagagtactcgacaggtaatttttttgatgtgc

SEQ ID NO: 423320 - DNA, 201 bp, Homo sapiens
ttaatccactcagcctctcctcatataggcataccttattatgttgcactttgctttattgcacttcacagatactgcattctttacaagtcaaagtttcrtagtaaccctgcattgagcaagtcgattggtgccattttccaacagtatgtgctcacttcatgtttctatgtcacattttggtacttcttgcaatatttc

SEQ ID NO: 423321 - DNA, 201 bp, Homo sapiens
tttctttgtctttagaaacaacttttaacttaaagtctattttgtctgacataaacttagccacccctgttttcttttggttgctgtttgcatggaatatstttttccatccctttattctcagcttttatgtgtctttgaatctaaactgagttcattgtagacagcatacagttggatctttaatccactcagcctctc

SEQ ID NO: 423322 - DNA, 201 bp, Homo sapiens
ggctttagactctgaggagacattgagcttgtacttttagtagttaagacatctcagttgaggagttgaggtgatatgaggacttttaacatttttaatcytttttttttttttttttttttgagactggatcttgccatgttgcccaggctggagtgcagtggcatgatcatagctcattgcaaccttgaactcctgggc

SEQ ID NO: 423323 - DNA, 201 bp, Homo sapiens
cccatttatcattatataatgactttctttgtctttagaaacaacttttaacttaaagtctattttgtctgacataaacttagccacccctgttttctttyggttgctgtttgcatggaatatctttttccatccctttattctcagcttttatgtgtctttgaatctaaactgagttcattgtagacagcatacagttgg

SEQ ID NO: 423324 - DNA, 201 bp, Homo sapiens
tacagaaaaaagattactgctcagttaaggtccttttccaaataacttcacacaaatcctttggttgctccaaacagaatgagagctatgagaatggtggyccagcccggccatcagactcccaagcatttggtccccggtctgaggtcacagaatctttgccacctttaccgagactgctctcagctgaggacaacaggc

SEQ ID NO: 423325 - DNA, 201 bp, Homo sapiens
cccaagccctgcctctcacaatctttccccatttctgctgcctctttgttgcctctggaggatgaagagggctttttcgcttgccctcaaatgctcatttmtgaggtaccccccccagaaaaaggtcaggtagcaacacagcagcaatagtatccacactaatctaaaagcatatttaaatatgaattactgtggtaggaa

SEQ ID NO: 423326 - DNA, 201 bp, Homo sapiens
ttgtcattattaaggtttcattaaagcagtcaaaattcagggagaatgtctatagatttcatttctctatcttcactgaattgattgaggactgatgttasagatttttttctctaaaacatttccatttgatttctcactgtatttgttcaatttgctagtcataagatttctttatatgggctacttttatctgctctg

SEQ ID NO: 423327 - DNA, 201 bp, Homo sapiens
aagccctggtatccccagcccatataggctattcttagggctacgtgtcttcggccatgagcactgaaatcaaatgcacgcttagtttttccagctcctgmtgaattttctctaatgtttgagtcctccttatttttggcctgttcctttttaagtctttgcacctcttgctccagttctcgtactctttttaggagcttc

SEQ ID NO: 423328 - DNA, 201 bp, Homo sapiens
aattatgcagcattagtttatgatttatatattagtattgtttttaattgtcccatgtgttatttgcactagcagcttgaggatagaaaacatatttgtakacctgaagtcttgaacatgggtaggaaaaaactaattattggttggtaagtaaaactttggatctcataaacatggtagaattgtaaattagaggatcag

SEQ ID NO: 423329 - DNA, 201 bp, Homo sapiens
atatttttgccacacaattctatcgggcatgtaaattttttcagtggccctgcaaaatctaagctttttaaggaatgtctttgctctacaaatgtgacctktgcttacctttttaaactatgttcttgtcactctcaagccgtattaaagaattgagctgcctgaatgcatatgttgtcatctctaaccctttatacaaac

SEQ ID NO: 423330 - DNA, 201 bp, Homo sapiens
ttccctctttctccttcttaaatctttttaaacttctttcacaggattgtttgagataacctagctctttatatcttcccttttaaatagaaacaactgtsttgagaagctcttcgaaacattttatggtaaggacttcacctatcattggtctttcctagctatatatcacattggtatcagatgatacttccaaattgc

SEQ ID NO: 423331 - DNA, 201 bp, Homo sapiens
tcccttccctctttctccttcttaaatctttttaaacttctttcacaggattgtttgagataacctagctctttatatcttcccttttaaatagaaacaaytgtcttgagaagctcttcgaaacattttatggtaaggacttcacctatcattggtctttcctagctatatatcacattggtatcagatgatacttccaaa

SEQ ID NO: 423332 - DNA, 201 bp, Homo sapiens
actagcattgggtatgtggctgattgatgtggataccaagttatttcagacactagaataaacagatttagctggcaactgaagatgcattaaaactaccmagacagctgggcgcggtggctcacccctgtaatgggaggccgaggcgggtgggttgcctgaggtcaggagtttgagaccagcctggctaacatggtaaaa

SEQ ID NO: 423333 - DNA, 201 bp, Homo sapiens
aacgtctgcgttcctgagggaggcggccggggcagcgtgagctacaggcgatgtgcgcggcgggccgcagcccctggaggtcacggtgtgcgctggccgcygccgcggtctttgccccggtggcctttctgagctcctgggccgcgcccctgggaccaggcggaggccggggacggccccagggctggaggggagtcccga

SEQ ID NO: 423334 - DNA, 201 bp, Homo sapiens
aacaaaaagaaaaaagcttataaaaattttttaaaaaaaattttaaatgctcaattttactcagctgagataaatgcaaaaggatatgaactatttttcarggaagtgactgcaaagacaaagtttgatagtataccactttggagagggaatagagacacaagctctattaatgtatggtcagtacagcttctttggagg

SEQ ID NO: 423335 - DNA, 201 bp, Homo sapiens
gatggtaaagtgcgaccttcctcaatatatatttcatgaatatatacatcagttttaatgaaaaagtaaaaaaaaaaaatccagcaacctgagagtcaaakgggcaaagaccaagcatttcaaacaaaaagaaaaaagcttataaaaattttttaaaaaaaattttaaatgctcaattttactcagctgagataaatgcaa

SEQ ID NO: 423336 - DNA, 201 bp, Homo sapiens
aaagggatacaacagtttcaatgctagttcctttgatgatgttctaatggtatataagatttaatttaatgcccaaagaatatacttttgcttttccaggratacaagcattagctttattgtgggttgatcatccacagatagcattcttttccatcctgtctggccagttcacagagggaaagaactgtttgttattca

SEQ ID NO: 423337 - DNA, 201 bp, Homo sapiens
cctcttgctccagttctcgtactctttttaggagcttctcagtctggtttctgtctgtgtcattatcagccatgatatgacaaccccaggaataaaccaaycatacaggtctgccctgtctgaaaagagagcaaagggatacaacagtttcaatgctagttcctttgatgatgttctaatggtatataagatttaatttaa

SEQ ID NO: 423338 - DNA, 201 bp, Homo sapiens
gcacctcttgctccagttctcgtactctttttaggagcttctcagtctggtttctgtctgtgtcattatcagccatgatatgacaaccccaggaataaacsaatcatacaggtctgccctgtctgaaaagagagcaaagggatacaacagtttcaatgctagttcctttgatgatgttctaatggtatataagatttaatt

SEQ ID NO: 423339 - DNA, 201 bp, Homo sapiens
ttatttttggcctgttcctttttaagtctttgcacctcttgctccagttctcgtactctttttaggagcttctcagtctggtttctgtctgtgtcattatmagccatgatatgacaaccccaggaataaaccaatcatacaggtctgccctgtctgaaaagagagcaaagggatacaacagtttcaatgctagttcctttg

SEQ ID NO: 423340 - DNA, 201 bp, Homo sapiens
ttaaactatgttcttgtcactctcaagccgtattaaagaattgagctgcctgaatgcatatgttgtcatctctaaccctttatacaaactggatcttctgmcttagacacatttaaagtggttctttatcctcattttaactggctcccacttgttctgcaagatctagcttcaatatctcctctataagaacttgcctat

SEQ ID NO: 423341 - DNA, 201 bp, Homo sapiens
gatgatacttccaaattgccactcaaatccagcaattgcaagataaatcatatcagagaaagaacaacagacctggtctttctattttgtcaaattagtamgggccctttgtgtcctgtaactttttttacctatcaatatgagttgctgtgcttcagtgtgtgttttttaagttgctgggcattacacttaccaattaaa

SEQ ID NO: 423342 - DNA, 201 bp, Homo sapiens
tagaataaacagatttagctggcaactgaagatgcattaaaactaccaagacagctgggcgcggtggctcacccctgtaatgggaggccgaggcgggtggrttgcctgaggtcaggagtttgagaccagcctggctaacatggtaaaaccccatctctactaaaaattcaaaaattagccaggcgtggtggcccacacctg

SEQ ID NO: 423343 - DNA, 201 bp, Homo sapiens
aggtggttcctagatcctggcaaattgtctatggttaaatgatgcttttaatttctgtgtcaacacagaccctcttcgttggtgtctccaaattagtattstcttcctctagtgtgtcattacagtcccttttggcttttgtttcttcctcatggaataaatgtgggtgctcaattcgtcccctacgtacaaaatgctgga

SEQ ID NO: 423344 - DNA, 201 bp, Homo sapiens
acacacttgccagcaccgggtactgaaaaaatcttatcaatctgaaatgatgtcttaatgcttttatacacattactgaaattgaacatgttttctgtttwttaatttttgttgctgtttagaaacagacgttggctttgtgcccaggctggagtgcagtggccagatcatagctcagtgcagcctcaaactccagggttc

SEQ ID NO: 423345 - DNA, 201 bp, Homo sapiens
cacacttgccagcaccgggtactgaaaaaatcttatcaatctgaaatgatgtcttaatgcttttatacacattactgaaattgaacatgttttctgtttaytaatttttgttgctgtttagaaacagacgttggctttgtgcccaggctggagtgcagtggccagatcatagctcagtgcagcctcaaactccagggttca

SEQ ID NO: 423346 - DNA, 201 bp, Homo sapiens
cttattaaagcaataacttccttaatagggctttagtctttttgcttttttttttcttttaagagctgatcatctgaattcctagtacttgcaagtaaatttttttttttttccttttctgtccacctaccattaggtggttcctagatcctggcaaattgtctatggttaaatgatgcttttaatttctgtgtcaacaca

SEQ ID NO: 423347 - DNA, 201 bp, Homo sapiens
aataacttccttaatagggctttagtctttttgcttttttttttcttttaagagctgatcatctgaattcctagtacttgcaagtaaattttttttttttyccttttctgtccacctaccattaggtggttcctagatcctggcaaattgtctatggttaaatgatgcttttaatttctgtgtcaacacagaccctcttcg

SEQ ID NO: 423348 - DNA, 201 bp, Homo sapiens
ggcaaatgacaaactgagaagaaaaaaataagtgatggtaaagtgcgaccttcctcaatatatatttcatgaatatatacatcagttttaatgaaaaagtaaaaaaaaaaaatccagcaacctgagagtcaaatgggcaaagaccaagcatttcaaacaaaaagaaaaaagcttataaaaattttttaaaaaaaattttaa

SEQ ID NO: 423349 - DNA, 201 bp, Homo sapiens
ggctcacccctgtaatgggaggccgaggcgggtgggttgcctgaggtcaggagtttgagaccagcctggctaacatggtaaaaccccatctctactaaaamttcaaaaattagccaggcgtggtggcccacacctgtagtagtccagttactccggagtcttagacaggataatcgcttgaacccaggaggtggaggttgc

SEQ ID NO: 423350 - DNA, 201 bp, Homo sapiens
  misc_feature (1)...(201): n = A,T,C or G
tgaaataaggtaagaaattgaaaaaaaaaaaaaaaaaaccttggtttgcacttacatatttaagttattccaccatgatcattgattacatgaaaaagagnatctttaaatcaaaagtaaaggccaaagtaattatattttaagaatactcaggacataatgaagtgttgatagactgggtcccaaaaagcagtgataatg

SEQ ID NO: 423351 - DNA, 201 bp, Homo sapiens
gcataatccatggttacaatatctaaatcagcacgagggaaaaaatagcggtaagtccgctcaaggcagctgaacctagcactgaagcttggttctacagrggcccaggccaatatacggatgtctggagggagtacccgattgagaatgtgggtataacggatctcttcagcagcagcattagcctcctcttttacatta

SEQ ID NO: 423352 - DNA, 201 bp, Homo sapiens
tacccacatctgtgcagggcagggtgaaggagatgtcaggagagaagcccaatctatccaatatgatccctacagtaaagcttcagtagccccagggaagygacctgctcttcctgtgcaactacagtacccacatgtagaaagtaatgtcccttcagaaacagtctctgaggcctcccaaagactccgaaagccagtgat

SEQ ID NO: 423353 - DNA, 201 bp, Homo sapiens
ggacggtgcagagtggcagcttccctccgtggattccaggtcctgcctggcgagccgtccccaacgtctgcgttcctgagggaggcggccggggcagcgtragctacaggcgatgtgcgcggcgggccgcagcccctggaggtcacggtgtgcgctggccgccgccgcggtctttgccccggtggcctttctgagctcctg

SEQ ID NO: 423354 - DNA, 201 bp, Homo sapiens
ctacagccatactagagaaaaagagaaaagaaagtttgagaatacataacatccatctaacagttctttaaaaactaagggttagttgcgttaagggagcygggtagggcgccaccattgatgttaatattgcctaatagctgagaaaatatctcaccatccctaaccttgaacacctttattacaataatgaaaaatgca

SEQ ID NO: 423355 - DNA, 201 bp, Homo sapiens
aatacataacatccatctaacagttctttaaaaactaagggttagttgcgttaagggagccgggtagggcgccaccattgatgttaatattgcctaatagstgagaaaatatctcaccatccctaaccttgaacacctttattacaataatgaaaaatgcaacaaatcatagatcaacctgatctatgtaaggtaaatgtc

SEQ ID NO: 423356 - DNA, 201 bp, Homo sapiens
aattatattttaagaatactcaggacataatgaagtgttgatagactgggtcccaaaaagcagtgataatgattcaaatccagaagacttggatcatacawtgggcaattttgaataaatcttaagtaatttgtaccactaattccccatctctaaaatggggtattttctggttccctgtctgctaggatataacagcta

SEQ ID NO: 423357 - DNA, 201 bp, Homo sapiens
catttgggggcttcccatttgttccacctgtgatgactgtcttgactttttctatggcaactaccaaaaatgtagtcactaaattcttactcttctagatkggataatataatctagccagacttgaagggattttacttaagatctaagaccctgatcttctgattcctttgcttctacacagtatcctaacaatgactt

SEQ ID NO: 423358 - DNA, 201 bp, Homo sapiens
tctcacaaatcgttatttatgtataaatatataaaaagtgtcatttaaatttcacaacctaaatagttcctttattccaacatttatttagtccttaccakgggccagagacttcggatttgtacaaatgctgtctaagagagcaagtacttttgcaaagttgcatttgggggcttcccatttgttccacctgtgatgact

SEQ ID NO: 423359 - DNA, 201 bp, Homo sapiens
catgccattaaaaaaaaaaactaactcttggctttactgccaaaaatcctcctagcccagagtctcacaaatcgttatttatgtataaatatataaaaagkgtcatttaaatttcacaacctaaatagttcctttattccaacatttatttagtccttaccatgggccagagacttcggatttgtacaaatgctgtctaag

SEQ ID NO: 423360 - DNA, 201 bp, Homo sapiens
tttttattctaaacagtatacaatctcactaagcaggcaaagaaaaacattaagatatctttttagattggtaagatttttcagtaccccatgctgctgaragagtgaagaaatgaaagcaagcacctttatggcctgtgtgctggggataatctgtttttctagagggcagtttggcattataaatcagaattcaggccg

SEQ ID NO: 423361 - DNA, 201 bp, Homo sapiens
gataatcccacagctgaaaattacatgaattaataaatgtaaagcacatagaacaatggcaggcacataaagtactccctaagtacctgttacataatgtrcattaagcagtatgccccatatcatgtagtttcaagcttttcttatgccagaactatactgtcctgttttaggacctgaaggtggcaagacagtagaaag

SEQ ID NO: 423362 - DNA, 201 bp, Homo sapiens
aggaaaaaaataggagtgtgacacagttgaaatgcagaggaaataacacattaatcactgtatagtaggacacatgccattaaaaaaaaaaactaactctkggctttactgccaaaaatcctcctagcccagagtctcacaaatcgttatttatgtataaatatataaaaagtgtcatttaaatttcacaacctaaatagt

SEQ ID NO: 423363 - DNA, 201 bp, Homo sapiens
taagctgcttgcttacctccccagaggtggagaaatttgttataactctgcaatagcctccctatagcagtctactgacccagtccctttatctcattttraagtctttgccccttctacccttgaaatccttttgattgtaactagctaaccctaggatgctgagtcactaagacttttgaagagaagatatggttaggt

SEQ ID NO: 423364 - DNA, 201 bp, Homo sapiens
gtaggatgttttgttttgttttaatactgtgattctttaagctgcttgcttacctccccagaggtggagaaatttgttataactctgcaatagcctccctrtagcagtctactgacccagtccctttatctcattttgaagtctttgccccttctacccttgaaatccttttgattgtaactagctaaccctaggatgctg

SEQ ID NO: 423365 - DNA, 201 bp, Homo sapiens
caagactccatctcaaaaaaaaaaattattaaagcatagaaattatatgtatgcacgtatatacacattatatgtgtgtgagagaacacaacactgctttkgtgattttttttttttagatcaaatcactcttttatggttaaaagcagggactcagtctgaagccaaactgcttgagttagaatttcagctccactactt

SEQ ID NO: 423366 - DNA, 201 bp, Homo sapiens
ttaaacttctttcacaggattgtttgagataacctagctctttatatcttcccttttaaatagaaacaactgtcttgagaagctcttcgaaacattttatrgtaaggacttcacctatcattggtctttcctagctatatatcacattggtatcagatgatacttccaaattgccactcaaatccagcaattgcaagataa

SEQ ID NO: 423367 - DNA, 201 bp, Homo sapiens
gatatgtgtaccctttaatagctttctaagaggaattcaaattactgatttttaaacgtgttacaagtatttctcccagtttgttgtctcttttgccttcwttatggtattgtttgcctttgtggtaggatgttttgttttgttttaatactgtgattctttaagctgcttgcttacctccccagaggtggagaaatttgt

SEQ ID NO: 423368 - DNA, 201 bp, Homo sapiens
caccgcaactccagcctgggcgacagagagagactcgtctcaaaaaacaacaacaataataataatgccaaactgccctctggaaaaacggattatccccmacacacagggcataataaggatgcttgtttttatttcttcacacacttgccagcaccgggtactgaaaaaatcttatcaatctgaaatgatgtcttaatg

SEQ ID NO: 423369 - DNA, 201 bp, Homo sapiens
aggggaagcaatggaagaacttctacctgatggacaaatatgggctaatatggatccagaagaacgaatgttggcagctgctacagcttttacccacatcygtgcagggcagggtgaaggagatgtcaggagagaagcccaatctatccaatatgatccctacagtaaagcttcagtagccccagggaagcgacctgctct

SEQ ID NO: 423370 - DNA, 201 bp, Homo sapiens
ctgagatctccagggttgctgggagccggggcagcaaccaggggtgcggcttgctctccagggagctgcggcagagcctggggccacagctgcactcagcyggtgcacccacggacagagggtcagactcggctcagcactgggctcaagccctggatgagaacaagaaccaagcttcttagcctcaggctccatctggga

SEQ ID NO: 423371 - DNA, 201 bp, Homo sapiens
caccagggacaggatcccgggtccacagcgagggcccacagcgtgggaggagggctgctcctccgggcccaggcctgggcgccctcctcccatgctgaccrgccagctggcctcgtctttggtgaggcctgtctctgtgccctacaactgcggtgaggcgtggagcgtccccagggagaaccggagcgggaggatggcccg

SEQ ID NO: 423372 - DNA, 201 bp, Homo sapiens
gtccgcacctgctcaagcgccaccacgcccgcatgcagctgctgcgtaagtgctcctactacatcgaggtcctgcccaagcacctggccctgggcgaccaraacccgctggtgctgcctagcgccttgttccagctcatcgacccctggaagttccagcgcatgaagaaggtgggcacagctcagaccaagatccagctcc

SEQ ID NO: 423373 - DNA, 201 bp, Homo sapiens
accatggccgtgctgagctggatgccctgctccggtcgccagacccacggcccttcctggccgactgggcgctggtggagcggcggctggcggacgtgtcrgccgtcatggacagcttcctgaccatgatggtgccggggcggctacacgtcaagcaccgcctggtgtctgatgtcagtgccaccaagatcccgcacatct

SEQ ID NO: 423374 - DNA, 201 bp, Homo sapiens
aggaggaggcagatgaccagcagctgctggaaccagaggcgtggaagacctacaccgagcgccgcaatgccctgcgtgagttcctgacctcggacctgagyccgcacctgctcaagcgccaccacgcccgcatgcagctgctgcgtaagtgctcctactacatcgaggtcctgcccaagcacctggccctgggcgaccaga

SEQ ID NO: 423375 - DNA, 201 bp, Homo sapiens
gatcctgtgctgcttaggaccacgccgtcccctctccacggccccgaggggtgccagcaacccctttcagcagcagggttaggaactggggcccttgcaargccacaggtcaggcggttctggccagaagtccgcagtcctagttcttccctgtcctgtcccacaggccactggttgtcagtagaggtttttgcccctcag

SEQ ID NO: 423376 - DNA, 201 bp, Homo sapiens
tccagcgcatgaagaaggtgggcacagctcagaccaagatccagctcctgctgctcggggacctgttggaacagctcgaccatggccgtgctgagctggaygccctgctccggtcgccagacccacggcccttcctggccgactgggcgctggtggagcggcggctggcggacgtgtcggccgtcatggacagcttcctga

SEQ ID NO: 423377 - DNA, 201 bp, Homo sapiens
gcaatgccctgcgtgagttcctgacctcggacctgagtccgcacctgctcaagcgccaccacgcccgcatgcagctgctgcgtaagtgctcctactacatygaggtcctgcccaagcacctggccctgggcgaccagaacccgctggtgctgcctagcgccttgttccagctcatcgacccctggaagttccagcgcatga

SEQ ID NO: 423378 - DNA, 201 bp, Homo sapiens
tcgtctttggtgaggcctgtctctgtgccctacaactgcggtgaggcgtggagcgtccccagggagaaccggagcgggaggatggcccgcgaatgtccccragggggatcctgtgctgcttaggaccacgccgtcccctctccacggccccgaggggtgccagcaacccctttcagcagcagggttaggaactggggccct

SEQ ID NO: 423379 - DNA, 201 bp, Homo sapiens; identical to SEQ ID NO: 379657

SEQ ID NO: 423380 - DNA, 201 bp, Homo sapiens; identical to SEQ ID NO: 379658

SEQ ID NO: 423381 - DNA, 201 bp, Homo sapiens
agcgctggggggagccgcctcacatagacagcagagaggctgccctgctgcaatgtcaccgtcgtcactgcctctgcaggctgcaggcacctgccactacygcagaggactgaggggccttggcccagcagggaccccagggccttgggggactgtgtgagctggaaacgtggctggccagatgggcagcaccatggagcc

SEQ ID NO: 423382 - DNA, 201 bp, Homo sapiens
cctcccccacaagcgtgaaaccaactgaccggattgacagatgcaggtgcgcgggaggcggaggtgggggtggtgccagcagccaatgggttaatggtccyggcaggggctccacaggggaccaggggtcagatgtctctctaagatggggacaggcacgcaagctgctattccggggctctgatcacggctgtctattta

SEQ ID NO: 423383 - DNA, 201 bp, Homo sapiens; identical to SEQ ID NO: 379676

SEQ ID NO: 423384 - DNA, 201 bp, Homo sapiens; identical to SEQ ID NO: 379663

SEQ ID NO: 423385 - DNA, 201 bp, Homo sapiens; identical to SEQ ID NO: 379662

SEQ ID NO: 423386 - DNA, 201 bp, Homo sapiens
tccaggctctgcgagggaaactcaggtgaaccaaagtgtcaagtagcgagcaggagggaagccgcgggctcaggggagatgaagtacaacgggagaggtcrctccccgacttccagactgggctcagagggacaagggcaggacagtagggcagaggccctgagcagacgcaggggagagcctcacctaggccaatcccca

SEQ ID NO: 423387 - DNA, 201 bp, Homo sapiens; identical to SEQ ID NO: 379677

SEQ ID NO: 423388 - DNA, 201 bp, Homo sapiens; identical to SEQ ID NO: 379678

SEQ ID NO: 423389 - DNA, 201 bp, Homo sapiens; identical to SEQ ID NO: 379668

SEQ ID NO: 423390 - DNA, 201 bp, Homo sapiens
ccaggcaatgacagcaggatcctgaagcccatgcaggctctgaaccacgcggccatccagaaggggtgagataaatgttggggaaaccatccccgaccccygcgagccccaggagcccaggctgccgcctcctgcctcctacacccctcccccccacagctggccctggaggctgctggagctggggttaccccgtgggga

SEQ ID NO: 423391 - DNA, 201 bp, Homo sapiens
ccatttcccagcgctcctggggctcagtgctggtcactggaacatcataagggaaaactttaaagcagctgctgttgtgacccattttgcagctggggacrtggaggctagaagcatttgcgaggcacccagtacctccattagtgtctggagaccacagtcaggctgggtaaggcaagctgaaagaggaatgacttccag

SEQ ID NO: 423392 - DNA, 201 bp, Homo sapiens; identical to SEQ ID NO: 379679

SEQ ID NO: 423393 - DNA, 201 bp, Homo sapiens
gtcgttgacctcgcctactcccagaggattcgcttcgtgcccagcctgtagcccacagtggcagcccacccacctctgctctctggccaccagctccaggytctgcgagggaaactcaggtgaaccaaagtgtcaagtagcgagcaggagggaagccgcgggctcaggggagatgaagtacaacgggagaggtcgctcccc

SEQ ID NO: 423394 - DNA, 201 bp, Homo sapiens
cctgggaggtggagcttgcagtgagcagagatcacgccactgtattccagcctgggtgacagggcaagttctgtcttaaacaaacaaacaaacaaaaaaawatatatatatatatatgacatgacataaaataacctcttgaaaattgaaaaactatttagctacagtgaatgacaatgtcagcaaacagatagaaacaga

SEQ ID NO: 423395 - DNA, 201 bp, Homo sapiens
gattagggtgaatcataaatctaagatgattgctgtccttataggaagaggggaaaacacacagacagacacagacaggggaagaatgcctcatgatgatraattcagagactggaatgatacagctacaagccaagaaatagcaagggttgctggcaaccaccagaagctaggagaaaggcatgcaacacaatctctcct

SEQ ID NO: 423396 - DNA, 201 bp, Homo sapiens
tggtggctcacgcctgtaatcccagcaatttgggaggccaaggtgggcggatcacaaggtcaggagatcgagaccatcctggctaacacggtgaaaccccrtctctactaaaaatacaaaaaacttagccgggcgtagtggtgggcacctgtagtcccagctacttgggaggctgaggcaggagaatggcatgaacctggg

SEQ ID NO: 423397 - DNA, 201 bp, Homo sapiens
ttcatgaatcgaaagaattaatattgctaaaatgcccataccacccaaagcaatctataggttcagtgcaatacctatcaaaattccaatgtcatttttcrtagaaatagaaaaaacagtcctaaaattcatgtggaactacaaaacccccaaatagccaaggcaatattcagcagaaagaacaaagctggaggcctcata

SEQ ID NO: 423398 - DNA, 201 bp, Homo sapiens
atgacatgggctgggcatggtggctcacgcctgtaatcccagcaatttgggaggccaaggtgggcggatcacaaggtcaggagatcgagaccatcctggckaacacggtgaaaccccatctctactaaaaatacaaaaaacttagccgggcgtagtggtgggcacctgtagtcccagctacttgggaggctgaggcaggag

SEQ ID NO: 423399 - DNA, 201 bp, Homo sapiens
aagaaaaaaaaatacatgacatgggctgggcatggtggctcacgcctgtaatcccagcaatttgggaggccaaggtgggcggatcacaaggtcaggagatmgagaccatcctggctaacacggtgaaaccccatctctactaaaaatacaaaaaacttagccgggcgtagtggtgggcacctgtagtcccagctacttggg

SEQ ID NO: 423400 - DNA, 201 bp, Homo sapiens
ggtcatgaaaaagaagaaaaaaaaatacatgacatgggctgggcatggtggctcacgcctgtaatcccagcaatttgggaggccaaggtgggcggatcacraggtcaggagatcgagaccatcctggctaacacggtgaaaccccatctctactaaaaatacaaaaaacttagccgggcgtagtggtgggcacctgtagtc

SEQ ID NO: 423401 - DNA, 201 bp, Homo sapiens
ccaggagtgtgaggttacagtgagccatgattgtaccactgcaccccagtctggatgacagagctagatcctgtctaaaaaaacaaaaaaacaaaaaaaamcaaaaaaaacagctggacgcagtgcctcacgcttgtaatcccaaacctttgggaggcctaggcgggcagatcacttgtgatcaggagtttgagatcagcc

SEQ ID NO: 423402 - DNA, 201 bp, Homo sapiens
gcacatgatcacttgagcccaggagtgtgaggttacagtgagccatgattgtaccactgcaccccagtctggatgacagagctagatcctgtctaaaaaamcaaaaaaacaaaaaaaaacaaaaaaaacagctggacgcagtgcctcacgcttgtaatcccaaacctttgggaggcctaggcgggcagatcacttgtgatc

SEQ ID NO: 423403 - DNA, 201 bp, Homo sapiens
acaaagtccacaataggctgtccacaagctgaggagcaaggagagccagtccgagtcccaaaactgaagaactcagaatcctgtgtttgagggcaggaagsatccagcatgggagaaagatgtaaactgggaggagaggcctgtctctctttttcacgtttttctgcctgctttatattcactggaagctgattagattgt

SEQ ID NO: 423404 - DNA, 201 bp, Homo sapiens
caattcaatcattccatattatatatcatagcatcactttgtacaccgtaagtataggcacttataatttgtcaatattcaatagtataaataaaaatttkaaaaaactttctgaccatcacaatatccaagagaaataaaaatatatgtcctaccagaaacttgtagataaatattcatagcagcattattcataataac

SEQ ID NO: 423405 - DNA, 201 bp, Homo sapiens
accagcaacaatgcagaactccagcatgaggatgagtcagttcctgaggccacagagaagtggaaacactctgagcagatggtaggagaatccaacttccacatccacaatacccttccccacattctgccaggcacccactgtttggaaaatctctcaacttatggtttctacactggaaaaagtaaaacggaggtagtc

SEQ ID NO: 423406 - DNA, 201 bp, Homo sapiens
ataactaaaaagtgaaaacaacccactctccatcccctgatgaatggataaacaaaatgtgttttatccaaacactggaatattattcagccataaaagasataaactattgatacttactctaacataatgaagcttgaaaacatgataatattttaaagaaggcagacataaaaggccacatattgtatgattctattt

SEQ ID NO: 423407 - DNA, 201 bp, Homo sapiens
aagttgacactcagtattaaacaacacacttgttcttggaatatggtgggaattattctgtcaaacttgcttctaaaatctggacagtagtctaagatccrgggccagtgggaagtgggatgtagttttgggtttttagtaatgatacagaaatctctaatcatgccactgatttatgccattcttagggtactttacatg

SEQ ID NO: 423408 - DNA, 201 bp, Homo sapiens
tggagtatgtctgggaccaatagctttgcgatccatattgttaaccttgaatgaagataagaatggtcacatggatcagaactatagcacatcaaactcartattccgtatgtgtcaaaggtactaacttctaacatcttgatacctattgaaataaataactccaaaattgtttttaaacttagaatcttaaggagtttc

SEQ ID NO: 423409 - DNA, 201 bp, Homo sapiens
ttaaatttatcatactttctcctgctgtggtaattaggagactttctaatccctaggagaaggcaatacaggaccagatcactgcccaaaatgataccctrcttctagaaaaaaggaaacttcaggagcaagtcatagagcaagaacagttgatccacagcaacaaatggacgatatcttccatccagagcaggtaggtgc

SEQ ID NO: 423410 - DNA, 201 bp, Homo sapiens
tatgtgatatacactatggtgtgtgaaaatgtggtatatatatatgatacaatactatttaaccttaaaaaggagggaaattctgtcattggcaacaacaytggtgaacctggaggatattatgctaagtgaaaaaagcctggcacagaaaaacaaataccacatcttctcacttaaatgtggaatctaaaacaattgaac

SEQ ID NO: 423411 - DNA, 201 bp, Homo sapiens
aaaaacaaataccacatcttctcacttaaatgtggaatctaaaacaattgaacacatgtaagcatagagcaaaatgctggttaccagaggctgaggggtgrggaggcaatggggagatgttggccaaaggtgcaatgtttcagttagaccggaggagtaagtatttgaggtgatggatatgttaattacctcaattcaatc

SEQ ID NO: 423412 - DNA, 201 bp, Homo sapiens
tagctttgcgatccatattgttaaccttgaatgaagataagaatggtcacatggatcagaactatagcacatcaaactcaatattccgtatgtgtcaaagrtactaacttctaacatcttgatacctattgaaataaataactccaaaattgtttttaaacttagaatcttaaggagtttcctgttccaaaatggtggcat

SEQ ID NO: 423413 - DNA, 201 bp, Homo sapiens
aacatcttgatacctattgaaataaataactccaaaattgtttttaaacttagaatcttaaggagtttcctgttccaaaatggtggcatagaggcaagctrgcttctctccctccaacaaagaaacagaaagaaatatacagcactgaggtcttcaccagcaacaatgcagaactccagcatgaggatgagtcagttcctg

SEQ ID NO: 423414 - DNA, 201 bp, Homo sapiens
ctcagcagtgagttcctggagggcaaggagtgtatctcatatattactgtatctatggacaggtactccataaatatttgagaatgaataaatattcagtkttttaacatatgtgccttactctcaacagcactgtttgccatgtatgattctagccccatctaaaacatgagcaaatctgagactcagttaagtaaagtg

SEQ ID NO: 423415 - DNA, 201 bp, Homo sapiens
cctagccagaaagtcctgtttttttatgtttgtctccatagtgccttccatgtaaggcagaaccccagcaccaaaaagcggttcagaaaagcattttcttyaaggggccaaacgaacgtgcaccctgaaaatacagtttttttctccctgatggttggatccaatggtaagatttagaatgcctaaaccaatgttttctaa

SEQ ID NO: 423416 - DNA, 201 bp, Homo sapiens
atcccagctactcgggagggggaggttgcagtgagccgggattgcaccactgcactccagcctgggtgacagagcaagactgtctcaaaaaaaaaaaaaaattgtcccagtgttatgaatgtgttgtgtgtgtgagtgtgccctgcgatgggatggtgtcctgttcaggtctggttcccaccaggtgccctgaggtgccag

SEQ ID NO: 423417 - DNA, 201 bp, Homo sapiens
tggtgccaccttaaagggtatgatgggtaatactgtagtaacatcggtactgatacactcaacaacagccccctagtacagaaagtcctgtttttgtttgyttgcttgtttgtttttgagacggagtcttgcattgttgcccaggctggagtgcagtggcgcgatctcagctcactgcaagctctgcctcctgggttcacg

SEQ ID NO: 423418 - DNA, 201 bp, Homo sapiens
ggaaaacaatgctgtcagcatgtgcctgcactccttatctgacaacactgagctctttactgcactctaaccaccttcctatgtccagcactttttctcakcccttgattcatgtttgtagttacagggattgctatggataattctgctatctgattcctcagatatatggcaatgtttgaagatctttctccttccctc

SEQ ID NO: 423419 - DNA, 201 bp, Homo sapiens
aggggcagatgagagggtaagatcaatacagagagcagcgagactgttacaggcatcctggcctgacctggctgtcatgggggagatggaacaggggcatrgtttcaggaaatgttaaggatctggatctcggctaggagggcttgatggttgaggagagaagtctggtgagggagagggaaaggtcaaggatgtgcccct

SEQ ID NO: 423420 - DNA, 201 bp, Homo sapiens
ccgttaatactgggccttagatttggagttgggtgcaggctgggtaggaaggagagggagaagcaagctggagttgggctgcacaaggccttcctagggckttcagctttgatctttgggctacagggtctttgaaggtgtgtgaactgatgtgataggacgagagagtgttctagaaaacacctgtagggctacagtgca

SEQ ID NO: 423421 - DNA, 201 bp, Homo sapiens
ggatgcgacatgtgcttcaccacacaggcaggaaactgcaggcagagtgccaagagctgaatagagcccgttaatactgggccttagatttggagttgggygcaggctgggtaggaaggagagggagaagcaagctggagttgggctgcacaaggccttcctagggcgttcagctttgatctttgggctacagggtctttg

SEQ ID NO: 423422 - DNA, 201 bp, Homo sapiens
tagttgacagccactgtccttcttggctgagtgtctacgtttttagcagccttgagcttgaatgtactgactgcctctccagctcaaagccatgaccaccycacatgtttttctaccaaagcttgtccctcacaaacaccaccatgtggacaaagagcagtgattacattttctcaaattcagtagtacagaaccaagggc

SEQ ID NO: 423423 - DNA, 201 bp, Homo sapiens
ttgatttaacaaacgtaaattcttcttggcctcatcatgtcacacctatgtgttctgataccctagttgacagccactgtccttcttggctgagtgtctaygtttttagcagccttgagcttgaatgtactgactgcctctccagctcaaagccatgaccaccccacatgtttttctaccaaagcttgtccctcacaaaca

SEQ ID NO: 423424 - DNA, 201 bp, Homo sapiens
gggggagaaagccctgtgggaagataaaacgtccctctgggaggaagagaatgccctctgggaggaagagagggccttctggatggagaacaatggccacrttgccggagagcagatgctcgaagatgggccccacaacgccaacagagggcagcgcttgctggccttctcccgaggcagggcgtagccagcatgcaggtg

SEQ ID NO: 423425 - DNA, 201 bp, Homo sapiens
ttctgggaagaggagaaaaccttctggaaagaggaaaaatccttctgggaaatggaaaagtctttcagggaggaagagaaaactttctggaaaaagtaccrcactttctggaaggaggataaggccttctggaaagaggacaatgccttatgggaaagagaccggaaccttcttcaggaggacaaggccctgtgggaggaa

SEQ ID NO: 423426 - DNA, 201 bp, Homo sapiens
tttctgggaagaggagaaaaccttctggaaagaggaaaaatccttctgggaaatggaaaagtctttcagggaggaagagaaaactttctggaaaaagtacygcactttctggaaggaggataaggccttctggaaagaggacaatgccttatgggaaagagaccggaaccttcttcaggaggacaaggccctgtgggagga

SEQ ID NO: 423427 - DNA, 201 bp, Homo sapiens
gctgggttacagagatgtcaggaagacatgtccacacctaatttcaatcaagtgtgacaagtaatagtggagtaacagacagacagtatcgcagaggtggygaggaactttgtctggagggtccgagtagctttcagaggggaaaggatgtacaggaattcaagcccaccacaggaacaaaaggggctctcagtagaggat

SEQ ID NO: 423428 - DNA, 201 bp, Homo sapiens
gatggtgatgccaccagctgtccacagcctagccactgtgtcttcatatgcacgcgcacacagacacacacacacacacacacacacacacacacacacacaccagctatgtgtcttttctcctcctccactccctgttcctaaaccagaaatggaaaaatacagagaaagccctgaaaatttccccaataggtctcacgg

SEQ ID NO: 423429 - DNA, 201 bp, Homo sapiens
atggtgatgccaccagctgtccacagcctagccactgtgtcttcatatgcacgcgcacacagacacacacacacacacacacacacacacacacacacacaccagctatgtgtcttttctcctcctccactccctgttcctaaaccagaaatggaaaaatacagagaaagccctgaaaatttccccaataggtctcacgga

SEQ ID NO: 423430 - DNA, 201 bp, Homo sapiens
aaactaatgcacaagctgcaggaggaaaaggcttttcgcgaagagatgaaaatttttcgtgaaaaaatagaggacttcagggaagagatgtggactttccraggcaagatccatgctttccggggccagatcctgggtttttgggaagaggagagacctttctgggaagaggagaaaaccttctggaaagaggaaaaatcc

SEQ ID NO: 423431 - DNA, 201 bp, Homo sapiens
ttgcagatgtggctggccattactgagagatttaaggtatggtttgtttagaaccctgtgacttgggtctggttttctcctggcatcctagacgcttcacmgctcagagcaggaggaacatacatctagtccagccctcccactttacagatgaggaaactaaggtctcaagacattaagtaacccaaggaccagaacaca

SEQ ID NO: 423432 - DNA, 201 bp, Homo sapiens
gttattcttcagctgttttcccagcctgcttcttgcagatgtggctggccattactgagagatttaaggtatggtttgtttagaaccctgtgacttgggtytggttttctcctggcatcctagacgcttcacagctcagagcaggaggaacatacatctagtccagccctcccactttacagatgaggaaactaaggtctc

SEQ ID NO: 423433 - DNA, 201 bp, Homo sapiens
gtttgtttagaaccctgtgacttgggtctggttttctcctggcatcctagacgcttcacagctcagagcaggaggaacatacatctagtccagccctcccrctttacagatgaggaaactaaggtctcaagacattaagtaacccaaggaccagaacacagtttccctgactctcaatccctgaacaataactagcagaaa

SEQ ID NO: 423434 - DNA, 201 bp, Homo sapiens
gtggttaatgtgaccgagggactgatgtgtaagtattatttaattttaattgcttttaaatagtcccatgtggctggtgatgcccggactggaccgcacaactctaaacaattcccattatagcgcttggttcacggttgattctctcctacaagattgaggtctgtgatgaaattcacctggactatgatgctccccatt

SEQ ID NO: 423435 - DNA, 201 bp, Homo sapiens
gaataccaagaaatgatggtatttcagctcctgggatggctgcaaaagaaggaaaggtaatgaattcaacaaagtcactcaaacttcctaagtagaggcartagctgtctgcccaagacatagctgacaccttcctggggccatttcagggagggctcagttgcttacagtggacgaggcagatcctaccctgtgtggagg

SEQ ID NO: 423436 - DNA, 201 bp, Homo sapiens
tttttcaaatcagaaaaagataaagaaattgaggaaaaatgtaaatatttgaagatgacaaaaaattatgtttgtttttaaaacttaggaaaatttagaaraacaaaaaagaaatcactcttcattttcttcacccagagactgccaggtccaacatttgttatttgcttaccatgctgtcaaatatcttacagtttttct

SEQ ID NO: 423437 - DNA, 201 bp, Homo sapiens
cactctaaaccagtgccatccaacagaacgttcagcaagaatattgttccataatctgtgctatttataggtagccacgagccacatgtgcacttgaaatrtggttaatgtgaccgagggactgatgtgtaagtattatttaattttaattgcttttaaatagtcccatgtggctggtgatgcccggactggaccgcacaa

SEQ ID NO: 423438 - DNA, 201 bp, Homo sapiens
ttgtatacaggtatcaaaatatcacactgtaccgcataaatgtgtataattactgtgtgttcattaaaaacaattttaaaatgtcttttaaataatttctstgtgtgcggcatagtggttagaagcctctgcctggattccaacgctagctcctccactttccagctacatgacctctagtacataattttttgtgcctta

SEQ ID NO: 423439 - DNA, 201 bp, Homo sapiens
agtggggacatgaatggtcctgccttattgagttgttttaaagattatgtgtattgaggcttatgaccaccattttacaggcaatagagagaacaaagggmtgcaatgaattaccctattaacattcaagctgcaaaatccagattgtagggaatgatagtcaggaaactgagacagccacgctgtgggctttaggtagca

SEQ ID NO: 423440 - DNA, 201 bp, Homo sapiens
gagtgaggagtggttgctgtgtagcaattaataatgtgggtcctaagattgttggtaaaactcaattgcaaagctgccttcaactttgtgtggacttaagkgtgggtagcattttagcaaagaggaccccgaagctttaaattctgcctgtaggatgctggcatgtcaggtgcaggagatgtgagttaatggtctcaactg

SEQ ID NO: 423441 - DNA, 201 bp, Homo sapiens
gaagacttttcctctgggaagccacgaattctgttgtgatgtcaataatgctctctgagggaaattccctgaaggggaaatagtgatgtctctgccctgcycctgaaccaatatttatagacacacccataaatattgttcaagaagaatttgtgttgaaagcccatgcctgcagaaaagactgagttgtctcatctgaac

SEQ ID NO: 423442 - DNA, 201 bp, Homo sapiens
acattcctgatcattgcattgaaagatttcctgtaatagcctaaccttccctctaacacacacacacacacacacacacacacacacacacacacacacasagacatcagttttattcaatgtattgatacacatgagtgaaaggcttagaatagcacattataagtcttcggtattgttaggtatcattttttccataat

SEQ ID NO: 423443 - DNA, 201 bp, Homo sapiens
aggtgatgtggggtacaaaggtctccttcctctagagaaaatgataacattggattacaaacacattggtaaacatcacaaaatgctaaagttggaaagaraaaacataatttcatacaaacgttttgttttatatgtgagacacttgagacttggaagtgatatgatggcccaggtcatacggccaaatgtagtcccaga

SEQ ID NO: 423444 - DNA, 201 bp, Homo sapiens
ttgttacatatgtatatatgtgccatgttggtgtgctgcacccattaactcgtcatttacattaggtatatctcctaatgctatccttcccccctcccccsaccccacgacaggcccccatgtgtgatgttccccttcctgtgtccaagtgttctcattgttcagttcctacctgtgagtgagaacatgtggtgtttggtt

SEQ ID NO: 423445 - DNA, 201 bp, Homo sapiens
ctttgaaccagttacacattctttctggacctttctatgaaatgccggaggttgcatttctctaagttgctaatgcacatttagcatttttttttttttttggtgatgtctcaagagcaactgaagtccaataaatattcagagggaacttgaggaacattggtgagctatggatagttccacctgttcatctgtccttta

SEQ ID NO: 423446 - DNA, 201 bp, Homo sapiens
tgtttctgtgaaggtattttgtaggtgtgattaaagcctgtaatcaattggatttaagtaaagaagattagcctagataatctgaatggacttcattcaawtggttgaaaggcattagaaaggcaattgaaaggcatagccaaggattccctggagaagaagagatcccacctgtgaaccaagcttcagcttaggactgat

SEQ ID NO: 423447 - DNA, 201 bp, Homo sapiens
ttcataaactttgttaaattttttgcccattttaaacctttatataagtgttaccttatcttatgtatgattttgcaactttaattgttgttcagcattayatttatgagatttatctttgtggatatatgagatttatctttgtggatatatatgtggatacatttgctagttttacatgtcagcgtggctagatcagtt

SEQ ID NO: 423448 - DNA, 201 bp, Homo sapiens
tgtggagggaaacttccagggcaaagactcagactttctcagctttgttttgtgaaggaaggtagcatgtgtgacactgatgacaccacaaacacttgttraacagacatgcatgttaacgttagtcaaccagtgaagtccacgctcagacgctcaagccctctgtgacactgtgccatgtgaatacactgggaagacaca

SEQ ID NO: 423449 - DNA, 201 bp, Homo sapiens
gggcgccctctccacgtcacccccagcacaacgcagacaggcaaagtggaagggtagagagaccgacgggtttcagcagagatgcagagcccctaagcgcragcccctcagaagggtctagtgggaaggggccggggacgcacaggaaacttacctcacccgggcagcattcgggtgcctccgctaccaagaccagttgcg

SEQ ID NO: 423450 - DNA, 201 bp, Homo sapiens
tgactgactgcaacctctgcctcctaggttcaagtgatcctcccacctcagcctcccgagtagatgggattataggcgccaccacatccagctgatttttrtatttttactacctcacaaatatcacctatagttgagagatgagaaggcaaagaaagaagacaaaagagtgctagacaggaaggaactatcccaaaatct

SEQ ID NO: 423451 - DNA, 201 bp, Homo sapiens
acacacacacacacacacacacacagacatcagttttattcaatgtattgatacacatgagtgaaaggcttagaatagcacattataagtcttcggtattrttaggtatcattttttccataataccattttgtatctaaatgtatcttgtatatttatatactgattttcaatggttagtctacccttctttcttattag

SEQ ID NO: 423452 - DNA, 201 bp, Homo sapiens
ttaactgttaactattttgtattatacaatacaggatataagttgaagttctctttttttagcatatgaatgtccagttgttccaataccatttattgaaagacttatttttctacctcattcgtatctttgtcaaaaatcaagtaaccacctatgtgtgggtcaatttctgggctctctgttctgttttattaatctata

SEQ ID NO: 423453 - DNA, 201 bp, Homo sapiens
cactcctttccttccttcccagtggcactcagtaacataaagtaactttatcattcctttacatgtttttatatatccatatattcataaactttgttaawttttttgcccattttaaacctttatataagtgttaccttatcttatgtatgattttgcaactttaattgttgttcagcattacatttatgagatttatct

SEQ ID NO: 423454 - DNA, 201 bp, Homo sapiens
taaatcagaagtctgacgttcttcaggaagaactctcagcattatgtctcttggtataataaatacaaatgcaggccctactgaaagccccctggggggggtctgacaagtcacattccatcagcggccacgtaccatgtgaccagccacccgcctctttatctctagctccttaagtcaggagtttcatttggctccaga

SEQ ID NO: 423455 - DNA, 201 bp, Homo sapiens
tccaacttgtggttctagcctcgtgggaagaccactgttagaagattctggttttttattcttctagtagttaccgttttaacattaaataatataattayatattatttaatatataattcaatctcttaattgagctgtcatttttaaaagtatgtttaacactcaactttgaaaagaaaagaaagttgacacagtttg

SEQ ID NO: 423456 - DNA, 201 bp, Homo sapiens
ccttggatgataccagcctgcctcccaactcatgccaagtttattcactcactcagccagccagtcagctagcacctactatctaagctatatgctgaaamcaataacaatatttgtcactaaatgtaacagagaaccctaactgcattcttgtaaaatccatttcctttctcaaaattttgtttataggactgttagagc

SEQ ID NO: 423457 - DNA, 201 bp, Homo sapiens
aactctcagcattatgtctcttggtataataaatacaaatgcaggccctactgaaagccccctggggggggtctgacaagtcacattccatcagcggccaygtaccatgtgaccagccacccgcctctttatctctagctccttaagtcaggagtttcatttggctccagaccttggcactacgaaggtcagccaaggtcg

SEQ ID NO: 423458 - DNA, 201 bp, Homo sapiens
cctgatcattgcattgaaagatttcctgtaatagcctaaccttccctctaacacacacacacacacacacacacacacacacacacacacacacacagacatcagttttattcaatgtattgatacacatgagtgaaaggcttagaatagcacattataagtcttcggtattgttaggtatcattttttccataataccat

SEQ ID NO: 423459 - DNA, 201 bp, Homo sapiens
cccagtgtggcaaagcctgtctgcctctaaagtacagctgccttggatgataccagcctgcctcccaactcatgccaagtttattcactcactcagccagmcagtcagctagcacctactatctaagctatatgctgaaaacaataacaatatttgtcactaaatgtaacagagaaccctaactgcattcttgtaaaatcc

SEQ ID NO: 423460 - DNA, 201 bp, Homo sapiens
cactgggcacaggctggagcatgatgaatgctgtgattttccaggctcaactcccaggaggtgaggttcattccctgaaacactggaccatgaaagaaaamccagagcatccaccaaagtgttgtttagcatttagaaaacaaaaaagaagcctctactgtctggtcctatccagtgtagttctgaatcaaagttgaccac

SEQ ID NO: 423461 - DNA, 201 bp, Homo sapiens
tcctgatcattgcattgaaagatttcctgtaatagcctaaccttccctctaacacacacacacacacacacacacacacacacacacacacacacacagacatcagttttattcaatgtattgatacacatgagtgaaaggcttagaatagcacattataagtcttcggtattgttaggtatcattttttccataatacca

SEQ ID NO: 423462 - DNA, 201 bp, Homo sapiens
aaagttgaccacccagtataaacaccactttttaggcttgtgcaaagggggttaatcatgatgctttttaaaaaataatgattgtgcaagattgcacacaygcacccaagtattaacaataatacaataagcaattacaatatcagggccaggttttataagatttttgtatgcctgatttactttggagtctcttgcctt

SEQ ID NO: 423463 - DNA, 201 bp, Homo sapiens
ttcctgatcattgcattgaaagatttcctgtaatagcctaaccttccctctaacacacacacacacacacacacacacacacacacacacacacacacagacatcagttttattcaatgtattgatacacatgagtgaaaggcttagaatagcacattataagtcttcggtattgttaggtatcattttttccataatacc

SEQ ID NO: 423464 - DNA, 201 bp, Homo sapiens
tttttgtatgcctgatttactttggagtctcttgcctttaaaaacaaacaaacaaacaaacaaacagaatattatagatacagtaaaactactcccaattycactcctttccttccttcccagtggcactcagtaacataaagtaactttatcattcctttacatgtttttatatatccatatattcataaactttgttaa

SEQ ID NO: 423465 - DNA, 201 bp, Homo sapiens
caaagatttaagtatttgcttaaatctttgcacattttttttctatggtatcttctagaatttttatggttgaaacttcttgcatttaggcctatgatagyctacgatgcatttttagttaactgttaactattttgtattatacaatacaggatataagttgaagttctctttttttagcatatgaatgtccagttgttc

SEQ ID NO: 423466 - DNA, 201 bp, Homo sapiens
tggaactctcctccattgctggtgagaattgaaaaagaagcaaccacttttgaaaaaattctggcagttcctcaacagtttaaatgtagagttaagatacracccagcaattccactcctacatatctatccaagagaaatgaaaacatacatctacacaaaaacttgtacacaaatgttcatagcagcattgttcacaat

SEQ ID NO: 423467 - DNA, 201 bp, Homo sapiens
agttgaagttctctttttttagcatatgaatgtccagttgttccaataccatttattgaaagacttatttttctacctcattcgtatctttgtcaaaaatsaagtaaccacctatgtgtgggtcaatttctgggctctctgttctgttttattaatctatatgttatatttttctcagtatcacactgtcttgatttctgt

SEQ ID NO: 423468 - DNA, 201 bp, Homo sapiens
acagtactttaacccctcagaatattttcaagtcaaacagtaaactaaacaatatactgtagatgttaagctaaaacgcacttgttaagtttcattccttygatgaagtggcatgtagtaaaggggggaagggataaactaaaggtgaaagagtaattagctaggtctcttaggtgatgtggggtacaaaggtctccttcc

SEQ ID NO: 423469 - DNA, 201 bp, Homo sapiens
ttttcaagtcaaacagtaaactaaacaatatactgtagatgttaagctaaaacgcacttgttaagtttcattccttcgatgaagtggcatgtagtaaaggkgggaagggataaactaaaggtgaaagagtaattagctaggtctcttaggtgatgtggggtacaaaggtctccttcctctagagaaaatgataacattgga

SEQ ID NO: 423470 - DNA, 201 bp, Homo sapiens
gagactatgcagaccacaataaatgcagaagaactctgccatttaaaaaaccaccttatataagtacagagcaggcacctggttatgacagaaaacctaastgtgattctaataccagcacttgttaccttgataaatctctgaatctgtgagcctcatgttccttctgtgtttacatggtaaaaagtctttgccctgcct

SEQ ID NO: 423471 - DNA, 201 bp, Homo sapiens
tactcaagcttctatttcttgatttatcaatttcagacaccagctcttatctagaagaaggtagactttaaatgtttcgtggctgtaaactacatgggagragtcccattaaataaaatattgagtcctatcaacagaagaatgctctctactcggtttaattatgacattaagaacttaattcaatgtttctcaaagatg

SEQ ID NO: 423472 - DNA, 201 bp, Homo sapiens
caatcctcaaccctgaaaactcattatccacatccacagataaagcaactgagacagagagtcgaagtaaggtcccttaaattaccaagagcaaagtaatrattcaaaatccagtgttgacaaggctttgggaggacagatacactaggtaaatattggtataatcttcctagagaacaactaacaagaggcatacaatga

SEQ ID NO: 423473 - DNA, 201 bp, Homo sapiens
aattgactatggtaggtaagagtactgaccatgttgcctaggtaccaagaataaagaggccaaattctagcctcaccttaaattcttcatagaatttactygatgggtgttatttaacatattttaagaagagaacacatctactgatgggaatctgtcagatgatcactggaaagttggacagacaaccactgggacttc

SEQ ID NO: 423474 - DNA, 201 bp, Homo sapiens
taatgcaggggagatgaagacaggtaaagccaaacattggatcaaaagtgatcacgcattacgtataaatgtccaaatacatgtatccatacacatgaccsttttcccattaatgagcctggtattgagccacttctgtaaagcccaaaagcaaacagccttaggttttcagagagaagtgtccaaccagactgcccactg

SEQ ID NO: 423475 - DNA, 201 bp, Homo sapiens
tgggtgctttgtgacaccacatcagatcatcgatatattcttcttagctacgccactttgaaccagttacacattctttctggacctttctatgaaatgcbggaggttgcatttctctaagttgctaatgcacatttagcatttttttttttttttggtgatgtctcaagagcaactgaagtccaataaatattcagaggg

SEQ ID NO: 423476 - DNA, 201 bp, Homo sapiens
tcagactacagcaaaggactaggcgatgacctcttaaaagtctgctgtgtcctaggtttgtgttgcccataggttgggaacagtaggtgttgcatgtttgkgtagttttttcttaattttggagtaatgaatgtatgaaagaagcccttctttgtgaccattctgcatgccaagcgatatggtggcatttcctctacagac

SEQ ID NO: 423477 - DNA, 201 bp, Homo sapiens
tgaacaataactagcagaaatattgtattaacaaagttcaagatggggtggatagaccagtggtggaggacagaagaaccgatcaaagaaccgttcatctkactggtacgaatcactgtatagggggcagcatcataccgctgtaactagcaggctagtttggaatctgggaatggtaatcccagtctctccttttcctgc

SEQ ID NO: 423478 - DNA, 201 bp, Homo sapiens
aaaaagtactgagagtacatcatagaatgaataaaataaacttgacaagagacttcagtgtttgtccttttggcctacagtacctaacagtcatgctcttytgtgtttatttgggtgaaaaatctaaatttgagccagtaagagcacgatgctactcaatatgcatactttgagtagccttcctatgtggctggtactttt

SEQ ID NO: 423479 - DNA, 201 bp, Homo sapiens
aaaaaaaaaaaaagtactgagagtacatcatagaatgaataaaataaacttgacaagagacttcagtgtttgtccttttggcctacagtacctaacagtcrtgctcttctgtgtttatttgggtgaaaaatctaaatttgagccagtaagagcacgatgctactcaatatgcatactttgagtagccttcctatgtggctg

SEQ ID NO: 423480 - DNA, 201 bp, Homo sapiens
cccaataatgggattgatgggtcaaatagtatttctggttctatatccttgaggaattgccatactatcttccacaatgattgaactaatttacattcccmctaacagggtaaaagcattcctatttctccacacccttgcaagcatctgttgtttcctgactttttaataatctccattctgactggcatgagatggtat

SEQ ID NO: 423481 - DNA, 201 bp, Homo sapiens
ttgatatgtggtataaatttggcgatacaaccctattctaccctgttttaattatttttgttattatttttattgaagcatagtaccatttttgtttcaaygtatgtatagctttcctgcccttggcagggggagttatcttcatatttagactatactttcagtttctttatggttgccaaatcgacttttatttttcat

SEQ ID NO: 423482 - DNA, 201 bp, Homo sapiens
taaaaactgaggattccaaaaatcccacaaagtcagcagcagatttgttggaacaaattgtcaaggctatgggaccaatcttagagatcctccaaaaagcsataaagactatggaaatgaatatttctgtgtttaagaaagccagtgacaagtagggatgcaacagaaatgttcatttctgtcagaaaactacttaaaatc

SEQ ID NO: 423483 - DNA, 201 bp, Homo sapiens
aacgaatacccagataacatttgccactgagtttaatccgctttgtaagcatcaggttatcccatgtgagcgcctagtacgtgtggaaatttaatagacasgcagaacagaacgtttgtagaccacctgaacaaataaattagcacccgtattagagtcgcagattgcttatatgggcggtgatttattatttgttagtag

SEQ ID NO: 423484 - DNA, 201 bp, Homo sapiens
ccatttttgtttcaatgtatgtatagctttcctgcccttggcagggggagttatcttcatatttagactatactttcagtttctttatggttgccaaatcracttttatttttcatttggattactgctttgctttgcagtgttggaacttatttgttggagaaatgtcttcagagtcagaaaaggataaagagagactga

SEQ ID NO: 423485 - DNA, 201 bp, Homo sapiens
gaccacctgaacaaataaattagcacccgtattagagtcgcagattgcttatatgggcggtgatttattatttgttagtagtgttttgaagaagaaatacrgggatacatatgcagtcggttttaagttatatgagtggcaaggttgatatatattggctatattcccgactggtcttttcaccagccaaaagtcctctat

SEQ ID NO: 423486 - DNA, 201 bp, Homo sapiens
tatttttctgaggctgatttgaactccaccagatgcttctcataacttttgatggctgcttgaagctgtgttttttccactgctcccaggatggcacggayaatcatatctatgccaaggccaagaacagcaactccaatactaccaaggagagaagcaccaatttgagctaacacagtgaccaacttgttaattatgcca

SEQ ID NO: 423487 - DNA, 201 bp, Homo sapiens
acactgactgaattgtttagccgcagtatgaatactcaaatccttttgatggctgtgaaaaacaatagttacattaaggatttttttgagcaaatgctcaraatttttaaggagatgcaatctgtagtggatgcaagacatgacaaaattcaaaaggagtctttatgttccaaggttgcaatggccatgtgctctgtggtt

SEQ ID NO: 423488 - DNA, 201 bp, Homo sapiens
cctccaggttcttccaaaaccactgatagacaccttgaaaaaactgcaggatgtactaaaaactgaggattccaaaaatcccacaaagtcagcagcagatytgttggaacaaattgtcaaggctatgggaccaatcttagagatcctccaaaaagcgataaagactatggaaatgaatatttctgtgtttaagaaagccag

SEQ ID NO: 423489 - DNA, 201 bp, Homo sapiens
gtctgtttccttttccttaatatcctgaagttttctatagagggttggctctagcttatcttttagtgcttcatcaaccttctgcaattccttttggattytcataatggcttggatgatgaggtcacagttttctttgatggtcccatctcttttcatctcaatggaggccagcctgcaccccaagtgcatatttagaac

SEQ ID NO: 423490 - DNA, 201 bp, Homo sapiens
tgcaatctgtagtggatgcaagacatgacaaaattcaaaaggagtctttatgttccaaggttgcaatggccatgtgctctgtggttcagaagagtaccaawgtagaggagttgcatcagtcagctaaagaagtattcaaaagtgcccatacgccagtcatcatctctgtgctaaacagcagtaacatccttgggagtctgg

SEQ ID NO: 423491 - DNA, 201 bp, Homo sapiens
aatagctagaagaaaatggataattttcaaatatcggtatggagtgggactttataagcctaaaaccaataaaaaaaaagcacatgcaaaaatttgactarcaaagatggccaatgtaaaaagaactgaaaacaagctggagagaatgcaaaaaaagtattgttattattttcaaaaagcagtgacaatctaatatataaa

SEQ ID NO: 423492 - DNA, 201 bp, Homo sapiens
ccctcaagacgataacagcctgtttggagacacacagcaaatgctcagagatatttagatataacataatttatgaaggagtataagtactatacattaaycagtattagattccacattcattctttcatagataggtactgagtgcctatattaatattaatgacatagaaggaaatgttactatccatgtaaacttca

SEQ ID NO: 423493 - DNA, 201 bp, Homo sapiens
tattgtctctacttctgtgtatgtttgaacttttcttataacaaataaaaaagaaagaaaaagaaaaacgtgaccctgtctaaacctctgatgtttagtcrttagtgctctctgaggttttacatttcttcttgctgtcacttttcttcactgtccaaacagggttttgccatcatgcacagtttccttatctgggagtgt

SEQ ID NO: 423494 - DNA, 201 bp, Homo sapiens
tgtgtcccttgaggcatttgaaaacgacaatgttccttgccctcaagacgataacagcctgtttggagacacacagcaaatgctcagagatatttagatayaacataatttatgaaggagtataagtactatacattaaccagtattagattccacattcattctttcatagataggtactgagtgcctatattaatatta

SEQ ID NO: 423495 - DNA, 201 bp, Homo sapiens
ggccttaagtgatctgcctacctcagtctcccaaagtgttgggattacactaaaataaaatacttaaatataaatctaagaatatatgagccaccatgccyggccaatttatcgttttttctttaatggatatgcttttggtgtcatacatatcaaaggactaatcagctaaccaaaagttacaagattttcttctgtatt

SEQ ID NO: 423496 - DNA, 201 bp, Homo sapiens
ctgtcagataagcaatcaagaagctgctggtgaagacgatttacttcttcccgcctttttgggttctctgggtaaaggaagtcactttgggccatatttcyaatatgatcgctgaaaaataaaatggtaaatttttactgaaagtcttaaaaaatgtctgctaactgtgtagaagggactaggaaatctttttcttcatgc

SEQ ID NO: 423497 - DNA, 201 bp, Homo sapiens
ccctcaaacaaaaagtcagagcttcattgctttattgtcctttaaatgctgtactccctacttccttggccttctgtcatccacctttcagaattatctgrtagtgattttatatattcagtccaggatttttagttgtaatcagtaggaaagatcagatggagtgtgcttagtctaccttaactggaaccagagcccctc

SEQ ID NO: 423498 - DNA, 201 bp, Homo sapiens
tagtcccagctacttgggaggctgaggcaggagaatggcatgagcctgggaggcagagcttgcagtgagccgagatcgtgccactgcacgccggcctgggygacagagggagactccgtctcaaaaaaaaaaaaaattttattggttacgtatactattccctgtctttaccctggttcaataaatctaaaattgtttcac

SEQ ID NO: 423499 - DNA, 201 bp, Homo sapiens
ttctgcaattccttttggattttcataatggcttggatgatgaggtcacagttttctttgatggtcccatctcttttcatctcaatggaggccagcctgcrccccaagtgcatatttagaacctcagtcagcttattggtgacatcgaagctgtcagataagcaatcaagaagctgctggtgaagacgatttacttcttcc

SEQ ID NO: 423500 - DNA, 201 bp, Homo sapiens
tttgtaaattgtcttgacaatataaaaaccttaaagtccaacttcactcttttccctgaaagctcagatcagtcttccctgctgcttcttcccagcttcagtcttcagacccgttaattcctccacagcaaagacacctgagtggcagggaaatcactcagccccagtgtaacttagtgaaagacagcaggctttacactc

SEQ ID NO: 423501 - DNA, 201 bp, Homo sapiens
atttttcaaccttgtgaaacttagttattacttctagaaatgcatatttaatgtaattattgatatgcttaaattaagtgtaacatttaatcttagttttytgtttttctgttctgtttttcaaatttctctgttttccttttcaagccatcttttgagtaatataagtagttacttaaataattttgaaatttcatttta

SEQ ID NO: 423502 - DNA, 201 bp, Homo sapiens
ggaggccgaggcagatggatcacttgaggtcaggagttggagactagcctggccaacatggtgaaaccctgtctgtactaaaagtacaaaaattaattgcrcatggtggtgtatgcctgtggtcccagctactcaggaggcagaggcacgaaaatcgcttgaacctggaggctgaggttgcagtgagctgacattgcacaa

SEQ ID NO: 423503 - DNA, 201 bp, Homo sapiens
ggggaaaatttctcgtctgtgttatggtgcccagtaacagtgatttattattcagatctgctccttatttttcatcttgcttcccgctctgaacccaccasagtgagattacacctggactggcctactgagacttcaccctaagaacttggtcgaatgtgccagttgctgtggtcttaacaatccagatgggatgctatt

SEQ ID NO: 423504 - DNA, 201 bp, Homo sapiens
actttcagaaacaaaggactgactggatgggttaatttccaaaaacatgtttgctgagtgttatggtatggtttgttttccccccaaatccatatgttgaratttcagcccccaaagtgatggcattaggtgaggctttatgtcatgacggtggagtcctcaggaatgggattagtgcccccataaaagagacccagaggc

SEQ ID NO: 423505 - DNA, 201 bp, Homo sapiens
aaaataaggctcagagagcactgaaatacagtgagggatttgggagttgggaacaaaagtaacagccagtaacctggagttgctgaagagtgtacagcctsgaggagtgtggggcggcagggttgtgagtagaagcttgcgattctgaataatatgcacagttatttgaaaagtggggaattttttggtaaatcgcttgga

SEQ ID NO: 423506 - DNA, 201 bp, Homo sapiens
gaggctaggctcagtggctcacacctgtaatcccagcactttggaaggccaaggcgggcggatcatgagtttgagagcagcctggccaatatggcgaaacyccatctctactaaaaatacaaaaattagctgggcatggtggcgtgtgcctgtagtcccagctaattgggaggctgaggcaggagaattgcttgaacttgg

SEQ ID NO: 423507 - DNA, 201 bp, Homo sapiens
gtgcatgagagtattctagctaataaatgaagaagtcagagaaatggaatatcattttgtaacccccatgatttaatgggtatagtcaatggccattaacrggctgttaacttcacaaaaagagtcaaccagacattaggggacttctaatggaagtacaaacaccacctctaaaattgtcctgccaaacaaaacaaacca

SEQ ID NO: 423508 - DNA, 201 bp, Homo sapiens
caagctcatcaatgcccaaggcctgctcagcattctaatggttggattaattgtcctctggagctatttaccttgggagggctctctcccctgcttcttcytgtgtacatccttgtacttttagacacctcagccaaatgaatctcctggtccagaaagctccatggataagaatttaaagataatggctttcattctgcc

SEQ ID NO: 423509 - DNA, 201 bp, Homo sapiens
atatgaataaagaaaattatgagaaaatttgccagaagaaaatcatatggcaaattatgacaacaatgagatatagtattccttcacatgtaggcttgccraaaattgggtaaaatgtgattacatcaatatgagcaaatggatatacttcatgcaccttagtgaaagtggaagccgcttcaaccactttgtggaggaaac

SEQ ID NO: 423510 - DNA, 201 bp, Homo sapiens
atttactgagcacctattacatttttttctagatgatacagaaatctccaccctttcagaattcctaatgaaatggaagaggctgatttatacgcaaaaaytggtaacacaagcagactatgctaactacttaatgtatgtaaaataaacaataattgttgactttcatatgaataaagaaaattatgagaaaatttgcca

SEQ ID NO: 423511 - DNA, 201 bp, Homo sapiens
cttcatgcaccttagtgaaagtggaagccgcttcaaccactttgtggaggaaacttgtcaacgtttattaaatatttagtaaaattcacagttcaaaacaygcatacctcatgacccagaaattctcaatatctactccatgaaacttatgcccatgttatccttgtataaggaggcatatataagaacatttgttgaagc

SEQ ID NO: 423512 - DNA, 201 bp, Homo sapiens
gttttaatgggatgttcaaaagtcatctctctttttgcctctgataggattgtccctctcctccatcagccaacaagatgaccatgtttatcttttatatycccaagagactccaaagcttctcttagctactattttctgtactagtctgtccctgggctcaggaagctcttcctgttatctaacattggcctctcccat

SEQ ID NO: 423513 - DNA, 201 bp, Homo sapiens
caccactatactagctatgtaagcttgagcaaatttctcctctaaatgggaataataaaggtacctacttcactggtttgctgtgaatattgaacaatacrattattgtaaagtacttagagcagcacttggcacacaataaacatccaataagtttctgttgttactattattcagtccaagtgtcctcttctgcaaaat

SEQ ID NO: 423514 - DNA, 201 bp, Homo sapiens
ctgcaaggaagttgcaggatgaacagtcagaaggcgatttttcatgatccaggcagaacctgcaattaagagagctttggggtctcttcaagcgatctttygtttaaaattaggaggcatgatctctttgcctctgcctctgacctctgtcagggtttgaaagtccactaatccgctaagttccaggccaaaaggcctgga

SEQ ID NO: 423515 - DNA, 201 bp, Homo sapiens
gaggatctttccttgaagggtgcacgcttcctgcaagatgcatctgtaggtgtttgagatcatgtcctgtagttcattccttgtgcaggagggtgagccckctgaggatggggaaaatttctcgtctgtgttatggtgcccagtaacagtgatttattattcagatctgctccttatttttcatcttgcttcccgctctga

SEQ ID NO: 423516 - DNA, 201 bp, Homo sapiens
cccatgtggtcctctggacgctgatctgcctgcctgtggttttcatcctttcttttgttgtctctttctactacggcactatcacctggtacaacatcttyctcgtgtataatgaggaaaggaccttctggcacaagatctcgtattgcccttgcctcgttctcttctatccagtgctcatcatggccatggcttcttccc

SEQ ID NO: 423517 - DNA, 201 bp, Homo sapiens
tctagaagtttatagatctttgcataaatgttggcgggtagtatggcacaatgaaaataacatgggctttgaaattagcaaacctgggtgtcagttccagycccaccactatactagctatgtaagcttgagcaaatttctcctctaaatgggaataataaaggtacctacttcactggtttgctgtgaatattgaacaat

SEQ ID NO: 423518 - DNA, 201 bp, Homo sapiens
acaaaaatattactgtagcaaaagtttattcactgtctattataagagatttagattgcattcccaaaataaagtattgcaagaagtaaagggagaggaargcttctgctaagttgaggatcgtttcccacattcctgtccatctcaccccatttgcttcctgttgatggctttgctttcctatctttcaggtggaatgca

SEQ ID NO: 423519 - DNA, 201 bp, Homo sapiens
aaacaaaaaaacacttttggacctccaaattctataggcaggaagcaggtagagaagactactcaccacccagctaaggcactcccagtttattgacgcayataattgtgtgagataataacttttttattgttttaaacctttacttcttgggtgacttgttacatcacaacagataattcatattcttgtactgtgaca

SEQ ID NO: 423520 - DNA, 201 bp, Homo sapiens
agactactcaccacccagctaaggcactcccagtttattgacgcacataattgtgtgagataataacttttttattgttttaaacctttacttcttgggtracttgttacatcacaacagataattcatattcttgtactgtgacatctgatatattccagacttgcaggaaactaacagtaaaaaggatccccaaattta

SEQ ID NO: 423521 - DNA, 201 bp, Homo sapiens
agtggtcactctcccgagggagacccactcagtccgccattgaatcactgactcaggactgtgccagatggtgtaaaaaaggctactcttgtcctcatgcscagcctgggagggtgcaacatggagatgcaatgcccactcttctgatcttgactctcacctcctttgtaccctgcagatatgtggaacctgcctctggac

SEQ ID NO: 423522 - DNA, 201 bp, Homo sapiens
actactcaccacccagctaaggcactcccagtttattgacgcacataattgtgtgagataataacttttttattgttttaaacctttacttcttgggtgayttgttacatcacaacagataattcatattcttgtactgtgacatctgatatattccagacttgcaggaaactaacagtaaaaaggatccccaaatttagg

SEQ ID NO: 423523 - DNA, 201 bp, Homo sapiens
tctactacggcactatcacctggtacaacatcttcctcgtgtataatgaggaaaggaccttctggcacaagatctcgtattgcccttgcctcgttctcttytatccagtgctcatcatggccatggcttcttccctcggcctctacgctgctgtggtccagctctcgtggtcctgggaagcatggtggcaagctgcccggg

SEQ ID NO: 423524 - DNA, 201 bp, Homo sapiens
tcgtgtataatgaggaaaggaccttctggcacaagatctcgtattgcccttgcctcgttctcttctatccagtgctcatcatggccatggcttcttccctyggcctctacgctgctgtggtccagctctcgtggtcctgggaagcatggtggcaagctgcccgggacatggagaaaggcttctgtggctggctctgcagca

SEQ ID NO: 423525 - DNA, 201 bp, Homo sapiens
atcttgaaacaaaaccagctaagccactctcacacttctgactcagagaaactatttataggaatcccacagaaatgttgagaaaattctattcacagaayactaaaaggttcagaaaccataaaaacaaaaaaacacttttggacctccaaattctataggcaggaagcaggtagagaagactactcaccacccagctaa

SEQ ID NO: 423526 - DNA, 201 bp, Homo sapiens
cttaccatgactacaaaataacccatcttttcctaagtttgtgggaatgttttgtagtctcaaaggatagtgttctaattgtagggagatgaggaaatcaygtttcaaggtaaatcaaggacagtgtctctgtcctgtgactactgtaagtagacattggctgggcacctttctaaaatgagctgtgcctgaagcaaaaat

SEQ ID NO: 423527 - DNA, 201 bp, Homo sapiens
aaggggcgtgcaagatggacgccatgaggggctacgcggccaaagtggaggagctgacgaagaaggaagtggggggcgtggagcgcgaacaaaggggcgtscaagatggacgccatgaggggctacgcggccaaagtggaggagctgacgaagaaggaagtggggggcgtggagcgcgaacaaaggggcgtccaagatgga

SEQ ID NO: 423528 - DNA, 201 bp, Homo sapiens
acgcgggggacgtttcggtccgggcccgcgcgagcgtgcgcgacaggaggagacgcgacggggcagcaccgctctggtggcgcattgctggacgcagccckgggccggggagccgcggcacccacctaggtccatggcggcgacgccggcggctgcgcggggctaacgccccctcccctccgagaactcgaacgcggcgcg

SEQ ID NO: 423529 - DNA, 201 bp, Homo sapiens
ggaagtggggggcgtggagcgcgaacaaaggggcgtgcaagatggacgccatgaggggctacgcggccaaagtggaggagctgacgaagaaggaagtgggrggcgtggagcgcgaacaaaggggcgtccaagatggacgccatgaggggctacgcggccaaagtggaggagctgacgaagaaggaagtggggggcgtggag

SEQ ID NO: 423530 - DNA, 201 bp, Homo sapiens
ttgatggctgaaatgtcctgaaactgtcgcaagcttagccgagacatcaataaatcacttaaactgcatgagagtgactgctgttggaaaggagaaactcrgtgactgagtgctggggaggcgtccaaatacacagactaactttttgtatggttttgggtggagttcccagctctcctattacaagagcgtatgtaggta

SEQ ID NO: 423531 - DNA, 201 bp, Homo sapiens
cacggcacgatgggagacgcaggagccacggcggccgcgcttaggcctgctcacaacctccgcccggccccgcccacagcctccgccgcgcacgcgcagtyctcacgaacgagcgcgccaagcgcacagcgccgccttccggcagagccctcccaccagccctcaggtacccggacgtcgctcactagacccctccgcacc

SEQ ID NO: 423532 - DNA, 201 bp, Homo sapiens
gtgggaggcttggagcgcgaaaaaaggggcgtccaagatggacgccatgaggggctacgcggccaaagtggaggagctgacgaagaaggaagtggggggcktggagcgcgaacaaaggggcgtgcaagatggacgccatgaggggctacgcggccaaagtggaggagctgacgaagaaggaagtggggggcgtggagcgcg

SEQ ID NO: 423533 - DNA, 201 bp, Homo sapiens
  misc_feature (1)...(201): n = A,T,C or G
aggcttccactcccacccgcccagctcgcgccacatacagtccctcaacgcgctcctgccgcgccgccccctccagacagcagcgttccggatcctagacnctttttgacggctggtcctccccagaaaatgcgccgtgtgagcccaaacatggtggggtttacgctggaccccgagcttgcaatctgtgcttgacaaaac

SEQ ID NO: 423534 - DNA, 201 bp, Homo sapiens
tgctgtggaaatgcccaagatctgagggcaggagaccattctccagtgacagcctcttgggaggttgaggccccagccccttatctcttcaaggctgattyactaataccccagcaccacagaggggagagggactctgtcctcctaaacactaaagtcaagtccaaaagcccccactggaacacagggcctacccggttc

SEQ ID NO: 423535 - DNA, 201 bp, Homo sapiens
cgggacccggaccaccccccgccaaggccaccccgggacccctagacccgccccgacgcgggggacgtttcggtccgggcccgcgcgagcgtgcgcgacargaggagacgcgacggggcagcaccgctctggtggcgcattgctggacgcagcccggggccggggagccgcggcacccacctaggtccatggcggcgacgc

SEQ ID NO: 423536 - DNA, 201 bp, Homo sapiens
actgcgacatccccggccctccggcctcagacgtgagagccagggccaagtgggaggcttggagcgcgaaaaaaggggcgtccaagatggacgccatgagrggctacgcggccaaagtggaggagctgacgaagaaggaagtggggggcgtggagcgcgaacaaaggggcgtgcaagatggacgccatgaggggctacgcg

SEQ ID NO: 423537 - DNA, 201 bp, Homo sapiens
aaggggcgtccaagatggacgccatgaggggctacgcggccaaagtggaggagctgacgaagaaggaagtggggggcgtggagcgcgaacaaaggggcgtscaagatggacgccatgaggggctacgcggccaaagtggaggagctgacgaagaaggaagtggggggcgtggagcgcgaacaaaggggcgtccaagatgga

SEQ ID NO: 423538 - DNA, 201 bp, Homo sapiens
ccaagtgggaggcttggagcgcgaaaaaaggggcgtccaagatggacgccatgaggggctacgcggccaaagtggaggagctgacgaagaaggaagtgggrggcgtggagcgcgaacaaaggggcgtgcaagatggacgccatgaggggctacgcggccaaagtggaggagctgacgaagaaggaagtggggggcgtggag

SEQ ID NO: 423539 - DNA, 201 bp, Homo sapiens
acgatgggagacgcaggagccacggcggccgcgcttaggcctgctcacaacctccgcccggccccgcccacagcctccgccgcgcacgcgcagtcctcackaacgagcgcgccaagcgcacagcgccgccttccggcagagccctcccaccagccctcaggtacccggacgtcgctcactagacccctccgcaccgtcccc

SEQ ID NO: 423540 - DNA, 201 bp, Homo sapiens
acggcttgtacaaacaggccacccagggcgactgcgacatccccggccctccggcctcagacgtgagagccagggccaagtgggaggcttggagcgcgaamaaaggggcgtccaagatggacgccatgaggggctacgcggccaaagtggaggagctgacgaagaaggaagtggggggcgtggagcgcgaacaaaggggcg

SEQ ID NO: 423541 - DNA, 201 bp, Homo sapiens
ctccgcccggccccgcccacagcctccgccgcgcacgcgcagtcctcacgaacgagcgcgccaagcgcacagcgccgccttccggcagagccctcccaccrgccctcaggtacccggacgtcgctcactagacccctccgcaccgtcccctgcccggcccctcttccggggtcccagcgggtcgggctcatgattccccgg

SEQ ID NO: 423542 - DNA, 201 bp, Homo sapiens
ctggtggcgcattgctggacgcagcccggggccggggagccgcggcacccacctaggtccatggcggcgacgccggcggctgcgcggggctaacgcccccycccctccgagaactcgaacgcggcgcgggacgcacggcacgatgggagacgcaggagccacggcggccgcgcttaggcctgctcacaacctccgcccggc

SEQ ID NO: 423543 - DNA, 201 bp, Homo sapiens
ccggcggctgcgcggggctaacgccccctcccctccgagaactcgaacgcggcgcgggacgcacggcacgatgggagacgcaggagccacggcggccgcgsttaggcctgctcacaacctccgcccggccccgcccacagcctccgccgcgcacgcgcagtcctcacgaacgagcgcgccaagcgcacagcgccgccttcc

SEQ ID NO: 423544 - DNA, 201 bp, Homo sapiens; identical to SEQ ID NO: 423537

SEQ ID NO: 423545 - DNA, 201 bp, Homo sapiens
caggcactgatgggacatttgcaaagcaacgtgtactcagtttacatttggtacattaagtgctgaggggtgtaagggagtgaatagtacggtgaatgctkcttttgtttttttccaacaggaatttattgagttcctgttgcatgcaaggcattgtgctgggaatacaaagatgaatacgattgtccttgtccccagtga

SEQ ID NO: 423546 - DNA, 201 bp, Homo sapiens
cttccattcctgagatggcaaatccaagcaactttccttttggcagagttcctccataggaggccccaattacttttgctcctgttggcttccactccttrcccaggagaccagttcctcctattgacctagaaagaaaactcttcttgactcatgtcctcgttctgagcttcacagagagcgcccagcaaaaaaaaaatt

SEQ ID NO: 423547 - DNA, 201 bp, Homo sapiens
ccgatagaaaatacagttggcaccagcaagatctgccaatcaaaagtgggctctgaagctaaggggtgtgtgtgtgtgtgtgtgtgtgtgtgtgtgtgtgygcgcgcgcgcgctctgaagctaaggggtgtgtgtgtgtgtgtgtgtgtgtgagtgacggagggattctcgctctgttgcccaggctggagtgcagtggcg

SEQ ID NO: 423548 - DNA, 201 bp, Homo sapiens
ggaggggacgcgggcgcgagcacgcatctcgcgcgcttctcggcactctccggctctgctcccggttggtgcagcgggtgcagaggctggctggccggagygaggcgggcgacacgccgcgccgggcttcgcctgcctgtcctccacctccgcagcaagtttccctaccttcgggcggacggggagaacgcacacgtgtgg

SEQ ID NO: 423549 - DNA, 201 bp, Homo sapiens
aggtttctgaaacagatcgtgagcttcatcaagagaattcaactggaaaaccaagactggtagactctctttttcttcagacaataggcaggagccaggcrgagtccagggattcttggaacacctatcttttcttcggaggacactaagttctatttgaagacaaagttcaatatggcaacaggactgatgggacacgaa

SEQ ID NO: 423550 - DNA, 201 bp, Homo sapiens
atgtgctctcttacaatgatgcaggaacaaaagcttcttctcctaatggcctgtggagctaagaattcatatggattttactacatgatattttccttcartttctcaaagaagggtaaataggtggatctctcaatagtgttcatatttttgaggtggattaactctttcaaaattagatcccaatatgtactcagaggc

SEQ ID NO: 423551 - DNA, 201 bp, Homo sapiens
tatatcttctcaaatatgacttttgctaccatcccatgaggcataaagagcaaatatactgatttttttttaacagatgaagagtgatatggtttagctctgtgtctcccacccaaatctcaccttgaattgtataatccccacgtgtcaagggcgggaccaggtggaaataattaaatcatgggggcagttttccccatg

SEQ ID NO: 423552 - DNA, 201 bp, Homo sapiens
tgcagtactgattgtttttgtaaggccaactgcaagttatttttgttaatgaagcaaagcagtattgcagcagcatatttgaagttgtatatcaaaaaatrttggggtttagtcatagaggccattttttgaggcatagtggttaagaacgcagactttagagtcaactgcttagtcacctcctggatctatcacatactg

SEQ ID NO: 423553 - DNA, 201 bp, Homo sapiens
atatcttctcaaatatgacttttgctaccatcccatgaggcataaagagcaaatatactgatttttttttaacagatgaagagtgatatggtttagctctgtgtctcccacccaaatctcaccttgaattgtataatccccacgtgtcaagggcgggaccaggtggaaataattaaatcatgggggcagttttccccatgc

SEQ ID NO: 423554 - DNA, 201 bp, Homo sapiens
agaagaattcttctattacagaagaagcatgaattgcataggagaggacacacaggtactgttgacaataacacagtgatccatacatccatctctgtggwaaagaagattgaacacagctgcatcaaaatgtaaaagaaaatattaaactctttataattatgtggctgtgatacatctcatggcctagagaaccattgg

SEQ ID NO: 423555 - DNA, 201 bp, Homo sapiens
aaggccaactgcaagttatttttgttaatgaagcaaagcagtattgcagcagcatatttgaagttgtatatcaaaaaatgttggggtttagtcatagaggscattttttgaggcatagtggttaagaacgcagactttagagtcaactgcttagtcacctcctggatctatcacatactgtgcagccttggacaagttatg

SEQ ID NO: 423556 - DNA, 201 bp, Homo sapiens
attgtggtatgtacacataatggaatactgtggagctgtaaaacagaatttgcagcaacattatcttaagtgaattaatgcagaaacagaaaaccaaatamcacatgtttttacttataagtaagagctaaacattgggtatacatggacatagagaagggaaaaatagacacaggactacaagaagggagaaggagggac

SEQ ID NO: 423557 - DNA, 201 bp, Homo sapiens
tccctggctgggaaatttaagccctttttaccctcagaggacagatctttgcaaccctctcattcctgagaggtaaggaatcatattctgagttagagccyatggtggttgtatccctggactctcaggttcctttgtggctattgggttacacactccagggggtggagttattaagaagaccctgagatctctgtggct

SEQ ID NO: 423558 - DNA, 201 bp, Homo sapiens
acatgtttttacttataagtaagagctaaacattgggtatacatggacatagagaagggaaaaatagacacaggactacaagaagggagaaggagggaccggggcaaggttgaaaaactacctgttgggtactatgctcactacctggatgatggactcagtcataccgcaaacctcagcatcatgcaatatactcttgta

SEQ ID NO: 423559 - DNA, 201 bp, Homo sapiens
gaagaaaaaagcttgggaaacataattacataaggtaactagaaatgatcaaaatctatttctttacctagcaacttcagatgaaattttgcagcagtttyatgaaatattttatgaaataattgctgtattcgtctgtcactgagaaatacaagtgtaagttaagcatttctgaagcctgaaattcaccgagtgcagttt

SEQ ID NO: 423560 - DNA, 201 bp, Homo sapiens
ggcacaagaatggcttgagcctgggaggtggaggttgcagtgagctgagttggcatcactgcactccagcctgggcaacagagcaagaccctgtgtcaggaaaaaaaaaaaaaagcaataaatgtaatgggtttgaatcatcatgaaaccatactcctcaacccccagcccccatacgtggaaaaattgtcttccatgaaa

SEQ ID NO: 423561 - DNA, 201 bp, Homo sapiens
cagtctttgcaatgagattttatgttaaatttaggtcacatgttaattttaactgttaggatatcctagaatgtgcattgttctttaccaacctaactgaygagtcaatttgcctgtcttaaatatgaggcttagtcagttgctcacctcatattttcaaagtaccagtgaaattagtggatagtttaagattaggtaggt

SEQ ID NO: 423562 - DNA, 201 bp, Homo sapiens
aaaaaaaaaaagcaataaatgtaatgggtttgaatcatcatgaaaccatactcctcaacccccagcccccatacgtggaaaaattgtcttccatgaaattsgtccctggtgctgaaaaggttggggaccactgacctagatgaatgcctagatgaatggtattactgcctttataaaagaaactcaggagagctcccttgc

SEQ ID NO: 423563 - DNA, 201 bp, Homo sapiens
tcaaaagaaaagaaaatagccatagttccttgtccgtcttagctgcattcgtgtctcactgcggctttgccaattttcctttcttttctgcaggttgcatmccctgtcctgagggcgcggcacggagtgcatgcgggccgctgccatgacgaccgccatcttggagcgcctgagcaccctgtcggtcagcgggcagcagct

SEQ ID NO: 423564 - DNA, 201 bp, Homo sapiens
  misc_feature (1)...(201): n = A,T,C or G
ccagactgaccaagaaagattcctgaggctggcaagtggggcaacgtgtggaggaagcccctcataatttggagaaaacttgatacaatagaagctgactnttaaggcattggcttttaaattaatacatatatccaaggatatgttatagctgcagtgtttgaaagccaaaggatttaagagttttgttgttgttaataa

SEQ ID NO: 423565 - DNA, 201 bp, Homo sapiens
actttattgtcttcaaatcttttgttttcttcctttttgtgagatttgtgggttttgtgccttataaatggaaatgtatgaacacaatatatgctcatgtrgaattttctgttctgggttattgggataagaaaaaatatatattgctcttcaactagtgaatgaaagaaacttcagaaagctagaattgcttatcaatca

SEQ ID NO: 423566 - DNA, 201 bp, Homo sapiens
ttttttctttttttttttttttttttgaggcagagtttcactcttgttgcccacgctggagtgcaatggcgtgatcttggctcactgcaacctccacctcyctggttcaagtgattctcctgcctcagccttctgagtagttgggattacaggagcctgctaacacacccagctaattttttgtatttttagtagtgacgg

SEQ ID NO: 423567 - DNA, 201 bp, Homo sapiens
  misc_feature (1)...(201): n = A,T,C or G
tctcaggaattctgatttttccttcaagattcagttcagggtcacttcaagagggctatacccccatcctttccctgttttggttgtttgctgagacctcngtgaaccagtgtttgtctctaatggagcacttattgcacatttttgtgttgattcccctacatgtctgtctccccagtaaactttgatctctttgaaggc

SEQ ID NO: 423568 - DNA, 201 bp, Homo sapiens
gacagcaatatttcacatttactacgcacttaccttgggctgggcagagtgctaagcacttcattttttagaccctctcatttaactatcacacaacccayataatatatagaattatgaagaaactgaggctgagagaattctataacttgcccaaggtcaccccagtaagtggcaaaactggagcttgactccaggtct

SEQ ID NO: 423569 - DNA, 201 bp, Homo sapiens
gaacccgggagacggaagttgcagtgaaccaagattgcgccactgcatcccagctgggcgacagagcaagaccctgtttcaaaaaaaatcttcgggaggcygaggtgggcggatcacctgaggtcgggcgttccagaccagcctgaccaacatggagaaaccccatctctactgaaaatacaaaattagccaggcgtggtg

SEQ ID NO: 423570 - DNA, 201 bp, Homo sapiens
gaggctgaggagggaggagtgcttgagcccaggagtttgggcccagcctgctgtacatagcgacacccctgtctctacaacaacagcagcaacaaaaaatyatccgggcgtgttggcgtgcatctatggtcctagctactctggaggatcacctgagcccaggaattagaggttgcaatgagctgtgatcgtgccactgca

SEQ ID NO: 423571 - DNA, 201 bp, Homo sapiens
gaacatgtgaaccaggcaccctggtttgtttggagcattgctgcccagaagcttctatgggataggtggtgcttgggattgatgtgttgtggccatgcagycctccctgaggattgacttctgcactaatccagtgaaggaggctgtgtcaaaagaagggctcagaagccctcttttcagaggcaatgattcctgtcagta

SEQ ID NO: 423572 - DNA, 201 bp, Homo sapiens
tacatggttgctaccagaccccactgttgtagctaatccttgcattacagaattggatcctgggattaacaaactcccacggacatgactgttgatttctrtgaattcaaccattttcccattgctgcaaattgggttcatttaggtacacagggacagaatagctgtgaaaggcccgtctgaaagaaagaaaggaccagc

SEQ ID NO: 423573 - DNA, 201 bp, Homo sapiens
tctatggtcctagctactctggaggatcacctgagcccaggaattagaggttgcaatgagctgtgatcgtgccactgcactctagcctgggcgacagagtrataccccgtctcaaaagaaaagaaaatagccatagttccttgtccgtcttagctgcattcgtgtctcactgcggctttgccaattttcctttcttttctg

SEQ ID NO: 423574 - DNA, 201 bp, Homo sapiens
atattaatggattctattagggcagcaaaactgataaagcagtcaaacccttcttgtgatagtgttttaaatcttggagaaatccacaatgaaaaggactyaatagaaaatacgactgtcattgggccatagctgccaagggaactaaaaggtttcttttaaatgaattctcctttggttttctcttggcggaaggaatca

SEQ ID NO: 423575 - DNA, 201 bp, Homo sapiens
cagcctggtaccacaccctccagatcctcttcttcctggttagcgcttatttcttctcctgccccgtgcctgagaagtacttcccgggttcctgtgacatygtgggccatgggcatcagatcttccatgcatttctgtccatctgtacgctctcccagctggaggccatcctcctggactaccaggggcggcaggagatct

SEQ ID NO: 423576 - DNA, 201 bp, Homo sapiens
cagcctgcagaaccgtggccaattaaacctctttgctttgtaaattacccagtgtccagtatttctttataacaatgagagaatgggctaatacactagtyaagttcaagaaactttggttctccatttttcctatcaaaacatcacattgactttcctgcttaatagtttcctttgtcattgggatcactgcactgatat

SEQ ID NO: 423577 - DNA, 201 bp, Homo sapiens
tcttggtccaactccattattctacagatgaattaaaggaggctcaaagaagctgtctgcagctccttgcttcctctactgtaccagaaagccacgttgcrttaaaataaccacggatcctagccggcctggtggctcacgcctgtaatctcaacacttggggaggctgaggagggaggagtgcttgagcccaggagtttg

SEQ ID NO: 423578 - DNA, 201 bp, Homo sapiens
agcacctgggctcaagtgatcctcttgtttcagccttgttattaggtaggattacagtcacataccacgatgcccagctaattttttgcagggtcttgctrtgttggtgcccaggttggtcttgaactcctgggctcaagccattctcctgccttggcctcataaagtgctgggattataggtatgagcctataggtattt

SEQ ID NO: 423579 - DNA, 201 bp, Homo sapiens
atgagatgggaaagcaaaaaacttagtgcctggttataactaacttgctgtcacatagtagttctcttttgaagaaatttggagagtattaagataatgcrtatgaagcatcaagacttccttggtgaggttttaagtgttcatgaccatattttagacaatgtattggacagcagtaatggcttaggccagtccgtagtc

SEQ ID NO: 423580 - DNA, 201 bp, Homo sapiens
ttagggtgtgggctctggagccagactacctgggcacagattctggctccaccacttcctgtctggattttgggcaagggacttcacctgtttcctcatcwgtacaatagctaaaaatagtagattccatttcatagagttgagaggagtaaatgttttatttatttaagtcacatgcaatgaccttagaaccatgtgtag

SEQ ID NO: 423581 - DNA, 201 bp, Homo sapiens
ccttttctaaaatcaacctataacctagaaacaaacaccaagggtttgatttctttagttattccaaaatttgcatgttgttgtttgtcctgagaagttgyggtgccttgggagctgagaaaacgtacatttttcaatatgagttttaaacgccttcattaagactaggattttccaggcttcaactgaccttcctgtcaa

SEQ ID NO: 423582 - DNA, 201 bp, Homo sapiens
tacaaaaaaagacacacagaccaatggaatagagaacccagaaataaagctgcacgcctacaatcaactgatctttgataaagttgacaaaaataaacaawggggaaaggatatcctattcaataaatggtgctgggaaaactggccaaccatatgcagaagaatgaaactggtctcctacctatcaccatatacaaaaat

SEQ ID NO: 423583 - DNA, 201 bp, Homo sapiens
tcagcctcccaaagtgctgggattacaggtgtgagccaccatgcgtgaccttagaatttttcatgaccttgcactaccaaagggaaatttaagtcctttcttgttgttgttgtttttgagatgaagtctcgctttgtcacccaggctggagtgcagtggcacgatctcggctcactgcaacctcctcctcctgggttcaag

SEQ ID NO: 423584 - DNA, 201 bp, Homo sapiens
atattctcaagagtcttctactggaagctagaaagaaataggaatttaagtccatagaatgaaggtagttattcctgcctgtgttgcccacctgttcacaraaagtacctttatgcttgaaaacattaggttctttggttactgcactgtagtttcaaatggatcctccagatggcattcatgtcttactcagaaagggca

SEQ ID NO: 423585 - DNA, 201 bp, Homo sapiens
cagcctcccaaagtgctgggattacaggtgtgagccaccatgcgtgaccttagaatttttcatgaccttgcactaccaaagggaaatttaagtcctttcttgttgttgttgtttttgagatgaagtctcgctttgtcacccaggctggagtgcagtggcacgatctcggctcactgcaacctcctcctcctgggttcaagt

SEQ ID NO: 423586 - DNA, 201 bp, Homo sapiens
agcctcccaaagtgctgggattacaggtgtgagccaccatgcgtgaccttagaatttttcatgaccttgcactaccaaagggaaatttaagtcctttcttgttgttgttgtttttgagatgaagtctcgctttgtcacccaggctggagtgcagtggcacgatctcggctcactgcaacctcctcctcctgggttcaagtg

SEQ ID NO: 423587 - DNA, 201 bp, Homo sapiens
tcaggacagtctgttctgccttttgtatgcaacaagaataaaaacgagttctaacagtgctccagtgttattttacattatgtttctctgcctggcccctycttttcctaagtctttgcttaggcattcttggtcataaaaatgacaaatggtaggagatgatagaccaaaaacaagctgatggttagaaattcagccagc

SEQ ID NO: 423588 - DNA, 201 bp, Homo sapiens
agttaaagttaatatccctttggacttgtacctctctgcttcttagttctataaatctcttcctagtttattttctgaaagagtgaagtagaaataatttccagaaaataacttgtcaacataaagtcatgagggaggctggtgatatgagaaatagaaggaactgtcagagctctgcagtcatggtcttctgcagaccaa

SEQ ID NO: 423589 - DNA, 201 bp, Homo sapiens
cccacaatcccttcatggcaatagctatattgttttgattatatgcacttccatacttcatctgtaccatgtttgtatgattacaaaaatagggctgggcrgaacacatactttaaatttgttttttcctttacatgtctttgactcatttattcattcaagaaatcttttttgagaatgtacaatgtgctagtccatcac

SEQ ID NO: 423590 - DNA, 201 bp, Homo sapiens
tgggtgtggtggtgcatgcctgtaataccagctacttgggaggctgaggcaggagaattgcttgaacccgggagacggaagttgcagtgaaccaagattgygccactgcatcccagctgggcgacagagcaagaccctgtttcaaaaaaaatcttcgggaggctgaggtgggcggatcacctgaggtcgggcgttccagac

SEQ ID NO: 423591 - DNA, 201 bp, Homo sapiens
ttttccctttaaaccccccatgaccaatagcttaccctatggcaagtatagttaggttactcgtaataattaatttggtatgctaactagttgagctcacrgaaaaatgcaagtatgggtgtattcctttataatgctggggtgtttcttggggagggtcttaatattttaccaacttaggttttaccaatttttgcatat

SEQ ID NO: 423592 - DNA, 201 bp, Homo sapiens
ctgtttcaaaaaaaatcttcgggaggctgaggtgggcggatcacctgaggtcgggcgttccagaccagcctgaccaacatggagaaaccccatctctactraaaatacaaaattagccaggcgtggtggcacatgcctgtaatcccagctacttgggaggctgaggcaggagaattgcttgaacccgggaggcggaggttg

SEQ ID NO: 423593 - DNA, 201 bp, Homo sapiens
tccacttggtccataacagcattaagaacagagcagacagcaagtaaataaatcgtattgactaattgatcaagatagctttgctagttgatacggtttaratctgtgtctccacccaaatctcatgttcagttataatccccagtgttggaagtggggcatggtgactagatcatgggggcagtttctcatggcttcaca

SEQ ID NO: 423594 - DNA, 201 bp, Homo sapiens
aggagaattgcttgaacccgggaggcggaggttgtggtgagccgagatggtaccattgcattccagcctgggcaacaagagtgaaactctgtctcaaaaamaaaaaaaaaaagaaagaaagaaaaaaaagaatattgggacagtaagggatcttggtccaactccattattctacagatgaattaaaggaggctcaaagaa

SEQ ID NO: 423595 - DNA, 201 bp, Homo sapiens
ggtactgagtttgcatgcatgggagatagagtgtcaagaactcccagtattaagagtattaagatctgggccaacaaattggccttagaggtatgggctcygggagaggaggctggaataggaaggaaaacagagaaaggatctgtttgaataattagggcttagaatttgtattgtaaacaaacaatggtgagctgttga

SEQ ID NO: 423596 - DNA, 201 bp, Homo sapiens
  misc_feature (1)...(201): n = A,T,C or G
attaacataagttaattttgaagacctaaattaagggagagcagtagaaatggaaagggcaaatggcttccagaaatgttgagataaaatcagcaaacctngattctgattagatgtaggggacgagtcaagtctgggttgaaggaaatgtctggagatgagtctgaagtgcccatgggggacattcttttggacacatct

SEQ ID NO: 423597 - DNA, 201 bp, Homo sapiens
atggatcctccagatggcattcatgtcttactcagaaagggcactgccattgtccccaaggcttctgtctactaattctattggtcttgtgttttgcttgmttgcttggcaaaaaaaaaaaaaaaaaaaaaaaaaaaatggagctattttctgtctatataaatctacttatatgaataaccattaaagtgattttgtata

SEQ ID NO: 423598 - DNA, 201 bp, Homo sapiens
ggtttcactatattggccaggctggtcttgaacttctgacctcaggtgatctgcccacctcagcctcccaaagtgctgggattacaggtgtgagccaccaygcgtgaccttagaatttttcatgaccttgcactaccaaagggaaatttaagtcctttcttgttgttgttgtttttgagatgaagtctcgctttgtcaccc

SEQ ID NO: 423599 - DNA, 201 bp, Homo sapiens
aaagacacatgtactcatatgttcatcacagcactattcaaaaatagcaaagatcaacctaggaatgaacctcagtgcccatcaacagtgaattgaataargaaattgtggtatgtacacataatggaatactgtggagctgtaaaacagaatttgcagcaacattatcttaagtgaattaatgcagaaacagaaaaccaa

SEQ ID NO: 423600 - DNA, 201 bp, Homo sapiens
tagcttgctatatgcatagcagatttagtgatctcattgtcattgtgctttccattagtaggctgataaatgacctcaggtttatgattggaatgtctcaytacaccagttctgtaaagctagccacaacaaaccatgtgtctctttaatatgaaagaagcccatcagatttatgatcatatttatctgggctaatagacc

SEQ ID NO: 423601 - DNA, 201 bp, Homo sapiens
gcagagttatcaagtgggcatcaaatataccccattccagatataacaaaattttgtggaatattattcaaccttaaaaaggaagaaaattggccaggcgyggtggctgaggcctgtaatcccagcactttgggaggccgaggcgggcggatcacgaggtcaggagttcaagaccagcctgaccaacatgatgaaaccctg

SEQ ID NO: 423602 - DNA, 201 bp, Homo sapiens
tgcagcgccatggacccctatctgtccacatggcctgcctctccttcttcttcctggctgcctgcagtgctgccaccgcagcccttctgaggcacaaagtsaaggccagactgaccaagaaagattcctgaggctggcaagtggggcaacgtgtggaggaagcccctcataatttggagaaaacttgatacaatagaagct

SEQ ID NO: 423603 - DNA, 201 bp, Homo sapiens
aggtggctggtcctcaccctgttggaatggctatcctactatgctgttctttggtaatggaataaattgacccaaggaccgaatttcatttggatttcaarttgtccagagtggaaaagccttcaagatgacatgatgaattactcagttcatctgatttctggtccctcctttctcgacaactataatactaaccctttt

SEQ ID NO: 423604 - DNA, 201 bp, Homo sapiens
aattactcagttcatctgatttctggtccctcctttctcgacaactataatactaacccttttctcaggataactgtctacacctggcagttttctctgamgtgctgttcactcacatccctaccttgcatggtaatataaaggactaggaagcagtcatacttccaggaaatgcttggattcatgtggacattcaggaag

SEQ ID NO: 423605 - DNA, 201 bp, Homo sapiens
caaaccacacctaacgaagccgatagttacactcatgtagaaagtccagggagacacctgtccctaggctttaattagtgggagtttcagacagcaaagtwtacctttactcaaacaagaagcctcagaagaacatgatcttcacacctgaactgttgattgcctggagactgctcagtgtgttctcccagtaaattgttc

SEQ ID NO: 423606 - DNA, 201 bp, Homo sapiens
atttattccatgtggcagatgcattctctgtctgtaatgatgcattttgaaaccagtactttctcaagtgagattagctgagatgtggaaagtataggaartgacagaacagacagaaattctagctagagggttctagttagataaagagaaaaaggcactcagaggaaatttgctctgctcatctttcccagggcacag

SEQ ID NO: 423607 - DNA, 201 bp, Homo sapiens
atcatgcaatatactcttgtaacaaacctgcacatatacctcctgaatagaaaagaaaagttgaaaaatttttaaaatgaagtaattctgagtgataaacratcacaacctttgtagatactacaggttaggcaggtaggtaattgtaatatcatggagatgaaagctgtagctttgtgatagtttacaattactgatctg

SEQ ID NO: 423608 - DNA, 201 bp, Homo sapiens
ctttgaccaggtgagttggaagtcatggaagaattggcatgtgagaagtgccttcagggacagataaggttttctgacaggaagctattccaggtaaaggsaacaacctgggcaaaagtctataaaggaatccccttctagtcatatacatatccaataagacatgggcaagactagactgcagcctagggtgtcggagca

SEQ ID NO: 423609 - DNA, 201 bp, Homo sapiens
atacaagcttctggtgtctaggacaaatttatggcaaataaaattagcaaaactgaactgggttgaactgaacaagaggatgggggaattgtgcaaatacrttgttagtagaaggtcaatttaaaatagggactagaaattatttgaagttttctttattacggattcaaagacttattttgaaagttggaaggagaaggg

SEQ ID NO: 423610 - DNA, 201 bp, Homo sapiens
cacctcagcctcccaaagtgttgggattacagacattagccatcacgcctgccctagaaacagttttttaataggagatatttgagaggcattgaggtagragactctatgacatgccctcagaatatcagaatcttcttagaaataaactaggaaatgcagatgtttttaactactcagacttttgaggaattaatcctt

SEQ ID NO: 423611 - DNA, 201 bp, Homo sapiens
ttctgctggttaactttatctctctctctcttaatttagactttcaacctatgaaaatgtaaatacctttgaaaaaactaaactatcagtcatttacatcytctcatgaatgaaatgcagtgtagggagaggagatggcaggacacagcaaacaggacacatttgcctgcttctctcttgcctaattcttcctgacctgta

SEQ ID NO: 423612 - DNA, 201 bp, Homo sapiens
ctgattagatgtaggggacgagtcaagtctgggttgaaggaaatgtctggagatgagtctgaagtgcccatgggggacattcttttggacacatctagagmagttggatattttaattcaaacctcagaaaagatctggttggaggcaaatttggaaatcagcggatacaggtgtagctgaagctaagggcctgggagaag

SEQ ID NO: 423613 - DNA, 201 bp, Homo sapiens
gaggagtgcttgagcccaggagtttgggcccagcctgctgtacatagcgacacccctgtctctacaacaacagcagcaacaaaaaattatccgggcgtgtkggcgtgcatctatggtcctagctactctggaggatcacctgagcccaggaattagaggttgcaatgagctgtgatcgtgccactgcactctagcctgggc

SEQ ID NO: 423614 - DNA, 201 bp, Homo sapiens
attccatatttcttagctgggttagaaatgattttgtccaggaacccaatgagaagagcctgggctaaaaaaattagttatggagtgagatttcaaatgtrcaggtaatacctacccgtgtgtgtgcgcgccttagggataactcatacaatacactgtatgtgtgatttttagacccacgtgtgtactacttgttccagt

SEQ ID NO: 423615 - DNA, 201 bp, Homo sapiens
agcagtgtacttattcacttggacgtaacacttgctgatgcttccaattctttatccaaatgttaaaataaatatgccagtatttatacattcaaatcagyatttctccccttcaaaagcctgctcttggcaagctgtgtactaattctagtgatgctgtcactactgagaataattttggagctcctgctttggagttgc

SEQ ID NO: 423616 - DNA, 201 bp, Homo sapiens
atttcttctcctgccccgtgcctgagaagtacttcccgggttcctgtgacatcgtgggccatgggcatcagatcttccatgcatttctgtccatctgtacrctctcccagctggaggccatcctcctggactaccaggggcggcaggagatcttcctgcagcgccatggacccctatctgtccacatggcctgcctctcct

SEQ ID NO: 423617 - DNA, 201 bp, Homo sapiens
cagatgaattaaaggaggctcaaagaagctgtctgcagctccttgcttcctctactgtaccagaaagccacgttgcattaaaataaccacggatcctagcyggcctggtggctcacgcctgtaatctcaacacttggggaggctgaggagggaggagtgcttgagcccaggagtttgggcccagcctgctgtacatagcga

SEQ ID NO: 423618 - DNA, 201 bp, Homo sapiens
cattaaaacagggtaatagtttcacgggagagaaatgactctcatttcctctgtaacatcaaacctaaactttcactaattccactgcacctagcccactsccttcctcattactccccagtagcccctctgctcacagacctaccaggaagtcataccattcctatgctcttattttgcctctttgctagaatgccccaa

SEQ ID NO: 423619 - DNA, 201 bp, Homo sapiens
ttcattcattcattcgttcattcagtgatttcttggaatatcaatgtgataggcacaatgctaatgataaaaatattctcagccctcaaaggatcttgcartttagtggtcagagagacatataatgcaaaccatgtaggcatacagtaaggaaagtcctataatgaaggactttaagtgcagtggcagttaggtgaagga

SEQ ID NO: 423620 - DNA, 201 bp, Homo sapiens
gctgcattcgtgtctcactgcggctttgccaattttcctttcttttctgcaggttgcataccctgtcctgagggcgcggcacggagtgcatgcgggccgckgccatgacgaccgccatcttggagcgcctgagcaccctgtcggtcagcgggcagcagctgcgccgcctgcccaagatcctggaggatgggcttcccaaga

SEQ ID NO: 423621 - DNA, 201 bp, Homo sapiens
tggaggaagcccctcataatttggagaaaacttgatacaatagaagctgactcttaaggcattggcttttaaattaatacatatatccaaggatatgttayagctgcagtgtttgaaagccaaaggatttaagagttttgttgttgttaataaaaggaatactccttttccttttggatcatagcttaacaaggcacagga

SEQ ID NO: 423622 - DNA, 201 bp, Homo sapiens
aaaaaagaaagaaagaaagaaagaaaagaagcagagttggactcagcgggaaaataggcgtgctaccacctcaggagagttccagggaagaaccccacccscactccagtgaggtcacaatggctggagctctgaggggcccaggctccctgagccaggaggagaggagaaagtccaaggaaagatggctggcagtcaccc

SEQ ID NO: 423623 - DNA, 201 bp, Homo sapiens; identical to SEQ ID NO: 203984

SEQ ID NO: 423624 - DNA, 201 bp, Homo sapiens
tccttcacatgtgtgggctatgcggtcaccaaggcccaccctgccctggtgtgcgctgtcctgcattccgaggtggtcgtggcccttatactgcagtattwtatgctccatgagactgtggcactttctgacatcatgggggcaggggttgtgctgggcagcattgccatcattacagcccggaacctcagctgtgagagg

SEQ ID NO: 423625 - DNA, 201 bp, Homo sapiens; identical to SEQ ID NO: 203950

SEQ ID NO: 423626 - DNA, 201 bp, Homo sapiens
gtaaagatggggtttcaccgtgttagccaggatggtctcgatctgctgacctcaggtgatccacccgccttggcctcccaaagtgctgggattacaggcgygagccacctcgcctggcccatcctttttttgttttgtttttttgagacagggtttcactctgtcacctgggctggagtgcagtggcgcaaactcagctca

SEQ ID NO: 423627 - DNA, 201 bp, Homo sapiens
gcaggtggatcacctgaggtcaggagtttgagatcagcctggccaatatagcgaaacaccatctctactaaaaatacaaaaaattagctgggtgtggtggsgggcacctgtaatgccagctactttggaggctgaggcatgagaattgcttgaacccaggaggcggaggtcgcggtgagccgagattgcaccattgcactc

SEQ ID NO: 423628 - DNA, 201 bp, Homo sapiens
acaggcatgagccaccacatccggcctactcttgtttaatttgtattttcctgatgattattgaggcccagtacgtgtattggccattttgataacttttkttttgtgatgtactttatttatttattatttttttttattttattttttgagatggagtctcgctctgtcgcccgggttggagtgcagtggcgcgatctc

SEQ ID NO: 423629 - DNA, 201 bp, Homo sapiens
ttcccttcacacagtataatcaaatgctcaatatgaggtgtttacgtagatttttgctgtattttttgaggtaagcttgatgctaatatatatttaaatcyttaaatgtcccattgaggccgggcgtggtggctcatgcctgtaatcccagcactttgggaggccgaggtgggcggatcacgaggtcaggagatggagacc

SEQ ID NO: 423630 - DNA, 201 bp, Homo sapiens
tagtgcgatctcggctcagtgcaacctctgcctcccaggttcaagcacttcttcctgcctcagcctcctgagtagctgggattactggtgcccgctaccaygtgaggtttcgccatgatggccaggctggtcttgaactcctgacctcaggtgatccatccacttcagcctcccaaagtgctgggattacaggtatgagcc

SEQ ID NO: 423631 - DNA, 201 bp, Homo sapiens
tttatggttttcagttatgaaatacatacataaaaatacgtaagatgccacctctgccctcatggagttttactatgtagaggtgtgtttaaaatcaatamttttcccgggctgggctcagtggctcacgcctgtaatcccagcactttgggaggctgaggcgggtggatcatcaggtcaggagatcgagaccatcctggc

SEQ ID NO: 423632 - DNA, 201 bp, Homo sapiens
cccaggttcaagcaatcctcccacctcagcctcctgggtagctgggaccacaggcttgcgacaccatgcctgactaatttttacatttttggtagagatarggtcttactgtgttgcccaggctagcctcaaactcctgggctcaagcagttcacctgcctcaggctcccaaactgctgggattacagacatgagctactg

SEQ ID NO: 423633 - DNA, 201 bp, Homo sapiens
atgaagcttagttaggatagcaaggcagtggcttgggagagaagtgatgagataggtaagtgaggccgagcagtggggaggaggtggggctgggttagagractgctggggcacagagtgcaagggccgggagggactcggtgcaggagggagagctcctcagttcgggctcactgtgccagtgttctgcgtctgctccat

SEQ ID NO: 423634 - DNA, 201 bp, Homo sapiens
tgcccaggctagcctcaaactcctgggctcaagcagttcacctgcctcaggctcccaaactgctgggattacagacatgagctactgtgcctggcctcttyctttttttctttttttgagatggagtcttcgtctgttgctaggctggagtgcagtggcgcaatctcagctgactgcaacttccgccccctggattcaagc

SEQ ID NO: 423635 - DNA, 201 bp, Homo sapiens
gcccaggctagcctcaaactcctgggctcaagcagttcacctgcctcaggctcccaaactgctgggattacagacatgagctactgtgcctggcctctttytttttttctttttttgagatggagtcttcgtctgttgctaggctggagtgcagtggcgcaatctcagctgactgcaacttccgccccctggattcaagca

SEQ ID NO: 423636 - DNA, 201 bp, Homo sapiens
cctgcctcaggctcccaaactgctgggattacagacatgagctactgtgcctggcctctttctttttttctttttttgagatggagtcttcgtctgttgcyaggctggagtgcagtggcgcaatctcagctgactgcaacttccgccccctggattcaagcaattctctgcctcagcctcccaagtagctgggattacagg

SEQ ID NO: 423637 - DNA, 201 bp, Homo sapiens
gcctgggtccacttagacatagcgttgtttcttttctttctttcttttttttttttttttgagacagagtctcgctctgtcacgtaggctggagtgtagtrgcacaatctcggctcactgcaacctccaactcccagattcaagtgattctccccgttcagcctcccgagtagctgagattacaggcacccaccaccatgc

SEQ ID NO: 423638 - DNA, 201 bp, Homo sapiens
ctttctttcttttttttttttttttgagacagagtctcgctctgtcacgtaggctggagtgtagtagcacaatctcggctcactgcaacctccaactcccrgattcaagtgattctccccgttcagcctcccgagtagctgagattacaggcacccaccaccatgcccagctaatttttgtatttttagtagagatgggtt

SEQ ID NO: 423639 - DNA, 201 bp, Homo sapiens
ttgggattataggcatgagcaactgtgcccagcctcaaagaagatcaatgtcttttttgtttgtttttgttttgagacacagtcttgctgtgtcacccagsctggagtgcagtggcgcagtctcggctcactgcaacttccgcctcccgggttcaaggaattctcctgcctcagcctcctgagtagctgaaattacaggca

SEQ ID NO: 423640 - DNA, 201 bp, Homo sapiens
gcagtctcggctcactgcaacttccgcctcccgggttcaaggaattctcctgcctcagcctcctgagtagctgaaattacaggcatgcgccaccacgcccrgctaatttttgtatttttagtagagacagggttttgccttgttggccaagctggtctcgaactcctggcctcaggtgatccgcccacctcagcctcccaa

SEQ ID NO: 423641 - DNA, 201 bp, Homo sapiens
aggctggagtgcagtggtgcgatctcggctcactgcaacctccacctcctgggttcaagcgattctcctgcctcagcctcctgagtagctgggatcatagrtgccaccaccacacccagctaatttttgtatttttagtagagatggggtttcaccatgttggccaggctggtctcgaactcttgacctcaggtgagccac

SEQ ID NO: 423642 - DNA, 201 bp, Homo sapiens
gatggtaaggatccgtgtcacttttagcaaattcatttttgtaagaaataattattgttaataaattttaagctctctaaaagttaaagctgtttgttgaygtaacaggggttatgtattggagataaatgtgtaaaaaactgtactgaaaagtttccatagcaaaccagattaaaatattataattgccttttaaaatat

SEQ ID NO: 423643 - DNA, 201 bp, Homo sapiens
gagagatcgcgtcactgaactccagcctgggtgtacatttcatgaacaccctgaactcattcttcccaggctggagtgcagtggtgcattcaaagctcacygcacacttaaactgggctcaagcaacctttcctcctcagcctcccaagtagctgagactaaagatgagtgccaccactaattttaaaattttatgtagag

SEQ ID NO: 423644 - DNA, 201 bp, Homo sapiens
atggtaaggatccgtgtcacttttagcaaattcatttttgtaagaaataattattgttaataaattttaagctctctaaaagttaaagctgtttgttgatrtaacaggggttatgtattggagataaatgtgtaaaaaactgtactgaaaagtttccatagcaaaccagattaaaatattataattgccttttaaaatata

SEQ ID NO: 423645 - DNA, 201 bp, Homo sapiens
gtgggtgtcccttgagtggaactaggacacctatagaacgctgctgtggccatgagccctctggggccatttgcatgtgagccccaagaaggaaggtggtkggaggaatggacacaccgaggaagctggtctattaacagtgactattctctgcttcttttgtttttttttccctacttaattgaaggaaaatatgaactg

SEQ ID NO: 423646 - DNA, 201 bp, Homo sapiens
aagaaataattattgttaataaattttaagctctctaaaagttaaagctgtttgttgatgtaacaggggttatgtattggagataaatgtgtaaaaaactrtactgaaaagtttccatagcaaaccagattaaaatattataattgccttttaaaatataatctgtatttccataattctaacatataaagatataatgtg

SEQ ID NO: 423647 - DNA, 201 bp, Homo sapiens
actgtggctaatattcccagagagaatcacttctttatttgctgataacacaaatacagggtcccaatagcatccagtaattcacaaagtaattttttcargattagcaccatgttcccacgggagctcacgttgctgtcatccacactgcacactttgcaggcaagaattttattcacctgtttattctgcctcttagaa

SEQ ID NO: 423648 - DNA, 201 bp, Homo sapiens
attcaatttatatatctaaattatattttctaaaatgcagattaaaaaaatggcaaactcctttgcagcgaggattttcactaccctttcagatctgcagmcaaatatggctaatctggtaggtttcaataatgtggtgatttgcttactgatgacattttatgtgataacattacatcaatgttattgattcattcaaca

SEQ ID NO: 423649 - DNA, 201 bp, Homo sapiens
aataatgtggtgatttgcttactgatgacattttatgtgataacattacatcaatgttattgattcattcaacacatgcttttataattggcaagtatatrgatactcattgcattggtataattgttagatattaagtatacctaaatttctttgtatttatgccacctagatgaaaattaatctttatttgtgtgtaga

SEQ ID NO: 423650 - DNA, 201 bp, Homo sapiens
agctcactgcacacttaaactgggctcaagcaacctttcctcctcagcctcccaagtagctgagactaaagatgagtgccaccactaattttaaaattttmtgtagagatggtgtccttctatgttgcccaggctggttttgaactccaggcctcaagtgattctcctacctcgcctcccaaagtcctgggatcacagggg

SEQ ID NO: 423651 - DNA, 201 bp, Homo sapiens
acggggttgcaccgtgttagccaggatggtctcgatctcctgacctcctgatctgcccatctcagcctcccaaagtgctgggatgacaggcgtgagccacygtgcccggccgagaccatgtcttattcatctttgtacatcagcatagtgtgttgcaagaatcctggaatgagttgggtataaaatcagtacagtacccta

SEQ ID NO: 423652 - DNA, 201 bp, Homo sapiens
catacccagtgtaattcttatttttttattttttagaccgagtcttgctctgttgcctaggcttgagtgcaatggcgtgatcttggctcactgcaatctcygcctcctgggttcaagcgattctcctgcctcagcctcttgagtaactgggattacaggtgtgcaccaccacgcctggctaattttatattttagtagaga

SEQ ID NO: 423653 - DNA, 201 bp, Homo sapiens
ctgtgggtgtcccttgagtggaactaggacacctatagaacgctgctgtggccatgagccctctggggccatttgcatgtgagccccaagaaggaaggtgrtgggaggaatggacacaccgaggaagctggtctattaacagtgactattctctgcttcttttgtttttttttccctacttaattgaaggaaaatatgaac

SEQ ID NO: 423654 - DNA, 201 bp, Homo sapiens
aaaactgtactgaaaagtttccatagcaaaccagattaaaatattataattgccttttaaaatataatctgtatttccataattctaacatataaagatayaatgtgagaaacttttgacaaacttgtctaatgatttggcagaaagctattttggttgctaggccctatagcaatgtagtgacagcattaaaaaaaaatt

SEQ ID NO: 423655 - DNA, 201 bp, Homo sapiens
atttttctgttacttaagctactgcatgttctcatttgtcatagctttccattcggatgtaaccttttatattttttagaatatatacagaactgtaatayttctttctgtttttagtaagtacaatagttgatgtctacacagttgaacaattaaagggaaaagctttgaagaatgaaggaaaagctgatccttcctatg

SEQ ID NO: 423656 - DNA, 201 bp, Homo sapiens
aggaagtgttgctgaggagactttgggctgcacggtaaatagcaaaaaggaagaaatgtttagaatatttccaaagtgaatgctttttcccaaaaaaatayaggttgttttgtcaaacatttgatagaaattgattcactaataaacagcctgggaaaaaatcatcttgctttaaacacacattgctttgatgaacaaatg

SEQ ID NO: 423657 - DNA, 201 bp, Homo sapiens
gcctgggtaacaagagcgaaactccgtctcaaaaacaaacaaaaacgaaacccgtttttactaaaaaaaaaaaaaaaaatacaaaaattagcctggcatgrtggtgtgcgtctgtagccccagctgctcaggaggctgagtcccagctgctgggaggcaggggttgcagtgagccgagagatcgcgtcactgaactccagc

SEQ ID NO: 423658 - DNA, 201 bp, Homo sapiens
cgtgcaggcccatccagtgagcagctgttgaactcgtgctttccaggcacaagacacagttcctgccctcagaactcccagccagggaggtgagaataagkagctgatgcaacagcaccagtcagtcctgaggcgtgcactctgctgctgttccaagagagaaaggctgcaggctgggatacgagaagggagggccccagc

SEQ ID NO: 423659 - DNA, 201 bp, Homo sapiens
aaattgtagggtaaaagagacagcagttgttgaatgaagtcatctctgaattctcagattgagctctttagttcatgttaattttgtatctgttaaagtgrccaggtagagaagcaagtcatattttttgtgggcagacactaacgtctattaccatatacctctaacggtagcagacaaataagggaattcagagagata

SEQ ID NO: 423660 - DNA, 201 bp, Homo sapiens
ggatacgagaagggagggccccagcaaggaaatgagactgggatggacctcgagggcttggcagagggagggaaggagggcaggcagaggactggtgtacrcagtttcagatgactcctgagaatggctgcgtagaaagtgtgttttactgttttttacgactgtcttgtagaccgcatagcactgaacactcagtaagtt

SEQ ID NO: 423661 - DNA, 201 bp, Homo sapiens
gggcagacactaacgtctattaccatatacctctaacggtagcagacaaataagggaattcagagagataataggataccatgtcccaccaagagatgctraggggtaaaaatgtggagaaatcgcttggtgtgtaggtagttgtgtttgtacagaatattcagccactgagtcaaatgtctgactcatcctctcgactca

SEQ ID NO: 423662 - DNA, 201 bp, Homo sapiens
aaatgagactgggatggacctcgagggcttggcagagggagggaaggagggcaggcagaggactggtgtacgcagtttcagatgactcctgagaatggctkcgtagaaagtgtgttttactgttttttacgactgtcttgtagaccgcatagcactgaacactcagtaagttttccacacactgtcgtagagtttttagtg

SEQ ID NO: 423663 - DNA, 201 bp, Homo sapiens
taattatggacaagctgcttcgtgcattaggtaacacagtattttacaaataaaaagatgtaaaatccaaaaccaaaatccaaaaaccatgatgcatacawaaataacacatgttgaagatttaactcattaattaatgaggggaccagtaagatataggggagaagaaggattcaaaggggaattggttcatgaccagcc

SEQ ID NO: 423664 - DNA, 201 bp, Homo sapiens
acccggcccatttttatttcttaaaacacatttaaaatttttcttcagtagtcactaaagagaacattaaacattttgaggagatgttaatatctctaagktttaagatctaggactttagaatttagatttattagcagcaaaatataagttttgttacagtctaatttatattactgtccagcatgtttggattaagaa

SEQ ID NO: 423665 - DNA, 201 bp, Homo sapiens
aagatataggggagaagaaggattcaaaggggaattggttcatgaccagcctgtccaagatggtgaaaccccatctctgctaaaactacaaaaattagccrggcatggtggcaggtgcctgtcatcccagctactcaggaggctgaggcagtagaattgcttgaacctgggaggcagaggttgcagtgagccgagatctca

SEQ ID NO: 423666 - DNA, 201 bp, Homo sapiens
attagaaaaaatgccttctttctcaaggagacacatttttaaaatttattatttattgcttaactttttaattgacaaaaaattgaatacattttatacamtatgttgttttgaaatatgtatacattacagaatggctaaatcaagctaattaacatatgtgctacttcacatacttatcattttttttgtggtgagaac

SEQ ID NO: 423667 - DNA, 201 bp, Homo sapiens
tgaggcagtagaattgcttgaacctgggaggcagaggttgcagtgagccgagatctcaccactgcactccagcctgggtgacagagtgagactgtgtctcaaaaaaaaaaaaaaagaaaaaggaattggaagaatagatacataggcaggcaatgcaaaatgctgaatgggtttgcttgtagatgaacctctgggctcctc

SEQ ID NO: 423668 - DNA, 201 bp, Homo sapiens
gaggcagtagaattgcttgaacctgggaggcagaggttgcagtgagccgagatctcaccactgcactccagcctgggtgacagagtgagactgtgtctcaaaaaaaaaaaaaaagaaaaaggaattggaagaatagatacataggcaggcaatgcaaaatgctgaatgggtttgcttgtagatgaacctctgggctcctct

SEQ ID NO: 423669 - DNA, 201 bp, Homo sapiens
aggcagtagaattgcttgaacctgggaggcagaggttgcagtgagccgagatctcaccactgcactccagcctgggtgacagagtgagactgtgtctcaaaaaaaaaaaaaaagaaaaaggaattggaagaatagatacataggcaggcaatgcaaaatgctgaatgggtttgcttgtagatgaacctctgggctcctcta

SEQ ID NO: 423670 - DNA, 201 bp, Homo sapiens
ggggtttcaccatgttggccaggatggtcttgatctcctgacctcgtgatccgcccgcctcaccctcccaaagtgctgggattataggcgtgaaccaccaygcccagcccatcatctaggttttaagccccacatgcattagctatttgtcctgatgctctccctcccctcaccccccattccccaacaggccccagtgtg

SEQ ID NO: 423671 - DNA, 201 bp, Homo sapiens
ggcagtagaattgcttgaacctgggaggcagaggttgcagtgagccgagatctcaccactgcactccagcctgggtgacagagtgagactgtgtctcaaaaaaaaaaaaaaagaaaaaggaattggaagaatagatacataggcaggcaatgcaaaatgctgaatgggtttgcttgtagatgaacctctgggctcctctat

SEQ ID NO: 423672 - DNA, 201 bp, Homo sapiens
gtagctgggattacaggcatgcgccaccacgcctggcttattttgtatttttagtagagacagggtttcaccatgttggtcaggctggtctcgaactcccracctcaggtgatccacccacctcagcctcccaaagtgctgggattacaggcgtgagccaccacgctggacctcgcacgtccttcttctaaagcatcagcc

SEQ ID NO: 423673 - DNA, 201 bp, Homo sapiens
aggttggtctcaaactcctgggcttaagtgttctcccccacctcggccttccaaagtgctaggattataggcgtgagccaccttgcccggccctttttaayttttagttaattaattattattttttatttttagagacagggtctcgctctatcactcaggctggagtgtagtgatgcaatcatgggtcactgcagcctg

SEQ ID NO: 423674 - DNA, 201 bp, Homo sapiens
aattggaaggttctgagctggcttggggtgagcctaggagctgaactttagatacttggcaatgctgcagacggctggcaaggtggggctggaacagctcrgtcagagatgttgttaatggccacatagctggcaaaggtacgctgcaatgatttaggagggtttaaaaaattatatgtgtttatggctgaacgcggtggc

SEQ ID NO: 423675 - DNA, 201 bp, Homo sapiens
attactaataatgttgtatcagattagcagagatcttactaaaagtgttctgtttctatttcaataaaaatgaggagtttaattttctcttacaaaattcwtctttgattatgacataatttactttgatacagagtcacatgaaaaatggctttggttttagtactttgattctcattcttagatttacaaaaatttgac

SEQ ID NO: 423676 - DNA, 201 bp, Homo sapiens
caaaacatttccttaatgaaagtgcactgtaaacaaaaaatgttttgctgtattattcaatgtttctaagagtaaaaagtatatattagtattgtctaaayttcaatgaaaaatgtagtttaaatgtggacctggaaatatttttctttccaaagatcactttcaaataactttcttgtatttttgcaatttagcaactgt

SEQ ID NO: 423677 - DNA, 201 bp, Homo sapiens
tataaaaaatggaagaaacaaattccgtacacaacaagggagacttaatttcacgagcgtgaagcaattccactcttttaggcttgtattttgaagcatcrtggcttatgagaagcctgttgtgtcctggcaaggctgacactgtttgcttaaccttatgtagctttctgcaaaaattaatttactaaaacgtgacaaaat

SEQ ID NO: 423678 - DNA, 201 bp, Homo sapiens
ttttatgatataggtttataacatgtgtgttttctacaatgatgatgtgaaaattgactctttgagtaggagttataggggaattcaatgattttgaacayacctcgactgttacttacttaaaagaaaactaagtggaatcatcttataagttaaagaacttattgtaaagcagctaccacacacccttaccttccctgc

SEQ ID NO: 423679 - DNA, 201 bp, Homo sapiens
tttgagtgtttatttataatccctcccagtctcagtccttgttcctaaaagcgtccgcatcaagatgatgattaaacacaaatacctcatcaggtgtcccmtaaatcctggggtacagatgggcaatctgcaggtaccttcccccctgcacagagggagcatcgaagctgcaacccaggctggaccaaaggaggacacgcc

SEQ ID NO: 423680 - DNA, 201 bp, Homo sapiens
gagatcgattttattgcttggatgctaaattattgactaataggtaaattcagttttgctacattcaaataacttttactgctaggacattgataacacaygcatgcgtgcacacagtactctctgtgtagtatcattagctcataactgcacattaaatgcccagatgatcccctggagtggttgttgaaggagttacag

SEQ ID NO: 423681 - DNA, 201 bp, Homo sapiens
gatgatggtgatacaaccttattaatgtacatagtggcactgacttacgcccttaaaaatggtttaggccagtcgggcgcggtggctcacgcctgtcatcycagcactttgggagaccgaggcgggtggatcacctgaggtcaggaggtcgagaccaggctggccaacatggtaaaatcccgtctatactaaaaatacaaa

SEQ ID NO: 423682 - DNA, 201 bp, Homo sapiens
gggcatggtggtgcatgcctgtaatttcagctactcgggaggccaaggtcggaggatcacctgagcccaggagttcaaggctacaatgagccatgttcgtrccactgcactccagcctggacaacagaatgagaccctgtctcaaaataaaaagacattttaaaaaaggaaatgatttaagggacctagcagagactataa

SEQ ID NO: 423683 - DNA, 201 bp, Homo sapiens
attttttgattttgtggagatggtgttttgccatgttgccaaggctggtctcgaactcctgggatcaagcaatcttcccgccttggcctctcacagtgctgggattacagcgctggcatgcctggcgaaaatgtgatgttaaaagtgttagaaaccaatacaagggaaagaatttcccactttgtgagctgtgggtgtccc

SEQ ID NO: 423684 - DNA, 201 bp, Homo sapiens
aactcctgggatcaagcaatcttcccgccttggcctctcacagtgctgggattacagcgctggcatgcctggcgaaaatgtgatgttaaaagtgttagaarccaatacaagggaaagaatttcccactttgtgagctgtgggtgtcccttgagtggaactaggacacctatagaacgctgctgtggccatgagccctctgg

SEQ ID NO: 423685 - DNA, 201 bp, Homo sapiens
tgattattattcactgggtgacattgttgcaaatggacacagtcttaatgggaggattattaacgtgcttgcagctgtgaaatcggtaagttaaaaccccsacaaagccaagtgcaattgggcaggggaggtgcagtcacttgatctgtgtttgggatggagtggtcatgatcagctggggtaacttttcttctctatctt

SEQ ID NO: 423686 - DNA, 201 bp, Homo sapiens
accacgttgggccagtctggcctcgaacgcctgagctcaggcaatctgccctcctcggcctcccaaagtgctgggattacaggcatgagccaccaaccccrgccaaaaatatcttcttttaaaggcagagagtggaaaggaatagggacaatttaaaaacccaactcttcccattatatttgaaatggtgaaatgcaggta

SEQ ID NO: 423687 - DNA, 201 bp, Homo sapiens
ccggccactcttcacactttcatttaacctgttgtttcttcctctcacccccactggcgtttcatgttaaaactcctttttaatacagtgttctccacctycccaaccccagatgttaggctgacctctcagcctctggctgtcctttctaggtccctttctctgggcaccacagatgcagtggtggcagaggtgggggtg

SEQ ID NO: 423688 - DNA, 201 bp, Homo sapiens
tgagctcaggcaatctgccctcctcggcctcccaaagtgctgggattacaggcatgagccaccaaccccggccaaaaatatcttcttttaaaggcagagastggaaaggaatagggacaatttaaaaacccaactcttcccattatatttgaaatggtgaaatgcaggtactttattttgcttcccagtattatttgggaa

SEQ ID NO: 423689 - DNA, 201 bp, Homo sapiens
gccactgaagctttcttttattgttgtaaataatatgtcactatcagttttttctagtgtattcaatttgtattacttctttttaaacaaatgcagttggrataatgaatccattctacttgcacagagctggatgccacgagaaacaggtattatcattcaatgattgtgtccaatatttgtcatttatatcctcccatg

SEQ ID NO: 423690 - DNA, 201 bp, Homo sapiens
tcttcactttttactattaaaatgattttggatgatttaaatgtgatttaaatgataatcagtttgctttttacttattatgcattttcaatttaagatayaccagaagctaacattctgctgaattttatacgagaaaataaagaaacgaatgttctggatgatgaaattgacagttatttcaaagaatccataaattgt

SEQ ID NO: 423691 - DNA, 201 bp, Homo sapiens
cgggtcacaaatgtgactttaggcttagatcgaaaggcaccctcgtcttcaagcccacaacgctgccatcggcatgtcactttcgtcaagaggaatatgtkcaattaataaaggagacagggctggcgggagccaattataacaaacacatcagatgccaatagcgctgcacaaacacgctttcccattgattcctgacaa

SEQ ID NO: 423692 - DNA, 201 bp, Homo sapiens
agtggttgaattctggaagttctcggaatggccttgttttcctcgtctgcagaatgaaactccagctgccagagggcttcaggcagagtcatcctatggarcatcatggtttaagggacccaggaaaactgtcactatgtggctacctcaaggtggtacaattaagcgagcggctccaataagtcacccatccagacattc

SEQ ID NO: 423693 - DNA, 201 bp, Homo sapiens
aaaacaaaaatttgtagagacagagtcttgctctgttgcccaggctggtctcaaactcctgggctcaagtgatcatcccgcctcatcctcctagagtgatsagattacaggcatgatgcttttatctttaaggtaaataaccaagctgtcatctggtacccatatcatttgtgcctgcactttatttcatcttaactaatt

SEQ ID NO: 423694 - DNA, 201 bp, Homo sapiens
ctttgatggagtgacgagtgggggtgagactaattatgccagtaactgatctattagtatttcagctcctgggaggaagaccatagtcacgggatcaatgytggaaaagttatagttttgttaaataaataaaagcttatcttgtaattcattaaaataactgtcaatttttaatgaatttctatcttgtaattcattaaa

SEQ ID NO: 423695 - DNA, 201 bp, Homo sapiens
gatactttggtatcaggtgcacatcgtgtttctccttgaacttgagcccacgatcttagcattcattggtggattgagtggttgaattctggaagttctcrgaatggccttgttttcctcgtctgcagaatgaaactccagctgccagagggcttcaggcagagtcatcctatggaacatcatggtttaagggacccagga

SEQ ID NO: 423696 - DNA, 201 bp, Homo sapiens
cagcctccagagtagctgggactacatgcgtgcaccaccacgtctggctaattttttttttttttttttgtagagatggggtctcactgggttgcccaggytggtctcgaagtcctgggctcaagtctcggcctcccaaagtactgggattatagacatgagccaccacacccagctgatcatacagcaaattaaattaag

SEQ ID NO: 423697 - DNA, 201 bp, Homo sapiens
aggtgatctgctcaccttggccccccaaagtgctacgattacaggctcgagccactgcgcctggccaaattattattactgttattttttcagacagggtrttgctctgtcacccaggctggagttcagtggtgcgatcacagctcactgcagcctcaacctccccagctcaagtgatcttcccacctcagcctccagagt

SEQ ID NO: 423698 - DNA, 201 bp, Homo sapiens
actggataatattgacaagcagggccatcattgactgtgagcctgtgaacgtcgaggcatcttgtatacactgtttctacttttcactgccaggtggatgktatccacaatttaaggatgaggaaattaatgtttagtaatgttaaaacacacgactacaaactagtggtgttgcaattcaaaatcatatttgactaactc

SEQ ID NO: 423699 - DNA, 201 bp, Homo sapiens
ggtgctaccttagcaataggagcttcagtctgggaggagagtgggacatataagcaaataaatacatcacgtttcccacagggcgcgtattttgtgttcaycttcgtcccactggatctgtccaaacttttcatttttgacagataaggaaaatgaagttcagatgcttgagtgacacagctaattagtggcaaggctgag

SEQ ID NO: 423700 - DNA, 201 bp, Homo sapiens
cacacgactacaaactagtggtgttgcaattcaaaatcatatttgactaactccacaggctgcctgaaattcaggtgtcatgagacacgtccttgaactgsagcgggtgggtgtgggcattcccagagttaaagaggccctggattataaagtgaagtcaatctgtttggtgtagcttacaatttttctacaatagaacct

SEQ ID NO: 423701 - DNA, 201 bp, Homo sapiens
ggcattcccagagttaaagaggccctggattataaagtgaagtcaatctgtttggtgtagcttacaatttttctacaatagaaccttttagagtgatgatrttgagggacaaaccaccatttcgttcatctgatatttatggttttcagttatgaaatacatacataaaaatacgtaagatgccacctctgccctcatgga

SEQ ID NO: 423702 - DNA, 201 bp, Homo sapiens
tattgagggacaaaccaccatttcgttcatctgatatttatggttttcagttatgaaatacatacataaaaatacgtaagatgccacctctgccctcatgkagttttactatgtagaggtgtgtttaaaatcaatacttttcccgggctgggctcagtggctcacgcctgtaatcccagcactttgggaggctgaggcggg

SEQ ID NO: 423703 - DNA, 201 bp, Homo sapiens
ttttgtatttttagtagagatggggtttcaccatgttggtcaggctggtctcgaactcctgacctcaggtgatctgctcaccttggccccccaaagtgctrcgattacaggctcgagccactgcgcctggccaaattattattactgttattttttcagacagggtattgctctgtcacccaggctggagttcagtggtgc

SEQ ID NO: 423704 - DNA, 201 bp, Homo sapiens
acagctcactgcagcctcaacctccccagctcaagtgatcttcccacctcagcctccagagtagctgggactacatgcgtgcaccaccacgtctggctaattttttttttttttttttgtagagatggggtctcactgggttgcccaggctggtctcgaagtcctgggctcaagtctcggcctcccaaagtactgggatta

SEQ ID NO: 423705 - DNA, 201 bp, Homo sapiens
ccatgcctggctaatttttgtatttttagtagagatggggtttcaccacgttgggccagtctggcctcgaacgcctgagctcaggcaatctgccctcctcrgcctcccaaagtgctgggattacaggcatgagccaccaaccccggccaaaaatatcttcttttaaaggcagagagtggaaaggaatagggacaatttaaa

SEQ ID NO: 423706 - DNA, 201 bp, Homo sapiens
atggggtttcaccacgttgggccagtctggcctcgaacgcctgagctcaggcaatctgccctcctcggcctcccaaagtgctgggattacaggcatgagcyaccaaccccggccaaaaatatcttcttttaaaggcagagagtggaaaggaatagggacaatttaaaaacccaactcttcccattatatttgaaatggtga

SEQ ID NO: 423707 - DNA, 201 bp, Homo sapiens
tctaattatatatatttttttcatacatagatatacacatctagggttttttctttctttttcttttttcttttcttttgagacggagtctcgctctgtcrcccaggctggagtgcagtggcgcggtctcagctcactgccagctccgcctcccgggttcacgccattctcctgcctcagcctccggagtagctgcgacta

SEQ ID NO: 423708 - DNA, 201 bp, Homo sapiens
gctggagtgcagtggcgcggtctcagctcactgccagctccgcctcccgggttcacgccattctcctgcctcagcctccggagtagctgcgactacaggcrcccgccaccacgcccggctaattttttgtatttttagtagagatggggtttcatcttgttagtcaggatggtctccatctcctgacctcgtgatccgccc

SEQ ID NO: 423709 - DNA, 201 bp, Homo sapiens
tgatttaaatgtgatttaaatgataatcagtttgctttttacttattatgcattttcaatttaagatataccagaagctaacattctgctgaattttataygagaaaataaagaaacgaatgttctggatgatgaaattgacagttatttcaaagaatccataaattgtaagtgaccgtttaaatatatttggattttttt

SEQ ID NO: 423710 - DNA, 201 bp, Homo sapiens
aaatgataatcagtttgctttttacttattatgcattttcaatttaagatataccagaagctaacattctgctgaattttatacgagaaaataaagaaacraatgttctggatgatgaaattgacagttatttcaaagaatccataaattgtaagtgaccgtttaaatatatttggatttttttaaaggccgaaattgggc

SEQ ID NO: 423711 - DNA, 201 bp, Homo sapiens
ctaacattctgctgaattttatacgagaaaataaagaaacgaatgttctggatgatgaaattgacagttatttcaaagaatccataaattgtaagtgaccstttaaatatatttggatttttttaaaggccgaaattgggcctgtaaaggtttgtttgacatggtaaaagataccagattcctattctgtaactactatat

SEQ ID NO: 423712 - DNA, 201 bp, Homo sapiens
tgggttgcagcctcacctggtgcttccagccagcagcacagccggctgctgccccgcccggtgttctggtgctcactggcctccagggctcaggccccccmaaaatggcaaaacaaccctcctgtgattccctgagatcctctttggaccaaaggtgctttaccctttctttccttcgttttcttttttttgaaacagggt

SEQ ID NO: 423713 - DNA, 201 bp, Homo sapiens
ttcacagtcagtcatgagagtgtgcgtttgccagccaggagctttcagtgcacacgtgggttgcagcctcacctggtgcttccagccagcagcacagccgsctgctgccccgcccggtgttctggtgctcactggcctccagggctcaggcccccccaaaatggcaaaacaaccctcctgtgattccctgagatcctcttt

SEQ ID NO: 423714 - DNA, 201 bp, Homo sapiens
atcacggctcgctgcaaccttgaactgctgggctctggggatcctcccactgcagcctcccaaagtgctgggattacaggcacacacaccacacccagctrattttttgattttgtggagatggtgttttgccatgttgccaaggctggtctcgaactcctgggatcaagcaatcttcccgccttggcctctcacagtgct

SEQ ID NO: 423715 - DNA, 201 bp, Homo sapiens
aataccaaccgcccatcaggttgtttcaaaggctttcagccactgactaatagaaaaagagactgcatacaacgtttcattcatgttttgctaggctagayacatttgttgtagcggtctcatatttgtaagtccgtggaaaaacctgaaagtatttttttcttgaaaatttttttgaaaaaaaaggtattctttgtacaa

SEQ ID NO: 423716 - DNA, 201 bp, Homo sapiens
gtcttgatcagtcattttctgacccaaggtcacagctcttgcaaaattttactgtagctcgacaaactctccatatcaactccacattacaagatctttcrtttcttcaattaaacaactggaaatggataccatccatgctctcagatttatgatgtcaataaagcccattatgatcacaccctgctgttgaaaaatggg

SEQ ID NO: 423717 - DNA, 201 bp, Homo sapiens
ttatgatataggtttataacatgtgtgttttctacaatgatgatgtgaaaattgactctttgagtaggagttataggggaattcaatgattttgaacatayctcgactgttacttacttaaaagaaaactaagtggaatcatcttataagttaaagaacttattgtaaagcagctaccacacacccttaccttccctgccc

SEQ ID NO: 423718 - DNA, 201 bp, Homo sapiens
taagtcaatacagtcgcttccacagtatgacaaaaggttccgtcttgatcagtcattttctgacccaaggtcacagctcttgcaaaattttactgtagctygacaaactctccatatcaactccacattacaagatctttcatttcttcaattaaacaactggaaatggataccatccatgctctcagatttatgatgtca

SEQ ID NO: 423719 - DNA, 201 bp, Homo sapiens
gttacttacttaaaagaaaactaagtggaatcatcttataagttaaagaacttattgtaaagcagctaccacacacccttaccttccctgcccctgagcastctgctatttatattttgcttttgcaaactagatttcttacaatgggatacatttacatataactttaataatttaaaatttaaaaatattaaaaaataa

SEQ ID NO: 423720 - DNA, 201 bp, Homo sapiens
ggatctcaccatgttggccaggctggtctcgaactcctatacgatcccacaccagcattcctcaaaaccgtccaggtcaccagaaacactgtcacagcccwgaggagcccagtgagacatggtgaccaaaggcgatgtgggggcctggagcagaaaagaaaattaggggaagagtaagcaaacctgaatcaactaccgact

SEQ ID NO: 423721 - DNA, 201 bp, Homo sapiens
ttccctgcccctgagcagtctgctatttatattttgcttttgcaaactagatttcttacaatgggatacatttacatataactttaataatttaaaatttwaaaatattaaaaaataacaattgttgttatagtttttcttgaaaggtaaactatttgctaataatggtctcttcagatagaaagttttactcaacatttc

SEQ ID NO: 423722 - DNA, 201 bp, Homo sapiens
gaaagctttgaagactgtggcaaattaaattgcattatacatgtgctttggatgaattcagtaaggattgatagcatagggcagttattatgctccatctrgtgattgaaaataaagtagaaatatgctaagtattaaatgattatatttgtaatagtagttaacttttggattactttatactattccttgtggaattga

SEQ ID NO: 423723 - DNA, 201 bp, Homo sapiens
attatatttgtatcaaaaattccagcagtaccaaaggtcacagatttgaaaagtgaaattcccctttcagctcctcactcttgccatcctagtcctctccycagaggtagacactaatagacagttcagaatatgtctataatttacatgtatgttgagttatattactttttttaaaaatttgagatagggtcttgctct

SEQ ID NO: 423724 - DNA, 201 bp, Homo sapiens
gcggtctcagctcactgccagctccgcctcccgggttcacgccattctcctgcctcagcctccggagtagctgcgactacaggcgcccgccaccacgcccrgctaattttttgtatttttagtagagatggggtttcatcttgttagtcaggatggtctccatctcctgacctcgtgatccgcccgcctcggcctcccaaa

SEQ ID NO: 423725 - DNA, 201 bp, Homo sapiens
gtatcaaaaattccagcagtaccaaaggtcacagatttgaaaagtgaaattcccctttcagctcctcactcttgccatcctagtcctctcctcagaggtaracactaatagacagttcagaatatgtctataatttacatgtatgttgagttatattactttttttaaaaatttgagatagggtcttgctctgtcactcag

SEQ ID NO: 423726 - DNA, 201 bp, Homo sapiens
ggctcattttttcttttttttttttggagacagagtctcactctgttgcccaggctggagtgcagtagtacagtctcggctcactgcaaccttcctctccygggttcaagcgacctctcccgggttcaagcgattttcatacctcagcctcctgagtagctgggactactcgggtgggcgggcggcgccacaagacaacca

SEQ ID NO: 423727 - DNA, 201 bp, Homo sapiens
gttcaagcgacctctcccgggttcaagcgattttcatacctcagcctcctgagtagctgggactactcgggtgggcgggcggcgccacaagacaaccaggmactcaccaccacgcctggctaatttctttcgtatttttagtaaagacggggtttcaccatgttggccaggctggtcttgaactcctgagctcaggtgatc

SEQ ID NO: 423728 - DNA, 201 bp, Homo sapiens
ctactaaaaatacaaaaaaattagctgggtgtggtggcacatgcctgtagtcccagctactcgggaggctgaggcaggagaatcgcttgaacctgggaggyagaggttgcagtgagctgagatcgtgccactgcactccatcctgggcgacagagcgagactccgtctcaaaaaaaaaaaaaaaaaatcactacctttccc

SEQ ID NO: 423729 - DNA, 201 bp, Homo sapiens
tgaggcaggagaatcgcttgaacctgggaggcagaggttgcagtgagctgagatcgtgccactgcactccatcctgggcgacagagcgagactccgtctcaaaaaaaaaaaaaaaaaatcactacctttcccttcacacagtataatcaaatgctcaatatgaggtgtttacgtagatttttgctgtattttttgaggtaa

SEQ ID NO: 423730 - DNA, 201 bp, Homo sapiens
aatgcaaaaacaaaattagccaggcgtggtggcaggtgcctgtaatcccagctactcgggaggctgaggtgggagaatggcgtgaacccaggaggtggagyttgcagtgagctgagattgcaccactgcactccagcctaggcaacagagtgaaactccatctcaaaaaaaaaatgtcccattgaatcatcttgcatgtga

SEQ ID NO: 423731 - DNA, 201 bp, Homo sapiens
gcgtgaacccaggaggtggagtttgcagtgagctgagattgcaccactgcactccagcctaggcaacagagtgaaactccatctcaaaaaaaaaatgtccyattgaatcatcttgcatgtgaaactctaaatttggctgggcttggtggctcacgcctgtaatccagcactttgggggcgggcggatcacttgagatcagg

SEQ ID NO: 423732 - DNA, 201 bp, Homo sapiens
ggcccagtcgtctgcacctgaaccaaagcatgttgctggccagagctcctgggctaatttcaggaccatcagagtaaaggggcacttctgtcttcagctcyccttggaccttggctcttctgcctccttcctactgataaaggcctacctttatggcctttataaagataggaaattacttttttttttttttttttaaga

SEQ ID NO: 423733 - DNA, 201 bp, Homo sapiens
gtttgcagtgagctgagattgcaccactgcactccagcctaggcaacagagtgaaactccatctcaaaaaaaaaatgtcccattgaatcatcttgcatgtraaactctaaatttggctgggcttggtggctcacgcctgtaatccagcactttgggggcgggcggatcacttgagatcaggagttcaagaccagcctggcc

SEQ ID NO: 423734 - DNA, 201 bp, Homo sapiens
ttagttgaatggttgaatgagcgaatgaatttgtcacagttcggcaagtgttttagatagtgacattgcattgtgagccacatcagaccaggccaaagaaygaatgaaaaacttgacgcagcttaattcccaaatgtttcttctggcactgaaaggccttgaatacaaaaactggtacactggataatattgacaagcagg

SEQ ID NO: 423735 - DNA, 201 bp, Homo sapiens
tctcaaaaaaaaaatgtcccattgaatcatcttgcatgtgaaactctaaatttggctgggcttggtggctcacgcctgtaatccagcactttgggggcggscggatcacttgagatcaggagttcaagaccagcctggccaacatggtgaaacctcgtctctactaaaaatacaaaaattggctgggcatggtggcaggtg

SEQ ID NO: 423736 - DNA, 201 bp, Homo sapiens
ggcggatcacttgagatcaggagttcaagaccagcctggccaacatggtgaaacctcgtctctactaaaaatacaaaaattggctgggcatggtggcaggygcctgtaatcccagctatttgggaggctgaggcagaagaatcgcttgagcctgggaggcggatgttgtggtgaactgagattgtgccactgcactccacc

SEQ ID NO: 423737 - DNA, 201 bp, Homo sapiens
tatgtttacagaattctacatcacattgttaatggccacgtaatattctatttgattgtattcttacatgtcttcactttttactattaaaatgattttgsatgatttaaatgtgatttaaatgataatcagtttgctttttacttattatgcattttcaatttaagatataccagaagctaacattctgctgaattttat

SEQ ID NO: 423738 - DNA, 201 bp, Homo sapiens
atgtttacagaattctacatcacattgttaatggccacgtaatattctatttgattgtattcttacatgtcttcactttttactattaaaatgattttggwtgatttaaatgtgatttaaatgataatcagtttgctttttacttattatgcattttcaatttaagatataccagaagctaacattctgctgaattttata

SEQ ID NO: 423739 - DNA, 201 bp, Homo sapiens
aaagaaatggagtaatcaatcctttgccatctcatgaagctatgagtacagtatgtagtgtatcatttaaaacatacgctcacgctgctggtctgtaacamagcatcagcagtgacagaattataaagcaatgtgtgcttttgaccaaaccattatcagcatttttaaaagatagaattactatgaggaatggtgtaaaat

SEQ ID NO: 423740 - DNA, 201 bp, Homo sapiens
gttcacagtcagtcatgagagtgtgcgtttgccagccaggagctttcagtgcacacgtgggttgcagcctcacctggtgcttccagccagcagcacagccrgctgctgccccgcccggtgttctggtgctcactggcctccagggctcaggcccccccaaaatggcaaaacaaccctcctgtgattccctgagatcctctt

SEQ ID NO: 423741 - DNA, 201 bp, Homo sapiens
aaagcgactaagaacaacacagtgcaatcaggaacacatcacaactgtcaggaatggttcacagtcagtcatgagagtgtgcgtttgccagccaggagctytcagtgcacacgtgggttgcagcctcacctggtgcttccagccagcagcacagccggctgctgccccgcccggtgttctggtgctcactggcctccaggg

SEQ ID NO: 423742 - DNA, 201 bp, Homo sapiens
agagccagaccctgactcaaaaaaaaaaaaaaaaaaaaagaaagaaacaaaaagtctgaaaccaaattgcaacttgtgcatcttatgcaaattgtacagamgtcgtacgctactgattacactgagtggctttatgcactcactgtagggttacccttaggaatttctgattcgaaacccaccgaggcagctctgatttcg

SEQ ID NO: 423743 - DNA, 201 bp, Homo sapiens
ctaatattcaaaacagcctggttaaatgtgcacagcctcgaatgcagacgtgagccacatgctctcaggatgcactgacattgtttcgttatcgagatgargcactaatgttttagaagagtgatggtggaagacagctgaagatttcctgtcatttgagtgtttatttataatccctcccagtctcagtccttgttccta

SEQ ID NO: 423744 - DNA, 201 bp, Homo sapiens
cccagctacgtaggaggctgaggcacaagaatcacctgaatctgggagacggaggttgcagcgagctgagattgtgccactgcactccagtctgggcaacrgagtgagactctgtctcaaaaaaaaaaaaaaaaaaacagaaaagaaaaaaaattactggaagccccaaagagcttttgtgtgtgaattatatccaaggct

SEQ ID NO: 423745 - DNA, 201 bp, Homo sapiens
cctaaggtaatacctggatggctcaagtttacatgtttttccctccaaatacacagatcaccagggaagggagcaagggggcaacctgttaccacttcagyttgaaattcatagaagcatgttatagaatatacatctgaaagaacattttgtactatgtatttgagtatttttattatcataatcaatagttatttgatt

SEQ ID NO: 423746 - DNA, 201 bp, Homo sapiens
tgattaaacaaataatcatttgtttataattgaaatgaaacttttcatgtaacacttatcaaaaggcagagaagcgattgaaactcttcatttgaaaaatraaagcattggttttcccttagatattggatcagaaaggtacactttcagcttcaccattcgggattcaccagcacattttgtaaatgcagcttcctgggg

SEQ ID NO: 423747 - DNA, 201 bp, Homo sapiens
cagagtaagaccctgtctcaaaaaaaaaaaaaaaaaaaaaaaaagactgcaatgcgaggcattcagaatgttatttgaagcatacaaatgtgatagttatrtttttactaaataaccttactgtctttggtttattacatatttcagtttgcatcaacccattgtattgttataattggttatctttctatagacatataa

SEQ ID NO: 423748 - DNA, 201 bp, Homo sapiens
ctgcaatgcgaggcattcagaatgttatttgaagcatacaaatgtgatagttatatttttactaaataaccttactgtctttggtttattacatatttcartttgcatcaacccattgtattgttataattggttatctttctatagacatataatacagccactgaatagattttgataaaagttgacatttgaccactg

SEQ ID NO: 423749 - DNA, 201 bp, Homo sapiens
gcgaggcattcagaatgttatttgaagcatacaaatgtgatagttatatttttactaaataaccttactgtctttggtttattacatatttcagtttgcaycaacccattgtattgttataattggttatctttctatagacatataatacagccactgaatagattttgataaaagttgacatttgaccactgaatagat

SEQ ID NO: 423750 - DNA, 201 bp, Homo sapiens
cagaatgttatttgaagcatacaaatgtgatagttatatttttactaaataaccttactgtctttggtttattacatatttcagtttgcatcaacccattktattgttataattggttatctttctatagacatataatacagccactgaatagattttgataaaagttgacatttgaccactgaatagattttgataaaa

SEQ ID NO: 423751 - DNA, 201 bp, Homo sapiens
gttaatgggattttaaggaactttacttttagttgaaataccaaatcttttacatctactcaccccagtatctctttgacagaacagcctcatatagtagraagaacaggagactttgaaaacacagaggtctagattcaaatcccagttccaacatttacttacatcatggctttgagaaaatttcttaatcttgttggg

SEQ ID NO: 423752 - DNA, 201 bp, Homo sapiens
ctcctctttaatactgtggtctcaagcagctgactccccataccggttatttagaacctaatcatatattgccttgtattgttaactttcaggacaatgtrtggtatctctctagttgaataatagggtcattgaacatatggactatgaaggcagaaagcttcacaaacttcatagggcccagtatagctatagacatcc

SEQ ID NO: 423753 - DNA, 201 bp, Homo sapiens
aattggcaagtatatggatactcattgcattggtataattgttagatattaagtatacctaaatttctttgtatttatgccacctagatgaaaattaatctttatttgtgtgtagagtagaagatatgattgtagatttgactagtaattgttcaaaatgatcaatagatgtattattttacttaatattttataaagtga

SEQ ID NO: 423754 - DNA, 201 bp, Homo sapiens
attggcaagtatatggatactcattgcattggtataattgttagatattaagtatacctaaatttctttgtatttatgccacctagatgaaaattaatctttatttgtgtgtagagtagaagatatgattgtagatttgactagtaattgttcaaaatgatcaatagatgtattattttacttaatattttataaagtgaa

SEQ ID NO: 423755 - DNA, 201 bp, Homo sapiens
taattgaaaatcctctgatccaaagaaaggaaatagaaagagaagaaaaattcagccctgcaactcctaggtaagcatctgtctagcacagagattgtgcsagaatgatcattactaataatgttgtatcagattagcagagatcttactaaaagtgttctgtttctatttcaataaaaatgaggagtttaattttctctt

SEQ ID NO: 423756 - DNA, 201 bp, Homo sapiens
ttggcaagtatatggatactcattgcattggtataattgttagatattaagtatacctaaatttctttgtatttatgccacctagatgaaaattaatctttatttgtgtgtagagtagaagatatgattgtagatttgactagtaattgttcaaaatgatcaatagatgtattattttacttaatattttataaagtgaaa

SEQ ID NO: 423757 - DNA, 201 bp, Homo sapiens
tggcaagtatatggatactcattgcattggtataattgttagatattaagtatacctaaatttctttgtatttatgccacctagatgaaaattaatctttatttgtgtgtagagtagaagatatgattgtagatttgactagtaattgttcaaaatgatcaatagatgtattattttacttaatattttataaagtgaaaa

SEQ ID NO: 423758 - DNA, 201 bp, Homo sapiens
atgaaaagtgacaaaatttttacaaaatcagtcagaagctgggcctgtaaattaactgtactccgagactggaactcttcccatcatcttacagctctaawggaagtttatattagtatctgtaaacaaaactttcattgcagttctctattcgtgatcattgatttttcaacttgatatacaaggggattttaaaaatta

SEQ ID NO: 423759 - DNA, 201 bp, Homo sapiens
aggtattcatttttattttttatttttattttttgagatggagtcctgctctgttgcccaggctgaagtgcaatagtgggatctaagctcactgcaacctstgcctctgggttcaagcgattctcctgcctcaggctcgcgagtagctgggattacaggcacccaccaccacatccggctaattttttgtatttttagtag

SEQ ID NO: 423760 - DNA, 201 bp, Homo sapiens
  misc_feature (1)...(201): n = A,T,C or G
tttattgaagaaaattaaatttcatgcactagacatcaacaaaagaaaagaaaccaatgaagtgctgaaggaaccggataagttctcataaaagttttctnacccaagtaatattagttcctggaagattcttctaagataaagaaaaataaaaatgaataataggttattgtctttagttttgtaaagtttatttttgtt

SEQ ID NO: 423761 - DNA, 201 bp, Homo sapiens
gagatggagtcctgctctgttgcccaggctgaagtgcaatagtgggatctaagctcactgcaacctctgcctctgggttcaagcgattctcctgcctcagsctcgcgagtagctgggattacaggcacccaccaccacatccggctaattttttgtatttttagtagagatggagtttcaccatgttggtcagactggtct

SEQ ID NO: 423762 - DNA, 201 bp, Homo sapiens
tagtgggatctaagctcactgcaacctctgcctctgggttcaagcgattctcctgcctcaggctcgcgagtagctgggattacaggcacccaccaccacayccggctaattttttgtatttttagtagagatggagtttcaccatgttggtcagactggtctcaaactcatgacctcaggtgacccacccgcctcagcctc

SEQ ID NO: 423763 - DNA, 201 bp, Homo sapiens
ttaactccttaagagcaatggtcatgctctctattggatggtcaagtacctgattcaaggctttctctctccctccctcccacattctctctctctctctmtctatatgtatatatacacacatatgtgtatatatgtttatgtgtatacacacgtgtgtatgtgtgtgcatgtgtatgtgtgtgtatatatgtatatttg

SEQ ID NO: 423764 - DNA, 201 bp, Homo sapiens
aactccttaagagcaatggtcatgctctctattggatggtcaagtacctgattcaaggctttctctctccctccctcccacattctctctctctctctctmtatatgtatatatacacacatatgtgtatatatgtttatgtgtatacacacgtgtgtatgtgtgtgcatgtgtatgtgtgtgtatatatgtatatttgag

SEQ ID NO: 423765 - DNA, 201 bp, Homo sapiens
ctgtcatctggtacccatatcatttgtgcctgcactttatttcatcttaactaattagatcagaaatactaaataaatagtttgaggaagtctatatctcyttttaccaaatttcagaaggcatcacttaaaatgtgtgaattagaaaaaagtagttattaaaatacttgctaaaattataaaaatgaaatacacggtttt

SEQ ID NO: 423766 - DNA, 201 bp, Homo sapiens
tcagttcctgcgcctttcccgagcgtgcacactttcactgtgtttgctctgcgatacacctgggtcgtgtgtacagagaagcaagggggtgctttctgccrctaattttgctttgtttgactcttctctggtgcacaatgtaagatttaaaagccgtgtaggccaggtgcagcggcgcacgcctgtcatcccagccgctca

SEQ ID NO: 423767 - DNA, 201 bp, Homo sapiens
gccggagaatcgcttgaacctgcgaggaggagggtgcagtgaaccgagatcgtgccactgcactcacagcctgggggacagagcgggactgccaccgccaygcacccagcctgggggacagagcgggactgccaccgccacgcacccagcctgggggacagagcgggactgccactagcacaccctcagtgatggttccct

SEQ ID NO: 423768 - DNA, 201 bp, Homo sapiens
agggaactcttaacagcggttattccagggactaggacacttgcatgtgtcttaatctaattagagcaaatggcagatgttcttccaggcggctttcaggsgaggggccagaacatttttcttttctttctttctttttttctttttttttgagatggagtttttgctctgtcgcacaggctggagtgcagtggtgcgatc

SEQ ID NO: 423769 - DNA, 201 bp, Homo sapiens
cctcctcggcctcccaaagtgctgggattacaggcatgagccaccaaccccggccaaaaatatcttcttttaaaggcagagagtggaaaggaatagggacratttaaaaacccaactcttcccattatatttgaaatggtgaaatgcaggtactttattttgcttcccagtattatttgggaaattaaaaaaaaatgagga

SEQ ID NO: 423770 - DNA, 201 bp, Homo sapiens
tctgataaaagagtctaatattcaaaacagcctggttaaatgtgcacagcctcgaatgcagacgtgagccacatgctctcaggatgcactgacattgtttygttatcgagatgaagcactaatgttttagaagagtgatggtggaagacagctgaagatttcctgtcatttgagtgtttatttataatccctcccagtctc

SEQ ID NO: 423771 - DNA, 201 bp, Homo sapiens
ttgcttgcctcatgtgtccacagaagataatggattgcgttgaaatccaggagccttttctctgaaacctaaggtctgtgagcagcagaaagcggatggtmggaagatctgataaaagagtctaatattcaaaacagcctggttaaatgtgcacagcctcgaatgcagacgtgagccacatgctctcaggatgcactgaca

SEQ ID NO: 423772 - DNA, 201 bp, Homo sapiens
taccaactggtttggagacatcagatgccgtcgatactttgtaaatgttgtgcatgagagacacctgtgacctacttctcacaccggtgctgggtcccacycctagaaattctggttctattggtctggggtgtgacagtgggtggtttaaagctcccaggtgattctaatttgtagccaaggccaagaacctctgccctg

SEQ ID NO: 423773 - DNA, 201 bp, Homo sapiens
caacctgtctacacaggtgtcagctttcctactagtgaagcaagctccaacaaaagattttttttaaggcaaagaaaaaagaaaaaagagaaaaaagtctsccataggttgcttgcctcatgtgtccacagaagataatggattgcgttgaaatccaggagccttttctctgaaacctaaggtctgtgagcagcagaaagc

SEQ ID NO: 423774 - DNA, 201 bp, Homo sapiens
cagagaacaattgtggatcttgttctcctggtctctgctcccagcactccgtgagcgggccccgcgtgcagggggattgctggccagacctgacagcctcrcacggtcagatactatcatcttttctgtctcccacaagggaggacgacggcctatctgatggaaagccagtctcctgctgaggatggatgcgcagctgtg

SEQ ID NO: 423775 - DNA, 201 bp, Homo sapiens
atgttggccaggctggtcttgaactcctgacctcaagtgatccacctgcctcggtctcataaagtgctgggattacaggaatgagccaccatgcacggccttttttttttttttttttgagattgagtcccacgctattgcccaggctggagtgcagtggtgcaatcttggctcactgcaaccttcacctcccaggttcaa

SEQ ID NO: 423776 - DNA, 201 bp, Homo sapiens
aggatgccatactcaagtgttctgatgacgggaggcaagctccaccgtggggccgcagagaacaattgtggatcttgttctcctggtctctgctcccagcrctccgtgagcgggccccgcgtgcagggggattgctggccagacctgacagcctcacacggtcagatactatcatcttttctgtctcccacaagggaggac

SEQ ID NO: 423777 - DNA, 201 bp, Homo sapiens
gtgttctgtttctatttcaataaaaatgaggagtttaattttctcttacaaaattcatctttgattatgacataatttactttgatacagagtcacatgawaaatggctttggttttagtactttgattctcattcttagatttacaaaaatttgactttgtcatgttaaaactgaatgaggagaaaagataaactttgga

SEQ ID NO: 423778 - DNA, 201 bp, Homo sapiens
tgaatgaggagaaaagataaactttggaaattacatctgtcttttttcatgtcaaggtatccttctactcacaggcttaccatcttagggcagattccttmgaagcagagcttgagaggaggactcttgtgggagtggttggttgagggtgagctctcaggggaaccctgcgaggatagaccaggaagcagctgagcagag

SEQ ID NO: 423779 - DNA, 201 bp, Homo sapiens
ggttcacctggagcctcagcaggagccgggagggagctctggagtgggagtggccccttagagcagtgccctggctgtagtccatccactccccaaacccscaggatggggcggggcatcagctcaaaggcgggtctggcagttctggagagaagggtgtagctgtgccctgtaccagcctgtaaagggctcttggtgggc

SEQ ID NO: 423780 - DNA, 201 bp, Homo sapiens
ggatggggcggggcatcagctcaaaggcgggtctggcagttctggagagaagggtgtagctgtgccctgtaccagcctgtaaagggctcttggtgggcacrgcagtctacggcatttacactcgcatcaactgtgacccgttcccaccttcttttctgacctcatcttatgccagactctgaagcctcatttctctgtagc

SEQ ID NO: 423781 - DNA, 201 bp, Homo sapiens
gggcatcagctcaaaggcgggtctggcagttctggagagaagggtgtagctgtgccctgtaccagcctgtaaagggctcttggtgggcacggcagtctacrgcatttacactcgcatcaactgtgacccgttcccaccttcttttctgacctcatcttatgccagactctgaagcctcatttctctgtagccacagtgaat

SEQ ID NO: 423782 - DNA, 201 bp, Homo sapiens
cttcttcaccaccatatcccttgtgcctagcatagggtctggtatataacagattctcagtattcatggaagtgatggatggatggttagatggagagaayattcttggtagagggaagaaacaggaaacctcctgtcttttccagaacagttaatattagtttgagccatatgaaactgctgatgttttactatttttca

SEQ ID NO: 423783 - DNA, 201 bp, Homo sapiens
tcaaaaatatgatggacttcatatcaagagaggataatgataggagatgaatgatattttaaaaaataaatctcactcttgaatgttgagttgttacggayaccaccttaaaatgaggtctttagatggcatggaattgcttagggggactccaccgtgcccagttttattattgaattctgtcgtgtaacaaatgatgtt

SEQ ID NO: 423784 - DNA, 201 bp, Homo sapiens
ttttccagaacagttaatattagtttgagccatatgaaactgctgatgttttactatttttcatctagaaataccaatttcataatgtaatagtctgatayggctggaatgcagggcatgggcaggaggagaagcttaaggtggaagcagagatattttacagacagctttgctttcataccgagttatttcctttgtgac

SEQ ID NO: 423785 - DNA, 201 bp, Homo sapiens
tttatcaaaaatatgatggacttcatatcaagagaggataatgataggagatgaatgatattttaaaaaataaatctcactcttgaatgttgagttgttayggacaccaccttaaaatgaggtctttagatggcatggaattgcttagggggactccaccgtgcccagttttattattgaattctgtcgtgtaacaaatga

SEQ ID NO: 423786 - DNA, 201 bp, Homo sapiens
attagtttgagccatatgaaactgctgatgttttactatttttcatctagaaataccaatttcataatgtaatagtctgatatggctggaatgcagggcaygggcaggaggagaagcttaaggtggaagcagagatattttacagacagctttgctttcataccgagttatttcctttgtgactggtagccacaatgatgg

SEQ ID NO: 423787 - DNA, 201 bp, Homo sapiens
ccctgtgtctcttcaaagtgttgtgtgacttacaacttcagctacgtacatgtagtttagagatagatgctttaaaataatcaactatatattactggttsttgctagtttaatatttctaatttggtgtttaaaaggtgaacatttgagtattttcatcaacaaatacttaagaacttctacatataggtgaagagtaat

SEQ ID NO: 423788 - DNA, 201 bp, Homo sapiens
gagtgccaccactaattttaaaattttatgtagagatggtgtccttctatgttgcccaggctggttttgaactccaggcctcaagtgattctcctacctcrcctcccaaagtcctgggatcacaggggtaagctgttgtgcctggccaatttttatttttattttattattatttatttatttatttttgagacaagagtt

SEQ ID NO: 423789 - DNA, 201 bp, Homo sapiens
ataatgtaatagtctgatatggctggaatgcagggcatgggcaggaggagaagcttaaggtggaagcagagatattttacagacagctttgctttcatacygagttatttcctttgtgactggtagccacaatgatggtctttgagctgggaaataatattttcatatttgtggtttaggaagatcactttgcttatggag

SEQ ID NO: 423790 - DNA, 201 bp, Homo sapiens
tgcctcagcctcccaagtagctgggattacaggcggccaccaccacgcctggctaagttttgtatttttagcagagacagggtttcaccatgttggccagrctggtcttgaactaacctcaggtgatccacccgcctcggcctcccaaagtgttaggattacaggcgtgagccattgcgcccggcctatttttacttttat

SEQ ID NO: 423791 - DNA, 201 bp, Homo sapiens
ctccatgcagagctcagcaggggtaggaaaaacacagtccctgacctgaggcactaaggcagaacagccaggtccataagagagagaaacaaccagtcctygggtttgtataacccctgaaagtttcagagcgcttttatgctcctatttttttggagaaggaaacaagcgcagagtcttgggcaagatcagacaaatggt

SEQ ID NO: 423792 - DNA, 201 bp, Homo sapiens
caccacgcctggctaagttttgtatttttagcagagacagggtttcaccatgttggccaggctggtcttgaactaacctcaggtgatccacccgcctcggsctcccaaagtgttaggattacaggcgtgagccattgcgcccggcctatttttacttttatttttgggacggggtcttgctctgttgcccaggctggagag

SEQ ID NO: 423793 - DNA, 201 bp, Homo sapiens
tgtagtaccagctactaaggaggctgaagcaggagggtggcttgagccctggaggtggaggttgcagcgagccaacatcgtacctctgcactccagcctgrgtcacagagtaagaccctgtctcaaaaaaaaaaaaaaaaaaaaaaaaagactgcaatgcgaggcattcagaatgttatttgaagcatacaaatgtgatag

SEQ ID NO: 423794 - DNA, 201 bp, Homo sapiens
ctcccacaagggaggacgacggcctatctgatggaaagccagtctcctgctgaggatggatgcgcagctgtgcagcaggggaggggactcctgtcaagcaygcggagtttttggggagaagcatctggagactggcccctggtttcacagtctggactctggttgggaaggggggcagcccccttttgtgggagtgatcag

SEQ ID NO: 423795 - DNA, 201 bp, Homo sapiens
gaacgtttgtatttccttttatttttattttttattttttactgagacagagtcccactctgttgcccaggctggagtgcagtggcacgatctcggctcaytgtaacctctaactcctgggttcaaaccattctcccacctcagcctcccaagtagctgtgattacaggcacacgccccacacccagctaatttttgtatt

SEQ ID NO: 423796 - DNA, 201 bp, Homo sapiens
ttttgagacagggtttcactctgtcacctgggctggagtgcagtggcgcaaactcagctcactatggcattggcctcctgggctcaagcgatcctcctacstcagcctcctgagtagctgggactacaggcgcacgtcaccacgcccagcacccttttttttttttttttttttgagacggactctcactctgtcgcctag

SEQ ID NO: 423797 - DNA, 201 bp, Homo sapiens
ctccatcgctcttctccaccttctccaccgtggctcggcagttggcccatccgtacctggctgctcaatggcttgactttgacacaataaacgggaactcrttcacaatgaagccatctcacgccaaatctatgtgttctacagtgattccaatgctagtcggggaataaaagtttaacacagactttacaaaacaggaga

SEQ ID NO: 423798 - DNA, 201 bp, Homo sapiens
ctctcactctgtcgcctaggctagagtgcaatggcgtgatctcagctcactgcaacctctgcctccccggttcaagcgattctctcgcctcagcctcccakgtagctgggattatgggaacctgccatcacgcctggctaatttttgtatttttgtagagatggggtttcaccatgttgttgggcaggctggtcttgaact

SEQ ID NO: 423799 - DNA, 201 bp, Homo sapiens
ttctcaaatcttacaagttgtgagaaaatgtatcattcttttacactcaactgtgtcaaacatcctaaataaagttcccaaacccaggaaagccagggacygtctgcgatttgctgttcccaaacccatgaaacccagggaccgtctatgatttgctgtggcttcacctgtatgggtccaggttgctcacgcccacctgtt

SEQ ID NO: 423800 - DNA, 201 bp, Homo sapiens
gttcaaaccattctcccacctcagcctcccaagtagctgtgattacaggcacacgccccacacccagctaatttttgtatttttagtagaggcggggtttygctatgttggccaggctggtgtcgaactcctgacctcaagtgatccgcccgcctcggcctcccaaagggctgggattacaggcgtgagccaccgcgcctg

SEQ ID NO: 423801 - DNA, 201 bp, Homo sapiens
gtgggttgcagcctcacctggtgcttccagccagcagcacagccggctgctgccccgcccggtgttctggtgctcactggcctccagggctcaggcccccycaaaatggcaaaacaaccctcctgtgattccctgagatcctctttggaccaaaggtgctttaccctttctttccttcgttttcttttttttgaaacaggg

SEQ ID NO: 423802 - DNA, 201 bp, Homo sapiens
actttgggagaccaaggcagagggatcacttgagcccagttcaagaccagcctgggcaacatggtgaaactccatctctacaaaaaatacaaaaattagcyggatgtggtggtgtgtacctgtaatctcagctgcttgggaggctgaagtgggaggatcacctgagcctgggaggttgaggttgcagtgagccaaaatcat

SEQ ID NO: 423803 - DNA, 201 bp, Homo sapiens
ttcaagcaatcctcccacctcagcctcctgggtagctgggaccacaggcttgcgacaccatgcctgactaatttttacatttttggtagagatagggtctyactgtgttgcccaggctagcctcaaactcctgggctcaagcagttcacctgcctcaggctcccaaactgctgggattacagacatgagctactgtgcctg

SEQ ID NO: 423804 - DNA, 201 bp, Homo sapiens
atcacttgagcccagttcaagaccagcctgggcaacatggtgaaactccatctctacaaaaaatacaaaaattagccggatgtggtggtgtgtacctgtartctcagctgcttgggaggctgaagtgggaggatcacctgagcctgggaggttgaggttgcagtgagccaaaatcatgccactgcactccagcctgggcaa

SEQ ID NO: 423805 - DNA, 201 bp, Homo sapiens
tcccacctcagcctcctgggtagctgggaccacaggcttgcgacaccatgcctgactaatttttacatttttggtagagatagggtcttactgtgttgccyaggctagcctcaaactcctgggctcaagcagttcacctgcctcaggctcccaaactgctgggattacagacatgagctactgtgcctggcctctttcttt

SEQ ID NO: 423806 - DNA, 201 bp, Homo sapiens
accagcctgggcaacatggtgaaactccatctctacaaaaaatacaaaaattagccggatgtggtggtgtgtacctgtaatctcagctgcttgggaggctsaagtgggaggatcacctgagcctgggaggttgaggttgcagtgagccaaaatcatgccactgcactccagcctgggcaatagagggagaccctgtctcaa

SEQ ID NO: 423807 - DNA, 201 bp, Homo sapiens
ggctggagtgcagtggcgcaatctcagctgactgcaacttccgccccctggattcaagcaattctctgcctcagcctcccaagtagctgggattacaggcrcctgccaccacgccggataatttttttttgtatttttagtagagacagggtttcatcatgttggccaggctggtcttgaactcctgacctcaagtgatcc

SEQ ID NO: 423808 - DNA, 201 bp, Homo sapiens
caaggtcaggagttcgagaccagcctggccagtatggtgaaacaccatcgccactaaaaatacaaaaattagctgggtggcctggtgcggtggctcacgcytgtaatcccagcactttgggtggctgaggcgggaggatcacgaggtcaggagatcgagaccatcctggctaacacggtgaaaccccgtctctactaaaaa

SEQ ID NO: 423809 - DNA, 201 bp, Homo sapiens
agggtttcatcatgttggccaggctggtcttgaactcctgacctcaagtgatccacctgcctcggtctcataaagtgctgggattacaggaatgagccacyatgcacggccttttttttttttttttttgagattgagtcccacgctattgcccaggctggagtgcagtggtgcaatcttggctcactgcaaccttcacct

SEQ ID NO: 423810 - DNA, 201 bp, Homo sapiens
tcatgttggccaggctggtcttgaactcctgacctcaagtgatccacctgcctcggtctcataaagtgctgggattacaggaatgagccaccatgcacggycttttttttttttttttttgagattgagtcccacgctattgcccaggctggagtgcagtggtgcaatcttggctcactgcaaccttcacctcccaggttc

SEQ ID NO: 423811 - DNA, 201 bp, Homo sapiens
acggtgtttcaccatgttgtccaggctggtctcgacctcctgacctcaagtgatccgcccacctcggcctcccaaagtgttgtgattacaggcgtgagcgrgccagccccacctcttgaggaacgatgagactcttctgatgcagtcgccaacaacgagcgctgctgaggcttccagggacatacaggacaagatcctccc

SEQ ID NO: 423812 - DNA, 201 bp, Homo sapiens
acctcaagtgatccacctgcctcggtctcataaagtgctgggattacaggaatgagccaccatgcacggccttttttttttttttttttgagattgagtcycacgctattgcccaggctggagtgcagtggtgcaatcttggctcactgcaaccttcacctcccaggttcaagagattttcctgcctcagacttccgagta

SEQ ID NO: 423813 - DNA, 201 bp, Homo sapiens
ccgcccacctcagcctcccaaagtgctgggattacaggtgtgagccaccgcccccggccagatcactgtttctgttttgatactttggtatcaggtgcacrtcgtgtttctccttgaacttgagcccacgatcttagcattcattggtggattgagtggttgaattctggaagttctcggaatggccttgttttcctcgtc

SEQ ID NO: 423814 - DNA, 201 bp, Homo sapiens
gaacttgagcccacgatcttagcattcattggtggattgagtggttgaattctggaagttctcggaatggccttgttttcctcgtctgcagaatgaaactycagctgccagagggcttcaggcagagtcatcctatggaacatcatggtttaagggacccaggaaaactgtcactatgtggctacctcaaggtggtacaat

SEQ ID NO: 423815 - DNA, 201 bp, Homo sapiens
accaaaacagttaacacaaaactattgccagaaggatgccatactcaagtgttctgatgacgggaggcaagctccaccgtggggccgcagagaacaattgyggatcttgttctcctggtctctgctcccagcactccgtgagcgggccccgcgtgcagggggattgctggccagacctgacagcctcacacggtcagatac

SEQ ID NO: 423816 - DNA, 201 bp, Homo sapiens
ccaggacaggcaggtccgtgtctggtgagggccccctcctcgatggccatcttttcactgtcctcgcatggcagaaggggcagatgagggccttggggcctttttttttttttttgagacggagtcttgcctgtcacccaagcttgagtgcagtggcatgatctcgactcactgcaacctccacctcccgggttcgagcga

SEQ ID NO: 423817 - DNA, 201 bp, Homo sapiens
actcctgacctcaggtgatctgcccgcctcagcctcccaaagtgctgggattacaggcatgagccactgcacccagcctcctgattctttttttaagggaygattagtaaaaataaatgtcagcaacttgggagcagtgctaagccaagccctgtgtttgctctacttcctaacccccaaccaaatgtaactaagccactg

SEQ ID NO: 423818 - DNA, 201 bp, Homo sapiens
tggagcgcagtggcgcgatctcggctcactgcaacctccacctcccaggttcaagcaattctcctgcttcagcctctcgagtaactgggattacgggcacytgccaccacaatacatttttgtgttttcagtagagacggggtttcgccacgttgcccaggtaggtatccagctcctgacctcaggtgatccgcccacatt

SEQ ID NO: 423819 - DNA, 201 bp, Homo sapiens
tgctataaaaaatggaagaaacaaattccgtacacaacaagggagacttaatttcacgagcgtgaagcaattccactcttttaggcttgtattttgaagcrtcgtggcttatgagaagcctgttgtgtcctggcaaggctgacactgtttgcttaaccttatgtagctttctgcaaaaattaatttactaaaacgtgacaa

SEQ ID NO: 423820 - DNA, 201 bp, Homo sapiens
tgaggctcaaatgaaaaatgcatgaaaactatttttatattttttcctctcctttaagatggacttaaaatgctagtttattttattttgttattttgtgtttttttttttgagacagagtctctctctgttgcccaggctggagtgcagtggcccgatcttggttcaatgcaacctccacctcctgggttcaagcaattc

SEQ ID NO: 423821 - DNA, 201 bp, Homo sapiens
tctctctgttgcccaggctggagtgcagtggcccgatcttggttcaatgcaacctccacctcctgggttcaagcaattctcctgcctcagcctcccgagtwgctgggactaaaggcgcatgccaccacgcctggctaattttttgtgttttagtagagatggggtttcaccgtgttgcccaggctggtggccaactcctga

SEQ ID NO: 423822 - DNA, 201 bp, Homo sapiens
tgtgcaaagggagtttactggtgtcagcatcagccccatctgggagctggtttgaaaggcaggacctcaggctcctcccaggccccttgaatcggaatccrcattttaacaagattcctgggtctgctcactcatgtttgagaagcacggctttagaagatgagaaatggaagctaaaatttaagcatgtctttttcattt

SEQ ID NO: 423823 - DNA, 201 bp, Homo sapiens
ctcctgggttcaagcaattctcctgcctcagcctcccgagtagctgggactaaaggcgcatgccaccacgcctggctaattttttgtgttttagtagagayggggtttcaccgtgttgcccaggctggtggccaactcctgagctcaggcaatccgcccaccttggcctcccaaagtgctgggattacagacgtgagccac

SEQ ID NO: 423824 - DNA, 201 bp, Homo sapiens
aggcttgtgtgcaaagggagtttactggtgtcagcatcagccccatctgggagctggtttgaaaggcaggacctcaggctcctcccaggccccttgaatcrgaatccgcattttaacaagattcctgggtctgctcactcatgtttgagaagcacggctttagaagatgagaaatggaagctaaaatttaagcatgtcttt

SEQ ID NO: 423825 - DNA, 201 bp, Homo sapiens
ccctgacctgaggcactaaggcagaacagccaggtccataagagagagaaacaaccagtcctcgggtttgtataacccctgaaagtttcagagcgcttttwtgctcctatttttttggagaaggaaacaagcgcagagtcttgggcaagatcagacaaatggtatgtttagaaccccgacacgaatcaattctcaaaacat

SEQ ID NO: 423826 - DNA, 201 bp, Homo sapiens
tatatattagtattgtctaaatttcaatgaaaaatgtagtttaaatgtggacctggaaatatttttctttccaaagatcactttcaaataactttcttgtrtttttgcaatttagcaactgtaaactgttgctcagtgagaatcactcaacagtaaaagtttgttccagttatgaagtggacacaaagttactttctttga

SEQ ID NO: 423827 - DNA, 201 bp, Homo sapiens
tgacattgttgcaaatggacacagtcttaatgggaggattattaacgtgcttgcagctgtgaaatcggtaagttaaaaccccgacaaagccaagtgcaatygggcaggggaggtgcagtcacttgatctgtgtttgggatggagtggtcatgatcagctggggtaacttttcttctctatcttggtagtatgctgaattaa

SEQ ID NO: 423828 - DNA, 201 bp, Homo sapiens
tttaatagagacggggttgcaccgtgttagccaggatggtctcgatctcctgacctcctgatctgcccatctcagcctcccaaagtgctgggatgacaggygtgagccaccgtgcccggccgagaccatgtcttattcatctttgtacatcagcatagtgtgttgcaagaatcctggaatgagttgggtataaaatcagta

SEQ ID NO: 423829 - DNA, 201 bp, Homo sapiens
gacattgttgcaaatggacacagtcttaatgggaggattattaacgtgcttgcagctgtgaaatcggtaagttaaaaccccgacaaagccaagtgcaattkggcaggggaggtgcagtcacttgatctgtgtttgggatggagtggtcatgatcagctggggtaacttttcttctctatcttggtagtatgctgaattaag

SEQ ID NO: 423830 - DNA, 201 bp, Homo sapiens
ttgcagctgtgaaatcggtaagttaaaaccccgacaaagccaagtgcaattgggcaggggaggtgcagtcacttgatctgtgtttgggatggagtggtcaygatcagctggggtaacttttcttctctatcttggtagtatgctgaattaagaaaacagtaacacttctcattaaagggaaactagctttttatctgtgga

SEQ ID NO: 423831 - DNA, 201 bp, Homo sapiens
agccccagagagcctgagttcattcagtcacatgagttccacgctgagccatggggatacaaaggtgctggaaacacagtccctgccctcgaggagtccaygtagatgccccagaggggcctgtcatggagctttgttgtgacatgttaaaaagactttcagtctctacttcaagcacctgtctccctgtgtctcttcaaa

SEQ ID NO: 423832 - DNA, 201 bp, Homo sapiens
aagaagacggaggtgctgagccccagagagcctgagttcattcagtcacatgagttccacgctgagccatggggatacaaaggtgctggaaacacagtccytgccctcgaggagtccacgtagatgccccagaggggcctgtcatggagctttgttgtgacatgttaaaaagactttcagtctctacttcaagcacctgtc

SEQ ID NO: 423833 - DNA, 201 bp, Homo sapiens
tcgcatgtggctctcaccatggtagccctgtggagaaggcaaaggacatatcctatatttgtttgtttcctgtggacactttttataccacagatatgctrtatttgatgttcactaagaagacggaggtgctgagccccagagagcctgagttcattcagtcacatgagttccacgctgagccatggggatacaaaggtg

SEQ ID NO: 423834 - DNA, 201 bp, Homo sapiens
atcgcgccattgtactccagcctaggccacaagagcaagaccctatcttaaaaaaaaaacaaggctggcgcggtggctcacacctgtaattccagcacttygggaggccaaggtgggctgctcacgaggtcaagagattgagaccatcctggccaacatggtgaaaccctgtttctactaaaaatagaaaaattagccgag

SEQ ID NO: 423835 - DNA, 201 bp, Homo sapiens
aagtgtgcgcctgtagtaccagctactcgggaagctaaggcaggagaatcacttcaacccaggaggtggaggttgcagtgagccgagattgcaccactgcrctccagcttggcgacagagcgagactccgtctcaaaaaaaaaaaaaaaaaaaaaaaaagtgaaaaaccagattaattttaaagtataattcattgtgata

SEQ ID NO: 423836 - DNA, 201 bp, Homo sapiens
tttcttcttttttttggggggtctcaaactcctgacctcaagaaatcctcctgcctcagcctcctgaaggattacaggtgtgagccaccttgcttggcccwaaaataggctttttttgtttgtttgttttttgagatggagtcttgctgtgtcacctaggctggagtgcagtggcatgtgctcagctcactgcaacctccg

SEQ ID NO: 423837 - DNA, 201 bp, Homo sapiens
ctaaggcaggagaatcacttcaacccaggaggtggaggttgcagtgagccgagattgcaccactgcactccagcttggcgacagagcgagactccgtctcraaaaaaaaaaaaaaaaaaaaaaaagtgaaaaaccagattaattttaaagtataattcattgtgataatttttgagagatcgattttattgcttggatgct

SEQ ID NO: 423838 - DNA, 201 bp, Homo sapiens
gtagagacggggtttcaccatgttagccaggatggtcttgatctcgtgatctgcctgccttggcctcccaaagtgctgggattacaagtgtgagccaccgygcccagccttttttgtatttttagtagacatggggtttcaccatgttggccaggatggtcttgatttcttgacctcgtgatccacccaccttggcctccc

SEQ ID NO: 423839 - DNA, 201 bp, Homo sapiens
ccaccacgccggctaatttttgtatttttagtggagacggggtttcaccatgttggttggacaggctggtcttgaactcctgacctcaagtgatccgcccscctcagcctcgtaaagtgctgggattacaggcgtgagccaccacgcctggccttgcctggcctctttcttggaagttacactgcaccggaatgcgattca

SEQ ID NO: 423840 - DNA, 201 bp, Homo sapiens
gtgcctgccgttcccacatgagaagccactgggtggagagaagggtcctagtttcaactcttctttttttttttttttaacttgctttaatgggcaagagsatttccacttctttgatcatcttaccccacaatggacagaattggacagtgtcaaagtttcctgtgtatctcgcatgtggctctcaccatggtagccctg

SEQ ID NO: 423841 - DNA, 201 bp, Homo sapiens
ggatcaaaatttatcatctttttgcctacaagaagggacaagccataagtgagactccatctctacaaaaaattaaaaaaaaatagctgggcatggtggcrcgtgcctgtgatctcagctactcaggaggctgagataggaggaccgcttgaaccctggaggtagagactgcagtgagctgtgttcatgccactgcactgc

SEQ ID NO: 423842 - DNA, 201 bp, Homo sapiens
gagacggggtttcaccatgttggttggacaggctggtcttgaactcctgacctcaagtgatccgcccgcctcagcctcgtaaagtgctgggattacaggcrtgagccaccacgcctggccttgcctggcctctttcttggaagttacactgcaccggaatgcgattcactggggagagaacgtttcatccaccctggctgg

SEQ ID NO: 423843 - DNA, 201 bp, Homo sapiens
cttactgtctttggtttattacatatttcagtttgcatcaacccattgtattgttataattggttatctttctatagacatataatacagccactgaatakattttgataaaagttgacatttgaccactgaatagattttgataaaaactgatatttaaattgttaatgggattttaaggaactttacttttagttgaaa

SEQ ID NO: 423844 - DNA, 201 bp, Homo sapiens
ctcaccccagtatctctttgacagaacagcctcatatagtagaaagaacaggagactttgaaaacacagaggtctagattcaaatcccagttccaacattkacttacatcatggctttgagaaaatttcttaatcttgttgggtctcaactatgaaataatacctcattaggttcttgtaaatattaaatgagatggtgta

SEQ ID NO: 423845 - DNA, 201 bp, Homo sapiens
gcttgaacccaggaggcggaggtcgcggtgagccgagattgcaccattgcactccagcctgggcgagaagagtgaaactctgtctcaaaaaaaaaaaaaaraaaaagaaagaaaagaaagtaaactccagtagatttaatactcttagctaaaagatgcttggcaagaaatgtgtaatattattaggaaagtctctctatg

SEQ ID NO: 423846 - DNA, 201 bp, Homo sapiens
agataatcctagattcacatggatgtataagaaataataagagggctgggcgtggtggctcacgcctgtaatcccagcactttgggaggccaaggcaggtrgatcacgaggtcaggagattgagaccatcctggctaacacggtgaaaccctgtctctactaaaaaatacaaaaaaattagccgggcatggtggtgggcgc

SEQ ID NO: 423847 - DNA, 201 bp, Homo sapiens
gctagaccaagtgatctgtggctagataagaaaccactatcttcagttcatttcccctatttgagaaatttgaattagtttccctgtttaaaattgctaamgtaaggcttgcttcagaaatatggaatagcataaatcactgaaagagaggagagtgtatcaccagcagtgttaatagcatctgggtgctacccggccagc

SEQ ID NO: 423848 - DNA, 201 bp, Homo sapiens
ggagagtgtatcaccagcagtgttaatagcatctgggtgctacccggccagccttgcaaggctttctgtatttgtagagaaggccccgtgcaggcccatcyagtgagcagctgttgaactcgtgctttccaggcacaagacacagttcctgccctcagaactcccagccagggaggtgagaataaggagctgatgcaacag

SEQ ID NO: 423849 - DNA, 201 bp, Homo sapiens
tctattttggaaaaaaagtatttgctgacccctagtggtcctcattaagtagcacataatttgttttgaaataacttattttaattatttttaaaatttattattttttttttgagacagggtctcactctgttcttccccacctctactaaaaaaccttgtctcatcaggcacggtggctcatgccagcactttgggagg

SEQ ID NO: 423850 - DNA, 201 bp, Homo sapiens
tattttggaaaaaaagtatttgctgacccctagtggtcctcattaagtagcacataatttgttttgaaataacttattttaattatttttaaaatttattwttttttttttgagacagggtctcactctgttcttccccacctctactaaaaaaccttgtctcatcaggcacggtggctcatgccagcactttgggaggct

SEQ ID NO: 423851 - DNA, 201 bp, Homo sapiens
ccacccacctcagcctcccaaagtgctgggcttacaggtgtgagccactgcggattgtccagaacatttttcgaattagttgatggaatgagttgatgttsctgggacgggtgtggagggagagctgtgcccctcccttccgtggactggagaggctcacggtagagcaggcctagaacccagctaggccactgtggtagc

SEQ ID NO: 423852 - DNA, 201 bp, Homo sapiens
ctccagcctgggcgacagagcgagattctgggttgataaataaataaataaagaggcaagagtaatttcttaatatagagagggatgatagtcaagagacaaaaaaaaaaaaaaggaaaaaacacacatgcttatgatagttcatgtaagtaaatgtgaattgcttgttatagtaaatggtgactgagagaacgtgaccct

SEQ ID NO: 423853 - DNA, 201 bp, Homo sapiens
gtttaactccttaagagcaatggtcatgctctctattggatggtcaagtacctgattcaaggctttctctctccctccctcccacattctctctctctctmtctctatatgtatatatacacacatatgtgtatatatgtttatgtgtatacacacgtgtgtatgtgtgtgcatgtgtatgtgtgtgtatatatgtatatt

SEQ ID NO: 423854 - DNA, 201 bp, Homo sapiens
tcatagctactacgttgtacagcagatctagatttcttggatttattctgtcaaggaaacagatttaaaggagaatactcgcgagaatgcacgaatttgtstgcttgtttatatcagctttacttttttttttagttttactttaagttctggcatacatgtgccgaacatgcaggtttgttacataggtatacatgtccc

SEQ ID NO: 423855 - DNA, 201 bp, Homo sapiens
tgagcgaatgaatttgtcacagttcggcaagtgttttagatagtgacattgcattgtgagccacatcagaccaggccaaagaatgaatgaaaaacttgacrcagcttaattcccaaatgtttcttctggcactgaaaggccttgaatacaaaaactggtacactggataatattgacaagcagggccatcattgactgtga

SEQ ID NO: 423856 - DNA, 201 bp, Homo sapiens
gccagtgactgtccatgctgggcctgctgctgtgcatctctcagaggtgcctgccgttcccacatgagaagccactgggtggagagaagggtcctagtttsaactcttctttttttttttttttaacttgctttaatgggcaagaggatttccacttctttgatcatcttaccccacaatggacagaattggacagtgtca

SEQ ID NO: 423857 - DNA, 201 bp, Homo sapiens
ttcccaaccccagatgttaggctgacctctcagcctctggctgtcctttctaggtccctttctctgggcaccacagatgcagtggtggcagaggtgggggyggccagtgactgtccatgctgggcctgctgctgtgcatctctcagaggtgcctgccgttcccacatgagaagccactgggtggagagaagggtcctagtt

SEQ ID NO: 423858 - DNA, 201 bp, Homo sapiens
tcactgaactaatttactgagcatgtgctgtatgctgggtgctgttctggggtgcaacgacaaaatggataaatatttccaccctcatggagtttaccctycagcagggagagacagagaataaataatgaagataatatgtccgtgaattatgaaatatttaaggagaacaggtggaacagagtcaggaggacctagaga

SEQ ID NO: 423859 - DNA, 201 bp, Homo sapiens
gtcaagccagtactgccaaagaaatggagtaatcaatcctttgccatctcatgaagctatgagtacagtatgtagtgtatcatttaaaacatacgctcacrctgctggtctgtaacaaagcatcagcagtgacagaattataaagcaatgtgtgcttttgaccaaaccattatcagcatttttaaaagatagaattactat

SEQ ID NO: 423860 - DNA, 201 bp, Homo sapiens
gactatttgcttctttgggttattgactcacagcttaaatgtcatcttcttcaaccttccccatctactctgtttgtggtagcgctaatggtcaattactkggattttgccctggcttttgtcagcataacccaagtcaccgtctgagattgtttgattcattgttcttgggtctccccctcacatatgtgagcctcatga

SEQ ID NO: 423861 - DNA, 201 bp, Homo sapiens
gcattcccagggtgctttatagtgcagacataaccgtcaagccagtactgccaaagaaatggagtaatcaatcctttgccatctcatgaagctatgagtayagtatgtagtgtatcatttaaaacatacgctcacgctgctggtctgtaacaaagcatcagcagtgacagaattataaagcaatgtgtgcttttgaccaaa

SEQ ID NO: 423862 - DNA, 201 bp, Homo sapiens
actggcgtttcatgttaaaactcctttttaatacagtgttctccaccttcccaaccccagatgttaggctgacctctcagcctctggctgtcctttctagrtccctttctctgggcaccacagatgcagtggtggcagaggtgggggtggccagtgactgtccatgctgggcctgctgctgtgcatctctcagaggtgcct

SEQ ID NO: 423863 - DNA, 201 bp, Homo sapiens
ctgagagaacgtgaccctttcagatggcagggccctggctgtggaggacatgcctgccacctggggagcatctgtatactttagggagaaggaataagccygctatatgatcatcttgaaaaacaggagaagtcactttgtaggcagtttatgttcaatcctattcagttgttcaaaggagtgctcaattgtttgcgattt

SEQ ID NO: 423864 - DNA, 201 bp, Homo sapiens
atcctctaagggcaaatttgagctggaaaagtttctaaaagacagatttgtctgatggaaaagatgatcaagcttgactgtacaatggtataaaaaactcmagatctaattaatgagacagatattataggatgttgtgcatttggctctgatgacagattcaaagaaaaaaatgtcaaagtattttgagcaataaccaac

SEQ ID NO: 423865 - DNA, 201 bp, Homo sapiens
gtgttcacctgtgcaaatatttgtggtcagcccagcctgctgctgccatgtcccttcggccgcctggggttgccgccggggctgcgttctggagaagagcmtgtctctcaaactccgaggtttaattcttttgctctccgcagggacaggcaccatctatgttcacctgcacagcacgcacacacaggttctatttacaaa

SEQ ID NO: 423866 - DNA, 201 bp, Homo sapiens
gcaaatgtcaaagggaactcttaacagcggttattccagggactaggacacttgcatgtgtcttaatctaattagagcaaatggcagatgttcttccaggyggctttcaggcgaggggccagaacatttttcttttctttctttctttttttctttttttttgagatggagtttttgctctgtcgcacaggctggagtgca

SEQ ID NO: 423867 - DNA, 201 bp, Homo sapiens
ccctgccagcttctggaacctctggaatgttctccaacagaacaaacagctctgcacctgatgttgagtctgatatcactcagctgtgttccaggtcagtkgcacatctgggtccacaatgccttccgggtcgggggcattacctgtggggccaggacaggccagacacaggccccacgggagggaaaccattgagagcag

SEQ ID NO: 423868 - DNA, 201 bp, Homo sapiens
tggcacagaaacacgggtgagccccaagccctgccagcttctggaacctctggaatgttctccaacagaacaaacagctctgcacctgatgttgagtctgrtatcactcagctgtgttccaggtcagttgcacatctgggtccacaatgccttccgggtcgggggcattacctgtggggccaggacaggccagacacaggc

SEQ ID NO: 423869 - DNA, 201 bp, Homo sapiens
gcacccagttaatttttaaattttttgtagaggtgaggtctccctacgttgcccaggctggccttgaaaccctgagcttaagtgatcctcccaccccggcytcccaaagtgctgggattacaggtgtgacccactgtgcccagccctaattccttccttaaacaattccttgtttcaagatcaactgaggggtatgtaagc

SEQ ID NO: 423870 - DNA, 201 bp, Homo sapiens
gtatctctttgacagaacagcctcatatagtagaaagaacaggagactttgaaaacacagaggtctagattcaaatcccagttccaacatttacttacatyatggctttgagaaaatttcttaatcttgttgggtctcaactatgaaataatacctcattaggttcttgtaaatattaaatgagatggtgtacctagtata

SEQ ID NO: 423871 - DNA, 201 bp, Homo sapiens
ccggcgcaccgtcttttggaatccagcgaccacagagacacacgcggctgtgagagcgcacggagacccctccccgcgcctgcggctgtcttgtccctctractcccaagaaggaagaaacgggaaccgggctccccctcccctcccccgagggctgagtctgagcgcgttgggggcggagccagtgagcggtgggggcgg

SEQ ID NO: 423872 - DNA, 201 bp, Homo sapiens
atatagagagggatgatagtcaagagacaaaaaaaaaaaaaaggaaaaaacacacatgcttatgatagttcatgtaagtaaatgtgaattgcttgttataktaaatggtgactgagagaacgtgaccctttcagatggcagggccctggctgtggaggacatgcctgccacctggggagcatctgtatactttagggagaa

SEQ ID NO: 423873 - DNA, 201 bp, Homo sapiens
tggtttgaaaggcaggacctcaggctcctcccaggccccttgaatcggaatccgcattttaacaagattcctgggtctgctcactcatgtttgagaagcayggctttagaagatgagaaatggaagctaaaatttaagcatgtctttttcattttctttttttgagacagagtctcgctctgttgcccaggctggggtgca

SEQ ID NO: 423874 - DNA, 201 bp, Homo sapiens
cagtgagccgagatcgtaccactgccctccagtctgggcgacagaacgagactccgtctcaaaaaaaaaaaaattagctgggcatggtggcaggtacctgkagtcccagctactcaggaggctgaggcaggagaattacttgaacccaggagacagaggttgcaatgagctgagatggcgccactgcactccagcctgggc

SEQ ID NO: 423875 - DNA, 201 bp, Homo sapiens
agggagggagtgggaatacacactgccctgctgtagggctccatggtctaataggtgcagtgggaccatgctggtgaggtgcacgggaggatggccctccrtggggcaccaggggggtgttcccttctggtgcatcagcgtctgtctgaattactgtagcaagttctgagctctgtagttggacagaccagagccacaagg

SEQ ID NO: 423876 - DNA, 201 bp, Homo sapiens
tgaccttccttgaaggggcgtagttgaataagttaagggatcagttctgtgcctttgtgctcagagctgcccagcaaccagggagggagtgggaatacacrctgccctgctgtagggctccatggtctaataggtgcagtgggaccatgctggtgaggtgcacgggaggatggccctccatggggcaccaggggggtgttc

SEQ ID NO: 423877 - DNA, 201 bp, Homo sapiens
tgatcagctggggtaacttttcttctctatcttggtagtatgctgaattaagaaaacagtaacacttctcattaaagggaaactagctttttatctgtggrtgagtagtaaaataaaattgtatttgaatgctaaatgcagtgttccactctgctcgtaaatgatctgctaactataggagaactttttatacattgctta

SEQ ID NO: 423878 - DNA, 201 bp, Homo sapiens
tatctcagtttactgcaagctccacctcccaggttcatgccagtctcctgcctcagcctcccaactagctgggactacaggcgcccaccaccacgcctggytaatttttttgtatttttagtagaggtggggtgtcaccatgttagccaggatggtctccatctcctgaccttgtgattcacctgcttcagcctcccaaag

SEQ ID NO: 423879 - DNA, 201 bp, Homo sapiens
gaagcccccgaaaacagtcggtcaaccaaaacagttaacacaaaactattgccagaaggatgccatactcaagtgttctgatgacgggaggcaagctccaycgtggggccgcagagaacaattgtggatcttgttctcctggtctctgctcccagcactccgtgagcgggccccgcgtgcagggggattgctggccagacc

SEQ ID NO: 423880 - DNA, 201 bp, Homo sapiens
aagggcaaatttgagctggaaaagtttctaaaagacagatttgtctgatggaaaagatgatcaagcttgactgtacaatggtataaaaaactcaagatctmattaatgagacagatattataggatgttgtgcatttggctctgatgacagattcaaagaaaaaaatgtcaaagtattttgagcaataaccaacatcatta

SEQ ID NO: 423881 - DNA, 201 bp, Homo sapiens
ctagagtgcagtggtgcaatctcagctcactgcagcctcgacttccctgggctcaggcaatcctcccacctcagcctcccaagtagctgggactataggcrcctgccactacacccagctcacttttgtattttttgtggtgacagggtcttgctacattgtccaggctggtcctgaactcctggcttcaagcaatcttcc

SEQ ID NO: 423882 - DNA, 201 bp, Homo sapiens
tcaggcaatcctcccacctcagcctcccaagtagctgggactataggcacctgccactacacccagctcacttttgtattttttgtggtgacagggtcttsctacattgtccaggctggtcctgaactcctggcttcaagcaatcttcctgccttggcttcccaaagtgttgggattataggcatgagcaactgtgcccag

SEQ ID NO: 423883 - DNA, 201 bp, Homo sapiens
aagtagctgggactataggcacctgccactacacccagctcacttttgtattttttgtggtgacagggtcttgctacattgtccaggctggtcctgaactyctggcttcaagcaatcttcctgccttggcttcccaaagtgttgggattataggcatgagcaactgtgcccagcctcaaagaagatcaatgtcttttttgt

SEQ ID NO: 423884 - DNA, 201 bp, Homo sapiens
tgcagtagcgccatcatagctcaccacagccttgaactcctgggctcaagcgattctcccccctcagcttccccagtagctgggactacaggcatgcatcrtcgtgcctggctcattttttcttttttttttttggagacagagtctcactctgttgcccaggctggagtgcagtagtacagtctcggctcactgcaacct

SEQ ID NO: 423885 - DNA, 201 bp, Homo sapiens
catcttgttagtcaggatggtctccatctcctgacctcgtgatccgcccgcctcggcctcccaaagtgctgggattacaggcgtgagccaccgcgcccagmccatctatgggtattttcttgatgtactacatgccaaatctatcattagatgtagatatattaattaattaattaattaattttgtagagacagggtctt

SEQ ID NO: 423886 - DNA, 201 bp, Homo sapiens
agggtctcactctgttcttccccacctctactaaaaaaccttgtctcatcaggcacggtggctcatgccagcactttgggaggctgaggcaggcagatcaygaggtcaggagttcgagaccagcatggccaacatggtgaaaccccgtctctactaaaagtacaaaattagccaggcatggtggcaggcgcctgtagtccc

SEQ ID NO: 423887 - DNA, 201 bp, Homo sapiens
ttagatattggatcagaaaggtacactttcagcttcaccattcgggattcaccagcacattttgtaaatgcagcttcctggggcaatgaagattacatcamgtctctttctgacagctttagggttggtgactgtggtaagttggcattgattcttaaactttttccatcatagtgttattcctgtggtatgtttatggta

SEQ ID NO: 423888 - DNA, 201 bp, Homo sapiens
gaggtcaggagttcgagaccagcatggccaacatggtgaaaccccgtctctactaaaagtacaaaattagccaggcatggtggcaggcgcctgtagtcccrgctacttgggagggtgaggcaggagaattgcttgaacccgggaggcagaggttgctgtgagctgagatcgcgccattgcactccagcctgggtaacaaga

SEQ ID NO: 423889 - DNA, 201 bp, Homo sapiens
aaagggctcttggtgggcacggcagtctacggcatttacactcgcatcaactgtgacccgttcccaccttcttttctgacctcatcttatgccagactctsaagcctcatttctctgtagccacagtgaatttctttatatttcatgaacaccgtgaactcattctgcactaagaacgtttgtatttccttttatttttat

SEQ ID NO: 423890 - DNA, 201 bp, Homo sapiens
gtgtttgggatggagtggtcatgatcagctggggtaacttttcttctctatcttggtagtatgctgaattaagaaaacagtaacacttctcattaaagggraactagctttttatctgtggatgagtagtaaaataaaattgtatttgaatgctaaatgcagtgttccactctgctcgtaaatgatctgctaactatagga

SEQ ID NO: 423891 - DNA, 201 bp, Homo sapiens
tggtttaagggacccaggaaaactgtcactatgtggctacctcaaggtggtacaattaagcgagcggctccaataagtcacccatccagacattcctggargagaagtgacctttgggctcctctctgtcttaggttcgggtcacaaatgtgactttaggcttagatcgaaaggcaccctcgtcttcaagcccacaacgct

SEQ ID NO: 423892 - DNA, 201 bp, Homo sapiens
gactcacagcttaaatgtcatcttcttcaaccttccccatctactctgtttgtggtagcgctaatggtcaattacttggattttgccctggcttttgtcascataacccaagtcaccgtctgagattgtttgattcattgttcttgggtctccccctcacatatgtgagcctcatgagatcaaaggtcttgtctgccttct

SEQ ID NO: 423893 - DNA, 201 bp, Homo sapiens
caaggcagtggcttgggagagaagtgatgagataggtaagtgaggccgagcagtggggaggaggtggggctgggttagagaactgctggggcacagagtgsaagggccgggagggactcggtgcaggagggagagctcctcagttcgggctcactgtgccagtgttctgcgtctgctccatgcagagctcagcaggggtag

SEQ ID NO: 423894 - DNA, 201 bp, Homo sapiens
atacatctgaaagaacattttgtactatgtatttgagtatttttattatcataatcaatagttatttgattaaacaaataatcatttgtttataattgaartgaaacttttcatgtaacacttatcaaaaggcagagaagcgattgaaactcttcatttgaaaaatgaaagcattggttttcccttagatattggatcaga

SEQ ID NO: 423895 - DNA, 201 bp, Homo sapiens
attagcaaaaccaatatgaaatttctattttggaaaaaaagtatttgctgacccctagtggtcctcattaagtagcacataatttgttttgaaataacttrttttaattatttttaaaatttattattttttttttgagacagggtctcactctgttcttccccacctctactaaaaaaccttgtctcatcaggcacggtg

SEQ ID NO: 423896 - DNA, 201 bp, Homo sapiens
ttggaatccagcgaccacagagacacacgcggctgtgagagcgcacggagacccctccccgcgcctgcggctgtcttgtccctctaactcccaagaaggargaaacgggaaccgggctccccctcccctcccccgagggctgagtctgagcgcgttgggggcggagccagtgagcggtgggggcggagccagtgagcggtg

SEQ ID NO: 423897 - DNA, 201 bp, Homo sapiens
aaaagatttctaaatggaagtaattaaaaacatgaagagctgagaaaatttttgtcagattcacctaagtccaatccttagcacatctaattatatatatwtttttcatacatagatatacacatctagggttttttctttctttttcttttttcttttcttttgagacggagtctcgctctgtcacccaggctggagtgc

SEQ ID NO: 423898 - DNA, 201 bp, Homo sapiens
catgtaaataagccccataaagaacaaagcctggccgggtgcggtggctcacgcctataacaccagcactttgggaggcagaggtgggaggatcgcttcakcccaggagttcgagaccagcctggggaacctagggagatcctgtctctacaaaaaatacagtaaattagctgggtgtggtgggggcacgcccgtagtccc

SEQ ID NO: 423899 - DNA, 201 bp, Homo sapiens
agaagtgttgccacttgcactgggtcacaggtgagactggacccagccagcctagttgcttcacttcatggttctcaactcttttctcttgtattctcccrcaagttaatgtgctcccgtttgtgtggttatatctactgatacttgctgtactgcagcttaatactgaaaaaattttaaaacattctagagcacacattc

SEQ ID NO: 423900 - DNA, 201 bp, Homo sapiens
acagagtgcaagggccgggagggactcggtgcaggagggagagctcctcagttcgggctcactgtgccagtgttctgcgtctgctccatgcagagctcagyaggggtaggaaaaacacagtccctgacctgaggcactaaggcagaacagccaggtccataagagagagaaacaaccagtcctcgggtttgtataacccct

SEQ ID NO: 423901 - DNA, 201 bp, Homo sapiens
gaatcagacagctctgaacgtgttctagccaatgtcagactaccacaacattccattgaaagggtacccacttattgttattgcccacttaaagtctttcmcagttttccctgatgttggtacttttttttctctcagtcttgaaattaaagtggttgatatgtccttccactctatattaaataaaatgttggttaaagt

SEQ ID NO: 423902 - DNA, 201 bp, Homo sapiens
atatacctctaacggtagcagacaaataagggaattcagagagataataggataccatgtcccaccaagagatgctgaggggtaaaaatgtggagaaatcscttggtgtgtaggtagttgtgtttgtacagaatattcagccactgagtcaaatgtctgactcatcctctcgactcacatgtctggcactttgggctgtaa

SEQ ID NO: 423903 - DNA, 201 bp, Homo sapiens
ttgtggtttaggaagatcactttgcttatggaggatggactgtaggggaatgaagcttagttaggatagcaaggcagtggcttgggagagaagtgatgagrtaggtaagtgaggccgagcagtggggaggaggtggggctgggttagagaactgctggggcacagagtgcaagggccgggagggactcggtgcaggaggga

SEQ ID NO: 423904 - DNA, 201 bp, Homo sapiens
caacccctggttgatttaaaaaaaacaaaaatttgtagagacagagtcttgctctgttgcccaggctggtctcaaactcctgggctcaagtgatcatcccrcctcatcctcctagagtgatgagattacaggcatgatgcttttatctttaaggtaaataaccaagctgtcatctggtacccatatcatttgtgcctgcac

SEQ ID NO: 423905 - DNA, 201 bp, Homo sapiens
acatcagaccaggccaaagaatgaatgaaaaacttgacgcagcttaattcccaaatgtttcttctggcactgaaaggccttgaatacaaaaactggtacaytggataatattgacaagcagggccatcattgactgtgagcctgtgaacgtcgaggcatcttgtatacactgtttctacttttcactgccaggtggatggt

SEQ ID NO: 423906 - DNA, 201 bp, Homo sapiens
tttttttgagacaaggtctcgctctgtcacccaggctggagtgcagcggcacaatcacagctcactgcagcctcaacttccctgggctcaggtgattgtcycacctcaggctcccaagtagctgggactacaggtgagccaccacccctggctattttttgtagagatgggatttcaccatgttgcccaggctagtctcaa

SEQ ID NO: 423907 - DNA, 201 bp, Homo sapiens
tttgtggtcagcccagcctgctgctgccatgtcccttcggccgcctggggttgccgccggggctgcgttctggagaagagcatgtctctcaaactccgagktttaattcttttgctctccgcagggacaggcaccatctatgttcacctgcacagcacgcacacacaggttctatttacaaagcgactaagaacaacacag

SEQ ID NO: 423908 - DNA, 201 bp, Homo sapiens
atgaaatcaaggaagccagattggggagatgagggattagtgcctgtgagcattcccagggtgctttatagtgcagacataaccgtcaagccagtactgcyaaagaaatggagtaatcaatcctttgccatctcatgaagctatgagtacagtatgtagtgtatcatttaaaacatacgctcacgctgctggtctgtaaca

SEQ ID NO: 423909 - DNA, 201 bp, Homo sapiens
ataccgagttatttcctttgtgactggtagccacaatgatggtctttgagctgggaaataatattttcatatttgtggtttaggaagatcactttgcttayggaggatggactgtaggggaatgaagcttagttaggatagcaaggcagtggcttgggagagaagtgatgagataggtaagtgaggccgagcagtggggag

SEQ ID NO: 423910 - DNA, 201 bp, Homo sapiens
ttcaatatttatacagtatatttaagaatgaaaattcagcctggatttaattcaaattagaagtaaaaattgctttatataacttttttaaaaacttacartgaactttgatatctttactaaagaaatgtgaggtcggacgtggtggctcatgcctgtaatcccagcactttgggaggccaaggcaggcggatcacctga

SEQ ID NO: 423911 - DNA, 201 bp, Homo sapiens
cgtgggccagggtggggactgcaccctgaagcactgccaggtacaacaaggcattgtctagacctctgatgcctgggtaccaaaggaactgatttcaaaartgtcttcaacccatcaaggcccctgagcagtttatccactgggggacactcaccttcatggtctgaaagtgtgagtttaaagtcttcaggctttagttct

SEQ ID NO: 423912 - DNA, 201 bp, Homo sapiens
gtcatattttttgtgggcagacactaacgtctattaccatatacctctaacggtagcagacaaataagggaattcagagagataataggataccatgtccmaccaagagatgctgaggggtaaaaatgtggagaaatcgcttggtgtgtaggtagttgtgtttgtacagaatattcagccactgagtcaaatgtctgactc

SEQ ID NO: 423913 - DNA, 201 bp, Homo sapiens
actaacgtctattaccatatacctctaacggtagcagacaaataagggaattcagagagataataggataccatgtcccaccaagagatgctgaggggtaraaatgtggagaaatcgcttggtgtgtaggtagttgtgtttgtacagaatattcagccactgagtcaaatgtctgactcatcctctcgactcacatgtctg

SEQ ID NO: 423914 - DNA, 201 bp, Homo sapiens
taagatataggggagaagaaggattcaaaggggaattggttcatgaccagcctgtccaagatggtgaaaccccatctctgctaaaactacaaaaattagcyaggcatggtggcaggtgcctgtcatcccagctactcaggaggctgaggcagtagaattgcttgaacctgggaggcagaggttgcagtgagccgagatctc

SEQ ID NO: 423915 - DNA, 201 bp, Homo sapiens
atactgcactttcccagagaatgtgtgtaacagatgttccaggtggctttaacaaatattcataattatggacaagctgcttcgtgcattaggtaacacartattttacaaataaaaagatgtaaaatccaaaaccaaaatccaaaaaccatgatgcatacaaaaataacacatgttgaagatttaactcattaattaatg

SEQ ID NO: 423916 - DNA, 201 bp, Homo sapiens
tgtatattcaaaccataagaaaaacctagataaattcgagaatttattatttctaatgcccagttcccagatgtgcataaggattcagctatcctaaaagyaaaggaaatagccaggggttttttcatattgtataaaggagttaccaaagacatcaaagaaaatagaccaacaaagaaaatatcctttaaggttaaatcc

SEQ ID NO: 423917 - DNA, 201 bp, Homo sapiens
aagcagttcacctgcctcaggctcccaaactgctgggattacagacatgagctactgtgcctggcctctttctttttttctttttttgagatggagtcttsgtctgttgctaggctggagtgcagtggcgcaatctcagctgactgcaacttccgccccctggattcaagcaattctctgcctcagcctcccaagtagctg

SEQ ID NO: 423918 - DNA, 201 bp, Homo sapiens
tgcaacagcaccagtcagtcctgaggcgtgcactctgctgctgttccaagagagaaaggctgcaggctgggatacgagaagggagggccccagcaaggaartgagactgggatggacctcgagggcttggcagagggagggaaggagggcaggcagaggactggtgtacgcagtttcagatgactcctgagaatggctgcg

SEQ ID NO: 423919 - DNA, 201 bp, Homo sapiens
aggtgcttggggagagctcctggcacagaaacacgggtgagccccaagccctgccagcttctggaacctctggaatgttctccaacagaacaaacagctcygcacctgatgttgagtctgatatcactcagctgtgttccaggtcagttgcacatctgggtccacaatgccttccgggtcgggggcattacctgtggggcc

SEQ ID NO: 423920 - DNA, 201 bp, Homo sapiens
agaatattcagccactgagtcaaatgtctgactcatcctctcgactcacatgtctggcactttgggctgtaaataaatattagttgaatggttgaatgagygaatgaatttgtcacagttcggcaagtgttttagatagtgacattgcattgtgagccacatcagaccaggccaaagaatgaatgaaaaacttgacgcagc

SEQ ID NO: 423921 - DNA, 201 bp, Homo sapiens
ctcacatgtctggcactttgggctgtaaataaatattagttgaatggttgaatgagcgaatgaatttgtcacagttcggcaagtgttttagatagtgacaytgcattgtgagccacatcagaccaggccaaagaatgaatgaaaaacttgacgcagcttaattcccaaatgtttcttctggcactgaaaggccttgaatac

SEQ ID NO: 423922 - DNA, 201 bp, Homo sapiens
gcctagaacccagctaggccactgtggtagcaggccaccaccagagtctactcactgcattgggagttccctttcgccaggctgggcccagtcgtctgcasctgaaccaaagcatgttgctggccagagctcctgggctaatttcaggaccatcagagtaaaggggcacttctgtcttcagctccccttggaccttggctc

SEQ ID NO: 423923 - DNA, 201 bp, Homo sapiens
atcaatcctttgccatctcatgaagctatgagtacagtatgtagtgtatcatttaaaacatacgctcacgctgctggtctgtaacaaagcatcagcagtgmcagaattataaagcaatgtgtgcttttgaccaaaccattatcagcatttttaaaagatagaattactatgaggaatggtgtaaaatactgagactctggt

SEQ ID NO: 423924 - DNA, 201 bp, Homo sapiens
cccaaatgtttcttctggcactgaaaggccttgaatacaaaaactggtacactggataatattgacaagcagggccatcattgactgtgagcctgtgaacrtcgaggcatcttgtatacactgtttctacttttcactgccaggtggatggtatccacaatttaaggatgaggaaattaatgtttagtaatgttaaaacac

SEQ ID NO: 423925 - DNA, 201 bp, Homo sapiens
tttaccaaatttcagaaggcatcacttaaaatgtgtgaattagaaaaaagtagttattaaaatacttgctaaaattataaaaatgaaatacacggtttttyaccaggcacagtggtcacgcctataatcccagcagtttgggaggctgaggtgggcggatcacctgaggtcaggagtttgggaccagcctaaccaacatgt

SEQ ID NO: 423926 - DNA, 201 bp, Homo sapiens
ttaccaaatttcagaaggcatcacttaaaatgtgtgaattagaaaaaagtagttattaaaatacttgctaaaattataaaaatgaaatacacggtttttcrccaggcacagtggtcacgcctataatcccagcagtttgggaggctgaggtgggcggatcacctgaggtcaggagtttgggaccagcctaaccaacatgta

SEQ ID NO: 423927 - DNA, 201 bp, Homo sapiens
gttgggcgtggtggtatgcaccagtaatcccagctacgtaggaggctgaggcacaagaatcacctgaatctgggagacggaggttgcagcgagctgagatygtgccactgcactccagtctgggcaacagagtgagactctgtctcaaaaaaaaaaaaaaaaaaacagaaaagaaaaaaaattactggaagccccaaagag

SEQ ID NO: 423928 - DNA, 201 bp, Homo sapiens
caccagtaatcccagctacgtaggaggctgaggcacaagaatcacctgaatctgggagacggaggttgcagcgagctgagattgtgccactgcactccagyctgggcaacagagtgagactctgtctcaaaaaaaaaaaaaaaaaaacagaaaagaaaaaaaattactggaagccccaaagagcttttgtgtgtgaattat

SEQ ID NO: 423929 - DNA, 201 bp, Homo sapiens
gaatctgggagacggaggttgcagcgagctgagattgtgccactgcactccagtctgggcaacagagtgagactctgtctcaaaaaaaaaaaaaaaaaaamagaaaagaaaaaaaattactggaagccccaaagagcttttgtgtgtgaattatatccaaggctggctacataaataatcttcagggcctagcacaaaatg

SEQ ID NO: 423930 - DNA, 201 bp, Homo sapiens
gctggagtacagtggcgcgatcttggctcactgcagactctgcctcccgggttcaagcgattctcctgcctcagcctcccaagtagatgggattacaggcrcctgccaccacgccaggctaatttttgtattttttagtagagacagggtttcaccatcttggccaggctggtctcgaattcctgacctcatgatccaccc

SEQ ID NO: 423931 - DNA, 201 bp, Homo sapiens
agtcttgctctgttgcccaggctggagtgcagtggcgtgatgttggcttactggctcactgcagcctccaccttccgggttcacgccattctcctgcctcrgcctcctgagtggctgggactacaggtgcgcaccaccgcatccagctaattttttgtatttttagtaaagatggggtttcaccgtgttagccaggatggt

SEQ ID NO: 423932 - DNA, 201 bp, Homo sapiens
ctgggactacaggtgcgcaccaccgcatccagctaattttttgtatttttagtaaagatggggtttcaccgtgttagccaggatggtctcgatctgctgamctcaggtgatccacccgccttggcctcccaaagtgctgggattacaggcgtgagccacctcgcctggcccatcctttttttgttttgtttttttgagaca

SEQ ID NO: 423933 - DNA, 201 bp, Homo sapiens
gcgcggagccgcttctctccgggctctcggggcaggggttcggacttggaaaggggtctgtgccccgcccatcccggggcccctcctttgccccgcccccmggaccgccttccccattcattctctcctacggggtgtctcctgcgcccccttctggtctcgtgtttggggtctctgcttccggtcacccaaaccctgggg

SEQ ID NO: 423934 - DNA, 201 bp, Homo sapiens
aggctgaggcaggagaatcgtttgaacctgggaggcggaggttgcagtgagcagagatggtgccactgcactccagcctgggctacaagagcaaagctccrtctcaaaaaaataaataaataaataaaattctgtattaacatagctagatctatttcttccaggctctcccaatgccgaagaggttaactaaaagtctag

SEQ ID NO: 423935 - DNA, 201 bp, Homo sapiens
atttgctgaagacctcctcgtttctacatagtaccttttcctctcccgtatcttcatttgttgggtcactgaggtttagaggtgtgaagggaagaggaccytaatacaactttcagcttgagttttctccctgatggagccacccttcgctaccttctcccgtgatggtgatagaaattgaggggtctaaggtgggaaaag

SEQ ID NO: 423936 - DNA, 201 bp, Homo sapiens
gacacacacactcctgtagtcccaactacttgggaggctgaggtgggaggaattgcttgagcctgggaggtggagactgcagtgagtcaaggtccagctaytgcactccagcctgggtgacagtgacctcatctcaaagataaataaaataaaatgcaaataatgtttctgtgcacaaattttgagaaacactgtaaacca

SEQ ID NO: 423937 - DNA, 201 bp, Homo sapiens
gtcttcctttcctatgaatcatttcctgttgttgctgtcaccttttcttccttgagggaaatgattatgatcattatttcagggtcattcctccagctctmatcttctctttgttatattttctctgtgttggaaaccacatccaggtcttattttggccctgagatcatccgcaggctgagacctgtgacttagatctct

SEQ ID NO: 423938 - DNA, 201 bp, Homo sapiens
tttattgctgacagacttaaggaaatagattgagaattaaaaaacggcagatgtgagaaaatgacaaagcttaaaaagattcttacagtagcagtccccartctctagtttttgactctctgcaagatattatctgaaagtcctgatattttgcccttggtttttatttctaggggtgggaaccgccaaacctctcccttc

SEQ ID NO: 423939 - DNA, 201 bp, Homo sapiens
cattacagtctatctttagtcctcctaaaccttcagctataatctctatgcaatcaacttaaatatatgtttgtagtattgtccctttctcccaaattccrtgtaaaacacttgcctgaattgaattgtttccacaaagttgttttcccctgtggactttgtttatatcagtagtttttattttcccaattttccaaattc

SEQ ID NO: 423940 - DNA, 201 bp, Homo sapiens
tgaggttttcctgattatctcctgtcatctcttaggatacttacaacactcttacttttgtcttatgctttgcttgcctaatttgcccacttcctccttayttagtctgtaaattttttgaaaattgggaccatcttactcatcttgataaccctattggcacttacggtacttttcttctaggaggcttttttttttttt

SEQ ID NO: 423941 - DNA, 201 bp, Homo sapiens
ctcctgtcaccccatccaggcctgaaggtggtgaaccaggcctctccaagacagccaaacgtaacctgaagcgaaaggagaagaggcggcagcagcaagakaaaggagaggcagaggccttgagcaggactcttgataaggtgtccctggaagagacagcccaactccccagtgctccacagggctctcgggcagccccca

SEQ ID NO: 423942 - DNA, 201 bp, Homo sapiens
gcctctccaagacagccaaacgtaacctgaagcgaaaggagaagaggcggcagcagcaagagaaaggagaggcagaggccttgagcaggactcttgataargtgtccctggaagagacagcccaactccccagtgctccacagggctctcgggcagcccccacagctgcatctgaccagcctgactcagctgccaccactg

SEQ ID NO: 423943 - DNA, 201 bp, Homo sapiens
cacaagcagtgctcccaccatggccttccaaagtggtgggattacaggcatgagccactgcacccagcctagtttttcttttttctttttcttttttttttgagacggagtcttgctctgtctccagtcacccagactggagtgcagtgacgcgatctctgctctgccaactgggctcaagctattctgcctcagcctccc

SEQ ID NO: 423944 - DNA, 201 bp, Homo sapiens
aggggtaccccccatactggcttacttccacctcctgcggcccagctctgtcctccagagcctagcgtctccctcaatccttcccttttcttcccaacttytactttttggactttccccctcccattcccagtgttcaaaatctcagtgactaccccaggtacctttgctgctgatttgggtgtcttgtttaaaagaaaa

SEQ ID NO: 423945 - DNA, 201 bp, Homo sapiens
taatcccagcactttgggaggctgaggctggaggattgcttgaggccatcctaagcaacatagcaagacctcttatctacaaaaagatttaaaaaaaaaaygagctgggtaaggtggcacacacctgtggtcccagctactcagggagcctcagaggggaagattgagccagggaggctgaggctgcattgagccgtgatt

SEQ ID NO: 423946 - DNA, 201 bp, Homo sapiens
gctgggattacaggtgtgagccaccttgccttgccaatttttgtatttttagtagaggcagggttttgccatattggccaggctggtctggaactcctggmcttgtgtgatccacccacttcaacctcccaaattgctgggattacaggtgtgaaccgccgcatctggccttaaaaatcttttttctttatttttacaaaa

SEQ ID NO: 423947 - DNA, 201 bp, Homo sapiens
agggggtccctgagactctttcagaaggtctgcaagcaaaactattctcataatcatgcttatttatttgtctttttcatggggttgactttgcaccaatrgtgcaaaagacatggttggtgaaactgctggccctgtaagcatgcatttgtcagggcagtggcaccaaattatactaatcattttgttcttcactgccac

SEQ ID NO: 423948 - DNA, 201 bp, Homo sapiens
ccaccactgagaaagccaagaagataaagaacctaaagaagaaactccggcaggtggaagagctgcagcagcggatccaggctggggaagtcagccagccyagcaaagagcagctagaaaagctagcaaggaggagggcgctagaagaggagttagaggacttggagttaggcctctgaggcctttggggaatagggaatg

SEQ ID NO: 423949 - DNA, 201 bp, Homo sapiens
cacttgaatctgggaggaggaggttgcagtgagccgagactgcaccattgcactccagcctgggcaacaagagcgaaactccatctcaaaatcaatcaatmaataaataaaataaaatagtaccatactctatatcagcgattctcaaagtgtggttcaggacccttaagggggtccctgagactctttcagaaggtctgc

SEQ ID NO: 423950 - DNA, 201 bp, Homo sapiens
gcacccagccaaatatttgtttctagagcagagagtatggtggctttatgctaagaggctgaaaactagcaagaggtaaatcaagaaggcctttttttttkcccccctcttgcggagttttgctcctgttgcccaggctggagtgcgatggcacgatcttggctcactgcagcctctgcctcccaagttcaagcaattctc

SEQ ID NO: 423951 - DNA, 201 bp, Homo sapiens
acgatcttggcttactgcaacctctgcctcccgccttcaagggattctcttgcctcagcctcctgagtagctgggactgcaggcatgtgcctccatgcccrgctaattttttctatttttagtggagatggggtttcatcgtgttagccaggatggtctccatctcgtgacctcgtgatccacccacctcggcctcccaaa

SEQ ID NO: 423952 - DNA, 201 bp, Homo sapiens
ttgccaccacacccagctaatttttgtgtttttaatggagatggggtttcaccatgttggccaggctggtctcgaactcctgaccttaagtgatccactcrcctcagcttcccaaagtgctgggattacaggtgtgcaccactgcgcctggcctccaatttttttttttttttttcccagacgaagtctcgctctgtcacc

SEQ ID NO: 423953 - DNA, 201 bp, Homo sapiens
tcctcgtgtactggtgtgtatgtatctatggtatgaattcctaaaagttgacctatttttttaagttccatctaaataaaatttctcctttacaacatccrctattgtcatttctcctccccgtggtttttgtgtctttttagcctcttgttcatttactgcctttcatgttcccatgctattgccttggttttttaacaa

SEQ ID NO: 423954 - DNA, 201 bp, Homo sapiens
ttttaccccaaaacatgtttcttgccgtatcttaaaatggctctgcaaagccgacctttgtaggggaaactgcatctgtaaaaaatctctattaacaggcygggctcagtcactcacacctataatctcagcactttgggaggccgaggcgggtggatcacatgaggtcaggagttcaagaccagcttggccaacatggca

SEQ ID NO: 423955 - DNA, 201 bp, Homo sapiens
attcctatctaaggggtctggggagtcatgccctacaaaccataagttctcatcagatgggttatttaaccctgtatctcccctcccctcccctccccttytcttttcttgatggagtttcgctcttgtcacccaggctagagtgcagtggcgcagtctcggctcattgcaacctccccctcctgggatcaagtgattctc

SEQ ID NO: 423956 - DNA, 201 bp, Homo sapiens
taaatcaagaaggccttttttttttcccccctcttgcggagttttgctcctgttgcccaggctggagtgcgatggcacgatcttggctcactgcagcctcygcctcccaagttcaagcaattctcctgcctcagcctcccaagtagctgggattacaggcgtgagccaccacgcctggcctaatggaaatttttaacagaa

SEQ ID NO: 423957 - DNA, 201 bp, Homo sapiens
ttagtggagatggggtttcatcgtgttagccaggatggtctccatctcgtgacctcgtgatccacccacctcggcctcccaaagtgctgggattacaggtrtgagccaccatgcccggccatcacctacctacctttatttaaaactgttggtctccatggcttagcatgtcctggtcttcctttcctatgaatcatttcc

SEQ ID NO: 423958 - DNA, 201 bp, Homo sapiens
catgtgtttaacctcttgaagactgtttccttggctgtaaatgatgatatctatctatcgtttagatttaacaggatgatgtatacaaagttcctcctgtwatgtagctacttattaataaatactctttactaatcattcttaaatactgagttttccactgctaggattttgcttttgttgttcctcttatcccctttc

SEQ ID NO: 423959 - DNA, 201 bp, Homo sapiens
gtagctgggactgcaggcatgtgcctccatgcccggctaattttttctatttttagtggagatggggtttcatcgtgttagccaggatggtctccatctcstgacctcgtgatccacccacctcggcctcccaaagtgctgggattacaggtgtgagccaccatgcccggccatcacctacctacctttatttaaaactgt

SEQ ID NO: 423960 - DNA, 201 bp, Homo sapiens
gcatcagacttgagttcaggttacagatatgtgctacctttgggatcttgaccatgtcttttttttttttgagctggagtctcactctgtcacccaggctrgagtgcactggtgtggtttcagctcactgcaacctctgcctcctgacttcaagcaattctcctgtctcagcctcccgagtagctgggattacaagcatgt

SEQ ID NO: 423961 - DNA, 201 bp, Homo sapiens
ttctctgaaactcttgacatcctttgtttcctgcagatatgaaaacaagtatgtgaagtttttcaagagtaaaccagagttgcccccagggctaagccctsaggccactgctcctgtcaccccatccaggcctgaaggtggtgaaccaggcctctccaagacagccaaacgtaacctgaagcgaaaggagaagaggcggca

SEQ ID NO: 423962 - DNA, 201 bp, Homo sapiens
gagaagaggtttcaccatgttgcccaggctggtcttgaactcctggatgcaagcgatctgcctgcctcagcctcccaaagtgttgggattagaggcatgarccaccacgcccaacctcagactactttctttttttctttttttgagaccgacttttgctgttgttgcccaggctgtggagtgcaatggcctgacctcggc

SEQ ID NO: 423963 - DNA, 201 bp, Homo sapiens
tagttagagatggggtttcaccgtgttggccaggctggtctcgaactcctgacctcaggtgatctgcctgccttggcctcccaaagtgctgggattatagrcgtgagccaccatgcctggcccccagcctagtttttctaagcacatatgcatatataacattaaggtaaaatgacatattttgaattatactgttaagat

SEQ ID NO: 423964 - DNA, 201 bp, Homo sapiens
ttttagttagagatggggtttcaccgtgttggccaggctggtctcgaactcctgacctcaggtgatctgcctgccttggcctcccaaagtgctgggattayagacgtgagccaccatgcctggcccccagcctagtttttctaagcacatatgcatatataacattaaggtaaaatgacatattttgaattatactgttaa

SEQ ID NO: 423965 - DNA, 201 bp, Homo sapiens
aaacaattaaaaaaacacactatttggcatttttctgcccaggagatttttttcttttcctttattaatttatgtatatcaatatggacttatagatgtgkattttatatgttaggttataatccaatactattttatttgctttattgctcaaatgttccagttttgaacattgggaactcttttagttttttacttggc

SEQ ID NO: 423966 - DNA, 201 bp, Homo sapiens
tttgtctgatgtatttctcatgattagatttgggttatgtgttttggggaggaagaccacagaggtaaagtgacattttcatcacattgtatcagggtacrtagtatcacaatgattttttactgttaatatttttgtttttttgagacagggtcttccctctgttgcccagactggagtgcggtgatgccatcatggctc

SEQ ID NO: 423967 - DNA, 201 bp, Homo sapiens
gatgcagacttgctatgttgcccaggctggttttgaactcctggccttaagtgatcttcccacctcagtctgccaaaatgttgggattacaggtgtgagcmtgcacctggccccagatttctcgaatatgaagaaatctcctgatatttctgtttccttgctgcctatttgttcttaactctttgcagtcattatttctag

SEQ ID NO: 423968 - DNA, 201 bp, Homo sapiens
tttttcttcacagccagattttgtttgtttctttctttttttaaaaatgaagcgatgcagacttgctatgttgcccaggctggttttgaactcctggcctyaagtgatcttcccacctcagtctgccaaaatgttgggattacaggtgtgagcatgcacctggccccagatttctcgaatatgaagaaatctcctgatatt

SEQ ID NO: 423969 - DNA, 201 bp, Homo sapiens
ttttccaagtcacccttttattatgctagattaaatactctgaaacactgctttgtataaaggattcattcatttattcaaagccctaagacaatacttcrcataaaggattaattcatttgacaaatatttgttgagtgcatgccatgtgccagatattaaaatctttaactggtattcaaggtctgaacattccagccc

SEQ ID NO: 423970 - DNA, 201 bp, Homo sapiens
atggtgaaaccccgtctctactaaaactactaaaattagctgagtgtggtggcatggtggcgtgggcctgtcatctcagctactcgggaggttgagacagsagaatcgcttgaacccaggaggcagaggttgcagtgagctgagttcgcaccactgcactccagcctgggcgacagagcgagactctgtctcaaaaataaa

SEQ ID NO: 423971 - DNA, 201 bp, Homo sapiens
gatcaactgaggtcaggggttcaagaccagcctgaccaatatggtgaaaccccgtctctactaaaactactaaaattagctgagtgtggtggcatggtggygtgggcctgtcatctcagctactcgggaggttgagacaggagaatcgcttgaacccaggaggcagaggttgcagtgagctgagttcgcaccactgcactc

SEQ ID NO: 423972 - DNA, 201 bp, Homo sapiens
tatatatatatatatatgtataaaaccaagccgtacctcaagcacctagggcacatgttctcaggacctcctaaggtcagtgtcagaggccatggtcactyatatttggctcagaatctctaaaaatattttacagagtttgactcttttcatcaacacaggtcaccctcctgagtagctggtagcacaggtacatgccac

SEQ ID NO: 423973 - DNA, 201 bp, Homo sapiens
ttactaaagagtaatgttaaaaactaagatctgatcactaggtgtttttatttctatgggagtatttttttttatttatgggagttttatttttttatgawtatttttattatcatcttttacttctctcttgccctcctcatgtatatcagttatcaaaatatcattcttttattcctactgctgttacccttatcccat

SEQ ID NO: 423974 - DNA, 201 bp, Homo sapiens
gaagaggttaactaaaagtctagcaccttttaaagaactgaataggaaacgtttgtcatctgttgtctctaagggtagccaccataagacttcaaaagaaycttggtctccacaatcttttatctgaacctgaacctttctatcgatctcaggcctttagacaaactcaaccaattgtcaaccagaaatgtttaaatttac

SEQ ID NO: 423975 - DNA, 201 bp, Homo sapiens
ctgagcttgatagcttccatgtacttaaatactttagtgatgagattaatgaatatgatctcttttaaatattgtataataggccaggcacggtggctcayacctgtaatcccagcactttgggaggctgaggcaggcggataatgaggtcaggagattgagaccattctggctaacattgttttaccccgtctttattaa

SEQ ID NO: 423976 - DNA, 201 bp, Homo sapiens
ggaccctcacgggcccttagcttttctccagcagttggaccactcatatctcttttaggttcttcaggcttgggggcttctacactctcatttccctccarttcctgccctccttcttttcccctcccccatctcagctatacttggtttctgccctaccccagtcccgttttcattatttttctcgaagctttatttgct

SEQ ID NO: 423977 - DNA, 201 bp, Homo sapiens
acacttaggtgaaaattagaattttggaaaacttatttattttatattatatataataatatatatatctattagatatatataataatatatatatctawtagatatatataataatatatatatctattagatatatataataatatatatatctaatagatatatatatatctaatatataatatatatatctaatat

SEQ ID NO: 423978 - DNA, 201 bp, Homo sapiens
agagacaaggtcttgctctgttgcccaggttagtgtacagtggcacagtcatagcttgctgtagtcttaactgttggggtcaagcaattctcctgcctcckcctcctgagtagctggtactagtactacaggcatgcgccaccatggctggctaatttttgaatttttttatagagctatgttgcccaggctgttctcaaa

SEQ ID NO: 423979 - DNA, 201 bp, Homo sapiens
gtttgatatgtattaacagtttggtatgtgtccttgcacacctttttctttgtccctgtacacagactacatgtctttaagtgttgccctttactccaacragaatagtaccatactggctgggtgcggtggctcacacctgtaatctcaggactttgggaggccgaggcgggtggatcacctgaggtcgggagtttgcta

SEQ ID NO: 423980 - DNA, 201 bp, Homo sapiens
ccactaaccatacacagctaatttttgtatagttcgtaaagacaggggtctccctatgttgctcaggctggtcttgaatgcctgggctcaagggatcctcycatcttggcctcccaaagtgctgggattacagccatgagccactgtgcctgacctttcgctatttattgataatgcttatcatattcatatgattatctc

SEQ ID NO: 423981 - DNA, 201 bp, Homo sapiens
aagtctcgctctgtcaccaggctggagtgcagtggctcaatctcggcttactgcaacctccaaccccctgtttcaagtgattctcctgcttcaacctcccragtagctgggattacaagcgcatgccgccgtgcccggctaatttttttttttttttttttttgtatttatgtagagacagggttttgtatgtagagacag

SEQ ID NO: 423982 - DNA, 201 bp, Homo sapiens
cagcagtcaggaggggtaccccccatactggcttacttccacctcctgcggcccagctctgtcctccagagcctagcgtctccctcaatccttcccttttyttcccaacttctactttttggactttccccctcccattcccagtgttcaaaatctcagtgactaccccaggtacctttgctgctgatttgggtgtcttgt

SEQ ID NO: 423983 - DNA, 201 bp, Homo sapiens
ggccaccctgatcctcagcctggcctttgcctccctccactcggcttgctcggcaggtagcgttatgagctttattcatggccaggctgggaagggggagrgaaggagggaagagaggtgggagggaaagaaggaggagggggaagattctttggccagggttggtcctgcgcaaaggaaggaggaaacagaactttctca

SEQ ID NO: 423984 - DNA, 201 bp, Homo sapiens
caaaaaacatttcaaaatctatgcctgggaatagcttttgccagtgcctcagactatctcctatcttttcttccagaagcaagcagcagcaacagctcaascttgaccgctcaccacccagaccctgggaccctggagcagtgcctcagtaagcttctcctgccaactgctctaaccccagaactggccctcagcctggga

SEQ ID NO: 423985 - DNA, 201 bp, Homo sapiens
ggcactggaaatgctgggttatctccccattttcctgtggaggctggaaggctgatctacatcccctgccttgccctgccattccgggttctgcaactcayggcagagggaccttggttaccatcttctgctcctggctttgatcttgttctcagccacctcagaacaccaccacactctctatgccctgcaacactcctg

SEQ ID NO: 423986 - DNA, 201 bp, Homo sapiens
caccctcctgcctccccgggcactggaaatgctgggttatctccccattttcctgtggaggctggaaggctgatctacatcccctgccttgccctgccatkccgggttctgcaactcacggcagagggaccttggttaccatcttctgctcctggctttgatcttgttctcagccacctcagaacaccaccacactctcta

SEQ ID NO: 423987 - DNA, 201 bp, Homo sapiens
gtttcttcttcttcttcttcttcttcttttttttttttttttagacggagtttcactcgtcacccaggctggagtgcaatggtgtgatctcagctcactgaacctccgcctcctgggttcaagcaattctgctgccccagcctcccaagtagctgggattacaggcatgcaccaccacgcccggctgcttttgtattttta

SEQ ID NO: 423988 - DNA, 201 bp, Homo sapiens
ccaccctcctgcctccccgggcactggaaatgctgggttatctccccattttcctgtggaggctggaaggctgatctacatcccctgccttgccctgccaktccgggttctgcaactcacggcagagggaccttggttaccatcttctgctcctggctttgatcttgttctcagccacctcagaacaccaccacactctct

SEQ ID NO: 423989 - DNA, 201 bp, Homo sapiens
atcccagcattttcggaagatgaagcaggtggatcacctaaggtcaggagtttgagaccagcctgaccaatatggtgaaaccctgtctctattaaaaatasaaaaaaattagctggatgtggtggcatgcgcctgtagtgccagctactagggaggctgagacaggagaattgcttgaacctgggaggcagaggttgctgt

SEQ ID NO: 423990 - DNA, 201 bp, Homo sapiens
tgagacaggagaattgcttgaacctgggaggcagaggttgctgtgagccgaaattgcaccactgcactccagcctgggcaacacagtgagactccctctcaaaaaaaaaagagaaagttccactttattttgtctggttccctttatcctgccctcattgaatgaccgaatgcattaacttaggcacttaaaacgaaggat

SEQ ID NO: 423991 - DNA, 201 bp, Homo sapiens
ttcacctttaagcttcagttacttttacaagggaaagaagaaagagcgggagaaccaaataaggcaagccagtgctgcccttgcatgtcactcccaagggsccctgggctgtgcccaggtaactcctctctcaagatagtccctctgtaatgtatcctgttttaacctttcttctaggcaccaagggaggtgcacaagaaa

SEQ ID NO: 423992 - DNA, 201 bp, Homo sapiens
aggagaattgcttgaacccagaaggcagaagttgcagtgagctgagatcatgccattgcactccagcctgggcaacagagtgagactctgtctcaaaaagaaaaaaaaaaaaaaaggaagggtattagggaataatacatagaggttaagagtatggcttcagagtcctgcagacttgcgtttgagttcttctgccatctt

SEQ ID NO: 423993 - DNA, 201 bp, Homo sapiens
agcactttgggaggcccaggtgggtggatcacttgaggccaggagttcaagaccagcctggccaacatggcaaaacccagtctctactaaaaatacaaaamattagctgggtgtggtggtgcgtgcctgtaatcccagctacttgggaggctgaggcaggagaattgcttgaacccagaaggcagaagttgcagtgagctg

SEQ ID NO: 423994 - DNA, 201 bp, Homo sapiens
tgctgggttatctccccattttcctgtggaggctggaaggctgatctacatcccctgccttgccctgccattccgggttctgcaactcacggcagagggaycttggttaccatcttctgctcctggctttgatcttgttctcagccacctcagaacaccaccacactctctatgccctgcaacactcctgctcccaaaacc

SEQ ID NO: 423995 - DNA, 201 bp, Homo sapiens
agtagagacagggtttcatcatgttggccaggctgttcttgaactcctgacctcaggtgatctgcccacctcggcctcccaaaatgctgggattacaggtstgaaccactgcacctggcctcttcctcatcttataaggaccccgccatattggattagggcccacccataggacctcatttaagcttaactgcctcttcg

SEQ ID NO: 423996 - DNA, 201 bp, Homo sapiens
gggctgtgcccaggtaactcctctctcaagatagtccctctgtaatgtatcctgttttaacctttcttctaggcaccaagggaggtgcacaagaaactatragacttagtctcatcatcaacattttcagaagcaagtgcataaccttctcaccaaaaccaggttatctgcttctgtccctggcttgagtcctgggcttaa

SEQ ID NO: 423997 - DNA, 201 bp, Homo sapiens
gttgcagatgatacacctgttctactcgctgtccagcatgagaagcatgtcactgtgtggcagctgtgtcccagccctatggagtcaagcaaatggctgaygtctcagacttgtgagattagaggatcactacctatccttccccagggctgtgtgtggcacccaaaatgtgctattctgactgtgttgactgctcaggat

SEQ ID NO: 423998 - DNA, 201 bp, Homo sapiens
gaggctaaacaccaaattgttaatgatgcttttatcaaggctttgaaatgttggaaaggaggaggagctaaaggggctggcactgagtaggagggaacagtttttttttttttttggagatagagttttgctcctgtcgcccaggctgaagtgcaatggtgcaattttggctcactgtaatctctacctcctgggttcaag

SEQ ID NO: 423999 - DNA, 201 bp, Homo sapiens
tgtggactcacaggttgctatagctactgagcttccattggataagatctgtggcttaaatgcatctgaaacctttaatatcccacctaacagtaaagacrtgactccgtatgctttaccagttattggtgaagtacgctctatggataaagaggcaactgattctgaaacaaattctgaagtatcagtttcttcttccta

SEQ ID NO: 424000 - DNA, 201 bp, Homo sapiens
ggttaggaaagaagtgagggcccattttgtggttcaagtgcactagacagctgctggggtaggaagcacaggcaatgtctgtaatcagctgtgggagagcrgtgactgagaacagtctgaggcctggctccacttggaagtatctggggtgcgatgaaatcacaattatcttgaagcctaaagagggaactacaagactgt

SEQ ID NO: 424001 - DNA, 201 bp, Homo sapiens
gtttaccaagatggagctgggttaggaaagaagtgagggcccattttgtggttcaagtgcactagacagctgctggggtaggaagcacaggcaatgtctgyaatcagctgtgggagagcagtgactgagaacagtctgaggcctggctccacttggaagtatctggggtgcgatgaaatcacaattatcttgaagcctaaa

SEQ ID NO: 424002 - DNA, 201 bp, Homo sapiens
gcctcagcctcccaaagtgctgggattacaggcatgaggcaccacacccagcctgccctgccttccttgcctttgaaacatgctctggttaatggttcagsagtttctcaagctaaaaatctgggtgttatccttaattcttttttcctcctcactacttatatcctatcgatatcactgtctattccatctgccttaaaa

SEQ ID NO: 424003 - DNA, 201 bp, Homo sapiens
tattaattgcctactatatacccaggcctagtataggtgccaaaacatatggaaaatatgcaccctgcccttagggaacttacagcctagctggaaaagtyaaatgtacatatgaaaaaataagaaaagacttacaaagcagtgtataacaactgcaaggaagtaacagaaagcctcatttatttctgttgcactaaaatg

SEQ ID NO: 424004 - DNA, 201 bp, Homo sapiens
ttatatttttaaaaactaaggttaaaacaaccatgtttggccaggcacagtggcttaaacctgtaaccccagaactttgggaggccgagatgggtagatcrcttgagtccaggagttcgagaccagcctgggcagcatggcaaaaccctgtctctaccgaaaaatacaaaaattagccagccgtgatggcacccacctgta

SEQ ID NO: 424005 - DNA, 201 bp, Homo sapiens
accgtgatacaaagttgcacagtataactgaaaaagtttgacagccaaactatgcatagaagagtctagagggattagtcataattttctttggatgaatrttttttcgttaactcttcttaatttttttcttgtgtatgatttttgtttccaaataagtgtaaagaacttgaaatcattttatagtggaaatacaataaa

SEQ ID NO: 424006 - DNA, 201 bp, Homo sapiens
aaccttttccttatataatagagatactcctccagttataaaaaaggttatgttgctgggctccatggctcacgcctgtaatcctagcactttgggaggcsgaggcaagtggatcacctgaggtcaggagttcgagaccagcctggccaatgtggtgaaaccctgtctctaacaaaaatataaaaattagctgggcatggt

SEQ ID NO: 424007 - DNA, 201 bp, Homo sapiens
aggctcagtacagttcagcagacttttggcctttctctcattgaaatgctacatggtaggtcgtgctcagaaattgaccctagctaacatccttgcctccmccaccatctgttttaactatgccggtaatgaaaatgagggataccaaccattcagtaattcactggatagttaacaagtaatctattattattattatta

SEQ ID NO: 424008 - DNA, 201 bp, Homo sapiens
cttttagtgttattagttgtattctaggagagccagttcctagtgatgaagaaccctgaggaaagagtagaacaaaaggaaaaataaggctgttttgttcrgattttttagttgtgttaaataatgcagcaaagagctccttaaaactgaagtccagttgattagtggtaatagataagaattttttaaaaaactatttac

SEQ ID NO: 424009 - DNA, 201 bp, Homo sapiens
taatacccagtcttcccaataccccattctctgtaaaatcttacaaggattgagttgaatattatcaactactatattccttcactcagaaaaaaaaattygtagtcatatgtttcatcataagaataatatatactaaattgcctgtgtatttatttttatttgcagattcccactggattcttctctctgctgacagtg

SEQ ID NO: 424010 - DNA, 201 bp, Homo sapiens
cctcctgcttcagcctcctgagcagctgagactacaagcacatgccaccacacttggctaattttttttttttttagcagagacaggatcttgctatgttscctaggctgatcatgacctcctgggctcaagtgatagtcttgcctcagcctcccaaagtgctgggattacaggtgtgtgccactgcatgtggccccaacc

SEQ ID NO: 424011 - DNA, 201 bp, Homo sapiens
tagcagagctcagtctttattagatggctccgaaagtggtgtttatgtattcatgactgtgtggttttgactaagggcagaattctcagaacaaaacaatrttatggtgccatatggatggtgttttatggtttctctgaggctttgtgtcccttgtccaaagctgcattgaagctgtcttaggagcacttaaaagatacc

SEQ ID NO: 424012 - DNA, 201 bp, Homo sapiens
cctcccaaagtgctgggattacaggtgttagccactgtgcctgcccttcctttcctttcttccttccctccccctcccccttccttccttccttccttcctctctctctctctctttttttttttttttttgagatggagtcttgctctgtcacccaggctggagtgcagtggcgcaaactcggctcactgcaacctccgc

SEQ ID NO: 424013 - DNA, 201 bp, Homo sapiens
ctcccaaagtgctgggattacaggtgttagccactgtgcctgcccttcctttcctttcttccttccctccccctcccccttccttccttccttccttcctctctctctctctctttttttttttttttttgagatggagtcttgctctgtcacccaggctggagtgcagtggcgcaaactcggctcactgcaacctccgcc

SEQ ID NO: 424014 - DNA, 201 bp, Homo sapiens
tgggattacaggtgttagccactgtgcctgcccttcctttcctttcttccttccctccccctcccccttccttccttccttccttcctctctctctctctytttttttttttttttttgagatggagtcttgctctgtcacccaggctggagtgcagtggcgcaaactcggctcactgcaacctccgccagccgggttcaa

SEQ ID NO: 424015 - DNA, 201 bp, Homo sapiens
ccacgttggtcaggctggttttgagctcctgacctcacgtgatctgcccttctcgggctcccaaagtgctgggattacaggcgtgagctgccacacccagsctttatactaaaattagtctttctcagtctgtgtttattattgcaacattttattcttatatccattattatatatttatgtatccactgattgatagta

SEQ ID NO: 424016 - DNA, 201 bp, Homo sapiens
cattaaatagtattttttatgtttatatttcaaagtgagtattcaggtattacagcttatccaaataatgtccttattctccctactgactatatgtatcttttttttttttttttttttgagacagagtttcacttttgttgcccaggctggagtgcagtggcgccatctgagctcactgcaacctccgcctcccctccc

SEQ ID NO: 424017 - DNA, 201 bp, Homo sapiens
cccagaagtagaaatgcaaatttgaagagtatatgtgtttctacttttaattgagttaccagattgcctctcaaagatttttacttaacagtgcatcatcrcacgcccgccagctatgtataaggctgtccttttcctcgtatgtcaccaatctgatcagtgaccctcctgcttcagcctcctgagcagctgagactacaa

SEQ ID NO: 424018 - DNA, 201 bp, Homo sapiens
aggtgtcttagctatatctgaaacagccaagaaggtgttcttaccgtcagattgtgtctctcaggctgctgtccatcatccttttagtgttattagttgtrttctaggagagccagttcctagtgatgaagaaccctgaggaaagagtagaacaaaaggaaaaataaggctgttttgttcggattttttagttgtgttaaa

SEQ ID NO: 424019 - DNA, 201 bp, Homo sapiens
ttctcagactagccactcctgagtggaaaacactgaaccatctgaccagagacaattcacaacacccgggtggcacaggagcctgagacaaagtgacaggrctggagagggcagggaccaagacttcatgttgtgtgattccactgataggaaatgtcaagcagacacatccatggacagattcatggggacaggggtggg

SEQ ID NO: 424020 - DNA, 201 bp, Homo sapiens; identical to SEQ ID NO: 250227

SEQ ID NO: 424021 - DNA, 201 bp, Homo sapiens
tcaggtacacatttattccttgaaatgcccccacaaccagggttaaggtctttgggttcatacacacacacacacacacacacacacacacacacacacayatatgaacacacacacacacacacacacatatatacacattctttttattattattattattattttgagacggagtcttgctcttgtcgcccaggctga

SEQ ID NO: 424022 - DNA, 201 bp, Homo sapiens
ggccagggaccgagacctacttcagctctcacccgtgtcacaggaataaggccacttccccggttcgcagtggggtttaaactggccagaacacgttgggsacttgggccgggaactgccttcccattctgcatcacagggagcttgcggattgatcgcgcaggcccgccacacccctgatctcctgggcgacgccggaag

SEQ ID NO: 424023 - DNA, 201 bp, Homo sapiens
ctcaggtacacatttattccttgaaatgcccccacaaccagggttaaggtctttgggttcatacacacacacacacacacacacacacacacacacacacmtatatgaacacacacacacacacacacacatatatacacattctttttattattattattattattttgagacggagtcttgctcttgtcgcccaggctg

SEQ ID NO: 424024 - DNA, 201 bp, Homo sapiens; identical to SEQ ID NO: 250228

SEQ ID NO: 424025 - DNA, 201 bp, Homo sapiens
ttttttgtatttttagtagagatggggtttcaccgtgttagccaggatggtctcgatctcctgacctcgtgatccgcccaccttggcctcccaaagtgctrggattacaggcgtgagccactgcacccggcctagcctggagtttttaatatttgcaggccacatcgccctcctccctagcttgtcaaacctgtgttctca

SEQ ID NO: 424026 - DNA, 201 bp, Homo sapiens
ggcggatcacaaggtcaggagattgagaccatcctggctaacatggtgaaaccctgtctctactaaaaatacaaaaaattagccaggcgtggtggcgggcrcctgtagtcccaggtactcgggaggctgaggcaggagaatggcgtgaacctgggaggtggagcttgcagtgagccgagattgcgccactgcactccagcc

SEQ ID NO: 424027 - DNA, 201 bp, Homo sapiens
gatgctttatgaggttaaaagatgagctcatcaatgtctttttttttttttttttgagatggagttttgctctcattgcccaggctggagtgcaatggcgkgatctcagctcactgcaacctctgcctcccgggttcaagcaattctcctgcctcagcctcccaagtagctggcattacaggcatgcgccaccacacctgg

SEQ ID NO: 424028 - DNA, 201 bp, Homo sapiens
gggttagatgatgtcctgatagtggggccccataatgggactaatgccccataagaaaaaatgcctttgggaggctaaggcgggaggcttgcctgagatcrggagttcaagaccagcctggccaacatggtgaaaccctgtctctactaaaaatataaaaattaggccggacgtggtggctcacgcctgtaatcccagcac

SEQ ID NO: 424029 - DNA, 201 bp, Homo sapiens
atggcgtgaacccgggaggcggagcttgcagtgagccgagatcccgccactgcactccagcctgggcgacagagcgagactccatctcaaaaaaaaaaaawaataataataataataataataataataacagccaggcgtggtggctcacgcctgtaatcccagcattttgggaggctgaggcaggtggatcacctgagg

SEQ ID NO: 424030 - DNA, 201 bp, Homo sapiens
ccaccacgcccagctaattttttgtatttttagtagagatggggtttcaccgtgttagccaggatggtctcgatctcctgacctcgtgatccgcccacctyggcctcccaaagtgctaggattacaggcgtgagccactgcacccggcctagcctggagtttttaatatttgcaggccacatcgccctcctccctagcttg

SEQ ID NO: 424031 - DNA, 201 bp, Homo sapiens
ggagtgcagtggcgcaatctcggctcactgcaagctccacctcccaggttcacgccattctcctgcctcagcctcctgagtagctgggactacaggcgccygccaccacgcccagctaattttttgtatttttagtagagatggggtttcaccgtgttagccaggatggtctcgatctcctgacctcgtgatccgcccacc

SEQ ID NO: 424032 - DNA, 201 bp, Homo sapiens
agagtgaggatgtggagaaattagaaccttcatactttgctgtgggaatgcaaaatggtgtagccaccatgggaaacagcctggcagttcctcaaacagtyaaacacgatccagcaattcacctccaaggtatatacccacatgaattgaaaacaggtgttcaggccaggagcggtggctcactcctgtaatcctagcatt

SEQ ID NO: 424033 - DNA, 201 bp, Homo sapiens
cctgccaccacgcccagctaattttttgtatttttagtagagatggggtttcaccgtgttagccaggatggtctcgatctcctgacctcgtgatccgcccrccttggcctcccaaagtgctaggattacaggcgtgagccactgcacccggcctagcctggagtttttaatatttgcaggccacatcgccctcctccctag

SEQ ID NO: 424034 - DNA, 201 bp, Homo sapiens
gtgatctgagccaggtgcctgggccaggttattctggggtaccctctggcaggcactgcctttcagtccactgccactgagatagggttttttttttttttaattttttttgagaccgagtctccctctgttgcccaggctggagtgcagtggtgtgatctcggctcactgcaacctctgcctcctgggttcaagtgattc

SEQ ID NO: 424035 - DNA, 201 bp, Homo sapiens
ctgggattacaggtgtgagccactgtgcccagcctagacttgtgttttaatgaggtttcccacctggtacatattttcctccccctgacctccaaataccrcatctacaacacaatcacccagtagctgtcctgggtgaaggacaggcatcctgaccctgtctgtcttctggaggctttgttctagtcatgcgtttggaca

SEQ ID NO: 424036 - DNA, 201 bp, Homo sapiens
caagtttccgtccccatcggccggacagattagaatcctttcaggtgctaggtgaatacagatggggcggtgctgcttgctgagttagcctttgcgcgggmacaggcctggcttttttgaggcattgcacagaaggctcagaacagggccagggagcggggtggtgtatccggatccgtagtctggaaaagctccctctgg

SEQ ID NO: 424037 - DNA, 201 bp, Homo sapiens; identical to SEQ ID NO: 250239

SEQ ID NO: 424038 - DNA, 201 bp, Homo sapiens; identical to SEQ ID NO: 250240

SEQ ID NO: 424039 - DNA, 201 bp, Homo sapiens; identical to SEQ ID NO: 250241

SEQ ID NO: 424040 - DNA, 201 bp, Homo sapiens
ctggaatttcatgtctgcattgcgtaaaaaagcatagactggcagcaattaaaacagaagctgtacagaaactgtggttagtatccctggattaacttggrtagtttcgttatcacttctaaccatctggtcagttggtttaattctacagagccagaatcctattcaagctgcctgcaatcagagtgtaccttatcatgg

SEQ ID NO: 424041 - DNA, 201 bp, Homo sapiens
gagatggaaattgagctgcaattgccttaagttccaggagtcaatctgggagccagcatctcttttagacatgtgtatgcaagtggaagggctggggtggstagctcactggaagagggctgtgtctgctcaccgtcagtgggaagagggagaggcagagaggtaatagtaatatcaggagggcatcgtggaattgtgctc

SEQ ID NO: 424042 - DNA, 201 bp, Homo sapiens
ggttttgccatgttgcccaggctggtctcgaattcctgagctcaagtgatccgctggcctcagcctcccaaagtgctgggattacaggtgagagccactgygcccggcctcacatacttattataatgtccattacgtgcagggtgcactgagtgtttcacacaccttttatctcatttaattctctcaacctttgtggca

SEQ ID NO: 424043 - DNA, 201 bp, Homo sapiens
ctctgtgccatttccaggaagacgaggcaagagcggagattgtggcgccagcacgcccagtatcgaaacgcacagcaggggtgccgggtgtggggggggggcgctgaggacagagacatcggggcgcagaagacagtcgcttgggggacttggccagcggcttttgggcacggcctatgcagtggttttttctctccaaac

SEQ ID NO: 424044 - DNA, 201 bp, Homo sapiens
tcctcagtggcctagagaccgaacggctgataactgggctttggtttgaagcaactgactcctgtgttacttccttgctgagaaaataattggagcactaytggcttggcttaagatctaaaacaatagttcatcccataattaaatgattgatatacagccattcaaaaaatatcacgggggttgggggcctggagagga

SEQ ID NO: 424045 - DNA, 201 bp, Homo sapiens
catcagtgtgcagactttttgagttgtttttccaatagtagggaagggtttgggttcagccatcatctgctgacgcacatgtcggggagggctgtggcttmaaaaagcacatactttgacccctaagaagttgactgatctaaactgcagaaaggcagagcttggagaagttcagcgcctgacctcagaagggtctgacac

SEQ ID NO: 424046 - DNA, 201 bp, Homo sapiens
aaagtgctgggattacaggcatgagccaccacgcctggcctaatttttattttttttgagacggagtctcactctgttgtccaaggtggagtgcagtggcrtgatgtcagctcacagcaacctctgcctcccaggctcaagtgattctgctgcctcagcctcctgcgtagctgggactccgggcggttgccaccatgcctg

SEQ ID NO: 424047 - DNA, 201 bp, Homo sapiens
tcttcccgtgggaaggcggggcagactggagtgaggccaatcaggcctggagggtagtggacccacctcccacccagacctgggatggggaggcagtgggrggaaacaggtatgtaaactcccagcttggctttgtttctacgggcttcttgccctgggcagagaaggcatcaaggggtagggactgcccagggccggtgt

SEQ ID NO: 424048 - DNA, 201 bp, Homo sapiens
gagcagaatcccagcagggtggcagggaccagaaaggtgggcagggaggggtgggactgagtaaagcagggggcggcagtgatagggctgggcccacagcygcccttcccctctccaaccttctggtcccaggtgctgtgtgagcattactggctgaccgactctaccccggacacccatggtcacatcaccatccacctc

SEQ ID NO: 424049 - DNA, 201 bp, Homo sapiens
ctcagctgtgggaaggggcggggggatgagggagcttctgcccaggcctctaggcagcaccacccgggtagccaccaggtggcgctgtggaccgctgtgcrttctcccagatggagccctaggggttgggggacacaagggagcctttttctgttagattggggcaggcggggcgagcctcctaaccctatgtccatctcc

SEQ ID NO: 424050 - DNA, 201 bp, Homo sapiens
gaaggggcggggggatgagggagcttctgcccaggcctctaggcagcaccacccgggtagccaccaggtggcgctgtggaccgctgtgcgttctcccagayggagccctaggggttgggggacacaagggagcctttttctgttagattggggcaggcggggcgagcctcctaaccctatgtccatctccagaagcagtat

SEQ ID NO: 424051 - DNA, 201 bp, Homo sapiens
gaatattctaagtattcttgatcttcatgttcctaggtattcatgtctttctctaagtttggaaggttctctgttattgtttatttgaataaactttctaycccagtctctccatctacgtcctatttaagaccagtagttactagacttgcccttttgagtttattttctagatcttgtaatagtgcttccttctctttt

SEQ ID NO: 424052 - DNA, 201 bp, Homo sapiens
tgggggacacaagggagcctttttctgttagattggggcaggcggggcgagcctcctaaccctatgtccatctccagaagcagtatgtctacctctacaaytgtctgaacagcgcgctggcagacgggctgccctgagtcagcactggtcacggtgcaggagaggtttgtgccctgtgggatggggacagcattcctgaca

SEQ ID NO: 424053 - DNA, 201 bp, Homo sapiens
tttgggtactgactttatttctagatttccccatattttgcctaccctaataattcattccccttgatttccttacattacagaaaatgctttaacacacwtggttgagccaccacaaatcctttctggaaagacatagcaactataatcacatacccaataattaaaacagagatttaatttcgtaccttgactgtaaga

SEQ ID NO: 424054 - DNA, 201 bp, Homo sapiens
tttctagatttccccatattttgcctaccctaataattcattccccttgatttccttacattacagaaaatgctttaacacacatggttgagccaccacawatcctttctggaaagacatagcaactataatcacatacccaataattaaaacagagatttaatttcgtaccttgactgtaagatcagatcgttcttgtaa

SEQ ID NO: 424055 - DNA, 201 bp, Homo sapiens
gtaatttgcaggggatgtctacagccaaaatgatggaggcaggatgctggaggcagagagtaaggggttgtggcatttgccacaacaaagcagagttcaarctatcacttactagctatgtaacccccagccagttgattagcccttctgtgacttagtttcctcacctgtaaacagggttaagatctacctcatagggtt

SEQ ID NO: 424056 - DNA, 201 bp, Homo sapiens
gagcttctgcccaggcctctaggcagcaccacccgggtagccaccaggtggcgctgtggaccgctgtgcgttctcccagatggagccctaggggttggggracacaagggagcctttttctgttagattggggcaggcggggcgagcctcctaaccctatgtccatctccagaagcagtatgtctacctctacaactgtct

SEQ ID NO: 424057 - DNA, 201 bp, Homo sapiens
gcctctaggcagcaccacccgggtagccaccaggtggcgctgtggaccgctgtgcgttctcccagatggagccctaggggttgggggacacaagggagccyttttctgttagattggggcaggcggggcgagcctcctaaccctatgtccatctccagaagcagtatgtctacctctacaactgtctgaacagcgcgctgg

SEQ ID NO: 424058 - DNA, 201 bp, Homo sapiens
ggcggggcgagcctcctaaccctatgtccatctccagaagcagtatgtctacctctacaactgtctgaacagcgcgctggcagacgggctgccctgagtcrgcactggtcacggtgcaggagaggtttgtgccctgtgggatggggacagcattcctgacacatccacgtgggcctgggctccctggaagggcggcctcca

SEQ ID NO: 424059 - DNA, 201 bp, Homo sapiens
ctcctaaccctatgtccatctccagaagcagtatgtctacctctacaactgtctgaacagcgcgctggcagacgggctgccctgagtcagcactggtcackgtgcaggagaggtttgtgccctgtgggatggggacagcattcctgacacatccacgtgggcctgggctccctggaagggcggcctccactgggccctgtg

SEQ ID NO: 424060 - DNA, 201 bp, Homo sapiens
caggagaggtttgtgccctgtgggatggggacagcattcctgacacatccacgtgggcctgggctccctggaagggcggcctccactgggccctgtgctgsgaaggtacagggtcttggaataaagacctgtggccaagcctgaagctcagtgtgttctgtctgtccatcctcaggcctgggcccagcgtgtgggtctcgt

SEQ ID NO: 424061 - DNA, 201 bp, Homo sapiens
aggagaggtttgtgccctgtgggatggggacagcattcctgacacatccacgtgggcctgggctccctggaagggcggcctccactgggccctgtgctggraaggtacagggtcttggaataaagacctgtggccaagcctgaagctcagtgtgttctgtctgtccatcctcaggcctgggcccagcgtgtgggtctcgtg

SEQ ID NO: 424062 - DNA, 201 bp, Homo sapiens
aggacctggagtctggttgaacttggtgacctatggcccctatgctgttggtttttcccctgaagcaatcctctccctgctaatcctccagtttctaaatwtcctcagactttggtctctccacgtctagtttcctgtggtgctaagccctggattcagaatcacagctccaaattgtttgtcctctgcctcatcaccctg

SEQ ID NO: 424063 - DNA, 201 bp, Homo sapiens
gtggcgcacgttctccttgtggggatggccccgttggcatcttcccgtgggaaggcggggcagactggagtgaggccaatcaggcctggagggtagtggamccacctcccacccagacctgggatggggaggcagtgggaggaaacaggtatgtaaactcccagcttggctttgtttctacgggcttcttgccctgggcag

SEQ ID NO: 424064 - DNA, 201 bp, Homo sapiens
agagggcggggcggcggagcgctgggcaccgcctactcgcacttgcgcactggttgacaggaggctggacggggtcaggtgggatgccgcagtttttccargaattgtttaccttgtgtcctattaccctccctgctggattcaggatggagaaagtagtaatgaacgggccttacacttggtcatcagctgggcgcagag

SEQ ID NO: 424065 - DNA, 201 bp, Homo sapiens
gccatccccagccttctctacctgccagagcccccaggggccaccctcagcccccaccaggatggaggtgccagagctaccctgttactcggaaggcaggygctggaggcacccctcaggcggaggtgccaagttttccctgctccttctctgtctccttcttcctcccctctacataagaggtgggggagaaagcaggga

SEQ ID NO: 424066 - DNA, 201 bp, Homo sapiens
tcagaagtcaggagggtccttctcaggcctggttgaagaagggtacagaggtcgtgctggctgctcagccgggagctttcccagaacgagactaaagcactggtgccctcccaggaggactaaatgccggtgtcctccatatgccatgtttatcaggagctgagggtgggccccctaatgaccctcacaaaagcaggctgg

SEQ ID NO: 424067 - DNA, 201 bp, Homo sapiens
ggtttgatttcagaatatataaaagttttataagactgaagagatctacagaagtaaagaatagaagctcctgtttgatcagatcagaatcagaacaatamtactcaggaaaatatcttgtatcacattttaaaataaaccaagtatttttatggcaacaggcatatatggtaaaattataaatataggcaaagaaaacac

SEQ ID NO: 424068 - DNA, 201 bp, Homo sapiens
gagtaaagcagggggcggcagtgatagggctgggcccacagccgcccttcccctctccaaccttctggtcccaggtgctgtgtgagcattactggctgacygactctaccccggacacccatggtcacatcaccatccacctcctagctgaggagcctgaggatgagtggaccaagcgggaattccagctgcagcacgtgc

SEQ ID NO: 424069 - DNA, 201 bp, Homo sapiens
ccagaggatcagaatcccttccaaaataagatggtaagcaggagcctaagagtgagtcaaaaacaagtaagatatgaaacatacacttctaacacctgcayataaaatttactacacctgcatatactgcctcctgtgacttttagcctattcttaacaatttactttcgaagctcccttaatttctattcattcctttcc

SEQ ID NO: 424070 - DNA, 201 bp, Homo sapiens
tgggtactgactttatttctagatttccccatattttgcctaccctaataattcattccccttgatttccttacattacagaaaatgctttaacacacatrgttgagccaccacaaatcctttctggaaagacatagcaactataatcacatacccaataattaaaacagagatttaatttcgtaccttgactgtaagatc

SEQ ID NO: 424071 - DNA, 201 bp, Homo sapiens
ggggatgccctatcagctgtgtcaccttgaacaaatcatttctcctcttgggtctctgtttcctccagtgtgaaacgtggtgaaggcatgaggggctatgrgagccccaaggcctctttcagagatctcctctgggtcccatgtgaccccgtggctatccccaaaggcaagagggtccccagccctgcagccaaggccctg

SEQ ID NO: 424072 - DNA, 201 bp, Homo sapiens
ctcatagcctattcatcagcctcattaccctattattttttaatcaaccaaacaataattcatctaacttctcattaactttttcttctgacgcattaacrtcacctcttctaatccaaacagcctgactactacctcttataatcctagcaggccaacatcacctatctaatgaatcacccttatggaaaaaaactccgt

SEQ ID NO: 424073 - DNA, 201 bp, Homo sapiens
ataataatgtttactaatcaagaactattaaacttctgatctaacaaccttatatgactagcatgtattatggcttttatagtaaaaatacccctatacgracttcacctatgactccctaaagcccacatagaagtctctattgccagctcagtagttaggaggctacggtatcatatgacttaccctcatcctcagccc

SEQ ID NO: 424074 - DNA, 201 bp, Homo sapiens
ccccagcctcccgagtagccgggattacaggcgtgggctaccacgcctggctaattttgtatttttagtagagacggggtttctccatgttggtcaggctrgtctcaaactcctgacctcaggtgatccgcctgcctcggcctcccaaagtgctgggattagaggcgtgagccaccgcgcctggccaatacgtttacgttt

SEQ ID NO: 424075 - DNA, 201 bp, Homo sapiens
ctgctgtttgctttcttgggaattataactttaagattgcctgtgataactgataaccactggacttgtttgaaaggttagatggtgtgtgcatgtgtgtstgtatgtgcgtgtgtgtctgtgtgtgtctgcgtgtttctctgtgtgtgtgtagatacagggtaatttgcaggggatgtctacagccaaaatgatggaggc

SEQ ID NO: 424076 - DNA, 201 bp, Homo sapiens
gctgggcaacacagcaagcccccgtctctattaaaaaaaaaaaaagattagttgggcatggtggtatgtggtcccagctactcgggagtctgaggtgggargatcgcttgagtctgggaggtcaacgcagcagtgagctgatcgcaccactgcactctagcctgggcgacagagtgaaaccctgtctttaaaaaataaaat

SEQ ID NO: 424077 - DNA, 201 bp, Homo sapiens
cttaacctcactgtggtgtgtcgcgtcctagttttccatggctgtgggacaatgaacctcaggtattaccccagataatgatgccgctacactatgtgctrcatttccacataagctggcgatatggagtccgtgtcagtgctctgctcacagtcctgtgcttgcgtgcatttcctcccccgggtgctttccttccagcag

SEQ ID NO: 424078 - DNA, 201 bp, Homo sapiens
gggagacagggcaaaaaaggaaggaggggtgcccacagcctgctctagctctgcactggggcttggctcagcatgggagagaccagagacagcaagaggckgcgtgaaggaagcacagccagctcactatggtctaaggagagaacagggattggcctcagttttaaccaccgtgccctttgctcaccagggctctggggc

SEQ ID NO: 424079 - DNA, 201 bp, Homo sapiens
tgttggacaatggtcttgggggagtggacaatggtcttgggggagcggacactggaagcccctccctgcccttctggcatagcctcagatctccctgggcyctgcttgggttatgggtcaaaaggacacagtctcacaatgcccctgtcttctccacaccctaccctgtcctcaggaatatggtgggaatttaccgcctcc

SEQ ID NO: 424080 - DNA, 201 bp, Homo sapiens
aggtgaggggagcgtgccccagtggggtggaaataatgtctgttcttctgccatggtgaggacaacagggctgtcacactgaggctgggtggccttctttggggggggggtcccagaagctgggaggggggccttatccactcttgtctcctcagaaagggactctgccagcaccatctccctttactggggcctcccggc

SEQ ID NO: 424081 - DNA, 201 bp, Homo sapiens
agcccgccgggaccgggagaaagcagctgcggacaccgcgcccgtgcgtctgcgcgcctggccgccaggtgacccagcagcccggccgccgagatgcccarcccgcccaggctccgggcgctgtgacttcgcgccgctgtgtgcgcctccccgagcgccggctgcgccccccagcccggcccggggcctaccgcctgcccg

SEQ ID NO: 424082 - DNA, 201 bp, Homo sapiens
actggggcctcccggctcccccaggggcctccctaaagtcatgtcccaagaggctgtgttggagacactaatttgtgggcaggcgcggaggctgaaaagcrgagaaccatttttagcgtctgagttggggtgagatggcccgtgaaggggaccctattgggggcagctgtcctgtccgtctggctcacaggagcttcccct

SEQ ID NO: 424083 - DNA, 201 bp, Homo sapiens
gtgtgggcttcctctgccctctccagcaccaatgctgatcatgtctttgccacagggggagagcaggaaggaaagggaggtgcagagactgcaatttccayacctggagcctgggcatgagctgcccgccaccaccctgctgcccttcctggctgctgtgggccagtgctgctctcggggcaacaacaagaagccgggcac

SEQ ID NO: 424084 - DNA, 201 bp, Homo sapiens
ggttgaaggggcaggggagataaggccttccagagcttcctttcccagtgttaagtcttcctagactgattaatgatcctttttctagaaggacctggggkaggaggtacactgtcacctttggaattcaagcatcctaccatccatgctggcagaagattttcccactaacttgtcacaattccctgggagctgtgaagt

SEQ ID NO: 424085 - DNA, 201 bp, Homo sapiens
ggtgacggtgcactgggtggctgagagcagcacagcaggctggttctgtaccctcctcagggtcacacatgtaggtgctggggccacagggcatggggtgktgcatggggaagagtcctgtgtgggcttcctctgccctctccagcaccaatgctgatcatgtctttgccacagggggagagcaggaaggaaagggaggtg

SEQ ID NO: 424086 - DNA, 201 bp, Homo sapiens
tacactgtcacctttggaattcaagcatcctaccatccatgctggcagaagattttcccactaacttgtcacaattccctgggagctgtgaagtctgcatytgggttcagtggaggtggggttttctgagctggtctgtgtcttcctggggattgagaaagcccccctctctctcaagactcaggggatgcttctgagaat

SEQ ID NO: 424087 - DNA, 201 bp, Homo sapiens
tctcttcccccactccacggctgtgagattttctctttctagccaatacctttcatgaagtaggtgcttccacctctccatctttgttctagggaagaccrgaaaggcatctttatagtcaactggtattctttgccttgatactcatgtccaaaaactattaccacttttgggctcaatgccaggcctgtttgatcaagg

SEQ ID NO: 424088 - DNA, 201 bp, Homo sapiens
gaattctggccaacggagatgcagcccgtagtcacagacatggtgacggtgcactgggtggctgagagcagcacagcaggctggttctgtaccctcctcarggtcacacatgtaggtgctggggccacagggcatggggtggtgcatggggaagagtcctgtgtgggcttcctctgccctctccagcaccaatgctgatca

SEQ ID NO: 424089 - DNA, 201 bp, Homo sapiens
cagagaagccatgttttggatgaaaaactagaaagtgggagaggcagggcgcaatcctctttgagtctcctgctcctggtgtgggacagagaaagctcccrgggagagctgctcagctgcaggcagtgagggaagggaaggagggaaggggaggacccaggcagcatccagaccagggtggggaagagaacttattcttaa

SEQ ID NO: 424090 - DNA, 201 bp, Homo sapiens
ccttccttctctccctccctccttttctccccgttcctttcttcccttctctctgtccttcccccttccttcctttactgatgtaacaaccttggtgtgcygtggctaagccacactccacccctgacctgcgggggatgagtcaaacggtcagacttgcctgggcttgttccacgctcccctggctagacaggcgtctac

SEQ ID NO: 424091 - DNA, 201 bp, Homo sapiens
tctccaccagaacccactgctccgtggcggtcgccatagttagccgcttccttccggaaggcgggtcacaagcgcgtcccaaaagtgcgcgtcgctgctcrgtgtcgttatcacctccgcagagggcggggcggcggagcgctgggcaccgcctactcgcacttgcgcactggttgacaggaggctggacggggtcaggtg

SEQ ID NO: 424092 - DNA, 201 bp, Homo sapiens
tactgatgtaacaaccttggtgtgccgtggctaagccacactccacccctgacctgcgggggatgagtcaaacggtcagacttgcctgggcttgttccacrctcccctggctagacaggcgtctacacattctcagttaggggctggacaggggcagctgctagacaggtcctattctgggcctctctgagaaaaagtgtc

SEQ ID NO: 424093 - DNA, 201 bp, Homo sapiens
gctgcaggaggctacacagtcccaggaggctgcttctaagaggcccacgtggcctgcatggggatgcgcctggctgtccagcatgtggtcatttgaattgkacatgtttcactgggatgcctacagaaaagtagacagaagatgtggaaaaagtttttgaaatgttgcaaacttagctacttttaaaataaaaaaaatagc

SEQ ID NO: 424094 - DNA, 201 bp, Homo sapiens
gtttcccactcctcttcaaccgtcagcgacatcttgggccttcttttccagtcaggtgggatggcgcccctgtgaggctgtgtcttatccctcggaacacrggcaccccacagagggtcctgcctcctgtggtctggagcccccccctcaaggaagaaacccgtgctgtctgctcgcaactccaggatgtttggacacctc

SEQ ID NO: 424095 - DNA, 201 bp, Homo sapiens
gggggaggacatgcagcccaaggatcctgcagctcttggatcaagtaggtcttctccacccagagctgccggccacaggtcccgcaaaagaaaactgtcgrggccaccgctgcagctgcaaccgacccctcccctgcaactgaggtgggagagagatgaggggcccccaccggctaagcttccatgtctatctcctgaggc

SEQ ID NO: 424096 - DNA, 201 bp, Homo sapiens
gcaggcgtggtggcccacgcctgtaatccagcactttgggaggcccaggcgggtggatcaggaggtcaagagattgagacctgaggagcatctctgcctgyaccatctgggaagtgaggagcgcctctgcccggctgctccaccatctgggaagtgaggagcgcctctgcccagccgccccaccatctgggaagtgaggag

SEQ ID NO: 424097 - DNA, 201 bp, Homo sapiens
ccggcctcctcaccatctgggaaatgagaagcacctctgcctggccgccgtcccatctgggaagtgaggagcacttctgcccagccgccaccctgtctggmaagtgaggagcacctctgcccggccccctcaccgtttgtaagggaggagcgcctctgcccagcccctgcaccgtctgggaagtgaggagcgcctctgccc

SEQ ID NO: 424098 - DNA, 201 bp, Homo sapiens
ctgaggcaggagaatggcttgaacccaggaagtggaggttgcagtgagccgagatcgcaccactgcactccagcctggtgacaaagcaagactccgtctcaaaaaaaaaaaaaaaaaaaagtaagacatggcaaactgcagtggcacccagcctgcccctgctgtctccacacctgctgagactccctgcccctggccacc

SEQ ID NO: 424099 - DNA, 201 bp, Homo sapiens
tggcctaaccataggatttcactttaattctaccactcttttaactttaggcctactaaccaacacactgactatatatcaatgatgacgtgatattgtcygagaaagtacattccaaggccaccacacagcaattgtccaaaaaggcctccgatacaggatgctcctattatctcagaagtatccttcttcgccggtttt

SEQ ID NO: 424100 - DNA, 201 bp, Homo sapiens
agaattaggaggacattgacccccaacagctattcttcccctgaacccttcagaagcacctctcctaaatacgtctatattacttgcatcaggagtttcartgacttgagcccatcacagcctaacagaaggtaaccaaaaacaaacaattcaagcactacttaccacaatcctcttaggagtctatttcacccttccaca

SEQ ID NO: 424101 - DNA, 201 bp, Homo sapiens
gaggcaggagaatcgcttgaacccaggaggtggaggttgtggtgagccgagatcacaccactgcactccagcctgggcaacaggagcaaaactccgtctcwaataaataaataaataaaatctaacacagaatcccaatattaaccatcggattatttaatttcagtggttcttttttgggtacactatacaagactactc

SEQ ID NO: 424102 - DNA, 201 bp, Homo sapiens
atcccagcactttgggaggccaaggcgggcggatcacctgaggtcgggagttcgagaccagcctgaccaacatgcagaaaccccgtctctaataaaaatamaaaattggccgggcatggtggcacatgcctgtaatctcagctacctgggaagctgaggcaggagaatcgcttaaacccgggaggcggaggttgtagtgag

SEQ ID NO: 424103 - DNA, 201 bp, Homo sapiens
tttgctttatctatctgggtgttccagcactgggtacattaatgtttacaattattataacctcttgttgaattgacccctttatcatcatataatgaccktccttgtctcttttcacaggttttgacttaaaaatctattttatctgaaatacatatagctattcctgctctttttgggggtgtttcatttgcatggaat

SEQ ID NO: 424104 - DNA, 201 bp, Homo sapiens
tgctgtttgctttcttgggaattataactttaagattgcctgtgataactgataaccactggacttgtttgaaaggttagatggtgtgtgcatgtgtgtcygtatgtgcgtgtgtgtctgtgtgtgtctgcgtgtttctctgtgtgtgtgtagatacagggtaatttgcaggggatgtctacagccaaaatgatggaggca

SEQ ID NO: 424105 - DNA, 201 bp, Homo sapiens
ctttcttgggaattataactttaagattgcctgtgataactgataaccactggacttgtttgaaaggttagatggtgtgtgcatgtgtgtctgtatgtgcrtgtgtgtctgtgtgtgtctgcgtgtttctctgtgtgtgtgtagatacagggtaatttgcaggggatgtctacagccaaaatgatggaggcaggatgctgg

SEQ ID NO: 424106 - DNA, 201 bp, Homo sapiens
ttcttgggaattataactttaagattgcctgtgataactgataaccactggacttgtttgaaaggttagatggtgtgtgcatgtgtgtctgtatgtgcgtrtgtgtctgtgtgtgtctgcgtgtttctctgtgtgtgtgtagatacagggtaatttgcaggggatgtctacagccaaaatgatggaggcaggatgctggag

SEQ ID NO: 424107 - DNA, 201 bp, Homo sapiens
atgtctacagccaaaatgatggaggcaggatgctggaggcagagagtaaggggttgtggcatttgccacaacaaagcagagttcaaactatcacttactarctatgtaacccccagccagttgattagcccttctgtgacttagtttcctcacctgtaaacagggttaagatctacctcatagggttgttgtgtggattca

SEQ ID NO: 424108 - DNA, 201 bp, Homo sapiens
gggccctgtgctgggaaggtacagggtcttggaataaagacctgtggccaagcctgaagctcagtgtgttctgtctgtccatcctcaggcctgggcccagygtgtgggtctcgtgggcaaacatggagccgggatggaagctaggacctggagtctggttgaacttggtgacctatggcccctatgctgttggtttttccc

SEQ ID NO: 424109 - DNA, 201 bp, Homo sapiens
tgaaatgggattgagtgttgttacataagcctgtggtcgttgtggcctcaggcagaactatgaggccaagagtgctcatgcgcaccaggctttctttttgraattcgaggtgaggcctttaccacccgtgagctcagaggagggaagactgggacctgtctgaaggtctggagggaactcccagttgcacacttgccccca

SEQ ID NO: 424110 - DNA, 201 bp, Homo sapiens
gacattctcccaaaatgagtctcccaaaaatgaccttaacttgtgaaaagaaagtaaattctgcatctctgatccccacttgtgaacctgggtgtctggcrccttggggaggactcagggcgcataagcggcctcttctgaggaggtcacgggatgccaggctgcctgggtcatcagtgtggaaacaactggccaggaggc

SEQ ID NO: 424111 - DNA, 201 bp, Homo sapiens
actgagagaccctgagtgaggtatgcctagctaagcccagatgacacccaaatgtgtgggcaaaaataaacgattgttattgttctaagccactgttttgsgattgttatattttgggataactggaaggaatacaccgtgggactttgcttgatttggaacttttgcttggcctctgtatcagtttcctagggctgctgt

SEQ ID NO: 424112 - DNA, 201 bp, Homo sapiens
tttacacttccttgcagacactgaattattgtgttaaattattataacttaatagcttgtgaaatatacaaacaacaagattatgccgacatggctgttaraagacaagacaaattagcagactcatgctcatttctgtcattgaacaattcgtctcattccttcctcaaggcgctgccgttttcctgctctccgtccgtg

SEQ ID NO: 424113 - DNA, 201 bp, Homo sapiens
catttggttagcaaatagcccactttcccaggactgatgagagggacatttggaggctcatgacaggcagcatgatagaggggagtcagcctggtctcacyggcaggtcttcaaagctcagactttcgtgtctgtggaaggctgggttacacgatttaacaaaaacaaacctgaagagtcctcttgtcattggtaagctcc

SEQ ID NO: 424114 - DNA, 201 bp, Homo sapiens
attcaggatgatctcatcttgagatccttcattacatctgttaggacccttccaccaaataaggtcacattgacatgctctggggtataatagggctctcyagggaaacaggataaataaaacatatatagatctctacataagaggagatttattataatgattggcttggccaggcgcagtggctcatgcctgtaatcc

SEQ ID NO: 424115 - DNA, 201 bp, Homo sapiens
ggaaagaggaaagcaaatacgaattgtactatttgtaccaaatctttgggattcattggcaaataatttcagtgtggtgtattattaaataaaaaaaaaaytttgtttcctaggttgaaggtctaattgatacgtttgacttatgatgaccgtttatgcactttcaaatgaatttgctttcaaaataaatgaagagcagct

SEQ ID NO: 424116 - DNA, 201 bp, Homo sapiens
atcccttagcccagtcaagttgacacctaaaactaaccatcacatggagattaggacataggcatgcctttttgagatccaccattcaactcactccagtrgccttcccttcctcatcccaactcccctctcttttatcatttttttcttgagaatgctcactaataaattacttttacacaaatccttgttttgtggtct

SEQ ID NO: 424117 - DNA, 201 bp, Homo sapiens
gctcagaggttcctgctggattccagctggagcagtgtgatacccttctttttcagctgttcgtgccttcctttcttgtatccaccaaagtggagacaaawacatgatctcaaagatacacagtacctacttaattccagctgatgggagaccaaagaatttgcaagtggatggtttggtatcactgtaaataaaaagagg

SEQ ID NO: 424118 - DNA, 201 bp, Homo sapiens
atattttttccgttgtcttcatgatatattcatgggaaggggagtatgtggcttattgctgttagtttatcaatagagaatgctggccaaatgtctttaakagtaatgacgatctcaatagcggtaatgacagctaccactttcggagctcctcctgcctaccaggcaccactggggtccctctctgcagcccctcacgcc

SEQ ID NO: 424119 - DNA, 201 bp, Homo sapiens
cagcaaaatgaaacatccacaaatatgacttaaattgagaatatgtgcatgtctatgtaagtaagaatatgattggcttcttttttttttcctttctttctttttttttttttttgaggcagagtcttgctctattgcccaggctggagtgcaatggcatgatcttggcttactgcaacctctgcctcctgggttcaagca

SEQ ID NO: 424120 - DNA, 201 bp, Homo sapiens
aggttttccccaggcaataggtacttagcatgagctatattctcatctcatctatttgcagaggacccacccaggcaaggccagggcatcccagcccaggyaggcccaaccccatcagggctggcatctgtggtctctgacgatggcctgaggaaggtccagcctcacagtgctccctttgatgagccctgggtgggatgc

SEQ ID NO: 424121 - DNA, 201 bp, Homo sapiens
ttctactaacactctgctcatgatgagatatacatttctaagatgatggaagaattctctaccatgctcttcacttccttctgttccctcaccagaattgyctttaaaatccataactccactaacagtctcttcaagaaattctatgacttttctctcaagtacctcaaaaaccatccaacctctatttattactcagtt

SEQ ID NO: 424122 - DNA, 201 bp, Homo sapiens
agccgcagcgtagaaagtttccttgactcctcctccggctgggtctccctcccttgccaagcccagcctgtgaaactgaataacgaagatcactcaacaawgcctgctcctctctgactgcaccgccccgccgccgacgcccagtagagcccccggggcggtccccaccgacggcgcagcccgccgggaccgggagaaagc

SEQ ID NO: 424123 - DNA, 201 bp, Homo sapiens
actcctcctccggctgggtctccctcccttgccaagcccagcctgtgaaactgaataacgaagatcactcaacaatgcctgctcctctctgactgcaccgycccgccgccgacgcccagtagagcccccggggcggtccccaccgacggcgcagcccgccgggaccgggagaaagcagctgcggacaccgcgcccgtgcgt

SEQ ID NO: 424124 - DNA, 201 bp, Homo sapiens
gctttatctatctgggtgttccagcactgggtacattaatgtttacaattattataacctcttgttgaattgacccctttatcatcatataatgaccttcyttgtctcttttcacaggttttgacttaaaaatctattttatctgaaatacatatagctattcctgctctttttgggggtgtttcatttgcatggaatgtc

SEQ ID NO: 424125 - DNA, 201 bp, Homo sapiens
ctcctgggttccagcgattctcatgcctcagcctcctgagtagtggggattacaggtgtgcaacaccatgcctggctaatttttgtatttttagtacagayggggttttgccatattgggcaggctcacctcaaactcctgacctcaagtgacccacccacctcgcctcccatgttgtcattattattatcattttttttt

SEQ ID NO: 424126 - DNA, 201 bp, Homo sapiens
agtccaaagtttttcttcctttgatactttgaatgtcattctatttcctcaggctggtaaggttaccactgagaagtctgctgccaagtgtgttggagctmctttttatgttatttgcttcttttctcttgctgcttttaggatcctttctttatctttgacctttgagagtttgcttattgtatactttgaggtaatttt

SEQ ID NO: 424127 - DNA, 201 bp, Homo sapiens
tttgagtttattttctagatcttgtaatagtgcttccttctcttttatttatttttgcttttttctccttggactgtgtgctttcatataacctgtctttkaatctactgattcattctgccacttgatcaattctactgttgagagattatgattcatttttcagattgtcaattgagtttctaagccccagaatttctg

SEQ ID NO: 424128 - DNA, 201 bp, Homo sapiens
tggaggtcaaatgttggaaatctgctgtgtgcttgacaccaagcattgcccgttaaccatgttcctgatctctgcctcctacaccccagggctacacccgmccacaggagttcattgcctctcaggggcctctcaagaaaacactggagaacttctggcggctggtgcgggagcagcaggtccgcatcatcatcatgccga

SEQ ID NO: 424129 - DNA, 201 bp, Homo sapiens
ctggagaacttctggcggctggtgcgggagcagcaggtccgcatcatcatcatgccgaccatcagcatggagaacgggagggtgagtgcgccttgcaggckcctagaaaggccaccaggtggcgcacgttctccttgtggggatggccccgttggcatcttcccgtgggaaggcggggcagactggagtgaggccaatcag

SEQ ID NO: 424130 - DNA, 201 bp, Homo sapiens
agtaatgccacagtagatttatgctgcacaaaagctgtgagccttctgcctgaggaacccccgcaaaaagttccaacaggggtctgtggacccttgccagyggggacaataggattacttctagggaggtgtagtttaaatttaaagggggtacaagtacaaacaggagtcactgattcagattacaatggagaaattcaa

SEQ ID NO: 424131 - DNA, 201 bp, Homo sapiens
tgaggggcaggggttattagaggtccatcatctctgatccaaagctcttggggccagatgcatttgggagtctagactttgaattttttttttttttttttgagacggactctcctttgtcacccaggctggagtgcagtgttgtgatcttggctgactgccacctccacctcccaggttcaagccattctcctgcctcag

SEQ ID NO: 424132 - DNA, 201 bp, Homo sapiens
actccagcctgggtgacaagagcaagactctgtctcaaaaaaaaaaaaactatatatgtacatatatatatgtgtgtatatatatgtgtatatatatatatgtatatatatatatacacatatatatttgagaccctgtctcaatcaaatcaaatcaaatcaaatcaaaactgtgttgcccaggctggagtacagtgtcgt

SEQ ID NO: 424133 - DNA, 201 bp, Homo sapiens
actattcagggaaagaaatataaaggtttggtagatacaggagcggacatttcatttctctatagcaatggccgtccacatggccaattcaacctgctcartttaacatagttggagttggtaaagcccctgaagtatatcaaagtagttatattttgcattgtgaagggcctgatggacaacctgggactattcaaccaa

SEQ ID NO: 424134 - DNA, 201 bp, Homo sapiens
cactccagcctgggtgacaagagcaagactctgtctcaaaaaaaaaaaaactatatatgtacatatatatatgtgtgtatatatatgtgtatatatatatatgtatatatatatatacacatatatatttgagaccctgtctcaatcaaatcaaatcaaatcaaatcaaaactgtgttgcccaggctggagtacagtgtcg

SEQ ID NO: 424135 - DNA, 201 bp, Homo sapiens
atcgcaccactgcactccaggctgggcaacagagcaagactccgtctcaaaaataataataataataataataataataataaaataacacattctcaggscaggcgcagtggctcacgcctgttaatcccaacaccttgggaggctgaggtgggcggatcacctgaggtcaggagtttgagaacagcctggccaacatgg

SEQ ID NO: 424136 - DNA, 201 bp, Homo sapiens
ctgtcctcatcgtcaccttcaccctctccttcccccatttatttattcattgattcattccatcaatcaacaaatacttgttgagggtactgtttcatatsccagggatacaaggaaagatcaggaaggttagcaaccacaggcagcaatgctctgtgcatcatcgcctgcagtttgtgagacaacagcaagacagctttg

SEQ ID NO: 424137 - DNA, 201 bp, Homo sapiens
gataaataccctgattttagtcacctctttcacttccatcccctgccggagcatcccattggctgatccaacaggaagcaatgggtgacagagacaaggcygtccagctttagacccggggccctcgcactttaggaggccacagagctccccgctcacatgtctagtatgtggccttcatttgtagtcatgtcctgtccc

SEQ ID NO: 424138 - DNA, 201 bp, Homo sapiens
tgtggtggtgggcgcctgtagtcccagttactcaggaggctgaggcacgagaatcacttgaacccaggaggcggaggttgcagtgagctgagattgtgtcrtgcactccagcctgggcgacagagagagactccatctcaaaaaaaaaaaaagaaaagaaaaagaatgttgagatggccacagtggagcattgaaaagagg

SEQ ID NO: 424139 - DNA, 201 bp, Homo sapiens
ctttcacttccatcccctgccggagcatcccattggctgatccaacaggaagcaatgggtgacagagacaaggccgtccagctttagacccggggccctcrcactttaggaggccacagagctccccgctcacatgtctagtatgtggccttcatttgtagtcatgtcctgtcccacaaagatgagggtcaggctttcata

SEQ ID NO: 424140 - DNA, 201 bp, Homo sapiens
ccccgctcacatgtctagtatgtggccttcatttgtagtcatgtcctgtcccacaaagatgagggtcaggctttcatagaggtcagctgcctggagcccgvagcagggtggagaatggcaaagggactccaagaggccaaggagagatgtatagcccatcatgcatcttcaggtctgctagagcaaaccctgagggctgct

SEQ ID NO: 424141 - DNA, 201 bp, Homo sapiens
agcctgggcaatatagcgagacctccatctctacaaagaaattaaaaattagacgggcatggtgacttgcacctgcagtctcagctactcaggaggctgargtgggaggatggttggagcccagttggtcccactgcactccagccagggcaacagactgagacgctaactaaaaataataataataataataataataat

SEQ ID NO: 424142 - DNA, 201 bp, Homo sapiens
acagaagacctgctagagacagcaggggaaattgttcacggagtgggtattgatggcagaatgaatttttgaggcagaatctctctctgtcgcccaggctrgagtgcagtggcacaatctcggctcactgcaacctccacctcctgggttcaagcgattctcctgcctcagcctccctagtagctgggattacaagcatgt

SEQ ID NO: 424143 - DNA, 201 bp, Homo sapiens
aaattaataagggatgggaggctgaggcaggagaatcgcttgaacctgggaggcagaggttgcagtgagccgagatcacgccactgcactccagcctgggygacagggtgagactccgtctcaaacaaacaaacaaaaattaataagggagaatcgggtagaggaaagtatcctgaaggtatgaaaaggaaaccattctgt

SEQ ID NO: 424144 - DNA, 201 bp, Homo sapiens
cgatggctcactcttacaatcccagcactttgggaagccgaggcaggcagatcacttgaggtcaggtgtttgagaccagcctggccaacatggtgaaaccytgtctctactaaaaatacaaaaattaactaggtgtggtggcgcacacctgtaatcccagctacttgggaggctgaggcaggagaactgcttgaacccggg

SEQ ID NO: 424145 - DNA, 201 bp, Homo sapiens
agtggggaagattgggaaaggcctaggatcagagagggaaatgggtccctggttgcccatggacctaatggggtctctcgagcagcaggggccttgcgccytgggggacaaggtagggagggggtggcctggctgcgctgacccgcctaccgacccctctcgacctgcaggactctggctactggagatgggcgcccggct

SEQ ID NO: 424146 - DNA, 201 bp, Homo sapiens
ggccactctacaaacttgtatttggatattgcaaaattgaaagaacaaatatttaaagtatcccaggcacacgtgaacttaatgccaggaactggagtgcktgaaggagctgcagacagattagcagctagtaacccattcaaatggataaaaacacttggaggctctgtgatttcaatgatgattgtgcttttactctgt

SEQ ID NO: 424147 - DNA, 201 bp, Homo sapiens
aagtgggtggatcacgaagtcaggagttcgagaccagcctggccaagatggtgaaaccccgtctctactaaaaatacaaaaattagccgggcgtggtggcrggcgcctgtagttccagctactcgggaggctgaggcaggagaatcgcttgaacccaggaagcggaggttgcaatgtgccaagatcgtgccactgcacact

SEQ ID NO: 424148 - DNA, 201 bp, Homo sapiens
gagccagcgtgccaggtcaagaatgtttttaatgattaaccatggaatttaagctggctaaggaagaaatgagggcatgggagggtgagggggagtaaaawatgaaagggacaacggatgggagatcacagtgggttggaaggatcatgcgagtggggcactggagggaatgaggtggaaagaaaaagtgatgggtggaga

SEQ ID NO: 424149 - DNA, 201 bp, Homo sapiens
gagaggccgaagtgggtggatcacgaagtcaggagttcgagaccagcctggccaagatggtgaaaccccgtctctactaaaaatacaaaaattagccgggygtggtggcgggcgcctgtagttccagctactcgggaggctgaggcaggagaatcgcttgaacccaggaagcggaggttgcaatgtgccaagatcgtgcca

SEQ ID NO: 424150 - DNA, 201 bp, Homo sapiens
tggatgttgcagtgagccgagattgcaccactgcactccagccttggtgatagaacaagactctgtctccaaaaaaaaaaaagcaatgaaaacatatgtcyacacaaacacttgtacatgaatattcatagcagccttattcataatacccctaagctggaaacaacccaaatgtccatcatactgagtggataaacaggt

SEQ ID NO: 424151 - DNA, 201 bp, Homo sapiens
cagataactagccagacccatccctttatttcagcccatccctttatttcctgtaagaaatgtttttagttaatctataatctatagaaataatgcttatyactggcttgctgtcaataaatatgtgggtaaatctctgttcaaggctctcagctctgaaggccgtgagacccctgatttcccactccacaccctatattt

SEQ ID NO: 424152 - DNA, 201 bp, Homo sapiens
caagctcccccgcccgcccgccctcgctcccgctgggccccgcagccggaggaggggcggcctcccgcccccgcccgctggatctcagagtcgccgccccsggcgccgggctgcagccgccacgccccgggagaggaccgaccgcccagaccgccggtcccggggccccctgggccacgccgatcacggggagcccctcga

SEQ ID NO: 424153 - DNA, 201 bp, Homo sapiens
taaatctctgttcgaggctctcagctctgaaggctgtgagacccctgatttcccactccacaccctgtatttctgggtgtgtgtctttaattcctctagcrccactgggttagggtctccacgacccagctggtctcggcactctgggatcctgccacggggctgtgtaaccagccatctctgtgcaacatgcccagcact

SEQ ID NO: 424154 - DNA, 201 bp, Homo sapiens
gagagatgtatagcccatcatgcatcttcaggtctgctagagcaaaccctgagggctgctttagagagggttatcaagggagacttcttggaggaggtggyttctgactgtgacttgaatgccaggactgtttgccctgccccctgccatctctccttcccagatggtgctccaagaggcagcttgtggacctggtgatgg

SEQ ID NO: 424155 - DNA, 201 bp, Homo sapiens
tatttatgtaaatattaatttcttcaattctaatcaaattctacatatggcttagaaatcaaatagaaaagtttgccttaattttttctataataaaagtatgtaatctcttttagaagaatggaaaacgaagtgttttagattaaaagagatgagtgagacctgccacccccactggtgtttgagcccccacggggatct

SEQ ID NO: 424156 - DNA, 201 bp, Homo sapiens
aagcatttgtggaaactgttaatagctcttaataaaatcaaaatttgggaaagaataaaaaagcatctagaaggccactctacaaacttgtatttggataytgcaaaattgaaagaacaaatatttaaagtatcccaggcacacgtgaacttaatgccaggaactggagtgcttgaaggagctgcagacagattagcagct

SEQ ID NO: 424157 - DNA, 201 bp, Homo sapiens
agcactgtgacatgttcatgatggccatgacccccaccctgaaggtcgtgggtttactggaatgagggcaaggaacacctggctcacccaggatggaaaayggcttaaaggggttcctgtaccacaaacaatagcatgagcgatctgtgccttaaggacatgttcctgctgcagataactagccagagcccatccgtttat

SEQ ID NO: 424158 - DNA, 201 bp, Homo sapiens
catatacctgaagcgcttagcctgacacaattgaacgccagacggaagccgtgatcagcggtcctgacgggggtcagagtcagaccaggggtcttttaccsaagtggggaagattgggaaaggcctaggatcagagagggaaatgggtccctggttgcccatggacctaatggggtctctcgagcagcaggggccttgcgc

SEQ ID NO: 424159 - DNA, 201 bp, Homo sapiens
ctctactaaaaatacaaaaattagccgggcgtggtggcgggcgcctgtagttccagctactcgggaggctgaggcaggagaatcgcttgaacccaggaagyggaggttgcaatgtgccaagatcgtgccactgcacactctagcctgggcaacagagcaagactgtgtctcaaaaaaaaaaaatctttgacaaaacatagt

SEQ ID NO: 424160 - DNA, 201 bp, Homo sapiens
gactaacaaagtcatctgctgtttggggaaatctctggtgttgggaacaggcccccaaatctggccataaactggccccaaaactggccataaacaaaatmtctgcagcactgtgacatgtttgtgatggccatgacccccaccctgaaggttgtgggtttactggaacgagggcgaggaacacctggcccacccagggcg

SEQ ID NO: 424161 - DNA, 201 bp, Homo sapiens
gaagccagaggatacccagggacagtagggctcccaggtggctggttctcagcacaccttccatgaatctgcttgctgctgcttcagtgtggtggccatcrtgctgtgtgacaaaccaggctgttcacagcttcctcagccccccagaaggggagtgtcaggaagagacatttagttcatttgcctgcaaattttcttctc

SEQ ID NO: 424162 - DNA, 201 bp, Homo sapiens
gggggcggggccgggacagagtctgagagatgtagccaatgggcgagaccgctggaggagccagggggcggggctgagggacgcagtgcctgggcggtagscccggtgggcggggctggagaaggtgaagccgggaatccgaacgagtgggcggggcaaggcaggaagaccctggctgggccgggggagaaagcaagtagt

SEQ ID NO: 424163 - DNA, 201 bp, Homo sapiens
gctggagcacagtggtgtgatcatagttcactgcagcctccacctcctgagctcaagcactcctcccacctcagcctcccgagtagctgggactacaggcrcttgcaaccatgtctggttaattttatattttgtagagatggaggtcttgctatgttgcccaggctggtctggaactcctggcctcaagcaatccccctg

SEQ ID NO: 424164 - DNA, 201 bp, Homo sapiens
ttctttttttctttgaaatggggtctcactctgtcacccaggctggagcacagtggtgtgatcatagttcactgcagcctccacctcctgagctcaagcaytcctcccacctcagcctcccgagtagctgggactacaggcgcttgcaaccatgtctggttaattttatattttgtagagatggaggtcttgctatgttgc

SEQ ID NO: 424165 - DNA, 201 bp, Homo sapiens
ttgaacctgggagccagaggttgcagtgagctgagattgtgccactgcactccagtctgggtgacagagggagactctgtctcaaaaaaaaaaaaaaaaaraaagaaagaaaatgttttagaaagaatggaagcagaaaatactgggtagacagctcttttgagaagttttaccacaaagagaaacaaagacgctgcatgc

SEQ ID NO: 424166 - DNA, 201 bp, Homo sapiens
ctttttttttttttttggagatggagtctctgtcacccaggctggagtgcagtggcgggatcttggctcactgtagcctcaacttctgggctcaagcgatyctcccacctcagcctctctaataactgggactacacacacacgccaccatgccctgctaatttttttgtagagacgggggtctcactatgttgcccaggc

SEQ ID NO: 424167 - DNA, 201 bp, Homo sapiens; identical to SEQ ID NO: 278359

SEQ ID NO: 424168 - DNA, 201 bp, Homo sapiens
atcccatataattctcaaggacaagccatagtggaaagaatgaatctctccctgaaacagcagttgcaaaagcaaaaaaaaggggggaaaacaaggactaygggacaccccatatgcaactgaatctagcattgttaactttaaattttttgagcctgcctaaaggccagatcctatcagtagctgaacagcatctacaga

SEQ ID NO: 424169 - DNA, 201 bp, Homo sapiens
ggctcatacacctcttccaggcgtcaccttttgcagtgttttgcagtgatgggcattccagcttctattaaaacagataaagccccaggctacactagccragctctagctacatttttctctatacggaatattaaacacattactggtatcccatataattctcaaggacaagccatagtggaaagaatgaatctctcc

SEQ ID NO: 424170 - DNA, 201 bp, Homo sapiens
caccctttttacatcactcacattagggctcatacacctcttccaggcgtcaccttttgcagtgttttgcagtgatgggcattccagcttctattaaaacrgataaagccccaggctacactagccgagctctagctacatttttctctatacggaatattaaacacattactggtatcccatataattctcaaggacaag

SEQ ID NO: 424171 - DNA, 201 bp, Homo sapiens
aagtttttcagatgccctatacttcagctcaaaaagtggagcctgtagctgtaattgaggtagtgactgcttttcatatgcctattaatgtgatttctgaytcttcatacgtgattcattccacacaattaactgaaaatgctcagttacaatttcctgcagatgaacaactgatgattttatttacccaactgcaaacag

SEQ ID NO: 424172 - DNA, 201 bp, Homo sapiens
ctatgccatgagtaatctattttctatccttagaggagatcctggtctcacaagccctcggtaattaacaagagaagctgaggcagagctgcggctaatcraaaagcaagtccataaagctcaaataaatagattagatccagagaagactctagatttgctaatttttccaactcagcattcacctactggtgttattgt

SEQ ID NO: 424173 - DNA, 201 bp, Homo sapiens
agggcaagcaattgaacctactcgttaaaagttttcacagtgttacattattcattatatggatgatatactttgtgctgcccccactcgagaagtattaytccaatgttatgatcacttacaaaattcgatttcttgcgctggtttaattatagctcctgacaaaattcagactactactccttactcctacttggggac

SEQ ID NO: 424174 - DNA, 201 bp, Homo sapiens
gtgaaattaaacgaacaggaggatttggaagcacaaataaacaaggcaaaacagcttattgggtgaatcaaattactgataaacgtcctacctgtgaaatractattcagggaaagaaatataaaggtttggtagatacaggagcggacatttcatttctctatagcaatggccgtccacatggccaattcaacctgctca

SEQ ID NO: 424175 - DNA, 201 bp, Homo sapiens
cccaggctcctcccccaggaccacccaggctcctcccctgctctggctccaccccaggaccacccagactcctcccccaggaccacccaggcccctccccsaggctctggctccaccccaggaccacccagattcctcccccaggaccacccaggcccctcccccaggctctggctccactccaggaccacccagactcct

SEQ ID NO: 424176 - DNA, 201 bp, Homo sapiens
ggcaggggttattagaggtccatcatctctgatccaaagctcttggggccagatgcatttgggagtctagactttgaattttttttttttttttttgagayggactctcctttgtcacccaggctggagtgcagtgttgtgatcttggctgactgccacctccacctcccaggttcaagccattctcctgcctcagcctcc

SEQ ID NO: 424177 - DNA, 201 bp, Homo sapiens
cactgcactccagcctgggcgatagagtgagattcagtctcaaaaaaaaaaaaaaaaaaaaaaaaagcccagtggtttccaaagtgattccaaatggattmcaccaggaatgtatgggagttctctttgatagtatttttagtgaattgcagtaacattgcactgttttgtgtttgctcattttcttttttcttttctttc

SEQ ID NO: 424178 - DNA, 201 bp, Homo sapiens
gcgggtccctgggagtcccataacccgcagcgtcgctttcccgggccctccctcggcctgaggctcctttaaacccaaagttatacaaatgcacgttagawagccctaaatctggaagggctttgctttgaacgtgggtgttcgaacgcccaggcctctccatccctgcgctcgtccgcggaggccaccatccaaaacccc

SEQ ID NO: 424179 - DNA, 201 bp, Homo sapiens
taaaggaaatactccatttcctggagcttgtttcaactgtgggaagcatgggcacactaaaaaagaatgcagaaaaaaatcagcaagtcaggccggcagayaggggaaaaaagaaaactgctgagcctgatatatgtccaaaatgtaaaaaaaggaaaacattgggctaatcagtgtcactctaagtttgataaagatggg

SEQ ID NO: 424180 - DNA, 201 bp, Homo sapiens
ataaataccctgattttagtcacctctttcacttccatcccctgccggagcatcccattggctgatccaacaggaagcaatgggtgacagagacaaggccrtccagctttagacccggggccctcgcactttaggaggccacagagctccccgctcacatgtctagtatgtggccttcatttgtagtcatgtcctgtccca

SEQ ID NO: 424181 - DNA, 201 bp, Homo sapiens
gaaaaaagaaaactgctgagcctgatatatgtccaaaatgtaaaaaaaggaaaacattgggctaatcagtgtcactctaagtttgataaagatgggaaccygatttcgggaaatgccatgaggggcccatcccgggccccgttcgaaaccaggggcatttccgcctcaggccactccttcacccctgtacaatgtctgtcc

SEQ ID NO: 424182 - DNA, 201 bp, Homo sapiens
agctgggcatggtggtgggcgcctgtagtctcagttacccgggaggctgaggcaggagaatggcgtgaacccaggaggcggagcttgcagtgagccgacatcgcaccactgcactccaggctgggcaacagagcaagactccgtctcaaaaataataataataataataataataataataaaataacacattctcaggcc

SEQ ID NO: 424183 - DNA, 201 bp, Homo sapiens
gtaaaaaaaggaaaacattgggctaatcagtgtcactctaagtttgataaagatgggaacctgatttcgggaaatgccatgaggggcccatcccgggcccygttcgaaaccaggggcatttccgcctcaggccactccttcacccctgtacaatgtctgtcccctgccacagccagtaatgccacagtagatttatgctgc

SEQ ID NO: 424184 - DNA, 201 bp, Homo sapiens
ggtgggcgcctgtagtctcagttacccgggaggctgaggcaggagaatggcgtgaacccaggaggcggagcttgcagtgagccgacatcgcaccactgcaytccaggctgggcaacagagcaagactccgtctcaaaaataataataataataataataataataataaaataacacattctcaggccaggcgcagtggct

SEQ ID NO: 424185 - DNA, 201 bp, Homo sapiens
gaagcacatcatataatatgtgtccttttgcatctggcctctttcatgtagcatattgctttggagtttattcatactatagcatgtttattcctttttaytgcttaaaaatattctattttgtggacatggcacattttatatatccattcatcagctaatagacatttggagtgtttccaaatgtataaagctgctatg

SEQ ID NO: 424186 - DNA, 201 bp, Homo sapiens
ctggctgcgctgacccgcctaccgacccctctcgacctgcaggactctggctactggagatgggcgcccggctatcgcggcgacggctgccggcggacccrtccctggccctggacgcgctgcccccggagctgctggtgcaggtgctgagccacgtgccgccacgctccttggtcacgcgatgccgcccagtgtgccgcg

SEQ ID NO: 424187 - DNA, 201 bp, Homo sapiens
agcagcaggggccttgcgccctgggggacaaggtagggagggggtggcctggctgcgctgacccgcctaccgacccctctcgacctgcaggactctggctrctggagatgggcgcccggctatcgcggcgacggctgccggcggacccatccctggccctggacgcgctgcccccggagctgctggtgcaggtgctgagcc

SEQ ID NO: 424188 - DNA, 201 bp, Homo sapiens
gccgacatcgcaccactgcactccaggctgggcaacagagcaagactccgtctcaaaaataataataataataataataataataataaaataacacattstcaggccaggcgcagtggctcacgcctgttaatcccaacaccttgggaggctgaggtgggcggatcacctgaggtcaggagtttgagaacagcctggcca

SEQ ID NO: 424189 - DNA, 201 bp, Homo sapiens
tcacccccacctatctccagtgtctgggccccctgctagaatggcactgacaccagggcggggtccttttccggttttattcactgctccgtccccagcamctagcgcaggactggcacctcctcagtcctttgggcctatctgttgaagtggaggaagagaaggggcccgcaggccctcaccctctcactccccttcccc

SEQ ID NO: 424190 - DNA, 201 bp, Homo sapiens
ccctgcaggtctcccacgtcttcaccaactttggcaagggcatccgctacgtatcttttgagcagtacgggagagacgtgagttcctgggtggggcactayggcgcccttgtgacccactccagtgtgagggtcaggatccgtctgtcctagcgactggactactgcctgacgttgtcagtcaagaccagccttgcagcca

SEQ ID NO: 424191 - DNA, 201 bp, Homo sapiens
gaaacccagagagctggctgggtgacgggggcatagaggctgactgctgcctggcaggtggggcgctcgagagaactgcggctgcgtctaccagctccggrtccgccttctggatgtgtatgaaaaggaagtggtcaagttctcagcctcacctgacccggtccttcagtggactgagaggggctgccgacaggtgggtcc

SEQ ID NO: 424192 - DNA, 201 bp, Homo sapiens
cctttgtgatgaggctgagaggggaagtgatgcagagccggggaaggtagagctttggagaagccagagcccccactctgcactcctgcccaccctcatcscagcaggctggggtggtccacagggggccactgactggcttgatacccctctgaaacgagacacctcccctgaccaccttgtggatgcccagggtctctg

SEQ ID NO: 424193 - DNA, 201 bp, Homo sapiens
ccagctactcaggaggctgaggcaggagaattgcttaaacctgggaggtgaaggctgcagtgagctgagatcgcgccactgcactccagcctgggcaacaagagtgaaactctgtctcaaaaaaaaaaaaaaaaaacacattctcggcccggcgcagtggctcacacctgtaatcctagcactttgggaggctgaggcagg

SEQ ID NO: 424194 - DNA, 201 bp, Homo sapiens
cccagctactcaggaggctgaggcaggagaattgcttaaacctgggaggtgaaggctgcagtgagctgagatcgcgccactgcactccagcctgggcaacaagagtgaaactctgtctcaaaaaaaaaaaaaaaaaacacattctcggcccggcgcagtggctcacacctgtaatcctagcactttgggaggctgaggcag

SEQ ID NO: 424195 - DNA, 201 bp, Homo sapiens
tggataaacaggttgtagattatgtgttcagtggactattacccagcaataaaaaggaatagactactgattgatacacaacaagtggatgggccaagcgyggtggctcatgcctgtaatcccagcaatttgggaggccaagctgggaagatcgctgagcccaggagttcaaggctagcctgggcaacatagcaagaccct

SEQ ID NO: 424196 - DNA, 201 bp, Homo sapiens
gcttgagcctgggaggtcatggcagcagtgagctatgatggcgccactgccctccagcctgggcaacagagtgagaccctgcctcaaaaaaaaaaaaaaagtatgagtgaatcacacggacattatgctgaaggagaggacaaataaccctaagccatgcctacaactcaaggaatattacaggcatgagccactgtgcct

SEQ ID NO: 424197 - DNA, 201 bp, Homo sapiens
actgcttgaacccgggaggtggatgttgcagtgagccgagattgcaccactgcactccagccttggtgatagaacaagactctgtctccaaaaaaaaaaaagcaatgaaaacatatgtccacacaaacacttgtacatgaatattcatagcagccttattcataatacccctaagctggaaacaacccaaatgtccatcat

SEQ ID NO: 424198 - DNA, 201 bp, Homo sapiens
aatcacttgaacccaggaggcggaggttgcagtgagctgagattgtgtcgtgcactccagcctgggcgacagagagagactccatctcaaaaaaaaaaaaagaaaagaaaaagaatgttgagatggccacagtggagcattgaaaagagggtgggccacatgtgaacgcacaggttgcatgcccatgaagccagtcctgag

SEQ ID NO: 424199 - DNA, 201 bp, Homo sapiens
aggatcgatttagtccagaaattggaggctgcagtgagctatgatcgtggccatgcactccagcctgggcaacacagtgagaccctgtctcaaaaaaaaawttttttttttttttgcttttgataatcattcatgttctgggtacttgtggcttattccttattttgtatttgtattatttataatatttgtatttgcaat

SEQ ID NO: 424200 - DNA, 201 bp, Homo sapiens
ccgcactcctccggggtcagcagctcggccagacggacggctgcgtgagggcccatagcgtccacggcccccgccggagccagcgcccaaacccagagcgycaggaccaaggcgctcgccagagtccgcgccgccatccctggcgggaaccagggaccgaggactgtgcggggacggggacgtggacgggctccgcgccgg

SEQ ID NO: 424201 - DNA, 201 bp, Homo sapiens
cgcactcctccggggtcagcagctcggccagacggacggctgcgtgagggcccatagcgtccacggcccccgccggagccagcgcccaaacccagagcgcsaggaccaaggcgctcgccagagtccgcgccgccatccctggcgggaaccagggaccgaggactgtgcggggacggggacgtggacgggctccgcgccggt

SEQ ID NO: 424202 - DNA, 201 bp, Homo sapiens
aaccgtccaaagcaccactgccccaagactgtgctcccattttacagctgagggcaagggcactgtgaggtgagggagaatctggcccatctgcagcccakgcccccgggggcgcgcgccgctctttaggaaggagcagctttgtttcccaccagccctgcactgtggcgagcgggccggggctgccgggcgacgcccggt

SEQ ID NO: 424203 - DNA, 201 bp, Homo sapiens
cgcgcgccgctctttaggaaggagcagctttgtttcccaccagccctgcactgtggcgagcgggccggggctgccgggcgacgcccggtcgccgtcgccgycgccgccagtgatccatagcgtgagcaggacgaccagcgccccggtgcccagcgcccccacgaagccggtgaggaggccgagcgccagcggccccgccca

SEQ ID NO: 424204 - DNA, 201 bp, Homo sapiens
gcatatttcagggaccctaaagtttataacatcagatatccggaataaattccatcacattaccaccagtaaacttattttatagtaagtggttgtatgaygccaatactgactcaaaccaacctttggatagaaaagtgtttcaggagtgaggtaaagaatgacacttccccttcataccaatcagtgttcattaagcag

SEQ ID NO: 424205 - DNA, 201 bp, Homo sapiens
taaggaagctttttattttacaggtctttgtgggaagaaacaaatcacaaaagcaattaagagagctcaaacaatgggtaagaaagagcacctcaacaackgtattgagctagctgaaattttgctcattatgctttgtcaagaactttaattatctctttacagggtttatgccagttacatacaaggatcctgcatatt

SEQ ID NO: 424206 - DNA, 201 bp, Homo sapiens; identical to SEQ ID NO: 106662

SEQ ID NO: 424207 - DNA, 201 bp, Homo sapiens; identical to SEQ ID NO: 106698

SEQ ID NO: 424208 - DNA, 201 bp, Homo sapiens; identical to SEQ ID NO: 106677

SEQ ID NO: 424209 - DNA, 201 bp, Homo sapiens
tatgtttcctattttagtgtacgattagtccagtttgatttatgctttatagggatacttaaagtattgggaaatggtggtggggaaaccgaacaatttaygtttgctcttgaaactgttttaggtgtggcctgaagtcactgatcctgagaagttcgtgtatgaagatgtggctatcgcagcatacctgctggtaagggt

SEQ ID NO: 424210 - DNA, 201 bp, Homo sapiens
aattaactacagacgacctgatggagatgagtgctgccaacccagcgccagatgatgaggaagaatatgtaaaagagacagtgccagaaagcaaattaachgacagtgtggcagaagggccctgattattccagactgcatttgacttcttttatgccatagactcttctgcgatatgcactgaaactaaaggaaatgatg

SEQ ID NO: 424211 - DNA, 201 bp, Homo sapiens
gagcatgggcttcccactagcagtgtggtcttggggatgtgctctacctcctggccctctgtctactcaccttgaaatgggtttaatcattcctgagcctytgaggaggtggcagggctgggcctcacatggatctgttgcagccttcgtgcttgaaaggggtgctcaggccctgtagcatgaagccctttgagaaccatc

SEQ ID NO: 424212 - DNA, 201 bp, Homo sapiens
gatggcttcaggtcagccagccctgagcatgacccatgagggccacaagggccagccctgcctctgtccctgccccttcctgaggccgccaaggggcggcrcgctgcatccatgctggctggtatggagcctggcaccgtgctgccgggtacacgcggggcctcatctcatcctgcactcatggcagagcaggcctttcct

SEQ ID NO: 424213 - DNA, 201 bp, Homo sapiens
gccgttctttccttctttttcccccttttttcagttaaataatgttttattttagagtggtttagactcactgaagaatctgacagaagcagcaagttccrcggtgccccacccagctctgacgtgggtggcatttgacctcagggtgggacgtgggtcaccccgttccctccttgctcctctggacctcgtcccatgcga

SEQ ID NO: 424214 - DNA, 201 bp, Homo sapiens
ctgtaatcttagcactttgggagcccaaggctggaggatcgcttgaggccaggagttcaagaccagtctgggcaatatagcaagacacccgccccccccccaactatctctacaaaaaataaaacattgtaaaaagaaaatcatcaaggagaaaggatgtctgcctgaacaggtttttaatgcagatgaaagtaccctatt

SEQ ID NO: 424215 - DNA, 201 bp, Homo sapiens
ctttcggtgggtgaggaggaaggaggaacagacctggagatggagagcggggatgggtgagcggtgggctcagtcctgcctgcgccttggaacttgggaaycagggcacctaacaggctctggacccccgtcccctccagatgggtgtccgtgggtctggggcttgttagggactctccacgtggccttggcctctcagcc

SEQ ID NO: 424216 - DNA, 201 bp, Homo sapiens
cactgcaggtacaccagcaggcgggtgtattcatctcatatttagaatgcagctttgatatggttgcaggattgctacaagaaaagcatacatacagactytaatatgatttgagaaaaggtgaagtcattatatgacaaagcagaaagaaggtgaaggttctaaagctggagaatttaatgccaacaaaagatgatttga

SEQ ID NO: 424217 - DNA, 201 bp, Homo sapiens
gaaattatccaaagagaaaacaggttactgagtgcaagcaaaatgcactgtccccttgagtatgtggtaagatttggagctgttgtgattcgataatttawttctctttgaaatccccaaaacacaacaatcatccatggcaaaaggagaaaattacatcgattgttctcatggggtgagtggtgtgctgaaattatgttc

SEQ ID NO: 424218 - DNA, 201 bp, Homo sapiens
tccgaagaagaaaaatctgggacatgtatggaccacaaactcagttagaggtaccgtctttattacgcatgcccttgatctcagcatggcttagctcccartgggaattgctgtaatgaatgtgtctctttgtataggtcaagcagacatgctgatagtaaaccttcacattaatctaagtgctctgaaattagagaagag

SEQ ID NO: 424219 - DNA, 201 bp, Homo sapiens
ctggcacattctaggctgtgggctgtagcagtgaatgaaaggcaaaagttcctctcctggagtgccattgtgaatagagtgctgggggattgaaagcatcrtgcttgactcatccctatttttaatactgcttctgatgagacggtagctaggcagttgtaatttgtccttcttctctttttctttccagatgtcctcaat

SEQ ID NO: 424220 - DNA, 201 bp, Homo sapiens
ctagggggcaacagctggaacctgcagcccaatattgatggttccaaactgattatcttcctgctatgctgtactgtacagtactgtactgataggctgcrcatatttgtctacacctgtaagagcttgaaatggttgttacaatgccctttttcaagtgtgttattaaagaatgagtttctaatcataatacctataagc

SEQ ID NO: 424221 - DNA, 201 bp, Homo sapiens
ctctctgaagcctgcaaaacccgcctctgctggttcttcatgcatcaccctgatggctgcgctctgtccacggactgctgcccgtttgcccatgggcctgyggagctgcggccaccccggaccaccccgaggaagaagatttcatgagctgcatccttgccagccgaggcctggttggggaggccaaaccaaggagagctt

SEQ ID NO: 424222 - DNA, 201 bp, Homo sapiens
cagcagtagacactggggactgctggagtggggagtgagggagagggcagagtttgaaaaaccccctggtagttactatgctcactgcttgggtcatgggrtctgtcttaccccaaacctcagcatcttgcagtacacccatgccacaaacctgcacacataccccctgaagctgaaataaaagtggacattatatgcaac

SEQ ID NO: 424223 - DNA, 201 bp, Homo sapiens
gagagcggcacctgcccaggtagcacggtcagtaggggtgggtgtcttgtgcctggaacttcctgccagcaacttatacccctcctggtgcgtccagcgcrtcaggtgccattaccccatgatatgatggccagcttagccacttcctgctagggggcaacagctggaacctgcagcccaatattgatggttccaaactga

SEQ ID NO: 424224 - DNA, 201 bp, Homo sapiens
cccatacctcagtcactcccactggaggcagactcactgtgaccagcaggaactctaggctgtgttccggttgtatccctgaccctggattggcacctccygtggcgtgggagctaaagagaggctggtgaattaaggaactttcaggtttacttctcagtgtgtcttctctgttccaaaccacagttgtgaatgggagag

SEQ ID NO: 424225 - DNA, 201 bp, Homo sapiens
atctggattcgctttgggaggatttctcccaaagtctcgcccgtggcaattcggagttgctggccttcctcaccagctccggggcgggatcgcagccagargcgcagcgtgagctcgacgtggttctcagaaccgtcatcccgaaaactagcccacattgcccccttacaactcccaggagggaaatagtcgtgcaaggta

SEQ ID NO: 424226 - DNA, 201 bp, Homo sapiens
cctgagtgccacatccaagctgtactttccgaaacagtcttggggataatgtctgagtaactggaatgagtttgcccggggcttcctagaaagcagagggrtgtggcgagaagagcatgggcttcccactagcagtgtggtcttggggatgtgctctacctcctggccctctgtctactcaccttgaaatgggtttaatca

SEQ ID NO: 424227 - DNA, 201 bp, Homo sapiens
tagctaggcagttgtaatttgtccttcttctctttttctttccagatgtcctcaatggaaccataacgtttttgcctttggaagaagatgatgaggggaayctaaaggttaagatgagcaatgtgtatcaaattcagctcagtcatagcaaagaagaatggtaagagctggacagtggactcctagttttatggtttccat

SEQ ID NO: 424228 - DNA, 201 bp, Homo sapiens
agtgcatcatacatgtcatctatagcagtggcggtttaaatgaatctcctttgtgctcaaacagcgttatctttaacttgtcggagaataaccagtgggarcgtgcttaactaggagcctgcatgtctgaccacattgtagtgattcaaaggagtgtctttctccttgaacacagtgtttataggtaagacagtaggtctc

SEQ ID NO: 424229 - DNA, 201 bp, Homo sapiens
tttctgcctgtgtgacaggttcgtaatattttgctgttgttttggggaaaaaaaaaacccgtttttccacagagagcctatctctggcagaagtagccaaygagctggacacggagaccctgcggaggctgaagcgggagtgtgggggcctgcagacgctgctccggaacagccaccaggtgttccaaggtacggagtccg

SEQ ID NO: 424230 - DNA, 201 bp, Homo sapiens
gcaaggcaggttctgcacttgagaagcttcaggccaggcacggggctcacgcctgcaatcctaacacttgggtggccgaggcgggtggatcacttgagccygggagtttgagaccagcctgggcaacatagtgaaaccccatctctgcaaaaaaaagaaaaacaaataagagaagcttcagttctggctcggacggccagt

SEQ ID NO: 424231 - DNA, 201 bp, Homo sapiens
gtcttccacacctgagacagcaagacccgtcccttctcttccttctcctcctcagcctgctcagtgtgaagaggatggggatgaagatctttgtgatggtyggtccacttccactcaatgaatagtaaattttctctttcttatgattttcttttcttttctttttttttttttttttgagacggagtcttgctctgtcgc

SEQ ID NO: 424232 - DNA, 201 bp, Homo sapiens
actacaagagatgcatccaatgggagaaaaaacagctgtacacatttatcacatatttgagtgtcccctacctgccgggcactcttaggtgctgacgattyaacagtgacaagagcccctgcctttatggtcatgggaaggggtgggaggcagacacacagccagtgtgtgcagcaggttcgagggtggtggcaggtgctg

SEQ ID NO: 424233 - DNA, 201 bp, Homo sapiens
cagaacagaggctgggccagggtgggctacagacatcaagacacccgggggtctgggcctgacagcacatctattccacgctgtcagccagccctgggcamtagagccatgtgaccgtggggttaaagtgcactcagatcagtcagatcttggtcaagagtagcttgcttctcctggtactgaggacagagaaaatgactc

SEQ ID NO: 424234 - DNA, 201 bp, Homo sapiens
ggaaaccgaacaatttatgtttgctcttgaaactgttttaggtgtggcctgaagtcactgatcctgagaagttcgtgtatgaagatgtggctatcgcagcrtacctgctggtaagggtgtaagcgacctcagcttctctggagtgggtggagtttgctacaggcagatgttccctgtagtgaaggacattttccaaatcca

SEQ ID NO: 424235 - DNA, 201 bp, Homo sapiens
caggagccgtcctaggacaggttatagtatagtggctctgtgggcgtggcctcactttcccagggtggtgtgggagtggcctctccctctgggtgtgactrggtcacagagcctcatctgccagagggcagaatgttgttttatgagatgaaaaaatgttgacttttcatcatggagaatgtcaggaatatacaaaagtag

SEQ ID NO: 424236 - DNA, 201 bp, Homo sapiens
ggaaagaaatttgtgaaactgtcactgcaggtacaccagcaggcgggtgtattcatctcatatttagaatgcagctttgatatggttgcaggattgctacragaaaagcatacatacagactctaatatgatttgagaaaaggtgaagtcattatatgacaaagcagaaagaaggtgaaggttctaaagctggagaattta

SEQ ID NO: 424237 - DNA, 201 bp, Homo sapiens
catgctgaaggaagggagggcgacttccccgccgcagatctggattcgctttgggaggatttctcccaaagtctcgcccgtggcaattcggagttgctggmcttcctcaccagctccggggcgggatcgcagccagaggcgcagcgtgagctcgacgtggttctcagaaccgtcatcccgaaaactagcccacattgcccc

SEQ ID NO: 424238 - DNA, 201 bp, Homo sapiens
gcgtctgctcaggatgcttgaccctgtggttgttggttctttttgaaggtcttcctacaattgccgcttctttgtcctcccctgctgcttctttgacttcrttggaagatactcccggaggcagagtaagaagactcagtaccgggaataccttgacttcattaaagaagtgggcttcacctgtgggtttcacgtggacga

SEQ ID NO: 424239 - DNA, 201 bp, Homo sapiens
gtccagcgcgtcaggtgccattaccccatgatatgatggccagcttagccacttcctgctagggggcaacagctggaacctgcagcccaatattgatggtwccaaactgattatcttcctgctatgctgtactgtacagtactgtactgataggctgcgcatatttgtctacacctgtaagagcttgaaatggttgttaca

SEQ ID NO: 424240 - DNA, 201 bp, Homo sapiens
ctgcaaattcattggtcagtacaaaaaattgattgtctcagttctgtaggttaggaatccccattggctctgctggtttctccgctgtgggtctctctcasgaggccaaaatcaaacagcctgccggctgggctcttatttggaggttctgggaaggaatctgttctcaggctcattcagttcgttggtagaatccaattt

SEQ ID NO: 424241 - DNA, 201 bp, Homo sapiens
aggttccagctgttgctgctagcaggaagtggctaagctggccatcgtatcacagggtaatggcacctggtgcgctggacacatcaggatgggtatgagtygctggcaggaagctcttctcttgcccttcgtcctgctggcagtgcctgcagaactttaatgtgttcttgctaacttattatgaagtactaaggttaacct

SEQ ID NO: 424242 - DNA, 201 bp, Homo sapiens
gcccttctgtgctgcgccaggaggtgctgctgtggggacatgggcagagtgtcgcgggactgccttaacaggagacttcaggttaagaaacctcagctccratgttgggaggcgagacagagaggcagccgtgggagggcaaacagggtcaggcctggccttggcggtgcttccagccaggctgtgagggtgagcccccaa

SEQ ID NO: 424243 - DNA, 201 bp, Homo sapiens
gtgaattgttgacagggctttaaaaatgtaaatatcacagatgacaaaggtaagacctacaccttcctccctcctccatgagaccctctccccagaaatastgcagcagtcctttttagtccttccagaaaaaaaaatcctgatttgtttctcttttatttttatgaagtgatagggtcttgatctctcgcccaggctgga

SEQ ID NO: 424244 - DNA, 201 bp, Homo sapiens
gcatgccttgtttctttatgtaaatcttttattgtaagaaaccagttgtgaattcctgcctttgagcttatgtttcctattttagtgtacgattagtccaktttgatttatgctttatagggatacttaaagtattgggaaatggtggtggggaaaccgaacaatttatgtttgctcttgaaactgttttaggtgtggcct

SEQ ID NO: 424245 - DNA, 201 bp, Homo sapiens
tcaggcacagggttcactgacatctttttctgctgatacagcctggatttggagtcagccagctatcagagtaggtagagacttataaatttctgttaatytgataaacaaacagctcctaaaacaagggaaacgtggtgatctcattggacctaagaggaagtccccaggccccggcatggacctataaaatgacaggct

SEQ ID NO: 424246 - DNA, 201 bp, Homo sapiens
gagtaggtagagacttataaatttctgttaatttgataaacaaacagctcctaaaacaagggaaacgtggtgatctcattggacctaagaggaagtccccrggccccggcatggacctataaaatgacaggctttgggtagcatggatgtttttttgctgtcagatttttcttttgaaacccaccatctcaaggagctgga

SEQ ID NO: 424247 - DNA, 201 bp, Homo sapiens
cgttctttccttctttttcccccttttttcagttaaataatgttttattttagagtggtttagactcactgaagaatctgacagaagcagcaagttccacrgtgccccacccagctctgacgtgggtggcatttgacctcagggtgggacgtgggtcaccccgttccctccttgctcctctggacctcgtcccatgcgatg

SEQ ID NO: 424248 - DNA, 201 bp, Homo sapiens
ttttaaaggttcatatctgttttaattttctgtccagaaagatggcattcagatggaatcgtgtatcccaaacccacgtggcttggagaagagttgctggycaagttggccaagtggtctgtagagaacaagaagagtgactttaaaagcaccctttccctcatctccattatgaagtatagcaaggcttaccaggaactt

SEQ ID NO: 424249 - DNA, 201 bp, Homo sapiens
tctcattggacctaagaggaagtccccaggccccggcatggacctataaaatgacaggctttgggtagcatggatgtttttttgctgtcagatttttcttytgaaacccaccatctcaaggagctggagggagataaaaagcaaggcaggttctgcacttgagaagcttcaggccaggcacggggctcacgcctgcaatcc

SEQ ID NO: 424250 - DNA, 201 bp, Homo sapiens
tgagcccgggagtttgagaccagcctgggcaacatagtgaaaccccatctctgcaaaaaaaagaaaaacaaataagagaagcttcagttctggctcggacrgccagtcatgtatacacagacaacagtatggaacagtgtggtgtgtggtactgggttttgcccttattttctggatgttcagctgatgcagtgaaagcac

SEQ ID NO: 424251 - DNA, 201 bp, Homo sapiens
ctgcagcttccaggtgtgcacagagggggcaggaacagggcagggagccatggtttaccagcgccagcggctggggagtttgccataacttgctttgtggmgcttttttttttttttcctctttctgtaagtattttaaagcaaattctagctagcatgctatttcacccctaagtacttccacgtgcatctttaagaata

SEQ ID NO: 424252 - DNA, 201 bp, Homo sapiens
taggtggaaagcaattaaacacaagaagttctcgaaatgggagtttgaagacctggaatgggggaggtaagctgtccaccatcttagggaggggctagcasgctcccaggcttgagggcaggaattcacgtcttcagaaccgacatgaaatggtgtggccctgtgactacacactttgaaaaagccattgatggtgggtgc

SEQ ID NO: 424253 - DNA, 201 bp, Homo sapiens
aaggaagggagggcgacttccccgccgcagatctggattcgctttgggaggatttctcccaaagtctcgcccgtggcaattcggagttgctggccttcctyaccagctccggggcgggatcgcagccagaggcgcagcgtgagctcgacgtggttctcagaaccgtcatcccgaaaactagcccacattgcccccttacaa

SEQ ID NO: 424254 - DNA, 201 bp, Homo sapiens
cattcaaacatcacatgttctcacttatttatggggtttaaaaatcaaaacaatggaactcgtggacatagagagtggaaggatggttaccagagggtggraaggggagtggagggttgggggagaggtgggatggttaaagtgtacaaaaaaaatagaatatgaataacacctagtatatgatagtctaacagggggatt

SEQ ID NO: 424255 - DNA, 201 bp, Homo sapiens
tttgtgtctaaattattcttgcgtagagtgaattaccacctgactttgttttgtttttctcttcacttagattctatgggaagaagaaagggctgagaggrgactaactgccaggcagtcctttgtggacctgggatgtggaaatggcctcctggtccacatcctgagcagtgagggggtaaggcccggctccatcacctt

SEQ ID NO: 424256 - DNA, 201 bp, Homo sapiens
cttcaaccaaaagagtatgtctgattctcatgttgttctaggcggtgtgtcggtgttcagatggagagctcagggctctgccacagagccatgaaccatgytgtaacgttcaaaatgttctagaacgtgccggtgctgatttctgtgcctctgtcactgatgaggcccagaggcttgttctgtcccatggtgccctcctta

SEQ ID NO: 424257 - DNA, 201 bp, Homo sapiens
gggtgtggtggcgggtgcctgtaatcccagctactcaggaggctgaggcagtagaattgcttgaacctgggaagcggaggttgcagtgagccgagatcgcrccactgcactccagcctggtgacggagcaagactccgtctcaaaaacaacaacaacaaaacaaaacaaaacaaaaaaacttcataaaacaggtggggctt

SEQ ID NO: 424258 - DNA, 201 bp, Homo sapiens
cagctgcgacagcggctgccagcaccaggctcctgggtcaggagtgtggtgtcctgatccgtaggggtctgacaggctcagctgcatacagacaggcgccrtctcctccgctctcctgcagcttgggagggtgtggataagatgtgaggtgcagcacctggcagataggaagttcctggcaaatacatgcaggaaaaccag

SEQ ID NO: 424259 - DNA, 201 bp, Homo sapiens
ctgattctcatgttgttctaggcggtgtgtcggtgttcagatggagagctcagggctctgccacagagccatgaaccatgctgtaacgttcaaaatgttcyagaacgtgccggtgctgatttctgtgcctctgtcactgatgaggcccagaggcttgttctgtcccatggtgccctccttaaaggcacccggtgctccctc

SEQ ID NO: 424260 - DNA, 201 bp, Homo sapiens
agctgttggttgtctttctagctggctagagcaagtgcctctggaaggccgccccttctggcacctggccagatgggggctcaggtgttaagaggggcggscgggagctacctgccatgtccagggttgtagacacggggagtgggtcaatgaggctgggccagcctggagcctgcctgcgccgttcgggagcctcatctc

SEQ ID NO: 424261 - DNA, 201 bp, Homo sapiens
aagtagcgaatttactgttaggtggaaagcaattaaacacaagaagttctcgaaatgggagtttgaagacctggaatgggggaggtaagctgtccaccatyttagggaggggctagcacgctcccaggcttgagggcaggaattcacgtcttcagaaccgacatgaaatggtgtggccctgtgactacacactttgaaaaa

SEQ ID NO: 424262 - DNA, 201 bp, Homo sapiens
gtcctcaatggaaccataacgtttttgcctttggaagaagatgatgaggggaacctaaaggttaagatgagcaatgtgtatcaaattcagctcagtcatascaaagaagaatggtaagagctggacagtggactcctagttttatggtttccattgaggatttctttaggtagccaaaggattctgggttgccagggctta

SEQ ID NO: 424263 - DNA, 201 bp, Homo sapiens
ctgtaatgaatgtgtctctttgtataggtcaagcagacatgctgatagtaaaccttcacattaatctaagtgctctgaaattagagaagagaaaaagagasatgaaactagacttcacagaaccttctggttaaactgactgaagggcgctgacctccaggcagaagtgctgtctctccctgagtttgttggtgccgtttg

SEQ ID NO: 424264 - DNA, 201 bp, Homo sapiens
agccacagttactcggaagcccccagctgactgcctggcttgtttcagatgcagccgcttgaaacgtgcgcagcatcttcatatcataaagattgtgcacrgatccttacaatgtctcctgggggagagcggctgaggctgccttgcacaggcccttcccagggcgctgtccgacgcctgccccaccatgtccacatctgt

SEQ ID NO: 424265 - DNA, 201 bp, Homo sapiens
tatctgtgcttattcatatttctcttatttttaaaggttcatatctgttttaattttctgtccagaaagatggcattcagatggaatcgtgtatcccaaamccacgtggcttggagaagagttgctggccaagttggccaagtggtctgtagagaacaagaagagtgactttaaaagcaccctttccctcatctccattat

SEQ ID NO: 424266 - DNA, 201 bp, Homo sapiens
ccttccccggccttgcctgaagacacatcccatacctcagtcactcccactggaggcagactcactgtgaccagcaggaactctaggctgtgttccggttstatccctgaccctggattggcacctcccgtggcgtgggagctaaagagaggctggtgaattaaggaactttcaggtttacttctcagtgtgtcttctctg

SEQ ID NO: 424267 - DNA, 201 bp, Homo sapiens
gctgtacttctatgaactgcaaggccctatgtgacctgggtgggccctgttaccctttgatttcaccttctaccacttgtcaccttgtccacgccactcamctccattccccatgcacctgagcacacgcctgccctagggcctttgcaattgctgctcctgtgtctgaaacactcttcttccaggtgccccatggcacac

SEQ ID NO: 424268 - DNA, 201 bp, Homo sapiens
aaactactgcacataggcaggtcccccttcgtgttcctgttccagagctcattggcctctgttactccacacttgcacctggaggggctccggttgggagrcgcatgtaaacccagtgcaccgggacggcaccaaggagcagaggctgccctgcaccagccccgtccttagactgcgtggagggacctgcgccttgcccct

SEQ ID NO: 424269 - DNA, 201 bp, Homo sapiens
cttctggaagtgacttgtgtccctctaatgcaccgtggtggcagaaaacctggaaaccacagctctcaccagacggaccacttgccattgtcccctccagyggggccatgctgctgccgcgccctcagcacacttgtgaggccctccggctctgccccgctcacccagtggctgggatctgcttgttcttaggaatgtccg

SEQ ID NO: 424270 - DNA, 201 bp, Homo sapiens
ctgaggctcctttattcccccgagccttctgtcgtgagcggtttcctagcttccagcgagaaccaggaaggaggtggttgctttggccatgtttcacgggkagttgttggattcccacaaggaaacggccaaatgggagcgtaggggggtatctcggcccaatttgggcggcggggtcaggaggcagcctagaggaggcct

SEQ ID NO: 424271 - DNA, 201 bp, Homo sapiens
tagacaagtctcagagaggtcagtgcgccggcccgatgtctcccagtgagtggagaggccacgccacagtccgggccaggtctgacccagcactggcaccyctgagcctatggcatcatccgaggactgtaatcctcaacccgttcctcagagcaacttggtgaaagggagtgtctgtctgctgtcagaagcagtggtgga

SEQ ID NO: 424272 - DNA, 201 bp, Homo sapiens
cgccccttctggcacctggccagatgggggctcaggtgttaagaggggcggccgggagctacctgccatgtccagggttgtagacacggggagtgggtcartgaggctgggccagcctggagcctgcctgcgccgttcgggagcctcatctctatcatcagcgcccgctcctcagtccttagacaccctgcaggtcctgct

SEQ ID NO: 424273 - DNA, 201 bp, Homo sapiens
tatatgcaacaaaaagaaacaatattggccaggaacatcacttccctattttgccctgatatgcgattgccgtgtggctttgttccgaatttccttgactscgtctgctcaggatgcttgaccctgtggttgttggttctttttgaaggtcttcctacaattgccgcttctttgtcctcccctgctgcttctttgacttca

SEQ ID NO: 424274 - DNA, 201 bp, Homo sapiens
caagcccagcctattttgttattttttatgacttagtaatggggaataggtgatggttccttctgtagtaagtattcagtgatacttattataaagtagcrgtttaataagcacccttaattccatatggtatttgggcctgtatagaaagtataaaatttaattcataccgtttggtatttttaaaacgaaaaagtcaga

SEQ ID NO: 424275 - DNA, 201 bp, Homo sapiens
ctgctgtcagaagcagtggtggagatggcggctcctgtgctgaggtagagtcccaggggatgcgcacggtaaggagggaggaggcggcaggaacttgggtsgagcagactgtggctctgtggttccatttcaaaatgaggagcacatttccagaggaggagagtctttctagctgttggttgtctttctagctggctagag

SEQ ID NO: 424276 - DNA, 201 bp, Homo sapiens
aatccagaacatacccttcctccagagaagcttccgtggatgaaaagaggactcagtacattaagagcaggcggggctgccctgtaagcccacctggctgsgagctttccccttctccacgctgggttgctgctggcagtgctggtcactgtgacggtcagcaagctctggacgccagggtcgggtgtgtaaccagggcct

SEQ ID NO: 424277 - DNA, 201 bp, Homo sapiens
actcagcccgcaaagcaaggcagacacatccctggccttctggagccggtggtgcagtgagggaggggggagatgtagcaggtgctcacccaggtgccagyggtgtacacacttccatcatctgcagcttccaggtgtgcacagagggggcaggaacagggcagggagccatggtttaccagcgccagcggctggggagtt

SEQ ID NO: 424278 - DNA, 201 bp, Homo sapiens
tggttctttcatgcagcttcctacatctcagagccagcaatggggttgaattcttctcatacttggaatctctctgccttcctctcctgctgcttctctcytccgcctccagccagagaaaattctctgctcttcgtggcccatggagttaggccgggcccacctggataatccagagtactcttcctcttgaggtctgta

SEQ ID NO: 424279 - DNA, 201 bp, Homo sapiens
tacttggaatctctctgccttcctctcctgctgcttctctcctccgcctccagccagagaaaattctctgctcttcgtggcccatggagttaggccgggcycacctggataatccagagtactcttcctcttgaggtctgtaaccataatcatgtttgcaagtgccccttttgccatataatacagtatattcacgagtcc

SEQ ID NO: 424280 - DNA, 201 bp, Homo sapiens
ctggagggagataaaaagcaaggcaggttctgcacttgagaagcttcaggccaggcacggggctcacgcctgcaatcctaacacttgggtggccgaggcgkgtggatcacttgagcccgggagtttgagaccagcctgggcaacatagtgaaaccccatctctgcaaaaaaaagaaaaacaaataagagaagcttcagttc

SEQ ID NO: 424281 - DNA, 201 bp, Homo sapiens
cttaaagagaagtataaggaaatggttaaggtaattctggtggagaatatctgatttttcccccttcatgattttcttttcttttcttttctttttttttyttttttttttttttttgcgacagtcttgttctgtcacccccccaaaaaaaagggccagagtgaagtggtgtgatcttggctcactgcaacctctgcctcc

SEQ ID NO: 424282 - DNA, 201 bp, Homo sapiens
cttgcccaggctggagtgcagtagctcactgcaaccttcgcctcccaggttcaagcaattctcgtgcctcagcctcccgagtagctgggactacaggcacrcaccaccacgcctggctaatttttgtatttttagtagacatgggatttcatcatgttggccaggctggtcttgaacacctgacctcgtcacccacctgcc

SEQ ID NO: 424283 - DNA, 201 bp, Homo sapiens
accccgtctctactaaaaatacaaaaattagccgggtgtggtggcgcgtgcctgtaatcccagctactcaagagcctgcggtgggagaatcgcttgaaccygggaggcggaggttgcagtgagccaagatcacgtcactgcactccagcctgggtgacagtgagagtccatcttaaaaaaaaaaaaataaagaaaaaataa

SEQ ID NO: 424284 - DNA, 201 bp, Homo sapiens
cattggtgggacacaggaatgtgggggagaaggaggaggaggccagagcatttctctctctctctagccctcccgcagtacatagctcctgcagagtagtccctctgggcccatctcttgcgaggtccacctcctcctccctttgtcctcctggtgagtgtttggctcctgtagtagtccattttcacatcgctataaaga

SEQ ID NO: 424285 - DNA, 201 bp, Homo sapiens
gggtgtggtggcgcgtgcctgtaatcccagctactcaagagcctgcggtgggagaatcgcttgaacctgggaggcggaggttgcagtgagccaagatcacrtcactgcactccagcctgggtgacagtgagagtccatcttaaaaaaaaaaaaataaagaaaaaataaaaaaaatttaggttgagcgtggtggctgtaatc

SEQ ID NO: 424286 - DNA, 201 bp, Homo sapiens
gcaggaaaatcgcttgaacctgggaggtggaggttgcattgagccaagattgcgccattgcactccagcctgagtgacagaatgagactccatcatttccaaaaaaaaaaaaaaacaaacaaacaaaaaacacacacatacacacacaaaaactacctgagactggataatttataaagaaaagagatctagttgactcac

SEQ ID NO: 424287 - DNA, 201 bp, Homo sapiens
gcctgcggtgggagaatcgcttgaacctgggaggcggaggttgcagtgagccaagatcacgtcactgcactccagcctgggtgacagtgagagtccatctyaaaaaaaaaaaaataaagaaaaaataaaaaaaatttaggttgagcgtggtggctgtaatccttgcacttcgggaggctgaggcggacggatcacttgagg

SEQ ID NO: 424288 - DNA, 201 bp, Homo sapiens
aatgggtgaactaatttacactcccaccaacagtgtaaaaacgttcctatttctccacatcctctccagcatctgttgtttcctgactttttaatgatcaycgttctaactggcgtgagatggtatctcattgtggtttggtttgcatctctctaatgaccagtgatgatgagcattttttcatgttcgttggcctcataa

SEQ ID NO: 424289 - DNA, 201 bp, Homo sapiens
cggaggttgcagtgagccaagatcacgtcactgcactccagcctgggtgacagtgagagtccatcttaaaaaaaaaaaaataaagaaaaaataaaaaaaawttaggttgagcgtggtggctgtaatccttgcacttcgggaggctgaggcggacggatcacttgaggtcaggagttcaagaccaacctgggcaacatggtg

SEQ ID NO: 424290 - DNA, 201 bp, Homo sapiens
tacccagatcaggggatatgcagggacctaagttccttcccctcacaccatcccctgggtgtcaccctcctctgcatagccaagggtggctcactgctacygtgctaccagatggcagaaaaacaaacagaaaagtgacatgattatgctgatgtgttgagaccttacttcactgccctggaaaatgaaaggtgtgatcag

SEQ ID NO: 424291 - DNA, 201 bp, Homo sapiens
aagaagggctgaggccacacacgtgtgccccaagggtgtggaggagaaggcgctgggcagcaggtgcaaccagaagcagctggccctgggcccttttcatyccaaggttagaagcaaataaaaactccctcttcacaaacatcgttctcttgctccgtggaattgtgttttaccaaaagtggaaaagggttttcccattat

SEQ ID NO: 424292 - DNA, 201 bp, Homo sapiens
cgttttatcctttctgtctcaaacatgtcttccaggtatacccctccttgaacagagcagggaaggatgcgtcaggaataagtcacctcagtgaatagctktttttaaaaaagaaatcattgtgtttttcaagttctgtggttggtgatgacgaaatgaattaaacagcatttccctgcagttcccctgtctcttccctaa

SEQ ID NO: 424293 - DNA, 201 bp, Homo sapiens
tgggactacaggagtgtgccagctaatttttctaattttagtagagataaaactaaatacccaaaggaaaaggcagagaattaaaaaatcacgactcagcwgtgcgtggtagctcaacacctgtaatcccagtactttgggaggccaaggcaggcagatcacttgaggtcaggagttcaagaccagtctgaccaacatgga

SEQ ID NO: 424294 - DNA, 201 bp, Homo sapiens
ctctgtttgtctattattggtgtataggaatgtttttgagttttgcacattgattttgtatcctgagactttgctgaagttgcttatcagcttaaggagatttttttgctgagacaatggggtttcctaaatatacaatcatgtcatctgcaagcagagacaacttgacttcctctcttcctatttgaatacctttatttc

SEQ ID NO: 424295 - DNA, 201 bp, Homo sapiens
aatcaacattgcttttttcttttccctgtttatgcttttcttgcatgtttctatcataaacttcacataaatcacagatttcagaagcaaacacagtgttyacaccattaattcaaagtaaagggaggtcagaaactgccagagtcagattctcagtctcttctactgggcagaatatcataaagtatatattagcataat

SEQ ID NO: 424296 - DNA, 201 bp, Homo sapiens
aggctggtcttgaactcctgatctcagtgatccacccacctcggcctcccaaagtgctaggattacaggcatgagccaccgcgcccagccaatcatttctratttttggcaggtttctttatatatgacacagaaagtcacaatgaggttaggatcggcaaggaggccattttctgtggttagccacctcttcaggtgtct

SEQ ID NO: 424297 - DNA, 201 bp, Homo sapiens
ccgggttcaagtgattctccttccttagcctcctgagtagctggaattataggcacgtgccaccacgcctggctaattttttgtatgtttagtagagacgsaatttcaccatgttggccaggctgctctcgaactcctgatctcaggtgatccacccgccttgacctcccaaagtgctgggattacaggagtgagccactg

SEQ ID NO: 424298 - DNA, 201 bp, Homo sapiens
tagcctcctgagtagctggaattataggcacgtgccaccacgcctggctaattttttgtatgtttagtagagacgcaatttcaccatgttggccaggctgstctcgaactcctgatctcaggtgatccacccgccttgacctcccaaagtgctgggattacaggagtgagccactgcacctggctagctcctttggtatgt

SEQ ID NO: 424299 - DNA, 201 bp, Homo sapiens
gaagggaagtaacatttattgaaagtcttctgtgtaccagtcactactggaaatgctttaaatatcttaattataatgtaatatatattaatatatctatraacagatacctcaggaattaagttatcacttacaagtagtcattttaaatgtagtgctttgtgttggcaaatgtatatatagccaaggtgtattaatttg

SEQ ID NO: 424300 - DNA, 201 bp, Homo sapiens
agctagagtacaggatttctatacagtgctttttgtcgtctttatttagcgtttgagtttctagtcaaaatagtttttttttctttttgagatggagtctygctctgttgcacaggttggagtgcagtggtgcaatcttggctcactgcaacctccacctcccgtgttcaagtgattctcctgcctcagcctcccaagtag

SEQ ID NO: 424301 - DNA, 201 bp, Homo sapiens
tttatgaatatatgaatagtattttcattctcttgctattcctcaaagtactataggaaagaagggaagtaacatttattgaaagtcttctgtgtaccagycactactggaaatgctttaaatatcttaattataatgtaatatatattaatatatctataaacagatacctcaggaattaagttatcacttacaagtagt

SEQ ID NO: 424302 - DNA, 201 bp, Homo sapiens
ctcattaattttagctttttcctttattttttctttgtgttttcttttgttttgctttcttgttcttttcctagtttttatgagctgggaattattattgktattatttattttttgagacagtctcactctgttacccagggtggagtgcagtggcatgatgtcagctcacttcagcctcagccttatgggctcaatctt

SEQ ID NO: 424303 - DNA, 201 bp, Homo sapiens
ctaaggatacacagctagtaaatggtagaactaggtcttaaatccaagccatctggctccagagcctgccatcttaaccacagggctgcacagcttcccaygtggcatttgtggaactaaaatacaaagcaggccgggcgcagtggctcatgcttgttatcccagcactgtgggaggccaaggcaggctgatcacttgagg

SEQ ID NO: 424304 - DNA, 201 bp, Homo sapiens
gcttgaacctgggaggtggaggttgcattgagccaagattgcgccattgcactccagcctgagtgacagaatgagactccatcatttccaaaaaaaaaaamaaacaaacaaacaaaaaacacacacatacacacacaaaaactacctgagactggataatttataaagaaaagagatctagttgactcacagttccacagg

SEQ ID NO: 424305 - DNA, 201 bp, Homo sapiens
gctaaatttttcaagtagtttacatttttcttcaattagtccagaaagcattatagcaagctttttctctcttcccacataaagccgactcctaaccgatstaaaacttctccacagaaaaaggagaacagcaaaaaatgcagcaacagctgcacatatcaccatttcccatggaaaaccatgaggattcgaatccagtct

SEQ ID NO: 424306 - DNA, 201 bp, Homo sapiens
gtagatataggaaattgatcaatgataattcatctttggttacaaccctaatacaggtgttcaccctgccagttatgcctacactcaatcatttctttttyttttttttttttgagatggtgtctccctcttttgcccaagctggagtgaagtggcatgatcttggctcactgcaacctccgccccctgggttcaagtgat

SEQ ID NO: 424307 - DNA, 201 bp, Homo sapiens
gttggttccaagtctttgctattgtgaatagtgctgcaataaacatacatgtgcatgtgtctttaaagtagaatgatttataatcttttgggtttataccyagtaatgggattgctgggttaaatggtatttctggttctagatccttgaggaattgccacactgtcttccacaatgggtgaactaatttacactcccacc

SEQ ID NO: 424308 - DNA, 201 bp, Homo sapiens
gggaaggagatgtggggtgcagttctctcctcccccagtccacagggatgacttgcagctagatgtaccagaggtgagggcatcaatctgggtgtttcacrtaatggtcccagatggagtgaggtgtgtccctgttggccctgctgtccttccggctccacagagaggtcatggagagcccagcgaggaaggcttccaaaa

SEQ ID NO: 424309 - DNA, 201 bp, Homo sapiens
cacgtgggcctgcccactctcccatgatgcccgtaggcagctcagaatggttctcttggtcagagagaagccaaggtgatgtgaggggtagtttgtgtggmattcctaatgggaaacttacatgtgattctcagtttatttggtggctgttctccagtaagctcccttgcatcctgaattctctagtgtatttttgacctt

SEQ ID NO: 424310 - DNA, 201 bp, Homo sapiens
ttttgttggatattgaggaaaggcatatgtggccacatggttttgaagtagagtaacaggtgctgacagtctttcttctggcacttggagtatgtcatctsgctgcctctcactccatgatgtctgatgagaaatcagctgttggtatcactgaggctcacttgcacatagtatgtcgcttctccctttctgtgttcaaga

SEQ ID NO: 424311 - DNA, 201 bp, Homo sapiens
ttcctacaaacatgttagataaaaccaacacagatgtgtccccctcctgctgcagagactcaaggtagactctgataaaaaaaaaacacacagctgatcaygtaataggcgaagagagaaaacaaaagtagtgccgttgggaccaacacactctttagtggccgttcctgggtctgggtacttgttgggtttggtcctaga

SEQ ID NO: 424312 - DNA, 201 bp, Homo sapiens
agcgctgccacaaccctgcgtggctcccccaggaccagccccaagtaccgctgaggggtagcccctggctccaacatagcgccaaggctgctctggcggtygccgcagtaaccccggccacaacaagcagcggagaactcgcagccttgcgtccggaacccgaatccgcacccggcaaccggagcagaccattgtggagcc

SEQ ID NO: 424313 - DNA, 201 bp, Homo sapiens
aaagatgggtttcttgaataaatatgcaaatcagtccagtaaataaatgggcaaagtatatgacctggcagttcagagaagaggaaacccaaaatagccartaaatataaataggtgttcaaccttactagtaatttaagggcttgcaaattaaaccatcaaattagcaaaaataaaaatggtgctataactgtgagtgag

SEQ ID NO: 424314 - DNA, 201 bp, Homo sapiens
ttcttgaacaaaatttataggttttgcacattttcaatatcaataaaccagtcaccatagtttattacaagagtttcagccaaaattatttgaaatgactrttttaaatgtataaagctaagtaaatatcaggcaatgcaagaaataatgaggttaaatgtaatggatgattgttattctgaaaagataaagtttaaagtc

SEQ ID NO: 424315 - DNA, 201 bp, Homo sapiens
gcaagtgactgcagaggttggggagatgccagtgtaccatgaagtgtgttctgacatcagggctgtccagcagcggggcctcttgggctggctgccagggytcctggggtggatttctcgccctgggccagggtggcctccatgactgtttacagaggtcctcctgcctctgaaactctgtgtcagttacaacattgttac

SEQ ID NO: 424316 - DNA, 201 bp, Homo sapiens
cactttgggaagccaagaagggaggattgcttgaggccaggagtgtgagaccagcctggtcaacatagtgagacctcatctctaaaaaaaaaaagaagatyatatatgtatgtataaaaagtccatccttatcacagtgatttgaagccaaactttcatatatattttgatttatatctggacttttaatgctaccacact

SEQ ID NO: 424317 - DNA, 201 bp, Homo sapiens
attctgctgatttggggtagagagttctatagatgtctattaggtctgcttagttgagagctgagttcaaatcctgaatatctttgttaattttctgtctygttgatctatctaatattgacaatggggtgttacaatctcccactattattgtgtgggagtctaaatctctttgtaggtctcttagaacttgctttatga

SEQ ID NO: 424318 - DNA, 201 bp, Homo sapiens
ggtgctcctctattgggtgcatatatacttaggatagttagctcttcttgttgcattcatccctttaccattatgtaatgcccttctttgtcttttttttkatcttcattggtttaaagtctgttttatcagagactaggattgtaaccctgctttttttgctttccgtttgcttggtaaatattcctccatccctttatt

SEQ ID NO: 424319 - DNA, 201 bp, Homo sapiens
aaaacatcagatctcgtgagacttattcactaacacgaggaccgtgtaggggaaccgcccccatgattcaattatcccccactgggtccctcccacaacaygtgggaattataggagctacaattcaagatgagattggtagggacacagccaaaccatgtcatggtgtgaggtgcagatctaaatttcttttctccaaat

SEQ ID NO: 424320 - DNA, 201 bp, Homo sapiens
tttatagaactcttcactcaaaaacagcagaaaacaaatttcccaagactaattatattttgggccataaacgaaggctcaataaacataagctgggactwcaggcacatggcaccccatcccgggtaatttttgtgtattcttgtagagacagattttcaccatgttgtccaggctggtctcaaactcctgggctcaagc

SEQ ID NO: 424321 - DNA, 201 bp, Homo sapiens
taattatcacccattcctcaagaagcaagctatttaattctctcacccattttgtattttggaaacaatctgttgagctatattatactatctgttatacwcagtttaatgagattccactatcctcccatgtagatataggaaattgatcaatgataattcatctttggttacaaccctaatacaggtgttcaccctgcc

SEQ ID NO: 424322 - DNA, 201 bp, Homo sapiens
tatatgtatgtgtgtgtgtgtgtgtgtgtatcacctgcacacacagtaactcacacatacatatctttatatatttctatatctctgtctggatatgtatyaaaaattctaatgcaacaccactgggttcattgtagcctctcccttttctgtatttgtagcttatttcttaaacagtgagaaactttgctcttgttattt

SEQ ID NO: 424323 - DNA, 201 bp, Homo sapiens
ctgagggggttgcaggggaggtgagctcgcatggacctgtgtgtgatgtggttgctggggctgttgacctagtgtgggtttctcctgtgcaaacacagtgkcaagtggtgattctactctgctagttacatggcattgaaagtattttgcgtggtttattttaagcgggatattggcaatttagaaacactggactagggt

SEQ ID NO: 424324 - DNA, 201 bp, Homo sapiens
ttataattcatttggggaaaacgccatcagcgtgccacatggtcacccttcattatcatcacatagctactatctttttagatttctctcttggcagttaycaagaccgtgttatttaggtttagagttttttttgtttttgttttttgagacagagcttccctctatcatccaggcctgagtgcagtggtgtgatctcag

SEQ ID NO: 424325 - DNA, 201 bp, Homo sapiens
tgctttatgagaccatctaaagtaaaattttgtttgtttcagaaacgggtatgcaggagattagaagccagtgggcatgagcgtggctgccaccaggtgamtgcctgtgccctggcatcctggggcccagaggaccgggagcttccatcaagaggctgcctcccagcaccaaggccagagagtggccaggggaggctaagt

SEQ ID NO: 424326 - DNA, 201 bp, Homo sapiens
attcaattagagtgttgtgtgctttatgagaccatctaaagtaaaattttgtttgtttcagaaacgggtatgcaggagattagaagccagtgggcatgagygtggctgccaccaggtgaatgcctgtgccctggcatcctggggcccagaggaccgggagcttccatcaagaggctgcctcccagcaccaaggccagagag

SEQ ID NO: 424327 - DNA, 201 bp, Homo sapiens
catcatcctacggtcctgttccctcggaagtgacagggacccagtgtcagaaggagacctgtgaggatcggttaacctttcacagcttgattctcctcttkccttggtaatctgatggtccagaggattccctgggcctcttgagcctcttccttccccccctggaggcaaaggtgagagtctgagtggaccctccaacag

SEQ ID NO: 424328 - DNA, 201 bp, Homo sapiens
caataaaccagtcaccatagtttattacaagagtttcagccaaaattatttgaaatgactattttaaatgtataaagctaagtaaatatcaggcaatgcawgaaataatgaggttaaatgtaatggatgattgttattctgaaaagataaagtttaaagtcatctcctcaaatgccctataaagttttccagctccacagg

SEQ ID NO: 424329 - DNA, 201 bp, Homo sapiens
gcctgtgggccagagtgccacgctgctatgtgccaggatatgtggccaagtgtgacagagattcctagatgctgacgagcctctcattgcacagtggtacrgtgtctggccaactgtctatccccagccatctggttctcccagttacttctgcgggtgaaggtgaggagatgagaggcctgctctaggaaatgggttggg

SEQ ID NO: 424330 - DNA, 201 bp, Homo sapiens
ctggggctccagacccaggctccctaaaacatgggccgagactcattgcaggacctcgggtgcttggtatccgtgtcatgtcttctcctgccgtctacacytgactgttcctgagtctcgttcactgagcgcctgccacgtgccaggcccagggctgggtgttgggggacgagtacgtggggagcgaacacgcgcagaaaa

SEQ ID NO: 424331 - DNA, 201 bp, Homo sapiens
caagattgttgaatataagatgaacacacaaaaatagatagactcttacttactggtaacagtcaattagaagaacaaaactccattcacatggttgcagygtgaggatgtaagttactatctagtgttctgtatttcatcagcatttcttgtaaggcaagtcttctagcgacagattttctgtttttgtttatctgggga

SEQ ID NO: 424332 - DNA, 201 bp, Homo sapiens
agagttagaataaaatctgtcttgcctttgtggaggaagagctgaatcaagatatgattgcgctggtggaggaaacatcatcctacggtcctgttccctcrgaagtgacagggacccagtgtcagaaggagacctgtgaggatcggttaacctttcacagcttgattctcctctttccttggtaatctgatggtccagagg

SEQ ID NO: 424333 - DNA, 201 bp, Homo sapiens
ttttgcccattcagtatgacattggctgtgggtttgtcataaatagctcttattattttgaaatacattccatcagtacctagtttattgagagtttttakcatgaagggctggtgaattttatcagaggccctttctgcatctattgagacaatcatgtggtttttgtcattggttctgcttatgtcatggattacattt

SEQ ID NO: 424334 - DNA, 201 bp, Homo sapiens
aaggaattttttttaaacatttcttataggacaggtttgctggtgataatttttttttaacttctatattctgaaaaagttttttttttttttttttttgkttttttttttttttgagacagagtctccctctgtcaccaggctggagttgcagagagctcactgcaatctctgtctcccgggttcaagagattctcctgc

SEQ ID NO: 424335 - DNA, 201 bp, Homo sapiens
caccatgttggccaggatggtctcaatctcctgacctcatgatgcgcccgcctccacctcccaaagtgctgggattacaggtatgagcaaccatgcccggycaaaaaaatcttaattttatccttattttgaaagatatttccactgtgtgtggaattctaaattgataggtttttttctttcagtaatataaaaatgttg

SEQ ID NO: 424336 - DNA, 201 bp, Homo sapiens
ctaaagtaaaattttgtttgtttcagaaacgggtatgcaggagattagaagccagtgggcatgagcgtggctgccaccaggtgaatgcctgtgccctggcrtcctggggcccagaggaccgggagcttccatcaagaggctgcctcccagcaccaaggccagagagtggccaggggaggctaagtacaggggtatgttcct

SEQ ID NO: 424337 - DNA, 201 bp, Homo sapiens
gaaggaattttttttaaacatttcttataggacaggtttgctggtgataatttttttttaacttctatattctgaaaaagttttttttttttttttttttkgttttttttttttttgagacagagtctccctctgtcaccaggctggagttgcagagagctcactgcaatctctgtctcccgggttcaagagattctcctg

SEQ ID NO: 424338 - DNA, 201 bp, Homo sapiens
tttgagacagagtctccctctgtcaccaggctggagttgcagagagctcactgcaatctctgtctcccgggttcaagagattctcctgcctcagcctcccragtagctgggactacagatgcttgccaccatagctaatttttgtatttttatagagatgggatttcaccatgttggccaggatggtctcaatctcctgac

SEQ ID NO: 424339 - DNA, 201 bp, Homo sapiens
aactatcaaaccgcctgacttacttggaatttatagaactcttcactcaaaaacagcagaaaacaaatttcccaagactaattatattttgggccataaasgaaggctcaataaacataagctgggactacaggcacatggcaccccatcccgggtaatttttgtgtattcttgtagagacagattttcaccatgttgtcc

SEQ ID NO: 424340 - DNA, 201 bp, Homo sapiens
gaaactgactttaaaaaatcagtttccttttatttgtagttattctcaataaaatttcacccaggcttgggcgttttaatatttacacccactacttctgmaagtctaatgtaaataaagattgaaatgtgaatttgaaaagtcacacctcttgatatttgaacagactatagctgcatatatcttcttcttctaataata

SEQ ID NO: 424341 - DNA, 201 bp, Homo sapiens
gagataaaaagatggatagtataaaagtgtaattaggagtcatagaggaaagaatgagaatgcccattaggaaatccagaaggaaggactttagagaatgtttgagtagaatagttgaaaagataatggctgagaattttccagaattgaagaaaggcatatgtggtcaaacaattttgaagtagaataacaagcaaggga

SEQ ID NO: 424342 - DNA, 201 bp, Homo sapiens
ttgctattagccgactatggtgttactgatgggggaaaattgaaacttgtaaaattatgtggggaatacttaatatttccacttttcccctttaatccagktgattgaaagttgacagcaaaccagttttaacataacacacctccttttgcactgtaaggattgagcagatcctgaataaccagagattgaaagccttgg

SEQ ID NO: 424343 - DNA, 201 bp, Homo sapiens
tagtgagagagactagggatatttggttggagagaacaagcctccaaagtgtctgagaatgatcatcaaatatctgaatgtttatctcatacacaaggggytttgtttattttatgttgctcaaaggagaataattagaaacagtgggttgaggttgtgagaaggcaatttggtttagatcagtatttctctcacattagg

SEQ ID NO: 424344 - DNA, 201 bp, Homo sapiens
ctttaaaaaaaaaaaaagactcaattataagtccatctataagaaactcactataaatataaagatgcaatagataaataaaaggacgcaaaaaaaatcaygctaacactgaccagaagaaaggtggagttgctatattaataaaagacaaagtcaatttcagggtaaagaatattaccatggatataaaaggtgatttca

SEQ ID NO: 424345 - DNA, 201 bp, Homo sapiens
aaatgcataaaattgttggtattttcaaaacatctttgtttagggaaaattataattcatttggggaaaacgccatcagcgtgccacatggtcacccttcrttatcatcacatagctactatctttttagatttctctcttggcagttatcaagaccgtgttatttaggtttagagttttttttgtttttgttttttgaga

SEQ ID NO: 424346 - DNA, 201 bp, Homo sapiens
aattcatctttggttacaaccctaatacaggtgttcaccctgccagttatgcctacactcaatcatttcttttttttttttttttttgagatggtgtctcmctcttttgcccaagctggagtgaagtggcatgatcttggctcactgcaacctccgccccctgggttcaagtgattctcctgcctcagcctccctagtagc

SEQ ID NO: 424347 - DNA, 201 bp, Homo sapiens
gaagagggtttccaagttggttccattctccctgtcactttcaggtacactagtcaaatgtaggtttggtcttttcacatggtcccatatttcttggaggsttggttcattccttttcattcttttttcttaatcttatcttcatgctttatttcattaagttgatcttcaatctctgatatcctttctttggcttggtcg

SEQ ID NO: 424348 - DNA, 201 bp, Homo sapiens
tttccatgtagttgtgcggttttgagtgaatttcttaatcctgaattctaatttgattgcactgtggtctgagagactgttttgatttccgttcttttgcrtttgctgaggaatgttttacttccaattatgtggtcaattttagaataagtgcaatgtggtgctgagaagaatgtatattctgctgatttggggtagaga

SEQ ID NO: 424349 - DNA, 201 bp, Homo sapiens
gggcgacagagtgagactgtgtctcaaaataaataaataaataaataaataaataaataaataaataaaaataaaagaagaagattcagagttaaatatcyttgttttaccccattggttgcagattttatagctcatctgctgagtaagatctttgccgtgagaacctagtaaataaccagctgatgatgcagcccctga

SEQ ID NO: 424350 - DNA, 201 bp, Homo sapiens
cctgcacagaacagcatggacgtgagcagtccagtggggtggagcccagggtcactaaatataggcgtagggctggtggtacccagatcaggggatatgcrgggacctaagttccttcccctcacaccatcccctgggtgtcaccctcctctgcatagccaagggtggctcactgctactgtgctaccagatggcagaaaa

SEQ ID NO: 424351 - DNA, 201 bp, Homo sapiens
  misc_feature (1)...(201): n = A,T,C or G
ttaatcttctccattatctcaagataactcactcccctagaattcagttgccctcttactttgagtgttggcttgctcatatcagaacttgccttctcttngccaagctagacttggtcaagagtgtggactgaaagctcgagcatagtaggctgaggagtcttttttaaaaaaggtcacagtatcaagatgttaagatcc

SEQ ID NO: 424352 - DNA, 201 bp, Homo sapiens
tactgttcttactgcttgaggtataccttcccacctccaaagattctcttgctccttcgtggcccacccgagattcctgtcttgtgtgaagccttcttcargcccctcaccaggtagggtcacgtgctgtcttccctggctcctgtagcatttcgttctgatcactcgaaggagccatcagtatctgacgtcagtactctg

SEQ ID NO: 424353 - DNA, 201 bp, Homo sapiens
agctttttttaaaaaagaaatcattgtgtttttcaagttctgtggttggtgatgacgaaatgaattaaacagcatttccctgcagttcccctgtctcttcyctaagagacgcctgctgcctcctgggtctgcgcaccccacggcacctccaagtgagcctcccaggcttccactgactctgccccttcagtgcacagccca

SEQ ID NO: 424354 - DNA, 201 bp, Homo sapiens
tccagacagtccaccagagttagaataaaatctgtcttgcctttgtggaggaagagctgaatcaagatatgattgcgctggtggaggaaacatcatcctayggtcctgttccctcggaagtgacagggacccagtgtcagaaggagacctgtgaggatcggttaacctttcacagcttgattctcctctttccttggtaat

SEQ ID NO: 424355 - DNA, 201 bp, Homo sapiens
cacttcactcattaagctcacttgggaccatcacctccggaaaaggaagaagtccccctcaacaaatggttggtcttgcctcctcaggacaggcagcaagrcttcctgagacctgtggcagcttcgtgtgtttctatcattgaggcagcaccatccctgtttgctattttaatttagcatcgtttgaaacagcgtctattt

SEQ ID NO: 424356 - DNA, 201 bp, Homo sapiens
ctttgtgttctgtttgcccttccaggtcagatccactgcccacctttcctggcatctgcacaggaggccagcctgcatggcttacatccagggggtgccgrgggcacctgggctctcccacttccctttgggctcagccgctagggggatttggggcaggcaacaggaggctggagaacgagggcagggtatgtggccatg

SEQ ID NO: 424357 - DNA, 201 bp, Homo sapiens
ggctccccagggccttgtgcggaagggggcgtggtgcgcgggcctcggccaggcctgagatgccgggagggtttgaccctggggctgcatggacagcttakcgctcggccgctggcgacagcggagggcggaggatctgcaggttccgggggacgtggtgagcccccggggcctgggcgttagggacgggagggcggatgg

SEQ ID NO: 424358 - DNA, 201 bp, Homo sapiens
aaagtatgtaacttgatactaagcaaaagcatataactagtttcttgaacaaaatttataggttttgcacattttcaatatcaataaaccagtcaccataktttattacaagagtttcagccaaaattatttgaaatgactattttaaatgtataaagctaagtaaatatcaggcaatgcaagaaataatgaggttaaatg

SEQ ID NO: 424359 - DNA, 201 bp, Homo sapiens
gtatccactggaaacagtggacctctgattagggcaagaggtggaggaacaaagcgagggccagttgctgcattttcagcagggagagatgaatcagggayatttaaattaccaagatcatctttggtgtcatttctactggattccatttctgaaggcattgacccatccattttatccaaaggaggcatattaaaactt

SEQ ID NO: 424360 - DNA, 201 bp, Homo sapiens
gaattattcatattgtattaagaaagtatgtaacttgatactaagcaaaagcatataactagtttcttgaacaaaatttataggttttgcacattttcaayatcaataaaccagtcaccatagtttattacaagagtttcagccaaaattatttgaaatgactattttaaatgtataaagctaagtaaatatcaggcaatg

SEQ ID NO: 424361 - DNA, 201 bp, Homo sapiens
ttgtatccactggaaacagtggacctctgattagggcaagaggtggaggaacaaagcgagggccagttgctgcattttcagcagggagagatgaatcaggsatatttaaattaccaagatcatctttggtgtcatttctactggattccatttctgaaggcattgacccatccattttatccaaaggaggcatattaaaac

SEQ ID NO: 424362 - DNA, 201 bp, Homo sapiens
gtagtcacatgtgaattattcatattgtattaagaaagtatgtaacttgatactaagcaaaagcatataactagtttcttgaacaaaatttataggttttscacattttcaatatcaataaaccagtcaccatagtttattacaagagtttcagccaaaattatttgaaatgactattttaaatgtataaagctaagtaaa

SEQ ID NO: 424363 - DNA, 201 bp, Homo sapiens
gtaaccccggccacaacaagcagcggagaactcgcagccttgcgtccggaacccgaatccgcacccggcaaccggagcagaccattgtggagccggctgcsggggggagctgggggatgcgggcgctcacaggcccactctgcccacccagcccccttgttacactacatcctgaggtagcacatgttggacccgcgcaag

SEQ ID NO: 424364 - DNA, 201 bp, Homo sapiens
gcttcccatgtggcatttgtggaactaaaatacaaagcaggccgggcgcagtggctcatgcttgttatcccagcactgtgggaggccaaggcaggctgatmacttgaggtcaggagttccagatcagcccggctaacatggtgaaaccctgtctctactaaaaatacaaacattagctgggcttggtggcacacacctgtg

SEQ ID NO: 424365 - DNA, 201 bp, Homo sapiens
cccagcgtcaggctcgaacaccctatgagaactgtggcagtgacagtgcgggtttttgtggacttcatccccggacacagtgagaagctcttggctaagayacagggctgatttactcacactgtgagggaataagctgggaatggaagagtctggctgtgtcagtatagccaaatacgaatcccagaatagatgggtatg

SEQ ID NO: 424366 - DNA, 201 bp, Homo sapiens
gtaccgctgaggggtagcccctggctccaacatagcgccaaggctgctctggcggtcgccgcagtaaccccggccacaacaagcagcggagaactcgcagycttgcgtccggaacccgaatccgcacccggcaaccggagcagaccattgtggagccggctgcgggggggagctgggggatgcgggcgctcacaggcccac

SEQ ID NO: 424367 - DNA, 201 bp, Homo sapiens
tcgttatttacctattagtcattcaggaccaggttgttcagtttccatgtagttgtgcggttttgagtgaatttcttaatcctgaattctaatttgattgyactgtggtctgagagactgttttgatttccgttcttttgcgtttgctgaggaatgttttacttccaattatgtggtcaattttagaataagtgcaatgtg

SEQ ID NO: 424368 - DNA, 201 bp, Homo sapiens
tatccccagccatctggttctcccagttacttctgcgggtgaaggtgaggagatgagaggcctgctctaggaaatgggttgggggccggaggggccctggyggggattgccgtgagcctctcttactcccggatgtccctggtgagaggagccacttttgtgttgcttttgtgctgaatcctgattcaatatttagacatt

SEQ ID NO: 424369 - DNA, 201 bp, Homo sapiens
ctgttttgatttccgttcttttgcgtttgctgaggaatgttttacttccaattatgtggtcaattttagaataagtgcaatgtggtgctgagaagaatgtrtattctgctgatttggggtagagagttctatagatgtctattaggtctgcttagttgagagctgagttcaaatcctgaatatctttgttaattttctgtc

SEQ ID NO: 424370 - DNA, 201 bp, Homo sapiens
cctcccagacagctgctcccatccctgccatgtgcgccacaagcccctgctccagccgccacagcttctccgatcctggaacagtctgaccttgtactgtkcttactgcttgaggtataccttcccacctccaaagattctcttgctccttcgtggcccacccgagattcctgtcttgtgtgaagccttcttcaggcccct

SEQ ID NO: 424371 - DNA, 201 bp, Homo sapiens
ggaggcagaggttgcggtgagccgagattgtgccattgcactccagcctgggcaacaagagtgaaactgtgtctcaaaaaaaatatatagaatataactgyatatattaagacatgctacatatcagaattctttcatcattgtctaagaaaagctttttgcaggaaagatatttacaatgcacaaaatataaagatgggt

SEQ ID NO: 424372 - DNA, 201 bp, Homo sapiens
tggtcaattttagaataagtgcaatgtggtgctgagaagaatgtatattctgctgatttggggtagagagttctatagatgtctattaggtctgcttagtygagagctgagttcaaatcctgaatatctttgttaattttctgtctcgttgatctatctaatattgacaatggggtgttacaatctcccactattattgtg

SEQ ID NO: 424373 - DNA, 201 bp, Homo sapiens
gggattacaggcgtgagacaccgtgcccatcctggattatctgaatttatagcacaacactgctaaattattcccatgatacaaaggaggcagctgaaacrcagagggggtaattaactggcctaaggatacacagctagtaaatggtagaactaggtcttaaatccaagccatctggctccagagcctgccatcttaacc

SEQ ID NO: 424374 - DNA, 201 bp, Homo sapiens
aatatttgttgttgcactgttagagtaagaaaagccagaaacaacctaaatgttcatcaatagaatgaataaatgaattgcaatagatttactcaatgaartgttacagagagcagtgaaaatggatcaaatcaaatggagaaaaaaggaaattacagaaggatctacgtagaatgatactatctagatacaattttaagc

SEQ ID NO: 424375 - DNA, 201 bp, Homo sapiens
atacttagtggaagcatctgtgttgaagagaaaaggacgaggatgctattagcacttctgctcggtatgctagggctcctagctggcataatgtgataagaaaaaaaaaagaaacaatggacataagaattggaaagagaaaaatctaaattgttatttccagatggtataattatctacatagaatatccaaggctgacc

SEQ ID NO: 424376 - DNA, 201 bp, Homo sapiens
ccatttatgtttaaggttaatattgttatgtgtgaatttgattctgtcattatgatgctagctagttattttgcccgttaattgatgcagtttcttcatastgtcgatggtctttacaatttggtatgtttttgcagtggctggtaccagtttttcctttccatatttaatgcttccctcaggagcttttgtaaggtaggc

SEQ ID NO: 424377 - DNA, 201 bp, Homo sapiens
cttcaaaataagggcgttatttctactgagtggaagggctcagggtgcagtgttttggtgatatctaatgttttatcccctaagttttgtgagtcttgggygtgatgtatccacacatagataggtcatcatgacactggaggacatcaaaggcagagaaacgtgtagagctgctagagagaaatgactggctaagcatga

SEQ ID NO: 424378 - DNA, 201 bp, Homo sapiens
agacaggaggattgcctgagcccagtagttggaggctgcagtgagctatgattatgccactgtactccatcccaggcagcagggtgagaccccatctcttaaaaaaaaattttccagaaaatctgcagatagactagtagaactaatatccagcaagattgttgaatataagatgaacacacaaaaatagatagactctta

SEQ ID NO: 424379 - DNA, 201 bp, Homo sapiens
taagagtcatgctcctttgctgcaggtatgctggagtttgctggaggtccactccagaccctgtttgtctgggtatcaccagcagaggctgcagaacaccraagattgctgcctgttccttcttctggaagcttcgtcccagaggggcacctgccagatgccagctggagctctcctctatgaggtgtcagtcaacccctg

SEQ ID NO: 424380 - DNA, 201 bp, Homo sapiens
tgcagaacaccgaagattgctgcctgttccttcttctggaagcttcgtcccagaggggcacctgccagatgccagctggagctctcctctatgaggtgtcrgtcaacccctgctgggaggtatctctcagtcaggaggcacaggggccagggacccacttgaggaggcagtctgtcccttagcagagcttgagtgctgtgc

SEQ ID NO: 424381 - DNA, 201 bp, Homo sapiens
agcatcaccacgcccagctaattttttaaaacttttttgtagagacgggatcttgccatgttgcccaggctggtctcaaattcctgggctcaagtgatccrcctaccttggactcccaaaattctgggattacaggcatgagccactgcacctggcctcgtgtacaagtgtgtatgtatttatttacttattgaggcagag

SEQ ID NO: 424382 - DNA, 201 bp, Homo sapiens
gccgcccagttttgtgcttgaaacccagggccctggtggtgtaggcacccgagggaatctcctggtctgtgggttgcgaagaccatgggaaaagcatagtwtctgggctggagtgcaccgttcctcatggcacactccctcacggcttcccttggctggggagggagttccgtgaccccttgtgcttcccgggttaggcga

SEQ ID NO: 424383 - DNA, 201 bp, Homo sapiens
tcttctagagctacacaggcttggtaagtgcaggatccgtcttcccagttaatacaggcagcatttttttagatgtctttactgcgtagcgggaatgactrgctttctaccctgcaccatctctttcctcactactcactgcctggccgtgaagccagtaccacttaggtttctatcacagccgcacccctcctccaggta

SEQ ID NO: 424384 - DNA, 201 bp, Homo sapiens
cttctgtttagtttatatgtataaaattctctctttattgataattatctatttggtgagacatcattctgcttttctttaattcttaatcataatcttcttttttttttttttttttttgagatggagttttgctctcgttgcccacgctggagtgcaatggcatgatctcagctcactgcaacctccgcttcccaggtt

SEQ ID NO: 424385 - DNA, 201 bp, Homo sapiens
gtgccgttgggaccaacacactctttagtggccgttcctgggtctgggtacttgttgggtttggtcctagattgcacccagggctgggaactggaatgctsacgtccagagatagatgtggttttggcctaacaaaggtgtgggagctagaatttggatccttgcataaagtttagagcctgaagatctgattgtacccta

SEQ ID NO: 424386 - DNA, 201 bp, Homo sapiens
tcagattggaaatataaattgcaaatacatttaaaattccttctaaaaaacagggtttaggaaagggaccaggccactggatttggttaaaatagagaatyatttaaggacatcttggagaaaagatctttctcatttaattttccaaatagcaatcaacattgcttttttcttttccctgtttatgcttttcttgcatgt

SEQ ID NO: 424387 - DNA, 201 bp, Homo sapiens
gcatatatggcagtttgaaggcattataaatgagatttacatacacctataaattgtgccagggcaattagttatccatatatgaggaaagataaaattasatctctgcctcacacaaaatcaattctaggaggtgggaggtgggggtgggagttaataagaacctatatatgaaagaaaaacctttaacattgttagtag

SEQ ID NO: 424388 - DNA, 201 bp, Homo sapiens
gttcttttcagtgtggctatgttacttatttgtaatgtagttaggttcattatttttgtattccacttgggttcctctccccctatgtcttggtttacttmcatttttccctcactttttggcatgtgaaatgttactctggtgctttaatgcagagctctacactccctcttcatttctgttcccatgccaccctgttcc

SEQ ID NO: 424389 - DNA, 201 bp, Homo sapiens
ttaagctcacttgggaccatcacctccggaaaaggaagaagtccccctcaacaaatggttggtcttgcctcctcaggacaggcagcaaggcttcctgagayctgtggcagcttcgtgtgtttctatcattgaggcagcaccatccctgtttgctattttaatttagcatcgtttgaaacagcgtctatttctcggccacgc

SEQ ID NO: 424390 - DNA, 201 bp, Homo sapiens
  misc_feature (1)...(201): n = A,T,C or G
catggtattgtgtcccattactgctgttgttaaccttgtcacttgattacgatggttttatccacggtaaagttactatttttctctttacaattaatacnaatcttggggaagatagtttgaggctgtgcaaacatccagtttctccttaaacttttgcctcctaattttagcatctattattagatcttgcctgcaata

SEQ ID NO: 424391 - DNA, 201 bp, Homo sapiens
aatctgtgacactttgacagtcttttaggacctcgacacttagtgattattggttagttattttgttgtcccacattttcttatgattagagtcagggtgygcatttttggcatgagtactgcagaagtgatgttgtgccatcttggtacgttgtacggaggagggttcatggtattgtgtcccattactgctgttgttaa

SEQ ID NO: 424392 - DNA, 201 bp, Homo sapiens
aataatccacagtaagtaacagaaaatatgaataaattaattcactgtgctggctgagtgccactgagatgtcatcctcacattccctactagaacccacrctctgctcgccttggtggcagagtatggcttggctctcctttctcctactacaggctgtcgggaccctggcccttcagccccctgcgccccttgaagaat

SEQ ID NO: 424393 - DNA, 201 bp, Homo sapiens
gttcaacgtaagcagccccagatgtaaatgcctctgtggcagtcatttttctttggtccaggcccatccatgacaactgaactatttcccaagtaagtgtrtagatcagtatcgtatgtggtcagctctcaataatccacagtaagtaacagaaaatatgaataaattaattcactgtgctggctgagtgccactgagatg

SEQ ID NO: 424394 - DNA, 201 bp, Homo sapiens
agtggcttatgcctgtaattccagcattttgggaggctgaggcaggagaatcgcttgaacccaggaggtagaggttacagtgagctgagatcacgccactrcactccagcctgggtgacagagcgagactctgtctcaaaaaaaaaaaaattaaaaaattaaattttatatatatatattttctggatacttgtatcatat

SEQ ID NO: 424395 - DNA, 201 bp, Homo sapiens
tcaaaaagctcccatcacagggattttacagattttaaaaaccctgtatgaaagaacacatggatgatttaacattagaaaaatgactgcattgtctgatmaaagggaaaatagagatcatctgttacatgcagcaacagcatacagtcagatgcgaatcccattcatgatatatatttaaaaactccacaaaccagaaat

SEQ ID NO: 424396 - DNA, 201 bp, Homo sapiens
attttgtccacatcttcatatatagtcattctagtagatacggagcagtatctcactgcagtttttatttttactttttttgtagaggtacagtcttgctrtgttgcccaggctggtctcaaaccctggcctcaaatgatcttcccaagtcagcctcccaaaatgctgggattacaggcatgagcgcccatgcctggccat

SEQ ID NO: 424397 - DNA, 201 bp, Homo sapiens
gtgcatttccttgcagtccagttagctagcgtggtcacatgtgtcatagttcaatgacagtagtgttttatcgtttccattgggcagacatgttttgagcrcctgctgtgtctcaagccctgtcctaggcactggagatgagatgaagaaacgatgagtagaggccttgcttacgtttatcctgcaactcatgatgaggct

SEQ ID NO: 424398 - DNA, 201 bp, Homo sapiens
taatttttactgtggtatttacttaatgtatttccttctttccttttgcatttgttaattagaattcaactgtaaggaagtcctttcccttttcagctatktatttactcaattatttttgatatgggtagactaataggcatttactttattctgtggattatccagtgctgttttttatttattttattgcttaaatca

SEQ ID NO: 424399 - DNA, 201 bp, Homo sapiens
agtcattttaaatctcttgaagatcattttggcttcagctacttgtgatttgagggattctgactcatctgctagaggctgtatcgtttttgaaatatccrccatcaattcattttgttgcgaatgtttagatttctcttcttttaactctttttctagacagagaatttcatgctcaagttcagaattggacctgttcaa

SEQ ID NO: 424400 - DNA, 201 bp, Homo sapiens
gggatcttgccatgttgcccaggctggtctcaaattcctgggctcaagtgatccacctaccttggactcccaaaattctgggattacaggcatgagccacygcacctggcctcgtgtacaagtgtgtatgtatttatttacttattgaggcagagtttcggtctgtcacccaggctggagtacagcagtgccatctggttt

SEQ ID NO: 424401 - DNA, 201 bp, Homo sapiens
ttcccgcggcgtcccgcccctccctctccttattggctccccagggccttgtgcggaagggggcgtggtgcgcgggcctcggccaggcctgagatgccggkagggtttgaccctggggctgcatggacagcttagcgctcggccgctggcgacagcggagggcggaggatctgcaggttccgggggacgtggtgagccccc

SEQ ID NO: 424402 - DNA, 201 bp, Homo sapiens
gggagaaggaggaggaggccagagcatttctctctctctctagccctcccgcagtacatagctcctgcagagtagtccctctgggcccatctcttgcgagktccacctcctcctccctttgtcctcctggtgagtgtttggctcctgtagtagtccattttcacatcgctataaagaactacctggtgcctgtaattccag

SEQ ID NO: 424403 - DNA, 201 bp, Homo sapiens
ccaagtagctgggactacaggagtgtgccagctaatttttctaattttagtagagataaaactaaatacccaaaggaaaaggcagagaattaaaaaatcamgactcagcagtgcgtggtagctcaacacctgtaatcccagtactttgggaggccaaggcaggcagatcacttgaggtcaggagttcaagaccagtctgac

SEQ ID NO: 424404 - DNA, 201 bp, Homo sapiens
gtccagagaagttcaggaaatgctacatactttcccctgccttttagagacttgatgtccattagactgtgaaagacctcgagaattgcatgaagaaactkgtttccaaaatgtccttttgtaaagggatacctgctacacatgtgattctgggaatattctgggaagcgcaggcctgttgagtaaatgcagcacctgtat

SEQ ID NO: 424405 - DNA, 201 bp, Homo sapiens
tggtggcaggcgcctataatcccagctactcaagaggctgaggtgggagaaccactggaggcagaggttgctgtgagctgagatggcgccactgcacttcrgcttgggtggcagagtgagagtgtctcaaaaaaaaataaaaataataaactatcaaaccgcctgacttacttggaatttatagaactcttcactcaaaaa

SEQ ID NO: 424406 - DNA, 201 bp, Homo sapiens
ctgtgcgggctgtgtggaccatgggcgacatcaaggcaagtgcccacccttgcacagggcctcatctcgcccccctgcccctgccacctgcctgcccgggsttggggcagaacaagaagaggccacccatgggggacagtgtgggataggccatccctgacgtcacaccatctgtttccgccatcatcatcatcatcacag

SEQ ID NO: 424407 - DNA, 201 bp, Homo sapiens
tcaccagccgccacaagaacctggacactgtgcgggctgtgtggaccatgggcgacatcaaggcaagtgcccacccttgcacagggcctcatctcgccccyctgcccctgccacctgcctgcccgggcttggggcagaacaagaagaggccacccatgggggacagtgtgggataggccatccctgacgtcacaccatctg

SEQ ID NO: 424408 - DNA, 201 bp, Homo sapiens
caggcttttagggtctttgtcccagtgttctggtgtggtgagccttggggtgggtctgcttccaccctgtgctaggtcgtcactggtttcatgcggttgtrgtctggaaactcatgccctcagttctgggctgagcggagagtctcgcccactgctcctgtgctgtgcctcggtgccttagcaggtggtgccagctctacg

SEQ ID NO: 424409 - DNA, 201 bp, Homo sapiens
gcctccagacgcagccacagcaaaggaggcagcaaagcccagccctgccatggatgtgcagttcccggtgccaaatgtatgtccatggagggagcatggtrtggggcctagagaaggtcctgacccagggttgggggtgcctcgggaggcagagagggaggccccaggccggcaaccgctgagtttcacactttcagctgg

SEQ ID NO: 424410 - DNA, 201 bp, Homo sapiens
caccagggcatgctgtgcttggtgtcgctgaactcaagcgggccagggaggagtgagtccaggatggctgggctctcatggagaagatgggaaggctcagrcagaaggtgggcagctccctggacctgaatcccagcgcgtgggcaccagccattcagtattcaccgaagaacaagagacagaagggagaagccgagggcg

SEQ ID NO: 424411 - DNA, 201 bp, Homo sapiens
ccaagagcctgggtgttcctgtgagctggctgtgaagcattgctgcccctcaacagtccggaggtgggagtggaaacaggcgtgtgtgggtgtatgtgtgkgtgtgtctgtgtctgtttctgcccctctcctcctttgttccttgctgtttctctttctgtctgtggcccttggtccatctgtgacttcatccatctcccc

SEQ ID NO: 424412 - DNA, 201 bp, Homo sapiens
gcattgacatgcactgctgcctcgtgtgggtggggggatgtgcgggtgtgtgtgtgtgtgtgtgtttggatgtatgtgtgtttggatgtgtgtgtctgcgkgcacgtgtgtgtgtgtgtgtgtgtgtgtttagaacctagagggatgtcacatgccgccaggggccctgcaggtcacatgaatgagtgaggtggctgcgtg

SEQ ID NO: 424413 - DNA, 201 bp, Homo sapiens
ttgtaactggttggcatagcttttgtgtgctccacctggtcactgtctgctgccagctgtccctgggctggttttcaggagctgggacaagactccacacttttttttttttttgagacagagtctcactgtcacccaggctggagtacagtggtgcaatctcagctcactgcaacctctgcttcccgggttcatgcgatt

SEQ ID NO: 424414 - DNA, 201 bp, Homo sapiens
cgtggtggggacaccatcagtgcttcccccagctgtctgctcagtgaggcccaggacagcccagcatggctgggacagtggccagccctcaggagcgaggsagtcacctgcctgtggtactattaagaactccaggcaggctgcgtgagaagattaaaataagccctgggcctgtggttgagccaaaagacttgtacccct

SEQ ID NO: 424415 - DNA, 201 bp, Homo sapiens
atctcagcactttgggaggccaaggcaggaagatcacttgaggccatgagtttaagactaacctgggcaacaaaaggagaccccatctctatttttttttwaaaaaaaaaaaaaggagagagagagagctgcctcatatcggttgccttgaaaggccacccatcactggagggttcagatgtaggctgaggaggtgctcag

SEQ ID NO: 424416 - DNA, 201 bp, Homo sapiens
ctcccgagtagctgggatcacaggcacccgccaccacacccggctaatttttgtatttttagtagagacggggtttcaccatgttggccagactcgtctcraacccctgacctcaggtgatccacgtgcctcagcctcccaaagtgctgggatgacaggcatgagccaccatgcctggccaagactccacactttttaacc

SEQ ID NO: 424417 - DNA, 201 bp, Homo sapiens
ccaccatctgattatactggggcatatttcgtgcaaggcctagaacaggcacccaggaaatactgatattatgaatgaatgcccctgactccaggggcagyagtcctgaggcccagtgaggtggggcccagccagacactttccctgggaggagtgagggccaggggacagacagagccctccaggtaggccagggggagc

SEQ ID NO: 424418 - DNA, 201 bp, Homo sapiens
agccattcagtattcaccgaagaacaagagacagaagggagaagccgagggcgccgtgccccctgtccaggctttctcatccacaattgttttgctcacargggaaatgtgaggaattccttgaggtggctgagaaatgaaaactgaagattgctggattcctgggccctggacggccagggctggctgctccacaaggaa

SEQ ID NO: 424419 - DNA, 201 bp, Homo sapiens
gctacccccatcatttgcttttgtgtttgttttatgagtttgagtatagagttctatgttggcaataaaatatcgccctcagaatttggaaggtgcagctyttctgccttttaggttctaggttgctattgggaggggccggtgttgttctgatcccagatccttcacaggggactggcttcattccatgttctgtctctt

SEQ ID NO: 424420 - DNA, 201 bp, Homo sapiens
gctgtgctctgatggaactgagaggggggcctgggcactccccagcagcggcccagcagctgctcagtgtcccagtccctgccctgccagggacaagtggkctgggaggggcaggactgagggttcctgggaccaggagcagggtccacagtctgcagccgcatgcctgggagctaccctccgtcccccgcactctggaca

SEQ ID NO: 424421 - DNA, 201 bp, Homo sapiens
cacgcacacctgccttagtcttcaggctctgcagttgtgctgcttcctccaggaagcctgcctggactacgttggctgctttgctcctggagcactaaccsggcagtgtggcacccactccacccccattagcctggcattgacatgcactgctgcctcgtgtgggtggggggatgtgcgggtgtgtgtgtgtgtgtgtgt

SEQ ID NO: 424422 - DNA, 201 bp, Homo sapiens
ggagaagtgagcccttccctgcacccccagaggacggtgagttgggtgagcctggtttcccaaggtctctgatgcccccccgtccctcatcttctcttccygtgaaccctcccaacaagccccttcccaggaccctcccctctcaggacacgacccacaccctctcccgctgggtctctgccctctgcctgttatgtgcca

SEQ ID NO: 424423 - DNA, 201 bp, Homo sapiens
ttttctgagatccagggggagaactgagatccaccccagcctcagcaagggtgccaggggtcagtaatgatgaattgaattgttttgttttactttgtttytaggattcaaatgtgttttctacccccatgaaatgccaaagtagtagcatacacaagttgaaaaagcatcaccaatgactgaccaaaaataggacatgcc

SEQ ID NO: 424424 - DNA, 201 bp, Homo sapiens
taggcttcgcagcacagcttggctgcctttgcaggacaatccgcttctgggacctggagaagttccaggtggtgagctgcatcgaaggggagcctgggccmgtcaggtacgcaggctgtggggtgggcggcccagcgctcctcccggcagtggggcgtggctgtgggtgggcctttcccatctccgctgctgcgccctccc

SEQ ID NO: 424425 - DNA, 201 bp, Homo sapiens
ccccagatgttgctcctggtggccctgccctgggggagaggtttctagagaaaagctggcttcccagggacatgtggaggccaggatgagggataggcttygcagcacagcttggctgcctttgcaggacaatccgcttctgggacctggagaagttccaggtggtgagctgcatcgaaggggagcctgggcccgtcaggt

SEQ ID NO: 424426 - DNA, 201 bp, Homo sapiens
tggtgggccctgccccacctattgtaactggttggcatagcttttgtgtgctccacctggtcactgtctgctgccagctgtccctgggctggttttcaggrgctgggacaagactccacacttttttttttttttgagacagagtctcactgtcacccaggctggagtacagtggtgcaatctcagctcactgcaacctct

SEQ ID NO: 424427 - DNA, 201 bp, Homo sapiens
tttcctctctctctctgtctctgcaggcttttagggtctttgtcccagtgttctggtgtggtgagccttggggtgggtctgcttccaccctgtgctaggtygtcactggtttcatgcggttgtggtctggaaactcatgccctcagttctgggctgagcggagagtctcgcccactgctcctgtgctgtgcctcggtgcct

SEQ ID NO: 424428 - DNA, 201 bp, Homo sapiens
ctttctagaccacatggtcataccacagtttctttcttttcttatttaaaaaacaccgtggccaggcgcagtggctcacgcctataatcccagcactttgrgaggccaaggcaggcggatcacctgaggttgggagttcgagaccagcctgaccaacgtggagaaaccccatctctactaaaaatacaaaattagccgggt

SEQ ID NO: 424429 - DNA, 201 bp, Homo sapiens
ttgggaggccaaggcaggcggatcacctgaggttgggagttcgagaccagcctgaccaacgtggagaaaccccatctctactaaaaatacaaaattagccrggtgtggtcgcacatgtctgtaatcccagctacttgggaggctgaggcaggagaatcacctgaacccgggaggtgggggttgtggtgagccaagatcgca

SEQ ID NO: 424430 - DNA, 201 bp, Homo sapiens
ctggggctgggattttgccccctcggcttgcagtcccagccccacctctccgctttctgcagataggtgtggccttctcccagagcaacgtctcctcctaygtggtggatctgacgcgtgtcaccaggactggcacggtggcccgggaccctgtgcaggaccaccggcccctggcacagccactgcccaaccccagcgccc

SEQ ID NO: 424431 - DNA, 201 bp, Homo sapiens
caaggcaggcggatcacctgaggttgggagttcgagaccagcctgaccaacgtggagaaaccccatctctactaaaaatacaaaattagccgggtgtggtsgcacatgtctgtaatcccagctacttgggaggctgaggcaggagaatcacctgaacccgggaggtgggggttgtggtgagccaagatcgcaccattgcac

SEQ ID NO: 424432 - DNA, 201 bp, Homo sapiens
aatagttcctttttttttttaatctgtgtgttttctatgtccatattactcattcatccccaaattctctgccagaagagtaaagctcctcctgtttcttwgaaacccatcccataatccaggcgccttttctcagagcctctcctctggtcctagtgacctgcagcccagctgtcatcctgggcctctgtgtctcttctc

SEQ ID NO: 424433 - DNA, 201 bp, Homo sapiens
tgagtatagagttctatgttggcaataaaatatcgccctcagaatttggaaggtgcagctcttctgccttttaggttctaggttgctattgggaggggccrgtgttgttctgatcccagatccttcacaggggactggcttcattccatgttctgtctcttccttcctctctctctctcttttctttcctctctctctctg

SEQ ID NO: 424434 - DNA, 201 bp, Homo sapiens
gctccatccgtgtctgggacctggaagctgccaaaagtaggcctccgagcttgcctcctgtgcacgcacacctgccttagtcttcaggctctgcagttgtrctgcttcctccaggaagcctgcctggactacgttggctgctttgctcctggagcactaaccgggcagtgtggcacccactccacccccattagcctggca

SEQ ID NO: 424435 - DNA, 201 bp, Homo sapiens
tgctcctgctccatccccccattgcagatgctgcccagagtcccgccctgagccctgcccttcttgccaggcccttctggccggacccagtcatcttttcyttttgcctccagacgcagccacagcaaaggaggcagcaaagcccagccctgccatggatgtgcagttcccggtgccaaatgtatgtccatggagggagca

SEQ ID NO: 424436 - DNA, 201 bp, Homo sapiens
ggcctgcagcctcccccatgctcctgctccatccccccattgcagatgctgcccagagtcccgccctgagccctgcccttcttgccaggcccttctggccrgacccagtcatcttttccttttgcctccagacgcagccacagcaaaggaggcagcaaagcccagccctgccatggatgtgcagttcccggtgccaaatgt

SEQ ID NO: 424437 - DNA, 201 bp, Homo sapiens
tccgttgggcttggcctcacgctcccagggtgaagcagaactcagagagcgagcgccgcagccccagcagcgaggatgaccgggacgagcgcgagtcccgygcggagatccagaacgccgaggactacaacgagatcttccagcccaagaacagcatcagtgaggccgggctcccgcccccagcccagcgtccccatcggt

SEQ ID NO: 424438 - DNA, 201 bp, Homo sapiens
catctacctaacagcatccctcatcctccacccactgacatctactcaaataccacctcctccataaagccttcctggatttctctttccaaccaagcagyttctctcccagcttgaacctctcctggtctgtctctctccttgcactgtcttgggtggggttcagtgccctgcaaaccataagctccacacccatggggc

SEQ ID NO: 424439 - DNA, 201 bp, Homo sapiens
gggcagccaagatgcctggtcaccctgacctcctccctgccctgcctccagctctgggatctcactgccggcaagatgatgtctgagttccctggtcacasggggcctgtcaacgtggtcgagtttcaccccaacgagtacctcctggcctccggcagctctgacaggtgaggaggaggagcgaggcgagttgcttgtgac

SEQ ID NO: 424440 - DNA, 201 bp, Homo sapiens
gggcccaggatcccagggtgagctcatgccgtgtcctccctcaggggcacagccaggccgtgcggtgtctccggttcagccccgatgggaagtggttggcrtcggccgcagatgaccacaccgtgaaggtagctcccggcctgacctgggcccaggggctgggggctggggtctgctgatcacagcaggctgagtcctcac

SEQ ID NO: 424441 - DNA, 201 bp, Homo sapiens; identical to SEQ ID NO: 123784

SEQ ID NO: 424442 - DNA, 201 bp, Homo sapiens
tgaatcccctagagccacgttcatcaaactgctccaagcagaaccaggcgggtaaccagtgttgttagatggaaggggtcccataggagtgaggaggcagrgagaggtctgttgggcccaggatcccagggtgagctcatgccgtgtcctccctcaggggcacagccaggccgtgcggtgtctccggttcagccccgatgg

SEQ ID NO: 424443 - DNA, 201 bp, Homo sapiens; identical to SEQ ID NO: 123786

SEQ ID NO: 424444 - DNA, 201 bp, Homo sapiens; identical to SEQ ID NO: 123787

SEQ ID NO: 424445 - DNA, 201 bp, Homo sapiens
gcttctgctcagaatgccagctttagtgagcagtttctgtccttgtctccgtggggagtaacgacctagagaaggctgggccccaccgtctgctcacgacygcacaccttcctccagtcgtggctctgacctctcctgactctgcccctctgcttctctctcccccacagctctgggacatcaggaggaaaggctgtgtct

SEQ ID NO: 424446 - DNA, 201 bp, Homo sapiens
cagcacagcttggctgcctttgcaggacaatccgcttctgggacctggagaagttccaggtggtgagctgcatcgaaggggagcctgggcccgtcaggtaygcaggctgtggggtgggcggcccagcgctcctcccggcagtggggcgtggctgtgggtgggcctttcccatctccgctgctgcgccctccctgccctggg

SEQ ID NO: 424447 - DNA, 201 bp, Homo sapiens
ccctgacctcaggtgatccacgtgcctcagcctcccaaagtgctgggatgacaggcatgagccaccatgcctggccaagactccacactttttaaccatgwatttaaccataagactctgggcaaagctctttgcagggcctctgtttccttgtttgtaaagtgagaggtttgggccattttcatgttgttccccaaaact

SEQ ID NO: 424448 - DNA, 201 bp, Homo sapiens
ttcgggggcccaggagagggactgtcacaggggaagcctcggagttccagccctgggcctcacagggcacctgcttccgttgggcttggcctcacgctccyagggtgaagcagaactcagagagcgagcgccgcagccccagcagcgaggatgaccgggacgagcgcgagtcccgcgcggagatccagaacgccgaggact

SEQ ID NO: 424449 - DNA, 201 bp, Homo sapiens
ctttctgcagataggtgtggccttctcccagagcaacgtctcctcctacgtggtggatctgacgcgtgtcaccaggactggcacggtggcccgggaccctrtgcaggaccaccggcccctggcacagccactgcccaaccccagcgcccccctccggcgcatctatgagcggcccagcacaacctgcagcaagcctcagag

SEQ ID NO: 424450 - DNA, 201 bp, Homo sapiens
atgaccgggacgagcgcgagtcccgcgcggagatccagaacgccgaggactacaacgagatcttccagcccaagaacagcatcagtgaggccgggctcccrcccccagcccagcgtccccatcggtgaaagggaggctgggggtccttccagggtagcctgctgtggctccgcatccctttaacttcctcctaacccacac

SEQ ID NO: 424451 - DNA, 201 bp, Homo sapiens
gtggcaggcatctatctgccagatgcttctgctcagaatgccagctttagtgagcagtttctgtccttgtctccgtggggagtaacgacctagagaaggcygggccccaccgtctgctcacgactgcacaccttcctccagtcgtggctctgacctctcctgactctgcccctctgcttctctctcccccacagctctggg

SEQ ID NO: 424452 - DNA, 201 bp, Homo sapiens
ccctgggccctctggattcctcggggtggggaccaggctgggtgccacaggacccacggccatctctcgcctggcccaggagcgtcctcttcaacccagayggctgctgcctgtacagcggctgccaggactcactgcgtgtctacggctgggaacctgagcggtgctttgatgtggtcctcgtcaactggggcaaggtgg

SEQ ID NO: 424453 - DNA, 201 bp, Homo sapiens
catttgcctcttagccactgtctctgctttccttcttgttagttcttcgcacactcatgggacacaaagccaacatctgcagcctggatttccacccgtayggcgagtttgtagcctctggttcccaggacacaaacatcaaggtgagaggccggtccgtgccccgtgtctcctgctgggcctgtggcaggaccagcccgg

SEQ ID NO: 424454 - DNA, 201 bp, Homo sapiens
tgtgggtggagggcagagctttgctgctggctcctcccatgccagcatctgggtgtccatcccacgcaggccgtgaagatcccccagcaggccgagctggyggacgaggatgccatgtcacagatccgcaaaggccacgacaccatgtgtgtggtgctcaccagccgccacaagaacctggacactgtgcgggctgtgtgg

SEQ ID NO: 424455 - DNA, 201 bp, Homo sapiens
atgaacccatcctaaagcacttagcacagcatttccagttaggctgacagtggggtgagaaatcctgaaagatgttcacagcattctcagacatctcacawgtcaaacttccccagtcagataaaagcatcttgggcctgggatgggggaaggagtgggagcgaggaggggcgggcagagggatgcagacagggctcggat

SEQ ID NO: 424456 - DNA, 201 bp, Homo sapiens
tcaaacttgtaatttcatggacattgcttaagcccaagctaataaaaatagcaagtcaattttaaaaattgcgtataactagtcaatattaccaggtgatrtgcagaaacaggaagaaaatcgtgaagtctaaaggtaggaaggacaggcatgatgaaagttgagaaacagtgatttccgtctcaggcccatgccctgccc

SEQ ID NO: 424457 - DNA, 201 bp, Homo sapiens
tttaggcagccagcatcccggaacagagctgcagctcattatcctggcctctgggaggagtttctttttccttacgttccaaatcaccctacctgaggtgycccctctgcagattcccaaacctaatttgcagtgcagcttctgactctggtggctttggtgggtgtcagtctttatcaagtggtcttggtgatccaggga

SEQ ID NO: 424458 - DNA, 201 bp, Homo sapiens
taaaaatagcaagtcaattttaaaaattgcgtataactagtcaatattaccaggtgatgtgcagaaacaggaagaaaatcgtgaagtctaaaggtaggaargacaggcatgatgaaagttgagaaacagtgatttccgtctcaggcccatgccctgccctgtctgctggtcctgcagctcatggtggacaccaaaggggga

SEQ ID NO: 424459 - DNA, 201 bp, Homo sapiens
gtatcatagaaagagtatcatgagtatatcaaacttgtaatttcatggacattgcttaagcccaagctaataaaaatagcaagtcaattttaaaaattgcrtataactagtcaatattaccaggtgatgtgcagaaacaggaagaaaatcgtgaagtctaaaggtaggaaggacaggcatgatgaaagttgagaaacagtg

SEQ ID NO: 424460 - DNA, 201 bp, Homo sapiens
gactcttggtgaaataaagatgaagaggaataggccgggcacagtggctcacgcctgtaatcccagcactttgggaagctgaggcgggtggatcacctgargtcaggagtttgagaccaccctggccaacatggtgaaatcctgtctctactaaaaacacaaaaattagccgggcgtggtggcaggcacctgtagtcccag

SEQ ID NO: 424461 - DNA, 201 bp, Homo sapiens
ggtgttgttctgatcccagatccttcacaggggactggcttcattccatgttctgtctcttccttcctctctctctctcttttctttcctctctctctctktctctgcaggcttttagggtctttgtcccagtgttctggtgtggtgagccttggggtgggtctgcttccaccctgtgctaggtcgtcactggtttcatgc

SEQ ID NO: 424462 - DNA, 201 bp, Homo sapiens
acacctgtaatctcagcactttgggaggccaaggcaggaagatcacttgaggccatgagtttaagactaacctgggcaacaaaaggagaccccatctctatttttttttaaaaaaaaaaaaaaggagagagagagagctgcctcatatcggttgccttgaaaggccacccatcactggagggttcagatgtaggctgagga

SEQ ID NO: 424463 - DNA, 201 bp, Homo sapiens
cagggccatcgggccgagcctcccccttgcaaagtcagggccagctctgccccagatgttgctcctggtggccctgccctgggggagaggtttctagagaraagctggcttcccagggacatgtggaggccaggatgagggataggcttcgcagcacagcttggctgcctttgcaggacaatccgcttctgggacctggag

SEQ ID NO: 424464 - DNA, 201 bp, Homo sapiens
gttccctggccccagtgtcccaggtctgtggcttcatgggcaggttgggacccaaggcatctagtgggaccccatagggcagggaggctcgtggctgttgrggccaaccctggggccagggccatcgggccgagcctcccccttgcaaagtcagggccagctctgccccagatgttgctcctggtggccctgccctggggg

SEQ ID NO: 424465 - DNA, 201 bp, Homo sapiens
cctcctgatcgggctcacatgtcccaagcctatcccgagtggaaggtagcttgtggataaagagcttggcctggattagagggagggtgggcagccaagaygcctggtcaccctgacctcctccctgccctgcctccagctctgggatctcactgccggcaagatgatgtctgagttccctggtcacacggggcctgtcaa

SEQ ID NO: 424466 - DNA, 201 bp, Homo sapiens
gccctctgcctgttatgtgccaggtccctgcaagaccgatagtgcccccgtaggagcctgtgccctggtgtgtgggggacaaacatggacaccaccacackggggggcctgccaggggcactcgggctgtggaggatggagaggagtcactgggggcccaccttagatggggtctgctgtagacgggatgatcgggaggct

SEQ ID NO: 424467 - DNA, 201 bp, Homo sapiens
ctcaggaggcccaatgcctgtcaaggcctgggggccagtgagaagagagagagagaagtgcttctggcaggaagggagctgagaggaggtgagctggggcsagtcccagcaagaggtcaggcccacaaggcctcagctgggggtttggattaagaagggagaaaaatgatctgcactgtggttggagaacgggcaggcatg

SEQ ID NO: 424468 - DNA, 201 bp, Homo sapiens
tctgtccttgtctccgtggggagtaacgacctagagaaggctgggccccaccgtctgctcacgactgcacaccttcctccagtcgtggctctgacctctcytgactctgcccctctgcttctctctcccccacagctctgggacatcaggaggaaaggctgtgtcttccgatacagggtaaggatgcgctctgtcggtgac

SEQ ID NO: 424469 - DNA, 201 bp, Homo sapiens
actcatgggacacaaagccaacatctgcagcctggatttccacccgtacggcgagtttgtagcctctggttcccaggacacaaacatcaaggtgagaggcyggtccgtgccccgtgtctcctgctgggcctgtggcaggaccagcccggcccggccctcagtgctggatgcctgctgaggggacctcttccctttctgcag

SEQ ID NO: 424470 - DNA, 201 bp, Homo sapiens
caagcagcggccaatcaaggcaggggatggaggcaagtgggggtcgcgcctggagcggagcctcggcctccggagccgcagctgcaggtggagtgggcaargggacgaggtggcgaggggacggtgggccctgggctgggccgagccaggcggggctggctgggcttgcgggcagagagctctgagcgtggggaggctaga

SEQ ID NO: 424471 - DNA, 201 bp, Homo sapiens
gttcctagctctgtccttgggaatcgcagggagcaggagcggttcccttgccaggagctggggaattggaccatcagggtcgtcttcgagattctttccarggaggacttcagtggccgtctctgggatgcctttcctaggcccctaagcttagcttctgactccgctctcccacatcccacacgtcagacaaaaacaacg

SEQ ID NO: 424472 - DNA, 201 bp, Homo sapiens
gaattcccctacacattggcaccttggtgggccctgccccacctattgtaactggttggcatagcttttgtgtgctccacctggtcactgtctgctgccasctgtccctgggctggttttcaggagctgggacaagactccacacttttttttttttttgagacagagtctcactgtcacccaggctggagtacagtggtg

SEQ ID NO: 424473 - DNA, 201 bp, Homo sapiens
ttccgcgagctgcacctgctcatggccagtctggactgaggaaagcagtgggcaggggcgctcggcagcccacagggcctggcctcagcccccactcctgytccttgtgcacccactggcccatgagcctctgcctggcccctgctgctgtcctgtggccgtcctggaggaggtgatgctggtccctggccacctctacag

SEQ ID NO: 424474 - DNA, 201 bp, Homo sapiens
tgagccgtaattagcttagccacaccctgttatcagcagagaggttgtttccggctttttttggctctgctaaagcaccctgtggtgaacatcctcagccrcctagatccttgagcagatccgtgatcactgcattcaatccaagggtgtgtgcttttgttaaagctttcaaaacagattgccaaattgccccccagaaat

SEQ ID NO: 424475 - DNA, 201 bp, Homo sapiens
tgtacagcgggagctcagagcctggggagagcaacaggcaggaactggataaccgtatccctctgtgtctcctctagttgcaagctggtgcctgtgctttraatcagttagctggggggtaggggtaggggtggggtgggaatgctgcaggctgcatgaacagcaagtgcaaaggccctgaggcaggaggctcagtgtatt

SEQ ID NO: 424476 - DNA, 201 bp, Homo sapiens
ctttctgtctgtggcccttggtccatctgtgacttcatccatctccccctaaagctacgtccagacgggctgcacctccctgaagctgatcctgcagcggkttctgcccctcatcacagacatgctggcggccccaccctctgtgggtgtggatatcagcagggaggagaggtgagggcagcgcatgtgttgggggcaggg

SEQ ID NO: 424477 - DNA, 201 bp, Homo sapiens
gcagggttatgccagcaatgtggcccctgtgtcttcaggatcagcgggtgggaacggagcagcatttctggggtcagctgggtatctgtgctgccagaacrgggccctgggacaggcatgctgctggttgtgccagcagcttggcattaattaatgtcctggaggcctgtctgttgagtgcctaacaaggaacagatggga

SEQ ID NO: 424478 - DNA, 201 bp, Homo sapiens; identical to SEQ ID NO: 259671

SEQ ID NO: 424479 - DNA, 201 bp, Homo sapiens; identical to SEQ ID NO: 259672

SEQ ID NO: 424480 - DNA, 201 bp, Homo sapiens
tggtgttcctcttactggaaacagtagggagactgagtggtggccgagagcacagcagaggaggccagggggcctctaggccccacccctcctcggccctrctgtgccatgcgtacactaggtccttggcaggcagggtcccagggtgcagtggccctaggcagcccccatttcaagataccactcagagccaggccattt

SEQ ID NO: 424481 - DNA, 201 bp, Homo sapiens
ggggaagtgagacgctgcttctcagctcagacacagcccggccttgccagccgcccctgctgctgctgtggtgacaacttcaacaatagcaggggagccgyctgcccatcggtggccaccattgctgccactaccaccaccactggcccagctgttgggatgccagccagccctctggggcgggggctgcagcaggcagaa

SEQ ID NO: 424482 - DNA, 201 bp, Homo sapiens; identical to SEQ ID NO: 259675

SEQ ID NO: 424483 - DNA, 201 bp, Homo sapiens; identical to SEQ ID NO: 259712

SEQ ID NO: 424484 - DNA, 201 bp, Homo sapiens; identical to SEQ ID NO: 259713

SEQ ID NO: 424485 - DNA, 201 bp, Homo sapiens
gatgtcgttgaggcgggaccccagacactccacagatagtgtcttgtaccactcctctgcctctagctctgaagaaaatgctacttcatcatgcagctccrgagcccggtagcccaccccgtctgcccagcctgacttatgccaccatgcacagcagggagggtaaggacagtgggttctgcctgcctgtcttgcctcaac

SEQ ID NO: 424486 - DNA, 201 bp, Homo sapiens; identical to SEQ ID NO: 259679

SEQ ID NO: 424487 - DNA, 201 bp, Homo sapiens; identical to SEQ ID NO: 259715

SEQ ID NO: 424488 - DNA, 201 bp, Homo sapiens
ccggtagatctgtggagcgagatgacagggctcaggcctccctggaccactcccaccccaccagcatggccctgcagccacccctgcctgccacagggggyggtgccgcacagccttccctggagccccagcctggggacaccgggggtgggagtcaccagcagtgtcacctccctgggagagaagcctcctccccaaatt

SEQ ID NO: 424489 - DNA, 201 bp, Homo sapiens
gcctcatccttgggggcaaggagggggcagcttgctccctttctccaggctcttggccgacagccccctgaggctgtccacggtacactgcagccagcccsgcagcaggcagcccccagcagtcatcggtgctcgccagcactgtggtcactgggatggggtcttggcctcactgctgtccccctggctgggctttggctt

SEQ ID NO: 424490 - DNA, 201 bp, Homo sapiens
tgggcaagttactcctctaagcctccatttcatttcttcgtctgtaaaatgggaacattacattcccccttgggattgctaggccaataagtaaaccaagytcctagcacagtgcccaacacagagtgaatggcagccaccatcacaccatagtaggacagggctgggaggcgagagggtcctaccggccagcctcgaagg

SEQ ID NO: 424491 - DNA, 201 bp, Homo sapiens
ggccctgagtcacagggacccctggccacacttagtccctaatgatgtttgcaagagcaagacctaacctaggacccaaaatggtgggcaaagaggggttsggaaggggagggaaaggtcagggccaataggtggacccacaaatttgacaggcagtggggtcaagtggtgaggggggggcccagaaccaacccaccatcc

SEQ ID NO: 424492 - DNA, 201 bp, Homo sapiens
atagcttcacttgacctgcatgctgtgggcaagttactcctctaagcctccatttcatttcttcgtctgtaaaatgggaacattacattcccccttgggaytgctaggccaataagtaaaccaagctcctagcacagtgcccaacacagagtgaatggcagccaccatcacaccatagtaggacagggctgggaggcgaga

SEQ ID NO: 424493 - DNA, 201 bp, Homo sapiens
ggtcgcaggagatgacccctgcgtgtctgagtgaaccccatgctctgcaatgttaaagacaatttgcctggtcagctcagcagcccccacaaacccctctrccctcctgccccacccggtcctctacctgtttctctccagccccaggctaagaatcactacctcgagctcacgcagggcctgttcccaggccctgcaact

SEQ ID NO: 424494 - DNA, 201 bp, Homo sapiens
ctgggaccgcaggtacataccaccatgcccagctaatttttaaaaacttgtttgtagagatggggcttttgtttttttttttttttttttttgagacggastctcactctattgcccaggctggagtgcagtggcccaatctcggctcattgcaagctccgcctcccgggttcacgccattctccttcctcagcctcccga

SEQ ID NO: 424495 - DNA, 201 bp, Homo sapiens
cctggggtccaagaacctcccacagttaggcagtctacattcctcctataaggtctggtctggggtcccctcactggcaactgatccccaacagctctgcyacacctgggctctggcagccagagatgggtcaattttctcagctctgtcttcaccgcctgcctctggggctgccttctcctcagagcaaggaccagctca

SEQ ID NO: 424496 - DNA, 201 bp, Homo sapiens
tgttgagtgcctaacaaggaacagatgggactaccccagtgggcacacgcacagatgggactaccccagtgggcacacgcaaacaagggaggggcagagasggtaatgcgcccctatcccacttgcaccctgatagcccctcaattccactcctgcccattcactgcctctatcccagctccctggggtccaagaacctcc

SEQ ID NO: 424497 - DNA, 201 bp, Homo sapiens
actccgcatgccccccaaccccactcaggctgagccagggatccttgagcagcctgagccgacccgcccccttcaaggcaatgggagagagaagggagaargggacaggagtcctgggtcaaacacaagacttgggtgacctcagtcaccagggctgtccttcctacaggggaaggggcaactgccagacctgtctttggc

SEQ ID NO: 424498 - DNA, 201 bp, Homo sapiens
agctgcccttgcatgacccctccctcctgcctagacttttttctgcccaaagtctgtggctggggtttacctactccttccagcgggcattccaaaagccygacagagcctgttccccaggcatctctggtgttcctcttactggaaacagtagggagactgagtggtggccgagagcacagcagaggaggccagggggcc

SEQ ID NO: 424499 - DNA, 201 bp, Homo sapiens
gcttctgccttgaaaactccaagggctgtgtgtatgtatatatatatagttttcttcaagagttgctgcccagacagggcggtgaaaccaccagaagccarcctgctccttcccagtgttgccccaccagggactgtggccccaagctcgcaggagtgctcctgctgcgtctgtccataggccccaccccgtcccataccc

SEQ ID NO: 424500 - DNA, 201 bp, Homo sapiens
tttgtgaatgctgaggaatgatcctgatatttacgtttccacaagctgacttgggttgggagctcatctgttcccttgacttctctttttccagttcttcrgcaaggccacaggtgctgcgggaaaatcagtaactaatgaacgagaattgtcaccacccagaaatcccaaatcctaacagtgccaaaatgtgctttaagc

SEQ ID NO: 424501 - DNA, 201 bp, Homo sapiens
taatttcttacgcctgtctttactgcaatctctgaatataaattgtgaagatttcatggacatttatcacttcctcagtcaatactcttgtgatttcctaygcctgtctttactttaatctcttaatcccgtcatcttcataagctgaggatgtatgttgcctcagaaccctgtgatgattgcgttaactgcacaaattgt

SEQ ID NO: 424502 - DNA, 201 bp, Homo sapiens
ttgcaacagctgcttgatgttttccacagacacgcggccctcattgccggttaacgcttgaagcttatccaccagacctttcagagcctccactggggatracttatcccagaccactgccacaaactggccagcagagatcccaaaatctgccattcttgcagtgcagtactgacagacctaaaaactgctggccaaaag

SEQ ID NO: 424503 - DNA, 201 bp, Homo sapiens
aaaaaaagggtcagggtgccacctctatgtccaataattatagactggttacataaatcacagtccatctattgtatggaatactattacatcattaataygaatgaagggaaatacactgaagtaggtaagtgtctatgatatctaagggtgggaaaaaaggtgattgaacaatgtatacttatgatcttatttacattt

SEQ ID NO: 424504 - DNA, 201 bp, Homo sapiens
gaacctgggagatggaggttgcagtgagccaagatcgtgccgctgcactccagcctggtgacagagcgagactccgtctcaaaataaataaataaataaawaataaaaaattatagctgggcgtggtggctcatgcctattatcccagcaccttgggaaggcgaggcaggtggatcccttgagtccaggagttcaagacca

SEQ ID NO: 424505 - DNA, 201 bp, Homo sapiens
agctgacttgggttgggagctcatctgttcccttgacttctctttttccagttcttcggcaaggccacaggtgctgcgggaaaatcagtaactaatgaacragaattgtcaccacccagaaatcccaaatcctaacagtgccaaaatgtgctttaagccttttctcttcacaccagtgtcataactcagaagcctataggc

SEQ ID NO: 424506 - DNA, 201 bp, Homo sapiens
ttcgagaggaaacttggagtccagggtaaagaaggtgtccaccctgtcctccttttggttgatcatcatgttcaacctgaccacatgctcaagaggccaayggtgagttaaactacatccacagaagatgcactaggatgcaaaggaattagaaacaaatttacatgagaaaaagctgtatgactggccagcaatgtgtag

SEQ ID NO: 424507 - DNA, 201 bp, Homo sapiens
catggtgggatgtgagggacaggagttggctggaggagcagatgggtcccatgtcaggaacctcctaggcatcatgaagattgctatcactcagaagcacyttttccccaggtttgaaggctggcatcccaaggtaggggcagctggcacagcggaaggcatcgcccaggtagcactggagagagagaatggggaagccaa

SEQ ID NO: 424508 - DNA, 201 bp, Homo sapiens
cataaacacagtcagaaactattaattacaaacatacataaatgcttcctgctgtgtagaagagaacacactggcctgggaggcagaagatgtgggttcamagtccagctctacccctctgagaggtctgaccttgggccaaccacttgctgatagttacagaagtcaccatttgctaagctcttgctttgcaccaggcac

SEQ ID NO: 424509 - DNA, 201 bp, Homo sapiens; identical to SEQ ID NO: 259683

SEQ ID NO: 424510 - DNA, 201 bp, Homo sapiens; identical to SEQ ID NO: 259690

SEQ ID NO: 424511 - DNA, 201 bp, Homo sapiens; identical to SEQ ID NO: 259692

SEQ ID NO: 424512 - DNA, 201 bp, Homo sapiens
tagctccaccaaccctttcctcccacttctaacctctggcaaactctgatctccaccgccacaattttgttatttcgagcatatgaatggatttgtacagyacagagccttttgagattggcttttttcactcagctacttcccttgatatccatccaagctgatgtacatatagttagctagttcatttttattgctgca

SEQ ID NO: 424513 - DNA, 201 bp, Homo sapiens
cactcagtaatgtcagaatgaagggcaccagcctttcccgaacttgcagatcctacaaatcacccgagggagtggttaaaatgagattcctggaccacacmcagacccactcaatcaatccttctggacaaaggcctagctgtctgttctagtaacaagcatccttccgatctggatacttaattatatcaactcaacacg

SEQ ID NO: 424514 - DNA, 201 bp, Homo sapiens
tctcgaactcctgagctcaagtgatccacacgccgcagcctcccaaagtgctgggattacaggcatgagcctggcccagaattttttttaaaaagtgagamtcaacaatgaaacaggaacgtctccaggcatttggcgtgtgtcaggaattagggtttcagaaaggatacccaaatgttagtttccacaggaaaggctcat

SEQ ID NO: 424515 - DNA, 201 bp, Homo sapiens
aaggcgaggcaggtggatcccttgagtccaggagttcaagaccagcctgggcgacgtggtgaaaccccatctctactaaaaatacaaaaattagctgggcrtggtgacagaatctatggtagtcttatgtagtaatcttatgtagtcccagctactggggtggaggagagggcctgaggtggtaggactgcttgagcccag

SEQ ID NO: 424516 - DNA, 201 bp, Homo sapiens
tggcagaaatcaaaggactaatcctctaaaaatatcaccatctcatttattgctggctcaatttctaacatgtccctctaagcccattcaaacagaagaawgtccctaggccagccttacctgaaggagaagacttcttggtgatggaaagcttaagctgcctagaagaacccacttcaaagtttggttttttgcctgtga

SEQ ID NO: 424517 - DNA, 201 bp, Homo sapiens
caaagtgtgacttggcaaggaaggcaaataaattgacagaaataacccaaccacagattcaatgtttttaaaaagaaacaacacatttaaatttgcaaackgaatactggttattttccctttcatcaaaatatgaaaatttaattccactgaatctgcagtgatcaagaatacttactatgtctgtaccatttaatatta

SEQ ID NO: 424518 - DNA, 201 bp, Homo sapiens
gagggaagtgtgagcaagaagtgggatgtcactttatattctgtatgctttggtgtaaagtgaatttttatgaggagtctgatatagtttggatatgtgtmccctctaaatctcatgttgaactgtaatccccaatgttggaggtggggcctggtgagaggtgactggatcatgggggcagatttctcatgaatggtttag

SEQ ID NO: 424519 - DNA, 201 bp, Homo sapiens
tttagtcatttaactctgttttccttaatgacagagggcaagtaaaaatggaaaaaaaaaaagaaaaaaaaataattaaaaagacaataattctggttttkttttttttttttttttgcgggggtggtggggaggacagagtttcactcttgttgtccaggctggagtgtaatcttggctcaccacaacctctgcctcccg

SEQ ID NO: 424520 - DNA, 201 bp, Homo sapiens
ctggcttcttcaaatcttctggatccagcagctcatctgagtcaatgagatcctggagagtgttcaaagcaatgagtgatacagtcgtggtctctgctaaygaaaagctaaagtgactgcaggcttcgagaggaaacttggagtccagggtaaagaaggtgtccaccctgtcctccttttggttgatcatcatgttcaacc

SEQ ID NO: 424521 - DNA, 201 bp, Homo sapiens
gcctgtccctacacgggagacagacaagaagacacttgttccctgccctcaagagaacgctctgtctagacacttagactaagaccttagaggtttttttktttttttttttttttttttttttggcagagtcttgctctgttgcccaggctggagtgcaatggcacaatcttggctcactgcaacctccgactccggggt

SEQ ID NO: 424522 - DNA, 201 bp, Homo sapiens
catcaattaggcaaagtgtgacttggcaaggaaggcaaataaattgacagaaataacccaaccacagattcaatgtttttaaaaagaaacaacacatttamatttgcaaactgaatactggttattttccctttcatcaaaatatgaaaatttaattccactgaatctgcagtgatcaagaatacttactatgtctgtacc

SEQ ID NO: 424523 - DNA, 201 bp, Homo sapiens; identical to SEQ ID NO: 259698

SEQ ID NO: 424524 - DNA, 201 bp, Homo sapiens
cagcagggtccacagcaggtttcactgagtccaagcaataaaagaaaaaactccataaacacagtcagaaactattaattacaaacatacataaatgcttyctgctgtgtagaagagaacacactggcctgggaggcagaagatgtgggttcaaagtccagctctacccctctgagaggtctgaccttgggccaaccactt

SEQ ID NO: 424525 - DNA, 201 bp, Homo sapiens
accgcccactagggaatgctgacaacattagaaactctactgtatatgctaaagagtctgaatacatgaaccccattatctcaagtcttcataagcccaamattcccaaagaaggcagatagcttccttggtgagaatcctgacttggaagagtcaagaaaggggattagaggcaagtaagaaggttggaggcagaaagat

SEQ ID NO: 424526 - DNA, 201 bp, Homo sapiens
ttgttttttttgagacagagtctcgctctgtcgcccaggctggagggcagtggcgtgatctcggctcactgcaagctccgcctctcaggttgacgccattytcctgcctcagcctcctgagtggctgggactacaggcgtctgccaccaggcccgactaatttttttgtatttttagtagagacggggtttcactgtgtta

SEQ ID NO: 424527 - DNA, 201 bp, Homo sapiens
agtactctactcagtttctcctttctttcttaaacattaatgacaccagtttccaatttaaaatagctcaaataaatgaaacaaacaatttgtggtagagragtcaaaatggattagttttatgttgaacacttcagacttctgcagaggtggccaactcagtggcaatcatgccaccacagatacagactgaattcaagc

SEQ ID NO: 424528 - DNA, 201 bp, Homo sapiens
agtgggaatgtaccagtaaatatctgttaatgtctgcatacctcacagctgggtcaattcaggcatttaaaaatagggataggaaggatgaggatggagckgtgtgtgtgtgtgtgtgtgtgcgtgcgcgtgcgtgcacgcgtgtgcttgtacacaattttctagtcagaagaaatatagttttataagtgtcttagcatc

SEQ ID NO: 424529 - DNA, 201 bp, Homo sapiens
gtgaaaaactatagtcatgaaaagttccctaggaggccatagttcttttttttttgtttttgagatggagtctccctctgtcacccaggctggagtgcagyggcgcgatctcagctcactgcaagcttcgcctcctgggttcccgccattctcctgcctcagcctcccaagtagctgggactacaggcgcccgccaccatg

SEQ ID NO: 424530 - DNA, 201 bp, Homo sapiens
actgctggccaaaagggaatcaagactgggcagagacaaagtgcaatttaatctgtgagatatcataaaatatgattagaatcccaacctaacttgtaacygcccactagggaatgctgacaacattagaaactctactgtatatgctaaagagtctgaatacatgaaccccattatctcaagtcttcataagcccaacat

SEQ ID NO: 424531 - DNA, 201 bp, Homo sapiens
tagaaaatagtgctttttaaagcatggaacagtcagcaacttgcccaaaggtgccaataaaactatttaagctgacaaaatcttttcaggtttacacatgsccacaagagttttcaacatatcgtatgaagtgagaacaagaaattatgtggggaaaaagagatgctaaaaaatttaaaatgccaccaacatggccaagcg

SEQ ID NO: 424532 - DNA, 201 bp, Homo sapiens
aagcatcatgtatcttacatgcacagcatttcttgtttcctagttctaagcaatactgattacctcacctgcagggcagcaaagaaagttgtctacaaacstacctctttcacttccacaagaccagaaagagtcagggctgaacacagcttagatgctgtcttcactttgctattgttatctgccaaaaggaaaatccca

SEQ ID NO: 424533 - DNA, 201 bp, Homo sapiens
aatatttaacactcaagcattaaatactatagcactttgatttgtcactcttttcctaaaggagttactaaaggttttatttgctagactgatgtcaattrgccttctggatccacggcctccataatctggctctacctgtatctcccaccattccaaagtgatccctccttattctatgaaaaccctttgcattttccc

SEQ ID NO: 424534 - DNA, 201 bp, Homo sapiens
gaaacccctccagcctcataaagacaacgtgggtgggtacttacattgcaacagctgcttgatgttttccacagacacgcggccctcattgccggttaackcttgaagcttatccaccagacctttcagagcctccactggggatgacttatcccagaccactgccacaaactggccagcagagatcccaaaatctgccat

SEQ ID NO: 424535 - DNA, 201 bp, Homo sapiens
caaaagcaaaaaataacactgaagtttgggcttcagttcaaaaaattctttaactcgggtgcataaaagagttccaagaatactgacagttatcagaaagraaaatcctaattaaaattaactaactgggctgggtgcagtgactcacacctgtaatcccacactttgggaggctgaagcaagtggatcacctgaggtcag

SEQ ID NO: 424536 - DNA, 201 bp, Homo sapiens
gaaaaaacaaaaaaaaaataataacctattctgtttaatgtacagatggtccttgacttaatgatggttctacctataatttttcaacttttatgatagtrtgaaagtaatactcattcagtagaaactgtatacttcagttttcagtaaattacatgagatactaagcactttattataaacaggctttgtgttagatga

SEQ ID NO: 424537 - DNA, 201 bp, Homo sapiens
tataagaaaaaaaaaatgacctgtttctagaatgatgttggaataggttcttccttgggacaatagaaagggatgaaaaagaccccacctactagactacyacaactttgcactgtacttacagaaaaaccctcataaaggaaacgaagggcaaaagcttacttattagctagagaaaacaagccaaatgtctagaccttt

SEQ ID NO: 424538 - DNA, 201 bp, Homo sapiens
agcttggcagcagcagggtccacagcaggtttcactgagtccaagcaataaaagaaaaaactccataaacacagtcagaaactattaattacaaacatacrtaaatgcttcctgctgtgtagaagagaacacactggcctgggaggcagaagatgtgggttcaaagtccagctctacccctctgagaggtctgaccttggg

SEQ ID NO: 424539 - DNA, 201 bp, Homo sapiens
ctggcacatgatgtcgaggaagaacccttgcaaacttcaaggtgtgcaatatgggatcaatctcccatttaagaaccagccaggcaagatgggagtatggrttgctgggcattaagttataagaaaaaaaaaatgacctgtttctagaatgatgttggaataggttcttccttgggacaatagaaagggatgaaaaagacc

SEQ ID NO: 424540 - DNA, 201 bp, Homo sapiens
agacagagtctcgctctgtcgcccaggctggagggcagtggcgtgatctcggctcactgcaagctccgcctctcaggttgacgccattctcctgcctcagyctcctgagtggctgggactacaggcgtctgccaccaggcccgactaatttttttgtatttttagtagagacggggtttcactgtgttagccaggatggtc

SEQ ID NO: 424541 - DNA, 201 bp, Homo sapiens
cagcttttacatttaaaaaacactgatgattaacgctgatgatgaacatcactgattaactttctacaatccttcccatccatttataaaaacaaatgtgragacaccaaggtctcgctctgatgcccatgctggagtgcagtggcacaatagtggcttactggtagggttttgagggagagtgaaattagatacatggca

SEQ ID NO: 424542 - DNA, 201 bp, Homo sapiens
ggggtttctccatgttggtcaggctggtcttgaactcccagcctcaggtgatccacccgcctcagcctcccaaagtgatgagattacaggtgtgagccacrgcatccagctaattctgtggtgtttttgtttgtttgttctgttttttgagacagagtctcactccgtcacccaggctggaatgcagtggcacaatctcaa

SEQ ID NO: 424543 - DNA, 201 bp, Homo sapiens
cagacaagtaggattctttagtcatttaactctgttttccttaatgacagagggcaagtaaaaatggaaaaaaaaaaagaaaaaaaaataattaaaaagasaataattctggttttgttttttttttttttttgcgggggtggtggggaggacagagtttcactcttgttgtccaggctggagtgtaatcttggctcacca

SEQ ID NO: 424544 - DNA, 201 bp, Homo sapiens
gtgcagtggcgcgatctcagctcactgcaagcttcgcctcctgggttcccgccattctcctgcctcagcctcccaagtagctgggactacaggcgcccgcyaccatgcccggcaaatttttttgtatttttagtagagacggggtttcaccatgttagccaggatggtctcgatctcctgacctcgtgatccgccctcctt

SEQ ID NO: 424545 - DNA, 201 bp, Homo sapiens
cctaaattatgtggctgaccagcaaacagcaaggaaacttattggagcctggaaaggtagtgatccatgtttcataatgatgaagcctttagtgaaactaycacagtaatttggatgataaatactctgtgcctagttgatttgtggctttaggtgaagaagtgggaaaatagatggtaatgtgttggttctgttcactac

SEQ ID NO: 424546 - DNA, 201 bp, Homo sapiens
agtctcttcatatctagttccggaatgtcccccttctggtgccaggcttgcttttcagttgggcctgacccacttctcttccaggaaagcgcccgccttcyttctgcacccgtcaacctctggagtgtcctgaaaaccctcccttgtgggagtctctgggctgcctgttggtgggacgatttctcaggagcacgacttccg

SEQ ID NO: 424547 - DNA, 201 bp, Homo sapiens
aaattagccaggtgtggtggtggatacctgtaatcccagctactcgggaggctgaggcaggagaatcgcttgaacccaggaggcggaggttgcagtgagcyaagattgtgccattgcactcctgcccgggtgacgagagtgaaactccatctcaaaaaaaacaaaaacaaaaacatttaaaaaataatatcctaaaagcca

SEQ ID NO: 424548 - DNA, 201 bp, Homo sapiens
aattagccaggtgtggtggtggatacctgtaatcccagctactcgggaggctgaggcaggagaatcgcttgaacccaggaggcggaggttgcagtgagccragattgtgccattgcactcctgcccgggtgacgagagtgaaactccatctcaaaaaaaacaaaaacaaaaacatttaaaaaataatatcctaaaagccac

SEQ ID NO: 424549 - DNA, 201 bp, Homo sapiens
gaccttttgaggatgtctccatgacttatgagtggtgaataattttcttaagcctgtggaaaaacacgacttcaggaagaaaactgtctgtgtaattattrattcatttctgctttggggaggtggaatgggtcaggaattgttttggtgaagttaggacagcatttgtgtctaaaaggttgtggatcagcaccactttat

SEQ ID NO: 424550 - DNA, 201 bp, Homo sapiens
gaattgctccttcaccgggtaacctgagcaaatcattgtaagcccctgaaattatgtagtttgttactgtggcataatatatgttagtgaatgctggccartacaaatttacagtgttatctattcaacttacctcagaaacactaaggtcacagagagagacagaattaataccaggtaattcaactttcaactcaattt

SEQ ID NO: 424551 - DNA, 201 bp, Homo sapiens
ttcttttggtttctggaaagcaaataattttgcacatctcaaaacctagtttaaaaccatttaaggccaggcatggtggctcccgcctgtaatccgagcastttgggggtccaaggcggccggatcacctgaggtcaggaatttgagaccagcctggccaacatggtgaaactccgtttctactaaaaatacaaaaattag

SEQ ID NO: 424552 - DNA, 201 bp, Homo sapiens
gggaggcagaggttgcagcgagccaagaccacaccattgcactccagcctggtgacaaagtaagactctgtctcaaaaaacaaaacaaaacaaaacaaaamaaaaaaaaaacaaaaaaaattagcaatacctaagtgtaaagtattctctggttattctgggatcatttcattcaagacctccccatccctggcaccaact

SEQ ID NO: 424553 - DNA, 201 bp, Homo sapiens
cttctatcagacacactgctttgcctgaaacttggtcttttggcagtaacagttgaggaaagtgatctggattgctcatagtactgcttcgtatctgtccragagttagttctttatgaaaaaaagggtggaggggagataaaaaataaatctacaacataaaatactatgagctataatatatgtggtgttagtagagat

SEQ ID NO: 424554 - DNA, 201 bp, Homo sapiens
aatatggtaagagtgtgagagggtgaactggaatttctcctcaatgcatttcatggccatctgaattaactgattttttttcacttggtccttttctgctrcatgaagaacatcaggattgtaggcaacatcaatgactgtgtaagcatctgtgtgtgtaattgaaagggtatgaaatgaagaaaaattgttgcactaatg

SEQ ID NO: 424555 - DNA, 201 bp, Homo sapiens
taacgggtaatcattctataggttggcaaacccacctcttctctcagttccttgacaaaccgcgacgcctgttaccagggtaaccagcctgggtacaacawctaattgggtccggggaacttcagggagaaaagtctcttcatatctagttccggaatgtcccccttctggtgccaggcttgcttttcagttgggcctgac

SEQ ID NO: 424556 - DNA, 201 bp, Homo sapiens
gacatttcttggcacttttgcatggattaaaacagctcaccttattacaaaagttaaacagtattaaatttgcataaagatacactaattgtaattatatyatcaacaaataaagagttttacttgaaatgctctcaaccaagtaagatcttgtccattcctaataaaatttttacaatgtgctttctctcaattatttgt

SEQ ID NO: 424557 - DNA, 201 bp, Homo sapiens
gcaaatcattgtaagcccctgaaattatgtagtttgttactgtggcataatatatgttagtgaatgctggccaatacaaatttacagtgttatctattcarcttacctcagaaacactaaggtcacagagagagacagaattaataccaggtaattcaactttcaactcaattttcagaggtttctcactgtgatcatgca

SEQ ID NO: 424558 - DNA, 201 bp, Homo sapiens
gacgtatacagtgtatgtacacgtatatatactatacacatatacatacatatataattttttattttatatagataaaataaaatgctatatatatatayacgtatatatatacatatatatatatataaaaaataaatgcttgaaactatgaggtcaagaactttgatcctggcccaaatcccaaattttaaatccatt

SEQ ID NO: 424559 - DNA, 201 bp, Homo sapiens
ttagtaaagcctgtttggaaattatatatatatgtgtgtgtctgtatatgtatatgtatgtatgtgtatatacatgtatgtatacgacgtatacagtgtaygtacacgtatatatactatacacatatacatacatatataattttttattttatatagataaaataaaatgctatatatatatatacgtatatatataca

SEQ ID NO: 424560 - DNA, 201 bp, Homo sapiens
tgatgagattagacattccaaaacatagtgattactttggaaaaatccaaaggtgttaaggaatcccactttccaagttttttttttttttttttttttttgagatggagtcttgctctgctgtccagaatggagtgcagtggtgccatctcagctcactgaaacctctgcctcccaggttcaagtgattctcttgcctca

SEQ ID NO: 424561 - DNA, 201 bp, Homo sapiens
atgatgagattagacattccaaaacatagtgattactttggaaaaatccaaaggtgttaaggaatcccactttccaagttttttttttttttttttttttttgagatggagtcttgctctgctgtccagaatggagtgcagtggtgccatctcagctcactgaaacctctgcctcccaggttcaagtgattctcttgcctc

SEQ ID NO: 424562 - DNA, 201 bp, Homo sapiens
gatgatgagattagacattccaaaacatagtgattactttggaaaaatccaaaggtgttaaggaatcccactttccaagttttttttttttttttttttttttgagatggagtcttgctctgctgtccagaatggagtgcagtggtgccatctcagctcactgaaacctctgcctcccaggttcaagtgattctcttgcct

SEQ ID NO: 424563 - DNA, 201 bp, Homo sapiens
caaaaagaccaagatgatgagattagacattccaaaacatagtgattactttggaaaaatccaaaggtgttaaggaatcccactttccaagtttttttttkttttttttttttttgagatggagtcttgctctgctgtccagaatggagtgcagtggtgccatctcagctcactgaaacctctgcctcccaggttcaagtg

SEQ ID NO: 424564 - DNA, 201 bp, Homo sapiens
aaacatttttctccacgacccacagtaagaaatgcattttacagcactacacaatgatgtgtacatgtataacaggaaggaaaggttcaaaaaacaatttwttacatgtaatgtactccagcctcattccatacccttcccatcctatactatggtagcaaaggatgttggtctcgctaatttgattttacaacccactga

SEQ ID NO: 424565 - DNA, 201 bp, Homo sapiens
caaaacagaaaataaaataaaaggctagcttcattcctttttatccgttttccgttatgacagaatgtggttaattagacaaagaaattggtaagaattckagtctgtaggaatgtttatgttttctataacaggaacatgattttccaagcttggtattttgacaatcctttttattttgtaagctataagctaagaatc

SEQ ID NO: 424566 - DNA, 201 bp, Homo sapiens
aacataagaattttgaggagacacatatcatagcatcctcctccaaattagcagaagatcctgatgactgatcacactagaaagttacctgatcctaccaytgcaatgtgatatagtttgaatctgtgtccccacccaaatctcatgttcaactgtaatccccattgttggaggtggggcctggtaggtggtgactcgatt

SEQ ID NO: 424567 - DNA, 201 bp, Homo sapiens
caacaaaaatgaactcagagctctcaatttctactaatgtagggtcaactgggttatctgagaaagaatgataagagtttatgggctatgagtaacaagtytaaggtgactaatatctgttacagaaacactccattgacttggacatttatttttgatgaatgaatgtcatgttaaacagctaagcatggaggcagagag

SEQ ID NO: 424568 - DNA, 201 bp, Homo sapiens
acccagtcaaaagcctggacacctctatactcctcccctcacttttcacctgactttgagtgactttttagaattcttgaggaaaatccctaataaaattytatggggaaaaattacctgaaaaaagtcatagctctgcataaccatctgccagtactcatactccctactaaccaaaaataatagacagtgtgccatggt

SEQ ID NO: 424569 - DNA, 201 bp, Homo sapiens
tttaacttggccctagttatgggaaactcaatggaaaagtcaattcttcttagtgaccaattcatggcatcagagatagcactgcatggaatttctatcaytttgatccagacttgcactggagataaaagggtatctccaaaaggagaattatgcaaatttgggaatgccttaaaataaatcattattaatattaacctt

SEQ ID NO: 424570 - DNA, 201 bp, Homo sapiens
tccaaaccaaagatggttgaaaatcttcaggacatgtgggctagcaactaaatatcagctgaattaaagttcttaaaacaatttctaaactttaatcaacyctgacactcatctagtactagtttttgggaaatgtccactagtttttaatggaactaaaaactttgaaaccattctggccaaaatggttttttagtaaat

SEQ ID NO: 424571 - DNA, 201 bp, Homo sapiens
aagaaacaggaagggaactgggagatccattaacaaatctttacaaactggagagccttggaaatattgtctaacactgtcttttactttataattctgcsttccaggcagtcaatgtaaaactacaagtacttttaagtaacccagttttatactcaggctattgttttaatttttcatttactttttaacaaacacata

SEQ ID NO: 424572 - DNA, 201 bp, Homo sapiens
tcaatctctcccctgaagacttataaagtatcatttgggaaaaaaaggtcaaagtatattagctctactgctgcagaaaacaaatgtggtatgtatttcayattagtgacttcaaaagggaaattttacctagtgttaaccatacgatgtgctaaagtttaaattaacttttttttctcagattttttttttaattttatt

SEQ ID NO: 424573 - DNA, 201 bp, Homo sapiens
agaaaaagagaatcagaaaaggaaggcagcaagagaaagaaacaggaagggaactgggagatccattaacaaatctttacaaactggagagccttggaaakattgtctaacactgtcttttactttataattctgcgttccaggcagtcaatgtaaaactacaagtacttttaagtaacccagttttatactcaggctatt

SEQ ID NO: 424574 - DNA, 201 bp, Homo sapiens
cccttgggcccaggagattgaggctgcagggagtcatgatcatgccacagcagtcaagcctggccaacagagcaagaccctgactcaaaaaaaaaaaaaaagtaacatttgtgaaagaaaaatcagaaagactggaacaggtgggaagtcatttaatctaacatccttactgccaagggtattttaaccatatttaagtat

SEQ ID NO: 424575 - DNA, 201 bp, Homo sapiens
aggtttaggagtaaaacggcataaagcctgggattttctctgaaatactacacacacacacacacacacacacacacacacacacacacacatgcacgcaygcacacacaaacacacacacatgcactcctcccaaaacaaacatacaaaccataaaaagtagagggaggggcgcagaggagataaaggatgtagcaaatg

SEQ ID NO: 424576 - DNA, 201 bp, Homo sapiens
actggtgacagtaagctgcagctgggaagcagcagagtagattcttccttcagatggggcattctgctccagttgaccactttctctaccattcaagtgtygtctctcaggaagaacttaacctgcccatgttatctaaaatagccaacttacctcctactctctatccccgtatttattattaatgctcctttaaagtac

SEQ ID NO: 424577 - DNA, 201 bp, Homo sapiens
tcaagtgtcgtctctcaggaagaacttaacctgcccatgttatctaaaatagccaacttacctcctactctctatccccgtatttattattaatgctcctktaaagtacctaagaaaattgtttctcttaaaagattctctcttaacctacttctttggtgtagtctgttcaatattaagtaccaacttctacttctattt

SEQ ID NO: 424578 - DNA, 201 bp, Homo sapiens
caaaagaactattcttcaatacacagaagagatgattaatttgaagacgcatttgttgttaaagtaacaatgtaagaaaatatttcaaattaataaaattwggataattaatatggtggtaaagaagctaatttaattgagttgcatgaaattccatttcattatattcacttgtatatttagtgaagctataatcaaatt

SEQ ID NO: 424579 - DNA, 201 bp, Homo sapiens
atttactctcattctgttaaatttgtctttctcttaggccatagcttgggaatgttaaatccaaaatttggctcagtgtttttaaaacttaaaaaaaaaaagtcataaagacaagctgttttcttgatcctttaatgcattttcaacgtttaaatatcacatattctggttaatcatagccaataagatatcatcagatca

SEQ ID NO: 424580 - DNA, 201 bp, Homo sapiens
ccccgtatttattattaatgctcctttaaagtacctaagaaaattgtttctcttaaaagattctctcttaacctacttctttggtgtagtctgttcaataytaagtaccaacttctacttctatttggaatataaatatttataattaaaaaaattattaattacttcattcaatacaacaaaacagctcattagaggata

SEQ ID NO: 424581 - DNA, 201 bp, Homo sapiens
aagaggagggcttttcctccccactggtttgattattattcctagggtccacacagaggacttaattattgggctcaatagctttgctgatttagaggctrgtgtaacaatagcaaaatcaaagcaatactctggcagatcaccttattccaatcaagaattgagtggactgaaagctggctattcaaaggtagaacacct

SEQ ID NO: 424582 - DNA, 201 bp, Homo sapiens
attgatggaaacctaggttaattccatatttttgtgactgtgaatagtgctgcaagaataagacttgcctcctaagccagttgtgctagactgtaacagayaccagccatcacctaattatgtagagtttaatgcctactgcaaagatgcactaaaatatttgttaaattcaattacagattctcagatgatatatttagc

SEQ ID NO: 424583 - DNA, 201 bp, Homo sapiens
gtcttgaactcctgacctcgttcgtgatccacccacctcggcctcccaaagcactgggattacaggcgtgatacacaatgcccagcctcttttttttttttaatataaaaaatttaaaaagataagaatgtctacaatgaataagtatagcttctctggcttcactgatagtataatcttgatgtcaggtaggtttcttgt

SEQ ID NO: 424584 - DNA, 201 bp, Homo sapiens
tctctggttactatcttggctgacaactctatacaagaataatgtaaccggaggtgaggagttcgagaacagcctggccaacatggtaaaaccccgtcttyactaaaaatacaaaaattagagcctggcttgaagatggccaaatagaacagctctggggtgcaggtcccagcaagatcaacacggaaggtgggtgatttc

SEQ ID NO: 424585 - DNA, 201 bp, Homo sapiens
cccacccccacggagcccagcaagctaagatccactggcttgaaattctcactgccagcacagcagtctgaagtcgacctgggatgctggaccttgggcasgggagggacacccgccattattgaggctttagtaggtggtttttcccctcacagtgtaaacaaaatcgccagaagttcaaactgggtagggcccaccaca

SEQ ID NO: 424586 - DNA, 201 bp, Homo sapiens
gaagtcgacctgggatgctggaccttgggcaggggagggacacccgccattattgaggctttagtaggtggtttttcccctcacagtgtaaacaaaatcgmcagaagttcaaactgggtagggcccaccacagcttgcaaagcgccgctgtagccacactgtctctcaagattcctcctttctggggcagggcatctctga

SEQ ID NO: 424587 - DNA, 201 bp, Homo sapiens
cacaatacttctttaggttgtcagttttttcttgaaatttgccttaaattgggtaagggccaacaattataaaaaggaatgataatgctttagctgcatcrgattcaccaggaaggcttgttaaacacaaggttctggctccccactcaaagttgttaattctgtaaatgtggggtgaggcctgaggatttacattcctaa

SEQ ID NO: 424588 - DNA, 201 bp, Homo sapiens
aagttgttaattctgtaaatgtggggtgaggcctgaggatttacattcctaacaagttcccaggcaatggtgatgctggggtccttaaaccataccttgaraaccactgcactaaagtatgttgtcagtgtacttgaataaaggcatgaggaaagaagagttgtttctgaactcttaactaaggtaataataatcaggtgt

SEQ ID NO: 424589 - DNA, 201 bp, Homo sapiens
aataagagtcaagaaaatggggtcaacaagttctgtttcaggaatacagtcttttgtactttgcatacagttcctgctcatggctgcagagaaaatgagayggcaatggggagaagacaggaagaagaaggcaaaatgagaaacaataatgacagatgctgcaatggtccaccttttcgttactgacatggttaattcttc

SEQ ID NO: 424590 - DNA, 201 bp, Homo sapiens
ttagtaagcaattggatgttacattgagatcttttttttgctctttggctaccacattcaataagtatttaagcactagtttaaagtggatgattgttaaygtacaacaaaattgcacagtaataaagcctgtaataaaaataagcggaacacccacagctcatacagtgtagttaagtgtattagctggtctcaaaagca

SEQ ID NO: 424591 - DNA, 201 bp, Homo sapiens
ttcattaaaagttttatttacttcagtgacattgtattttttaataaaagcccatctcccccgcccccaccagaagcacaattacacataaaggtaagtayctgtatttcatttcagaaggttccaatacccactaatttctataaacttcaaattaagaattactgaaacaggactattacagaatcagaaatctttggg

SEQ ID NO: 424592 - DNA, 201 bp, Homo sapiens
gaaaagatatgagtataagattttggtccaccacagtatcctaggtgcctgaaacagtgcctggcatacagaaactgacattcaataattattttctgtaygaataaacaactgggtacacttttccaccaaaaagtaatatttattttttccttccattcacatcttatcacaggaataaagtattaaaggcatcataag

SEQ ID NO: 424593 - DNA, 201 bp, Homo sapiens
aacagatgtaaagctttaacctagggttggcacacttaccagctttaagctaattcctcattctctactgagaaaaactgctgcaggaccaaagttgcagsatgtattttaatttaaaggtttagatgcccagtgtgatccagatttaaagattttctagataaattatatcaaattttaaacaaataaattatcaaaccc

SEQ ID NO: 424594 - DNA, 201 bp, Homo sapiens
tttctgtactgaaagctgtacattacagtgtgatgactagtagcgtttgcctacatgctttacacttaaatcattagatataaacgtggtttcatatgacytgtctgtgagagcttatttagtagtcttagatcatcatcttctaatgactacttatcagcttgtactacagtatgtgggccaagttggcccattcttact

SEQ ID NO: 424595 - DNA, 201 bp, Homo sapiens
aggcacaggcacattcaggaggcatgaaaaaattacattcacaggtaactcagactcccacatcactaacgcctttctccttcatgaccaactgtcaaggmaaaaaggatttccgatctagccaaatatgaactgctgttgcactgcagccttattcaggagcagacctaaagaactgtggtaaaagaagtttggcagatg

SEQ ID NO: 424596 - DNA, 201 bp, Homo sapiens
gcaggcttgttacatatgtatacatgtgccatgttggtgtgctgcacccattaactcctcatttagcattaggtatatctcctaatgctattcctcccccmtccccccaccccaaaactgtccccggagtgtgatgttccccttcctgtgtctttcaataagcatcttggttccccatctatgacacaatacttctttagg

SEQ ID NO: 424597 - DNA, 201 bp, Homo sapiens
cattcaggaggcatgaaaaaattacattcacaggtaactcagactcccacatcactaacgcctttctccttcatgaccaactgtcaaggcaaaaaggattkccgatctagccaaatatgaactgctgttgcactgcagccttattcaggagcagacctaaagaactgtggtaaaagaagtttggcagatgagaacaaccgg

SEQ ID NO: 424598 - DNA, 201 bp, Homo sapiens
acaattttttacatgtaatgtactccagcctcattccatacccttcccatcctatactatggtagcaaaggatgttggtctcgctaatttgattttacaasccactgatggatcagagttgcaatttgaagaaaaatactgatacagacataggatgtatctctgtgtgcaaggtatcactggaaggacctagttaggatt

SEQ ID NO: 424599 - DNA, 201 bp, Homo sapiens
ttttaaatttagaaatgttttggtattctccttaagttcattaaaacttctctttagtgcatttagtttggtgtaaataaaaggatcagttctgcctgatyttcaccctgatttcctgtctgtttcagttaatattccttatcctattgttactaatgtttaatgaggtctttattaaaatatacatatgttcttttactc

SEQ ID NO: 424600 - DNA, 201 bp, Homo sapiens
aaaagtcagcaaattccaaaccattataatcctagaattggctaaatttttagatgtacatcacctgtaatctactttaaaaactaactgctgatttcaarcatttttctccacgacccacagtaagaaatgcattttacagcactacacaatgatgtgtacatgtataacaggaaggaaaggttcaaaaaacaatttttt

SEQ ID NO: 424601 - DNA, 201 bp, Homo sapiens
gtcagtgtacttgaataaaggcatgaggaaagaagagttgtttctgaactcttaactaaggtaataataatcaggtgtccaaatttaatttaagtcctgtktctgagttgaactgcattttccaaacatcttgaagaactggcattccaacctgtttgaatttactgttctactaaccagtaggaattctactagcagcct

SEQ ID NO: 424602 - DNA, 201 bp, Homo sapiens
aagaaaatgtggcacatatacaccatggaatactatgcagccataaaaaaggatgagttcacgtcctttgtagggacatggatgaagccggaaaccatcaktctcatcaaagtaacatggggacagaaaaccaaacaccacatgttgtcactcataagtgggagttgaacaatgagaacacatggacacagggaggggaac

SEQ ID NO: 424603 - DNA, 201 bp, Homo sapiens
tcttaattatcagagcagctaattttatgaccagtcagtatgcaattaactctacttctctctacacttatatacattgtagacaagcaactgtgatttcrtttgtactgcaattagaactattaattttaataactcatggttaataaatatgtgtcaaagatcttcataaactgaccaaatcatcacacataataatta

SEQ ID NO: 424604 - DNA, 201 bp, Homo sapiens
agcattttgggatgtcaaggcaggataactgcttgaggccaggaggaagcttaagaccagcctggacaacacagcaaaacctcacatctacaaaataaaamataaaaataaaaaaattagctagatgtggtagtacacacctatagtcttagctactcaggaagctgaagcaggaggttcccttgggcccaggagattgag

SEQ ID NO: 424605 - DNA, 201 bp, Homo sapiens
atccaagcagaattaaattttctacattttatccttagcaagccaaagaaaaagccatcaaattcagtatcacttaaagcaaatacagaaaaaaaaaaaaacaaaggtgtttaagtcagttaatatgtgctctcctcccagaaaggctacctgctcccctacaagagtagataccccagctagctgcttctttagttactg

SEQ ID NO: 424606 - DNA, 201 bp, Homo sapiens
actaaaaactttgaaaccattctggccaaaatggttttttagtaaattgttgatatacttcctccggcaaacttatctcctgaagtactagtgactatcaygtaagatcacttgataataacttgtcctggtgtgacattacgtggaagttgtttcataatgttctagtcttgttctaagtttatattcttttcaaacaaa

SEQ ID NO: 424607 - DNA, 201 bp, Homo sapiens
atcatttacatttgtggacactgggatcttagctaaggtcacagaaccagaactaagcagctgtgtagcagctagactagggctgtttataccaggttgtmtcagatgtcatctgaatctttttattctttccagaaaaaaaatggggaaaaaaatgtgtaaagcttgatgctcacctgcacagtggtcaagacctttttt

SEQ ID NO: 424608 - DNA, 201 bp, Homo sapiens
ggcttttttttttttttttttggagacggaatctcactttgtcgcccaggcaatctcggctcactgcaacctccacctcccgggttcaagcaattctcaarcctcagcctcctgagtagctggaactacaggcgtgcaccaccacatccagctaatttttgcatttttgaaaatagagaccgggtttcaccatgttgacca

SEQ ID NO: 424609 - DNA, 201 bp, Homo sapiens
atattcttttcaaacaaagatagtgtaattaacttatcaactaagggatttagagagacaaatgggagaaataaaaccaaatataagattggggtcgggcrcggtggctcacgcctgtaatcccagcactttgggaggctgaggcaggtggatcacctgtcaggagttctataccagcctggccaacatggtgaaacctca

SEQ ID NO: 424610 - DNA, 201 bp, Homo sapiens
ggtggtgtttgaatgcttagatcaagtattgcaaagtactagtggtaactgtgcaaaaataattatatttgttcaagaagtcaaataatttcaatttcacwagtcttttttatcttttgttaatttgattctgaatgtatacaaaccatttacatagcaagatccaatatattctaggcagatcagcctgtccctcagttt

SEQ ID NO: 424611 - DNA, 201 bp, Homo sapiens
taaaaccaaatataagattggggtcgggcgcggtggctcacgcctgtaatcccagcactttgggaggctgaggcaggtggatcacctgtcaggagttctakaccagcctggccaacatggtgaaacctcatttctactaaaaatacacaaattagccgggcgtggtagtgcacgcctgtaatcccagctattcgggaggct

SEQ ID NO: 424612 - DNA, 201 bp, Homo sapiens
agggcactaatcccacttatcacagctccactttcatgacctaatcactttgtaaaggcctcacctcttaatattattgcgctggggatgagatttcaacrtaagaattttgaggagacacatatcatagcatcctcctccaaattagcagaagatcctgatgactgatcacactagaaagttacctgatcctaccattgc

SEQ ID NO: 424613 - DNA, 201 bp, Homo sapiens
acattcctaacaagttcccaggcaatggtgatgctggggtccttaaaccataccttgagaaccactgcactaaagtatgttgtcagtgtacttgaataaargcatgaggaaagaagagttgtttctgaactcttaactaaggtaataataatcaggtgtccaaatttaatttaagtcctgtttctgagttgaactgcattt

SEQ ID NO: 424614 - DNA, 201 bp, Homo sapiens
ataagaattttgaggagacacatatcatagcatcctcctccaaattagcagaagatcctgatgactgatcacactagaaagttacctgatcctaccattgsaatgtgatatagtttgaatctgtgtccccacccaaatctcatgttcaactgtaatccccattgttggaggtggggcctggtaggtggtgactcgattgtg

SEQ ID NO: 424615 - DNA, 201 bp, Homo sapiens
cttcaaaaatgcttagcaggaaacatcaactgcaaagagcgctgcacctttgaaagtgctctgaaaccaatttagtcttgctgctgtcactactacgaaayttaactttacctttccaaaatgatctagtatacaaacaaggtccttcataaggcaaaataatttttaacaaggacaactatcttttctttaaaaacacaa

SEQ ID NO: 424616 - DNA, 201 bp, Homo sapiens
ctgatcctaccattgcaatgtgatatagtttgaatctgtgtccccacccaaatctcatgttcaactgtaatccccattgttggaggtggggcctggtaggyggtgactcgattgtggaggtggatccttcatgaacggtttaccaccatccctgtttctgaaagctcaaatgagggaagggaagcaattcttatttattta

SEQ ID NO: 424617 - DNA, 201 bp, Homo sapiens
cctatttaaatatgggattataactggtaactaattctgcaccatcttggggggagctttctacttttccttgtactcagttggctagatatggggtccayactgtcatctaagtgttgcttgcacaagaatcttaattatcagagcagctaattttatgaccagtcagtatgcaattaactctacttctctctacactta

SEQ ID NO: 424618 - DNA, 201 bp, Homo sapiens
actgtcatctaagtgttgcttgcacaagaatcttaattatcagagcagctaattttatgaccagtcagtatgcaattaactctacttctctctacacttayatacattgtagacaagcaactgtgatttcgtttgtactgcaattagaactattaattttaataactcatggttaataaatatgtgtcaaagatcttcata

SEQ ID NO: 424619 - DNA, 201 bp, Homo sapiens
tcatcagccaaactgcttctgactttgctgaccctgacttttatcaacagttcaggagcagagagggctcaacccacagcctcaactgaggcggaagagcrtgctgcctgaatcctgcttttccttaggcctggaacagacattgtcttgccctttcctaatgtttttgttctgtgatgtgaaatatttgcacctgatctt

SEQ ID NO: 424620 - DNA, 201 bp, Homo sapiens
tacatatatctccactttgtacactggacaggattcatactacttctacatacacttgtttttccatcttttaagggcagataatacatattctaatttcrcagggttatttcgggaataaaattagtagaaaagatgaaggtactacatacacactttataataacattattcaaccctaatcctcataataaactgcaa

SEQ ID NO: 424621 - DNA, 201 bp, Homo sapiens
attttccaagcttggtattttgacaatcctttttattttgtaagctataagctaagaatccctgtgaaactacattaatggagtttcataagactttatcygcagcaattttttttagacttgtatatgacggtaatatttctttcagcattttatcagtggagtagtaatagttcacatagagatagtttgcttttttca

SEQ ID NO: 424622 - DNA, 201 bp, Homo sapiens
gacatcaactgttttcttcttccatttccacactagcaatatattaatgtgaataaaaatgtttcatgatgcaaatgataaacagtacattataatgtaargtattgttgagcaggaaaagaaaactgagttgtccatacgattttgtaaatatttaaattggttacatgctaaatgtttaaatttcattttatagtagtc

SEQ ID NO: 424623 - DNA, 201 bp, Homo sapiens
tgttgagcaggaaaagaaaactgagttgtccatacgattttgtaaatatttaaattggttacatgctaaatgtttaaatttcattttatagtagtccttcycttatccacaatttccctttctgaggttttagttgcctgaggtcaactgtagcccaaaaatattaaatgaaaaattccagaaataaacagttcatatact

SEQ ID NO: 424624 - DNA, 201 bp, Homo sapiens
ctcagctactcgggaggctgggacaggagaattgtttgcaccctggaggcagaggttgcagtgagctgagatccagttctatccatgttgctgcaacagasatgatttcattcttttttatggctgaatagtattccatgttacatacatacaccacattttctttatccaatcatccattgatggaaacctaggttaatt

SEQ ID NO: 424625 - DNA, 201 bp, Homo sapiens
aacgtggtttcatatgacttgtctgtgagagcttatttagtagtcttagatcatcatcttctaatgactacttatcagcttgtactacagtatgtgggccragttggcccattcttactgaaaatattttgaattaattttaacccctaaatattaaggccctattttcacaaagtatcacataactacatttgaacagga

SEQ ID NO: 424626 - DNA, 201 bp, Homo sapiens
atttttagtagagatggggtttcaccatcttggccaggctggtcttgaactcctgacctcgttcgtgatccacccacctcggcctcccaaagcactgggaytacaggcgtgatacacaatgcccagcctcttttttttttttaatataaaaaatttaaaaagataagaatgtctacaatgaataagtatagcttctctggc

SEQ ID NO: 424627 - DNA, 201 bp, Homo sapiens
tgtggtttagtgtgggacattaatttgcaggaaaatttctgttgttcctgcttcaaatatttaatctgttcctttccttttttacttcgtttggtattctyatcatgcatatgatacacctattgttgttccacagttcttggatattctgttcagtttatttcagtcttttttccctttacttttctatcttggaagttt

SEQ ID NO: 424628 - DNA, 201 bp, Homo sapiens
tgagagcttatttagtagtcttagatcatcatcttctaatgactacttatcagcttgtactacagtatgtgggccaagttggcccattcttactgaaaatrttttgaattaattttaacccctaaatattaaggccctattttcacaaagtatcacataactacatttgaacaggaagatatttctacgtatagtggttaa

SEQ ID NO: 424629 - DNA, 201 bp, Homo sapiens
tgggacattaatttgcaggaaaatttctgttgttcctgcttcaaatatttaatctgttcctttccttttttacttcgtttggtattctcatcatgcatatratacacctattgttgttccacagttcttggatattctgttcagtttatttcagtcttttttccctttacttttctatcttggaagtttctactgacatat

SEQ ID NO: 424630 - DNA, 201 bp, Homo sapiens
tgtgtagcttttttttttttttttgcatttatcctaatgctttctgagcttcctgaatctgtggtttagtgtgggacattaatttgcaggaaaatttctgytgttcctgcttcaaatatttaatctgttcctttccttttttacttcgtttggtattctcatcatgcatatgatacacctattgttgttccacagttcttg

SEQ ID NO: 424631 - DNA, 201 bp, Homo sapiens
tctccctgcacaccccatcaggcttcattccagatttttaatcactgattttctgtaatttgaatatgatatgactatgtgtagcttttttttttttttttgcatttatcctaatgctttctgagcttcctgaatctgtggtttagtgtgggacattaatttgcaggaaaatttctgttgttcctgcttcaaatatttaat

SEQ ID NO: 424632 - DNA, 201 bp, Homo sapiens
tctcactacattagctaggacttctagtacaatgctgtaagagcagaatgttgttaaggaagttctcttctattcctagtttaccaagtctttatcatgamtaggtgttgaattttgtcaagtgccctttctttattgatatgatcctgagaattttctttagcctgttgacgggatgaattatattaattaaattttgaa

SEQ ID NO: 424633 - DNA, 201 bp, Homo sapiens
ttataagacagctctattaaataaaatgttatctaagaaaaggataagaaaattaacagctgacatataccacagctcacaggcatcagagaagtttttttaatgatttaaatctatccatattaatatattgtactcatagcattttcctgaaaaactggaaagctggctggtggcaactattgttttagacaacctact

SEQ ID NO: 424634 - DNA, 201 bp, Homo sapiens
ttggccaggctggtcttgaactcctgacctcgttcgtgatccacccacctcggcctcccaaagcactgggattacaggcgtgatacacaatgcccagcctcttttttttttttaatataaaaaatttaaaaagataagaatgtctacaatgaataagtatagcttctctggcttcactgatagtataatcttgatgtcagg

SEQ ID NO: 424635 - DNA, 201 bp, Homo sapiens
tcttaggatttaaatatacagctacattgccgtaacaagaaccagttacaggaagagcaggaaaaaaagttggggggacaaactggcaggaaatgacttcrggacactttttttctttttttttaaatccaagtcaaagaataactcagctctttacagttatttaaatctgaaaactatttccctgaaaatgaaatttct

SEQ ID NO: 424636 - DNA, 201 bp, Homo sapiens
ctccctcatacttcttatccaataaatcattaagtcatgtctattttatcccctaaatataatttgatttatccacttctatctgtttcccaccttagtccaagctatcatcttttaccttcaacagccatctggttgtgctccccacatacattttgcagaacgcatgtagagggatctctgtaagatgagaatctgatt

SEQ ID NO: 424637 - DNA, 201 bp, Homo sapiens
aagtactttttgtttgtcctctatgtttttaaaattactactatcctacaatggcttttttttttttttttttggagacggaatctcactttgtcgcccakgcaatctcggctcactgcaacctccacctcccgggttcaagcaattctcaagcctcagcctcctgagtagctggaactacaggcgtgcaccaccacatcc

SEQ ID NO: 424638 - DNA, 201 bp, Homo sapiens
ttaaatctgaaaactatttccctgaaaatgaaatttctaagtaatatacaaatcaacttaactagactgaaacatttaggctgatcttactttatcctttwtctcagtatcttacctaacggttctatatttcaaagcctgacagatttgtttggctggcatgatctgaccacttcctttctatcgagaaatacaattttc

SEQ ID NO: 424639 - DNA, 201 bp, Homo sapiens
gtgacttcaaaagggaaattttacctagtgttaaccatacgatgtgctaaagtttaaattaacttttttttctcagattttttttttaattttattattaytatactttaagttttagggtacatgtgcacaatgtgcaggcttgttacatatgtatacatgtgccatgttggtgtgctgcacccattaactcctcattta

SEQ ID NO: 424640 - DNA, 201 bp, Homo sapiens
cttgttttcttttcatccataattcttagcctccaaagtgttttgtattctaactcctgctcatttctctagacttaccttttcaccatactctactagcktcttgatctttctcctgttacctggtgggcaaagtgggttcctgccttctgcactagctggttccttagcctagaatgttcttcccagagacagtaacat

SEQ ID NO: 424641 - DNA, 201 bp, Homo sapiens
tgaaatttctaagtaatatacaaatcaacttaactagactgaaacatttaggctgatcttactttatcctttttctcagtatcttacctaacggttctatrtttcaaagcctgacagatttgtttggctggcatgatctgaccacttcctttctatcgagaaatacaattttctcttttgttgctgaaagatttctgttca

SEQ ID NO: 424642 - DNA, 201 bp, Homo sapiens
aacagaaaataaaataaaaggctagcttcattcctttttatccgttttccgttatgacagaatgtggttaattagacaaagaaattggtaagaattctagyctgtaggaatgtttatgttttctataacaggaacatgattttccaagcttggtattttgacaatcctttttattttgtaagctataagctaagaatccct

SEQ ID NO: 424643 - DNA, 201 bp, Homo sapiens
ataatctattcttcagatatgcttgtttacctgctcagtttaaaaattttcataaagaaacatggaatcttggtttctcttgaaaaatagtagtcctggcracactggactggtgacagtaagctgcagctgggaagcagcagagtagattcttccttcagatggggcattctgctccagttgaccactttctctaccatt

SEQ ID NO: 424644 - DNA, 201 bp, Homo sapiens
cgtgggtccgtttacagattttgaagtgtaaatgttaacatggagataatgcaggtcagtattttacatcttattagatatctatataaagaagataagakagccgggtacaatggcccatgcctgtaatctcagcactttgggaggacgagatgcaaggattgcttgagtccaggagtttgagaccagcctgggcaacat

SEQ ID NO: 424645 - DNA, 201 bp, Homo sapiens
actcttattttatttaataatagccccaaagtgcaaatgatgctggcaatttaaatatgccaaagagaaggcataaactgctttctttaagtgaaaagatraacgttcttaacttgaacaggaaaggaaaaatcctacgctgaggttactatggtaagaaacgatgttctatctatgaaattataaagaaggaaaaagaaa

SEQ ID NO: 424646 - DNA, 201 bp, Homo sapiens
tcagccctccgagtagctgggattacaggcacctgccactgcacctggctaatttttgtatttttagtagagatggggtttcaccatcttggccaggctgstcttgaactcctgacctcgttcgtgatccacccacctcggcctcccaaagcactgggattacaggcgtgatacacaatgcccagcctctttttttttttt

SEQ ID NO: 424647 - DNA, 201 bp, Homo sapiens
taaaaccaagtctcagatttaaaaggttcttttatactgtaacaatgtcattaacatggaatttctcatgctgaattgttgtacattgggataatctaccrtttgggtcctgtttattccctttcaagacacagataaatgggatgaggcagatgtattaagagttcctaaggaagggatgcagtgagttataaaggattt

SEQ ID NO: 424648 - DNA, 201 bp, Homo sapiens
aacctaactgcacaccattttgagtagcatgatgaaacctcctaccaccctactccagcccatacaggacgtaaatcatccccttgcccagtgcatctacrttgtgtacactatctgccctttagtcacttaggcagccatctcagttaccagatctcagttatcaggatatctcagtgttgtgttcaagtaactcttatt

SEQ ID NO: 424649 - DNA, 201 bp, Homo sapiens
aaacacattaaaataaaaggttatctatctttccattgttataagatgtgggttccaaagcacttgagggatgggatggagacagctgctcaaggacaagytggagaaagttcattataagagtatgtataattcattccagacctctcaacgttctctctcataatctctttggggtcctagagactttgggcagctagc

SEQ ID NO: 424650 - DNA, 201 bp, Homo sapiens
tttatatgtgggatggaccacatgcagcaatatctaatttagtaaatatttcaagcatatatcaaaccatgatgcataaaatataatgaaaaggaaaaatrttaatactttaattattactcaagaaagaacacatgactaagctgtcaccaactgcctatcataatgctataaaacttacttaggaccaactaataaaag

SEQ ID NO: 424651 - DNA, 201 bp, Homo sapiens
gtttcaccatgttggccaggctggtctcgaactcctgacctcaggtgatccaccagccttggcctcccaaagtgctgggattacaggtgtgagccaccgcrcctggccccaagtttcttttgagttcaactgaacaatagaaatcaacattgtaagaagtggctatataacagaccgaggagaaaaatgatagtatttatc

SEQ ID NO: 424652 - DNA, 201 bp, Homo sapiens
ctggtctcgaactcctgacctcaggtgatccaccagccttggcctcccaaagtgctgggattacaggtgtgagccaccgcgcctggccccaagtttctttygagttcaactgaacaatagaaatcaacattgtaagaagtggctatataacagaccgaggagaaaaatgatagtatttatcattctagaaagaattaggga

SEQ ID NO: 424653 - DNA, 201 bp, Homo sapiens
aacagaccgaggagaaaaatgatagtatttatcattctagaaagaattagggagaaattagttttcactctacacaagggaataggtatgtgtgacatctkcaactgaacgaaagtaacaatgtctgagaatgaaaaaagaaacaggcatctcctggagtctggagcttaaaaaaaccattatattaaaatgttcaccaac

SEQ ID NO: 424654 - DNA, 201 bp, Homo sapiens
caaattttactaagtctttccttttgctctgaaataatcatcacacacctgcttatgctacgaagcatgtgagctgacagaacagagagcacttatacccmgattctccttcctagttttgcagttcagaataaagtaaacagaaaacttaagactatgcccttgttagcattagaaattaaagaagattctggattcacc

SEQ ID NO: 424655 - DNA, 201 bp, Homo sapiens
caacagccatctggttgtgctccccacatacattttgcagaacgcatgtagagggatctctgtaagatgagaatctgattgtgtcactttcttgcttttaygataatcttccttcacaggcttcccaaggctctgtaagatttggcctccatcgccacttctgccgcatcctcacttagcacttgtggcctatacttgtcc

SEQ ID NO: 424656 - DNA, 201 bp, Homo sapiens
tagaccatgcaatattctgttctaaaactctccatacatttgtttattaacatcataaaactccataaggtagatgctcttaatatcatccccctccctcytcttcttcctgttttgtttttttttaaactataagaggaaactgagaaataaagaggttcaacagttcacccaaggctaagcagctagtaagtagaagag

SEQ ID NO: 424657 - DNA, 201 bp, Homo sapiens
cttcaaatttcagaagccaaaaatatgcggttaatgcagtatctctcagtatataagcttaggaaacaaaagaaaatcagatggcaagaaatacctgaatktaatttatttattaatttatttagtttattttaatgagtcaactaaaaatccaaatgcataatagtgcaaacacttcattaactgggttcataacaagat

SEQ ID NO: 424658 - DNA, 201 bp, Homo sapiens
cattttaatcaagaactgcaaaccaatgaacctaacatgcaaaggacatcttaaacaagaactgtaaaccaatgaaccttcattatgtaagcagacacacrgaaaaaccaagcctttaagaaactgactttacatactgactttcctagtatgggaaggtgataactcagctgtgaacatgaaggtgaagatatggagaag

SEQ ID NO: 424659 - DNA, 201 bp, Homo sapiens
agcataacttaaataccactaaatctgatgctcagagtcattactgctgtaatcatcacatcacatcttctttcttcactgttgttctgaagagtcacagygtctaaatattatcatgacagatctatcataacagtgatttttaacatctccagaaaatagtctattattgatggaatgcccagcttaagatgtactttt

SEQ ID NO: 424660 - DNA, 201 bp, Homo sapiens
atgtaaccggaggtgaggagttcgagaacagcctggccaacatggtaaaaccccgtctttactaaaaatacaaaaattagagcctggcttgaagatggccraatagaacagctctggggtgcaggtcccagcaagatcaacacggaaggtgggtgatttctgcatttccaactaaggtaccctactcatcttactgggact

SEQ ID NO: 424661 - DNA, 201 bp, Homo sapiens
ggagaaatacctaatgtagatgatgggttgatgggtgcagcaaaccaccatggcacgtgtacacctatgtaacaaacctgcacgttctgcacatgtatccyggaacttaaagtataataataataaaaaagaagaatataatttcagaaatatggaaaagggttttatttactgatatgacctacaaaaagtcagcaaatt

SEQ ID NO: 424662 - DNA, 201 bp, Homo sapiens
tagacactggcatgaaatgatgctcttcaaatctgctgaattaatctgactctaaagccaatttaagaccatacaatagtctgcccctcactgttccaacktggtcatttccagtaactgatctttgtagtcactgtgctcatactgcatttactgcccacactgagggtgtttaaaacttgctgatttcatggaatctct

SEQ ID NO: 424663 - DNA, 201 bp, Homo sapiens
taacattctgtgcgcaaatgctttatttttaagcaaatggaaaaaaatcacttgcttcagataagagacaaggggaaaattggagctaataaagcattacwctgagagaatttccttttcttcagtttttccttctcacatcttaattgtgctacttattaaacacacccccaatccaactgtttcctgaactcagtagta

SEQ ID NO: 424664 - DNA, 201 bp, Homo sapiens
ggtttcactatattataaatagttccatataatattgaggatttattttaaatgtaaatgagaaaaaaggggaatcttttttcccttacaaacgaggtaayttaaaaatttaccattcttagtctacatgtattcccgtattttacatcttgtgaaaaagcaagacatgatatacttctattagttagcttttcttggaag

SEQ ID NO: 424665 - DNA, 201 bp, Homo sapiens
aaagagaaggcataaactgctttctttaagtgaaaagataaacgttcttaacttgaacaggaaaggaaaaatcctacgctgaggttactatggtaagaaaygatgttctatctatgaaattataaagaaggaaaaagaaacgtgataaatgcctattagttaagatggaaaaggcattaaatacatgagtggaagacatga

SEQ ID NO: 424666 - DNA, 201 bp, Homo sapiens
tcattaacattcactgttgacatcagtccaaagcattcacctgcattaaaacacttcattaaaacactcaagaactctatcactatttatctagaagcacrcataaaacaaaattcagttttacatacaataggatttaatcagctgtttttcagcttttttttaatggagtcaacttataattttttattattatgaagt

SEQ ID NO: 424667 - DNA, 201 bp, Homo sapiens
gaataaagtattaaaggcatcataagttaaaagttctgttaatggcatcataagctgaaagtttagtgtttaatatattcaagttgcatcataatcaagamtctttctatcatgatatcgaagtgtctattcttatagaaccacacataaattatattaatattaacatctattatatctgttaatatgttaatagtttat

SEQ ID NO: 424668 - DNA, 201 bp, Homo sapiens
atactacttcaaagaaaatgaacaaattacagttccctacaacatggataaatcttaaaaacttaatgtccaacaaagaagccagacaccaaaatgtagayggtatatgatcccatgtattgagatggtaaaactataaagaaaatccaggaagtgattataacaaacagtggttacctatgggagaaaagaagtggttat

SEQ ID NO: 424669 - DNA, 201 bp, Homo sapiens
aagtctctaactatttaatagccaaatcatctatttctctttatagttctgtaagtttttgtcctacatattttgatatgctgttgttatgcacatacacrttaaggattgctacgtcttcttgaagtattgacccgtttaccattatgtaatgcccctcttcatctctgacaactttccttgctgtgaagtcttctattt

SEQ ID NO: 424670 - DNA, 201 bp, Homo sapiens
caaggaaagtgttcatggtgattcagggcctccggcattcctctcctttctgagctcctatagtacttacgttttacactacttcttttacccttaatgakgaagatgaaggtcagaaactgattgcatttgctgagcaatcactatatgccagagattcttataattagcactttacatgatattaatgcatttaactgt

SEQ ID NO: 424671 - DNA, 201 bp, Homo sapiens
agctccagctgaaatcaaactgacatcattttatgtatttaactacaaacctcttacacaatacattagctcaatttgctttttcattcttaaatgaaacmttatgcctggagcagaggacctttcattagtgctacaatttgtacaagattctaaaaatatgttcattaatccaagcagaattaaattttctacatttta

SEQ ID NO: 424672 - DNA, 201 bp, Homo sapiens
agaacgcaggactaagaaatgcccagtgaaagcaaagtactcaattactaacgaaatgttaacatgtcattctggcaagaagaaaaatatcatggaacagsagaatgaacctgggcactggagtcatgaaagttcacaatcagaactctagtttagccactgtggtataacacctaaaattaaggttcaatatcatgtgcc

SEQ ID NO: 424673 - DNA, 201 bp, Homo sapiens
gactccatacattttgaaaaaatgtaattgcttatattccagtataggtatttttaagcacctagtacctattacaatcactgatctagaaataaatacaygcactggacatgcaagcattatatagattatggcattagtgtgttataaagtaattaaagcagttataagtaaaattagaccaagagttcttatcaagga

SEQ ID NO: 424674 - DNA, 201 bp, Homo sapiens
ttttctttgttccaacatagggctgaggactcagaagacagcatcacccaggtcacaaactgacagaaaagataatctattcttcagatatgcttgtttayctgctcagtttaaaaattttcataaagaaacatggaatcttggtttctcttgaaaaatagtagtcctggcaacactggactggtgacagtaagctgcagc

SEQ ID NO: 424675 - DNA, 201 bp, Homo sapiens
cctacaggactgagtggtggcaggtaccacaatagcttatccatgtattgactctccacccctaccaaaccatattctccttgtttctcactctacttctygggattatgttccctaataaacagcacatgctgctctgcttccggctcttcttagtggggaagctgagctaagacagatctaatagtctgtggtgccttt

SEQ ID NO: 424676 - DNA, 201 bp, Homo sapiens
aacaagataacaagatgggagagttcccttgacccctttgtgggacttgcaacaggggtatggctcgcttacctggccaccactgagctcaaaccccttgygggagagggagcacacaggcaagcaggtgcagaagtgcttttgggctctggccccacagcactgtctaagggtatgttacaattaatgctcttttagcag

SEQ ID NO: 424677 - DNA, 201 bp, Homo sapiens
  misc_feature (1)...(201): n = A,T,C or G
gcttgcccataagaaaacaaaattggactcttcaaacatcttgctgaaaaccagatgcccaatgtctgcaacataccccttttggtaacagaggacttatnttatcctaagaagttgtgattcttatgcagaaaatttcagtgcaaattgaaaattcagttaccttttcaaagaagaattaggctaactctcaggaggact

SEQ ID NO: 424678 - DNA, 201 bp, Homo sapiens
tgtttatatactagcaacaaaaaatagaaaatgaagtttaaaagtgattccatttggtcactgtgaaaagcacaaaataggaataaatcacggcaaagatrtgaaagacttttatgcagaaaactacaaagcatcactaagaaaaatcttaaaaactatagagggatccatcatgttcaaggattatgtctcaatattgtg

SEQ ID NO: 424679 - DNA, 201 bp, Homo sapiens
cggaacagagctgaggctggacatctgtgtcaaggatggttctgaaagaacatggtctcatgaacaggtgagtcacctcccagaagccagggcagtgggarccagtcgggggctgatgcagacacagagggatgcagctggaacaaatctccgaatggtgcagatggtacttgtgggacctggagtgaggccgctgtatca

SEQ ID NO: 424680 - DNA, 201 bp, Homo sapiens
taatataaaaaattaattttttaaatgtaatataaaaaattaattttttaaattaaggaatgcttgagacattgaggccaaaattaaaactctaaactgtsaagcaactgttaaatgtgtgcaaataggaaacaaatagaatgaaatgaagcctcgagaacctacccctaagccaaagggcacaacattgctaataagcac

SEQ ID NO: 424681 - DNA, 201 bp, Homo sapiens
ttttgggggcacatagtaggtgtatatatggggtacatgaaatgttttgatacagtcatgcaatgcataacaatcacatcatgtaaaatggtgtccatccyctcaagcatttatcctttgtgttacaaacaatccaattatattattttacttattttgaaatgtacaattaacttattattgactatagtcaccgtgttg

SEQ ID NO: 424682 - DNA, 201 bp, Homo sapiens
tatgtattgcttttattgatttttgttttgtttgcttttttctatttttgggggcacatagtaggtgtatatatggggtacatgaaatgttttgatacagkcatgcaatgcataacaatcacatcatgtaaaatggtgtccatcccctcaagcatttatcctttgtgttacaaacaatccaattatattattttacttatt

SEQ ID NO: 424683 - DNA, 201 bp, Homo sapiens
tataaagttaacagtgaatggtaggaaaaattcaaaaacatatataaagtcacattttattgagttaataaaataaagagcaattaagttattgtttgaaratatttttattgtttccttttgacaactttttagaatactttacaaaattgcttttcaaattctttgcttttggggatagaacttggctgtcaattagca

SEQ ID NO: 424684 - DNA, 201 bp, Homo sapiens
tagtttaacagaggaagcctgtagagtgctttggaacacttccaactaaatttcatggttttaatgactctgctgttctgtgtttgtgatgtcatcttaamcttgcttttcccctgaccatgaacagatcactttacatgggcctcctgttgttgtagtagtttttaatcttacatgtgaaggatgtaagcaacagcaccc

SEQ ID NO: 424685 - DNA, 201 bp, Homo sapiens
agactccaaggttgataaagtgcatgacatgaccaccaattaaaccaaaatagaggggcaggaacaaggcagaagagaagaaaatcaattgcatttagaayatgctggatctgagatgtccatgggacatgcagctgggaaattctgcaaggaactggacataagatggatgatgagtgaccggcatactggtgagagttg

SEQ ID NO: 424686 - DNA, 201 bp, Homo sapiens
acttggtcattgattagatgaggatggtaagggagacaaaggagttaaagactccaaggttgataaagtgcatgacatgaccaccaattaaaccaaaataraggggcaggaacaaggcagaagagaagaaaatcaattgcatttagaacatgctggatctgagatgtccatgggacatgcagctgggaaattctgcaagga

SEQ ID NO: 424687 - DNA, 201 bp, Homo sapiens
aaaaatattttctgctgtctcaagtcaggtagcaagagcaagagataagtgtattggcagtaccaaatccagtgaccttattcatataatacaaacggacycaggcaacatgacacatatcacattaatattaaagcaaagaaataagagttaacattgtgatatggtttggctgtgtccccaaatctcatcttgaattgt

SEQ ID NO: 424688 - DNA, 201 bp, Homo sapiens
cccatatacttactattttcaaaatttaagcagatagcaaaaagctcaccacagagcagaaaatgaatggattgcttttttaaaagaagtggatgattgawtgaataaatacatttattgtctctaattgaacctgcttgtaggccctacatagtgccaatacagcctacaaattcacattccacatgggcaactccacct

SEQ ID NO: 424689 - DNA, 201 bp, Homo sapiens
gagtagaagatagagtgctttagcctctcaatactcatctggatccttcacaacctggccaacataacagccgaccatcagcccttagagttattcaggcwtaatacaccccaattcatcctgaaattgtaaggggatcttgaatagttgttttgcttttatgactttcaagtgcttcaccaacataataatgataataac

SEQ ID NO: 424690 - DNA, 201 bp, Homo sapiens
gtcatacctaaaactgaactcattatcattcccacaccaatcctgtttctctttctgcatttcttgcctgaatacagcttttcctctagacatccacctcmtccctctacctcaacctccacatctcattaatcagaatgcccaatgcatttcacttctcagatcactccctgggtcacccccaactcatccccattggtc

SEQ ID NO: 424691 - DNA, 201 bp, Homo sapiens
ccatcacctctgacaacatctcctcactctggcttcctcattgttctctaaccaccagggtgcatagctgcttagggcccagaccctggccattccctctrggtgggaaggtctgagactctttgcatggttaattagcttaccttctttgagactcctcagatgttaccttctcagtgagattttccctggccactcaat

SEQ ID NO: 424692 - DNA, 201 bp, Homo sapiens
cctgcttcagcctcccgagtagttgggattacaggcatgtaccaccaggcccagctaattttgtatttttagtacagacgggatttccccatgttgctcagctggtctcgaacttctgacctcaggtgatccgcccgccttggcctcccaaagtgctgggattacaggcatgagccaccgcgcctggcctactacaaacat

SEQ ID NO: 424693 - DNA, 201 bp, Homo sapiens
agtaacatgattcccagaacacaatattgtaagaatgttgtcaacaaagaaagtagaataagtttctagcaccttttgttatgagcttctagcatgctttkctgtgagcaatgtctctgttaatttagcctgagttgattgatttcctgccttaacttcacacactcagcttcttaatgagctttcagtactggagaaaaa

SEQ ID NO: 424694 - DNA, 201 bp, Homo sapiens
cagaacacaatattgtaagaatgttgtcaacaaagaaagtagaataagtttctagcaccttttgttatgagcttctagcatgctttgctgtgagcaatgtytctgttaatttagcctgagttgattgatttcctgccttaacttcacacactcagcttcttaatgagctttcagtactggagaaaaaaaatctcagtcttt

SEQ ID NO: 424695 - DNA, 201 bp, Homo sapiens
tgcggactaaaatacaattttttgtgtatgtgtttcttcccagatagctacattattggttacttgccaagcaaccccatatacttactattttcaaaatytaagcagatagcaaaaagctcaccacagagcagaaaatgaatggattgcttttttaaaagaagtggatgattgaatgaataaatacatttattgtctcta

SEQ ID NO: 424696 - DNA, 201 bp, Homo sapiens
ttctaacttttgccatttcaacttagcaatattcctactgattacctaacatacttaactgccattctctgatcactccgaaatagaaaggctctgttacractctcctggggctcttccgtaaagagaaagtctttgtgaactgaacgcctgcccagatctagactgtcaaacagaaaagaatcttgttaataggaacta

SEQ ID NO: 424697 - DNA, 201 bp, Homo sapiens
gtagtgatgggtgcctgtaatcccagctactcaggaggctgaggcaggagaatcactttgagcatgggagggggagattgcagtgagccaagatcgtgccwctacactccagcctgggtgacagggcaagactctgttaagaaaagaaagagagagagagaaaaggaaggaaggaaagaaggaaggaaggaaggaaggaag

SEQ ID NO: 424698 - DNA, 201 bp, Homo sapiens
ctagggaaattaattggcccattcttcacttcatcaagcttagctttcctttacattaggtttttcaaggtgctagcatcaattcggctcatctctactcyttgtctctttagctaatctgcaaatttgggcaaactgtgtaggatttgttccagtaacattttagctaaataaagaccgtagagtgttattaaggacttt

SEQ ID NO: 424699 - DNA, 201 bp, Homo sapiens
cagaccccagtatggtagacccactgacagcttgcaccatgcacctgaaaaagccacaggcactcaatgccagcctgcgaaagcagctgggagggggctgwaacctgtaaagccacaggggcagagctgtccaaggccatggaagcccacttcttgcatcagcataacctggatgtgagacatggagtcaaaggagatcat

SEQ ID NO: 424700 - DNA, 201 bp, Homo sapiens
ctggtttgtgtgagaactacagaggttttagcattgctggaacataaacttgaaggaaaggaatgtaggtggaaagaacagcaaaggccagattgtggagmgttcctaagaggtcaaagagtttgaactttattctctaggggttatgtgaaaaggttgtgagattttagattgagagggaacaaggccacacaggccttt

SEQ ID NO: 424701 - DNA, 201 bp, Homo sapiens
tctttttttttttattatactttaagttctagggtacatgtgcacaacatgcaggtttgttacatatgtatacatgtgccatgctctttttttttttttttgagttgcagtttcgctcttgttgcctgggctggagtgcaatggcgcaatctcggctcaccgcaacctccgcctcccaggttcaagcaattgtcctgcttc

SEQ ID NO: 424702 - DNA, 201 bp, Homo sapiens
ggccactgagataagataaatggcaataagaagtatttcaaagacctaagagagaaaaaaatgagctaatcgtaggtgtagaagaataaagtaattgatayaatctgaagatgtatcaccttggatgcaggaaagtaatcaacaggtaataataataatacataaaacactgtgaaaatgacaagctaaccatcaggctac

SEQ ID NO: 424703 - DNA, 201 bp, Homo sapiens
ctcctgcccactccattcactttacagatggaaaccctgaatcactgacaaactaagtgaccacaaaaggttattgtcagagataaaactaggattaaaaytggtttcttaattccaagccttcattccctcatagccatattagacacaaaaggctttggacaggaaggagttctctcttacagaaacatcctcttccaa

SEQ ID NO: 424704 - DNA, 201 bp, Homo sapiens
aaggatgtaagcaacagcaccccaacatggacttcaggaaatactttaaggctatgtattgcttttattgatttttgttttgtttgcttttttctattttkgggggcacatagtaggtgtatatatggggtacatgaaatgttttgatacagtcatgcaatgcataacaatcacatcatgtaaaatggtgtccatcccctc

SEQ ID NO: 424705 - DNA, 201 bp, Homo sapiens
ttctctgacaaactaacttctaaatggagaccgaaaagatggagacttttacctttttagataggtaaagaaagtgatggagaaaaagaccacagacatcyggatcaacttgtgcaaggccctgagataagcaagatattggttttctcagaacagaaagaagccagttgaaatgcatacgtgcaacagaaaatgaactat

SEQ ID NO: 424706 - DNA, 201 bp, Homo sapiens
taatcccagcactttgagaggccaaggcagcggatcatctgaggtcaggagttcaagaccagcctgcccaacatgatgaaaccgcatctctactaaaaatrcaaaattagctgggagtagtggtgcatgattgtaatcccagctatttgggaggctgaggcaggaagatcgcttgaacccaggaggtggagattgcagtga

SEQ ID NO: 424707 - DNA, 201 bp, Homo sapiens
aacaactgtctataggtcttgatcctgcttctgtgccttttgtgtttccacatctgttttgtattacttctaccgtgactatatgtgttacaaataagtttaatttatcgacttatttatttctttattcattttcttgccaactggagacaaagctgatgcaacaaggagataaattttccttctttcccataacatttt

SEQ ID NO: 424708 - DNA, 201 bp, Homo sapiens
gaaaggctgactgggatcaagctattggacaagagcatggaaaatgggattatcaaggactccttgctccatggtaattaaaccgggagttaaagaacagsaacatgatgaaagattttaatattttttgaatgaagcagatgatttcttttcttctattatttctcatattgctgacaattttgcatcaagcttccatga

SEQ ID NO: 424709 - DNA, 201 bp, Homo sapiens
ataaaataagaaaaacatatattcttctattctcaaatctgttgattaaagtaaactgctcatgtttctccactttaagcactaggctcttaggatgcatctttttttttcttactcaggtttgtctctttggagcagcctcagaaaatgctcactgctttatggcttctagggttgctggagtgagagaaaaactgaaac

SEQ ID NO: 424710 - DNA, 201 bp, Homo sapiens
tgctccatggtaattaaaccgggagttaaagaacaggaacatgatgaaagattttaatattttttgaatgaagcagatgatttcttttcttctattatttmtcatattgctgacaattttgcatcaagcttccatgaacgtatgacaaaattgatagttcatgttctgattctttaatttgctctgtgttcattatatatt

SEQ ID NO: 424711 - DNA, 201 bp, Homo sapiens
acagtaagaatggaaagcagtctaccttagatcattaagtgagtgtaaagttaatattcaacaactaatacaaagtacacaaaaatagagggttggtttttaaattcttctaactctttaaaaataaaataagaaaaacatatattcttctattctcaaatctgttgattaaagtaaactgctcatgtttctccactttaa

SEQ ID NO: 424712 - DNA, 201 bp, Homo sapiens
cagtgacaatgagaatttcaaaggaaatacatttttacttccatgagatgttttcaatctttagatacttgtagagatgcaaaggggatatataaataggratctactgtattaaacgttttagtctttaatactttactgtttagaataactatgcaataccagcagagaaatatttattttcttaaagctgtattattt

SEQ ID NO: 424713 - DNA, 201 bp, Homo sapiens
aattaagcttcttctaaaatttacttttttcatggctatgtcctatgtctaaaatttaaacacacaaagccttctgtcttacctggtagtagtctactccrttttttaggcaaagtatttaagacagaatgatcaagcttcaacaatgaaatgcaaattttatttaaaaatcaatgtttacgtgcaagtttatttgatttc

SEQ ID NO: 424714 - DNA, 201 bp, Homo sapiens
ctgctcctgttactaaggcagttagtgtcctactattccagacctgaaaacttttcatcatcctttaactcattccatttctacaaacaagtttccatgamtgtttctctgaattgcttgttcatcttcattaccaccaatcacccactgaattatttctatccatgcttttcctgaacatctttgaacatattttgtttc

SEQ ID NO: 424715 - DNA, 201 bp, Homo sapiens
catgggagatagagattgtgccaagacaggatgtgtcaatgtctaatgagctaaaccatctgtatttttagtgaggtggaaaggaagtctgtaactatggyggctgacctggttactgagagggctctgagtggaaggatattctgaaattcccaagtctctcttcatctgctcaaccaattcccaagtatctcctcactt

SEQ ID NO: 424716 - DNA, 201 bp, Homo sapiens
cagccctgatgaaatcttgatcttagtacagtgggacccatgttggacttctgacttacagaactgaaacgtaataaatgtattgctttaagcaacaaagkttgtgataatttgttacagcagcaatagaaaataaatacaatatatgaactgaaaggtatttcctaaattaactggaaaatcagagactagaataagtat

SEQ ID NO: 424717 - DNA, 201 bp, Homo sapiens
tagaatatataggcaggcatagcaagataaatatctgaaatgttaatttgtatattgttctactgatgtttacaattcataggaataacaggaaatttctrcatcactatcccacctacttctcacttcaacacacttgccttatacccactagttcccaaacaatggccttgatagaactcatctgctctgaaactgggg

SEQ ID NO: 424718 - DNA, 201 bp, Homo sapiens
cacatgtaatttgccatgtcttcttggaacactcttgcaacagcttcgagattcctttgaccaagtttattagttaatgatgcttgtgcaattcagcttttaaaaaacttggggctgaaatatgctgtcatttttacaagtagcttttaatcataataaacaaactttatttagcacaaggtctttctttgggatttcact

SEQ ID NO: 424719 - DNA, 201 bp, Homo sapiens
gaaaatatgttcttcaataatttatctttccttgcttaacatgtacgcttacctattttagtagcacttttaattaaaataaaatccagagaacaattaarcttcttctaaaatttacttttttcatggctatgtcctatgtctaaaatttaaacacacaaagccttctgtcttacctggtagtagtctactccgtttttt

SEQ ID NO: 424720 - DNA, 201 bp, Homo sapiens
atatacataaccagaaaatatatgtgtattgtgatattttaaaaatgaagcatttacccaacatgaaaaaaatgaagaaaaagaagagaatgaggaggagsaggaagaagggagggagggagagaggacgagaggaggaagaaaaaggaggagaagaaagaaaaatctatctggacatacagtttacttgtaaagacaaac

SEQ ID NO: 424721 - DNA, 201 bp, Homo sapiens
attttgtgctcaaagtggtatttggagctgactcagcatagataaaggtcagtgatacgttgtttcactaaaccagtgcttcttgagtttattgttattttgtcttcaagtgagctaccaataggaaaagtcaaactttatgacttttgaagagacaagaataggttcaatcctaaaactagggcttttaggcatgaggtg

SEQ ID NO: 424722 - DNA, 201 bp, Homo sapiens
actgtggtttcgggaaataatatccttaatgatatctctaatcttagaataataataataataataacaataaaaatcaaggttcttagcatcaatacagytgacttgctgtagaatggtatctggctggtaacataactcaaaaaattaagcaaatattttatgaattgaataagcaaacaaaaaaattcatttagtata

SEQ ID NO: 424723 - DNA, 201 bp, Homo sapiens
cgcttgttttatataatttgaattaagctaaaatgttctttattcttacatgtaagaagtagtcacagaggtgtattgtgaaatattaaactcatgtataraaaataaacgatttctatttgattttgtaaatattgaaaaccaggattgctgacagcttctgaaggtatttctttaagaaaattcagtaactaagctgga

SEQ ID NO: 424724 - DNA, 201 bp, Homo sapiens
agcatccccagcatctctctctttctcactctctctctctctctatctctgtgtgtgtgtgtttgtgtgtgtctatggatgggggtgtgtgtgtgtgtgtgagtgtcatttcttataacttcattccttggaaggcctagaagtaatgttcatttcagtacaatgagcattcctcacattcagattgtggtactggaacat

SEQ ID NO: 424725 - DNA, 201 bp, Homo sapiens
tagcatccccagcatctctctctttctcactctctctctctctctatctctgtgtgtgtgtgtttgtgtgtgtctatggatgggggtgtgtgtgtgtgtgtgagtgtcatttcttataacttcattccttggaaggcctagaagtaatgttcatttcagtacaatgagcattcctcacattcagattgtggtactggaaca

SEQ ID NO: 424726 - DNA, 201 bp, Homo sapiens
ttttccatcaaaccctgaagggttatatggaaaaaaaaagaaaaaaggtttgcattgacataatgaatagaggatttaagccaaaaacccaaccataaatkagcttctctgtgctaaacagaattcgggccaaagatactgatcagcaatatacaaacgaaaatatattttttaaaaatgtgtaaggtgggcatatttccc

SEQ ID NO: 424727 - DNA, 201 bp, Homo sapiens
acaggtaatcctgggagatttcctgtatcagagagtttcaaacattcacatgataattaaactaacctttgtatgcaatttttttttggtaaaaagaattmtcttggagatatgaaatgattgagtatgaaccacagctgtgttttcaaatatgtagtttgcctttttggttgttgtaccctgctcactctccttcacaca

SEQ ID NO: 424728 - DNA, 201 bp, Homo sapiens
ttttcatcctcataatattttgtgtgtaatgctggattttaaaaaatgagtaattctagcatccccagcatctctctctttctcactctctctctctctctatctctgtgtgtgtgtgtttgtgtgtgtctatggatgggggtgtgtgtgtgtgtgtgagtgtcatttcttataacttcattccttggaaggcctagaagt

SEQ ID NO: 424729 - DNA, 201 bp, Homo sapiens
agcaggagttgcttctagtttggatcccatatgttaagaaattccaccttccatttaacaagaatttcctctgggagccatcatggggatgccgtctacargctagtggcacgagattcaagacactaaaagtgtacactaagaaaaatctaccagtagacatgaatgaaataattagctcaaggctctgatgaaatggta

SEQ ID NO: 424730 - DNA, 201 bp, Homo sapiens
attttcatcctcataatattttgtgtgtaatgctggattttaaaaaatgagtaattctagcatccccagcatctctctctttctcactctctctctctctctatctctgtgtgtgtgtgtttgtgtgtgtctatggatgggggtgtgtgtgtgtgtgtgagtgtcatttcttataacttcattccttggaaggcctagaag

SEQ ID NO: 424731 - DNA, 201 bp, Homo sapiens
aagtaattcaggaggtaaagaataacactttataaggtaaagagtcaattcaccaggtgcatatcacagatttatacttaaaaataattcatttgaaattyaaatggcaacagtttatactgctacaaggagaaactgatatagccacatttataatggaagtaatagtaatctcacatcatttgtagagtgatcagtcaa

SEQ ID NO: 424732 - DNA, 201 bp, Homo sapiens
tgtgccatgttggtgtgctgcacccattaactcatcatttagcattaggtgtatctcctaatgctatccctcccccctgcccccaccccacaacagtcccyggggtgtgatgttccccttcctgtgtccatgtgttctcattgttcaattcccacctataagtgagaacatgcggtgtttggttttttgtccttgcgatag

SEQ ID NO: 424733 - DNA, 201 bp, Homo sapiens
catatggatacatgtgccatgttggtgtgctgcacccattaactcatcatttagcattaggtgtatctcctaatgctatccctcccccctgcccccacccyacaacagtccctggggtgtgatgttccccttcctgtgtccatgtgttctcattgttcaattcccacctataagtgagaacatgcggtgtttggttttttg

SEQ ID NO: 424734 - DNA, 201 bp, Homo sapiens
gtgatctgcccacctcagcctcccaaagtgctgggattacaggcttgagccaccacgcccagcctattgcatagtttttgtaacagaaacacataaaaaawttaaagcaaagttaaaagtattaccaaatatattactcaaacatacacacctacacagacacacacacagagacatgcaaaatgaagcaagagaggcaat

SEQ ID NO: 424735 - DNA, 201 bp, Homo sapiens
tcacacacatacacattcagccctccagaatttgaccaccaaggaagtactttaccggctcctgtggcttctctttccttggtcggtgcacagagtcatcrctgcagtatgtgaggatcctttaccctaggttgctggccagtttcttttcatgttgctgagagctcaggttattcctcacactgggtaggtcctgatttc

SEQ ID NO: 424736 - DNA, 201 bp, Homo sapiens
ggggatatgagaggaagagcaaaggaggctttggattgggaagaagggaggcagtgagatgtagctgtaatccaggaatagtcagggaagcagataatttmgttaaagtatcttggcctaataagggaactcggcaggtggggataactaaaaggagtgcttaaaagagtattgtctaagttggcaccagagttggggagt

SEQ ID NO: 424737 - DNA, 201 bp, Homo sapiens
cccgggaaaggtaaaactactgtatattttctactgtttacacttcttattgggactaataattacacctgtaattacatatgtactatttcccttttccrttagatcatcagaccatatttgttattggtttttcttacttaaaactcagtgcctagtccattgcttcactcatagtagatgctcatttgttgaccgtat

SEQ ID NO: 424738 - DNA, 201 bp, Homo sapiens
aactaaatgctacctacctgaatgtactttacctgtagatacatatagacaaaatttaaggggtagaaaaagataacccatgcacacagaaaccgaaagcrataaaacttgtatcagctaaaacagactttaaagcaaaaatcactaaaaagacaaaggatatcattatataatgataaagacatcaatccaggaagataa

SEQ ID NO: 424739 - DNA, 201 bp, Homo sapiens
tatgcatatggcagattttatttatgtatacattcaatgtattatatatatgaattatctatctatctatctgtctatctgtctatctatccatccatctrtccatcctatctttcttgtgcttgctaacatgcatgagagagattccccttcgttactggctttgaagcagtaagctgtcacattgtgcaagggcatatg

SEQ ID NO: 424740 - DNA, 201 bp, Homo sapiens
acttctaataaagacacactcaagactgggtgatttataaaggtaagaggttgactcacagttcagcatggctggggagaactcaggaagcttacaatcayggcagatggggaagaaacacatccttcttcatatggcggcagtaaggagaagtgctgagcaaaagggggaaaagcaccttataaaactgtcagatttttg

SEQ ID NO: 424741 - DNA, 201 bp, Homo sapiens
ttgtgaaaaacttaatagtcttgggggaaaaaatcacaattttcttattgattattaagattgcctgtattgttccagctggcatggtcattcttagagtmcctcattatcatccaaaatgagcactgcctaccagacaatgagatcatatttaagggtcctcctattatttctgggagtttccaaaggagtgcctcacct

SEQ ID NO: 424742 - DNA, 201 bp, Homo sapiens
gtccctcattatcatccaaaatgagcactgcctaccagacaatgagatcatatttaagggtcctcctattatttctgggagtttccaaaggagtgcctcayctatacccacagaacattgctctgtttacagccactttgcagtatcttccaggaaccatctttcctttccaaatccacttctgcctctcgaatgttacaa

SEQ ID NO: 424743 - DNA, 201 bp, Homo sapiens
ggtctttatctaaacaaatcttgaggtatttatatctttctgactcgtatgataatatctgtgcatatatatacatatacacacacacgttttactctccyactataatatggaatcggtgttttattcacatacctttgcttcttgattataataagcaccaattttttttaacaactgtctataggtcttgatcctgct

SEQ ID NO: 424744 - DNA, 201 bp, Homo sapiens
tcccatccatttgtcaatgactttaaccttggccactcttcttattacttaatcaatagctccatttggatattttttaagtctccaagtgaaagtccaaraccaatcataattcacccaagaatctgctcttattccagtgttctatggggcaaaaaaatgacccaattattcacgcagctgctcaaaccagaaaccaga

SEQ ID NO: 424745 - DNA, 201 bp, Homo sapiens
ctttttaatagcttctcctgtacttctgaaattgcattggtctttatctaaacaaatcttgaggtatttatatctttctgactcgtatgataatatctgtrcatatatatacatatacacacacacgttttactctcctactataatatggaatcggtgttttattcacatacctttgcttcttgattataataagcacca

SEQ ID NO: 424746 - DNA, 201 bp, Homo sapiens
gtgagtgtaaagttaatattcaacaactaatacaaagtacacaaaaatagagggttggtttttaaattcttctaactctttaaaaataaaataagaaaaayatatattcttctattctcaaatctgttgattaaagtaaactgctcatgtttctccactttaagcactaggctcttaggatgcatctttttttttcttact

SEQ ID NO: 424747 - DNA, 201 bp, Homo sapiens
gaatggaaagcagtctaccttagatcattaagtgagtgtaaagttaatattcaacaactaatacaaagtacacaaaaatagagggttggtttttaaattcytctaactctttaaaaataaaataagaaaaacatatattcttctattctcaaatctgttgattaaagtaaactgctcatgtttctccactttaagcactag

SEQ ID NO: 424748 - DNA, 201 bp, Homo sapiens
caaagactcacatccattcagtcaactaaatttttatcatatgtaagtcaaaacagattaaacagaaatggaaggaaaaaatccacacgtactggctggcmcttgctttgtatctggaggagaataaatatcccagcctgaaaaaatggtaaagaaatggttcattttcctgctactgctgaattgggagatatagggtcg

SEQ ID NO: 424749 - DNA, 201 bp, Homo sapiens
agtacatatctccataggacttcattatatatatttgtttattgtctgtctctcaactaggatgtgaactctacattttagaaaaggcaagtactatgaayggcatgtaacaagttttatttgttaaattaatcaattgttactagattgtatatactgtataaagtacttatcccagttcctggaagtaaatccttaaag

SEQ ID NO: 424750 - DNA, 201 bp, Homo sapiens
acagttgacttgctgtagaatggtatctggctggtaacataactcaaaaaattaagcaaatattttatgaattgaataagcaaacaaaaaaattcatttartatagcattaccagccacaaagactcacatccattcagtcaactaaatttttatcatatgtaagtcaaaacagattaaacagaaatggaaggaaaaaatc

SEQ ID NO: 424751 - DNA, 201 bp, Homo sapiens
gttattcatagctaatcaaggtagcagctttaaaattttgaaaccttggatgatttctaaagatcatcaacctgctttttattatttatttatttttttttgagacagagtcttgctctgtcgctcaggctggagtgccatggtgtgatctcggctcactacaacctccacctcccgggttcaagcgattcttgtgcctca

SEQ ID NO: 424752 - DNA, 201 bp, Homo sapiens
aatacttgtatttaatctactctttctactctaattttgtcagctcactctataatgtcatgtcttccctctagtacaagtggcagtctagggtgagaaascagttagtgatcatgccatttgaacttataaaattatggaacatttctacaattttactttgccttttgtgacaatattgttgaagaatacagctctttc

SEQ ID NO: 424753 - DNA, 201 bp, Homo sapiens
gtttacaagtcagatttaactaatttacacctaagtaaaactgactgaaatattcacaataaaaataataaacattgagttctcattcacagaacatgtgyattgagagtcagtttgtccatgttttccttcctcagcaatccaagttgatagactaactcatatgtaagacattattgatcttatgtctataaaaagtat

SEQ ID NO: 424754 - DNA, 201 bp, Homo sapiens
ttttataattatttttctagtctaagttgtttcctctacattgaattcagcaacaatagattttaatggctctcctttattaattatcttttaaaaatttyaacttcattttcatagaaacactgactttctttcttcactcatacttcatcactctgtaaatacttcatttacttacctaaataaaataacaatagaact

SEQ ID NO: 424755 - DNA, 201 bp, Homo sapiens
acaatcatggcagatggggaagaaacacatccttcttcatatggcggcagtaaggagaagtgctgagcaaaagggggaaaagcaccttataaaactgtcakatttttgtgagaactaactcactatcacaagaacaggatggaagaaaccacccccatgattctattatctcccaccaggtccctctcatgacacatgggg

SEQ ID NO: 424756 - DNA, 201 bp, Homo sapiens
taactagattaaccaagaaaagggaagacccaaataaacaaaaccagaaatgtaaaaggagacattataattgataccacagaaatacaaaagatcatcakaagctatatgagtaactatatgctaacaaactagatagcatagaggaaatgaataattttctgaacacgtacaacttaacaagattgaatcaggaagaag

SEQ ID NO: 424757 - DNA, 201 bp, Homo sapiens
aaggttgctgtccctgcgtgattataaactgcagctatttagatcgtcaaagaggagtaagatgttcacagtgatcatggtgtgggcttttttcacagcartgggctacaagtgatcccttcaagatgacgaagcaactctgaccattgcttgggtctctctaattatctcatgacctgtttccatcagatcttggtcatc

SEQ ID NO: 424758 - DNA, 201 bp, Homo sapiens
caagaaaagggaagacccaaataaacaaaaccagaaatgtaaaaggagacattataattgataccacagaaatacaaaagatcatcagaagctatatgagkaactatatgctaacaaactagatagcatagaggaaatgaataattttctgaacacgtacaacttaacaagattgaatcaggaagaagtagaacacctgaa

SEQ ID NO: 424759 - DNA, 201 bp, Homo sapiens
gcagctatttagatcgtcaaagaggagtaagatgttcacagtgatcatggtgtgggcttttttcacagcaatgggctacaagtgatcccttcaagatgacraagcaactctgaccattgcttgggtctctctaattatctcatgacctgtttccatcagatcttggtcatcaacgagtagatagagtccctgctcttcata

SEQ ID NO: 424760 - DNA, 201 bp, Homo sapiens
attttctgaacacgtacaacttaacaagattgaatcaggaagaagtagaacacctgaacagacccataataagtggctatattgaatcagtaataaaaagrctcccaagaaagaaaagccaagtactgaatggattcactgtggaattccaccaaatgtataaagaagaactaaaaccaacctacctctaattacttcaaa

SEQ ID NO: 424761 - DNA, 201 bp, Homo sapiens
aaaggcatccaaattggaagtcaaatagtccctgtttacaggtaataaaatcttatatctagaaaaaccagaaattttcacttgaaaattcttataactgrtaaacagattcagtttataaaacaacccatttcatgaggccagcattaccctgataacaaaaccaggcaggaacacagcaaaaaaagaaaaatataggcc

SEQ ID NO: 424762 - DNA, 201 bp, Homo sapiens
aggcatccaaattggaagtcaaatagtccctgtttacaggtaataaaatcttatatctagaaaaaccagaaattttcacttgaaaattcttataactgatraacagattcagtttataaaacaacccatttcatgaggccagcattaccctgataacaaaaccaggcaggaacacagcaaaaaaagaaaaatataggccaa

SEQ ID NO: 424763 - DNA, 201 bp, Homo sapiens
atttttgcacttttagtacagactgggtttcaccatgtttgccaagatagtctcaatctcttgacctcatgatccacctgccttggcctcccaaagtgctsggattacaggtgtgagctaccacgcccagcccaaactgactatttttaggtgcaggtccaaaatgagaatattacaaatattacaaaaacttgatattaa

SEQ ID NO: 424764 - DNA, 201 bp, Homo sapiens
gattatctcaatggacacgcaaaaaggcatctgacaaaattcaatacctcgtcgtagcaaaaattctcaacaaactaggcataaaagaaccatactttaarataataatggccatagatgacaaacctacaggcaacatcatactgaatgagggaaagttgaaagtcttttctctaagaattggaacaaggcaagagtacc

SEQ ID NO: 424765 - DNA, 201 bp, Homo sapiens
gctaatacctcaaaagtacaggcaataataacaaaaatagacaaatgagactatctcaaatgaaacattttctgacaacaaatgaacagtcaacagagtgrggagacaacctacaaaatgagagaaaataatttcaaattactcatccaccaggggactaatatccagaatatataaggaactcaaacatctcgacagtaa

SEQ ID NO: 424766 - DNA, 201 bp, Homo sapiens
agttcaatggtgcaatcttggctcactccaacctctgcctcccgggttcaagcaattctcttgcctcggcctcccgagtagctggagtagctggaactacrggcacatgccaccatgcccagctaatttttgcacttttagtacagactgggtttcaccatgtttgccaagatagtctcaatctcttgacctcatgatcca

SEQ ID NO: 424767 - DNA, 201 bp, Homo sapiens
acccttatatattgatggtgggaatgtaaatcagtataaccactgtggagaacagttgacaatttctcaaaaaacttaaaatagaactaccatatgacccmagaattccactaccaggtatctatctaaaggaaaagaaataagtatatcaaagagatacctacacttgcatgtttattgcatcactattcatgatagcaa

SEQ ID NO: 424768 - DNA, 201 bp, Homo sapiens
tgagagtgatgctttcctgcctaaactaatattttcaggtagcttcaaagtagacacccataaaccgaaggagagcagaatgtgctaagcaaagaaaccartaaataaaagaagatagtctgcgtgcatagcaacactgcctgggttaggtctttgggtatgataatttgcccatggatctgactggaagcaactagatca

SEQ ID NO: 424769 - DNA, 201 bp, Homo sapiens
tgagacaagcaacctttaacctttaaatgcgctttaaagactgagcatttatctcttgtcacaaagaatgaatgtcacatctccaataaaaccagtcctcrcttttcatcctccctaccatttagtattgccataaggttaagttctaaccaacagcttgtgaacaaaataaacctcttccaggctagcccaccaaacctc

SEQ ID NO: 424770 - DNA, 201 bp, Homo sapiens
ttctggaacctttccctctttctgatagttgtgtcaggcatggcaaaagctgtttccctgaatccagagacagaagtgacatattgagaacggaagagttrtcctgccaacaacaagcaacctaccacttgatatttagtgagacataaatttttatctagtataaaatgctgtgttttagggtctctttctatgttttaa

SEQ ID NO: 424771 - DNA, 201 bp, Homo sapiens
gaacatatttggtacttaaggctttgtccttaaagattaaagcatgcaatattctggaacctttccctctttctgatagttgtgtcaggcatggcaaaagmtgtttccctgaatccagagacagaagtgacatattgagaacggaagagttgtcctgccaacaacaagcaacctaccacttgatatttagtgagacataaa

SEQ ID NO: 424772 - DNA, 201 bp, Homo sapiens
tggaatttaaacagaacatatttggtacttaaggctttgtccttaaagattaaagcatgcaatattctggaacctttccctctttctgatagttgtgtcakgcatggcaaaagctgtttccctgaatccagagacagaagtgacatattgagaacggaagagttgtcctgccaacaacaagcaacctaccacttgatattt

SEQ ID NO: 424773 - DNA, 201 bp, Homo sapiens
accttcctgtctcctttgtcttctttcttttttcttctttctttctctctttctttctttccttctttcttttcttttctttttttctttccctctcgtgyactggcaaggaagatcttgtttttcaaagcaatactgcagtatctattcttcacttcccttggtgttgagaagcagctgtggcaaaagtagtggtgatag

SEQ ID NO: 424774 - DNA, 201 bp, Homo sapiens
atataaccttctatttttttctaaataggcttatttccccccactctaaagcaaatgtgatttctttgttcaaaattcctcaattttcagaacacacactrcaagatgagttctacaagtgtccttactcatctgcctgtagtcttgctcgaaacctgggaaagatttttcaacactcgctctgccagtaggtagaactta

SEQ ID NO: 424775 - DNA, 201 bp, Homo sapiens
aactttcttgcttgttacattaagaaatcaatgtcaaattatatataaccttctatttttttctaaataggcttatttccccccactctaaagcaaatgtratttctttgttcaaaattcctcaattttcagaacacacactacaagatgagttctacaagtgtccttactcatctgcctgtagtcttgctcgaaacctgg

SEQ ID NO: 424776 - DNA, 201 bp, Homo sapiens
ttttatttaaaaatcaatgtttacgtgcaagtttatttgatttcctgtctattatgttaacattaattaggttattttgtttatgcattttattgtaagaktcaaaattttaagttccatggtgaacagccttctaaaactttcttgcttgttacattaagaaatcaatgtcaaattatatataaccttctatttttttct

SEQ ID NO: 424777 - DNA, 201 bp, Homo sapiens
aatcatgactttaatttttttttcttcttaagagaaaaaataaactcatcagcctatccctattaagaattatagaagttatcctcactcacattatatarcattataatccacttaaaaacaaacactattgctgccctccttattacttcttaatacaactccaatgaagtgctagcatgaatagttacttctgcatag

SEQ ID NO: 424778 - DNA, 201 bp, Homo sapiens
atttgttggaggaatgctactttcaaatcctatatggtagttatgattttcattttctaattctttctctagattaattttatccaaacttgtgaatgatrgagctaaaatactgaatctggaatcatcagcaccatgatgttttcctatgcttccccaggagcattctttattcgtattttgaggttttggtaacacaga

SEQ ID NO: 424779 - DNA, 201 bp, Homo sapiens
caatgcctgtaccccactgtatcgtggaagtaattaacttgctttagattttgcaggctcagaggcagaagggatttgccatgtctcagatgagattttgyacttggaattttgtgttaatgcttgattgagttaagactttgagggactgttgttaaggcatgtttggtttttaaatgtgtaaaggatgtggtattttgt

SEQ ID NO: 424780 - DNA, 201 bp, Homo sapiens
tgccatgtctcagatgagattttgtacttggaattttgtgttaatgcttgattgagttaagactttgagggactgttgttaaggcatgtttggtttttaartgtgtaaaggatgtggtattttgttggggctgtggcaaaatgttatggttggactctgtgtccccacccaaatctcatctgtaattgtaatccttatgca

SEQ ID NO: 424781 - DNA, 201 bp, Homo sapiens
gttttattttcttttaaagaatttaaaaatgtcattctattgtctctggcttccattgttttgagtgacaagttttctttcattcagattgttgttccacygtgtgaaatcttttcttacatttttgcccccttccctaattttctcttttaattttcagatgtttgagtataaaatgtctatatgtggctgtctttgcat

SEQ ID NO: 424782 - DNA, 201 bp, Homo sapiens
cctagattccatctggtgtcattttccttgtaccagaagtatttaatttggcatttctcatgtgcctgctagctgactaatttctttcagcatctgtttayggtaatgtctttattttgtttttggttttgaaacttatactcagtggatatagaagtatgttttattttcttttaaagaatttaaaaatgtcattctatt

SEQ ID NO: 424783 - DNA, 201 bp, Homo sapiens
tggttagatagaagaaatgagttcaaatgtttgatagcagactagagtgactatccttagcaataatattatgcatatttcaaagtaactagaagggaggycttgaaaaaataccaatacataaaactgataaacacccaaggtgatggatatacctatgccccgacttggtcattatatattctttgcaagtaacaaatg

SEQ ID NO: 424784 - DNA, 201 bp, Homo sapiens
actctttcctagattccatctggtgtcattttccttgtaccagaagtatttaatttggcatttctcatgtgcctgctagctgactaatttctttcagcatytgtttacggtaatgtctttattttgtttttggttttgaaacttatactcagtggatatagaagtatgttttattttcttttaaagaatttaaaaatgtca

SEQ ID NO: 424785 - DNA, 201 bp, Homo sapiens
aaagaaaacaaatattaggatatagaatatttaatcaacaaaatcatgatcaaaggcttccaacatagagtagaagttttttaaaaaaattcatttatgarctatacaaaacattgaaggaacaaatactttattgcgtataaacttatgcagagtggaaaatggtggaaactgaccaactattttgtgaggttattataa

SEQ ID NO: 424786 - DNA, 201 bp, Homo sapiens
aataacttctatctagagttaggaggcctacttaggtagctcggctttgctagaattattttgtaatttggtaagtgttttaaaattttaacctcttaatstcagtttactcatctacaaagtccacaaaaattataagattaatgtgtgtgtttgcataaacatgcacctcattagaactaatgaaatgattgatttacc

SEQ ID NO: 424787 - DNA, 201 bp, Homo sapiens
tagtactcagccctgaaatatactttttctgatattaataatcatacaagcatttttttctgattgaatgttgtctttttgtttattttactttcaatctmtctctgcctttgtttcttgtgtcccttgtagacaacaattgagtccttccttttttatctcatttgtcaattcctgccttttgtttggaatgtttattct

SEQ ID NO: 424788 - DNA, 201 bp, Homo sapiens
atgcattagtttttcaaaactttcagaaaccctagcaacagaagaggtagaactatataaattttaattgctaatatgaaatttgccttaaagaaggcatytatgtttatatcataaattcatttttagattaacaaaatatcagtgatttttttggaatatctgccagtgatcaaattcatttctcaatgcattaacaca

SEQ ID NO: 424789 - DNA, 201 bp, Homo sapiens
tcttttgaaattcattttttaatatattaaaaacttgctatacttgctattaagcattttatagcaggaagataaaatattgtcgggtgagctatgtgaaratacttcttgaagaaaatagttttgctttcctcccttaagtattaacaaatggatccctgatgttttcttcttatttcacttcagagaaaaacagtagct

SEQ ID NO: 424790 - DNA, 201 bp, Homo sapiens
aggcaattttcctaactctgcctctagaagagtttccctatcaattactgaatacccattgtgtctttttccctcaatcacccaggaggaatcatctatcrtcctgtcctgaagggagctcctcctatgtctggctggacctttgtatagtagttaattaagatttagatcccctgttaggaaacctgctgggttaagaga

SEQ ID NO: 424791 - DNA, 201 bp, Homo sapiens
gattttttagcaattatgatttgaagattatatgggggtaagtgaaaaaagtgaaaagttgcggtgttaaaaccgaagtttcttctcattttaattatcawaaatttaagagattactttctagtgttgtcagttccatcatctagcacgtctgtaagttcatgtcgaaaatgatcatatcacaaatatctttaaaattgc

SEQ ID NO: 424792 - DNA, 201 bp, Homo sapiens
ctgggaatacaggcgcgcggcactacgctcggctaatttctttgtatttttagtagagacggggtttcaccatgctgcccaggctggttttgaactcccamgctcaagcaatccacacgcctcggcctcccaaagtgctgggattacaggcgtgagccaccgcgcccagcctcccttccctttctaaggagcaagaaatag

SEQ ID NO: 424793 - DNA, 201 bp, Homo sapiens
cttaataatattttcgtatcagaaggagaaggattcacattgctgcaacctctgggggctctttggcacttcctcagcattgataatttctgctgctcccscatctgatgtagtaccagtgataatccacttttctgttccttttgtttccaatatcttttttcccttcccttttttgagacagagtctcgctctgtcccc

SEQ ID NO: 424794 - DNA, 201 bp, Homo sapiens
ataccatccttatctagaatcttttgaaattcattttttaatatattaaaaacttgctatacttgctattaagcattttatagcaggaagataaaatattrtcgggtgagctatgtgaagatacttcttgaagaaaatagttttgctttcctcccttaagtattaacaaatggatccctgatgttttcttcttatttcact

SEQ ID NO: 424795 - DNA, 201 bp, Homo sapiens
tcaattaattaaataattaattatttctcattgtatgcttgacttctctgtgttaatgatgtctggccctcatcttactctcaaatataataatattgaarcccaaattatctttccttcccagttttcctgctcctgttactaaggcagttagtgtcctactattccagacctgaaaacttttcatcatcctttaactca

SEQ ID NO: 424796 - DNA, 201 bp, Homo sapiens
gttgtcctgaaaatggaagtgatatacagaaacagccagattggttatagctcagcatttgccttatttgaacacggtttgaacagttggctgtctgtgamtggttaaagtatggctgctgggacagaagcatactcctcagttaggagtatgcctatctactaaattaggttagagttcatccataaggactcaagaata

SEQ ID NO: 424797 - DNA, 201 bp, Homo sapiens
aaggaaaagtagattcagatatttggggctgtgtgagtctgagcaaatcagattttgagttttgcagactttagacacatattcatgatggtgagtagggrcttaactcttcaactcagaaaacggaggctctgagaggcaaaataagatgccaaagtttgtactctccccattgcaagcatatagacaaaaggtaatcaa

SEQ ID NO: 424798 - DNA, 201 bp, Homo sapiens
taggagaaggtagattccaggtacacaaaaatagagacttgtaaactaaggttctgttataaatatatacatattttcttcataagcctttgtgtctaaasagtaactccagttttttttttaaatgttatatgaaaactgagttgaaaactactctaggaaaacatttttaaagttattgttggctggcaggaatatggg

SEQ ID NO: 424799 - DNA, 201 bp, Homo sapiens
gtatggagagagagaatgggcgatgtttctcagcactgcttcaagcaggattaggggcggcgtgggaacctagagtgggagagattaagctgaagggagawcttgtggtaaggggtgatattgtggggatgttagaagaaacatttgtcatatattatgattggtgatggcctggatacggttttggatgaattgagaaac

SEQ ID NO: 424800 - DNA, 201 bp, Homo sapiens
tcttttttaggagattgttgactagtgatttaagctcttaacttgttaatagtctattcagattttctacttcttcaggattaaatcttggtaggttgtaygtgtctagggatttatccatattttctatcatatctaattttttgtatctaattattaatagtagtctcatgatcctttgcatttctgtgatatcagttg

SEQ ID NO: 424801 - DNA, 201 bp, Homo sapiens
agaagcagccaggtgttttgtgcttcctgataaagaattcaaaactaccatgaagaagtcttgccaaaaattctaacttgaatatatttgattaagcctcyagatttaattaccaaggcccaggaaatatggaggacagaggtacacattaaactaaatcaggtggaaatctgtacagaaaaaataatatggtttctttaa

SEQ ID NO: 424802 - DNA, 201 bp, Homo sapiens
tttagacttaaactggacttttaccaaatagacctaacagaaatttacagaacattttatctaacagctgcaaaatacacattcttctcatccacacatgsgacattctccaggattgaccatctttttagccacaaagaagtctcaacatagttttaaaaaatcaaaattatatcaagtaatttctcagactacaatgga

SEQ ID NO: 424803 - DNA, 201 bp, Homo sapiens
caccttgctctcttccaatgccatataagacatgccttgttttcccttctccttccaccatgattgtaagtttcccgaggcctccccagccatgcagaacrctgagtcaattaaacgtcttttgtttataaattacccagtcttaggtagttctttataggatgtgaaaatggactaatacagcaggcttgagacaccaga

SEQ ID NO: 424804 - DNA, 201 bp, Homo sapiens
accatccacacaaacaacactgcaagcagggttgtttgtgatcattcacacacatacacattcagccctccagaatttgaccaccaaggaagtactttacyggctcctgtggcttctctttccttggtcggtgcacagagtcatcgctgcagtatgtgaggatcctttaccctaggttgctggccagtttcttttcatgtt

SEQ ID NO: 424805 - DNA, 201 bp, Homo sapiens
tcttttgtggtagaatgtgatcagttaagctggggcagggcattttcacttcttttgtgattcttcagttatttcaggccatctgggtgaattcgtgcaartcacaggggatgcgatggtttggcttgggctcagaggcctgagagaattgactctcctttagctaagagagccagacagactctatcttggctccttcac

SEQ ID NO: 424806 - DNA, 201 bp, Homo sapiens
gcacatttaaaattttttaaaaaacataactaagttatgttttataccatgttaaaattgtgaaattcccacaaatctaaaatgtaatcccttatataaarggcttttaaaattgttgttgcagggcacaagttcagttagttttagcttatttcttctgttctaactttgtatttgatcacctttaagtggggtgggaat

SEQ ID NO: 424807 - DNA, 201 bp, Homo sapiens
tacagttttcaatctggtgtacagggaacagtggtaatgaatccaagttcttaggaacagtcctagtagcaaaatggctttaaaaatgtttccatataggraagaaaaccaatcaagcattggtaatgtggaaaaagcctttgttccttgggaggaaaattgccaacagtgttctttatcaaatatactttgggtgaatat

SEQ ID NO: 424808 - DNA, 201 bp, Homo sapiens
ccttgggaggaaaattgccaacagtgttctttatcaaatatactttgggtgaatattattttaaagattccaataacaaaatacaatttcatttgcaacaygtatggaagaacacagctaaattctggtttcatcgaattaatgaaaacaagtctaagaataaagaccatgagattgcacagatttgcaaaaggaaattct

SEQ ID NO: 424809 - DNA, 201 bp, Homo sapiens
attctggtttcatcgaattaatgaaaacaagtctaagaataaagaccatgagattgcacagatttgcaaaaggaaattctgtttcggattcacatgggaargtttctgttctcagctggagttcctttgggaagaatttaattattaaagtgaaagagaactagtctttgcttagataaataactaaattctatcagagat

SEQ ID NO: 424810 - DNA, 201 bp, Homo sapiens
gtctgcttaacagctaccagttggaagcttctgagggattaatagaatatgttccacagtgaacatagagaagacagtttgcatgccaaggaatgacagggtaaaagacccaggtgctgaaatatttaatatggcaggaatattggtttttatgaaaggggaaaagagatacgggtgttgttaaaatagattagggccaga

SEQ ID NO: 424811 - DNA, 201 bp, Homo sapiens
gtggctcacgcctgtaatcccagcactttgggaggctgaggtgggtggatcacctgaggtcgggagttcaagactagcctgacgaacgtggtgaaaccctstctttactaaaaatacaaaaattagccgggcgtggtggctcacgcctataatcccagctacatgggaggctgaggcaggagaattgcttgaacccaggag

SEQ ID NO: 424812 - DNA, 201 bp, Homo sapiens
tgtgtctgcttaacagctaccagttggaagcttctgagggattaatagaatatgttccacagtgaacatagagaagacagtttgcatgccaaggaatgacagggtaaaagacccaggtgctgaaatatttaatatggcaggaatattggtttttatgaaaggggaaaagagatacgggtgttgttaaaatagattagggcc

SEQ ID NO: 424813 - DNA, 201 bp, Homo sapiens
tgagacaggatcttgctctgtcacccaggctggagtgcagtggcacaatcatagcttactgcagtcttgaactcttgagcgcaagagatcctccctcctcrgcctcaagagtagctaagcctacaggcatgcaccaccatgctgagctaatttattttttatttatttatattttttgtagagatgtggtcttgctatgtt

SEQ ID NO: 424814 - DNA, 201 bp, Homo sapiens
agttaattctggagtgagagattattaagcacattgtagctatacatggaaactatatgcatcactctagaaagctgaatcttgatcttcatttgtttccrtcatgcgtacatcttctggtcagttgtaaatgtaggggagaaactaaagatggaatttattaaaaccctaaagccacaacatttataaatataaatataa

SEQ ID NO: 424815 - DNA, 201 bp, Homo sapiens
gtaatgtctttattttgtttttggttttgaaacttatactcagtggatatagaagtatgttttattttcttttaaagaatttaaaaatgtcattctattgwctctggcttccattgttttgagtgacaagttttctttcattcagattgttgttccactgtgtgaaatcttttcttacatttttgcccccttccctaattt

SEQ ID NO: 424816 - DNA, 201 bp, Homo sapiens
tagtggtattactaaaaaagcacaaatcctttttgaatcatctgatgttcaaataataccacagaggttatgagggacgggcgcttttcccccactaatayatgcataaaagtgagagaatttccatgctgctttctaaagggaaaagcctggatgggacaccttcatatttttacactttctcactctctcatgccaagg

SEQ ID NO: 424817 - DNA, 201 bp, Homo sapiens
ttgggaggctgaggtgggtggatcacctgaggtcgggagttcaagactagcctgacgaacgtggtgaaaccctctctttactaaaaatacaaaaattagcygggcgtggtggctcacgcctataatcccagctacatgggaggctgaggcaggagaattgcttgaacccaggaggtggaggttgcagtgagctaagatctc

SEQ ID NO: 424818 - DNA, 201 bp, Homo sapiens
atttcctttaatcttacattagtggtattactaaaaaagcacaaatcctttttgaatcatctgatgttcaaataataccacagaggttatgagggacgggygcttttcccccactaatatatgcataaaagtgagagaatttccatgctgctttctaaagggaaaagcctggatgggacaccttcatatttttacactttc

SEQ ID NO: 424819 - DNA, 201 bp, Homo sapiens
atagatataggcatttatgaatcaggtaaaagtgtgtgttttaagatgaattaatggaggcttctggaattttataaccagctcaatttattaactaataktaactttacatttatactatatatatttagcttttccatctgctaaagattgaatccttttgtttatcaataaatcatacaaaaacatttgttttgcatt

SEQ ID NO: 424820 - DNA, 201 bp, Homo sapiens
tattgctgaattctaccaaacttataaagaagaactaacacaaattattttcaaactagtcacaaaatttgaagagggaggattattttcctaattcattmtacaaaaccagcattaccctgatactaaaaccagacaaagccaccacaaaaaataacactacagattaatgtcctgataatgaacatcaacacaaacatc

SEQ ID NO: 424821 - DNA, 201 bp, Homo sapiens
ttgaatataaagaaattaaattacccacttaaaagatacagattggttgaatggattttaaaaaatgacccaattatatgctgtctacaagaaatgtcacytataaagacacatatagactgaaagtgaagggatgtaaagatattctgcataaacagaaaccaaaagtaagcagaagtagctatacttatatcagataaa

SEQ ID NO: 424822 - DNA, 201 bp, Homo sapiens
aagcaaatttatttagtagtgaacagtcgctcctgcccatgatagatattactaattgatcttggctctatttcttacttagccaggaagctgtttatacratactttgctttaaagtgctattcaatttaatttatgaaacatggtttatggattaaccagggcctaggaggaccatgagtaggatgaaaaggaaaatac

SEQ ID NO: 424823 - DNA, 201 bp, Homo sapiens
gcacatgatgaatttcaaatatatttctagtcattgtctactgttatcacatgcttagagttttactagagatgcatttgtagtttgtgtgatataacagrtagtaaacaacaaggctcaaatagacaaaaaaaagctcccagtatataaatgactatgactaaaatttccaattcttccaaaaactgtaagttgacagtt

SEQ ID NO: 424824 - DNA, 201 bp, Homo sapiens
aaatgagttcttttttagcaaattaagataacttaggctttggaagcattcccagacgtgagaaataaggcaaataacatctgtttttcaaagtatccacyaccttctttgtgaatatggattcagagtaaataagccatagctctcctcatttcttgttgagaggtaagaattgtctctcttagaatctttactgattcc

SEQ ID NO: 424825 - DNA, 201 bp, Homo sapiens
aattaaaactttaaaaaatacaaagattaataaaataataagttgtctctttgaaaaaacaaataaaattgataaactactaactagattaaccaagaaaagggaagacccaaataaacaaaaccagaaatgtaaaaggagacattataattgataccacagaaatacaaaagatcatcagaagctatatgagtaactata

SEQ ID NO: 424826 - DNA, 201 bp, Homo sapiens
ggttcttctttaagaaaacctttcgtatcatatttgaagataaaaatttcagctctttacagttgttttagtaaattcttgagggcaaatgctttctgctmatctgctttatcctccaagacttcaaatgcagaaaatcatgctggcatgtgtggtaaaaagccatcaaatcattaaatatgaattcccttttcccggaat

SEQ ID NO: 424827 - DNA, 201 bp, Homo sapiens
ttttttgttaaaatgtgatggtgggtattactgataattttttaaaatgcatgaagttgcatgaaagttagtgcagtgtgagtttgtcacatttatatggkaactcatattatatcaatatagtgattagaaattggattacattatattagagtgctatgcttttcaatctttaactgaaaattcaatttaactattttt

SEQ ID NO: 424828 - DNA, 201 bp, Homo sapiens
tgacatttataacaggtagttttttcttttcccaaagaaaataacttttttttccttgttcccagtaggttatacaattgtgttgcttaatggctaactcrtcatgggcatttgctctaaaatgatggtagggaaggaagctccaggagtgagtgtactctgcttcttacagtttcctgatagagcattcctgatagagtg

SEQ ID NO: 424829 - DNA, 201 bp, Homo sapiens
agagtgatcacatacagtgtgaaatgtctctgaagccttctgttgtcttaaatagacatgtagtcatatcatttcacatgttactttatataaatccatgmtcattttaaaagaaagagaatatccaaattactatgccatgtttagcgctgactgtagcacccctagggtttcacagccaaaatcatatttgagaaacaa

SEQ ID NO: 424830 - DNA, 201 bp, Homo sapiens
tgtctctgaagccttctgttgtcttaaatagacatgtagtcatatcatttcacatgttactttatataaatccatgatcattttaaaagaaagagaatatycaaattactatgccatgtttagcgctgactgtagcacccctagggtttcacagccaaaatcatatttgagaaacaaatgaaagaacatggtatttgcaat

SEQ ID NO: 424831 - DNA, 201 bp, Homo sapiens
cttgaatgagataatatatgttagtatgtgtgtcatgtgtgtttattcattaaagaaagagtaaactagtataaataggtactatgtagaaatagtacaarcaggtaccatactaggtgctgctctagatgtcagtaagacagcagttaataagacaaagtccattccctctggaagcatacacactaataggaaagaact

SEQ ID NO: 424832 - DNA, 201 bp, Homo sapiens
ggatcaatctcagcttactgcaacctctgcctcccaggttcacgcatttctcctgcctcagcctcccgagtatctgagattacaggtgcttgccaccatgyccggctaatttttgtatttttagtagagatggggtttctccactttggccaggctggtctggaactcctgacctcaggtgatccacccacctcggtctcc

SEQ ID NO: 424833 - DNA, 201 bp, Homo sapiens
ggctgggaagataggcagagcagttcatggagggctttgcaggctggattatgggttgggattttcttttaagagcaaagaaatttcaagagttttatatrcaaatcacactacagtcacactcagtttacacctctgtaatggggataataatatgaatcacagggttgtaactggaattatatatgattaaatttaaaa

SEQ ID NO: 424834 - DNA, 201 bp, Homo sapiens
accattaaccacgtatttcatatatatttcatatatatgaaaatatatctataataacattatctcactgggatgataggcacattatctttcattaggasttttcatttttataggtaagtaactgtatgtttatagaatatataggcaggcatagcaagataaatatctgaaatgttaatttgtatattgttctactga

SEQ ID NO: 424835 - DNA, 201 bp, Homo sapiens
tcgatgaaaaataaaagacctagaggcatttttgaaaagctaatcaaatgatcaaaagctcattaactctatgagggcaaactagcaaaaatgactccacyttgtatattaaaactagaaggggaaataatacaattctaaaaatgtgagaattgatgacacttgctggcagtttttgagatttgagagtggatagtttta

SEQ ID NO: 424836 - DNA, 201 bp, Homo sapiens
taaaatactttatattttgtatttgtatattgtataatataaaatattaaaatatataaaatacattaaaatatatgcatgtattatatatatatatatawcccataagtatatatatactacaaaggtgaagttaaagatatagagtagggcaataggagagaaagagtcagagtcattgggaatcaatcttgtaggttc

SEQ ID NO: 424837 - DNA, 201 bp, Homo sapiens
tccacctctaaataccatcacattgggagtctggacttcgacacatgaatttttggaggacttgaacattcagcccatgacgttcccatctcaagacttttaacttagtgacatttaaaaatagcctttatctatataaagcaacattcataggttccaggttaggttctaatatctttggaggccattatttagcctact

SEQ ID NO: 424838 - DNA, 201 bp, Homo sapiens
ctccacctctaaataccatcacattgggagtctggacttcgacacatgaatttttggaggacttgaacattcagcccatgacgttcccatctcaagacttttaacttagtgacatttaaaaatagcctttatctatataaagcaacattcataggttccaggttaggttctaatatctttggaggccattatttagcctac

SEQ ID NO: 424839 - DNA, 201 bp, Homo sapiens
gcctttccttagtgagagctcaagatggcatagagagacagatctgtcttcctctacttacaagggcactgattccaatgtgaaggtcccaccttgtgagytaatctaatcctaattacctatgaaaagctccacctctaaataccatcacattgggagtctggacttcgacacatgaatttttggaggacttgaacattc

SEQ ID NO: 424840 - DNA, 201 bp, Homo sapiens
taggtctcccaagactgtagctcccagaagtttttccactctacattcagtgtctagcaatttgtaaaaattaccatgaaagtattttaccaatgtatgaycccagcttctgttccatgtacatagatcttgtctgtgtctctttagatttacctgtccttccatattttagtgtgaaagttttccctgcaacctcaactt

SEQ ID NO: 424841 - DNA, 201 bp, Homo sapiens
acagatgaagttcacagccccaacagtaacttaaatttaacatgtctaaaactggaaacatatcttcctttgaactatttcttgaagtaaaaataagtaamaaaaattaatgcacttaatgacatcactatcaacgtaattatttaagtcagaatttaattaagctcttcccagactgaaccaggtcctgtttcgtgttct

SEQ ID NO: 424842 - DNA, 201 bp, Homo sapiens
ggaatttgctatttttaagaacgtttactaggaatttatgagaaaaagacctaaatcaatatatttctaatagctggatcatagatataacttatcaattyttatattgatgcagtaataacaaatgttttttataccacctttaggcactgcaggcattactaaaatatattttttgattattgtagtctttatcaaaat

SEQ ID NO: 424843 - DNA, 201 bp, Homo sapiens
attgataaatactcaaggtgatgtatcccctaaatgcatgacttgatcattacaattctgtgcatatgacaaaatatcacatgtaccccacaaatatgtayaaatattatgtatctattttaaaagatagatgctaggggataaaagacagagagaagacatagattaccttcaaagactgatagttgattctgaatagca

SEQ ID NO: 424844 - DNA, 201 bp, Homo sapiens
ttttctgggctctaattttttaagaacacaatcaactgaatctaattggcataattatcctttcacagatagctttaaattgtttatttggatcatagctraaatgaacaagggaaggaggaaacagcaattaatttcatgagtccagattttcgactttatgaagcttcaatgaggctgtttaaagattacacttctaaa

SEQ ID NO: 424845 - DNA, 201 bp, Homo sapiens
aaagaaatctaaaagaatattctatgtactttctatgatgattgtaaaagtattttggtcatagaagtaaaatgtactatgaaacttactgatagagacaktttgaaaatgtccatgagtgtgactttaaggtgctgaaaggaagataaatcacaaaaatttctagattccaatgtttcttatttctagatagttcacttt

SEQ ID NO: 424846 - DNA, 201 bp, Homo sapiens
ctctctgtcacccaagcagcagtacagtggcatgatcatagctcactgcagccttgagctcctgggctcaagtgatcttcctgtcttggccttccaaagtktttgggttagaggtgtgagacactgtgcccaactggcacacaatttttttttttttttttttttttttgagatggagtctcactctgtctccaggctgga

SEQ ID NO: 424847 - DNA, 201 bp, Homo sapiens
tcgttatcagtcttgttacagataaataactaaagctagaaacttgtcattgcatcatattgtgccttaaatatctagcctagctgttaaactacttaaaytctgatgagaattcagtttatagcatattatggggcttgcatagtactcatctaccatgaagctggaactttcttaagcttattgtttactagagtgctt

SEQ ID NO: 424848 - DNA, 201 bp, Homo sapiens
aatattttttcttttttgatttataatcctttggttataaatctgttttttttttttttttaaaaaaaagagttgttaaaacaatcttgctaaaaattgtktatctctatttcagagctgtggaatcagcagtgtttttggttggcaacaaacgagatctttgtcatgtgcgagaggttggctgggaagaagggcaaaagc

SEQ ID NO: 424849 - DNA, 201 bp, Homo sapiens
ctcccgggctcaagcaattctcctgcctcagcctcctgagtagctgggactacaggtacgtgccaccacactgggctaatttttgtatttttagtagagayggggtttcaccatgttggccaggatggtctcgatctcttgaccttgtgatgtatctgccttggccttccaaagtgctgggattacaggcataagccaccg

SEQ ID NO: 424850 - DNA, 201 bp, Homo sapiens
ttcttgtgttgactacttaataatttttcagggtgtcttgttttattaataaacacatttgcaattttacaattttcaccaaaaattatttagctgcattycacgtctattgcaatgcaatgcttctattgtcttcacttttgaagattttgggtaaacattatcttttttttttgagacaggatcttgctctttcacctg

SEQ ID NO: 424851 - DNA, 201 bp, Homo sapiens
tctaggaattttcagtctttttaccatcatattctagaagctacagtatttcttagtttataaacaaataaaaatattatttagttccagccaataaatgyttgcattttgcattatgaagtaatgtataaaataattaaaagtcatacacttcgactttgaaacagaactacacatgtagtttaagagcaattgtgacat

SEQ ID NO: 424852 - DNA, 201 bp, Homo sapiens
acaaagctatatcaattcatataggttggtactggcacagggaaaggttaactggaacaatttaattcacgaaaattacagaaacagactcatggacaaayggaacttcaatcccatgaattaggaagcattgcaaatcagtgaacaaagaatgtattattcaatggtgcaggaaataatgctctcacatgtggaaaaacc

SEQ ID NO: 424853 - DNA, 201 bp, Homo sapiens
ttctataaattcaaaactattctaaaacgaagtctaccaagtaagattacaatactagcttgtataaaaagcatagaatacgatggagaaagctggaacayggtactgaatgaggcaaataaaatatatccagaattcgaggaggaatttgcttcttgatatcaagatctactacaaagctatatcaattcatataggttg

SEQ ID NO: 424854 - DNA, 201 bp, Homo sapiens
ggtgtaattctagccagatatgcatgacatatatgagaaaaacaacaaaaatctaacaaaataaatttataaagaactaaacaagtggaactgtattccayattttgggtagatagacaatattgttaaagtacctgttatttctgactttattttatagagtcattatactttcaataaaatacaaaaaaagttattgtg

SEQ ID NO: 424855 - DNA, 201 bp, Homo sapiens
ctcattgtataaggccaggtttacctaattaccaaaactagataaaaacattgttgtaaccacccaatgggttcaccttgcccactgcctagacagagccwattatcgagacagggaattgcaatagagaaagaataattcacatagagccagctgtgcaggagaccagagttttattaccacacaaatcagtctccccga

SEQ ID NO: 424856 - DNA, 201 bp, Homo sapiens
cacacattgtcatttgaatgaaaccaacttttagtggaatcagggccaataagagttgaagactgactgtgtgcacccatttttttccttatagtagatayatttgcagtgttctatgccatttaaagcctagtgattttaatatattcttcaactcaaactctatttttatattgtttctttataaccaaggaagacata

SEQ ID NO: 424857 - DNA, 201 bp, Homo sapiens
acttcctataatattactgatattttagaactccattgtttcaatcattaaatatcttatatttaagcatcatggtgtaggtaagggacaggactaaaaawttctgacatttcttcaaatcagagtaatcactcaagaacacttaaaaacatactgaaagtataaacatttgtattggacatttttcaggaaatatttcta

SEQ ID NO: 424858 - DNA, 201 bp, Homo sapiens
tactgtattagtctgttttcacactgctaataaagaggtacccaagactgggcaatttacaaaagaaggaggtttaatggacttacagttccacatggctrgggaagtcccacaatcatggcagaagaaaaggaggagcaagtcacattttacatggatggcagcaagcaaagagagagaacttgtgtagagaaacttcca

SEQ ID NO: 424859 - DNA, 201 bp, Homo sapiens
atacatttacctgagtagaagtacgttgaaagccaagaaagagaaaaagaataatcgataataccacaaagttttctcagtattattaagaatatgatttrttttactttttaactttctatagtgacttttaacatctatcaagtctactaagagattttacattttgaatagtctcaaacatttttagaatacaagaac

SEQ ID NO: 424860 - DNA, 201 bp, Homo sapiens
tgaagatttttcccccttaatatgaaactgtaagaaatacagtttgaaagggctggaaagggcaaaagtggatgaacattctgtcactgcatggcagaagrgcaaaagagagcaaacccacttcctcacatttttaaataagatccttaattccgtctatgattacactttcctcatgatttaactacctcctaaaggcct

SEQ ID NO: 424861 - DNA, 201 bp, Homo sapiens
acatctttctatgaagcataatcatattcatttaaaaaccaatttatttggtttccagaaatattttcggtattagtcatagtaccttttgctagaaaaawtttttaatttaaataccttcataggctggaggaaaaataactttgtaagatacatgtattggaaactttttttgtcacaattattaacagatcttgaaaa

SEQ ID NO: 424862 - DNA, 201 bp, Homo sapiens
taatgaaatttacgggatagaaagctacttgatggcaatgtggaaaatggattggaaaagagctgggctgtagtagttcaggagctgagacatatggaaakgtactagtgagaatcaagagaagatcacgtttttttcttttcacgtatcaaaacaaatgaaattacatattttatgagctatcaggaatttatggtgaag

SEQ ID NO: 424863 - DNA, 201 bp, Homo sapiens
tatttttctttggcacattaagaacatcatacttttgtcttccagtattttttattgctgataagtatattgaaagtctaattgtctctaatttcttttcrgcgatctgactttcttctctatctacatttataattgattatctttaatttctgatgaatgtaagttttctgtcaagactcaagtatttcactgagcttt

SEQ ID NO: 424864 - DNA, 201 bp, Homo sapiens
gtaactgtatacacacatgaccataagtaacatacacacaatattttttcttttttgatttataatcctttggttataaatctgttttttttttttttttwaaaaaaagagttgttaaaacaatcttgctaaaaattgtgtatctctatttcagagctgtggaatcagcagtgtttttggttggcaacaaacgagatcttt

SEQ ID NO: 424865 - DNA, 201 bp, Homo sapiens
ttgtttgagatggagtctcgctctgtcacccaggctggagtgcagtggcgcgatctcggctcactgcaggctccgccccgggttcacaccattctcctgcstcagcctcccgagtagctgggactacagcgcccgccacctcgccggctaattttttgtattttttttagtagagacggggtttcaccgtgttagctagga

SEQ ID NO: 424866 - DNA, 201 bp, Homo sapiens
ggagtctcgctctgtcacccaggctggagtgcagtggcgcgatctcggctcactgcaggctccgccccgggttcacaccattctcctgcctcagcctccckagtagctgggactacagcgcccgccacctcgccggctaattttttgtattttttttagtagagacggggtttcaccgtgttagctaggatggtctcgatc

SEQ ID NO: 424867 - DNA, 201 bp, Homo sapiens
gatctcctgacctcgtgatctgcccgcctcggcctcccaaagtgctgggattacaggcgtgagccaccgcgcccgcccggaagaattctatccaaatactrcccatgttaataggtaaaacatattttagttgcaaattggtttaaggagaagagagggagagaatttacaaatttctaggtttatagaaatttaaaattc

SEQ ID NO: 424868 - DNA, 201 bp, Homo sapiens
tgatctctttcactgttataatttcctcagttatattttttgcaaaggtagtttcattatgagaaaagaatactgaagaccaatattcctcaaaaacatarggacagaaatctataacgaaatatcagtatatcaaatccaggattacacaaaagacctttggatttggatttgagtttggatttgaatgtaaggtgaatt

SEQ ID NO: 424869 - DNA, 201 bp, Homo sapiens
gaggttcagactcttgcagccagaggctgcatgattcctaaaccataatttctaatcttgtagctaatttgttagttttaagaaggcagactggtcccaakgcaagaagggggtcttttcgggaaagcgctattatcaattttatttcagagtcaaactataaactaaattccttccctaggttaatttggcctatggcta

SEQ ID NO: 424870 - DNA, 201 bp, Homo sapiens
cctttctagaaaactgacagtgactaacaccttatttaactgatttataacttacccagtaaaataagtttccctatcactggagatttttccagggacgytccataaaggaaacgtattttctaataatttcttagctactgtcatagcatcagctttcctacccaggaagacctctactcaatcagaaaacatgcaaat

SEQ ID NO: 424871 - DNA, 201 bp, Homo sapiens
accttctttatctggtgaaagtacactttggcataatgcattaaagccttacggtatttaggcatagcagagtttaggggagcaggacatgcatgaagttmtattattaggggtatacatcttccagtgtctatttcctaaggggtaattcatgttttccagtgagagtggatatgattgccattaaagccaaaggtatta

SEQ ID NO: 424872 - DNA, 201 bp, Homo sapiens
tcccatggattttcctgcaggaaaaggaaagaattagagcaacagaaagtaagaaataggaaaaaaaaaaaaaaagcacataaagttttcatgtttgcagygaagttttgatctgtgatcttgagaaagaagctcatgacttggattctgtctgcttgtatggagagatttccctggtcagctttaccttaaaatctccag

SEQ ID NO: 424873 - DNA, 201 bp, Homo sapiens
gagctaaagccatccattgcgtatggtcccatggattttcctgcaggaaaaggaaagaattagagcaacagaaagtaagaaataggaaaaaaaaaaaaaaagcacataaagttttcatgtttgcagcgaagttttgatctgtgatcttgagaaagaagctcatgacttggattctgtctgcttgtatggagagatttccct

SEQ ID NO: 424874 - DNA, 201 bp, Homo sapiens
tgagctaaagccatccattgcgtatggtcccatggattttcctgcaggaaaaggaaagaattagagcaacagaaagtaagaaataggaaaaaaaaaaaaaaagcacataaagttttcatgtttgcagcgaagttttgatctgtgatcttgagaaagaagctcatgacttggattctgtctgcttgtatggagagatttccc

SEQ ID NO: 424875 - DNA, 201 bp, Homo sapiens
tatatataaatgtgtagatatatatctccacatttagtgtgcgtgtgtgtgtgtgtgtgtgtgtatatatatattatatatatatatatatatatatatatctccacatttagtaaaaagagacccaactggatttaatccaagcaaataattgtaaccgcatagatgattcccaaatcttgagtgtgtaatgccaggaag

SEQ ID NO: 424876 - DNA, 201 bp, Homo sapiens
atatatataaatgtgtagatatatatctccacatttagtgtgcgtgtgtgtgtgtgtgtgtgtgtatatatatattatatatatatatatatatatatatatctccacatttagtaaaaagagacccaactggatttaatccaagcaaataattgtaaccgcatagatgattcccaaatcttgagtgtgtaatgccaggaa

SEQ ID NO: 424877 - DNA, 201 bp, Homo sapiens
ggctctaattctgagaagggcaagaggtaaaagtactgtccagtcctttttaagttggaggctgagcttggtgaggtgtgtctttagaagaccattagtcygttctacctttcctgaagattggggatggtaagggatatgaaggttccactgaataccaagagcctgagaaactgcttgggtgatttgactagtaaagac

SEQ ID NO: 424878 - DNA, 201 bp, Homo sapiens
catcctttttgaatttatctcttcacaggatttgataccgttcaccatacttaaaatttcttgctttctcactttggctttccgtgacactggaatttctrtctttctgtgtttgctctttctcaaacactggctttttttttttttttttttgcctattatgcattttccatcttatccttgtcagggctttttttcttc

SEQ ID NO: 424879 - DNA, 201 bp, Homo sapiens
tctattcaaagtcaatattctctttttctattgaatatccacttatcatttgactacagagggaaatctataagcatgttggcatgctaaagtctctttcrtattagctaaacagtctcttcttgaccagcaattaccccatccatagacacagttttaactcttttctacccaccacaactaatcaccttaatatggtta

SEQ ID NO: 424880 - DNA, 201 bp, Homo sapiens
aatgataattaataaaatgtgtaatttaaaaaaatttagatgggaacattgaaaaatggaagacattatttctgcttgtgaggatacagtagattttttttccctcccaaatcactcttgggtaatttttaatacagattttttaaatgaagtaacagaatgctgtaaaaatattcaaaggaaatctaacaattttatgat

SEQ ID NO: 424881 - DNA, 201 bp, Homo sapiens
cattttctaattctttctctagattaattttatccaaacttgtgaatgatagagctaaaatactgaatctggaatcatcagcaccatgatgttttcctatgcttccccaggagcattctttattcgtattttgaggttttggtaacacagaaggactaaaaccaattgctggtgctttgctaacttgatgccaggagagtt

SEQ ID NO: 424882 - DNA, 201 bp, Homo sapiens
tatatatatgtgtgtgtatatatatatatataaatgtgtagatatatatctccacatttagtgtgcgtgtgtgtgtgtgtgtgtgtgtatatatatattayatatatatatatatatatatatatctccacatttagtaaaaagagacccaactggatttaatccaagcaaataattgtaaccgcatagatgattcccaaa

SEQ ID NO: 424883 - DNA, 201 bp, Homo sapiens
ctgaaatatactttttctgatattaataatcatacaagcatttttttctgattgaatgttgtctttttgtttattttactttcaatctatctctgcctttrtttcttgtgtcccttgtagacaacaattgagtccttccttttttatctcatttgtcaattcctgccttttgtttggaatgtttattctatttacatttag

SEQ ID NO: 424884 - DNA, 201 bp, Homo sapiens
tacatgtatgtctccacatttatgtgtgtgtatatatagaggaatctatatatgtaatatatatacacacacacataaatgtggagaccatatatatatatgtgtgtgtatatatatatatataaatgtgtagatatatatctccacatttagtgtgcgtgtgtgtgtgtgtgtgtgtgtatatatatattatatatatat

SEQ ID NO: 424885 - DNA, 201 bp, Homo sapiens
tcaataaaaatatgtatattaaacttggtcttagaaaagagctgatacggaaatgctgtagtagtgctccagatcttcccagaattgaaattaacatcagstgcatgatatctttctctgattctgaaaaacatatgttaagaaaaatacttaggacaagacctgcaagacacagtttaaaacatattgcccacaatgtaa

SEQ ID NO: 424886 - DNA, 201 bp, Homo sapiens
atacatgtatgtctccacatttatgtgtgtgtatatatagaggaatctatatatgtaatatatatacacacacacataaatgtggagaccatatatatatatgtgtgtgtatatatatatatataaatgtgtagatatatatctccacatttagtgtgcgtgtgtgtgtgtgtgtgtgtgtatatatatattatatatata

SEQ ID NO: 424887 - DNA, 201 bp, Homo sapiens
ctgaaatatttaatatggcaggaatattggtttttatgaaaggggaaaagagatacgggtgttgttaaaatagattagggccagattttgaagtatgtgtsatttttattctgagcagtgatcatttgtcaggggcttttaagtaggagcatgaccctattttacctatgtttttcaaagatgaatttggtgcagcattaa

SEQ ID NO: 424888 - DNA, 201 bp, Homo sapiens
ttgtgtttttcatatattcctaattgtttgctgaaattcatatacttgaattctataataaatccatatatatatatatatatatatatatattttttttwtttttttttgagatggagttttgctcttgttgcccaggctggagtgcaatggtgcgatctcggctcactgcaacctccacctccctggttcaagcaattc

SEQ ID NO: 424889 - DNA, 201 bp, Homo sapiens
gggccagtaggaaattcgcttttctatggcaccctgtaagtgttagggtgtaagggcatatgtatatgcacactaaatgtggatatatatatatatatatacacacacacacacatacatttatatattcctctatatatacatatatattcctctatacatgtatgtctccacatttatgtgtgtgtatatatagaggaa

SEQ ID NO: 424890 - DNA, 201 bp, Homo sapiens
gcttgattatttgtgtttttcatatattcctaattgtttgctgaaattcatatacttgaattctataataaatccatatatatatatatatatatatatatattttttttttttttttttgagatggagttttgctcttgttgcccaggctggagtgcaatggtgcgatctcggctcactgcaacctccacctccctggtt

SEQ ID NO: 424891 - DNA, 201 bp, Homo sapiens
agggccagtaggaaattcgcttttctatggcaccctgtaagtgttagggtgtaagggcatatgtatatgcacactaaatgtggatatatatatatatatatacacacacacacacatacatttatatattcctctatatatacatatatattcctctatacatgtatgtctccacatttatgtgtgtgtatatatagagga

SEQ ID NO: 424892 - DNA, 201 bp, Homo sapiens
tgcttgattatttgtgtttttcatatattcctaattgtttgctgaaattcatatacttgaattctataataaatccatatatatatatatatatatatatwtattttttttttttttttttgagatggagttttgctcttgttgcccaggctggagtgcaatggtgcgatctcggctcactgcaacctccacctccctggt

SEQ ID NO: 424893 - DNA, 201 bp, Homo sapiens
gggctgcttgattatttgtgtttttcatatattcctaattgtttgctgaaattcatatacttgaattctataataaatccatatatatatatatatatatwtatatattttttttttttttttttgagatggagttttgctcttgttgcccaggctggagtgcaatggtgcgatctcggctcactgcaacctccacctccc

SEQ ID NO: 424894 - DNA, 201 bp, Homo sapiens
tctttgtctatttccatgctactgataattttggttattgaccactttggcctctgatcataagacttgctgttatgagaattttcagggaaagctattcraaagcaggccaagtcaaatagtaagatccaaaccaaagaggaagtaaaaaatgaaatatgcagattttctgcagatccaatataggccctcggagactgg

SEQ ID NO: 424895 - DNA, 201 bp, Homo sapiens
ctgggctgcttgattatttgtgtttttcatatattcctaattgtttgctgaaattcatatacttgaattctataataaatccatatatatatatatatatwtatatatattttttttttttttttttgagatggagttttgctcttgttgcccaggctggagtgcaatggtgcgatctcggctcactgcaacctccacctc

SEQ ID NO: 424896 - DNA, 201 bp, Homo sapiens
gaggtatccattttcattgttaccttggtaacacaagtcataataacctggagacctaactagaaaaaataaaaagattagaaacctttggaaatcccaarcttgccatccattatttaggatgtttgcaaaccaaattctaattgctcctgtaaacacatcatttgttcttttgtcttgggaggtttctttaatgtgttt

SEQ ID NO: 424897 - DNA, 201 bp, Homo sapiens
aggcaaaataagatgccaaagtttgtactctccccattgcaagcatatagacaaaaggtaatcaaaactcaggttattctgaccctaagaaccccccataygctttatattctcacagtgaactgaaccattgaacaattagttcaattttgatagaaataggaagaaagatagcattacaggcaaggttaacaatataaa

SEQ ID NO: 424898 - DNA, 201 bp, Homo sapiens
ttagacatcagtaatgaacactggcatattaaaatctgggagaagtcttgcagtgagaaaaatttatagaatttgagtacatattatgttttatataacawgattttccttcatgagaccattgagatatagtttgggaaattataagactatctcaaatgtaaacataaattattcttgttataatagcctcttgccatt

SEQ ID NO: 424899 - DNA, 201 bp, Homo sapiens
gttcaagatggcggctccatcttcccttccttttgtcaggcatatgtacaataagaagcagacaagatggtgctgatcaactggaaagtccatttgcattrtaagattagggtggagtgaccagccttccccttgcctgccctatgtaaacgtcatacctgatggaacaaatctgtgagccctatgtaaatcagacaccac

SEQ ID NO: 424900 - DNA, 201 bp, Homo sapiens
ttctgggctgcttgattatttgtgtttttcatatattcctaattgtttgctgaaattcatatacttgaattctataataaatccatatatatatatatatwtatatatatattttttttttttttttttgagatggagttttgctcttgttgcccaggctggagtgcaatggtgcgatctcggctcactgcaacctccacc

SEQ ID NO: 424901 - DNA, 201 bp, Homo sapiens
ctgcttgagctcagaatttaataccatcaccagaaattggtttttctttctccctgtctcacctgtgcttttctctgtgtcagctccattctcaggtaccrttggcagttttcaggtaccatttccttggtttacaatccaggtagttagtttctgcttctcaacaattctcaataatttgattctcactggtacaggagt

SEQ ID NO: 424902 - DNA, 201 bp, Homo sapiens
aaattttaatatgattaaatgactatgaaaacattaacatgtacatttattagttaaatattgagccatctacttatgaataatttacctatttaaaacartgattaaatcaaggtgtgtaaattttctccacattatacttttccgaatttctgtctctttaatacaattgctttctggatggcattttctactgctaaa

SEQ ID NO: 424903 - DNA, 201 bp, Homo sapiens
tcttgtctatttttacatcatttaaaacaacttatcctccttaatttactacagtaaatagtatacattttcagttcctcaaacatgccaaacatacaaarttgttcaccattttgcagggcatggtttatgcttctatcactggcatgattaccatgtaaagtacaatataggggcaccccattccatcaatcaaatgca

SEQ ID NO: 424904 - DNA, 201 bp, Homo sapiens
ggaaaatcatctttttaattttgcaatagtacaaggtaaaaatgtctttattactttgttgattagagctagtttttataccacgtactgttctggaaaakaggataatttttggagagtctaagttcttaagtcattaccattcttggcttctaatatctcactacttgaaatgtgggctgtagaccggcagcataggca

SEQ ID NO: 424905 - DNA, 201 bp, Homo sapiens
ataagttaataatttttccataagatccttgacagtcacaattatcatacccattttatagattaaaaactgaaatgcaaaaaggtgaggccaattatccraaattatatagtaacgattgatggatactgagaattcagagctcaatctgttaaccactacaatttactgtagaattttctattacctcagtggtcattt

SEQ ID NO: 424906 - DNA, 201 bp, Homo sapiens
gaaattttgatttgctaggaaaatcatctttttaattttgcaatagtacaaggtaaaaatgtctttattactttgttgattagagctagtttttataccaygtactgttctggaaaagaggataatttttggagagtctaagttcttaagtcattaccattcttggcttctaatatctcactacttgaaatgtgggctgta

SEQ ID NO: 424907 - DNA, 201 bp, Homo sapiens
agagacaatctgttgaatgggagaaagtatttgcaaactgttaatctaacaaggactattatgcagaatataaaagaaactcaacagcaaaaaaaaaaaaagaaaaaacacacaaactaaaaatgaacaaacaaataatcccatcaaaaagtgggcaagcaatctgaatagacctttctcaaaagaagacatagaaatggc

SEQ ID NO: 424908 - DNA, 201 bp, Homo sapiens
tgggaggataatagcaagagttcagagtaggctccttacccaagatccccataaaccaaaccttctaaaatcaaatagatcaaagaatgagctagatagartttactcacttaagtaagcagtctttttgttaatcccctaccactgaatttctataatcctcatttgatgtatttctccataggccacaagtgccagcag

SEQ ID NO: 424909 - DNA, 201 bp, Homo sapiens
tggcttgcccaccttgtcactgccactgctagcaccagtgtgagcctcctgggagcctgagtgttgcttcttctctgctactttcatcattgattgtaggygcactgccaggggccccaaaacctgcctatccactcggccctctgctgccactgctggcacccaaggaagtcacctgggagcccaagcatcagttcacct

SEQ ID NO: 424910 - DNA, 201 bp, Homo sapiens
ccagaatttgaccaccaaggaagtactttaccggctcctgtggcttctctttccttggtcggtgcacagagtcatcgctgcagtatgtgaggatcctttaycctaggttgctggccagtttcttttcatgttgctgagagctcaggttattcctcacactgggtaggtcctgatttctcacccctgaggccgccataagga

SEQ ID NO: 424911 - DNA, 201 bp, Homo sapiens
ttgtttcatttaaatcaaacatataaaatttgaccatcctgtaagcaattggccgaaacagaatttttaaaaaagactagtatttactcaggaggcatttmtggtttactactgacaatgcaatgattattcagcaaaagcttttaagtacagtaaattttattgttttacatagaagctaataagaattatttttaagtt

SEQ ID NO: 424912 - DNA, 201 bp, Homo sapiens
tctttactacttctatctctctctttctttctctgtttgactttctgtctctttctctttaactccctctttgtctctctgtctcttcctctctctctgcytctctctttctctctttctccttgactccctatttgtccctctgtctctttctctctctctctttcctctctgcttatctttacctgcctctgccagctg

SEQ ID NO: 424913 - DNA, 201 bp, Homo sapiens
agaattgcttgaatccaggaggcagaggttgcagtgagacgagattgtgccactgcactccagcctgggtgacagagtgaagactccatctcaaaaaaaaygaacaaattaatataaattgtcatgagattagttagaacttttttaaaatatagaagttttttgaaaaggattattttagaattttaattaaaaggattt

SEQ ID NO: 424914 - DNA, 201 bp, Homo sapiens
aggcaaaattgacttggttatgttaataactagatggtcagcaatagagtgaggaaagaagaaagagtaatagaatagatgaaagagagttaaatttttcytagctttagtttggtagggttttcccctgggaatatggcccacaaatctgaaaggggcagcactttcttgactcgggtgtgatgagtccatcccctttct

SEQ ID NO: 424915 - DNA, 201 bp, Homo sapiens
gtagatgtagtttatccaatttacatttttattaattgtcacccaccaaaatattgactcaaattctgcagctatttgatttcaggctttaaattgatctkgtattctctgtgggactccaattgcatttaaatagacgtaagagttgaaagacccataaggggctcctctcactttatgatgtcttatttttccttcctc

SEQ ID NO: 424916 - DNA, 201 bp, Homo sapiens
tttttaatagtgtttaccttatagaattattgaaaagattaaatgtgatagaaatgttaaagtctcagacatgtatgtatgccctatatcagaataatagmgttacaagagtttttaaacagaccttaatttacatgagtctgaaatgttagtgatttgttaattactaccgataagttattattttagcagcatccaaat

SEQ ID NO: 424917 - DNA, 201 bp, Homo sapiens
gtcacttgagcctaaagaatcatagcatcttaactggccaaacccaggagctgtgacatgatgaatggataccagaggttctttttctatttcctggattygtaggtccctacatccttaaataactgcaaatacttggtagtgtctttgtgactattacacatagtaccttgaagccagactgagtttgacagagaaaat

SEQ ID NO: 424918 - DNA, 201 bp, Homo sapiens
tactattgacacacttaattcatacaacttaactgttactagtattaatttagttgtttaaacttccctctttcattaacttccaagaactaagatagggkatcagtgctataaaagggcttttataaatttatcttagaaagttgattatttgaaattctcaccttattttgctgttacccgcctaagatctaaaagtac

SEQ ID NO: 424919 - DNA, 201 bp, Homo sapiens
ttgacacacttaattcatacaacttaactgttactagtattaatttagttgtttaaacttccctctttcattaacttccaagaactaagataggggatcartgctataaaagggcttttataaatttatcttagaaagttgattatttgaaattctcaccttattttgctgttacccgcctaagatctaaaagtaccatcg

SEQ ID NO: 424920 - DNA, 201 bp, Homo sapiens
ataatcgataataccacaaagttttctcagtattattaagaatatgatttattttactttttaactttctatagtgacttttaacatctatcaagtctacyaagagattttacattttgaatagtctcaaacatttttagaatacaagaacacaattgtaaactgcatctgattacaggaactcacatatctgggggaatt

SEQ ID NO: 424921 - DNA, 201 bp, Homo sapiens
ggatcagtgctataaaagggcttttataaatttatcttagaaagttgattatttgaaattctcaccttattttgctgttacccgcctaagatctaaaagtrccatcgatgactcagcagagttggaatgaaaggtgtatgttgttgctttgtcgtgtatctcttctcttgtaagaatatattggcgtcattttcctcttaa

SEQ ID NO: 424922 - DNA, 201 bp, Homo sapiens
cataaatggagatgtttggaaacttttcatttaattcattatcatgcctggaagtagtacagagggtaaaacaacctacaaataaaacacatttatgtgtwttatgtgttgccaataaaacacatttatgttgagtaatacatttaaaaacactcagagagaaaataaatcgccccaaagacatataagacaagagcatgg

SEQ ID NO: 424923 - DNA, 201 bp, Homo sapiens
tattatacaatatcaaaaagcaaatcgcatttgttaatgtaactgctgacctaaatctttaagtattaggaacatataaagctcagagtggtgggtacagrcttcacaaaattcaaatttttacttcaaggatttgattttgctattggcaataattatagtaaattgttttccttgagttacaaagttactttctttcat

SEQ ID NO: 424924 - DNA, 201 bp, Homo sapiens
atttagtcaactctcttgaagacttaaattgaattttaatagcaatatctaagacatgacattttaaagctgtcatatgaccctatgaattacatacatamttgttttcaacatttcctcaaaatatatgtaaatatgcaaatatattaagaataatagtcactagcccaactgaggaagctatgggtgattaaacagacc

SEQ ID NO: 424925 - DNA, 201 bp, Homo sapiens
aaagaaaagagacgtcccagtggatctaaatcaatggccaaattgatcaataatgtatttggaaagagaaggaaatctgtttagtagacaggtaatcctgrgagatttcctgtatcagagagtttcaaacattcacatgataattaaactaacctttgtatgcaatttttttttggtaaaaagaattctcttggagatatg

SEQ ID NO: 424926 - DNA, 201 bp, Homo sapiens
ttctcaggtaccgttggcagttttcaggtaccatttccttggtttacaatccaggtagttagtttctgcttctcaacaattctcaataatttgattctcastggtacaggagttaagaataaattacttaggcagatagtaagggtatgggagtcctcggtaaggctttcctttttaatgaaaagcagtcccaaatcattt

SEQ ID NO: 424927 - DNA, 201 bp, Homo sapiens
tggttctctatttctgagagatattaatagatgttctgcctatttctccaaaaattctatttaggaaatgggacttaggagactttcctcttagacatcartaatgaacactggcatattaaaatctgggagaagtcttgcagtgagaaaaatttatagaatttgagtacatattatgttttatataacatgattttcctt

SEQ ID NO: 424928 - DNA, 201 bp, Homo sapiens
cctaggggagataatgtttcattactgccctctgcccagatgcaggagaggggagagaaactacatataccccaatgtatctattgctgttctagtggctrgaaacatgtggatgttcttcaccaaaaaaaaaattataggtgaattaattatgcaaaatataaaaaatatgaacagatacctacttaatgatgtttaata

SEQ ID NO: 424929 - DNA, 201 bp, Homo sapiens
aaacgtgtgtgtatacatgtatgtacacatatactgtagtattaaaatttattttcacctgtttctttgtgtattttcatgcacacacacacacacacacmcccctttataccatataggtgtatatatgtgtgtgtctatctatatagatagagatatatagatatagatagatacatagatataataccttaatactgt

SEQ ID NO: 424930 - DNA, 201 bp, Homo sapiens
acatattatgttttatataacatgattttccttcatgagaccattgagatatagtttgggaaattataagactatctcaaatgtaaacataaattattctygttataatagcctcttgccattaaatatttaaatgatagtatttgtcttcttatacaccagaatatgccaagcaaacatttggttatagtatgagtctcc

SEQ ID NO: 424931 - DNA, 201 bp, Homo sapiens
tttacttctaagaagatatgtgaaaagtataaatacgataaccttaataagtgtctcacagatgatttttgaaagaaaccaacagatttgttatactcagygtattagtcagcctgggctgctataacaaaataccagagaccgggtggcttaaacaacatacatttatttctcttcgttctataggctgcaaagtttata

SEQ ID NO: 424932 - DNA, 201 bp, Homo sapiens
tgagatatagtttgggaaattataagactatctcaaatgtaaacataaattattcttgttataatagcctcttgccattaaatatttaaatgatagtattygtcttcttatacaccagaatatgccaagcaaacatttggttatagtatgagtctccagctaagtctactggtgaggagaggttgtcctagacctgtccac

SEQ ID NO: 424933 - DNA, 201 bp, Homo sapiens
atgtgccatgttggtgtgctgcacccattaactcatcatttagcattaggtgtatctcctaatgctatccctcccccctgcccccaccccacaacagtccytggggtgtgatgttccccttcctgtgtccatgtgttctcattgttcaattcccacctataagtgagaacatgcggtgtttggttttttgtccttgcgata

SEQ ID NO: 424934 - DNA, 201 bp, Homo sapiens
atatataaccatatataatatggttagttattaatcaccgatcatgccccagactttgagctacatggatattgctgtggaaaaaaattacacacacacayacacacacacacacacacgtggatgcatgaagctagaatttttgaccaattaccttgaaacacacatccaaaacctttgagaatatactgcaaattctga

SEQ ID NO: 424935 - DNA, 201 bp, Homo sapiens
tgagagtcagaggggaaaatggaacttgcttggagccaccaagaaagaattataaatccgggaatctaacccagatctttgactgcaaaataatattttawaataagcttgtttttgaaaattgtgctttctaccttttaaaacaccaccaatattataatctataatatataaattggactcagtataatacatcagatt

SEQ ID NO: 424936 - DNA, 201 bp, Homo sapiens
gaagtaatgtataaaataattaaaagtcatacacttcgactttgaaacagaactacacatgtagtttaagagcaattgtgacatatttgagaaggcatgtmtaagagtccctgatttaactaagactgcagaactatagaaaatgtattttgtagacaaaactgtgtcccctcaaatattcccatgttttgatccctggaa

SEQ ID NO: 424937 - DNA, 201 bp, Homo sapiens
ataggatagaaaaatagttgtatttattacttctttgctcttgggttactgtcaattaattcatttaaaggactaagaacatcacttggcacctaatatayaccatcataatataatatataaccatatataatatggttagttattaatcaccgatcatgccccagactttgagctacatggatattgctgtggaaaaaa

SEQ ID NO: 424938 - DNA, 201 bp, Homo sapiens
agccagctatcatgttttggaagcacccaactgtccttttaaggattttctctggccttcagttttgcccattgtggtttgattttgcaaaagatgatcawggtactgttctgagaagctcaatgaatcttatggagggctcaaattgagataaagatacttctaaagctttgcaattaaaatttatttctcagctaaaac

SEQ ID NO: 424939 - DNA, 201 bp, Homo sapiens
aggatggataagcttgtaagttgaaccatgaagcatcaaaaagaactatgtaacttaattcccactgtgattcaaatggcatattaaaaaactggcatttstgatgagaactacacattatacacccagagataacaatatgcttgtccctggacatgacaacaacggtgatgacagcaatatgattatctcacctttttt

SEQ ID NO: 424940 - DNA, 201 bp, Homo sapiens
aggagggtatgttgcagtgagccgagattctgccattgcactccagcctggacaacaagagtgaaactctgttacacacacacacacacacacacacacactcacacaaaagaattaaatgataatgagtgcattaatttcacataacaaaactttggaacatttctaaccataattacatttgtgttttcaacaagaaca

SEQ ID NO: 424941 - DNA, 201 bp, Homo sapiens
ccttttaaggattttctctggccttcagttttgcccattgtggtttgattttgcaaaagatgatcatggtactgttctgagaagctcaatgaatcttatgragggctcaaattgagataaagatacttctaaagctttgcaattaaaatttatttctcagctaaaaccttaacttcttttaaagggcaatatattttattc

SEQ ID NO: 424942 - DNA, 201 bp, Homo sapiens
atctcttaacttttcagttcttttatttttataggatagaaaaatagttgtatttattacttctttgctcttgggttactgtcaattaattcatttaaagsactaagaacatcacttggcacctaatatataccatcataatataatatataaccatatataatatggttagttattaatcaccgatcatgccccagactt

SEQ ID NO: 424943 - DNA, 201 bp, Homo sapiens
caggagggtatgttgcagtgagccgagattctgccattgcactccagcctggacaacaagagtgaaactctgttacacacacacacacacacacacacacactcacacaaaagaattaaatgataatgagtgcattaatttcacataacaaaactttggaacatttctaaccataattacatttgtgttttcaacaagaac

SEQ ID NO: 424944 - DNA, 201 bp, Homo sapiens
gagatggttaagcaaataatgctgtattagataaagggaaaattctgttatcactaaatttgaatgtataacgactagcaaccttaaaaattgtaagttamatatgcagtgcatccaattgtacattataatgataattaataaaatgtgtaatttaaaaaaatttagatgggaacattgaaaaatggaagacattatttc

SEQ ID NO: 424945 - DNA, 201 bp, Homo sapiens
ccaggagggtatgttgcagtgagccgagattctgccattgcactccagcctggacaacaagagtgaaactctgttacacacacacacacacacacacacacactcacacaaaagaattaaatgataatgagtgcattaatttcacataacaaaactttggaacatttctaaccataattacatttgtgttttcaacaagaa

SEQ ID NO: 424946 - DNA, 201 bp, Homo sapiens
attaattcatttaaaggactaagaacatcacttggcacctaatatataccatcataatataatatataaccatatataatatggttagttattaatcacckatcatgccccagactttgagctacatggatattgctgtggaaaaaaattacacacacacacacacacacacacacacacgtggatgcatgaagctagaat

SEQ ID NO: 424947 - DNA, 201 bp, Homo sapiens
cccaggagggtatgttgcagtgagccgagattctgccattgcactccagcctggacaacaagagtgaaactctgttacacacacacacacacacacacacacactcacacaaaagaattaaatgataatgagtgcattaatttcacataacaaaactttggaacatttctaaccataattacatttgtgttttcaacaaga

SEQ ID NO: 424948 - DNA, 201 bp, Homo sapiens
aacaaaaacaagagataaagaaaacaagaatacaaataaagatttgagcaatgctcgtataatagaaatgtgtaaatatctgaagcctaatatagaaaacmcatcatattatatacaaataacatatttacaaataaagaacatgtacttcttcacaatgatgtttctagacatttcaaaaataaatattttacagacagt

SEQ ID NO: 424949 - DNA, 201 bp, Homo sapiens
tattaattaagctatataattccaagttggcaatagttcaaaaattagaaatattgtccttaaaactgtcagtttgccaattgaaaccaatgctaagaaartcttacctttcgagatagctttcctggagcttccctacttttctgcaggtggagctgaataacagatttatctttttgaaacattttgtggctccccaaa

SEQ ID NO: 424950 - DNA, 201 bp, Homo sapiens
gcccctgcacctggaactgtttgcttgcttgtaaccacttatccttttaactttttgcatactttgcttctgtaagattgttttaactagaccccccccccaaccctttcgaaaccaaagtataaaagaaaatctagccccttcttcggggccgagagaattttgagcgctagccgtctctgggtcaccagctaatacagg

SEQ ID NO: 424951 - DNA, 201 bp, Homo sapiens
ttccttttctctgtatgttgaagtcttgatactgcactctggacaccagtgcaatgacttcagcctcatacatggctactgcgtgcttacttaaactgacyttctttattttatccacctgcgtgtatacttcttcctagaattgccagataatatacttgatgtctagtgtgttggttaatattgagtgtcaacttgatt

SEQ ID NO: 424952 - DNA, 201 bp, Homo sapiens
gaggtaaaagtactgtccagtcctttttaagttggaggctgagcttggtgaggtgtgtctttagaagaccattagtctgttctacctttcctgaagattgrggatggtaagggatatgaaggttccactgaataccaagagcctgagaaactgcttgggtgatttgactagtaaagactggtctgttatcagactgtatag

SEQ ID NO: 424953 - DNA, 201 bp, Homo sapiens
agtcttgatactgcactctggacaccagtgcaatgacttcagcctcatacatggctactgcgtgcttacttaaactgaccttctttattttatccacctgygtgtatacttcttcctagaattgccagataatatacttgatgtctagtgtgttggttaatattgagtgtcaacttgattggatcggaggatgcaaagcat

SEQ ID NO: 424954 - DNA, 201 bp, Homo sapiens
tcacttaaggcaaggactggccattttcacttcttttgtggtggaatgtcatcagttaaggcaaggaccggccatttacacttcttttgcggtagaatgtsatcagttaaggcggggcagggcattttcacttcttttgtgattcttcagttacttcaggccatctgggtgaatacgtgcaagtcacaggggatgcgatgg

SEQ ID NO: 424955 - DNA, 201 bp, Homo sapiens
tagccaaaataatactgggttgtgggttaagagaaccttttgtattttagtagccattattataatagcttcatcatttggttaggtaaatgtccagatgkgaataatttatctggaagagatattggaggatttgtgatacctctagctgaattcctttagtaacttggattagaggtgaaacaaataattcagatttat

SEQ ID NO: 424956 - DNA, 201 bp, Homo sapiens
aagttactttctttcatttttgagaataccaaatacctcatacccaagtctcaatagccatggtatctgctagtcatttcttcaagaggacagcattaccragaaagggagttagttcagttttcagttaaaataaatgaaccttagctttttctagacacaatcattatcctttgatatgtaacaaaagtactttatgta

SEQ ID NO: 424957 - DNA, 201 bp, Homo sapiens
tttctttcatttttgagaataccaaatacctcatacccaagtctcaatagccatggtatctgctagtcatttcttcaagaggacagcattaccgagaaagrgagttagttcagttttcagttaaaataaatgaaccttagctttttctagacacaatcattatcctttgatatgtaacaaaagtactttatgtataagtcc

SEQ ID NO: 424958 - DNA, 201 bp, Homo sapiens
tctaaaatgattttaagtaattggggctatgtgtaactgtatacacacatgaccataagtaacatacacacaatattttttcttttttgatttataatccyttggttataaatctgttttttttttttttttaaaaaaaagagttgttaaaacaatcttgctaaaaattgtgtatctctatttcagagctgtggaatcagc

SEQ ID NO: 424959 - DNA, 201 bp, Homo sapiens
tgtgcgagaggttggctgggaagaagggcaaaagctggcactggaaaaccgatgccaattctgtgaactgtctgcagcagagcagtctctggaggtggaartgatgtttatcagaattatcaaggacatcctgataaacttcaaactcaaagaaaagagacgtcccagtggatctaaatcaatggccaaattgatcaataa

SEQ ID NO: 424960 - DNA, 201 bp, Homo sapiens
taccaaatacctcatacccaagtctcaatagccatggtatctgctagtcatttcttcaagaggacagcattaccgagaaagggagttagttcagttttcarttaaaataaatgaaccttagctttttctagacacaatcattatcctttgatatgtaacaaaagtactttatgtataagtcccatgtaattacacagtgtg

SEQ ID NO: 424961 - DNA, 201 bp, Homo sapiens
acgtcccagtggatctaaatcaatggccaaattgatcaataatgtatttggaaagagaaggaaatctgtttagtagacaggtaatcctgggagatttcctrtatcagagagtttcaaacattcacatgataattaaactaacctttgtatgcaatttttttttggtaaaaagaattctcttggagatatgaaatgattgag

SEQ ID NO: 424962 - DNA, 201 bp, Homo sapiens
ttataagattaatgtgtgtgtttgcataaacatgcacctcattagaactaatgaaatgattgatttaccctatagcccacacaggaatacagtgtggtaayattacctaagcttaattaatgaatctcatattttttgttaaaatgtgatggtgggtattactgataattttttaaaatgcatgaagttgcatgaaagtta

SEQ ID NO: 424963 - DNA, 201 bp, Homo sapiens
gtattactgataattttttaaaatgcatgaagttgcatgaaagttagtgcagtgtgagtttgtcacatttatatggtaactcatattatatcaatatagtrattagaaattggattacattatattagagtgctatgcttttcaatctttaactgaaaattcaatttaactatttttaaaatatattgaaatattgcttta

SEQ ID NO: 424964 - DNA, 201 bp, Homo sapiens
tgaatatgatcatttttcttgagatataatttatacacagtgagacgcatagatctaagagcacagcttgatgagttttgaaaagtgcatagacctgtctyatcttgtcaggatatggaacatttccatcatctcagggaaagtttccccatacgtcttccaaaacaagtgctacctttcctcccagagacagtcactgtc

SEQ ID NO: 424965 - DNA, 201 bp, Homo sapiens
ttggccatgctttctctattttgcaccatgtccacccacatatgtgtttgagcacattccccattttccattaaaattcacttatatctagcattgttagwatagtaaactaaaaacaaaacctctttctataaaattgccatttaaagtgatgcaaaaacctttcttttacccctacaaacaagtggaagcactgaataa

SEQ ID NO: 424966 - DNA, 201 bp, Homo sapiens
actgtccaaatttatattaatggacttcagggcatgctaccccaaaatatggcattttggcatttaaggaaagagcagaaacaggaaacttactctctgaycttctcctgcccttctcccctgaagcaggttgtaaaagaattctctgccttccttccaaactaggtcataagacttttctttggagaggtaccctcctca

SEQ ID NO: 424967 - DNA, 201 bp, Homo sapiens
catttaaagtgatgcaaaaacctttcttttacccctacaaacaagtggaagcactgaataatatggatgaatcatctgtgttcttatgaaagataagaaawccccctgtggcacaaacagaaaggggacaaaagctggggttaggagcaaaagctgattctgtgttcactttagggatgtgagttaaaacagactgctaca

SEQ ID NO: 424968 - DNA, 201 bp, Homo sapiens
ctcttggaaataagtaatactactctagaactaccttcttaaaatccaggctgtattatatttggtataggaaaaaaaatacaagctttattttgctaaaraggaacttgcaattacaaatagatcataacagaaatcaatgaaaaatgtaccatgtatgaatcatcagttataacaaagagaagcaaaacttggcataat

SEQ ID NO: 424969 - DNA, 201 bp, Homo sapiens
gaagttttcagcattttttctaacgctttttgttccttctcataaaaaggttttggatgggtctttaacatcgtcctcaggtttgtcccattttgctgctrtaatccatttgcaagctttatcaggcttcaatatcaagtgactaaattgataaaggtcagggagtcctggattataaccttctatgaggatcctaaattt

SEQ ID NO: 424970 - DNA, 201 bp, Homo sapiens
atttaagaagttttcagcattttttctaacgctttttgttccttctcataaaaaggttttggatgggtctttaacatcgtcctcaggtttgtcccattttkctgctataatccatttgcaagctttatcaggcttcaatatcaagtgactaaattgataaaggtcagggagtcctggattataaccttctatgaggatcct

SEQ ID NO: 424971 - DNA, 201 bp, Homo sapiens
ctcagtcttaattttcttggtattcttttgtctgttataatacctagcacataaacatcctcaggatgttcaataaattagagtttataagtgccttttamatattttaaaaagtcttctgttttttttctgttgtattttctagaaacctaatttacattattaaagtagcaaatccagtgtgaagctgggtgtcacatt

SEQ ID NO: 424972 - DNA, 201 bp, Homo sapiens
cttggtattcttttgtctgttataatacctagcacataaacatcctcaggatgttcaataaattagagtttataagtgccttttacatattttaaaaagtyttctgttttttttctgttgtattttctagaaacctaatttacattattaaagtagcaaatccagtgtgaagctgggtgtcacatttagagtttctgaatt

SEQ ID NO: 424973 - DNA, 201 bp, Homo sapiens
tcatgtataaactagtactgtctttgcttaactcttctgcctcttccgtactgttccataaactaaagtagtactatcttgtactttttttttttttttttggagatggagttttgctcttgtcatctaggctggagcgcaacagcgcgatatctgctcactgaaacctctgcctcccgggatcaagcaattctcctgcct

SEQ ID NO: 424974 - DNA, 201 bp, Homo sapiens
tcttattttagtcatgtctctagcctataaattccttttaattcatttttgagtctttgacttttaatcagagaagtctcagctatccaagttatagtaaygccttctgctatattatttttggtttatattaactatattgtttcttttagaattatttcctttcatttgttgggtttatttgagccatttttgagtctc

SEQ ID NO: 424975 - DNA, 201 bp, Homo sapiens
catgcctggctaatttttgtattttttttagtagagacagggtttcaccatattggccaggctggtctcgaactcctgactttgtgatctgcccacctcarcctcccaaagtgctgggattacaggcgtgagccaccacacccagccggaaatatttttatttttaaaagagtattctattcatgtaaggaatggattgct

SEQ ID NO: 424976 - DNA, 201 bp, Homo sapiens
ttctattgcaatctcaatttaattactatgtgacagacactcaaataaaatttagagctttatatgacttcaattcagttctctcttagaaccttacaacygctcaagtagagatcacttcaaatattagctccagattcttttatcacttacttgatgaaatataaaaagtagtagattagttgattaaaaaagttaaag

SEQ ID NO: 424977 - DNA, 201 bp, Homo sapiens
attataaaaatgctattgaaatattattttaatacaatatattttgttattaaaataataaataataatgaaatattatttttcccacaaaaaggaaaatwgtcttaaggccattcactgttaacactgcacagtaaagaactggatttactaataagaatgtcatcaaatttatcaaacttcccaaaagataatttcaag

SEQ ID NO: 424978 - DNA, 201 bp, Homo sapiens
ttcacctttgaacccttcctcatctttcttcttctatatccaataatccaccagtccttgtaggatgtactacataaatatatcttaaatctatcttcccctctctgtctatcactaccataattgtcatttaaagctttcatattttcacttgaaatattgtattgactctgggactccttttccattttctgcaattca

SEQ ID NO: 424979 - DNA, 201 bp, Homo sapiens
atgccaacagggcaaggtcagaggctcgtttcgtgtttaatgattcactataacactgtgaaaggagttttggtctctgttgattttatcttatcagttgytacacaaataaaactacatgttcccatgatcggtttgagcaccttgagtgactgggaaaatcagtttttccaatctcttccgttaacacttactattgac

SEQ ID NO: 424980 - DNA, 201 bp, Homo sapiens
tgttttttgagacagagtttcgctcttgtcacccaggctggagtgcaatggtgtcgtctcagctcactgcaacctccgcctcccgagttcaagtgattctyctgcctcggcctcccaagaagctgggactacacgcgtgcgccaccatgcctggctaatttttgtattttttttagtagagacagggtttcaccatattgg

SEQ ID NO: 424981 - DNA, 201 bp, Homo sapiens
caagagacacttccagggtgtacatgcacttgtaggaaataaaaatcagtgtcacttaaaaatatccttgataaaatggtaaaaattattaattttgttaratctaaatccttaaatacatgtgtctttaattttctatatgaacatataggaaaaacagttaaagcacttctgcatactataatatagaagttgtcttca

SEQ ID NO: 424982 - DNA, 201 bp, Homo sapiens
aacatctcaatgattttctttattttgattacatgttaaaatgataatatttgaggtatattgagttaaagaaactgtagtattagaatttatttccatgkgtttctttgcatattttcttagtgtggctagtagaaaatttaaaactcttctgtggcctacgtgataaatttgttaaatggtgctatgtagagaaaatga

SEQ ID NO: 424983 - DNA, 201 bp, Homo sapiens
tgtaactgtatacacacatgaccataagtaacatacacacaatattttttcttttttgatttataatcctttggttataaatctgttttttttttttttttaaaaaaaagagttgttaaaacaatcttgctaaaaattgtgtatctctatttcagagctgtggaatcagcagtgtttttggttggcaacaaacgagatctt

SEQ ID NO: 424984 - DNA, 201 bp, Homo sapiens
gaaaagtaataattattcaaaatgagtttgaatattcaggggaaataaatttgataggtctaggctgaatatgatagggcagctagagaatttagggatargtttatagaaaattgagcaagagaaaaatgaatcagttattaactctacaaaattaatttgtacaagaaaggaaatcacaggtaatcttatctatgtttc

SEQ ID NO: 424985 - DNA, 201 bp, Homo sapiens
gtgtaactgtatacacacatgaccataagtaacatacacacaatattttttcttttttgatttataatcctttggttataaatctgttttttttttttttttaaaaaaaagagttgttaaaacaatcttgctaaaaattgtgtatctctatttcagagctgtggaatcagcagtgtttttggttggcaacaaacgagatct

SEQ ID NO: 424986 - DNA, 201 bp, Homo sapiens
taaaatagccctggattttgtgctcaaagtggtatttggagctgactcagcatagataaaggtcagtgatacgttgtttcactaaaccagtgcttcttgartttattgttattttgtcttcaagtgagctaccaataggaaaagtcaaactttatgacttttgaagagacaagaataggttcaatcctaaaactagggctt

SEQ ID NO: 424987 - DNA, 201 bp, Homo sapiens
tttggttttctgttcttgcatcagtttactaaagataatggcctccagctccatccatgtccccgcaaagggcatgctctcattcttttttttttttttttggttgagacaaagtcttgctctgttacccaggctggagtgcagtggcacaatcttggctcacggcaacctctgactcctggattcaagtgattctcctgc

SEQ ID NO: 424988 - DNA, 201 bp, Homo sapiens
ataggaacacttttacactgttggtgggactgtaaactagttcaaccattgtggaagtcagtgtggcgattcctcagggatctagaactagaaataccatktgacccagccatcccattactaggtatatacccaaaggattataaatcatgctgctataaagatacatgcacatgtatgtgtattgcggcactattcaca

SEQ ID NO: 424989 - DNA, 201 bp, Homo sapiens
tttcattttcttaatgctgtgtatcacatttgtcgatttgcgtatgttgaactatccttaaatcccgggaatgaatcccacttgttcatgatgtatgaccwttttgatgtgcttttgaattcaatttgctaatattttgttgagggtttttgcatctatgttcattagggatattggactgtaattttcttatattgcagt

SEQ ID NO: 424990 - DNA, 201 bp, Homo sapiens
tatttggagctgactcagcatagataaaggtcagtgatacgttgtttcactaaaccagtgcttcttgagtttattgttattttgtcttcaagtgagctacsaataggaaaagtcaaactttatgacttttgaagagacaagaataggttcaatcctaaaactagggcttttaggcatgaggtggttagtagaggagagtca

SEQ ID NO: 424991 - DNA, 201 bp, Homo sapiens
ttggaacgggtttcagaaggaatggtaccagctcctccttgtacctctggtagaattcagctgtgaatccatttggtcctggactttttttggttggtagrctattaattattgcctcaatttcagaacctgttattggtctattcagagattcaacttcttcctggtttagtcttggaagggtgtatgtgttgaggaatt

SEQ ID NO: 424992 - DNA, 201 bp, Homo sapiens
tagaaagctgaaagggtaatgtcaatgataacttccaagaaagtagaacaaaaaaaaaaacaaaagagacagagagacagagacatgtgcacacgtgtgcrtgtgtgtgcacacacacacgggagagagggagtaagagagagagacgagaatataagatagaggatcaatttctggttttaacaactttagaaaaagata

SEQ ID NO: 424993 - DNA, 201 bp, Homo sapiens
gataacaatggtgaaactgtaactttctttctttcacaaaaaatatatactgagccccaaggagctctttttgtggggggtatggtatgtgaaatttataraatttagtaattataccaggagatcaaatatgcagacttcattctatcctaaggttttattattgttttttcccacaaaatctccagaggagaaacatcc

SEQ ID NO: 424994 - DNA, 201 bp, Homo sapiens
gtatatatagtatatagtatacagtatatatagtatatatagtttatagtatatagtatatatagtatagtatatagtatacagtgtagtatagtatagtwtatcctatataggatatatagtatatagtatatatagtatatgtagtatataggatatatagtatatgtagtatatagtatataggatatatagtatatg

SEQ ID NO: 424995 - DNA, 201 bp, Homo sapiens
aaatgcaacatttaatagaaagctgaaagggtaatgtcaatgataacttccaagaaagtagaacaaaaaaaaaaacaaaagagacagagagacagagacakgtgcacacgtgtgcatgtgtgtgcacacacacacgggagagagggagtaagagagagagacgagaatataagatagaggatcaatttctggttttaacaa

SEQ ID NO: 424996 - DNA, 201 bp, Homo sapiens
aaatatatactgagccccaaggagctctttttgtggggggtatggtatgtgaaatttataaaatttagtaattataccaggagatcaaatatgcagacttyattctatcctaaggttttattattgttttttcccacaaaatctccagaggagaaacatcctactacagactttacaaataaaaaacaataaatgagtaat

SEQ ID NO: 424997 - DNA, 201 bp, Homo sapiens
ctctacagtatatataaagtatacacatactatacagtatatataaagtatatgtagtacatacatattatagtatatatagtatatatagtatatatcgkatatatagtatatagtatacagtatatatagtatatatagtttatagtatatagtatatatagtatagtatatagtatacagtgtagtatagtatagtat

SEQ ID NO: 424998 - DNA, 201 bp, Homo sapiens
agaaagaaggaaaggggaaggaaggaaaagagggtgatggggaggggaggagagagaaaagaaaagaaagatcagtagcagttttcatagtagagtggtgytcagtattcagatatgatttatcacatttgaagtaggacttccaagtagctgtaagccaaatctaataccacgaataggatagaccctaaaaacattctt

SEQ ID NO: 424999 - DNA, 201 bp, Homo sapiens
gtgtttttccctacatgaattcaacatagtatttcagtccctatgacattatgaacattttagggcaagagcttgaaagctgattatagaaagttgaaaaygtaaaaagaaaaattcctgttgtttcatttgtgaaggcaacgacatcagtcaaaaaggtcaacataacatacaagttaggactcgggcatgagaaaatgt

SEQ ID NO: 425000 - DNA, 201 bp, Homo sapiens
ttaacatcgtaattaaatcccacttaagtacagagatgcattttgatagactataccatttttatgcatatgaaacaatttatttattcacatattctgawtagaactgccaaaataggtacttgaattaaatgttcttttatggtaaaattcacccaatttgatgttaagtaagacagttggtttcaaagtctggaactg

SEQ ID NO: 425001 - DNA, 201 bp, Homo sapiens
gaagatgagagcagagctgatgaatacttctcctagatgggccaggacacttatgtcctgtgcaacagtcattctcttgctccccttcgctcctctttcayccaattcacagagacacaaaatttcttctttggagaaattgaatggaatatactcctggaccctcagacaccaagcactcggatacaccgtaatcacatt

SEQ ID NO: 425002 - DNA, 201 bp, Homo sapiens
cctagcccttcaaacagccattacaatccattgcgagtggcatttgtcatgaaacctatttgcacctagatagaaaagaagaggagacaattgaaaaggcrtatcagtgaaggaagtaaagataaaatgttgaaagaagaattcagaataatatttttttttctgaaattgttttgagaagaagtatgtggtataagcaga

SEQ ID NO: 425003 - DNA, 201 bp, Homo sapiens
gttcattttctgttgtcctagacttaaaattggcaaatacccttaatttctaatcaaaagtgattatggagaatattatgcctgtgttggctgatctacartgcatttgaatgggtgttttatgtattttgcattgcttttataattgttttggcagaaacgttatttaagcatgaattattttgtaatagcaaaattgga

SEQ ID NO: 425004 - DNA, 201 bp, Homo sapiens
gttgcaggagggattaatggactagcagcctttacttttgacttcagaacaagtcatatttcatagtcctatgggatgctacttagggaataatttatcargttaattcatcaatattaattattatttatcacaggtccacagtgtagcacattttattctgtaatttgttagatagggacagacacaattcgtttccaa

SEQ ID NO: 425005 - DNA, 201 bp, Homo sapiens
tttgaagaaatatgtaattcaaaaattctctaatcactttatttaagaaaaatggagcattgggtcatttaaacttttatcaattgaaaattaggaagatwtaataattcttagctttgaaaaatagacagtgcttttgggtaacaaaaataatgtgacagctgcattttggtattatacatctacaataatattaaatta

SEQ ID NO: 425006 - DNA, 201 bp, Homo sapiens
tacatgctggcaaatggcatagtggaacgctgccaaataggttaatggttctgaaaatcattttaccccaacatgggtaaaaatcgtgtctgtatgtgaaygtgttgcaggagggattaatggactagcagcctttacttttgacttcagaacaagtcatatttcatagtcctatgggatgctacttagggaataatttat

SEQ ID NO: 425007 - DNA, 201 bp, Homo sapiens
ggagcattgggtcatttaaacttttatcaattgaaaattaggaagatataataattcttagctttgaaaaatagacagtgcttttgggtaacaaaaataaygtgacagctgcattttggtattatacatctacaataatattaaattatgtacctactttcacatgtaatttgccatgtcttcttggaacactcttgcaac

SEQ ID NO: 425008 - DNA, 201 bp, Homo sapiens
gagttggaaaatggtttttatcatttttaatattatatgttaagtccctaaggtaagcattctggtagaaatgctacaaacttggtagaataagcctaccwtgaaaacaaatcaggtatacatgctggcaaatggcatagtggaacgctgccaaataggttaatggttctgaaaatcattttaccccaacatgggtaaaaa

SEQ ID NO: 425009 - DNA, 201 bp, Homo sapiens
agtctgctaaccttggcagtgtcctttgaaagtagtccctaggtagtgttaacttctgcaagctcacgtgagcctaagatcacccccgggcctagcctgcktggcaaactgacagaggtcacattttcagacaaatgaacaatttccctgataaagtgaaaccggtacttaagcacaagctctaatgagcagccccctgtc

SEQ ID NO: 425010 - DNA, 201 bp, Homo sapiens
ggagatgaggagtgaacctgaccaacatggtgaagacctgtctccactaaaaattcgaaattagataggcgtggtggtgcgtgcctgtaatcccagctackctggaggctgaggcaggagaattgattataacttgggaggctggggttgcggtgagccaagatcatgccactgcacttcagcctgggtgacagagtgaga

SEQ ID NO: 425011 - DNA, 201 bp, Homo sapiens
aacagaacagaggccttcaaaataacatcacaaatctacaaccatctgatctttgacaagcctgacaaaaacaagcaatggggaaaggattccctatttawtaaatggtgttcagaaaactggatagccacatgcagacaactgaaactggaccctttccttacactatatatacaaaaattaactcaagatggattaaag

SEQ ID NO: 425012 - DNA, 201 bp, Homo sapiens
actgccaggggccccaaaacctgcctatccactcggccctctgctgccactgctggcacccaaggaagtcacctgggagcccaagcatcagttcacctgarcctgctaaatccagtgcccacataggctacccaggagcccaaagacagccatggttggtccaccactaccacactggaagctgaggtttaattcacccag

SEQ ID NO: 425013 - DNA, 201 bp, Homo sapiens
atgacatgatcgtatatttagaaaaccccattgtctcagtccaaaatctccttaagctgataagcaacttcagcaaagtctcaggatacaaaatcaatgtscaaaaatcacaagcattcctatacatcagtaatagacaaacacagagtcaaatcatgagtgaactcccattcacaatggctacaaagagaataaaatacc

SEQ ID NO: 425014 - DNA, 201 bp, Homo sapiens
actattacactaatagcatatatattttgtgtaaagacataagaaatataaaaagcaaagaaatatgaatcttcaagagaacacaaaactctccagccacsaatttcattccaaagaaaagaaaatatatgagataactttttaaaataatgatatgaaaaaaactcagtgagatacaagagaacacaagcaaacagcaca

SEQ ID NO: 425015 - DNA, 201 bp, Homo sapiens
aataagagagtaaaaaaagagacaaaaataataaaaaaggaacaaacaaaaattctggaacaaaagaattcagtgaatgaaataagaaatataacaaagasctttaacaatagactagctcaagcagagagaatttcagaacttcataataggtcttttgaaataacccagtcagacaaaaaaaaagtaaaacaatatttt

SEQ ID NO: 425016 - DNA, 201 bp, Homo sapiens
tgttaactactatttagaacagaatttggtctaattttaaagtctttattaattcttgaatatttttggtttaagaactaaagccttatgcacataaccamattagctgtttcctaaaatataacagccctaaatctagattgtttgctttgcagcccttacagtgaggtttcttactaagcgattcattggagaatatgc

SEQ ID NO: 425017 - DNA, 201 bp, Homo sapiens
caaattaaaagttctccattgtggctatcttgattctaagttttctctaataagattaacccattttcctaatgatgcacacattctgggcccataatttktatatataaaattagctggagtcccagaagttggggtcccagactcattggattgagacaaattcactatcaaaaataagagcatctacctaaggcttca

SEQ ID NO: 425018 - DNA, 201 bp, Homo sapiens
gcaagtttaaagtagtggaatactaaacatttctaatggttcaagcttacttttcccacatatgtataaacgaatgtgtgcaaaattcccagtaaagtgcktaacacacagtaattttaattatgctaagaaaattgttgagggctctatgctagcagtataaataaaaatgctttttctattacaaataaaaatgttttc

SEQ ID NO: 425019 - DNA, 201 bp, Homo sapiens
ttatagttccacatggctggagaggcctcaaaatcatgggagaaggcaaggaggagcaagtcccatcttatgtggatggcagcagggaaagagagaacatktgcagagaaactcccatctttaaaaccatcagttctcgtgagacccattcactaacatgagaacaacacaggaaagacccacccccgtgattcaatcatc

SEQ ID NO: 425020 - DNA, 201 bp, Homo sapiens
attccctttttggtcaggttcttacttaggtgagagtatgaccaaaacgtagggccttagcaccactctcagttaccatcattttgggtttccagtcttgrcattttattataggttatggtgtcctcatggttacacatttctttcagctcttgccattccatttgaagagagaccatttgactttctagagatggctgc

SEQ ID NO: 425021 - DNA, 201 bp, Homo sapiens
ccttcccctcccccttcccctagaggagggaccagtgggagtggagatactctttcttccccagagaagaaagaaaagggggggttgtgtgaggttcaacmcttgaaattagtggaaggctcaacccctcaaaccagggatgtcttgccttgccttccctggaagtctcaatccctcaaaccaggggtgtcttgccttacc

SEQ ID NO: 425022 - DNA, 201 bp, Homo sapiens
tacataagaaatatgatgatcttaaggagcattggttagtaatagaaacgtataaaaatcagccacgaagttgaagaattgttgttgttgttgttgttgttttgtttgagatggagtctcgctctgtcacccaggctggagtgcagtggcgcgatctcggctcactgcaggctccgccccgggttcacaccattctcctgc

SEQ ID NO: 425023 - DNA, 201 bp, Homo sapiens
gtgaaaaaacaatatctatcatcatgaaagcacatgaaagtataaaacttactgttagagcagtcacaaaaatgagaaagaaaaagaactaaaatattacrcctgcagaaaaccaccaagtggcagtgctaaataatgagagagaaagaaaggaacaaaagatatacataactagaaaacaattaagaaaatgacaggaat

SEQ ID NO: 425024 - DNA, 201 bp, Homo sapiens
atacataagaaatatgatgatcttaaggagcattggttagtaatagaaacgtataaaaatcagccacgaagttgaagaattgttgttgttgttgttgttgttttgtttgagatggagtctcgctctgtcacccaggctggagtgcagtggcgcgatctcggctcactgcaggctccgccccgggttcacaccattctcctg

SEQ ID NO: 425025 - DNA, 201 bp, Homo sapiens
agtcttttctttaagaactagaacaagacaaggttgcctacctttagcactcttattcagcataataatggaagtcctacacacaacaattgggcaaaatrtataaataaaaagcagccagattggaaaagagaaagtcaagttgtccctctttgcagatgacaggatctcatattcagaaaaacctgaagattccaccaa

SEQ ID NO: 425026 - DNA, 201 bp, Homo sapiens
actttatctatttctttgctcaaagtaagtcttaaaagttggaaggaattttaatatttgaagtcttaggctgtaacaaatttgctggaagtaatcaattygttcaggtttgctaagtgaaatccttaacttcactgagaagaaaaaagactcttcttccccagcaatatatacaatgcagttttactgctaatgaatgta

SEQ ID NO: 425027 - DNA, 201 bp, Homo sapiens
catacataagaaatatgatgatcttaaggagcattggttagtaatagaaacgtataaaaatcagccacgaagttgaagaattgttgttgttgttgttgttgttttgtttgagatggagtctcgctctgtcacccaggctggagtgcagtggcgcgatctcggctcactgcaggctccgccccgggttcacaccattctcct

SEQ ID NO: 425028 - DNA, 201 bp, Homo sapiens
ttttttggttaggattgagaaacagaaaaacctgcgctcctagtaaatatttggctagagagtaataagagaaaaaattatgaagaagcattatacttcayatattatcaatatatttatgaagaaaaatactcatgtgagacggttacaagtataggtgaaggtacaattgttactccctgtcaaaaagagagatgcagg

SEQ ID NO: 425029 - DNA, 201 bp, Homo sapiens
taataagagaaaaaattatgaagaagcattatacttcatatattatcaatatatttatgaagaaaaatactcatgtgagacggttacaagtataggtgaasgtacaattgttactccctgtcaaaaagagagatgcagggacggtctaggaaatagtttcattttctaggatctcatatctgtgctacattcaataggaaa

SEQ ID NO: 425030 - DNA, 201 bp, Homo sapiens
tatatataagtttttatttatttttagtttttggagaaaatattactgggtaaaaaccttaaatatatttatatatgttataatgcagaaaggatttaaawaaatgtaatatatctttcttaatttgaagaaggcaagtctctggggcataaggcaatacagttatatggttaaatagtatggaaccgtggttctcaagct

SEQ ID NO: 425031 - DNA, 201 bp, Homo sapiens
gcataaagtctgcaaaacgttgggaagggagcaggatgtgtttagttttggataagtttgaaatatcagtgaagcatcaggtacgtgaggaacaggtaaaytgagattgtagatgaagagtagacttgtagattgggaataattcatacacaggtgtgataattggagccatgaaaaggaatgaaatcactgagggaaaga

SEQ ID NO: 425032 - DNA, 201 bp, Homo sapiens
ttaggtatgtagttatttatatccatatctgtctcccgagtacctcaagagttgcttgaacgttactgagtagatcacaagctacttgagagcaaggactstatagtatactaggatgcattggaatctgatgaccatctcttacggaagaggctgggaaatcaactgtaggcctgcttcagtggtccacgctgggtttca

SEQ ID NO: 425033 - DNA, 201 bp, Homo sapiens
tcaatttaatctttcatcctccttttacatacgaggaaatatatatttagagaggctaagtgagttggcaaaagctacctatctcttaacagaccatgacycaaaacactgtctcctttccattgcaccacactgcctcccactgacagttaacttggaatgattaaagcaagccaggtacctacaggtagcccttggcac

SEQ ID NO: 425034 - DNA, 201 bp, Homo sapiens
tttgcctcccagctcttctacattgagaagcagatgatagccagtctacttatgcccctgagcttctgttttctcattaaaaaaaaaaaatgacactatcrcatcaactttttttgggtcaaatccgtgagaacacgtatatgaagaataagcacttgttaaaaatgagttaatttgaagaatattagtgtttcctaaata

SEQ ID NO: 425035 - DNA, 201 bp, Homo sapiens
aaatatttttccttaaaaatggaaccattcgtgatcctatatgaacacaggagatgattagtagacatcagagaagcatggccatcactcatgcccttagytgacttaccatccagctaacactgttagccagcaaggtggtctgagagctttacagttctagacggctcttatttttagtctcaaattgtttattgtata

SEQ ID NO: 425036 - DNA, 201 bp, Homo sapiens
tttagtttttgctaccgtatgtgaaaaaaattgacaaagtatattagattggtcttgctatgttggaatttctgaactgccttttcagtacagtttgccckggacatacgtaacctaacagcagatgtaccacaatctctagaatcatgcttgtttgcctcccagctcttctacattgagaagcagatgatagccagtcta

SEQ ID NO: 425037 - DNA, 201 bp, Homo sapiens
tgatgccaagatgttatcagcaaatggatttcacatgcagaagaacccaacaaataatacatctcctctgaagacacgttttataggtgttttaccacatrggacatacttgattgcttcactcattcttcatgactagtagcagtggtcttggggtcaattggacattgatactcacaagacccagtataccatagtgga

SEQ ID NO: 425038 - DNA, 201 bp, Homo sapiens
gtaattcactatgggtaatgcacttttttgtatttttaaaagaccatttgctggtggcagaatccgtaactcgatatacaatatgcaaaacaatgtacacttttttttttttttgagacatagtctcactgtgtcacccaggttggagtgcagtggcacgatctcagctccctgcaacctcgactcctgggttcaagtgat

SEQ ID NO: 425039 - DNA, 201 bp, Homo sapiens
gggacatacttgattgcttcactcattcttcatgactagtagcagtggtcttggggtcaattggacattgatactcacaagacccagtataccatagtggwccgtactgtgcatcagcctttctgcttttttgaaaacccaacatgtcagtgttaggtatattgttccagatgatagctcaggtctagtggaaaatgacac

SEQ ID NO: 425040 - DNA, 201 bp, Homo sapiens
caatggagatagggctagaaatacttttgccaaatagcattcttattcactttatgccggtatttagaaaaaataaattatagcaagtatgatttctaagwatgtttttctataaattactaattgtaaaaagtcttgctttttaaaacaagttggtaatgcatatcatggaaggcatattttgtatgtataaattcacca

SEQ ID NO: 425041 - DNA, 201 bp, Homo sapiens
gaggaactcacagcctgtgtaagcaggttaattacgctgtaatagtaacttctgccacgtaagtttgcacaaactacagaatgtggaatgggtggcaggarggaataggggtccaaggaaagctttctagaggatctactacctgagtttggttttaacagagaaagagtgcattgctctgattacttcctgtgttcagat

SEQ ID NO: 425042 - DNA, 201 bp, Homo sapiens
aaagatacagctaaggttttgattttcctttgctatatgtaatgacaattgtcatctttctttgatttttctttgtctgctctataattaaatgaacttaygttaggtatgtagttatttatatccatatctgtctcccgagtacctcaagagttgcttgaacgttactgagtagatcacaagctacttgagagcaaggac

SEQ ID NO: 425043 - DNA, 201 bp, Homo sapiens
ttcgtggatcaatacttatttgtatgcatgcttagggaaatcactcgtctttgactaaaatatcaaattttattttactgtgtaagatttcttgattgccsatttagtgttaatgtcatgatatcctacctaagacatcagctgctcaattaaataatcgttaatagaggcccactatgcatcaggcactgctgcgtacag

SEQ ID NO: 425044 - DNA, 201 bp, Homo sapiens
tactaaaattatgttgtgaaggaaagatacagctaaggttttgattttcctttgctatatgtaatgacaattgtcatctttctttgatttttctttgtctkctctataattaaatgaacttacgttaggtatgtagttatttatatccatatctgtctcccgagtacctcaagagttgcttgaacgttactgagtagatca

SEQ ID NO: 425045 - DNA, 201 bp, Homo sapiens
tctctaagtaatcaaccttgatgaaatccagagactactaaaattatgttgtgaaggaaagatacagctaaggttttgattttcctttgctatatgtaatracaattgtcatctttctttgatttttctttgtctgctctataattaaatgaacttacgttaggtatgtagttatttatatccatatctgtctcccgagta

SEQ ID NO: 425046 - DNA, 201 bp, Homo sapiens
ccaaatagcattcttattcactttatgccggtatttagaaaaaataaattatagcaagtatgatttctaagaatgtttttctataaattactaattgtaamaagtcttgctttttaaaacaagttggtaatgcatatcatggaaggcatattttgtatgtataaattcaccacaattaaagattattcttgtcagtccttg

SEQ ID NO: 425047 - DNA, 201 bp, Homo sapiens
tttgtgtaatattatgtcagctttaacatataatattttgaatattttagctatatttagtggctttctgcaagcaactagaacagagaagtaatgggtcmataatcttgaccttaatttaaaactttcaatggagatagggctagaaatacttttgccaaatagcattcttattcactttatgccggtatttagaaaaaa

SEQ ID NO: 425048 - DNA, 201 bp, Homo sapiens
aggatggacttaaagatctttaaagaaataatagtgcctttatgacttaggactttttaattgtatttgaaattgtttagccttttgccaaattgtttttyggaaattcattgtaattcactatgggtaatgcacttttttgtatttttaaaagaccatttgctggtggcagaatccgtaactcgatatacaatatgcaaa

SEQ ID NO: 425049 - DNA, 201 bp, Homo sapiens
ttctctgctgggatgtggatgtcggcattgacacacgaactccctttccactttttacagtcttcacttgaacctgcacattttttttaaatgtatgaacrgtttttatttttaaacaagctgttcccaaaattatcaatctaggatggacttaaagatctttaaagaaataatagtgcctttatgacttaggacttttta

SEQ ID NO: 425050 - DNA, 201 bp, Homo sapiens
catacagatttaaatcctagttaaagatgctgtctgaaccatccagttattatccagcatctccataggcagttactgttcatttgtcccataggactatkaatacacactttttcattattgatggcatgtgggtaaccattagggaaatagataattcattctgtggtgtctccaacaccttgatagcagctatttgtg

SEQ ID NO: 425051 - DNA, 201 bp, Homo sapiens
tctatttgccaagattttcaagcatgaaaaagctactaagtagctgcctggtataatttttgagctatctgctcatacagatttaaatcctagttaaagaygctgtctgaaccatccagttattatccagcatctccataggcagttactgttcatttgtcccataggactattaatacacactttttcattattgatggc

SEQ ID NO: 425052 - DNA, 201 bp, Homo sapiens
ggactctcagatcaattaattccaccagtaatgatgaaacaactttatgaactctccccatctcggactaagagattagccatttttccagatgggactcmcaatgacacatggcagtgccaaggctatttcactgcacttgaacagttcatcaaagaagtcgtaaagagccattctcctgaagaaatggcaaaaacttca

SEQ ID NO: 425053 - DNA, 201 bp, Homo sapiens
atctttctaatgtattgttgaatttggtttgctagtattttttttgaggatttttgcatcaatcttcatcagagatactgtgctgtagtttttttgtttgttttttgttttttttgatgtgtctttgtctgattttggtatcagggtaatactggacttgtagaatgagtttggaagtattccctccttctctgctttttg

SEQ ID NO: 425054 - DNA, 201 bp, Homo sapiens
ttctaatgtattgttgaatttggtttgctagtattttttttgaggatttttgcatcaatcttcatcagagatactgtgctgtagtttttttgtttgttttktgttttttttgatgtgtctttgtctgattttggtatcagggtaatactggacttgtagaatgagtttggaagtattccctccttctctgctttttggaat

SEQ ID NO: 425055 - DNA, 201 bp, Homo sapiens
ctaatgtattgttgaatttggtttgctagtattttttttgaggatttttgcatcaatcttcatcagagatactgtgctgtagtttttttgtttgttttttgttttttttgatgtgtctttgtctgattttggtatcagggtaatactggacttgtagaatgagtttggaagtattccctccttctctgctttttggaatag

SEQ ID NO: 425056 - DNA, 201 bp, Homo sapiens
actgttttccatgcaccattttgtagtcctatcaacattgtgcaagggttccaatttctccacatcttctccaacacttgttagattttgttttgttttgtttttttgataatggccgtcctaacagatgtaaagtgatatctcattgtggttttgatttgcatttccctgatgattagtgatgttgaccatgttttcaca

SEQ ID NO: 425057 - DNA, 201 bp, Homo sapiens
gatgtccattactctttctagatttgtgaagttttcagccactatttccttaaataagctttcagctcctttttttcttctcccgagacacccataatgcrcacattggtttgcttgttggtgtactgtaagtgtcttaggctttcttaactcttcttctttctttgttcttttttctttttggactgggtaatttcacat

SEQ ID NO: 425058 - DNA, 201 bp, Homo sapiens
atgagtgctttagttactgttttctttgaaaaagaacattgctagtacacgatttgggttctgctcagctgattactgtcattactagagcttttacaaatgttgttctggtcagctttaatccttttttgctaagaagaagaatgcaaataatatattttcatatttaagatacacaaaaccatatttaatttccaggtt

SEQ ID NO: 425059 - DNA, 201 bp, Homo sapiens
tagtgattaaactgtagagtactgctagttaagctgtgttgttactattcactttccagattatgcccactatttctggaatcaaacttagtaccctaagkaaagggacctgaaagaagaatctgtggggtgtaggcttcccttgagacccagatagcagtggtagaatgtggcaggagatgtgaatcagaagactcacaa

SEQ ID NO: 425060 - DNA, 201 bp, Homo sapiens
tgagtgctttagttactgttttctttgaaaaagaacattgctagtacacgatttgggttctgctcagctgattactgtcattactagagcttttacaaatgttgttctggtcagctttaatccttttttgctaagaagaagaatgcaaataatatattttcatatttaagatacacaaaaccatatttaatttccaggtta

SEQ ID NO: 425061 - DNA, 201 bp, Homo sapiens
tgctacagatattcaaaggttgcttacatatatttcatttgctgggctttctgaattaaaatcctaattctaaaagacttcatattaaatagcagtagtaratctaagacttgatgtttgtatggagcctgcagcacaccaagagacttgtcatccatcaatgtactccttagaaagtgtaaatgtggacgttatggttga

SEQ ID NO: 425062 - DNA, 201 bp, Homo sapiens
tgcccagatatttgatttgtgagctgtacgtttcaccttttcatctttgatctactaaaaactggtttcttagttgtgaggtgtcacaggcaggttgatgygggtagtagtccttgtctttggaatctgaatatttatactcctgctctaagctgttctaagacttggggttatgcctttaaatcattttcaagcattggc

SEQ ID NO: 425063 - DNA, 201 bp, Homo sapiens
tgtaacgtttaagctctgttgttttggtcctttggtttcttctcttcttgatctgtatttaccaccttatggataatcccacatttgcatctgtggtcatkagtgtgctccttaactccagacctgagtctctgtgggttgcatatggtcactgcacatcccagaagtgtctcaagttcagtaattctggaagtcagctat

SEQ ID NO: 425064 - DNA, 201 bp, Homo sapiens
atattttgctctaccaccaagacttttccagaggtagagaaaccgtagttttttaattaaactgtatttgtatgggttagagcacattgaagctaatcctragttgtttctttggctcacacattacaaatagagtgtctctggggagaaatatgatgctataccatgagagaacatcctgcctcttcagtagatgcataa

SEQ ID NO: 425065 - DNA, 201 bp, Homo sapiens
aacagctgccaggaatcttgtggttgagactggttactaggactagaggaattgtcagcattattggaatgagtgctttagttactgttttctttgaaaamgaacattgctagtacacgatttgggttctgctcagctgattactgtcattactagagcttttacaaatgttgttctggtcagctttaatccttttttgct

SEQ ID NO: 425066 - DNA, 201 bp, Homo sapiens
cctacaggaaaacgacagcacgtgttctttttcactagtagaagtgacgttggtttcatgttgacaactttgaagccatttggaagtgtttcagtggagarcaaaatgaataacaaagcgggctcctttttctggaaccttagacaattcagtacattagtttcaacaagcagaactatgaggctatgttgtttgggactt

SEQ ID NO: 425067 - DNA, 201 bp, Homo sapiens
cctctcagttgatttcagtctcattgttaacaagggcttgtgtccaggcatatttgccccagctgttaagaaacactcctctgtaccttcatctcaccagytattcactatcaggcaagtagcatgtgctttcagggctgtgctcaaatcttcttcccttattccatcttttccacttattcaaattctcctcccaaaagc

SEQ ID NO: 425068 - DNA, 201 bp, Homo sapiens
agagaaagatgattgttccttttcatggaaatattctgtttcaggatatattctgttgatcaggacagttgaattgctgcttagattttttgagatctaawaaattactattagcatactgtaattattatagagttttccctcaattttctctttttaaggttctttttatcctcattttatttgaaaaccttggctttc

SEQ ID NO: 425069 - DNA, 201 bp, Homo sapiens
aggcaggaggaccacttgaacctgggaggtggaggttgcagtaagctgagattgtgccactgtactccagcctgggcaataaagatcaaaactctgtctcaaaaaaaaaaaaaaaaaaaaagggttgtatggtacttttgttagatatttagcatgatttccgtgtttatactttgttcttgttagatttcaaataataaa

SEQ ID NO: 425070 - DNA, 201 bp, Homo sapiens
agatgattgttccttttcatggaaatattctgtttcaggatatattctgttgatcaggacagttgaattgctgcttagattttttgagatctaaaaaattmctattagcatactgtaattattatagagttttccctcaattttctctttttaaggttctttttatcctcattttatttgaaaaccttggctttcgacctg

SEQ ID NO: 425071 - DNA, 201 bp, Homo sapiens
agcactgcaggtagagatatttcatgggttataataagagaaacacagatgagatgtagatggtaaggagtcttactgttgttggggtccttcctttctcyttcttttttcccccttacccctcccacaatttcatgaagtcttttaaattaaatatatagctgaattgtgttgtgaatcagacctgaggactattttttc

SEQ ID NO: 425072 - DNA, 201 bp, Homo sapiens
gccactcatttggtcctgcgcataatgtaagatgtaaacattccaagtcttctattattatactttagtattggaaatggattacgtgtggactattgagwttaagatgactcctttctcttagtgggctactatttaagactttgttttttatattgctgattatatatattctaaggaagattttctcaagaaagcagt

SEQ ID NO: 425073 - DNA, 201 bp, Homo sapiens
ttgtatagtggaatatctgcagaggccaagtaaaagaagtgaaggactaagacaggaatatcaaggattgtggtcggtggagagctcaacttggaaatctycagagaacaagaatgcagcaagactaaatagtaatatcaataactgttcttgttttgtttatttttgttttcagagtagctgtgctatgtgtttccagat

SEQ ID NO: 425074 - DNA, 201 bp, Homo sapiens
aatgggttgacgtgctcaaatttgtattttagatcactgaatgagtggaagatgtattggaagaaggttaaaattggatggagggagccatttttagtctraagcaagaatgtcagtgtcctgtttaatgtcactgaaatggtgccaaatgtaaggaaggaaggattagcttgttaatcatttatgttttaagagtgtaca

SEQ ID NO: 425075 - DNA, 201 bp, Homo sapiens
taataaaataacagttgttctcagcataaagtcatgagaagtgaagaatgtgagcattcctttaaaaacataaaatttgtcttataacagccagagtatasgtgaaggcagtaaggatataaatgtcttttttttttctttttttctcccagtaaacttagtatttccaaagtgccaggaacaatgaaaaaacaaattaca

SEQ ID NO: 425076 - DNA, 201 bp, Homo sapiens
agccgcgaacatatgctttttgacctttgagggaatccgtaagatctcgtgagaagcgcagcttctcggggaagctgtcatggctgctcctgtacgtagtyacggtcttgtgctctaaggtgagtggaggacgagcttgggcttagcggcagcccgtatcacatcctagactttttacttcgaggagaagagtctcacgag

SEQ ID NO: 425077 - DNA, 201 bp, Homo sapiens
tgacacatggttagctctcaatatattttagctactgctattatcattattggtagtactattaaacattttgaaacagaaaatcacttggggctggtcayggtggcacacgcctgtaatcctagcatgtggagaggccgaggcaggtggatcactggagctcaggagttcaagaccagcctgaccaaatggtaaaatcct

SEQ ID NO: 425078 - DNA, 201 bp, Homo sapiens
gttggccatttgtatgtcttctttggagaaatatttaagtcctttgcctatttttaaatcatattattatttttgctattcagttacagtatgttataatrtgtaaacatactacaaatatatatataatatatatattatgggatgcagaaaaagcaatcctgacaagaaaacttaaagcattaagttttatataaactt

SEQ ID NO: 425079 - DNA, 201 bp, Homo sapiens
attttcacttataggtatgaatattaaatatagaaattttggggttatgtcttacatgttagaatctaggaagtatttaagtttgggaatgcgagaagttsaagattgagttggtcattttgaaaaccttcagaaaaggcatatttaaaagtaattttcagatatgttgtatgaaaagcatgtaggaagagatttattttt

SEQ ID NO: 425080 - DNA, 201 bp, Homo sapiens
ctgacctttttagatactttatataagtggagtcatgcggtatttgtccttctatgactagcttatttcagttagcataatgcccttcaagttgatccacrttgtagcatgtgatgagatttccttctaaggctgaataatattccattatatgtatatatcacattttctttatccattcatctgctgatggatgtttag

SEQ ID NO: 425081 - DNA, 201 bp, Homo sapiens
taaattttaaagtgtgcagtacaatattgctgactttattattaatgatatagttaacaatattgtacagtggatctctaggacttaatcatcttgcatarctgaaactttatacctgttgaatagcaactcccctatttccccctttcctcacccctgacaatcaacattgtaatctctgtttctatgactgaccttttt

SEQ ID NO: 425082 - DNA, 201 bp, Homo sapiens
atatgttgtatgatactctcttttcatgctgagcagtggcagcaagtcgcagctcccaatcagctgtgcaatcatgagggtaaacaatgcatattgtattcaataaattacttgagatattcaacacttttattataatataggctttttgttaactcattttgcccaactataggtgaatgtaagtgttctaagcgtgtt

SEQ ID NO: 425083 - DNA, 201 bp, Homo sapiens
tcagtagaaaccatactttgaattttgaattttgttgttttgctgggttagtgatatgttgtatgatactctcttttcatgctgagcagtggcagcaagtygcagctcccaatcagctgtgcaatcatgagggtaaacaatgcatattgtattcaataaattacttgagatattcaacacttttattataatataggcttt

SEQ ID NO: 425084 - DNA, 201 bp, Homo sapiens
agaattgatatgtatatttaattcagaatagttattcggggactatgtgagggttgacgttgacccagcttgaaaagggatttataaaattgatataaatkatctaatgtcatagattagtgagagtaaaacttaactccctttgacattgactatgcataggatatgttactataatctcctgacataatttgttcttta

SEQ ID NO: 425085 - DNA, 201 bp, Homo sapiens
gggtggggtaaaaggattgcttgaacctgggaagttgctgcagtgagctgagatcacactactgcactccagcctggatgacagagcgagaccacatctcaaaaaaaaaaaaaaaaaggaaaagaaaagaaaaagaaagtcacttggaggaatgtttgaaaaattaatatcaattctttcctttcagattttgaaatcaga

SEQ ID NO: 425086 - DNA, 201 bp, Homo sapiens
taccatatgactctgaatggggtcttagttggagcagtgttagttgaaatttgcagagcaggtgttgctgtggaaagggctgataatggtgaagtcaaagratagtgcttcaaagcagcaaacctacagacccttctttaatgacaagtcctacatgtagaaaaaaataaggaatgcatcattattccttttatttatact

SEQ ID NO: 425087 - DNA, 201 bp, Homo sapiens
caactgttttagaggcaatggaaccatgcaagaatgttcatgttctacgaacgggattcaggtgagaactctcttatgctttcttcatgtggttttctttrttcctcatatatctggaataaaaaaattgagatgaaaactaaactcctttcttgaggggaggaggggttggggaggctttgttggtagttacagtctttc

SEQ ID NO: 425088 - DNA, 201 bp, Homo sapiens
cagaatggacactaacaggaatcaagtgctaccactttctgatgtggatacaacttctgctacagatattcaaaggttgcttacatatatttcatttgctrggctttctgaattaaaatcctaattctaaaagacttcatattaaatagcagtagtaaatctaagacttgatgtttgtatggagcctgcagcacaccaaga

SEQ ID NO: 425089 - DNA, 201 bp, Homo sapiens
aggcgtggtggtacatgcctgtaggtggtgcatgcctgtaatcccagctacatgggcggctgaggcaggaggatcacttgagcctgggaggttgaggctcyaacctgggtgacagcacaagaccctgtctcaataaaaataaaagtttaatttattttgtcacagatagtaaattaaattaaaatttgttttttctttaga

SEQ ID NO: 425090 - DNA, 201 bp, Homo sapiens
gatgaaagccttgagggaattagacagattttctgttttgaatagccaacacatgtttgaagtactagctgccatgaatcaccgatctcttatactcctgratgaatgcagtaaggtggtcctaggtaagaggaatttttctttcatcatttgcaatacctgagcttctgttttagactatttttgttttgttttaaaaac

SEQ ID NO: 425091 - DNA, 201 bp, Homo sapiens
atttcacctgtctttagcgtttagtttaagaaaagactagtaatgacagttttccttggctttcgtttgtttgggagtcttgatctacatttttgaaggayggttttgccaagtataggattattggttggcaatttttctttcagcactttgaatacattatcccagtcccttctctggcctgcaaagtttctgctaaga

SEQ ID NO: 425092 - DNA, 201 bp, Homo sapiens
ttcctgtgttttcacattgatgttttgtgttttttcatttcacctgtctttagcgtttagtttaagaaaagactagtaatgacagttttccttggctttcrtttgtttgggagtcttgatctacatttttgaaggacggttttgccaagtataggattattggttggcaatttttctttcagcactttgaatacattatcc

SEQ ID NO: 425093 - DNA, 201 bp, Homo sapiens
tgtccactgaatggacagactcagctcatactgcatttcctgtgtcttccctaattgtcaccgtcagagtccctgtgcttgtcatgtcttacccagtctcyggtgcagccttgacaacaggctgcaccggagactgggtaagacatgacaagttgtgtcacatcatttgttgtgtcagtaagtctgtctctgctcctcagt

SEQ ID NO: 425094 - DNA, 201 bp, Homo sapiens
aatccacttaatgtttagagtaattattgatagagaaggacttactattgccattttgttttctgtcttacagttttttcttctatcttttcctttcttgktatcttcctttgtgacttgttgattcttttgtgagatgtttcaattcctttctgtttttctttggtgtagtctctaaaggtgtttcatttgtggttacca

SEQ ID NO: 425095 - DNA, 201 bp, Homo sapiens
ctctaggttgcgtgctccttatgagaatctaatgccttatgaaacacccccctatgcccagtctggaaaaattgtcttccatgaaaccagtgccaaaaagsttggggaccactgatctatagtgttcttcaagtcctttgttttcttactgattttggtctggatgttctataaattattgaaagtggggttattgaagtc

SEQ ID NO: 425096 - DNA, 201 bp, Homo sapiens
gagtgctttagttactgttttctttgaaaaagaacattgctagtacacgatttgggttctgctcagctgattactgtcattactagagcttttacaaatgttgttctggtcagctttaatccttttttgctaagaagaagaatgcaaataatatattttcatatttaagatacacaaaaccatatttaatttccaggttat

SEQ ID NO: 425097 - DNA, 201 bp, Homo sapiens
ttaacaggattaagtctttcaatccatgaatgcagactgtccttccatttatttgtgtctttaatttctttcatcaatttctttgtagttttcaatatacmagtctttcacttccttaagtttattcctaagtattttatgctttttgatactattataaacaagattgttttcccaatttcctttttggatagtttgtta

SEQ ID NO: 425098 - DNA, 201 bp, Homo sapiens
tttagtttgatatagttctccttgtctgtatttgcttttgttgcctgcacttttggtatcatataaaaaaaatcattgcctaactaagccaatgccatcargcttctcctacacattttcttttaggaattttgtagttttaggtcttatgtttaaatctttaatccattttgagttgatttttgtgtatgttataaaata

SEQ ID NO: 425099 - DNA, 201 bp, Homo sapiens
gagaagcgcagcttctcggggaagctgtcatggctgctcctgtacgtagtcacggtcttgtgctctaaggtgagtggaggacgagcttgggcttagcggcrgcccgtatcacatcctagactttttacttcgaggagaagagtctcacgagttgtcctggaagtaagtttaaaggaggtgggttaatgctgggcggcccag

SEQ ID NO: 425100 - DNA, 201 bp, Homo sapiens
tgaaaatgatctatcagccgggcgcggtgactcacgccttgggaggccgaggcgggtggattacctgaggtcaggagttcaggaccagcctggccaacatrgtgaaactccgtctttacaaaaaatacaaaaattagccgggcgtggtggcatacgcctgtaatcccagctacttgggaggctgagacaggagaattgctt

SEQ ID NO: 425101 - DNA, 201 bp, Homo sapiens
ttcaagtaagtccttcagctacagccgcgaacatatgctttttgacctttgagggaatccgtaagatctcgtgagaagcgcagcttctcggggaagctgtyatggctgctcctgtacgtagtcacggtcttgtgctctaaggtgagtggaggacgagcttgggcttagcggcagcccgtatcacatcctagactttttact

SEQ ID NO: 425102 - DNA, 201 bp, Homo sapiens
ataataagagaaacacagatgagatgtagatggtaaggagtcttactgttgttggggtccttcctttctctttcttttttcccccttacccctcccacaawttcatgaagtcttttaaattaaatatatagctgaattgtgttgtgaatcagacctgaggactattttttcgattatgtgtgttcattctttgttcaaata

SEQ ID NO: 425103 - DNA, 201 bp, Homo sapiens
agtatgcatttatcctgtaggcaatgggaatccgttgaagaattttaagcaatgggttgacgtgctcaaatttgtattttagatcactgaatgagtggaaratgtattggaagaaggttaaaattggatggagggagccatttttagtctaaagcaagaatgtcagtgtcctgtttaatgtcactgaaatggtgccaaatg

SEQ ID NO: 425104 - DNA, 201 bp, Homo sapiens
aggggggatcattacccaggctcccaacttccttgtccacaccatcccctgcccccgcatcccactgcatgttccaaaagcagtcagtactaatttcagamgtgctgccttgctattgcgtatatgatctgttatattcctcccatttcatcataattcctatcgttttcctggccttatcacagcccttcatcctcccca

SEQ ID NO: 425105 - DNA, 201 bp, Homo sapiens
gtatatgatctgttatattcctcccatttcatcataattcctatcgttttcctggccttatcacagcccttcatcctccccaacacttcttcccctacccrtggacctctcagttgatttcagtctcattgttaacaagggcttgtgtccaggcatatttgccccagctgttaagaaacactcctctgtaccttcatctca

SEQ ID NO: 425106 - DNA, 201 bp, Homo sapiens
cagaggattccttgctatgaaaatgcggcatttgaatgcaatgggttttcatgtgatcttggtgagaaaaaaatgcaaatgaaatattctttaattactgrtgtacattctaacagctgccaggaatcttgtggttgagactggttactaggactagaggaattgtcagcattattggaatgagtgctttagttactgttt

SEQ ID NO: 425107 - DNA, 201 bp, Homo sapiens
gatatgtagccttcttaaaagagactatcaaatggaatggtagtttcctttatatttatttctgcatatatattatatgatttagaggccttaagttagcdattttcttccttttgctatggaaatttatgaaagccttccacatttaccatccccagggttgagtagtggtgaagaagctaaagtgaggagagatgcaag

SEQ ID NO: 425108 - DNA, 201 bp, Homo sapiens
ctgtaatcccagcactttgggaggccgaggcaggcggatcacgaggtcgggagatcgagaccatggtgaaagcccgtctctactaaaaatacaaaaattasccgggtgtggtggtgggtgcctgtagtcccagctgcttgggaggctgaggcaggagaatggcgtgaacccaggaggcagagcttgcagtgagctgagatc

SEQ ID NO: 425109 - DNA, 201 bp, Homo sapiens
tgaggcaggagaatggcgtgaacccaggaggcagagcttgcagtgagctgagatcgcgccactgcactccagcctgggcaacagagcgagactctgtctcaaaaaaaaaaaaaaaaaatagtactgatgcggggtaggagagaattgatatgtatatttaattcagaatagttattcggggactatgtgagggttgacgtt

SEQ ID NO: 425110 - DNA, 201 bp, Homo sapiens
cacctcctacttgagcctcttcagaaagctgccagagcaggctgaggatcatgtcccaccagtactgcgtctcctggagaagaggcaagagctggtagatrcagaccaggccctgcaggcccagaaggaggtgagcccccactactgtaacgaggtggtgagctggtggatgggaagtgatggagccaatttattagtgac

SEQ ID NO: 425111 - DNA, 201 bp, Homo sapiens
tgagatgtggggccctgaaacatgcttccttcacccccacctcctacttgagcctcttcagaaagctgccagagcaggctgaggatcatgtcccaccagtrctgcgtctcctggagaagaggcaagagctggtagatgcagaccaggccctgcaggcccagaaggaggtgagcccccactactgtaacgaggtggtgagct

SEQ ID NO: 425112 - DNA, 201 bp, Homo sapiens
aggcttccacaccacgctccacagaacccccagggtctcctaagcttgtgcaaaactccagctggtggaaagaaagctggggcaactgccagaaggatggyggtgccctgggaggaatatttccgactggctttgcaagagaaactgtctacgtgagtgggacgtagagggagggagggctagaaggagggcgggaatgcg

SEQ ID NO: 425113 - DNA, 201 bp, Homo sapiens
gcggagggcggcggaggagaggcaccaggcgggccgtcgggaggtggaggcgctgcgtctgtggacccagctccaggagctacggcgggaacacgcgcggstgcagcgccggcttaagcgcctggagccctgcgcgcgcctgctggagcaagcgctggagctgctgcccggggtgagtccggggcaggaggctgggagctc

SEQ ID NO: 425114 - DNA, 201 bp, Homo sapiens
ggtaagatgaggcctgaaggaagggcagggacactggcattcgagggctggaggagggtgtttgggcttcatccctgggtgatgggagccccggatgggtkgagcagggagcagccacagatcagggacaacaggtggaaggggttaggtgtgaacctgacagcatgggaggacccggacccccgaacccacacagacaac

SEQ ID NO: 425115 - DNA, 201 bp, Homo sapiens
aacagaggaagcttgttctgtgtctccttcatgttcagcagcatggcctcaagtcccaacctcagtatcagcatctgtaaaatggggaggggggttttctyctggaccacggctgggaaagccttgctgattacacattagtcattctttctgctctccctttctcccggggcgctggactccagaaccccactgcctcct

SEQ ID NO: 425116 - DNA, 201 bp, Homo sapiens
aggcgatggaatgttgtgtggtcggttgccaggcaaccagagcctgctggtggctgccttctgggccgagctgagcaggcttccacaccacgctccacagracccccagggtctcctaagcttgtgcaaaactccagctggtggaaagaaagctggggcaactgccagaaggatggcggtgccctgggaggaatatttccg

SEQ ID NO: 425117 - DNA, 201 bp, Homo sapiens
tttccgactggctttgcaagagaaactgtctacgtgagtgggacgtagagggagggagggctagaaggagggcgggaatgcgtgggctggcccatcctttsttcctcacctcctgggtcctggctttgggcagatcatagtgggggttattgtccccacttcacagaggaggaaactgaggatcagagagaaaccgaggca

SEQ ID NO: 425118 - DNA, 201 bp, Homo sapiens
tcccacttttccctccctcttgacggcagaggagtctctctctgtggccaccacagccccaggaccacagcaaatactgcctggctactgccaatattcamtaaaggctcaagggctctgcaatcagtttatgttaaatgctgccaagcctgtgtctctcacttcaggacagcaggctctcctctgtccctgggcaggtcg

SEQ ID NO: 425119 - DNA, 201 bp, Homo sapiens
agaattttgtgactagtatgatgttgcagaaaaaaaaaaagtggaaatagcagaaattcttgtctcattgtgaatctcagggaaaaagcacttaatgtttkgccattatgataatttttatgtaggatattactaaatactgtttttcagtttaggaagttctcttctattcctaatttgcttttttctttccaattttta

SEQ ID NO: 425120 - DNA, 201 bp, Homo sapiens
catgaattttgttttcattttttcctcattgcagaattttgtgactagtatgatgttgcagaaaaaaaaaaagtggaaatagcagaaattcttgtctcatkgtgaatctcagggaaaaagcacttaatgttttgccattatgataatttttatgtaggatattactaaatactgtttttcagtttaggaagttctcttcta

SEQ ID NO: 425121 - DNA, 201 bp, Homo sapiens
tgaggaacatggaggagtacatcaagaaagcattattgccgggcctggaagtaacgcaaaggtgttccactgtacagcttccaaggaggtcatatttcccwatgctcccttcagataaggccgtggaaattgggcaagcaagaattttctgagggtgaaatgagaggctacagaaaacagtaaattcctcatagagagcag

SEQ ID NO: 425122 - DNA, 201 bp, Homo sapiens
ttagattgtcaactccaacacctagagcactgcttggcacataagaggcctccatatttgtgatggtggctgttgaaatgctttgctgtaaggcaaagtcrgcaatataatccagagggcaacagagcgtgatttagattcagaaatgtatttagcctcatgtaaattaatgtgtggaaaagttcataatttcacagacac

SEQ ID NO: 425123 - DNA, 201 bp, Homo sapiens
tagattgtcaactccaacacctagagcactgcttggcacataagaggcctccatatttgtgatggtggctgttgaaatgctttgctgtaaggcaaagtcgrcaatataatccagagggcaacagagcgtgatttagattcagaaatgtatttagcctcatgtaaattaatgtgtggaaaagttcataatttcacagacact

SEQ ID NO: 425124 - DNA, 201 bp, Homo sapiens
tggaaaagttcataatttcacagacacttaaggcctaattttactttcaaaatattccagggaacctccacaaactcccgactgaaaaatgtctgtcttcrtatagtttttagaacatctcaatattctgttttaaaagcaaataccctatacccgcttcagctccaaatccttgtctgatgcttgggttattttagtaac

SEQ ID NO: 425125 - DNA, 201 bp, Homo sapiens
agaccatgtaataacacagtgataaggcagccgtctgcacatcaggaagcaaaacctcactggaaatcagccctactggcatgatcttggacttctagtcyccatgactgaaaggtaaatttcagttatttaagcccctcagtctgtagtatttttgttatggcagtcttcaagattaacacattctttattttaagaagg

SEQ ID NO: 425126 - DNA, 201 bp, Homo sapiens
attaagtgaacttgtgtaatataccagctcatctctatcacacatattatttctttctgtcacttcatttttttcctcctcattcacttccatcagcctaratcttgaaaactgaagcaaggcttattttgctctgtctgctctttttggtctgttctttagaacaggatacttgcttttgaaaactgacacttcagacca

SEQ ID NO: 425127 - DNA, 201 bp, Homo sapiens
gatattgcttttttgtcacagaaaagcaagctggttctagttaacattttcctcctgataactcacctccaacatctgtaaaactgtacaaatattggcckggcgcggtggctcatgcctgtaatcccagcactttaggaggccaaggcgggtggatcacaaggtcaggagatcgagaccaccctacctaacatggtgaaa

SEQ ID NO: 425128 - DNA, 201 bp, Homo sapiens
ttgcttttttgtcacagaaaagcaagctggttctagttaacattttcctcctgataactcacctccaacatctgtaaaactgtacaaatattggccgggcrcggtggctcatgcctgtaatcccagcactttaggaggccaaggcgggtggatcacaaggtcaggagatcgagaccaccctacctaacatggtgaaacccc

SEQ ID NO: 425129 - DNA, 201 bp, Homo sapiens
gaggccaaggcgggtggatcacaaggtcaggagatcgagaccaccctacctaacatggtgaaaccccatctctactaaaaacataaaaaattagccgggcrtggtggtgggtgcctgtagtcccagctactcgggaggctgaggcaggagaatggcgtgaacctgggaggcggagcttgcagtgagccgagatagcgccac

SEQ ID NO: 425130 - DNA, 201 bp, Homo sapiens
ttctcaagaagtgagaaatagcatttcattttgaaaaagaaaaatgtgctattcacctaatgattttcaatttcacctttaagatctgatatcccttcacmaagaataacttccctcacctttgcttttgttaagttttataatcccactatttaatgttttagaatttgggctaaataaaagttgcatttttgagaaact

SEQ ID NO: 425131 - DNA, 201 bp, Homo sapiens
ttctctaaaccttcagctctgctactggtgcctctttgagaagtgtcaaagtggtttccaggtcacctgagcactggatccccatgctgattccattctastaggctaagatagcagtcccataatcatcatttatgaacattaatgtccttgtctagacaggaataattgacctatcattcctaatcccattattcactt

SEQ ID NO: 425132 - DNA, 201 bp, Homo sapiens
tttaacatttaaaaaaactacgaaactgttttccaaaatagctgtatttttcattcccattctcgggacttggtattgtctatttttttccttaatagccrtagcacattgtggttttaatttgtatttccctaatgactaatgatgttaagcatctttttgcttatttacttaccatttgtatattcatatatcatcttt

SEQ ID NO: 425133 - DNA, 201 bp, Homo sapiens
tttgtttgagttcattgtagattctggatattagccctttgtcagatgagtaggttgcgaaaattttctcccattttgtatgttgcctgttcactctgacrgtagtttcttttgttcttgaatttttatcagcaatgttataaaacttcaagatatgagtcttatacatatgttaaattcattcctagttagtttatatgt

SEQ ID NO: 425134 - DNA, 201 bp, Homo sapiens
ggcacaaacttcttaaacacaatctctgatgaccaaacatttactgagcaatatgctaggctggcacaggtatgactcctgggaagctagacttaaaaatracatgacagtcacttctggccgtctggaaggctgtgtgtatgctgagaactgtgccctctcagaaataatcagagagggaacttccaagctactagtccc

SEQ ID NO: 425135 - DNA, 201 bp, Homo sapiens
caaagatacttgttctagccacttctatttgaattgttatgaaggttctgccaagggcaattagtcaaggaaaagaaataaaggacatctggatttttttwaaaatgtgaactatctctagtcatggacgacataattttgtatataaaattctgaagaatccactaagaactattagaactaacaaacaagttcaacaag

SEQ ID NO: 425136 - DNA, 201 bp, Homo sapiens
catgctctactgcaactaccaaaccctctgtgctctgcaaagaggggagtcctgttcatgctagctgtccaagcagctctctctgcaagctgaaatgactstgggggtcgtgaggtcttctgcagctaggattccaaaagtccatggtgagaggtggctcctccttgcctattaactcactttttacccaggacctgctgg

SEQ ID NO: 425137 - DNA, 201 bp, Homo sapiens
taatttttgtataaggtgtaaggaagggatcgagtttcagctttctacatatggctacccaagttttcccagcaccatttgttaaatagggaatcttttcyccatttcttgtttttgtcaggtttgtcaaagatcagatagttgtagatgtgtggtattatttctgagggctctgttctgttccattggtctatatctctg

SEQ ID NO: 425138 - DNA, 201 bp, Homo sapiens
gtcagctgtgattgtgccactgcactccagcctaggcaacagggtgagaccctgtctcaaaaataaatgaaaagggctgggcatggtggctcatgcctgtmatcccagcactttgggaggccgaggcgggcggatcacgaagtcaggagatcaagaccatcctggctaacacggtgaaaccccatctctactaaaaataca

SEQ ID NO: 425139 - DNA, 201 bp, Homo sapiens
atccatatattgaaattctactcagcaatgaaaaggagtgagcaatggatacatgcaataacaagggtgaatctcaaacacattatgttttaagagcacayagtgtatgattccctttatataaaattctagaagaggaaaaatccaggtattttgacagaaaacagttaagtggttaagtaggttaaccacaaatagtta

SEQ ID NO: 425140 - DNA, 201 bp, Homo sapiens
gaaatggtaggtcaactttacagaattttgtgagcttttattatttcataaaaagtaggccagtgacaccatgaagatatgttctttgagctgttcctacrttggtaacagtggcattacacaattccacatactctgccagcctctttgttgcttgtgatacaaaattgtaactagtgatgaaccaaggattaaggtagt

SEQ ID NO: 425141 - DNA, 201 bp, Homo sapiens
gatgttggtgaggatctgcttggtgatgacatcaccatagtctggttgtaacattgcctacagtatagcttggagtgctcttccacagtgcaggcgtccayatcactaatgaaggtcttacaccctatgcattcaggaatggggttgggatgggagagtaggtttggctgctttggggatggggagacccagccctgatag

SEQ ID NO: 425142 - DNA, 201 bp, Homo sapiens
ggcctcataatcatggtagaaggtgaaggagaagcaaaggcatgtcttacatggtggcaggcaaggagaagtgctgagcaaaagggggaaaagccccttayaaaaccatcagatctcgtgaaaactcactcactttcacaagatcagcacaggggaaaaacctggcccatgattcagttaccccccactgggtccctctta

SEQ ID NO: 425143 - DNA, 201 bp, Homo sapiens
acaaaggacatgaactcatccttttttatggctgcatagtattccatggtgtatatgtgccacattttcttaatccagtctatcattgttggacatttgarttggttccaagtctttgctattgtgaatagtgctgcaataaacatacgtgtgcatgtgtctttatagcagcatgatttataatcctttgggtatataccc

SEQ ID NO: 425144 - DNA, 201 bp, Homo sapiens
actagtaggataaagtttctatatttctctggaattaggttagtagaatctgaaataggtttgagctagtagaagagagcatcatggaacttgaagatagrgcagtaaagattattcaatctaaagaaaacagagaaaaaaaagaatgaataaaaataaagagcctcagagaaatgtggaacatcactaaatgtacattaa

SEQ ID NO: 425145 - DNA, 201 bp, Homo sapiens
gtattccatggtgtatatgtgccacattttcttaatccagtctatcattgttggacatttgaattggttccaagtctttgctattgtgaatagtgctgcartaaacatacgtgtgcatgtgtctttatagcagcatgatttataatcctttgggtatatacccagtaatgggatggctgggtcaaatggtatctctagttc

SEQ ID NO: 425146 - DNA, 201 bp, Homo sapiens
acaagatatacccatgtaacgaacttgcacatataccccatgaatctaaaataagttaaaattatgttttaaaaaggaagtgaaatacattcccagttaamaacaagcaaacaaataaaaaaaaccttgagaatttgttggtagcaggtctgctttacaagaaatactgaacaccagaaagtatttctagctcacattgca

SEQ ID NO: 425147 - DNA, 201 bp, Homo sapiens
gaataggaggataaatcatagcctgtaaacttatattaatgaataagaaagcatgactataaatgaattaaacatgtaactaaaggagatagaaaaggacsgaaaggaaaacagaaataaggaattagtaaaggtaaaggtagaagtcaatgaattagaaaactgaaaaatggtaacgctatatgtatatccaaaagatgg

SEQ ID NO: 425148 - DNA, 201 bp, Homo sapiens
tgtctgttggctgcataaatgtcttctttttgagaagtgtctgttcatatcctttgcccactttttgatggggttgtttgattttttttcttgtaaatttrtttctttgtagacgacggatattagccctttgtcagatgagtagattgcaaaaattttctcccattctgtaggttgcctattcactctgatggtagtttc

SEQ ID NO: 425149 - DNA, 201 bp, Homo sapiens
caagaaagcattattgccgggcctggaagtaacgcaaaggtgttccactgtacagcttccaaggaggtcatatttcccaatgctcccttcagataaggccrtggaaattgggcaagcaagaattttctgagggtgaaatgagaggctacagaaaacagtaaattcctcatagagagcagttccaaggtataattgagaaat

SEQ ID NO: 425150 - DNA, 201 bp, Homo sapiens
gcctccagctttgttctttttgcttaagattgtcttggcaatgtgggctcttttttggttccatatgaactttaaagtagttttttccaattctgtgaagraagtcattggtagcttgatggggatggcattgaatctgtaaattaccttgggcagtatggccattttcaagatattgattcttcctatccttgagcatgg

SEQ ID NO: 425151 - DNA, 201 bp, Homo sapiens
tgtaagtgtaaatggagcttacacataagtgtaaagggagttcctaaagaaggaagctgaagtattggaacagaacacacattaagaatttctgaagacamtttataaacaaaaacattcaatctacagactaaaagggcgtaccaaatttcaaagaaagttgatacagaatggccatggtaggaactgctggctgtatcc

SEQ ID NO: 425152 - DNA, 201 bp, Homo sapiens
agatattgattcttcctatccttgagcatggaatgttcttccatttgtttgtgtcctcttttatttcattaagcagtggtttgcagttctccttgaagagrcccttcacatcccttgtaagttggattcctaggtattttattctctttgaagcaattatgaatgggagttcactcatgatttggctctctgtttgtctat

SEQ ID NO: 425153 - DNA, 201 bp, Homo sapiens
cagttttcaaagggaatgcttccagtttttgcccattcagtatgacattggctgtgggtttatcataaatagctcttattattttgagatatatcccatcratacctagtttattaagggtttttagcatgaagggctgttgaattttgtcaaaggccttttctgcctctattgagataatcatgtgttttttgtctttag

SEQ ID NO: 425154 - DNA, 201 bp, Homo sapiens
tgacctagactgcctttcaaatttatttaggacaccagagcactttagcatgcattggaagggcttgctggaaatcggattctgaccactgggatagattrtttgcctctgtctaggactggtctaaatgctctctttgtgggtgcccgctgaattctgtcctgtgttgttttccactgtggcaacattgaatcaatcagg

SEQ ID NO: 425155 - DNA, 201 bp, Homo sapiens
ttcagtatgacattggctgtgggtttatcataaatagctcttattattttgagatatatcccatcgatacctagtttattaagggtttttagcatgaaggrctgttgaattttgtcaaaggccttttctgcctctattgagataatcatgtgttttttgtctttagttctgtttatatgatggattacgtttattgattcg

SEQ ID NO: 425156 - DNA, 201 bp, Homo sapiens
tacatttgctgaggagtgctttactttcaattatgtggtcaattttggaataagtgcaatgtggtgctgagaagaatgtatattctgttgacttggggtgragagttctgtagaagtctattaggtctgctttgtgaagagctgagttcaattcctggatatccttgttaactttctgtctcgtggatctgtctaatgttg

SEQ ID NO: 425157 - DNA, 201 bp, Homo sapiens
cacccagttcaagattcctggctgttttgtttacctactcaagcctcagcaatggtaggcgcccctcccccagcctcgctgccgccttgcagttcgatctmggactgctgtgctagcagtgagccaggctctgtgggcatggaaccctccaagccatgtgtgggatataatctcctggtgtgccgtttgctaagactgttg

SEQ ID NO: 425158 - DNA, 201 bp, Homo sapiens
ctcccccagcctcgctgccgccttgcagttcgatctaggactgctgtgctagcagtgagccaggctctgtgggcatggaaccctccaagccatgtgtgggrtataatctcctggtgtgccgtttgctaagactgttggaaaagtgcagtattagggtgggagtgtcccgattttccaggtaccatgtgtcacggcttccct

SEQ ID NO: 425159 - DNA, 201 bp, Homo sapiens
aaaaacagtcattttctcaaaagttacctccagtgctttctctttgatttaaagaagggcagttgacaagatctaagcaggtttttaaaatgagaagattraatacgttgtggtaataactatatatgcacatattgatacatgcatatatatgtgttacaaggaaatgaaaaaatctgttagcaaagatatttatcacat

SEQ ID NO: 425160 - DNA, 201 bp, Homo sapiens
ggtagtggccaccgggaagcacccgcattgggcatttgaggctgcactatgagcaggtgccaccaggaagggaccccaggaaaggtgggcagacaggggarcactcagattagactggctttatcccacaggtaagacacccctactctgtccagacccaactgtcaacagaagccaaagccatctggaggagcatggtaa

SEQ ID NO: 425161 - DNA, 201 bp, Homo sapiens
cacattggacataaagatgaaaacaatagacactggggacaaccagagagaggacaaaagaagggggtaaaatctgaaaaactacttatcgggtactatgytcactacctgtgtgataggatcatttataccccaaacctcagcattacaagatatacccatgtaacgaacttgcacatataccccatgaatctaaaataa

SEQ ID NO: 425162 - DNA, 201 bp, Homo sapiens
tctaatttcatttcctatttttttctcttgattatgggtcatatggacatgactctttcacatccctggtgactttggattgaatgaatgttggacattgwatattaaaaacaggagatgtattcatctgttctcacactgctaataaagacataccccggactggataatttataaaggaaagaggtttaaatagcttac

SEQ ID NO: 425163 - DNA, 201 bp, Homo sapiens
attacatatattttttggtatggacatctttatttttcttggtaaataaaaaggcaagttttatatgtcgagttggccacatgcacagtgcccagctattwggtcaaatgttattctgagtgtttctgtgtgggtgtatttggatgagattaatatttatataagcagattgagtacagcaaattgccctccctaatgtgg

SEQ ID NO: 425164 - DNA, 201 bp, Homo sapiens
caaagctccaataatggacttggaattaaagatctgtgatatgtccaacaaggaattcagaataatccttttaaatgccattcaactgtttttaaaaactstgttgactcccccaccaacctgtcttgcaagcctacctctgtggtctgacttgctgatgttaggccccggagagatggtcaaggttagattatgtggggg

SEQ ID NO: 425165 - DNA, 201 bp, Homo sapiens
ctaaaaccaccaaagaacacctgcaaaagctggaaggggtggctgtctccttaaatgcacaggtatcaatgtaaagacacaaaaattatgaaaactcaggraaatatgacactgcctaaagaaaccaacaaagctccaataatggacttggaattaaagatctgtgatatgtccaacaaggaattcagaataatcctttta

SEQ ID NO: 425166 - DNA, 201 bp, Homo sapiens
acaaaaaccattgcatgaaaagtgactggatttgtacatagcgtcaggagatgtgcgtagtgtcaaagtatctcatcacacattacttgataattacaaaygagaaaaatgaaccttcacagtggcaagacttgacttctacctctttcaaaaagtgagtgaatttactatcactaataattagattatattatgttatgt

SEQ ID NO: 425167 - DNA, 201 bp, Homo sapiens
ggaataggaaaaagtagacagtgaacaaaaaggaaaaattcagagacctagtgtgttagtcagggttcttttagagggacagaactaataggatggatagwtagatagatagatagatagatagatagatagatagatagatagatagagatagatgatagatagataaatgggagcttattaaatattaactgacatgat

SEQ ID NO: 425168 - DNA, 201 bp, Homo sapiens
catagcgtcaggagatgtgcgtagtgtcaaagtatctcatcacacattacttgataattacaaatgagaaaaatgaaccttcacagtggcaagacttgacktctacctctttcaaaaagtgagtgaatttactatcactaataattagattatattatgttatgtcccctgatatgatacaatatggtgtacacactccat

SEQ ID NO: 425169 - DNA, 201 bp, Homo sapiens
ggaaaaagtagacagtgaacaaaaaggaaaaattcagagacctagtgtgttagtcagggttcttttagagggacagaactaataggatggatagatagatrgatagatagatagatagatagatagatagatagatagatagagatagatgatagatagataaatgggagcttattaaatattaactgacatgatcacaag

SEQ ID NO: 425170 - DNA, 201 bp, Homo sapiens
aggagaaagttcaaattttagggactaaagaaacctaacaaagcagtttattataaacctcgattataatagtttactatattgttagctattaatagttyattatttttactttaaagtgcagggaaagatctccgttgttcctctccaaagtccaatctctccaactccagagaatgttttgtaaataatttatgtaat

SEQ ID NO: 425171 - DNA, 201 bp, Homo sapiens
gacagtgaacaaaaaggaaaaattcagagacctagtgtgttagtcagggttcttttagagggacagaactaataggatggatagatagatagatagatagatagatagatagatagatagatagatagatagagatagatgatagatagataaatgggagcttattaaatattaactgacatgatcacaaggctccacaac

SEQ ID NO: 425172 - DNA, 201 bp, Homo sapiens
ggaccaggcacagtggcttacacctataatcccagcactttgggaggccaaggtgaaaggattgtttgagcccaggaattcaagtccaggctaggcaacakagaaagtccctgtctctatacaaaaaataaaaagtttagccaggcatggtggtgcacacctgtggtctcagctacttgggaggctgaggtgggaggatca

SEQ ID NO: 425173 - DNA, 201 bp, Homo sapiens
aaaaaggaaaaattcagagacctagtgtgttagtcagggttcttttagagggacagaactaataggatggatagatagatagatagatagatagatagatagatagatagatagatagatagagatagatgatagatagataaatgggagcttattaaatattaactgacatgatcacaaggctccacaacaggctgtgtg

SEQ ID NO: 425174 - DNA, 201 bp, Homo sapiens
cctagtgtgttagtcagggttcttttagagggacagaactaataggatggatagatagatagatagatagatagatagatagatagatagatagatagatagagatagatgatagatagataaatgggagcttattaaatattaactgacatgatcacaaggctccacaacaggctgtgtgcaagctgaggagcaaggaga

SEQ ID NO: 425175 - DNA, 201 bp, Homo sapiens
ctagtgtgttagtcagggttcttttagagggacagaactaataggatggatagatagatagatagatagatagatagatagatagatagatagatagatagagatagatgatagatagataaatgggagcttattaaatattaactgacatgatcacaaggctccacaacaggctgtgtgcaagctgaggagcaaggagag

SEQ ID NO: 425176 - DNA, 201 bp, Homo sapiens
tgtgttagtcagggttcttttagagggacagaactaataggatggatagatagatagatagatagatagatagatagatagatagatagatagatagagayagatgatagatagataaatgggagcttattaaatattaactgacatgatcacaaggctccacaacaggctgtgtgcaagctgaggagcaaggagagccag

SEQ ID NO: 425177 - DNA, 201 bp, Homo sapiens
ctgaggcaggagaattgtttgaacttgggaggcagaggttccagtgagccgagatcgcaccactgcactccagcctgggtgacagaatgagactctgtctaaaaaaaaaaaaaaaaaaattaggtcataattacacctaacataaaacaactatcctttgtacaaccagaaacgcaccaatccccaacccaaatactatta

SEQ ID NO: 425178 - DNA, 201 bp, Homo sapiens
ctaagtgatgccctaatggatctcctatattccatgagcattcttccttacctccattgtggagtagtagacagatttcatcttgatagtctgggtcagtyaccccagacaacactgtaactcccttcttaacctgttgacttagtaggaggagcccaaagtgtccaggtggcaatcttaacttccagtttaatggaatcg

SEQ ID NO: 425179 - DNA, 201 bp, Homo sapiens
acaaggaaaaagtttaagttttgacagtaaagtagtaagattggcttttcagtttgtggcttgttcattgcctgtaaaagcacttgtatgcacgcatacayacacacacacacacaaattcaaaatgttttgagtgattgcatcattgttagagtagattccacttgcatcattgccagagtagattcataacaagtcatt

SEQ ID NO: 425180 - DNA, 201 bp, Homo sapiens
actttggcaggtgatagtaataaatagcaatacaagagaaaaaagttttgatgattaaagctctcagctagtaaattttttcccttttgtgtctttttttwaaaaaaattcacatttctttttggtaaagaaatttacttcaaagaacactgctgtgtaaaagtttccttggttcttgatatgctgcctctcatccccagg

SEQ ID NO: 425181 - DNA, 201 bp, Homo sapiens
gtatgttgattttgtattttgtattttgcaaccttaccaaatttttcatcagttctcatagattttggtgaagactttagctttttccaaaattaagattwtattgtctgcaaacaaggataatctgacttctttctttcccatttgggtgccctttatttctttctcttgtctgattgctttagctaagacttccagtac

SEQ ID NO: 425182 - DNA, 201 bp, Homo sapiens
ggaggctgaggcaggagaattgtttgaacttgggaggcagaggttccagtgagccgagatcgcaccactgcactccagcctgggtgacagaatgagactcygtctaaaaaaaaaaaaaaaaaaattaggtcataattacacctaacataaaacaactatcctttgtacaaccagaaacgcaccaatccccaacccaaatac

SEQ ID NO: 425183 - DNA, 201 bp, Homo sapiens
ccattgattggactacatttcacgtggcatgtaatcatcagcatttggggaaatgcttagatacaagattgtttgtgctagccccatgccattttcttagrttaccatgtttctccctggctctggatgtagaaagtagatagtgcatttggttaagtaggcacatatgagggcaaattatagggttcagggtagagtgga

SEQ ID NO: 425184 - DNA, 201 bp, Homo sapiens
aaaactgaagaacttggagtctgatgttcaaaggcaggaagcatccagcacagaagaaagatgtaggcagggaggctaggcctatctctctttttcacatytttttctgcctgctttatattccctggaaactgattagattgtgcccaccagattaagggtggatctaccttctccagcccactgactcaaaggtcaatc

SEQ ID NO: 425185 - DNA, 201 bp, Homo sapiens
gggtgaaggcaactatcgactggacttcagagagatttagacaaaagaaacaattacaaccaaaaggtcaacccaaccacccatatcagattccattgatkggactacatttcacgtggcatgtaatcatcagcatttggggaaatgcttagatacaagattgtttgtgctagccccatgccattttcttagattaccatg

SEQ ID NO: 425186 - DNA, 201 bp, Homo sapiens
tcaagatttctagctgagcaaaatgtgaacctcgaaccaccctacagatgatttcttaaagagtttatccaaaaaaaaaaataagaaaaaattctggtttkgtagacctacaaaacagagcctttatttacttgtgtggggagctcttattcgtggggtattccgagagggtgtgaggagttcttctagtcactaagaacc

SEQ ID NO: 425187 - DNA, 201 bp, Homo sapiens
ttatattccaaactagaataaaccctcttctattcagaatttttaaaattaagaatttgtgattatttagaaggggctaacatttgttttgaaggcagggwtttgtctattttattcattgcaaaatgaatatctgaatataaacatacaatttttgaagtcttagcattcattatatacaacaaaattcttcaacccaca

SEQ ID NO: 425188 - DNA, 201 bp, Homo sapiens
tttatttcatcctcattcttaaaggatattttcatcaggtatgctattttaggttgatggttattttcctagtgcattgaaggtattattttacaggtttrgacttccattgtttctgttaagaaacagcagtttaattgtttttttgttttttctttgaaggtagtctgtagtttttaatgggtacttttatgaactttt

SEQ ID NO: 425189 - DNA, 201 bp, Homo sapiens
gcatcctgttgttgcaagtccgccagtacctcaaaacactggttggttttcttcattctgtccatacctctttaatagtttcttcactaaaatttcttcartttccaggtgaggttgccatacatttcttgctaggattctaaatgatacaacactcaaaattcaaaattaagaagtgttaatattttgtgtaatgtctta

SEQ ID NO: 425190 - DNA, 201 bp, Homo sapiens
tgtataatgtataatgttcataatgatggatgaaccatcataacctgatggagaagtggactgggaagtctatatgtgcaaaaggggcaaaatacaagggstggccttgctttgtaacaattccctctcctggtaactaatctagtctggagagaactaaaactcactcacttccataagaattaaacaagttctgtgaga

SEQ ID NO: 425191 - DNA, 201 bp, Homo sapiens
aacatagaggagctcccaatcattctatatggaacttttaaaagtattttgtggcatagagatatgatgaactgaataagaaattaaaatatagccaatgwtgcaaataaaggtttattttcttattcagtctaatttcagttggtagggacttttttgatttatgttcgtatttgttacctttgagcaataaagaatagc

SEQ ID NO: 425192 - DNA, 201 bp, Homo sapiens
gacattaaggcccagagttgggaagggactttccttctcaaaccttctttgttgcccagtgcttgtggcttcttgtctgtctacccagctactctgcagaygcttctgtcctggctcctttctggatgactttgctctgctagatggaacatagaggagctcccaatcattctatatggaacttttaaaagtattttgtgg

SEQ ID NO: 425193 - DNA, 201 bp, Homo sapiens
catacaataagcattctaagtacattgagttgtggaaattgttttcttgaattggacacagcttgataatagctgctatatattaaagttctcatgctgcytctccttgtagattcatgccttggtactttctgcttttaaagaaactttctcttatatttaatatcatgtcacaaataaacttgatgatttaaggcttta

SEQ ID NO: 425194 - DNA, 201 bp, Homo sapiens
caccctgccaccaggtagctggttgatcaccccgaggaatggtgccatatcgagggcccagtgttagtctctgctgttggcaaattgggcactcagcagtkcctgtagctgggtcagctttggtgagtagaagtccatgttgctgagcccatgtgtaacctccatccctgccaccacggacactttgttcatgggctcatt

SEQ ID NO: 425195 - DNA, 201 bp, Homo sapiens
ccagccaaaccattggctacagcccacgtatcagtatataatcgcacatctggctatttctccttgcatacaaagtgcacaaccaggtgcagtgataaaakttctgcccactggaaagattttccttcaccgctgtccttcagggatgtcctagaaagggactgtagtgctgcagctgtccacttttgggtgatgcctgcc

SEQ ID NO: 425196 - DNA, 201 bp, Homo sapiens
aaattatagggttcagggtagagtggatcttttggagagaaaaggccaaggtgtatgtatgcatatgtatgtgtgtgtgtatgcatgtataaagtacaggwgtatgtgttaaaaaaaaaaggcatcttggatgtgagggcgatctgcctgcaacatctgtcaccccattgatcgccagggttgatccggctgatctggttg

SEQ ID NO: 425197 - DNA, 201 bp, Homo sapiens
taaagaagggcagttgacaagatctaagcaggtttttaaaatgagaagattgaatacgttgtggtaataactatatatgcacatattgatacatgcatatrtatgtgttacaaggaaatgaaaaaatctgttagcaaagatatttatcacataggactcagtcagccagggatttactactccataccgagcagagttgct

SEQ ID NO: 425198 - DNA, 201 bp, Homo sapiens
atacttggttgctgtttgtttgccatttgcatgtcttcttttgaaaaatgtctattcagatattttgcccactctttcatcagattattagattttactcytattgagttgtttgaactccttagatattctgtttattaatcccttgtcagatggatattgtgcaagtaatttctttcattctgtgggttgtctattcac

SEQ ID NO: 425199 - DNA, 201 bp, Homo sapiens
tcttggtttcttcttcaaattgcctactgttgacatatagaaatgctactgtatgttgattttgtattttgtattttgcaaccttaccaaatttttcatcmgttctcatagattttggtgaagactttagctttttccaaaattaagattatattgtctgcaaacaaggataatctgacttctttctttcccatttgggtg

SEQ ID NO: 425200 - DNA, 201 bp, Homo sapiens
agaaatttaatgaagaaaatttcttaataataaagtaaagcacaaagtagagagaacgagaggaaatgaaatgtgagtgtacaggtcatagtaaaaaagtaaaaaaaaaaaaaagcctcaaaactccattagacaaataaattagaaaaagtacaataaggaacgcagaggatactgatgcataaatagggttgaatgtta

SEQ ID NO: 425201 - DNA, 201 bp, Homo sapiens
tacacagatacataattctttagggactcaagagtaggaagtcagcaaactgtggccaggagggaaaatccagcctgctgcctgtttttcgtaagtaaagytttattggaacacaaacacaatcaccctcattcattcatgtatcatcactggctgtctttgtgttaaaacagcagggttaaatagttgcaacagagactt

SEQ ID NO: 425202 - DNA, 201 bp, Homo sapiens
attttgtatgtatccgaacctattagaaataatactaggagcatgaattccacgttaaaacacctccggttacttattgcaaaaagttctcccctcatttyggagcaactttcagtgtctttccccaagctatatatctttgttaaaattacattggtcatgtcactaaataatgcttggtacctaaagaaataaaagaat

SEQ ID NO: 425203 - DNA, 201 bp, Homo sapiens
tcatcactggctgtctttgtgttaaaacagcagggttaaatagttgcaacagagactttatggtctgcaaagcctaaaatattttttgcttgggcttttawtggcccgtgctttaaaaataaaaagtttgttgacccctgctctagaaagaaaaataatattagagcagcacacgagggtggtctattctagtgcctttga

SEQ ID NO: 425204 - DNA, 201 bp, Homo sapiens
tttgctgtatgtgtctgtttttgtgctaggacaatgcagttttcgttactgtagccttgtagtatcgtgtgaaattgggtaatgtgatgtctctgactctsttcattttgctttggagtgctttggctatttgggctcttttttggttccatatgaattgtacaatagtttttttttctaattctgtaaagaatgtcattg

SEQ ID NO: 425205 - DNA, 201 bp, Homo sapiens
caaggtaattgatgcctgcaaaaaggtggatccactacttgttattttactgataagagttttctgttctgcttcagtcttcctttgctcctaaccaactrtttaattctatgcctcccatcttctgtatcctaggtcagctgtgctaacttgatctctgaaaataggctgtggatggtccttgcccttccggactaactt

SEQ ID NO: 425206 - DNA, 201 bp, Homo sapiens
aatgaaatgcatttattaaattttttatataattttgtttttggaagtggcttcaccaatattctgaaaccctttctctacaggcaggtatctatgtgccyttgtttggcaatagctatctctaatgacaccaggtttgaagggaatgtgttgtatctgcaaatggtgttgaggcagatccaaggtgggcatcgttgagct

SEQ ID NO: 425207 - DNA, 201 bp, Homo sapiens
tgaccactgggatagattatttgcctctgtctaggactggtctaaatgctctctttgtgggtgcccgctgaattctgtcctgtgttgttttccactgtggyaacattgaatcaatcaggcagcgctgaattccaatgctaagtcccatgatcacttcactcttccttaccctatctcacagattctctctccataccacac

SEQ ID NO: 425208 - DNA, 201 bp, Homo sapiens
tctgtaagtatattatcatttgtgtaccaaaaaagtatcattgtatacccattatttatgtggtatgtgtgtgtgtgtgtgtgtgtgtgtatgtgtgtgtrctcacgttatattaacatatctctgaaaatgatacacaagaaattggtaatagccataggttggtgcaacagtacattaaaagtaatggcaaaaaccgca

SEQ ID NO: 425209 - DNA, 201 bp, Homo sapiens
gaagatttccacacatggcctaagtttgctcagtgggtgggctttcaggagcatgaaggtttttaaattcaggacctctgatttatggtgggtctttattycaaagactttctttaaatttagttttttgagaactgagggattgagaacatatttttcaaaggatgtgttcatttaaattgcaggtagatcagcccacag

SEQ ID NO: 425210 - DNA, 201 bp, Homo sapiens
ctcatctggaactcaatgcacatttcacattctttacagaagatttccacacatggcctaagtttgctcagtgggtgggctttcaggagcatgaaggtttktaaattcaggacctctgatttatggtgggtctttattccaaagactttctttaaatttagttttttgagaactgagggattgagaacatatttttcaaag

SEQ ID NO: 425211 - DNA, 201 bp, Homo sapiens
ccaagagattactgtgactgttttttttttttccagcccttttccttcctgtgcttcaatttggaaactttgatttgacttttcttcaaggttattgatckttctctctgtaatccttgcataataatttaattatctcagtcatttggagtctgtttctgttgaaaaaactctttttccatttgtttcttatgggctaca

SEQ ID NO: 425212 - DNA, 201 bp, Homo sapiens
tttcaaatattaaattaaccttttattactcataggatttcagagcctttcaagagtatacttagaattcttgccttaaatctttgttattgttgttataygttttacttacacgtatatcacaaacctgtaaaacatttttatgttttttaaaggaaatttaaagtcttttatatgtactcatttattatctgttatttt

SEQ ID NO: 425213 - DNA, 201 bp, Homo sapiens
tgttttactggatattcaatgaggccagaggcttaccagtgatggcattttattttacattccttgaattttctaatctgtacaattatatatatatgtatgtgtgtgtgtgtgtgtatttcttttatgtgccctattgcacataacatgcagtataaatatgtcatatattaagtgtaagttgaataattaagtgaactt

SEQ ID NO: 425214 - DNA, 201 bp, Homo sapiens
gttttactggatattcaatgaggccagaggcttaccagtgatggcattttattttacattccttgaattttctaatctgtacaattatatatatatgtatgtgtgtgtgtgtgtgtatttcttttatgtgccctattgcacataacatgcagtataaatatgtcatatattaagtgtaagttgaataattaagtgaacttg

SEQ ID NO: 425215 - DNA, 201 bp, Homo sapiens
ttttactggatattcaatgaggccagaggcttaccagtgatggcattttattttacattccttgaattttctaatctgtacaattatatatatatgtatgtgtgtgtgtgtgtgtatttcttttatgtgccctattgcacataacatgcagtataaatatgtcatatattaagtgtaagttgaataattaagtgaacttgt

SEQ ID NO: 425216 - DNA, 201 bp, Homo sapiens
tttactggatattcaatgaggccagaggcttaccagtgatggcattttattttacattccttgaattttctaatctgtacaattatatatatatgtatgtgtgtgtgtgtgtgtatttcttttatgtgccctattgcacataacatgcagtataaatatgtcatatattaagtgtaagttgaataattaagtgaacttgtg

SEQ ID NO: 425217 - DNA, 201 bp, Homo sapiens
caggtgaaaccaaatgaaagttttcagtttcttcatctgtaagtatattatcatttgtgtaccaaaaaagtatcattgtatacccattatttatgtggtakgtgtgtgtgtgtgtgtgtgtgtgtatgtgtgtgtgctcacgttatattaacatatctctgaaaatgatacacaagaaattggtaatagccataggttggt

SEQ ID NO: 425218 - DNA, 201 bp, Homo sapiens
gggctaaataaaagttgcatttttgagaaacttgaacaagggcaaggatttttcttttcttttttttttttaacggtgataacagtagcaaatatgataaygatggagattacttttacttttcaaaaaaatttaatttaattttaagttatgggatacatgtgcagggcacgcaggtttgttacacaggtaaacatgtgc

SEQ ID NO: 425219 - DNA, 201 bp, Homo sapiens
ataaaagttgcatttttgagaaacttgaacaagggcaaggatttttcttttcttttttttttttaacggtgataacagtagcaaatatgataatgatggasattacttttacttttcaaaaaaatttaatttaattttaagttatgggatacatgtgcagggcacgcaggtttgttacacaggtaaacatgtgccatggtg

SEQ ID NO: 425220 - DNA, 201 bp, Homo sapiens
ctattcaacataatattggaatttctggccaggacaatcaggcaagagaaagaaataaagtgtattcaaataggaagagaggaagtcaaaccatctctgtytgcagatgacatgatcctatatctagagaaccccattgtctcagcccaaaagtttcttaagatgataagcaacttcagcgaagtctcaggatacaaaagc

SEQ ID NO: 425221 - DNA, 201 bp, Homo sapiens
aattattcaataaatgctggtgctcttctctagcccttcctctaagaataggatgcaatgtctctctaaattggttcacatgtagtgttggtggagggagtgcaaactgataacctgaattacctcgggatgtccatttcttccctatggcaaatgacaaccttgtgccatttcttgagatagaaagtgagcttcttcttt

SEQ ID NO: 425222 - DNA, 201 bp, Homo sapiens
tcttatttcatcatgagttaatttatatataaggtgtaaggaaggggtccagttttaattttctgcgtatggctagccagttcccccagcaccatttattkaatatgaaatcctttccccattgcttgtttttgtcaggtttgttgaagatcagatggttatagatgtgcagtcttatttctgagatctctactctgttcc

SEQ ID NO: 425223 - DNA, 201 bp, Homo sapiens
tgatgccttcagctttgttctttttgcttaggattgtcttggctgcatgggctcttattttgtttcatatgaattttaaagtagttttttctaattctgtraagaatgtcaatggtagtttaatggaaatagcattgggtctataaattactttgagcaaaagctggaagcattccccttgaaaacaggcacaagacaagg

SEQ ID NO: 425224 - DNA, 201 bp, Homo sapiens
gatgccttcagctttgttctttttgcttaggattgtcttggctgcatgggctcttattttgtttcatatgaattttaaagtagttttttctaattctgtgragaatgtcaatggtagtttaatggaaatagcattgggtctataaattactttgagcaaaagctggaagcattccccttgaaaacaggcacaagacaagga

SEQ ID NO: 425225 - DNA, 201 bp, Homo sapiens
aaaactccattagacaaataaattagaaaaagtacaataaggaacgcagaggatactgatgcataaatagggttgaatgttagtgtagatatggaacatactcaaagtaaatgaaatgtaagtgtaaatggagcttacacataagtgtaaagggagttcctaaagaaggaagctgaagtattggaacagaacacacattaa

SEQ ID NO: 425226 - DNA, 201 bp, Homo sapiens
tcatctttggtgttatatatttaaatcttttgccatttggggggtgggggaattattttcttattattgagttgagaaagttatttatataatctgaatamcagtttctttatttgtacaaatttatgagatacatgagaaattttattacatgcttatgtatccaaaaaaccaattatataaagtatctggaaattgttc

SEQ ID NO: 425227 - DNA, 201 bp, Homo sapiens
ccaaagacctaaatgtagagccaaaactataaaactcttagggaaaaatactggggtaaatcttcatgacctggagttaagcagtgttttcttagcagcarcacaaaagaaggagtagcaaaagagaaattttttaattggatttcatgaaaagtataagattttgtgctacaaatgatattatcaagaaagttaaaagac

SEQ ID NO: 425228 - DNA, 201 bp, Homo sapiens
taagcataaaagctttctagctgatgaacataggctatataaaacaaccatgggccgggcactgtggctcacgcctataatctcagcactttgggaggccraggcgggcatattacctgaggtcaggagttcaagagcagcctgaccaccaacttggtgaaactccgtctctactagaaatattaaaaaaatcagccgggc

SEQ ID NO: 425229 - DNA, 201 bp, Homo sapiens
caccgaggggctggcagtaaaccattcatgagaactctacccccatgatccaatcacctcccaccaggcccacctccagcctcagtggggacagagatccmaaccatatcagttgagatataaatttaaataatttttctataatgaccttatgtccagtgatattgctaaatcatttattaattttaaattgtctacaga

SEQ ID NO: 425230 - DNA, 201 bp, Homo sapiens
ccaaacctcatgaattttgttttcattttttcctcattgcagaattttgtgactagtatgatgttgcagaaaaaaaaaaagtggaaatagcagaaattctkgtctcattgtgaatctcagggaaaaagcacttaatgttttgccattatgataatttttatgtaggatattactaaatactgtttttcagtttaggaagtt

SEQ ID NO: 425231 - DNA, 201 bp, Homo sapiens
gcatctgcccaaataatgggcatcctcatcttgcctgattcattaatgaaaaacaagttcatctgacaatgtaaataaagacaggagaacgagaaatggcmagatcgaagtagcattttataattctcaagaagtgagaaatagcatttcattttgaaaaagaaaaatgtgctattcacctaatgattttcaatttcacct

SEQ ID NO: 425232 - DNA, 201 bp, Homo sapiens
tcttgcctgattcattaatgaaaaacaagttcatctgacaatgtaaataaagacaggagaacgagaaatggcaagatcgaagtagcattttataattctcmagaagtgagaaatagcatttcattttgaaaaagaaaaatgtgctattcacctaatgattttcaatttcacctttaagatctgatatcccttcacaaagaa

SEQ ID NO: 425233 - DNA, 201 bp, Homo sapiens
ccctcacctttgcttttgttaagttttataatcccactatttaatgttttagaatttgggctaaataaaagttgcatttttgagaaacttgaacaagggcmaggatttttcttttcttttttttttttaacggtgataacagtagcaaatatgataatgatggagattacttttacttttcaaaaaaatttaatttaattt

SEQ ID NO: 425234 - DNA, 201 bp, Homo sapiens
aggggatatcaccaccaactttatagaaataggattataaataagtactatgaacaactctatgccaaaattcacataaataaattggacagatttctacmaagacatacactgctgagacttactcaaaaataaattaaaaattggagtaaatttacaacagataaagtgatcaaactagtaatttaacattttcacaca

SEQ ID NO: 425235 - DNA, 201 bp, Homo sapiens
gtctttaatccatcttgaattaatttttgtataaggtgtaaggaagggatcgagtttcagctttctacatatggctacccaagttttcccagcaccatttrttaaatagggaatcttttctccatttcttgtttttgtcaggtttgtcaaagatcagatagttgtagatgtgtggtattatttctgagggctctgttctgt

SEQ ID NO: 425236 - DNA, 201 bp, Homo sapiens
atttgcttttttctttccaatttttattttatattcacagggtagacatgcaaattcgttatatgggtgaatagtgtgtcacaggggcttgccattatttkgtcacccaggtaatgagcataatacccgacaggtagtttttcaatactcactctcatcccacactacaacctctagtagtctctggtgttctttgcattc

SEQ ID NO: 425237 - DNA, 201 bp, Homo sapiens
aacatcataagtaataggatatgtcaaaatcaagtgcaacctgatagaatgcaaggagaggaaaacatcacttctgtgctattcttgccatagatgcacastcacacactgtataatgatgcttcagtcagtgacagaccacatatacaatggcagtcccataagactataatggagccgaaaaattcctatagtctgatg

SEQ ID NO: 425238 - DNA, 201 bp, Homo sapiens
cctactgtgctgccaactgtataaaaggccaacacacacaactatatacagtacatgatacttgataatcataataaactactatgtttctggtttatgtrtgcaccacactttttattgttattttttagtgtactccttctacttataaaaaacaatcttaaatgtaaaagaacctcaggcaggtctttcgggagggat

SEQ ID NO: 425239 - DNA, 201 bp, Homo sapiens
gttttgctattgtgaatagtgttgtgatgaacatacacattcatgtgtctttatggtagaatgatttatattccttttggtatatacccagtaacaggatrgctgggttgaatggtagttctgttttagattttttgagaaatctccaaactgctttccacagtggctgaactgtttacattcccaccaacagtgtttcag

SEQ ID NO: 425240 - DNA, 201 bp, Homo sapiens
tatatgtgttacaaggaaatgaaaaaatctgttagcaaagatatttatcacataggactcagtcagccagggatttactactccataccgagcagagttgmtataggaatgtacacatcctgggaataatattagttgcaagtcagacaattacaaaaaattttataaaacagttctacagcatggctgtaataacaatct

SEQ ID NO: 425241 - DNA, 201 bp, Homo sapiens
tgttttttgcttgttaatttgtttatgttctttatcaattcaggatattagaacctttgttggaagcataacttgcaaatattttctcccattgtgtagaytgtctgtttactctattgatagtttcttttgctgtgcagaagatctttagtttaattaggtcccattcgtcaattttagttttgtcacagttgcttctgg

SEQ ID NO: 425242 - DNA, 201 bp, Homo sapiens
tttcctactcctaactttacttgtctccaatctattgaatgcttttttcagcgagtaactttttagttttagaatattcatttgattcctagaaaagtaarttccagttgactcttaaaattctccttctttgcatccacttggtccaatgtttgctctattctattgaacatattaatcatagttattttaaagtcctta

SEQ ID NO: 425243 - DNA, 201 bp, Homo sapiens
tcttttctttatgattatcaataaaatgcttgaaaggagatgaggttggggaataatttttgggaataccacaaaagacacttttgtgatggaaatccttaaaaagacacaatccattacctcattgggttcaaaaggcaattgtgaactactgtggagtttggaaagaagcaatgaggtaatcaaggatactgttgacaa

SEQ ID NO: 425244 - DNA, 201 bp, Homo sapiens
aggaaggtgaatccgggagacggagcttgcagtgagctgagatcgcgccactgcactccagcctgggcgacagagcgagactccatctcaaaaaaaaaaaraaagaaagaaagaaaagaaagaggaagtaataatctgtgaaatttttccttaggaacttattggcaatttaaaaatgaatttgttaagccatgctggttc

SEQ ID NO: 425245 - DNA, 201 bp, Homo sapiens
gcttgctggatcatatggtagctctattttcagttttttgaggaacctccaaactgttctccatagtggttgcactaatttacattcccaccaacagtgtrtcaggattcccttttctccacatccttgccagcatttgttattgcctgatttttggataaaagctattccaagtggggtgagatggtgtcgcatggtact

SEQ ID NO: 425246 - DNA, 201 bp, Homo sapiens
gtccccagtgtgtgatgttccccttcctgtgtccatgtgttctcattgttcaattccctcctatgagtgagaacatgcagtgtttggttttttgttcttgygatagtttgctgagaatgatggtttccagcttcatctatgtccctacaaaggacatgaactcatcattttatatggctgcatagtattccatggtgtacg

SEQ ID NO: 425247 - DNA, 201 bp, Homo sapiens
attgcttgcaaatgcaactgtctaggttacatacaaaatgaacataataagtttttatttcccatggtgatacaccaacagctacattcggcttctaatagtctgcaattcagtaataatagcttggttcagtttagtttattgaagacataaaaatacttggcagccagaggctggaatgcatggttcaagggaacaaga

SEQ ID NO: 425248 - DNA, 201 bp, Homo sapiens
tcaatctcctgacctcgtgatccacccgccttggcctcccaaagtgctgggattacaggtgtgcaccaccgcacccagctgtttctagtcttaatgatagytatgacagaatcagggttatttttaatggtaaatatttgctttttagagatatttctatatttatttctgtgctcctaagttttattctaaaactcattt

SEQ ID NO: 425249 - DNA, 201 bp, Homo sapiens
tatttttgagcatttatttgataccagaatcttgccataacaataaaattttttggttctgcaaagaaccaaaatttctgcaaagaaattttctcctaaaaacttaacttaacaatccttggctacattccattatttcaatgattttctctatattatatgaagtaatgtggaagaaattctaccccaggtgcattgtgt

SEQ ID NO: 425250 - DNA, 201 bp, Homo sapiens
cgaacctattagaaataatactaggagcatgaattccacgttaaaacacctccggttacttattgcaaaaagttctcccctcatttcggagcaactttcartgtctttccccaagctatatatctttgttaaaattacattggtcatgtcactaaataatgcttggtacctaaagaaataaaagaatttaagtggaaaata

SEQ ID NO: 425251 - DNA, 201 bp, Homo sapiens
atttttgagcatttatttgataccagaatcttgccataacaataaaattttttggttctgcaaagaaccaaaatttctgcaaagaaattttctcctaaaaacttaacttaacaatccttggctacattccattatttcaatgattttctctatattatatgaagtaatgtggaagaaattctaccccaggtgcattgtgtc

SEQ ID NO: 425252 - DNA, 201 bp, Homo sapiens
gaaaagatgttatcagggaaatgcaaattaaaaccacaatgagatacactacacactcaccaagaacggctaattataaaaaggacaattctaaatgtccrtgaggatgtagagcaactggagctcatatattgatggtgggattacgaaatgttacagttactttggaaaacagtttggcaatgtgttataaagttcaat

SEQ ID NO: 425253 - DNA, 201 bp, Homo sapiens
gtggacttgattgtgtagttgctttcttctgtcaatggtctatgtactttagtgtgtttttgtgatggctggtaatggcctttcatttccacatttagcasccccttaaggccctcttgtaaggcatgtcttttggtcgtgaattaccttagcatttgcttgtctgaacaggactttatttttcctttgtttatgaagctt

SEQ ID NO: 425254 - DNA, 201 bp, Homo sapiens
tttttgagcatttatttgataccagaatcttgccataacaataaaattttttggttctgcaaagaaccaaaatttctgcaaagaaattttctcctaaaaacttaacttaacaatccttggctacattccattatttcaatgattttctctatattatatgaagtaatgtggaagaaattctaccccaggtgcattgtgtcc

SEQ ID NO: 425255 - DNA, 201 bp, Homo sapiens
agccttcagagtttttataatatatcattatattatctaaaatgtatagttttcaagaaaaatgtgagctaaaacttgaaaacagaggaaagtgtaacacwtatgcaagaaaacaaacaacaagaggggaaaaaagaaaaagaaaaaaagaagaaaaaacccaggcagttgaaactgcttttgagggattctagatggtat

SEQ ID NO: 425256 - DNA, 201 bp, Homo sapiens
tatattaagtttgatagttgtgaagcatcagtgtcatctactaggtataagtttcagaaactattttatagtttaaaatcttgatttttccccttaaaacmaaaggtatattatttttacaaatttcataatgattatttgttgatgaaatttacctttttttttttcttgagacggagtcttgtctcgctctgtcgccca

SEQ ID NO: 425257 - DNA, 201 bp, Homo sapiens
tgggagaatactttagaggatatagaattctcagttgataaacccactctccaccctagtactgtaaacatatgtttccatccttttatgatctgcattgkttctgatgaaagtcaataataattcctatatttgttcctctgggtgtgtagcataaatatttttttggctggctttaagattattcttctttattactag

SEQ ID NO: 425258 - DNA, 201 bp, Homo sapiens
cgagcccaatcatgtacataccacttccatttgatgatggaatgctgctgtgcatgacccactttatggctagatgggtcagaaagcacccagttcatgayaggcagttcaggttgcatgtgacttgatgacccatagtcaaacgttcagtttccaccaaagcccagtaacaggccaagagctgtctctcgaaaggggagt

SEQ ID NO: 425259 - DNA, 201 bp, Homo sapiens
ttcaaattttttctctgccgaattcctctattcctggtactcttttcatacttataataaatttctcattttcatccaagagattactgtgactgtttttkttttttccagcccttttccttcctgtgcttcaatttggaaactttgatttgacttttcttcaaggttattgatcgttctctctgtaatccttgcataata

SEQ ID NO: 425260 - DNA, 201 bp, Homo sapiens
gaactgagggattgagaacatatttttcaaaggatgtgttcatttaaattgcaggtagatcagcccacagggctcttctcatacataatgtagctgtgctmtatggattaactgatacaaataaactagaatttgtgtcaaagatatttaagctgtgaagttgaattatagttttagcttaaatacctaaaccagaggtat

SEQ ID NO: 425261 - DNA, 201 bp, Homo sapiens
tcagctcatgctcgcatgggctgcacccactgtccaacaagtcccagtgagatgaacctcagttggaaatgcagaaatcacccatcttctgcattgctcaygctgggagctgtagactgtagctgttcctattcggccatctttgaaagtgtgttattttataatcagaaaaaataatcaatactatttttaaagaatgta

SEQ ID NO: 425262 - DNA, 201 bp, Homo sapiens
tgtagatcttgggacctgtcagtctctgtaattgcatgagcaaattccttataataaatgtctctctctctctctctccacacatacacacacataaacamacacacacacacacatatacacacacacacacacacacacacacacacacacacatcatattgcttctgcttctctgggaaccctgatcaataccgtcag

SEQ ID NO: 425263 - DNA, 201 bp, Homo sapiens
caacaagtcccagtgagatgaacctcagttggaaatgcagaaatcacccatcttctgcattgctcacgctgggagctgtagactgtagctgttcctattcrgccatctttgaaagtgtgttattttataatcagaaaaaataatcaatactatttttaaagaatgtagtggatgagatcatttgcaaatgtatacctgagg

SEQ ID NO: 425264 - DNA, 201 bp, Homo sapiens
gtagggccctcatgatgtgattagagtgcccttacaagaagggacaccagagagattgcttgctctctctctcagtgtcatgtgatgacacagtgagaagrtggccactggcaagccaggaagacacactttgctagagcccaacaatgctggcatcctgatgttgaacttccaccctttaatagaaataagtttctgctg

SEQ ID NO: 425265 - DNA, 201 bp, Homo sapiens
tgcccttacaagaagggacaccagagagattgcttgctctctctctcagtgtcatgtgatgacacagtgagaaggtggccactggcaagccaggaagacasactttgctagagcccaacaatgctggcatcctgatgttgaacttccaccctttaatagaaataagtttctgctgtgtaagccacccagtgtatggtattt

SEQ ID NO: 425266 - DNA, 201 bp, Homo sapiens
acctgccaattgtgtggcatttatctttatctactactgtacatttccacaggtaaatgtggtataagactcaaaattaatattttatactgccttgaccrctgatgaaattgggagagcctcaaattgcctaatcacaagtttccccccaccactgtgatcctgtgcataaagtcttctaaccaaacaactcaccatatc

SEQ ID NO: 425267 - DNA, 201 bp, Homo sapiens
ttttgagcatttatttgataccagaatcttgccataacaataaaattttttggttctgcaaagaaccaaaatttctgcaaagaaattttctcctaaaaacttaacttaacaatccttggctacattccattatttcaatgattttctctatattatatgaagtaatgtggaagaaattctaccccaggtgcattgtgtcca

SEQ ID NO: 425268 - DNA, 201 bp, Homo sapiens
tttgagcatttatttgataccagaatcttgccataacaataaaattttttggttctgcaaagaaccaaaatttctgcaaagaaattttctcctaaaaacttaacttaacaatccttggctacattccattatttcaatgattttctctatattatatgaagtaatgtggaagaaattctaccccaggtgcattgtgtccac

SEQ ID NO: 425269 - DNA, 201 bp, Homo sapiens
taaaatatttgaataaaaccccttgatactgtgcctccagactgctccatcaaaagaagcaatggaaactctttggaaacctaaaacccacaaatggaaaktgttatcatttatcttatatttggacatgctaacctttagcattgacaaatgccattatgtaaaatacaattatttcctcataaaagcttaatgctgtac

SEQ ID NO: 425270 - DNA, 201 bp, Homo sapiens
ttcattcagttcttctctaattttggttatttattttcttctactagctttgcagttgcattgttcttttttttctagtacctctagttgcattgttaggycattaatttaagagctttctgacttttcgatgtgggcatctgtgaacacagactcaatatcctccttctatctatttgaaattatatattatatatatat

SEQ ID NO: 425271 - DNA, 201 bp, Homo sapiens
aacataaagtaaataaatcgatattataataaaagatttttaattaaaaggggtacaaatatgtatgtaactaacaatatgagctcgctttctctctcacrtgcatatacacatgtgcacacacatgcacacacacacacacactcatacacacctcagctttttccactaaagtggcctgaaagcaatgatcctccagtg

SEQ ID NO: 425272 - DNA, 201 bp, Homo sapiens
ctgtactgaagaggggttacagttttagtaaggttcagtttacaactatttcttcatgggaccttccaggctcttgattaagtgctattaaaatgtctatrtctatattctggaatgtcttgacatgactaagctctgccctgattttcctaggtcagagctccggactccagccccatgcaacttcaaaatatgacaaat

SEQ ID NO: 425273 - DNA, 201 bp, Homo sapiens
cacttttcttgatattgcgaaatctctgagttatggacaaaactgtgtctgccaaaatcatatgttggaactctaacccctataggggtgactatatttgragacagggcctctgaggaggtgattagtgttaagtgaagtcactagtgtccttataagaagaggaagaaatgccagagagctctctctctctgtgtgtac

SEQ ID NO: 425274 - DNA, 201 bp, Homo sapiens
aggaaaatcaataattcccttttggacatgttagttttgagattcttgttaaatatccaaatgtcagacagttaccttcactagcacggagttcaatgaastgagtttcttgagatacaaatttggaagttatacttttaaatgctcaactggcatttaaagtcatgggtatggatgaaatcacctggggtgaggaattag

SEQ ID NO: 425275 - DNA, 201 bp, Homo sapiens
gcataagaaagttctgcatctgcttagaatattttgatggatatgcagaaaaggaataggaaaaagtagacagtgaacaaaaaggaaaaattcagagacckagtgtgttagtcagggttcttttagagggacagaactaataggatggatagatagatagatagatagatagatagatagatagatagatagatagataga

SEQ ID NO: 425276 - DNA, 201 bp, Homo sapiens
ggaatctacagaagcaggcaggcctccttgagctgcagtgggctccacccagttcaagattcctggctgttttgtttacctactcaagcctcagcaatggyaggcgcccctcccccagcctcgctgccgccttgcagttcgatctaggactgctgtgctagcagtgagccaggctctgtgggcatggaaccctccaagcca

SEQ ID NO: 425277 - DNA, 201 bp, Homo sapiens
ctctcatcccacactacaacctctagtagtctctggtgttctttgcattcatttgtattcagagtttagctgccacttgtaagtgagaacatgcagtattkggttttctgttcctgcattatttcccttaggataagggtctccagcttcatccatgttgctgcaaagaacatgatttcattcttttttatggctgcatag

SEQ ID NO: 425278 - DNA, 201 bp, Homo sapiens
gaggctgaggagggcagatcacgaggtcaggagttcaagaccagcctggccagcatggtgaaaccctgtgtctactaaaaataaaaaaaaaaaaaaaaaaattagccaggcttggtggcacgtgcctgtaatccaagctacatggtgggctgaggcaggagaattgcttgaacccaggaagtggagtttgcggtgagccaa

SEQ ID NO: 425279 - DNA, 201 bp, Homo sapiens
tttccactgtgaaattagatttgtaatgggttagaaattcaagcctgcttgtatcaaggcaagcttttattgtgagactaacttcaatggagcattcattmtgtttaagctttgatgtttaaaatttgtataaatcatgtgctttagtggtgatggttgcacaacagtgtgcaacttcatgccactgatctggacacttag

SEQ ID NO: 425280 - DNA, 201 bp, Homo sapiens
tgtaatcccagcactttgggaggctgaggagggcagatcacgaggtcaggagttcaagaccagcctggccagcatggtgaaaccctgtgtctactaaaaawaaaaaaaaaaaaaaaaaaattagccaggcttggtggcacgtgcctgtaatccaagctacatggtgggctgaggcaggagaattgcttgaacccaggaagt

SEQ ID NO: 425281 - DNA, 201 bp, Homo sapiens
ccaggctgggcgtggtggcttatgcctcaaatcccagcactttgggaggctgaggcaggcagatcacttgaggtgagaagtttgagaccagcctggccaayatggtgaaactccgtttactaaaaatacaaaaattaaccaggtgtggtagcgggttcctgtaatcccagctactctggaggctgaggcaggagaatcctt

SEQ ID NO: 425282 - DNA, 201 bp, Homo sapiens
ctgtcgacctcaagtgatccacctgcttcagcctcccaaagtgctgggattatgggcgtaagccaccgcacccaacctattctttttttttttttttttttgactgagaaatttctagataaggaattggtgatttagagaaaggtttttttttttctttcttttccattttacatatagagaggttaagactcagaaatg

SEQ ID NO: 425283 - DNA, 201 bp, Homo sapiens
ctaaataaaaaaaacttggctatattaacagctatactaaaactagaggatgcttgtaagattttaagtctagcacccagtttaatttttagattttgagstttttttttttcctacttgatttgagtctcaggtgatatgggttggaaaatgctctttttgattggtttgtgcttagggaaaggtttgatacttttttga

SEQ ID NO: 425284 - DNA, 201 bp, Homo sapiens
aatttgtacctatgtttgtaatctcttctgaattatttctactctgaaagatttaaaggcaatagaatgaggttcacaatgcctcacagagcaaggaaacrtcataaccattttacagaaagagagctgagcagaggcagtgtcctgttgaggtggaacttgaatttggacccacgggagtacttcctagccctgtggcac

SEQ ID NO: 425285 - DNA, 201 bp, Homo sapiens
tctgacttctactcagtattgaagatatttagtctgattttctgtacttctatcaagtttctatagacaatttctctgcaggatactgtggaccctgatgyttcttgtatgtgttccacgtcttcctcactctgtgctttcacatgctagacccagtgtctctgtaacatgaccctgttgcctgttgacacacaaactttc

SEQ ID NO: 425286 - DNA, 201 bp, Homo sapiens
agccactgtgcctggccataaatcgctttcattttttgaagcaatatctactgaagtagaatttataacacctctttctttagggtagaaatgttattcayctaatttttcaatgaatttggttcccaacaatagcgatttccctcttgtttaaatttaattggctttatatatttttctaactttttttttggttatgtc

SEQ ID NO: 425287 - DNA, 201 bp, Homo sapiens
ttgaggaagagcaccattatttgcaccagagcacttttagcttaaactctaaagtttaacgcgtgtctcagagttagaccactgtggttggtatccctcacacagggaacagtggttggtatccctcacacagggaacattacctgtcagaaaaagaccctcattaaatatttgttgaatgaattcatgagggcctcatct

SEQ ID NO: 425288 - DNA, 201 bp, Homo sapiens
cagatgctcgtttggccatgagtgagtgacatatgtttatcttctcacattattaaaattaatagtgtagggctgttctaagctctgtagttcctgggtgwaacttgtttttcctttcctctgaaaagattaattgttaagctgccaggggacaaggagacaaggtataatagcataaccaaaggtttaattaccgcctga

SEQ ID NO: 425289 - DNA, 201 bp, Homo sapiens
agtcaaagtatcaacattaagaggagtttggaagaagttggttccaaccctcatgggtgactttaagactttagtggaggaagtcactgcagatgtggtgraaatagcaagaaaactaaaagtagaagtggaaactgaagatgtgactgaattgctgaaatctcgtgataaaacttgaatggagcccagcaaggtggttca

SEQ ID NO: 425290 - DNA, 201 bp, Homo sapiens
ttgaaataaaactcatgctttgcttatctggaggttttaaaagttagattgtgcaaaactcattgtcttagtctattcctgttgctattgcaaaatacttsagactgggtgatatataataacagaaacctacttctcacagtttttgaggctgggaagtccaagattaaggttctgacagatttggtgtctggtgaggac

SEQ ID NO: 425291 - DNA, 201 bp, Homo sapiens
catatttagggcatagcatttagttgaagaattacaggaatactgccaccatagaaaaatcttagaaaacaagggattgtgcattgggaaagtacttaaaatattaagattgatttccagtgactttagtacattttaactatgaaggagagttaccgggttgctcataaatgcatattgccacaggctgaataaatgcaa

SEQ ID NO: 425292 - DNA, 201 bp, Homo sapiens
acttcacctaggtaaaaggtctcttaagacactcagtgttaaaccaggagtcattgtgggagacatgaaacattcaccccttactaacaaagggagccccrgggggcctcaaagttgaggggttttaggttttctgattttcagtagatatctacaacactcagagtttggtattttatatgattgctgatagtgttttag

SEQ ID NO: 425293 - DNA, 201 bp, Homo sapiens
tcatgataagaagggaaaaggagcacagcttttcccctatatgccttttttcactggtacccatgaccaagggtagaaaccttagcttgtggaagaaacargaaaattacagtttgccaagtttgggcagtctgtttgtccatcatttagtaggctcaaagcaggtgctaatagcagaaaaataaagtatttcaaggagga

SEQ ID NO: 425294 - DNA, 201 bp, Homo sapiens
tgtaattgtttcccaatctagaagccacagttgagatttacagctaaaaattaggagccccctccccagccaaccacttcacctaggtaaaaggtctcttragacactcagtgttaaaccaggagtcattgtgggagacatgaaacattcaccccttactaacaaagggagccccagggggcctcaaagttgaggggtttt

SEQ ID NO: 425295 - DNA, 201 bp, Homo sapiens
aagtttcagtgcctgtattcagattatatttgatggcatattcatgataagaagggaaaaggagcacagcttttcccctatatgccttttttcactggtasccatgaccaagggtagaaaccttagcttgtggaagaaacaggaaaattacagtttgccaagtttgggcagtctgtttgtccatcatttagtaggctcaaa

SEQ ID NO: 425296 - DNA, 201 bp, Homo sapiens
atggaaatgtttgctatttgggtatgtttatgtaaactatggcatactcaagcatgatgttttagaagaactttcagagacatagaaaatgcaatctaatrtagagagaatttacagttaaattagttaatgaaacagatattaagtacctactatgtgctaagcagtatcaccagcgggcaaaatagaacttatctgtcc

SEQ ID NO: 425297 - DNA, 201 bp, Homo sapiens
gtatcaacaatacactgtgtgtttgtgacacacccctccacttcctaccccatgacattatggaacactaaatgttgtgggatatggcaaaaaaaaaaaaatcaataattttatccctcacaaattcacagtagatcttgaggaaacaatagcagtttctagtaagtcttttaggctcttcagggcagaatgatggtgtgt

SEQ ID NO: 425298 - DNA, 201 bp, Homo sapiens
tcctaaggaaatagtaaaaggtatatgtacaagtatgtttatcaaagcattatttataatagcaaatactgaaaataatggaaatgtttgctatttgggtrtgtttatgtaaactatggcatactcaagcatgatgttttagaagaactttcagagacatagaaaatgcaatctaatgtagagagaatttacagttaaatt

SEQ ID NO: 425299 - DNA, 201 bp, Homo sapiens
tcagttcaccataaggtctcaacaatatctaaatcaccagccatacagtatatgataaatacagtgtttccacacaagaaaataacagaattgtcaggaaracatcaggcctgttatatttctctgtgaaataatagcgactgaatctcagtttctttttctttttgataaaaaaatatttaactaggagtaaacaccaat

SEQ ID NO: 425300 - DNA, 201 bp, Homo sapiens
gatatagagcatactgacatttacttaacccctactatatgtcataccttggaaatgtgtcccctgctctttgggaccctgacagagaaaactagagttargtgcccagaaagaggaagcccaacgtgtcacaagatgatttcaattacagcagttgtctcccttatctgcagtttcgctttccgaagttttggttactgt

SEQ ID NO: 425301 - DNA, 201 bp, Homo sapiens
ttgccggttacctgaattaacctctccaggttcctgtcacagcattacaggctgctggctttgagcaaggcctatttaaaaccaaacatctttttaatggstacagtgtgtcatttggaaagatgaaaaatgttctggagatggatgatggtgcttggttgcacaacagtgtgaatgtacttaattccactgaattataca

SEQ ID NO: 425302 - DNA, 201 bp, Homo sapiens
ttgtttaatatatagaaccaagtttttagacatggaagccactaactgaaggagtggctggatctgaaggatgaaggaccctgcaaaatcgtgaatgactrtagtatacagttatgaaacaatgatggaagagcaagtcccagacattttgaagactattgaatagaagtaatgagctagaaactgagattgaaacttgct

SEQ ID NO: 425303 - DNA, 201 bp, Homo sapiens
agttatgaaacaatgatggaagagcaagtcccagacattttgaagactattgaatagaagtaatgagctagaaactgagattgaaacttgctgttttaacrtggccccctcttaggaggatacgtggagaccaggtgagaaatggaagagttctggttcaggtccaccagtcccacaaacccactgggtgagcatctctct

SEQ ID NO: 425304 - DNA, 201 bp, Homo sapiens
agtgaaacaagttgcaataagaattagacttctgtctttctaaggataattctctattcatgttttcctgaacacaaacaaatgctacaccaaaaaaaaaacaacccataatatagatagtattaattaggaggttctttaaaaacatttcaaaattctgctgcacaataggaaacctaattttcatactctgaaatgtat

SEQ ID NO: 425305 - DNA, 201 bp, Homo sapiens
tgatgcaatgtgagaagaatccagatgctgctgccgactttgaagctagcagaggccaaaagccagggaaagagggcagcctctaaaagctgaaaaaggcraggaaacagattcttccctagaactcccctagaaccatagaggaatggagcccaggtgacaccttgattttcacccaatgagacccacttcagacttttg

SEQ ID NO: 425306 - DNA, 201 bp, Homo sapiens
ctgtaaatggagggtagaaaaagctgaggttcaggtcccaaacttaattataagggtagtgagccatgaaggaagattaaattttcaaccctaagaggttkgctaccctgaggttagggcctcatttgggaatgggaacctgagacttgaaatagggacatgtggaatgatgcacttatcatcttgaatcttgaatcccca

SEQ ID NO: 425307 - DNA, 201 bp, Homo sapiens
aaggaacagcagacagtggtttggagggcttgagttcagtccttgctcttatttttcatgtagccataatttcattagctatgaaataggacaaatcgttycctccccaactaggggaataaatgtctataagctgtaatgtacaaatgaaatgtattattaatagtttttctaggtctattctagagctttgctttagtt

SEQ ID NO: 425308 - DNA, 201 bp, Homo sapiens
tggctgaactttgtaattagctttgcctttactgtttggtttttagtagagttttttgtttttttttttttagttctgatttaatcaagattcttccttaygactcccccgctccacccccagaattctggtttattcagatttctctatatcttggtcaaaacaaatccagattcacacatgaaacaagttcctaatctt

SEQ ID NO: 425309 - DNA, 201 bp, Homo sapiens
aagttagggaagatgaaagagcaaacggggtgagcaacaaaccttgttaacttcattatatagttgggaaatcctaatttttagtttcaggggaatagaaktaaatactgttactatttttgttcaaatgaatctcaaacttccccagcaatttgagttaactgggcatgtgttctgtgtgttttaagtgttctcagtcta

SEQ ID NO: 425310 - DNA, 201 bp, Homo sapiens
atttattgatatgagcactgttctgatataaaggatttaaaaccctgacagggtcccagaagatggtgctaatacctaagctctaggaagcttggagatartgatggcccataccatgtaacgttgaaatattagaattatgatggccaataattgaagggtggatcaaaagacccaaagatgtatacgagaacttattaa

SEQ ID NO: 425311 - DNA, 201 bp, Homo sapiens
actttcatgagaaggattgaatgatgatagaggggaggggtcagcgcagaagattcttaggcaaattctcccaatgccttgacggtgaaaataggcttacytaacctgtaggctcataatattcagctgcaagagtctagaccatagttaatgaattttataaatgatatggaaacttgctttttgtttcatgtcattgat

SEQ ID NO: 425312 - DNA, 201 bp, Homo sapiens
tgcccctttaatctagtaataactcacgggggaatatgtggtgttcttatgaatataagaagctcatcttaagcataagaacctcatattaagaatttttyggcatgcaaatataagaacccaatgcaatcttttacacaggattgattttggtttttgttaagaatttgcaacttccagaatatattttggaatcagtat

SEQ ID NO: 425313 - DNA, 201 bp, Homo sapiens
ttgttaagaatttgcaacttccagaatatattttggaatcagtataattaattcccatgtcttacatctcttttcatatttctaaaagtctatactttctygagaatatgtataatgaggcacaatactcttcactgtctgtattgtactctacttatcaagcctagaaatgggctaaatgttaaatatgtatgtttcagg

SEQ ID NO: 425314 - DNA, 201 bp, Homo sapiens
cggtggggtgcgtgcgcagggggcaggtgaactgctgcactttgcacttgctaggctaggttctccgcgggtggggaggcgcgggggcgggggacggccgmgtgtttaatctatcaccagaggtcatccaatggtaattgaaggatgagctgggaggactaggatctccctgtcccaaacacagagtgttttggggggctt

SEQ ID NO: 425315 - DNA, 201 bp, Homo sapiens
attgtcatgtaaaccatccaaatggcttccttatttatttgtataatgtccatggcatggcctgtagacactttcatttttgctgcaagaatttcttttahaagaatccacatattaaataatcttcctcattttctttttctgcatttccccactaagtctagtttaacaacaaaaaaaacatacctgtttgtaaaatag

SEQ ID NO: 425316 - DNA, 201 bp, Homo sapiens
  misc_feature (1)...(201): n = A,T,C or G
cctgcaaacctgagctagctacgaagcctgagctctctctaggttaagatgattaggccaacgaatgatcctggcgaacaagccagtggatttattgaggnagagcaccattatttgcaccagagcacttttagcttaaactctaaagtttaacgcgtgtctcagagttagaccactgtggttggtatccctcacacaggg

SEQ ID NO: 425317 - DNA, 201 bp, Homo sapiens
atctggagattttatgctttagaatttttctaggaatgaaatagtaaagtgctcatattatgactgcttcgtttccaaaaagttatgatttttttatagtkaaaacatgaaaatatgaatcaactctagagacacataaaaatttttctcctattccagaaaaatcatgtcttcttccagagtggggctccgtttggctgc

SEQ ID NO: 425318 - DNA, 201 bp, Homo sapiens
gttttattctttcagcatttgattcaattgaatcatatgaaactgagaataaaagcttttcaggagaagatttaggatgaaaaaaattacatcatatctcktttcttccaggagttagagtatgttgaaaaactatataaaataggaagttgcatgatcttcttcttacttcatcttttgtagttttcaaaatgcaaggaa

SEQ ID NO: 425319 - DNA, 201 bp, Homo sapiens
catcaaaagcttgtgtctgagctgagccatctggttatacaataagatgctgtaagaaaagtggacattgcctctcatgaatttcatgtttattcaatgtsacttccaaaagtcacatcccagaatttttccactaagctaaatttaaatataccagaagaaattaactattaaggttttatcacagaaaaaaaattcttg

SEQ ID NO: 425320 - DNA, 201 bp, Homo sapiens
ttataccataagaaattaatgaggctgagagtcttaaactgtgttttatgtatttaaaataattatgattaagggtcttttacacatgtgtatttatcatkaattcttgttcaaagaactattttttatggttcaagaagcaaaattaatttaaatcagcagctaatgcacagttctcaattccatgagtcaactggatac

SEQ ID NO: 425321 - DNA, 201 bp, Homo sapiens
gactggagtgcagtggcccgatctcgactcactgcaacctctgcctccggggttcaagcaattcccatgcttcagcctcctttgtagctggaattacaggsacacaccaccatacctggctaactttttatattgttttcagtagagatggggatttgccgtgttggccaggctggtctcaaactcctgacctcaagtgat

SEQ ID NO: 425322 - DNA, 201 bp, Homo sapiens
catctaatatcatccaaattttttttaagttttttttttttttttgtaacagcatgctcaggcattcttatgaggcagaagtattcgcattctaggatccygctgttcttagaacagtgaaaggatgtttttccctagaataaggctttcccagagaaaccagctttaacataataatcagctaactttctctggacaaag

SEQ ID NO: 425323 - DNA, 201 bp, Homo sapiens
gtaattggctcatggttctgcaggctgtacaagaagcatgatgctgacatctgcttggcttctggggaggcctcaggaaacttacagtcatggtggaaggrgaagggggagcagttatgtcacatggccagagaaggagcaagagagctggtggggaggtgctacctacttctaaatgaccagatctcacaagaactcact

SEQ ID NO: 425324 - DNA, 201 bp, Homo sapiens
agagcacttccagcttgacattttaaggaggttttcacactggcctgcccaggttgtctgtacactgttgaactgatgggggtgaggggaatgaggaaagyagcaaagatagtgaagcttgattgacttatttaagaaaagacttattgccactaagagtgaggtgtgcctatgtgtgtggacctgtagttagaacaaaca

SEQ ID NO: 425325 - DNA, 201 bp, Homo sapiens
cacaagttagatattttaggcacaatctgttgaaactgctgtctcttcccacctctatttctttgttatatgtcctttcatgatgagtggcagcggagcarctagtattggcttcatgagcttgcaacctgtgcaatagcacagggtcctatgcttggttcaatgttctgctgttactgtcaggaaattctgaataatttt

SEQ ID NO: 425326 - DNA, 201 bp, Homo sapiens
gagtgggtagttggtaggcatgtatgtagtcaggcacgaaaggtacagaaatttggttttgccctgtttgctcacaaccaagcagggagaagaatatacarccccctaagtatagtaccagtggtaaggacagaagggaagagccaaaaagtcctctgctggacagagtcagggaaggatcctcaaaggaggatgtaatat

SEQ ID NO: 425327 - DNA, 201 bp, Homo sapiens
accacacaatttaatactgtgtgcaattcaaatttatatttgcacttataatgccactttattgcattgagagcacttccagcttgacattttaaggaggktttcacactggcctgcccaggttgtctgtacactgttgaactgatgggggtgaggggaatgaggaaagtagcaaagatagtgaagcttgattgacttatt

SEQ ID NO: 425328 - DNA, 201 bp, Homo sapiens
cttacctgtgatcctgtgacatgctctcttaagataaatgtgcactcacacctcttttcaaggtgtgatcgctaaggagtgactgctacagctcaagaaakacttttgttgagtgcctaatgttgagccaacacaggatcaagcagtaagggtataagcaaaaaaagttatcaactgtactggtggtgctgagatgaagaa

SEQ ID NO: 425329 - DNA, 201 bp, Homo sapiens
tagcatatttgttttgattgtacgtgtgggagctgtgagaacagctctgcaaaaatactttgcaagttaccatagtgactaaagtgtagtgctttatgatrttgtctttcccctgggtcttaattcagttgcgtgctttttaaatcataatctaatagttgacgtttaaatttttctatttttaaaaaactgtatacacac

SEQ ID NO: 425330 - DNA, 201 bp, Homo sapiens
ctcttggcttgtcctggcacaccaggtacctgccattactctttaattggtctgcttttccttccttattcttccttctgatttcctaattaaaaaaaaaactaatctcaactatgggaaaaggggaaatgtcaaatacaaagtttaccttcttcatgattttgctctgggccattaaaactaagtggggttgtagatcct

SEQ ID NO: 425331 - DNA, 201 bp, Homo sapiens
  misc_feature (1)...(201): n = A,T,C or G
tgttaacatctgaaggctgttggtggcctccgaaaaggagatggtggactcagaacagtttctaatggacaggtgcatgcgtctcaaaaacctctgctctnggcactaattggtctattctagttttaccagatgtcagatcttgacccaaacagtttagtttctggattttggaaggaaatattgacaaggcctaggtga

SEQ ID NO: 425332 - DNA, 201 bp, Homo sapiens
attagtctgttctcacactgctactaaagacatacttgagactgagtaatttatcaaggaaagagatttaattgactcacaattccacatggctgggggggcctcaaaatcatggtggaaggcagatgaggagcaaagtcatgtcttacatggtggcaggcaagaggacttgtgcaggggaactcccattttatcaaacta

SEQ ID NO: 425333 - DNA, 201 bp, Homo sapiens
ccctctccttgtattagtctgttctcacactgctactaaagacatacttgagactgagtaatttatcaaggaaagagatttaattgactcacaattccacrtggctgggggggcctcaaaatcatggtggaaggcagatgaggagcaaagtcatgtcttacatggtggcaggcaagaggacttgtgcaggggaactcccat

SEQ ID NO: 425334 - DNA, 201 bp, Homo sapiens
aagacaggatctcgctgggttggccaggctggagtgcagtggcatgatcccggctcactgcaacctctgcctctctagttcaaacaatcttcccacctcascctgctgagtagctgtgatcacaggtgcatgccaccacacctggctcatttttgtattttttatagagacagggtcttgtcatgttgcccaggtgggtct

SEQ ID NO: 425335 - DNA, 201 bp, Homo sapiens
ataagttgggtaagatttcagtttctttctttacatatatgtcttttttttggttcaggtagacctgaacattctctaatcattgatttcctctgtaaatmtgaatactcccctctattaagtaaagagtctaccacaaagctacacttaatcatttttctgaacatgtaaatctcaaagagtctccatttcctctttgtt

SEQ ID NO: 425336 - DNA, 201 bp, Homo sapiens
ttttgtattttttatagagacagggtcttgtcatgttgcccaggtgggtcttgaattcctaggcttaagcaatccccacctcagcctctcaaagtgctggkattacaggcatgagctactgcccctagccaggtctctaaaattatttcctttcctccttctctctctttcttttttcttccttccttccctctctttcta

SEQ ID NO: 425337 - DNA, 201 bp, Homo sapiens
attcctgggaatgttatgaaatgagtctcaagaggtaatcagaggccagattatgaagttttattttttttaaattttttgagatggagtcttgctctgtygcccagggtggagtacagtggtgcaatctcagctcactacaacctccgcctcccagactcaagtgattctcatgcctcagcctcccaggtagctgggact

SEQ ID NO: 425338 - DNA, 201 bp, Homo sapiens
ggatccccctcagccatcatcatgactttcatctttctccatgttggatgccctggtcctcaacctgaatcccatgtcttctctttttcttttttgacttkcttggtttatggtgtcgttttggtggaacacatcctttagtagctttctgaaaaaaaatgaagtacattggtgaccctttgcatatcggaaagtgccatt

SEQ ID NO: 425339 - DNA, 201 bp, Homo sapiens
gctcactacaacctccgcctcccagactcaagtgattctcatgcctcagcctcccaggtagctgggactataggtgtgcactgccatacccagctaattgkttttttttttgtatttttagtagaaatggggttttgccatgttagccaggctagtcttgaactcctgacctcaagcaatctgccggcctcggcctcccaa

SEQ ID NO: 425340 - DNA, 201 bp, Homo sapiens
tgtctgacttctactcagtattgaagatatttagtctgattttctgtacttctatcaagtttctatagacaatttctctgcaggatactgtggaccctgaygcttcttgtatgtgttccacgtcttcctcactctgtgctttcacatgctagacccagtgtctctgtaacatgaccctgttgcctgttgacacacaaactt

SEQ ID NO: 425341 - DNA, 201 bp, Homo sapiens
atcaacactaccctcattgccatagcataaaaacaatagttgattttacaaatgtgtgtaaacatatttagggcatagcatttagttgaagaattacaggwatactgccaccatagaaaaatcttagaaaacaagggattgtgcattgggaaagtacttaaaatattaagattgatttccagtgactttagtacattttaa

SEQ ID NO: 425342 - DNA, 201 bp, Homo sapiens
caatgagatataaacagtacattgacagatcagaaagacaaacatttctcaaaatctccattgtcattttcagcttggaggtcagcacagagggcccccctgctccttgaatgagatccattaggagttttggaagaagtgccagccttctggtgtttccagatcactgcctggcaggaaacagtttattattttgagaaa

SEQ ID NO: 425343 - DNA, 201 bp, Homo sapiens
ctggcttgagaaaattttttagtctcttctttttcagtctctaagagtttttgtatctgtaaaatgggagaatagtgtcatcctatcaggatggttatgawaatcgatgactgtgtaaagccccaggtcctctgcctcctaccggctgtcattatttttagtgattctccattgccttgtggagggggtacagagcagttg

SEQ ID NO: 425344 - DNA, 201 bp, Homo sapiens
gacagtcttggagtgcctgttatgtttccatttcctatagtaaatgctattgtgacttttagagaaatataacaaagtaccttcccccaacaaaactgagkccatgaaataactgtgtgtgaagctattagaaagcaccacaggacacaataaaatgagttatggagtacagtataagttaaatatgttaggccactcagg

SEQ ID NO: 425345 - DNA, 201 bp, Homo sapiens
aataaacgttctccaaaacaggggttgcaggcttagaatctaatcaccaaagcatttggtgtcaggagtggttggagaacgcagacaatgaatgtgatttyggagctgcattacttgctggccagctggcaatatggaaactattgctggtgtcaggtgaaacatggaagatccctggcattctatagcactgaaactatt

SEQ ID NO: 425346 - DNA, 201 bp, Homo sapiens
aggatgatattggcctaagagaatagacaatggacagattccatgggctgttgctggtgagggacagagcagtggtgtggtaatgttataacttaaaatgrcagaagaaaggaggtttgagggaaagagcatgaatacattttttttacatgctgtcatttgacagcatgtaaaaggttggcagaggtaaaataataataa

SEQ ID NO: 425347 - DNA, 201 bp, Homo sapiens
atgagattcggaggggacaaacatcccaactatatcactacctaaacattatcttgcaattcctaaacttcagttgactgtatccctgacctctagccccrccccattccaggagctgtggccttttagtacggcttaccttgctcattgtgactttattgcattttttacaaattaaaggtttgtggcaaccctgcatca

SEQ ID NO: 425348 - DNA, 201 bp, Homo sapiens
ctcactacaacagggatgatgggatcctgaaatcataaaggccaggtggtggtgcttaatatcagaagcgagatgcaatgcaattatcataatgaaaagcmatgtcataatagtagttggggggatgtgacccacacagagccatggagatggtttattggacatagcaagatagatggacagtcatcaagggaatcactc

SEQ ID NO: 425349 - DNA, 201 bp, Homo sapiens
agcagcctctttcccaagctctctcaaaccatttttgggtgtgctttagagtcacccttttccccacagaaagcctcattatgtgaatgtgctggttaatkttatgtgtcagcttggccataatatccagatatttggtcaaacattcttctaattgtttctgtgaaggtattcttatgatgagattaatatttacatcgg

SEQ ID NO: 425350 - DNA, 201 bp, Homo sapiens
aaatccctaagcagcctctttcccaagctctctcaaaccatttttgggtgtgctttagagtcacccttttccccacagaaagcctcattatgtgaatgtgmtggttaatgttatgtgtcagcttggccataatatccagatatttggtcaaacattcttctaattgtttctgtgaaggtattcttatgatgagattaatat

SEQ ID NO: 425351 - DNA, 201 bp, Homo sapiens
gaaacagagcctgattctattttttgatatcttttaagctgcaccccttcctcttgcccttgtgccccacatttagacatgcaggataagaaagcctgcaygctccctcctttggcgctggagggaggttcaggccacatgaacctctgccctgagtgggaacgttccacccccttgtcagccaaaaatccctaagcagcc

SEQ ID NO: 425352 - DNA, 201 bp, Homo sapiens
ttgcaggaaaattgagcactaagtacagagttcccatatacttcttgctcccctgctcccagcctaccccattatcaacattccccccacagagtggtacrtttgttacaattgatgaacctacattgacacattatcatgtcaagttcatcgttaacattcgggttcactcttggtgttgtacagtccatgggttttgac

SEQ ID NO: 425353 - DNA, 201 bp, Homo sapiens
gaggatcgcttgaacctgataggttgctgtgagctgagatcacgcccctgcactccaacctagtgagacgccatctccaaaaaaaaaaaaaaaaaaaaaawatatatatatatatatataatgaagacaaaaaagagatgccacgtggtagtagtttcaggctaggatttcctttttgcctccttttacaaggctgaagta

SEQ ID NO: 425354 - DNA, 201 bp, Homo sapiens
ggaggatcgcttgaacctgataggttgctgtgagctgagatcacgcccctgcactccaacctagtgagacgccatctccaaaaaaaaaaaaaaaaaaaaawaatatatatatatatatataatgaagacaaaaaagagatgccacgtggtagtagtttcaggctaggatttcctttttgcctccttttacaaggctgaagt

SEQ ID NO: 425355 - DNA, 201 bp, Homo sapiens
tcgagtactacagttaaggttaaaattcacctctgatcactactctcattcctggttctctgaatgtccccctgccaagttatggtaagagtatagcatgycccaaatccagaattttctacatgctttacttacgtacatgtataaaccaataaatccaatatagtattgcttgtgtatgtttgtattagaaatgctctt

SEQ ID NO: 425356 - DNA, 201 bp, Homo sapiens
tgggaggatcgcttgaacctgataggttgctgtgagctgagatcacgcccctgcactccaacctagtgagacgccatctccaaaaaaaaaaaaaaaaaaawaaaatatatatatatatatataatgaagacaaaaaagagatgccacgtggtagtagtttcaggctaggatttcctttttgcctccttttacaaggctgaa

SEQ ID NO: 425357 - DNA, 201 bp, Homo sapiens
atcactactctcattcctggttctctgaatgtccccctgccaagttatggtaagagtatagcatgtcccaaatccagaattttctacatgctttacttacrtacatgtataaaccaataaatccaatatagtattgcttgtgtatgtttgtattagaaatgctcttatactataattttttcattcagcaagatagcttag

SEQ ID NO: 425358 - DNA, 201 bp, Homo sapiens
gtttgagaccgggctgggcaacacggtgaaacccggtctctaccaaaaatacaaaaaataagccaggcatgatagtgtacgcctgtggtcccagctactcrggaggttgaggtgggaggatcgcttgaacctgataggttgctgtgagctgagatcacgcccctgcactccaacctagtgagacgccatctccaaaaaaaa

SEQ ID NO: 425359 - DNA, 201 bp, Homo sapiens
tccagattaattttatatgaaaatcaattaagtgcttatcctgacctcatttccataataaataagttttttctttgcattttattttttactgtcatgcyaataataaactgacaactcagagatgcaagtgaaatttttcttagcaaggcctgttcatttggaggcataggtgttgttatcagcctatcgtggttttta

SEQ ID NO: 425360 - DNA, 201 bp, Homo sapiens
taaaatctcctgccatcctgctttgtcctgctccagatgtgaatcatccctttgtctagcatatccacactgtctatgccacatgctcattagtcacttaraagacaccttggttatcagattgactctcacagtatcgcagtgtttgtgtttaagaaacccttattctgcttaataatggccccaaagtgtaagagcagt

SEQ ID NO: 425361 - DNA, 201 bp, Homo sapiens
tgtttctgctctttcatcataaagatcagctgcattttatttttttcagtcccttagaataacatccagttctagtcagcatgtttaatgtgcttctcaakgatgttctagcacaataaatttctgtatctcgtgcatgtgtacatatggtaaaaatttcttcaagttctagccatgtgggggaggaatattgcggtcgct

SEQ ID NO: 425362 - DNA, 201 bp, Homo sapiens
atattgttctagtatcagatgctccccataaagcacagagaaatgaatttttccacaaattgagtttagcaagaaagactgtgatcttctttaataagagsgcaaaatgtgaatttattttaaggaattaaaaataaagagtttggctgggtgtggtggctcattcctgtaatcccagcactttgggaggccaaggtagga

SEQ ID NO: 425363 - DNA, 201 bp, Homo sapiens
ggtggaaagttccagagataaacaatttataagctttaagttgtatgctactctaagtagtgtgataaaatctcctgccatcctgctttgtcctgctccaratgtgaatcatccctttgtctagcatatccacactgtctatgccacatgctcattagtcacttagaagacaccttggttatcagattgactctcacagta

SEQ ID NO: 425364 - DNA, 201 bp, Homo sapiens
cctggcctcaatacacacacacacacacacacacacacacacacacacacacacacacatatacacacatctctgtgtgtgtgtgtgtatatatatatatwcatacacatatattacacatgtatatgtgtctatacatacgtatacatagacacatatatgtgtgtgtgtatatatagggaatatgtaatcatacacaca

SEQ ID NO: 425365 - DNA, 201 bp, Homo sapiens
ggtcaatagtctcttaattgtaattcaataaagttaatttaaagtggtatacaatttgtgagtgttataattacagttcacatatttttgacttcagtgayggtaccgtttgctagagaaatatgcttcagttgaggataagtccattggatgtgtgtattttgatggctatcaatattttaaagttcattacttaatatg

SEQ ID NO: 425366 - DNA, 201 bp, Homo sapiens
gtgagccactgtacctggcctcaatacacacacacacacacacacacacacacacacacacacacacacacatatacacacatctctgtgtgtgtgtgtgkatatatatatatacatacacatatattacacatgtatatgtgtctatacatacgtatacatagacacatatatgtgtgtgtgtatatatagggaatatgt

SEQ ID NO: 425367 - DNA, 201 bp, Homo sapiens
ttctgaacaggtgattcatatatatgccttgtctaacaaagctgatcagcatggatatcccacaggtacatgtggttttgactgctgtgaatatgaccacyactctaaggacagagcataaaacgttaacacgactgtggaaaattgatcccatggtttctcactaggaatacaatatgttctcactggtgttgaactctc

SEQ ID NO: 425368 - DNA, 201 bp, Homo sapiens
ccgggaggcggagcttgcagtgagccgagatggcgccactgcatgctagcctgggcgacagagcgagactccttctcaaaacaaacaaacaaacaaacaaaaaacaagaaaaaaaaacaatacctcacaaacatggtatgtgacattttgtctgccaaatatgtattctattctatctccttccacaggaaagagaatcag

SEQ ID NO: 425369 - DNA, 201 bp, Homo sapiens
ggatatcccacaggtacatgtggttttgactgctgtgaatatgaccaccactctaaggacagagcataaaacgttaacacgactgtggaaaattgatcccrtggtttctcactaggaatacaatatgttctcactggtgttgaactctcttctcgttttgttagcagagtgactccttactcccatttgttggtttagaat

SEQ ID NO: 425370 - DNA, 201 bp, Homo sapiens
catggtttctcactaggaatacaatatgttctcactggtgttgaactctcttctcgttttgttagcagagtgactccttactcccatttgttggtttagartggacactgatattccaggtttgcagcaccaacatcaacaaagtgcttaggaagcaaagtcagttcattcaatttgataaacctttattgagtaactaga

SEQ ID NO: 425371 - DNA, 201 bp, Homo sapiens
atttcattttcttgcttcattagagaacaaaaatcaagcttgatttcttccatgatgtatttatgtagatgacagaatggaagaggaattgttaaaatatrggagcattcctagtaagtaggaacatgccagcctaggagggtattcagaactcaggattcagaacagtggcttaggcttgcaaaagggaaagggagctat

SEQ ID NO: 425372 - DNA, 201 bp, Homo sapiens
gaatattttcttacataactgtaatgccaccatcacacccaacaaaatgataatttgatgataccatctaatacccagtgtataatccaggcaaatatctstttataggggcctgtttgaatctggatctaacatggctcatacatcacactgattgttgtatctctgagtctgttttgatctacaccagtctccctgtcc

SEQ ID NO: 425373 - DNA, 201 bp, Homo sapiens
cttcattatttcttctatgaagatccccagtgaacctccaggtggtgggggctacataaaaatatttaaggcagggaatcccctgtcccctcccacccttrtaatactatatcagatgtgttttgggagaatgcaaatcacccacattgtaaaaggctctgcaaaacttggtgcacactacaagtcacgctgggggagagg

SEQ ID NO: 425374 - DNA, 201 bp, Homo sapiens
tacattgtggttttcccgacttccacagctattgacttatttggctgtgggatcatgtatggttgagggcaacagtcagtagttgacgtgtaagcaatccrtaagattgttagcatgattcctgctcattgttgtcttgtcaccaagtggtttgggagaaccaaggggagagagagtctaactttcttgttctgaaagtca

SEQ ID NO: 425375 - DNA, 201 bp, Homo sapiens
taaccaaaggtttaattaccgcctgaaaacttttgtccttcactttgaatttgcttttgtaggcttaagggggacttttaagaagcctggaccatgcttgkaaacttcaaaaataactctagggttatgtatggctgccacacaagggaatgtcagctttctcctccaggttacacatattcaagagagtcacaaaccacc

SEQ ID NO: 425376 - DNA, 201 bp, Homo sapiens
agtaaatatcctttgcctgtcacaagaatttgcaattatactagaatgtcatcatttcaggaaactataaagcaatgaacatgtttattttcagccacaargggaaaaaatatcctgagaaccacattctcttggcagtttgaggcatttattagaaaatctgtaatttctttttgtaatcccacactcagtgggcatacc

SEQ ID NO: 425377 - DNA, 201 bp, Homo sapiens
agacattggaaaagaaatgttctatctttaaaataattttgaattgcaaagagagaaatttccaccacccccctttcatagactaaactaagaataatttwtcctagtctgcacttaattagaggcagtgcagcatcacactgctatactgtattttcaaatgccactctttttaaacatactgtagcgagattaatcggc

SEQ ID NO: 425378 - DNA, 201 bp, Homo sapiens
taaaaatacaaaaaaggaattagccaggtgtggtggcgggcgcctgtagtcccagctactcgggaggctgaggcaggagaatggtgtgaacccgggaggcrgagcttgcagtgagccgagatggcgccactgcatgctagcctgggcgacagagcgagactccttctcaaaacaaacaaacaaacaaacaaaaaacaagaa

SEQ ID NO: 425379 - DNA, 201 bp, Homo sapiens
cctctgattggattcactgaaagatgcaaggttttgtaccatagagaagtagaaacgtggttattagctagtacatttggaatctttgggccactgatccrcataatccatcactccattattccttcaagtgagaaatatttgctttggccacagtgcttttatatttttaaacttttgtgtaggaatgctggttcttct

SEQ ID NO: 425380 - DNA, 201 bp, Homo sapiens
gaccatgcttgtaaacttcaaaaataactctagggttatgtatggctgccacacaagggaatgtcagctttctcctccaggttacacatattcaagagagkcacaaaccaccaaaagctggaagttgttaacatctgaaggctgttggtggcctccgaaaaggagatggtggactcagaacagtttctaatggacaggtgc

SEQ ID NO: 425381 - DNA, 201 bp, Homo sapiens
ttgcgtagtagcatattccatcatttaaaatgtaaactaatgtaattatataatttaaataagtaaagtcttttgaatcttataatagttacttgtctttycttgtgtagccatctttacctgccatgtagataatgctttttatctggcggtaggcccccagccaaacgcctttcccaaacctctgggtaccacgctatc

SEQ ID NO: 425382 - DNA, 201 bp, Homo sapiens
cccgggaggcggagcttgcagtgagccgagatggcgccactgcatgctagcctgggcgacagagcgagactccttctcaaaacaaacaaacaaacaaacaaaaaacaagaaaaaaaaacaatacctcacaaacatggtatgtgacattttgtctgccaaatatgtattctattctatctccttccacaggaaagagaatca

SEQ ID NO: 425383 - DNA, 201 bp, Homo sapiens
acccgggaggcggagcttgcagtgagccgagatggcgccactgcatgctagcctgggcgacagagcgagactccttctcaaaacaaacaaacaaacaaacaaaaaacaagaaaaaaaaacaatacctcacaaacatggtatgtgacattttgtctgccaaatatgtattctattctatctccttccacaggaaagagaatc

SEQ ID NO: 425384 - DNA, 201 bp, Homo sapiens
aacccgggaggcggagcttgcagtgagccgagatggcgccactgcatgctagcctgggcgacagagcgagactccttctcaaaacaaacaaacaaacaaacaaaaaacaagaaaaaaaaacaatacctcacaaacatggtatgtgacattttgtctgccaaatatgtattctattctatctccttccacaggaaagagaat

SEQ ID NO: 425385 - DNA, 201 bp, Homo sapiens
atttaatttgtgtctttatccctcacatttcctgtaaactctgttagctccagaggtctgattagttgaagtttaatttttttggcaggaattcttcaaakgtgggctgtgtgcttcacactgcatcacaccaggaggctgcagtgcctaggtgtctcacttctggtgatacaaacatcagctgcctttgatgttgtgaag

SEQ ID NO: 425386 - DNA, 201 bp, Homo sapiens
cttctggtgatacaaacatcagctgcctttgatgttgtgaagttcctaattgacttttcaggacggtttcatccattcataatctttgcctaatacaatcrtatttttaggtgctgaaaaattgtgattttctaattctatcatcacttccgcatttattagttggatttttttctattaaaatttttttctcatcagttt

SEQ ID NO: 425387 - DNA, 201 bp, Homo sapiens
gagaatcgcttgaacctggaaggtgaaggttgcagtgagccaagatcgtgccacttgcactccagcctgggtgacagagcgagattctatctcaaaaaaaraaaagaaaagaaaagaaaattaaggttgccaatcagccaaccttaaaatattaagattatccttgatatctgagcgggccaaaggaatcacaaggtcctt

SEQ ID NO: 425388 - DNA, 201 bp, Homo sapiens
tttcactttttttctagagtctggaataatttaagtaagtttacaactataacaatttgaagattggataaaattgccctagtgacttcttttttttttttcgtaatgatagctttcttctatggtaatttccatattcaagttttcatttgggtaattttggtgacttatattcagctatgaaattatccatttattcta

SEQ ID NO: 425389 - DNA, 201 bp, Homo sapiens
ccttttcttatcaaattgtgagatctgtttgtatattacaaagatacccctttgtatatcaactctgacacttttttttttttttttgagacagagtctcrctctgtcaccccagctggagtgcagtggcacgatcttggctcactgcaacctccgcctcccaggttcaagcgattctcctgcctcagcctcccgagtagc

SEQ ID NO: 425390 - DNA, 201 bp, Homo sapiens
ctcctgagctcaggcagtctgcctgcctcagcctcccaaagtgctgggattacaggcatgagccatcatgcccagccactattatgtctcttatggtgatytgcgatcagtgatctttgatgtttggggtgccacgaatcacaaccacataagagataactgataaatgttgttattccaactgcttcatcgactggctgt

SEQ ID NO: 425391 - DNA, 201 bp, Homo sapiens
ttttttaaaaatgtaaatgtctatgtcaaaaaataatcttagatttttcattgtcttgatcaaatcatggttagctttgaagaatggatgattttgtggtgaaaattcataagggaaaaatgtctatataaacggactgcaccaaacttcaaaatacttttattcctttgttgttctccagtttggttttggtagccttat

SEQ ID NO: 425392 - DNA, 201 bp, Homo sapiens
atgaccttaagttgaagtcaaatgcttatttaccattctgaaaatccaagggcctttaggaattgtactaaatctactctgtctgtgctctataaatgcarcaacaaagcctggatgacagcacatctgtttacagcatggtttactgaatatcttaagcccactgttgatacctactgctcagaaaaaaatattcctttc

SEQ ID NO: 425393 - DNA, 201 bp, Homo sapiens
tttttttaaaaatgtaaatgtctatgtcaaaaaataatcttagatttttcattgtcttgatcaaatcatggttagctttgaagaatggatgattttgtggtgaaaattcataagggaaaaatgtctatataaacggactgcaccaaacttcaaaatacttttattcctttgttgttctccagtttggttttggtagcctta

SEQ ID NO: 425394 - DNA, 201 bp, Homo sapiens
caatttgctgtggcatctcttggtattcccctgcccacttgtgatatcaaatagacaagtgcagcagccatgccctaagctagggctcagaaccccaaaartgagggtgtgtgctactttgccaagctgtctagatcagcggaagtgctacctagggacaaagggaacctggattaggtaatagaggaagagatgggctgg

SEQ ID NO: 425395 - DNA, 201 bp, Homo sapiens
acatgctacagagaaattttcgtgaaaggaaaagccaattgatgcagtaaacttcactgtggtcttattttaacaaattaccacagccactccagccttcrgcagccatcagcctgatcagtcagcagcaatcaagatgaaggcaagaatgtccaccagcaaaaagatgatgacttgctgaagccttagcattttttagca

SEQ ID NO: 425396 - DNA, 201 bp, Homo sapiens
ctttttttaaaaatgtaaatgtctatgtcaaaaaataatcttagatttttcattgtcttgatcaaatcatggttagctttgaagaatggatgattttgtggtgaaaattcataagggaaaaatgtctatataaacggactgcaccaaacttcaaaatacttttattcctttgttgttctccagtttggttttggtagcctt

SEQ ID NO: 425397 - DNA, 201 bp, Homo sapiens
ggcatctcttggtattcccctgcccacttgtgatatcaaatagacaagtgcagcagccatgccctaagctagggctcagaaccccaaaaatgagggtgtgygctactttgccaagctgtctagatcagcggaagtgctacctagggacaaagggaacctggattaggtaatagaggaagagatgggctggttttgagacca

SEQ ID NO: 425398 - DNA, 201 bp, Homo sapiens
cagtaaacttcactgtggtcttattttaacaaattaccacagccactccagccttcggcagccatcagcctgatcagtcagcagcaatcaagatgaaggcmagaatgtccaccagcaaaaagatgatgacttgctgaagccttagcattttttagcaaaaaagtttttggttttttttgagacagggtctagatctgtcac

SEQ ID NO: 425399 - DNA, 201 bp, Homo sapiens
tggtttttaaaatttggcttgattgtgattttctttggttaaaattccctctgccacaggccttgctgaggatctggtgctgcatgttcctggctgcagcrtgtttctctttggcgaagctgacctgcctgagaagcgcagtcttgtgcagagaaggaagcagctgggctggttcacgaggagggatttcagtgctcttca

SEQ ID NO: 425400 - DNA, 201 bp, Homo sapiens
cagtgctacagaactgtagctccaaatggaggtgctggcctgggtaggcaaagagctgggcagggccaggaaacatgtatttagtaggacaggtttttggrcatcacagtttgtgcttttaggctactgcagcagcccaaatgtgagttacactaagttatggctggagcacatacatgtgaccagaacatttggagagtt

SEQ ID NO: 425401 - DNA, 201 bp, Homo sapiens
tggaaaggtgaaatacaggggattctggttctttgccctaccatggaaggaacatttggacaccacattactttttttggaaaacggaagctaaagctagmggccaaaaaagctctcaaaagagaagatgaagaaagttaggaatattggtctgattaaaaagctctcaaaattatctagtgaatgctgacattagatagg

SEQ ID NO: 425402 - DNA, 201 bp, Homo sapiens
ttcaacctccaccttccaggttcaagggactctcctacctcagcctcctgagtagctgggattacaggtgcacatcatcacactcagctatttttttttttccagtagaaacagggtttcaccatcttgcccaggctggtcttgaactcctgagctcaggtgatctgcccacctcgggctcccaaagtactgggattacag

SEQ ID NO: 425403 - DNA, 201 bp, Homo sapiens
gggcagaaagagaaattttctcttctttttctttctttcttctttcaccttccaagggagagaagtttccccaccttggagaggaaactactaccctgatkaggtcagaaacatctcagattcattaattgtctccgttttatcactacttgaataagaaatagtaataaaacaaaaatattgtgtaactaaagcttacta

SEQ ID NO: 425404 - DNA, 201 bp, Homo sapiens
ctgcttaaacaatctggcataaagagtttacatccatatcagttcaccataaggtctcaacaatatctaaatcaccagccatacagtatatgataaatacrgtgtttccacacaagaaaataacagaattgtcaggaaaacatcaggcctgttatatttctctgtgaaataatagcgactgaatctcagtttctttttctt

SEQ ID NO: 425405 - DNA, 201 bp, Homo sapiens
ctctctcctcatgtatgctttaatactggccaccaaagaggagtataatataatgaatggaacttctgaagacacccctaaacaactttggcactcctaaagtgaaacacttttctgtagagttaaaatatatagaatcctttcacctttaattgattgaaaatgatggtgcctggaactatttttgagaataattttgat

SEQ ID NO: 425406 - DNA, 201 bp, Homo sapiens
ttatagcctaaatacttttgttatggaaaaaaatattatcagcaaaataaaatcagatactaagtgactaaaaaatgggagggttaccaaaaaaaaaaaaatcaggtactaagtgactaaaaaatgagagggttacaaaatataatctctctttcaaagcatgattgttcattcttgccttactacttttaagatgatctg

SEQ ID NO: 425407 - DNA, 201 bp, Homo sapiens
tctcagcccgggaggctcctcgagcagcgcccgccgcgtccctcggccttctgtggccacgctttggcgggggtggggggggcggggctggtctttggggrcatcgttccgtctctggggatgcggaggaactgggaggtcgcttctgggctgtagttactcagggccccaaaactgcagtgccccccgtccccgggagag

SEQ ID NO: 425408 - DNA, 201 bp, Homo sapiens
ggtgagcgccaccaagcccagctaattttttgtatttttagtagagacagggttttccatgtaggccagtctggtctcgaactcttaacctcaactgatcygcctgcctcggtctcccaaagtgctgggatgacaggtgtgagccactgggcccggccttcccagataatttaaggagagtttggcctgtgccggagcata

SEQ ID NO: 425409 - DNA, 201 bp, Homo sapiens
ggaaccctgggctcgggccccctgtcgctgtggttctggggtctgggtgctggtgccgtctgctggagagtggtctggagctgcagctctgtggagtctgraaaggggctgcccagtgattctcaccagctagtcagtggtggagaagttgcctgggtgtggaccacagagctggggatggaaccaggggccagggctggt

SEQ ID NO: 425410 - DNA, 201 bp, Homo sapiens
tggccaggctggtcttgaactcctgacctcaggtgatccacccgcctcagcctcccaaagtgttgggattacaggagtgagccactgtgcctggccttcarctgcttcctaagagtctaagttcttgttccaccctttaaggccagtgaaggacccgaacactgtgtgtgccggtgtcacgcagccagcagggctctgctc

SEQ ID NO: 425411 - DNA, 201 bp, Homo sapiens
ccctggagcaccaggtcctctgcactgctgagtgtgtgcttgtcctgcccattgccctgctcgggtttctgtgactgcgtaactggctgccccatgcaggrtgttttccaaagtaccgctgtctgtggtctgtgtgctccgtcatccagcagggcctgaggtggcaaggccggccgggctggtggggcggtcctcagagtt

SEQ ID NO: 425412 - DNA, 201 bp, Homo sapiens
gggcgtggggactacctggccgtggtgctggccacccaaggccacacccaggtgctgattcaccagctgagccgtcgccgcagccagagtccgttccgccrcagccacggacaggtgcagcgagtggccttccaccctgcccggcccttcctgttggtggcgtcccagcgcagcgtccgcctctaccacctgctgcgccag

SEQ ID NO: 425413 - DNA, 201 bp, Homo sapiens
tgctgaggcctgtgccaggctggagctgctcagagatttcggggtggtgggcttcctgggatccccccaaggtcaaagggtaccctgtatcccctgaagtraccattttctctctctctctgcaggccagcactccttgcccgaggacagagatggcgagcgcccggattggggatgagtatgcggaggacagctctgatg

SEQ ID NO: 425414 - DNA, 201 bp, Homo sapiens
cgggggcgtgcccgccttcgctctggggttcctgcgcccgagcactttactgcccccacgggtgagaggtgggcctgttttccccatcagccttggttccrccagtaaacccgatccggttggagccatcctcacctccgcagtcgagggcagaatctgttttccaggttgggatgtgaattctcagtggcgcccactctg

SEQ ID NO: 425415 - DNA, 201 bp, Homo sapiens
tggggccccaccttgggctgggggttcgctcagctggtttggactttgaggaggaggagactaagcaggacctggctttctcccctctggccccggcgccrgggcccagcacccctgctggaaccttcagtagggtgagatgcagcaggtgagcctcccgccctggccttgccctgagcacttcaacagataaaaccctga

SEQ ID NO: 425416 - DNA, 201 bp, Homo sapiens
agcaccaggtcctctgcactgctgagtgtgtgcttgtcctgcccattgccctgctcgggtttctgtgactgcgtaactggctgccccatgcagggtgtttyccaaagtaccgctgtctgtggtctgtgtgctccgtcatccagcagggcctgaggtggcaaggccggccgggctggtggggcggtcctcagagttccccac

SEQ ID NO: 425417 - DNA, 201 bp, Homo sapiens
cctttcagctccgaggcctccaggtcgttgttccctgttcactttcttctagcctcgttagacaccccaaactctgaccccagtccacgggggctctgacrtctctttcccctgcactccctcttgaccctgcccagacctccccatgctggcccgcaccttcccacctgctcctgtctggcctcctgcattcccgctctg

SEQ ID NO: 425418 - DNA, 201 bp, Homo sapiens
ccctgccctgccgtggcgcccatgcacctgcccgcgtgtcctgtgctttagctgaggggccgaggccctgccctgccgtggcgcccatgcacctgcccgcrtgtcctgtgctttagctgaggggctgaggccctgccctgccatggcgcccgtgcatctgcccgcgtgtcctgtgctttagctgaggggcaccttgggccc

SEQ ID NO: 425419 - DNA, 201 bp, Homo sapiens
ggacagggcccaagaagatggggtgggtgctgtacctccctcttccttccctggggtatctgtgggccacggcagggcccacagctgttgctagtagcctscttggggccagtgggtttgatttatttttgtgtttgtgtggtttgagggcaggcatcccttccccaccctttgcgtccctgctacagtgacccctctttc

SEQ ID NO: 425420 - DNA, 201 bp, Homo sapiens
gccgggctggtggggcggtcctcagagttccccacgctgctggctgcccaagtccctgcctgaggccctgccctgttgtggcgctcatgcacctgcccgcrtgtcctgtgctttagctgaggggccgaggccctgccctgccatggcgcccgtgcatctgcccgcgtgtcctgtgctttagctgggaggccgaggccctgc

SEQ ID NO: 425421 - DNA, 201 bp, Homo sapiens
ccgccgacgccccgcacctgcccgctcaggccagcagcccctgatgtccctgccctggagactttcactatcttccatcccatttgtccccaacgttgacyggccactgaggttgggggttcatgtggaggtttgcaacccccactaggcccaggtctggaaatgggaggcctggaggtgaggggtaggtgggctatggac

SEQ ID NO: 425422 - DNA, 201 bp, Homo sapiens
tcatcacgcccggctaatgtctgtatttttaggagagacgggtttcaccatgttggctgagctggtctcgaactcctgacctcaggtaatccacctgtctkggcctcctgaagtgctgggatgacaggcgtgagccgccgcacctggccatcaatgcatttaattgtgaaggtgcttggagcgtccctccgctaggcggtg

SEQ ID NO: 425423 - DNA, 201 bp, Homo sapiens
tcttctgccacgtgcttctgcctgtccccccactccctcctgtcgctgtttcctccacagtggttggcaagacgtggcccctgtggcctctgcctcgtgcrtctgaaggacatcccagccacagcatcacatcagactggaacagtggcgggatggggctgggcatcaggcagcatgcatgtgtcatgtcacggacacctc

SEQ ID NO: 425424 - DNA, 201 bp, Homo sapiens
tgaaagtgagagaaggccaaagacctggtattaaactgagggaaggccgaagacctggtattaaagtgagagaaggccaaagacctggtatgaaagtgagrgaaggccgaagacctggtattaaactgagggaaggcctaagacctggtattaaactgagagaaggccgaagacctggtattaaagtgagagaaggcctaa

SEQ ID NO: 425425 - DNA, 201 bp, Homo sapiens
cgcggtccttgctctgcagaggggagggaggagtgtcaggccccggcagagcccagcgccagtctgcgcctctctggcctccctgctgggtgccatctcargtggccagcgccaaggcacctccttcccggctctccccagcttccctcaagcgttttggggaggggagcatactgctgcacagccgaaattgtaaaatta

SEQ ID NO: 425426 - DNA, 201 bp, Homo sapiens
gcccggggcgtcctgcggagagccccacagtgggaggcccttgtagcggggagcccggtgactgctgggggtcagctgctggcggcccctgtggagacctsgcgacctgccaagggctccggacctgcctgggtggacccagggtgggcgtgcttctggctgcagggccgggccacaggcttccctctggctttctgccct

SEQ ID NO: 425427 - DNA, 201 bp, Homo sapiens
cttcgggcgctgggcctggctgagcgctgtcgccccctggtggactctgtgccccacagctgtcccacggggatgctgcgcccctgggaacccagcacctycgaaggccacctctgccccctgcccagagcctgcctgtgccgtggcctgtccacatccagcacaggggccacggggcacagagcgctgggtgacaagtct

SEQ ID NO: 425428 - DNA, 201 bp, Homo sapiens
tgggtgggcccctttggccatccctagctcttacccctcatgcagctccctgcaggggactccacactccactgggagccgagtgtcctagggacgccctsgagaggagccccaggagaaggccccagcccccggcaggcctgtgttacaggtgtgcctgcctgtgccctgttggggagccctgcccgtgtggcctcgcct

SEQ ID NO: 425429 - DNA, 201 bp, Homo sapiens
gcctcaacagctccagtgggtgggcagttgcaggcttttgctcttacagttgacctgacagtaacatgctgtttctcacatgtgcacaccattcttggggmaaattccaagagaatttctaggtcaaaggataaatgcttttttttgtttgagacagggtctcactctgtcactcaggctggagggcagtggtgcgatgtt

SEQ ID NO: 425430 - DNA, 201 bp, Homo sapiens
cttccccccgaccatgctgcccccgtcccaggcggggctcggcaggagcgccatgtggggcccctgggaggagtcctgtggctttgacatgaatgggggtrcgggtggttggcggtgggtcttggtcctcagctggcggctttgctcctgactgccccagtggcttccgtgtctagcctgacacccgtgtcagcccaggga

SEQ ID NO: 425431 - DNA, 201 bp, Homo sapiens
tggtcctcagctggcggctttgctcctgactgccccagtggcttccgtgtctagcctgacacccgtgtcagcccagggacagaggccccgggaggctgcartccagccctcacagaggacagggccgtgggcaggacctgcggcgccgggtgccagccacagcccccagaggcccccttagagctgggtgttctcggcctt

SEQ ID NO: 425432 - DNA, 201 bp, Homo sapiens
cagagcgctgggtgacaagtcttttgtcacctgccaggaccctgggactgcggcccatgagcagcgaggctgggactccagcgtgcggtgcttcagcccckgccactgtgagggttcgggagcccagcccggtacccgtccgcagaggccaggcgggggcagccgaccgcagccgggtgtggaactgcccttgtgcgcgtc

SEQ ID NO: 425433 - DNA, 201 bp, Homo sapiens
acctggccatcaatgcatttaattgtgaaggtgcttggagcgtccctccgctaggcggtgatgccatgcactactgcagccgcccctcagctgctttcccrccaccagcctccctcatggtgttgctgcttcatcttttcctcttgtttagtgatgtttttctttcattaagaatgaggctcgcacagctgggcttaactg

SEQ ID NO: 425434 - DNA, 201 bp, Homo sapiens
acaagtcttttgtcacctgccaggaccctgggactgcggcccatgagcagcgaggctgggactccagcgtgcggtgcttcagccccggccactgtgagggktcgggagcccagcccggtacccgtccgcagaggccaggcgggggcagccgaccgcagccgggtgtggaactgcccttgtgcgcgtctggggcttggggcc

SEQ ID NO: 425435 - DNA, 201 bp, Homo sapiens
aaagtgttgggattacaggagtgagccactgtgcctggccttcaactgcttcctaagagtctaagttcttgttccaccctttaaggccagtgaaggacccraacactgtgtgtgccggtgtcacgcagccagcagggctctgctcagaggcagctgtggtcctgctcagagagaggagtgggtgggttggtgcgtggttgc

SEQ ID NO: 425436 - DNA, 201 bp, Homo sapiens
cttccaggggccaagtggcactggtgcatgaggagatgcccctctctccagtcaaggctcgtggaggcaggacacccactgccctcgctggggctgggagccccccctccgctgggcagcacagctcgctccactccttgtggccacctgcagcgccctcctcaccctcagggcccccgggtgcccgacaggcccgagtcg

SEQ ID NO: 425437 - DNA, 201 bp, Homo sapiens
tctctgctagctcagccctgtcttggttgtggggatcatcaaattgggtggtggaggggatggacagccagcccctcacagccccctcggccgcggccgckctgggttgttgaaactgccccattgctttgtgaagcgaattcaactcatcctggctcccatgggctgaatggcccgcaggccactctaggcgccaggttc

SEQ ID NO: 425438 - DNA, 201 bp, Homo sapiens
gccgccaagatggccccgtcatgcccagttagtggcctcaggttaggcctgtttctgtgtcatcccgaaggcagtccagggctccttacgcctgtatctcygccacctcccactcgcatcgtgggtccacggggccgggccaccaggggctctgccagacaccctcgcccgccacagccatctggaggattctgcccccga

SEQ ID NO: 425439 - DNA, 201 bp, Homo sapiens
tgcctgtaatcccagctactcgggaggctgaggcgttagaatcacttgaacctgggaggcggaggttgcagtgagccgagatctcaccactgcactccagyctgggtgacagagtgaggctctgcctcaaaaaccaaaacaatgttttcgcataataacatatccaagtacttgaaaggtactagaggtgtctgcggagtc

SEQ ID NO: 425440 - DNA, 201 bp, Homo sapiens
ggtgggcgtgcttctggctgcagggccgggccacaggcttccctctggctttctgccctcaggcctttagcattgacatgcacacgaccctgcctcctttmtaaggactgtgtagaattacgtggcattcagtgagcagctgcacgtggtgttctagggcacctttggatgctcaggtgctcctgaggggtgtgccaggga

SEQ ID NO: 425441 - DNA, 201 bp, Homo sapiens
cctcactgccgccgcctcctcaggtctacaggggccacagtgaccttgtccggtgcctcagtgtctctcctgggggccagtggctggtttcaggtgggtcygagctgggggcagccttgagctggggggcaggtgggatggccaggtgttgagagctgtctctgccgcatccaggctctgacgacggctccctgcggctct

SEQ ID NO: 425442 - DNA, 201 bp, Homo sapiens
aatttctaggtcaaaggataaatgcttttttttgtttgagacagggtctcactctgtcactcaggctggagggcagtggtgcgatgttggctcaccaaaayctcaacttcctgggctcaagggatcctcctacctcagcctccctggtagctgggactacagggtccccgccaccatgcctggctagttttgttttgtttt

SEQ ID NO: 425443 - DNA, 201 bp, Homo sapiens
agaaaaaagcactagtaagagaaggcctaagacctagtattaaagtaagagaaggcctaagacctggtatgaaagtgagagaaggccaaagacctggtatkaaactgagggaaggccgaagacctggtattaaagtgagagaaggccaaagacctggtatgaaagtgagggaaggccgaagacctggtattaaactgaggg

SEQ ID NO: 425444 - DNA, 201 bp, Homo sapiens
gaggcctcagaggaggagcgccaagtgggcctgcggctgcgcatctgccacgggaaggtacgtggggcgccttgggggtgaggctgcagcgggaggggccyggctcagccactcagccagccttgctctcctgcagccagtgacgcaggtgacctggcacgggcgtggggactacctggccgtggtgctggccacccaagg

SEQ ID NO: 425445 - DNA, 201 bp, Homo sapiens
agtggaggccctgggggctggggagccaggggtggcactgtgcttaggggccgtgtctgggcctggctcacagggaggactcggtgctgctgctgaacccrgctctgggggaccggctggtggcgggcagcacagatcagctgttgagcgccttcgtcccgcctgaggagccccccttgcagccggcccgctggctggagg

SEQ ID NO: 425446 - DNA, 201 bp, Homo sapiens
tttgttcagtgtactctcgtggcaaaactgccggcgagtgtactttttctgcaataaataaaaatggccttactaaataaattaaatttatgttcaagtgytatttctttacggcactggggaacaagcatttcaaacactactaaaaatacaaaaattagctgggcatggtggcgtgtgcctgtaatcccagctacttgg

SEQ ID NO: 425447 - DNA, 201 bp, Homo sapiens
gtgcatctatattctacttggatttctgaatcattataggtgatatttgctcatgaaataagcacttagatttaaatgagaaattgccacaatcaaaaatkaagaaaaaactacatccaggtttaaagaaagcgacaatatatacaacatgaaatgtgtgaagcattaaaaaaatactatgtccaagggtgagacacacag

SEQ ID NO: 425448 - DNA, 201 bp, Homo sapiens
attataggtgatatttgctcatgaaataagcacttagatttaaatgagaaattgccacaatcaaaaatgaagaaaaaactacatccaggtttaaagaaagygacaatatatacaacatgaaatgtgtgaagcattaaaaaaatactatgtccaagggtgagacacacagtgattaaacacattgtccaattttgattctgc

SEQ ID NO: 425449 - DNA, 201 bp, Homo sapiens
ggaagttgtcaggaggtggggtaaatgctctggtgtggaaagaggactccactgggccagaaactgaccagtgtcaaggccatgtggggaaaggaaataayggctgggtcatgggctaagttgtggagagggagcaaagttccaagagcatgagccagtccccagctgcagctcacttaacaaaatcctcatgcttgtcat

SEQ ID NO: 425450 - DNA, 201 bp, Homo sapiens
agctgcagctcacttaacaaaatcctcatgcttgtcattgtcggtttttgatggaagaagccaaaaatctgtttttaagttttttttttttaatttaagayggattcttgcactgtcacccaggctggaatgcaatgttgcagtctcagctcactgcaacctctgcctcccaagttcaagcaattctcctgcctcagactg

SEQ ID NO: 425451 - DNA, 201 bp, Homo sapiens
cgcctgccaccacgcccggctaattttttgtatttctagtagagatggggtttcgccatgttggtcaagatggtcttgaagccctgatctcaggtgatccrccagcctcggcctcccaaattgtggggattacaggcctgagccaccgtgcctggcccccaaaatctgtttttgttgatccttcttgtctaagatctcctt

SEQ ID NO: 425452 - DNA, 201 bp, Homo sapiens
ctggcaagtggaacagcataaatagcacaaagacaaatgattatggatattgttctggaggaagtaggagcagaattccacattcattacatattgtcttrttatcatcccttgatgttttgtgtttggggctcatgaccttggccagtggctccatggtttttatcctgcacaggcacaagcagcaggtccagcacattc

SEQ ID NO: 425453 - DNA, 201 bp, Homo sapiens
ttcaaaaatgttctgaagccattcttaggctcaatactcatcttagtaacacttaattcagtgaataattttccctacctcgagttttccttttacataayagacttatattttaatatacctaacaattctgacattgaaataattttttttttgagatggagtctttctctgtcacccatgctggagtacagtggtggg

SEQ ID NO: 425454 - DNA, 201 bp, Homo sapiens
ttcctaagctggtcagatagttctccgatttatgtggattgtcttctttttgtataatgaatggccgtttgttgatttcttcctgcaggttaagcaccgcratgggcagtcaattgcagtgtatataagactcagaatccgtctttgcccttcaaggatttttcacgtatcataaacaacagttacagatgaaatgttttt

SEQ ID NO: 425455 - DNA, 201 bp, Homo sapiens
gtttcctaagctggtcagatagttctccgatttatgtggattgtcttctttttgtataatgaatggccgtttgttgatttcttcctgcaggttaagcaccrcaatgggcagtcaattgcagtgtatataagactcagaatccgtctttgcccttcaaggatttttcacgtatcataaacaacagttacagatgaaatgttt

SEQ ID NO: 425456 - DNA, 201 bp, Homo sapiens
tacaggtatatcccagtagataaactggggtcatctggcccataatttaaaggtagacctgtatgttcaaattatgttagtgaaataaaattcatgacatraacattttccttggaaagaaacatcctgtaagtggctcctggagcctaaaacatcctctggaacttccttgtgcccatgtaggtcatgactggtaaaatt

SEQ ID NO: 425457 - DNA, 201 bp, Homo sapiens
gttttatctcctactcatgtcccttgaccccttgcttagcaacagtcatttctgtatccttcttggttaagatgagaaagaatcttcttttttaatttcarcatgaaatcatttaagcattcaataaatatcatttggtcttgtatgattattcttttaggattatactaaatcagtgcatctatattctacttggatttc

SEQ ID NO: 425458 - DNA, 201 bp, Homo sapiens
tggtgctgcctcagatgccttagaagacaatgctgccaagaacacgtctagcattgaagccacacacaatggctcatgcctgtaattccagcactttggamggcagagactagaggatcctttgagcccagaagttcaagaccagcctgggcaacatagtgagaccccatctcttaaaaaaagaaaagaaaaaacatctaa

SEQ ID NO: 425459 - DNA, 201 bp, Homo sapiens
acaaccactgttagtattttggtatatttccttctagactcttttttatgtgggtttgcatctgtatctgtatgtatgtatatatatatatatatacatayatacatacatacagttggacaattggacatttttttcactgttcatttattcacttgaaattgtaacttaaaaaaagaaaatgtaactttaaaaataaaa

SEQ ID NO: 425460 - DNA, 201 bp, Homo sapiens
taattgccagccgaaataaggtctctgaaagaaagaaacaagaacatgataggactaacctaggcatagctgtgctcagagtatataatttattaaaaatytactacgtgccaggtactttgctaattgctttacacggattcttgcttaatcctcatgaataataccataatataggtactattctctccattaaatttt

SEQ ID NO: 425461 - DNA, 201 bp, Homo sapiens
aagaggaagttttttttttttttgagacagagtctcgctctgtcacccaggctactggagtgcaatggcgttatcttggctcactgcaacctctgtctccygggttcaagcgattctccgcctcagcctcctgagtagctgggattacaggcacccgccatcatgcccggctaatttttgtatttttgtagagatggggtt

SEQ ID NO: 425462 - DNA, 201 bp, Homo sapiens
atgaaatggatttgggggacacataacagtgtctctggcacaaagacatcatttacggtagttggtgagccttagtcttgccttttcttttggatgctgawgcagggaggagtcctggaacccagaggggcattaatattaatggaaggcattctggcttcacatattatcacatgccccatcatttcacctagatagacg

SEQ ID NO: 425463 - DNA, 201 bp, Homo sapiens
gaccaacctggccaacctggtgaaactccgtctctactaaaaatacaaaaaattagccgggcgtggtggtaggcacctataatcccagctacaggaggtgraggcaggagaatcacttgaacccaggaggcggaggttgcagtgagtcgagattgcaccattgcactccagcctgggcgacggagcaagactctgtctcaa

SEQ ID NO: 425464 - DNA, 201 bp, Homo sapiens
caactgttgacaaaattgtgactattcattaatacagtagaaaagaacttggcctccttttcatggaagctgatgatgagattaaagcactgttggcctgygagtggagtatagatttgggctgtccagaacacataaaatttgtatttatctttctgataaaaaaaagtaaaatagtctgagtgccaatttttccacttt

SEQ ID NO: 425465 - DNA, 201 bp, Homo sapiens
aggctggagtgcagtggagcgatcttggctcctccacttcctgggctcgagtgatcctccttccttagcctcccaagtagctgggaccacagatgcgtgcyaccatgcccagccaatttttgtatttttggtagagatggggtttcgccatgttgcccaggctggtctcaaactctgcagctcaagcaatccacccgcctt

SEQ ID NO: 425466 - DNA, 201 bp, Homo sapiens
ttttctccagaaaacgcccactcctggatcttcacattgaactcaatggctacatgtatgattggaacagcagagtttctgccaaggagaaatattatgtytggctgcagcacactctgagaaagaaacttatcctctcctacacataagaaaccaaaaggctgggcgtagtggctcacacctgtaatcccagcactttgg

SEQ ID NO: 425467 - DNA, 201 bp, Homo sapiens
agactccatctctacaaaaaaagacaaaatttagctgagcgtggtggcgtgttcctgtagtcccagctacttgggaggctgaagtgagtggatcccctgarcccagagaggtcaaggttgtggtgagctgtgatcgcaccactgcacttcagcatgggagacagagtgagaccctgtttcagaaaaaataaataaataaaa

SEQ ID NO: 425468 - DNA, 201 bp, Homo sapiens
tgcaaaattacagtcctgataacagctacccagagatcctgtaacggcatttgccctcattattattattattattattattattattattattattattwtttgaatttgagacggagttctgctctgttgcccaggctggagtgcagtggcgcaatcttggctcactgcaacctctgcctcccgggttcaagcaattct

SEQ ID NO: 425469 - DNA, 201 bp, Homo sapiens
agcaagactccatctctacaaaaaaagacaaaatttagctgagcgtggtggcgtgttcctgtagtcccagctacttgggaggctgaagtgagtggatcccytgagcccagagaggtcaaggttgtggtgagctgtgatcgcaccactgcacttcagcatgggagacagagtgagaccctgtttcagaaaaaataaataaat

SEQ ID NO: 425470 - DNA, 201 bp, Homo sapiens
aaggctgtgcaaaattacagtcctgataacagctacccagagatcctgtaacggcatttgccctcattattattattattattattattattattattatyattattatttgaatttgagacggagttctgctctgttgcccaggctggagtgcagtggcgcaatcttggctcactgcaacctctgcctcccgggttcaag

SEQ ID NO: 425471 - DNA, 201 bp, Homo sapiens
aaaaaggctgtgcaaaattacagtcctgataacagctacccagagatcctgtaacggcatttgccctcattattattattattattattattattattatyattattattatttgaatttgagacggagttctgctctgttgcccaggctggagtgcagtggcgcaatcttggctcactgcaacctctgcctcccgggttc

SEQ ID NO: 425472 - DNA, 201 bp, Homo sapiens
agttttcttcttttggttcatggccccaggagcctatcagaagtgggagctactcttgttgatacagagagagggaagcaggcagtctgccgccactatartgggagtcagacatctcaggtggcttttaaacaacatgaatgggaagagaattggtttatgaattgaagaaataggattataacatcttctggtgtggtc

SEQ ID NO: 425473 - DNA, 201 bp, Homo sapiens
aaaaagaaaaaaaaaagtgaccctgattattcattcattcatttagtaagcaggcactatggcatatgaatgcagtgactttcttaaaaggtttaggagcygaatacctagaagttaattcatatgaggctgcagaagtgcttcaaaaattactgtatgattaaatgccacaggataccacaagatattatagaattaaaa

SEQ ID NO: 425474 - DNA, 201 bp, Homo sapiens
gtgtggggaaaagaaagagagatcagattgttactgtgtctgtgtagaaagaagtagacataggagactccattttgttctgtactaagaaaaattcttctgcctcgagatgctgttaatctgtaaccttacccccaaccctgtgctccctgaaacatgtgctatgtcaactcagggttaagtggattaagggctgtgcaa

SEQ ID NO: 425475 - DNA, 201 bp, Homo sapiens
ggtgtggggaaaagaaagagagatcagattgttactgtgtctgtgtagaaagaagtagacataggagactccattttgttctgtactaagaaaaattcttctgcctcgagatgctgttaatctgtaaccttacccccaaccctgtgctccctgaaacatgtgctatgtcaactcagggttaagtggattaagggctgtgca

SEQ ID NO: 425476 - DNA, 201 bp, Homo sapiens
gagacggagttctgctctgttgcccaggctggagtgcagtggcgcaatcttggctcactgcaacctctgcctcccgggttcaagcaattctcctgtctcascctccctagtagctgggattacaggtgagcaccaccacgcctggctaatttttgtatttttagtagagacggggtttcaccatattggccagactggtct

SEQ ID NO: 425477 - DNA, 201 bp, Homo sapiens
cggtgtggggaaaagaaagagagatcagattgttactgtgtctgtgtagaaagaagtagacataggagactccattttgttctgtactaagaaaaattcttctgcctcgagatgctgttaatctgtaaccttacccccaaccctgtgctccctgaaacatgtgctatgtcaactcagggttaagtggattaagggctgtgc

SEQ ID NO: 425478 - DNA, 201 bp, Homo sapiens
ggtgagcaccaccacgcctggctaatttttgtatttttagtagagacggggtttcaccatattggccagactggtctcgaactcctgacctcaggtgatcygcccgtctcggcctcccaaagtgctaggattacagatgtgagccactggggctggttgccctcactatttaatgggttatttgcaacctgtgaatcatgt

SEQ ID NO: 425479 - DNA, 201 bp, Homo sapiens
aaccacagggtgtccttaggagccccagaaaagtgtggttgttggttctcaaagtctatttcctagggggggaaaaatatatatatatatatatatatatwgtgttagctccagccaccagtgagtcaggagaggctttctaggcaaagacatctaagttcagaatccttgtgatccagatgcctgtaccctttgagttca

SEQ ID NO: 425480 - DNA, 201 bp, Homo sapiens
tcccagcactttgggaggccaaggagggcagatcacttcaggtcaggagttcgagaccagcctggccaacatggtaaacgctgtccctagtaaaaatacaraaattagctgggtgtgggtgtgggtacctgtattcccagttacttgggaggctgaggtgggaggatcttttgaacccaggagttcagggtcatagcatgc

SEQ ID NO: 425481 - DNA, 201 bp, Homo sapiens
tagcccctgatagcactgggacttgtgttttcttatgtcactttcttcagtgtgaggttgaaaccttggggccaagtatagctggggaaagaagagataaytgaagaaaataggaagggagaacagttgttatacaaagaaactcagccagtgtaggggtggacttagctctccttcagctttgtaaatggtttctctctc

SEQ ID NO: 425482 - DNA, 201 bp, Homo sapiens
aagaaccagtgaagaaatccattcaggaatcagaagcttttttgcctcaggtacagaataaatgatctgatttggtattatatgtacatagctgtggatawccctgacttctttaaaaatacctgtccattaagaattctttgagacagtgggactctgagagtgttgttctcctgagaacttccatacaagggaaccctg

SEQ ID NO: 425483 - DNA, 201 bp, Homo sapiens
gaaccagtgaagaaatccattcaggaatcagaagcttttttgcctcaggtacagaataaatgatctgatttggtattatatgtacatagctgtggataacyctgacttctttaaaaatacctgtccattaagaattctttgagacagtgggactctgagagtgttgttctcctgagaacttccatacaagggaaccctgaa

SEQ ID NO: 425484 - DNA, 201 bp, Homo sapiens
atcctctcctacacataagaaaccaaaaggctgggcgtagtggctcacacctgtaatcccagcactttgggaggccaaggagggcagatcacttcaggtcrggagttcgagaccagcctggccaacatggtaaacgctgtccctagtaaaaatacaaaaattagctgggtgtgggtgtgggtacctgtattcccagttact

SEQ ID NO: 425485 - DNA, 201 bp, Homo sapiens
tgatgacaatgtcatggtaacaatactaaccacagggtgtccttaggagccccagaaaagtgtggttgttggttctcaaagtctatttcctagggggggawaaatatatatatatatatatatatatagtgttagctccagccaccagtgagtcaggagaggctttctaggcaaagacatctaagttcagaatccttgtga

SEQ ID NO: 425486 - DNA, 201 bp, Homo sapiens
atgacaatgtcatggtaacaatactaaccacagggtgtccttaggagccccagaaaagtgtggttgttggttctcaaagtctatttcctagggggggaaawatatatatatatatatatatatatagtgttagctccagccaccagtgagtcaggagaggctttctaggcaaagacatctaagttcagaatccttgtgatc

SEQ ID NO: 425487 - DNA, 201 bp, Homo sapiens
cagcactttgggaggccaaggagggcagatcacttcaggtcaggagttcgagaccagcctggccaacatggtaaacgctgtccctagtaaaaatacaaaarttagctgggtgtgggtgtgggtacctgtattcccagttacttgggaggctgaggtgggaggatcttttgaacccaggagttcagggtcatagcatgctgt

SEQ ID NO: 425488 - DNA, 201 bp, Homo sapiens
aacagagtcttcctgtaaatgaaactgttgagcagccgtaggggcccagctcaggaaaccaccagggtgtggtggtgagtagttttcagattgtgttatckcttctcccttccttcggaacttgctactggaggtgtaggagtggtagaggcttcctcattaaggcaggggtgctggagcgatcaaccatccctgtttgcc

SEQ ID NO: 425489 - DNA, 201 bp, Homo sapiens
tgcagtagtgtagcatgattgatagtatgctattctcttgaatagatggggttgtttcttgagccactttttattcctttgatcaaaaccttgaggagaargaatgcctgttttcctgactgctgttgcatgaagttagacatccagttcctctaaaggtgacatcagatggtttagatacctaaaaagaagtgaggctaa

SEQ ID NO: 425490 - DNA, 201 bp, Homo sapiens
tagcaagactccatctctacaaaaaaagacaaaatttagctgagcgtggtggcgtgttcctgtagtcccagctacttgggaggctgaagtgagtggatccyctgagcccagagaggtcaaggttgtggtgagctgtgatcgcaccactgcacttcagcatgggagacagagtgagaccctgtttcagaaaaaataaataaa

SEQ ID NO: 425491 - DNA, 201 bp, Homo sapiens
aactgcgcggggggcggggaattccgcagacaggattctagaatttatgtcttgtgtggtaacatttcagccggtgggtggcggggattaggcgtgaagcrgttcagcaggcagaggttctcggacgccctccggcgaagccacctgttgatgcttttgactttctgtccttgttcctcgtcccatctggagcatttccaa

SEQ ID NO: 425492 - DNA, 201 bp, Homo sapiens
acttgaacccaggcggcagaggttgcaggcgccactgcaccccaccctgggtgacagagtgagactctgtctcaaaaaaaaaaaagaatttaaaaattatwtggctacaatacaatgcttttaaaatccatctttgatttgatatgttacctctctctaataatatgtaaaagcgaatacacatgcatgcggccaatttct

SEQ ID NO: 425493 - DNA, 201 bp, Homo sapiens
atagcaagactccatctctacaaaaaaagacaaaatttagctgagcgtggtggcgtgttcctgtagtcccagctacttgggaggctgaagtgagtggatcycctgagcccagagaggtcaaggttgtggtgagctgtgatcgcaccactgcacttcagcatgggagacagagtgagaccctgtttcagaaaaaataaataa

SEQ ID NO: 425494 - DNA, 201 bp, Homo sapiens
agcacactctgagaaagaaacttatcctctcctacacataagaaaccaaaaggctgggcgtagtggctcacacctgtaatcccagcactttgggaggccarggagggcagatcacttcaggtcaggagttcgagaccagcctggccaacatggtaaacgctgtccctagtaaaaatacaaaaattagctgggtgtgggtgt

SEQ ID NO: 425495 - DNA, 201 bp, Homo sapiens
ggcaacatagcaagactccatctctacaaaaaaagacaaaatttagctgagcgtggtggcgtgttcctgtagtcccagctacttgggaggctgaagtgagwggatcccctgagcccagagaggtcaaggttgtggtgagctgtgatcgcaccactgcacttcagcatgggagacagagtgagaccctgtttcagaaaaaat

SEQ ID NO: 425496 - DNA, 201 bp, Homo sapiens
tgggcaacatagcaagactccatctctacaaaaaaagacaaaatttagctgagcgtggtggcgtgttcctgtagtcccagctacttgggaggctgaagtgrgtggatcccctgagcccagagaggtcaaggttgtggtgagctgtgatcgcaccactgcacttcagcatgggagacagagtgagaccctgtttcagaaaaa

SEQ ID NO: 425497 - DNA, 201 bp, Homo sapiens
agcctgggcaacatagcaagactccatctctacaaaaaaagacaaaatttagctgagcgtggtggcgtgttcctgtagtcccagctacttgggaggctgargtgagtggatcccctgagcccagagaggtcaaggttgtggtgagctgtgatcgcaccactgcacttcagcatgggagacagagtgagaccctgtttcaga

SEQ ID NO: 425498 - DNA, 201 bp, Homo sapiens
ccaggagtttgagaccagcctgggcaacatagcaagactccatctctacaaaaaaagacaaaatttagctgagcgtggtggcgtgttcctgtagtcccagytacttgggaggctgaagtgagtggatcccctgagcccagagaggtcaaggttgtggtgagctgtgatcgcaccactgcacttcagcatgggagacagagt

SEQ ID NO: 425499 - DNA, 201 bp, Homo sapiens
ctcagaagcgagggctgtgcacagttcaccgagaagctgacttcttctggagcctgtgtactgcggacatgtccctgctggagcagtctcacagctcaccrtccctgtacctgcagtgcctctcccagaaactgagacaagaaaggtgagcccccaggaggtggtcagttccggaccacctgcttattttcgtgccaccag

SEQ ID NO: 425500 - DNA, 201 bp, Homo sapiens
cttgagcccaggagtttgagaccagcctgggcaacatagcaagactccatctctacaaaaaaagacaaaatttagctgagcgtggtggcgtgttcctgtaktcccagctacttgggaggctgaagtgagtggatcccctgagcccagagaggtcaaggttgtggtgagctgtgatcgcaccactgcacttcagcatgggag

SEQ ID NO: 425501 - DNA, 201 bp, Homo sapiens
acgagactctgcccgcaatcccggcacctcgggaggccgaggctggcagatcactcgcagtcaggagctggagaccagcccggccaacacagtgaaacccygtctccaccaaaaaaatacgaaaaccagtcaggcgtggcggcgcccgcaatggcaggcacgcggcaggccgaggcgggagaatcaggcagggaggctgca

SEQ ID NO: 425502 - DNA, 201 bp, Homo sapiens
ctgatcacttgagcccaggagtttgagaccagcctgggcaacatagcaagactccatctctacaaaaaaagacaaaatttagctgagcgtggtggcgtgtwcctgtagtcccagctacttgggaggctgaagtgagtggatcccctgagcccagagaggtcaaggttgtggtgagctgtgatcgcaccactgcacttcagc

SEQ ID NO: 425503 - DNA, 201 bp, Homo sapiens
tctcggcctcccaaagtgctaggattacagatgtgagccactggggctggttgccctcactatttaatgggttatttgcaacctgtgaatcatgtctcctrtttccttgttaatgatgcttattgattatagacttaggaatatcagcacctcctttgtagctcttcattcttacatgatataataattaatttttttttt

SEQ ID NO: 425504 - DNA, 201 bp, Homo sapiens
ggtggactgatcacttgagcccaggagtttgagaccagcctgggcaacatagcaagactccatctctacaaaaaaagacaaaatttagctgagcgtggtgkcgtgttcctgtagtcccagctacttgggaggctgaagtgagtggatcccctgagcccagagaggtcaaggttgtggtgagctgtgatcgcaccactgcac

SEQ ID NO: 425505 - DNA, 201 bp, Homo sapiens
atatgacacaaaagcagaagcttttcataatggagattagaccatgtctaggattcctacccagtcctcttgagctctcctcactccagtgttgttttccrtgtttgttttttgttttccccagagcttcttcgagacaccttcacttccctgggctatgaagtccagaaattcttgcatctcagtatgcatggtatatcc

SEQ ID NO: 425506 - DNA, 201 bp, Homo sapiens
gtctctgcccacttatccaactgccagatgatgtcacttcattcctgtgagccctttaaattcttgaaacttgttttcttgctttctttttctttctttcytttttttttttttttttttttttttgagacagagtctcaccctgttgcccaggctggagtgcagtggcgtgatcttggctcactgcaacctccgccttct

SEQ ID NO: 425507 - DNA, 201 bp, Homo sapiens
aggctgaggtggactgatcacttgagcccaggagtttgagaccagcctgggcaacatagcaagactccatctctacaaaaaaagacaaaatttagctgagygtggtggcgtgttcctgtagtcccagctacttgggaggctgaagtgagtggatcccctgagcccagagaggtcaaggttgtggtgagctgtgatcgcacc

SEQ ID NO: 425508 - DNA, 201 bp, Homo sapiens
tgggcgtagtggctcacacctgtaatcccagcactttgggaggccaaggagggcagatcacttcaggtcaggagttcgagaccagcctggccaacatggtraacgctgtccctagtaaaaatacaaaaattagctgggtgtgggtgtgggtacctgtattcccagttacttgggaggctgaggtgggaggatcttttgaac

SEQ ID NO: 425509 - DNA, 201 bp, Homo sapiens
tagtcattaaattagaatatgcctgtgaggggagttaaggggaattcctttaaaattctagaaaacacacacaggtgccaattttgtctggctagggaaaagtaaactgctgaaaacacttggggggagaaatgaagctaatggtatcttgatcagtcaggaggattgggtatttgaaagcagggaagaaaaataattgga

SEQ ID NO: 425510 - DNA, 201 bp, Homo sapiens
cctctaactctaggctcaagcagtcatctcacatcagcctctggagtagctggaactacaggtgtgtgccaccacacccagctacatttttttttttttttgagacagagtctcactctgtcacccaggctggagtgcagtggtgctatctctgctcactgcagcctctgcctcctgggttcaagtgattctcctgtgaaa

SEQ ID NO: 425511 - DNA, 201 bp, Homo sapiens
atatttcattttttaaaattgtgtttatttacaacctgcttttttctaaaaaagattcaaggtggggccttcttttcttttctttttttttttttttttttgagatgaggtcttgcttgttgcccaggctggagtgcagtggtgatcatatctcacttcagcctctaactctaggctcaagcagtcatctcacatcagcct

SEQ ID NO: 425512 - DNA, 201 bp, Homo sapiens
gaggttgcagtgagctgaaattgcgccactgcactccagcctgggccacagagcgagactctgtctcaaaaaagaaggaaagaaagaaagaaaaaaaaaaacactcgcagtgtttactcctaacgcgtggaacttgtgtcgacatccacccccggttactgcatactcagtcacacaagccatagcaggaaacagcgagct

SEQ ID NO: 425513 - DNA, 201 bp, Homo sapiens
gatcttaccagatgtcagtcttttgatgttctcacatggcagaaaaagaggatgcaaactctcaagtatatctttaagggcacaaattccattcatgaggrctctaccctcatcacctaattacctcccaaaggccccaccttctgatactgtcactttggggatactgtctcccctttgaattctgggggggatacaaac

SEQ ID NO: 425514 - DNA, 201 bp, Homo sapiens
tcatgagggctctaccctcatcacctaattacctcccaaaggccccaccttctgatactgtcactttggggatactgtctcccctttgaattctggggggratacaaacattcagtttgtaacaatagccttatgatttagaggttacttgttcattcacctagacctcaaattgcattttacagctagtcaagtatatct

SEQ ID NO: 425515 - DNA, 201 bp, Homo sapiens
gggcgtagtggctcacacctgtaatcccagcactttgggaggccaaggagggcagatcacttcaggtcaggagttcgagaccagcctggccaacatggtaracgctgtccctagtaaaaatacaaaaattagctgggtgtgggtgtgggtacctgtattcccagttacttgggaggctgaggtgggaggatcttttgaacc

SEQ ID NO: 425516 - DNA, 201 bp, Homo sapiens
tgagcgtggtggcgtgttcctgtagtcccagctacttgggaggctgaagtgagtggatcccctgagcccagagaggtcaaggttgtggtgagctgtgatcrcaccactgcacttcagcatgggagacagagtgagaccctgtttcagaaaaaataaataaataaaaccaccagcaccacaaacaacaacaaaaagttattt

SEQ ID NO: 425517 - DNA, 201 bp, Homo sapiens
gagggacagaactaataggatacatgtatataaaaaggggagtttattaaggagtattgactcacatgatcacagggttaggtcccacaataggtcatctkcaagcaaggaagccaattcaagtcccaaagctgaagaacttggagtccaatgtttgagggcaggaagcattcagcatgagagaaagatggaggccagaag

SEQ ID NO: 425518 - DNA, 201 bp, Homo sapiens
aacagccctgtactaactgcaaggccagaagaacccctgcccttcccctccccacccccccacatcatttccagaagttctaaagaacagttgaaatttayggagatcagactgggttgagtgtgggatttccagggtgggttctagaaggagaagtgggtcttctgtagtttgttgaaattttattttccaaacccagcc

SEQ ID NO: 425519 - DNA, 201 bp, Homo sapiens
catttgttctgtccaagccttacatatcagcatgggcagggagaatgtggtgaagttttctttcaaggactttgtttgataaggaaggacatttatcagtraagagaggttttgagggaagtgaaccaatcttgagataagtacacaaaagagctttgagtctggtgtttccctgtttgcttctgccccctggaggagcaa

SEQ ID NO: 425520 - DNA, 201 bp, Homo sapiens
atagctcattgtagctggaagacctgtttcaagcctcagatctaccaattatgggccaggcaggctgggccaatcactaaccttgttgggcctctgttttsctacttgtaaagcgaaaaataataatacctgactttacaaggttgttgtgagcatcagttgtaataatttactatgtgaagtactttttaaactgtgaag

SEQ ID NO: 425521 - DNA, 201 bp, Homo sapiens
ggaggctgaggtggactgatcacttgagcccaggagtttgagaccagcctgggcaacatagcaagactccatctctacaaaaaaagacaaaatttagctgrgcgtggtggcgtgttcctgtagtcccagctacttgggaggctgaagtgagtggatcccctgagcccagagaggtcaaggttgtggtgagctgtgatcgca

SEQ ID NO: 425522 - DNA, 201 bp, Homo sapiens
cagttgcactctaattacaatttagaatgatgtttctgagccacctgtcaaatgcattctgggctgtacctctgcgtaccccaggaataaatctcatggcyttctttacctggcctccttagtggtggcccagcaggaagcgggggttagagcaggagccactcagccttccaagatagatactccatgggccggtggtat

SEQ ID NO: 425523 - DNA, 201 bp, Homo sapiens
gtactttgggaggctgaggtggactgatcacttgagcccaggagtttgagaccagcctgggcaacatagcaagactccatctctacaaaaaaagacaaaawttagctgagcgtggtggcgtgttcctgtagtcccagctacttgggaggctgaagtgagtggatcccctgagcccagagaggtcaaggttgtggtgagctg

SEQ ID NO: 425524 - DNA, 201 bp, Homo sapiens
aatctgagtactttgggaggctgaggtggactgatcacttgagcccaggagtttgagaccagcctgggcaacatagcaagactccatctctacaaaaaaakacaaaatttagctgagcgtggtggcgtgttcctgtagtcccagctacttgggaggctgaagtgagtggatcccctgagcccagagaggtcaaggttgtgg

SEQ ID NO: 425525 - DNA, 201 bp, Homo sapiens
acctataatctgagtactttgggaggctgaggtggactgatcacttgagcccaggagtttgagaccagcctgggcaacatagcaagactccatctctacawaaaaagacaaaatttagctgagcgtggtggcgtgttcctgtagtcccagctacttgggaggctgaagtgagtggatcccctgagcccagagaggtcaagg

SEQ ID NO: 425526 - DNA, 201 bp, Homo sapiens
gctcatacctataatctgagtactttgggaggctgaggtggactgatcacttgagcccaggagtttgagaccagcctgggcaacatagcaagactccatcyctacaaaaaaagacaaaatttagctgagcgtggtggcgtgttcctgtagtcccagctacttgggaggctgaagtgagtggatcccctgagcccagagagg

SEQ ID NO: 425527 - DNA, 201 bp, Homo sapiens
gacagttttcaggaacaacaagcaattattcctactttccaagttattttgatgccatggtggctcatacctataatctgagtactttgggaggctgaggwggactgatcacttgagcccaggagtttgagaccagcctgggcaacatagcaagactccatctctacaaaaaaagacaaaatttagctgagcgtggtggcg

SEQ ID NO: 425528 - DNA, 201 bp, Homo sapiens
tatttttaaaattttttaaaattgctgaacaggggtacctctgggcagtgtgtcagaataccactttttaaatattttatgatttatttatttttctattygaggttttaactgatgtgtatctgtatgtctatttgtgtatattttgtcatgatcatgtaacagagtctgaaaagtgtcgaagagacagttttcaggaac

SEQ ID NO: 425529 - DNA, 201 bp, Homo sapiens
gttcagggtcatagcatgctgtgattgtgcctacgaatagccactgcataccaacctgggcaatatagcaagatcccatctctttaaaaaaaaaaaaaaaaggacaggaactatcttactcaatgtattagtcatgtttctctagagggacagaactaataggatacatgtatataaaaaggggagtttattaaggagtat

SEQ ID NO: 425530 - DNA, 201 bp, Homo sapiens
tcaggagttcgagaccagcctggccaacatggtaaacgctgtccctagtaaaaatacaaaaattagctgggtgtgggtgtgggtacctgtattcccagttrcttgggaggctgaggtgggaggatcttttgaacccaggagttcagggtcatagcatgctgtgattgtgcctacgaatagccactgcataccaacctgggc

SEQ ID NO: 425531 - DNA, 201 bp, Homo sapiens
tcacttcaggtcaggagttcgagaccagcctggccaacatggtaaacgctgtccctagtaaaaatacaaaaattagctgggtgtgggtgtgggtacctgtrttcccagttacttgggaggctgaggtgggaggatcttttgaacccaggagttcagggtcatagcatgctgtgattgtgcctacgaatagccactgcatac

SEQ ID NO: 425532 - DNA, 201 bp, Homo sapiens
aaatgcttgataattctagtacaaatattgcatttttagagttggtcatttcctttatctacataatctaagtaagctctcaaaataaaaactggttaaastcttacgatagactcattggcatttctagttgtctattgaattagcttatctaagtttgaacaccatcgtactccatcagcttcatcatcttggccgtat

SEQ ID NO: 425533 - DNA, 201 bp, Homo sapiens
atgaataaactggggctgactcaaactgactcaaagtcacactgtcattacctttttgatcctgtacgttagactgggctgtatgcatgttcttgctggcscaataaagttgcaagtgccagctaacagcccttcccactccacctcaccacctcatagaggaaaattgtgacgttaatgggaaatgtcagcggtaatgtc

SEQ ID NO: 425534 - DNA, 201 bp, Homo sapiens
ctcactcagggctccccctgcatcacatcaggaggatgttcatgggagattcatgcccttatctagcagggaagccaaagatgttttttattcagaactaygtggtgtcagagggccagctggaggacagcagcctcttggaggtggatgggccagcgatgaagaatgtggaattcaaggctcagaagcgagggctgtgca

SEQ ID NO: 425535 - DNA, 201 bp, Homo sapiens
agttcaacatcttggtggtacattgctggacaagagtaggcctgggccattagagggtaccctggatgctcggtgctgcctttcccctgagaatcagggtkatttgactcaagccttctctgcctctgggaacaaaatcagtaattgggcttgaggccacttataaacccccctgggctcaggtggctaattagcaagtaa

SEQ ID NO: 425536 - DNA, 201 bp, Homo sapiens
acgacagctttgtgtgtgtcctggtgagccgaggaggctcccagagtgtgtatggtgtggatcagactcactcagggctccccctgcatcacatcaggagratgttcatgggagattcatgcccttatctagcagggaagccaaagatgttttttattcagaactatgtggtgtcagagggccagctggaggacagcagcc

SEQ ID NO: 425537 - DNA, 201 bp, Homo sapiens
ggtccttcctggtcagacatagtcctttaaagttcaacatcttggtggtacattgctggacaagagtaggcctgggccattagagggtaccctggatgctyggtgctgcctttcccctgagaatcagggtgatttgactcaagccttctctgcctctgggaacaaaatcagtaattgggcttgaggccacttataaacccc

SEQ ID NO: 425538 - DNA, 201 bp, Homo sapiens
aacgctgcagctgctgcgacgcggaggccgcgccgctgccacgctgcagccaggcgccgggtgggctgggtgggctgggggcgggggctgcggcagcggcrgggcgggccagggcgccctatactccattcttcatgatgtttggtcgaagagtcatctgaaattttgaattcagtaaggtggctagaaagtttagggtat

SEQ ID NO: 425539 - DNA, 201 bp, Homo sapiens
ttttaaccacagaactcccccactggaaaggattctgaaagaaatgaagtcagccctcagaaatgaagttgactgcctgctggctttctgttgactggccyggagctgtactgcaagacccttgtgagcttccctagtctaagagtaggatgtctgctgaagtcatccatcaggttgaagaagcacttgatacagatgaga

SEQ ID NO: 425540 - DNA, 201 bp, Homo sapiens
tacctacataggatatggactctgtctgctctgagcccattttagtttagaatatagagacctccctccaggtcctaagagagagattccatgagagatgygcaacaccataaggttggtgatttgtactttgaaatggctgcctttatttcctttaaagtcaatatcttatatttgaataaacacagtttgcaaagcatc

SEQ ID NO: 425541 - DNA, 201 bp, Homo sapiens
agtaatttcttgctaaatgccttaaactgagatagatatatcacatagattattttgtggcttttctttgtttgtttgtttgttctgttaatatataattrctaaaatacaaaaaatataaaatgaaatttcctctttcaagtatcagagatagctgctattaatgtttgatttttatgcctccagattcttttatattta

SEQ ID NO: 425542 - DNA, 201 bp, Homo sapiens
ctgagttaagaatcctattgagacatttaaagaggtgtaatgtatagtgtacctctgaaataactaacaggaagtatgaccttattctttgtatttgaagmtccataatgggagaagtaaagaacaaagacttaaggaacagcttggcgctcaacgtaagaccacctttttttaatattcattatttataaatgcttgata

SEQ ID NO: 425543 - DNA, 201 bp, Homo sapiens
gttgcactctaattacaatttagaatgatgtttctgagccacctgtcaaatgcattctgggctgtacctctgcgtaccccaggaataaatctcatggcctyctttacctggcctccttagtggtggcccagcaggaagcgggggttagagcaggagccactcagccttccaagatagatactccatgggccggtggtatta

SEQ ID NO: 425544 - DNA, 201 bp, Homo sapiens
atcccagcactttgggaggccaaggagggcagatcacttcaggtcaggagttcgagaccagcctggccaacatggtaaacgctgtccctagtaaaaatacmaaaattagctgggtgtgggtgtgggtacctgtattcccagttacttgggaggctgaggtgggaggatcttttgaacccaggagttcagggtcatagcatg

SEQ ID NO: 425545 - DNA, 201 bp, Homo sapiens
ggcagatcacttcaggtcaggagttcgagaccagcctggccaacatggtaaacgctgtccctagtaaaaatacaaaaattagctgggtgtgggtgtgggtrcctgtattcccagttacttgggaggctgaggtgggaggatcttttgaacccaggagttcagggtcatagcatgctgtgattgtgcctacgaatagccact

SEQ ID NO: 425546 - DNA, 201 bp, Homo sapiens
actttgggaggccaaggagggcagatcacttcaggtcaggagttcgagaccagcctggccaacatggtaaacgctgtccctagtaaaaatacaaaaattarctgggtgtgggtgtgggtacctgtattcccagttacttgggaggctgaggtgggaggatcttttgaacccaggagttcagggtcatagcatgctgtgatt

SEQ ID NO: 425547 - DNA, 201 bp, Homo sapiens
cactttgggaggccaaggagggcagatcacttcaggtcaggagttcgagaccagcctggccaacatggtaaacgctgtccctagtaaaaatacaaaaattrgctgggtgtgggtgtgggtacctgtattcccagttacttgggaggctgaggtgggaggatcttttgaacccaggagttcagggtcatagcatgctgtgat

SEQ ID NO: 425548 - DNA, 201 bp, Homo sapiens
taatcccagcactttgggaggccaaggagggcagatcacttcaggtcaggagttcgagaccagcctggccaacatggtaaacgctgtccctagtaaaaatrcaaaaattagctgggtgtgggtgtgggtacctgtattcccagttacttgggaggctgaggtgggaggatcttttgaacccaggagttcagggtcatagca

SEQ ID NO: 425549 - DNA, 201 bp, Homo sapiens
acctgtaatcccagcactttgggaggccaaggagggcagatcacttcaggtcaggagttcgagaccagcctggccaacatggtaaacgctgtccctagtaraaatacaaaaattagctgggtgtgggtgtgggtacctgtattcccagttacttgggaggctgaggtgggaggatcttttgaacccaggagttcagggtca

SEQ ID NO: 425550 - DNA, 201 bp, Homo sapiens
taagaattctttgagacagtgggactctgagagtgttgttctcctgagaacttccatacaagggaaccctgaataacaaagagaaagatgttaaagtggaytgcattagtgaactttggaatgcagggaagttccaaagtagcactcctcatctcaactcagtgactgctgaacatattagtcagcagtgatacttccctg

SEQ ID NO: 425551 - DNA, 201 bp, Homo sapiens
ataagaaaccaaaaggctgggcgtagtggctcacacctgtaatcccagcactttgggaggccaaggagggcagatcacttcaggtcaggagttcgagaccrgcctggccaacatggtaaacgctgtccctagtaaaaatacaaaaattagctgggtgtgggtgtgggtacctgtattcccagttacttgggaggctgaggt

SEQ ID NO: 425552 - DNA, 201 bp, Homo sapiens
cagcacactctgagaaagaaacttatcctctcctacacataagaaaccaaaaggctgggcgtagtggctcacacctgtaatcccagcactttgggaggccraggagggcagatcacttcaggtcaggagttcgagaccagcctggccaacatggtaaacgctgtccctagtaaaaatacaaaaattagctgggtgtgggtg

SEQ ID NO: 425553 - DNA, 201 bp, Homo sapiens
gagaaatattatgtctggctgcagcacactctgagaaagaaacttatcctctcctacacataagaaaccaaaaggctgggcgtagtggctcacacctgtartcccagcactttgggaggccaaggagggcagatcacttcaggtcaggagttcgagaccagcctggccaacatggtaaacgctgtccctagtaaaaataca

SEQ ID NO: 425554 - DNA, 201 bp, Homo sapiens
gaatctgcctgataatcgattgcattggcaatgagacaggtaggtgtggaagctgcagattaactggtgcccccagattgagatcatggcacaggcaagcwgtattcattggagtgatcagcaccaactgccgtgacaaaccagttcaagaatctgtgcttcatcctgggtgcggtggctcatgcctggaattccagcact

SEQ ID NO: 425555 - DNA, 201 bp, Homo sapiens
cttgttgcccaggctggagtgcagtggtgatcatatctcacttcagcctctaactctaggctcaagcagtcatctcacatcagcctctggagtagctggawctacaggtgtgtgccaccacacccagctacatttttttttttttttgagacagagtctcactctgtcacccaggctggagtgcagtggtgctatctctgc

SEQ ID NO: 425556 - DNA, 201 bp, Homo sapiens
ggagaaatattatgtctggctgcagcacactctgagaaagaaacttatcctctcctacacataagaaaccaaaaggctgggcgtagtggctcacacctgtratcccagcactttgggaggccaaggagggcagatcacttcaggtcaggagttcgagaccagcctggccaacatggtaaacgctgtccctagtaaaaatac

SEQ ID NO: 425557 - DNA, 201 bp, Homo sapiens
tgccaaggagaaatattatgtctggctgcagcacactctgagaaagaaacttatcctctcctacacataagaaaccaaaaggctgggcgtagtggctcacrcctgtaatcccagcactttgggaggccaaggagggcagatcacttcaggtcaggagttcgagaccagcctggccaacatggtaaacgctgtccctagtaa

SEQ ID NO: 425558 - DNA, 201 bp, Homo sapiens
atctttatgtctagctaagggattgtgaatgcaccaattggcactctgtatctagctcaaggtttgtaaatgcaccaatcagcactctatatctagctcagggtttgtaaatacaccaatggacactctgtatctagctaatctagtggggacgtggagaacttttgtgtctagctcagggattgtaaacgcaccaatcag

SEQ ID NO: 425559 - DNA, 201 bp, Homo sapiens
gaaggtttgtagctttactcttgaagccagtgagattaaaaacccaccgggaggaacaaacaactccagtacgcgccgccttaggagctgtaacactcacsgcgaaggtctgcagcttcactcctgagccagccgcaccacgaacctatcagaaggaagaaactccgaacacatccgaacgtcaggaacaaactccggcca

SEQ ID NO: 425560 - DNA, 201 bp, Homo sapiens
tgagtagggagaatcacttgaatccgggaggcagaggttagagtaagctgagatcacaccattgcactccagcctgagcgacagagcaagaccccatctcaaaaaaaaaaaaaaaaaaaaaggcggccagacatggtggctcacgcctataattccagcactttgggaggctgaggtgggtggattactggaggtcaggag

SEQ ID NO: 425561 - DNA, 201 bp, Homo sapiens
agaatcacttgaacccagaaggtggaggttgcagtgagctgagattgcgccactgcactccagcctgggcgacagagcaagactccgtcttaaaaaaaaawaaaataaaattaaatttttaagaccttcctgctccctgaagtgggccaccctgatcccagcccccaggtctggagtcaccatttccagttcttcaaacct

SEQ ID NO: 425562 - DNA, 201 bp, Homo sapiens
tcacttgaacccagaaggtggaggttgcagtgagctgagattgcgccactgcactccagcctgggcgacagagcaagactccgtcttaaaaaaaaataaawtaaaattaaatttttaagaccttcctgctccctgaagtgggccaccctgatcccagcccccaggtctggagtcaccatttccagttcttcaaacctgcct

SEQ ID NO: 425563 - DNA, 201 bp, Homo sapiens
acttgaacccagaaggtggaggttgcagtgagctgagattgcgccactgcactccagcctgggcgacagagcaagactccgtcttaaaaaaaaataaaatwaaattaaatttttaagaccttcctgctccctgaagtgggccaccctgatcccagcccccaggtctggagtcaccatttccagttcttcaaacctgcctgt

SEQ ID NO: 425564 - DNA, 201 bp, Homo sapiens
agccagcagagccaaggacctgagtggctttcttggaactgatagcttcgcgctagacaaaagtgaatgagaatatgaaccaggtataaaaagcacgagcsgggtgcagtggtgcgcgcctgtcaggcccacctgctaggggggccaagtgggaggatcacttgagcccaggggtttgagaccagcctgggcaaccttgtg

SEQ ID NO: 425565 - DNA, 201 bp, Homo sapiens
ggttgcagtgagccaagattgcaccactgcactccagccttggtgacagagcgagactctgtctcaaagaaaagaaaaaaaggagagatgacaaaaaaaawatatatatcaggaaatgcaaagaaactgcagaggggaggaaacgcattaaccaaaacaggaccatgacacatctaaaaacagagttacaacatagtacat

SEQ ID NO: 425566 - DNA, 201 bp, Homo sapiens
gcactttgggaggctgaagcaggaggatcacttgagcccaggagttccagaccagcctgggcaacacggctaatccctgtctctactaaaaatacaaaaarattagtcgggtgtggtggcgcgtgcctgtaatcccagctactcgggaggctgaggcaggagaatagcttgaacctgggaggtagactttgcaatgagcca

SEQ ID NO: 425567 - DNA, 201 bp, Homo sapiens
tggcgcgtgcctgtaatcccagctactcgggaggctgaggcaggagaatagcttgaacctgggaggtagactttgcaatgagccaagatcgcaccactgcmctccagccggggcaacagagcaagactgtctcaaaaaaaaaaaaaaaaaaaaaaaaaaaaaagactggtttctaccatgcctccctcctccctccttccc

SEQ ID NO: 425568 - DNA, 201 bp, Homo sapiens
gaaagaaactttcttagtcagataaggaattccaggaagagtccctccctccactcgggggtagggagggtacaagacaaggttaggcagctttgcagtcctctcagcatgtcagagccccagtctggggtatcactttctgagccccaaccttcctatccctcttcatctctccaaacttctctgtgtaggtggcattcc

SEQ ID NO: 425569 - DNA, 201 bp, Homo sapiens
gtaaatctcggagcaggcgggggcgagggcgggggctgtcaccgcggtgttgcctgacgcaccctcctccccagctcaggaaattgtgaggtgaactcttyccctccagagcgctgtctgctgtgaaggcggctcgggcccccaacacacacatagcaggtgacaggtagggcccaagcactggagtccccgctcctccct

SEQ ID NO: 425570 - DNA, 201 bp, Homo sapiens
gtcactgggtcctacctgtgcagaacgtcagtcccagccgagaaagcaagggccagggcagtagttctcaaacttgtgttagcctcagtcacctggagagytggttgtgccatggcttccgatgcagcaagtctggagtgcgccccagaggtgtgcatttccaccgggtctcctggtggtcccgatgctgccagccccagg

SEQ ID NO: 425571 - DNA, 201 bp, Homo sapiens
agcaagccagttttcctcactttggagctgcattgtctatcatgtgaagatgttcataaccaccagtgtctgcttctagctctttcctatcctttgcttcyggagtttacttgtgtgtgaggaaggcttttgtggggaccaaggtacatggagcagttgggaggtgaaagtttgtcactgggtcctacctgtgcagaacgt

SEQ ID NO: 425572 - DNA, 201 bp, Homo sapiens
ttttttttgagacagagtctcactctgtcacccaggccagaatgcagtggcgtggtggcatgatcttggctcactgcaacctccgcctcctgggttcaagygattctcctgccaggtagctgggattacaggcgtgcaccaccacatctggctaatttttgtatttttagtagagacagggtttcaccatgggggccaggc

SEQ ID NO: 425573 - DNA, 201 bp, Homo sapiens
acctgccaggacccctgccccacagggcctgccactccctccacaggcctcatcttagggtctgcacctttgccccagatctgggttccagccccagggayttggcacacagccggtgcctaataacagcttgttggatggatagatgagcggatgggcgggtgagtgggtgaaggggcgctgcgaagacatctgtctcat

SEQ ID NO: 425574 - DNA, 201 bp, Homo sapiens
ctgtcaccgcggtgttgcctgacgcaccctcctccccagctcaggaaattgtgaggtgaactcttcccctccagagcgctgtctgctgtgaaggcggctcrggcccccaacacacacatagcaggtgacaggtagggcccaagcactggagtccccgctcctccctgaagacctatcagggcatctctgggactgtgttcc

SEQ ID NO: 425575 - DNA, 201 bp, Homo sapiens; identical to SEQ ID NO: 352504

SEQ ID NO: 425576 - DNA, 201 bp, Homo sapiens
aatgtgataaaaagcttaaatggaaatttaaaaaacctaacttttctgggaggacggaggctccttgtggagccagttgagggtctgtgggggtcatgggrgcaccgtcagacactgtgggagatgctggacagggctgggtccaggcctccaggcccagtgggacctcccttctcagcccccttctctctttttttttcc

SEQ ID NO: 425577 - DNA, 201 bp, Homo sapiens
gtatgagccccagcccagcgagcggcacaatggggatgaccccagcacacctgccaggacccctgccccacagggcctgccactccctccacaggcctcakcttagggtctgcacctttgccccagatctgggttccagccccagggatttggcacacagccggtgcctaataacagcttgttggatggatagatgagcgg

SEQ ID NO: 425578 - DNA, 201 bp, Homo sapiens
atctgcctttttttttttttctgttaaactcaagtaaaatagaatatatttagtttaaaatagaactggtacggtgcaatctaatctaaaattgtttggasttacctttctctgaactgcaggggcagaaggagggtgatcccttttctccccatgtaaagggtcatgaccggcacctctattacaaaaatcaagttaaca

SEQ ID NO: 425579 - DNA, 201 bp, Homo sapiens
cagagatgcttgtcccagtcctgatcctaagcccctgcctcgttggcattggtgagccccgtaagccccatccacttcctccccctcatcacccacctatytcttaagcagggccctgactcctgccccgtccactgtgccctcactctggccacacaggcctgcccactgcctattttttttttttttttgagacagagt

SEQ ID NO: 425580 - DNA, 201 bp, Homo sapiens
aaagaaactttcttagtcagataaggaattccaggaagagtccctccctccactcgggggtagggagggtacaagacaaggttaggcagctttgcagtcctctcagcatgtcagagccccagtctggggtatcactttctgagccccaaccttcctatccctcttcatctctccaaacttctctgtgtaggtggcattccc

SEQ ID NO: 425581 - DNA, 201 bp, Homo sapiens
ggcagtgaggggcttagcacctgggccagcatttgctgtgctcgatttctcgccaggccttagctgcttccccgcagggcagggcttgggacctgcagccygccatgcctgagcctcctccccctccccaccgtgggctcctgcgaggcccgagcctcccagacgagcgctgctccctgctccatggcgcccagtcccatt

SEQ ID NO: 425582 - DNA, 201 bp, Homo sapiens
ttcctccccctcatcacccacctatttcttaagcagggccctgactcctgccccgtccactgtgccctcactctggccacacaggcctgcccactgcctattttttttttttttttgagacagagtctcaccctgtcacctaggctggagtgcagtggcacgatctctgctcactgcaacctctgcctcccaagttcaagt

SEQ ID NO: 425583 - DNA, 201 bp, Homo sapiens
agaacaagtaaaacgtcaggagttagctaaccgagcaagatgaaaaaaacttgcaacgcctccctacacgcaagtgccaggaaagggaaggaaatcacacrggggcacagctgaaagccagcagagccaaggacctgagtggctttcttggaactgatagcttcgcgctagacaaaagtgaatgagaatatgaaccaggta

SEQ ID NO: 425584 - DNA, 201 bp, Homo sapiens
aactcctgggctcaagtgatcctccagtctcaacctcctaaatagctgggattataggtgcatgctgctgtacctggttttgcaattcttttggaaagaarctttcttagtcagataaggaattccaggaagagtccctccctccactcgggggtagggagggtacaagacaaggttaggcagctttgcagtcctctcagc

SEQ ID NO: 425585 - DNA, 201 bp, Homo sapiens
gttggccaggcttgtctcaaacactctttacctcaggtgatccactcgcctcggcctcccaaagtgctgggattacaggcatgagccactgcgcccggccragacaaccacaattcttttattgttgttgttttttgagatcggagtctccctatgttgcctggtctggtctcaaactcctgggctcaagtgatcctccag

SEQ ID NO: 425586 - DNA, 201 bp, Homo sapiens
ccatgttggccaggcttgtctcaaacactctttacctcaggtgatccactcgcctcggcctcccaaagtgctgggattacaggcatgagccactgcgcccrgccgagacaaccacaattcttttattgttgttgttttttgagatcggagtctccctatgttgcctggtctggtctcaaactcctgggctcaagtgatcct

SEQ ID NO: 425587 - DNA, 201 bp, Homo sapiens
gctagccaaggtcaaggtcgaggttttggcatcgccacacctcaactgtgtggttccacggccccacagagggttcggtgacgcctgggaaggtgccgggwtccacggccccacagagggttcggtgacgcctgggaaggtgccgggatccacggccccacagagggttcggtgacgcctgggaaggtgccgggttccacg

SEQ ID NO: 425588 - DNA, 201 bp, Homo sapiens
tgggacctgcagcccgccatgcctgagcctcctccccctccccaccgtgggctcctgcgaggcccgagcctcccagacgagcgctgctccctgctccatgrcgcccagtcccattgaccgcccaagggctgaggagtgtgggcgtacagcgcgggactggcaagcagctccacctgaggccccgtgggggatccactgggt

SEQ ID NO: 425589 - DNA, 201 bp, Homo sapiens
ttctggctcactgcaacccccgcctcctgggttcaagcaattctcctgcctcagcctctcgagtagctgggactacaggcgcgggccaccacacccggctmattttttgtatttttagtagagatgggttttcaccatgttggccaggctggtcttgaactcctgacctctcaggtgatccacccgcctcggcctccccaa

SEQ ID NO: 425590 - DNA, 201 bp, Homo sapiens
tgcctcagggagctcataacagcactatactgtggggtggtgccagatctgtctcatagaccctggccaacggatgaaatgagttctcagacacaggcatrcagcataagagcagctgggtgactgcctggctcaagtggccagagagcagccccaagaagctggagctgcttgcttttattcagtgcaggcacaatgtgg

SEQ ID NO: 425591 - DNA, 201 bp, Homo sapiens
gactgacgagacagctgttgaaggtctgcatgtgtacctgtgaacacagacaggcttcaatctcaatcttaataagggctcctcagaaatgaagctcaggragcaaacaaacatgggaaatgatggctaaacacaaacaggtgggttttgcttttatttccttttaaccataggactcctgagtccttgtaatatatagta

SEQ ID NO: 425592 - DNA, 201 bp, Homo sapiens
cttcaggctcctgagtagctgcgactacaggtgtgcaccaccacacccagctaatttttaaaaaattcttttaagagacaagatctcactatgttgcccargctggtctcaaactcctgggcacaagcaatcctcccacctcagcctcccgagtagctgggaccacagacacacgccaccatgcctggctaatttttgtat

SEQ ID NO: 425593 - DNA, 201 bp, Homo sapiens
gcaagaccccatctcaaaaaaaaaaaaaaaaaaaaaggcggccagacatggtggctcacgcctataattccagcactttgggaggctgaggtgggtggatyactggaggtcaggagttcaagaccagcctggccaacatggtgaaaccccatctctactaaaaatacaaaattagctgggcgtggtggcgtgcgcctgtaa

SEQ ID NO: 425594 - DNA, 201 bp, Homo sapiens
gaccccatctcaaaaaaaaaaaaaaaaaaaaaggcggccagacatggtggctcacgcctataattccagcactttgggaggctgaggtgggtggattactkgaggtcaggagttcaagaccagcctggccaacatggtgaaaccccatctctactaaaaatacaaaattagctgggcgtggtggcgtgcgcctgtaatctc

SEQ ID NO: 425595 - DNA, 201 bp, Homo sapiens
aagaggaagcagagctaggggagccgaggagctcctgctgggctctgccagggaagaagccgcagtaggagcccctacgtaggccctgcaagaggcctggygttcaggaaagggcccgctgaccatccagtgcagggaaaggagtccagctctggcctctgcccctcagctccacctcctgcattcctaggagttctccag

SEQ ID NO: 425596 - DNA, 201 bp, Homo sapiens
ctttggcagagcacagcgctgggctccagccctgatgcagaggtacaaagctcgtctgggcagattgttatgcaaatcaaaagaggaagcagagctagggragccgaggagctcctgctgggctctgccagggaagaagccgcagtaggagcccctacgtaggccctgcaagaggcctggcgttcaggaaagggcccgctg

SEQ ID NO: 425597 - DNA, 201 bp, Homo sapiens
aagtttagcaaggaaagagcagaaacgtcccagagaaattaaatttcagttttgtggtgaacagctggatcctttttcccatatcctcaccaaaaaattcyaatactatctttgtcaccttgtgtcatggatctattttgagctctctcgcggttcctgagctcctgtgtttagagtgcaccaggctctgccttccgggtt

SEQ ID NO: 425598 - DNA, 201 bp, Homo sapiens
ttgtaaacgcaccaatcagcaccctgtcaaaacggaccaatcagctctctgtaaaatggaccaatcagcaggatgcgggtggggccagataaaagaataamagcgggctgccgaagccagccgtggttgccttacacactatgcaagctttgctgtttgcagtaaaactggctgctgcttgctctttgggtccacactgac

SEQ ID NO: 425599 - DNA, 201 bp, Homo sapiens
aggggctcatcacacatacaaggtcggtggattgtccccatcttacagatgagggagcggaggcagggcgtgcagaaggggccactcgtggccacggagcrgggactggcaggcccattgtcgtcagcggactcctcagccccagtgccaggcaaggactagagccatggaaagcagggacgctgagtccctggggcgttt

SEQ ID NO: 425600 - DNA, 201 bp, Homo sapiens
cccagctactcgagaggctgaggcacgcgaattgcttgaacccaggaagtggaggttgcagcaaaccgagatcatgccactgcactccagcctgggggacrgagtgaactctgtctcaaaaaaaaatattaaaatttagcctggtgcagtggcttatgcctataatctcagcactttgggaggccgaggtgggcagatcac

SEQ ID NO: 425601 - DNA, 201 bp, Homo sapiens
aaatagcaagccagttttcctcactttggagctgcattgtctatcatgtgaagatgttcataaccaccagtgtctgcttctagctctttcctatcctttgyttccggagtttacttgtgtgtgaggaaggcttttgtggggaccaaggtacatggagcagttgggaggtgaaagtttgtcactgggtcctacctgtgcaga

SEQ ID NO: 425602 - DNA, 201 bp, Homo sapiens
acgcccagctaatttttgtatttttagtagcgacagagtttcaccatgttggccaggctggtcttgaactcctcacctcaggtgatctgcccgcctcagcrtcccaaagtgctgggattacaagcatgagccaccatgccaggcctgcaatttcttagactattgaatggccctggagtcagattgcttggggtcaaaggc

SEQ ID NO: 425603 - DNA, 201 bp, Homo sapiens
tttcttgcctgggccccagcaggatccagtggcctgagcggggaacagattcaagtcccagaacaggatgggggacagcctcacctaccaatttcctttcyattcttttttttttttttttttttttggagacaggctttcgctctgtcacccaggctggagtgcaatggcgcgaccttggctcactgcaacccctgcctc

SEQ ID NO: 425604 - DNA, 201 bp, Homo sapiens
gcgggtggggccagataaaagaataacagcgggctgccgaagccagccgtggttgccttacacactatgcaagctttgctgtttgcagtaaaactggctgytgcttgctctttgggtccacactgactttatgagctgtagcactcaccatgaaggtttgtagctttactcttgaagccagtgagattaaaaacccaccgg

SEQ ID NO: 425605 - DNA, 201 bp, Homo sapiens
cagtgtatgagaggcaaaggaaacctcctttaaaactctggaaacaagcataaactgatatttcccaggccctgccagcctgggagtcaaatgaggtcatrttaccacccaaatctgcctgagaacagagtcctgtctccctgccgggccaggcaaatgccacttcaagatacagtccgttgagaacccctagactgggac

SEQ ID NO: 425606 - DNA, 201 bp, Homo sapiens
gagtgcgccccagaggtgtgcatttccaccgggtctcctggtggtcccgatgctgccagccccaggtgaatacaaaccacagctgccgagaattttagcaytgaggtcttgggcaaggcattctcctctccttcatccttggtttcccatctgcaaaagtgagggagtagggtgcagtggctcacacctgtaatctcagca

SEQ ID NO: 425607 - DNA, 201 bp, Homo sapiens
attatgggagctacaagatgagatttgggtgtggacacagagtcaaaccatatcatgctctaagaaaagaaagttttgggcctagagtcaggaaaaagccytttcaagtcaagctgagaactttaaggtggtcttggctacctcattttatgcaaagtaggcagaaaatttaaaagaaaagaaacatatttaagtacaatt

SEQ ID NO: 425608 - DNA, 201 bp, Homo sapiens
cagacgcctgtaatcccagctattcaggcggctgaggcagaagaatcacttgaacccgggaggaagaggttgcagcgagctgagactgcaccactgcagcrtgggtgacagagtgagactctgtctcaaaaaaaaaaatagggataaacaactgctcaaatattttaaatctgtatatttcttattttaaatattaaatat

SEQ ID NO: 425609 - DNA, 201 bp, Homo sapiens
catggagatggagagtagaaggatggttaacagaggctgggaaggggtagcttggggtaggtaagggggaagtggagatgtttaatgggtacaaaaaaaamttgaaagcatggataaggcagtatttgctagcacaacagaatgactagagtcaaaaataatttgattgcacatttaaaaatatctaaaagagtgtaattg

SEQ ID NO: 425610 - DNA, 201 bp, Homo sapiens
atagacctcttcatatatatatatgtatatatatgtgtgtatatatacatatatgtgtatatatgtgtgtatatatacatatatgtgtatatatatacgtatatatatatatatgtgtatatatatacgtatatatatgtgtatatatatgtatatatatatgtgtatatatatatatgagagattagccctttatctgtg

SEQ ID NO: 425611 - DNA, 201 bp, Homo sapiens
tagacctcttcatatatatatatgtatatatatgtgtgtatatatacatatatgtgtatatatgtgtgtatatatacatatatgtgtatatatatacgtatatatatatatatgtgtatatatatacgtatatatatgtgtatatatatgtatatatatatgtgtatatatatatatgagagattagccctttatctgtga

SEQ ID NO: 425612 - DNA, 201 bp, Homo sapiens
caagacacagaacatttctgtaacaccagaaaattccctcttgccctttcctaatcaatcacaaacccctcccctataaccattgatgtcatttttgcctrtacctttatatgaatggaatcatgcagaagatactattttgggtatcttactttgtcttccttgtacccctttgtgaaatcctcccatgcctagacctcg

SEQ ID NO: 425613 - DNA, 201 bp, Homo sapiens
agacctcttcatatatatatatgtatatatatgtgtgtatatatacatatatgtgtatatatgtgtgtatatatacatatatgtgtatatatatacgtatatatatatatatgtgtatatatatacgtatatatatgtgtatatatatgtatatatatatgtgtatatatatatatgagagattagccctttatctgtgat

SEQ ID NO: 425614 - DNA, 201 bp, Homo sapiens
tgtgtatatatacatatatgtgtatatatatacgtatatatatatatatgtgtatatatatacgtatatatatgtgtatatatatgtatatatatatgtgwatatatatatatgagagattagccctttatctgtgatacaagttattttctcccagtttgttatttatcttttggctttgtgttgacatttacttcataa

SEQ ID NO: 425615 - DNA, 201 bp, Homo sapiens
cttctagtagttttatagtttcaggtattacatttaagaatttaatccgaatggccaggcgtggtggctcacgcctgtaatcccagcactttgggaggccraggcaggcagattacgaggtcaggagatcgagaccatcctggctaacacagtgaaaccctgtctctactaaaaatacaaaaaattagccaggcccacgtg

SEQ ID NO: 425616 - DNA, 201 bp, Homo sapiens
ttctttttaaaaaatatttactccctccatagagttgaacttcctctctttttagaagaatggatttctcggagtctgaaaaatttatggttcttctctgraagaattttattttaaaggtaagttgaactacctatagggttattacaacagctcagtggccacagggggaaattctgacagcttgatccttgaatttca

SEQ ID NO: 425617 - DNA, 201 bp, Homo sapiens
tggtgagtgaatgatccttttaatatgctgttgaattcagtttgctagtattttgttgaggatttttgcatctatgttcatcagggatattagcctgtaattttttttttttttttgagatggagtctcactctgttgcccaggctggagcgcagtggcatgatatcagcttactgcaacctctgccgcctcccacgttca

SEQ ID NO: 425618 - DNA, 201 bp, Homo sapiens
ggtgagtgaatgatccttttaatatgctgttgaattcagtttgctagtattttgttgaggatttttgcatctatgttcatcagggatattagcctgtaattttttttttttttttgagatggagtctcactctgttgcccaggctggagcgcagtggcatgatatcagcttactgcaacctctgccgcctcccacgttcaa

SEQ ID NO: 425619 - DNA, 201 bp, Homo sapiens
gttcctatacctagtttctagttataatgttagggtgtttgagatctttcttcttttttgatgtagatgtttattgctataaacttcactcttagaaccatttttgctgtatactatatatcttatatatttttgtatgttgtgtttccgtcttcatttgcctcaagatatttttaaatgatccctttaatttctacattg

SEQ ID NO: 425620 - DNA, 201 bp, Homo sapiens
tatagacctcttcatatatatatatgtatatatatgtgtgtatatatacatatatgtgtatatatgtgtgtatatatacatatatgtgtatatatatacgtatatatatatatatgtgtatatatatacgtatatatatgtgtatatatatgtatatatatatgtgtatatatatatatgagagattagccctttatctgt

SEQ ID NO: 425621 - DNA, 201 bp, Homo sapiens
aatggagtttaatttaccaatttttcctttatggctcataccttgggtatgcaaagtaagaaatccctacccccttgaaggtaacagagattttctcctawgtttcttcattttattcattcctcctgttttcttttaaatttgtacttttagcttccttcatttaggtctgtgacccatctcgagttaatttcttgttcc

SEQ ID NO: 425622 - DNA, 201 bp, Homo sapiens
atttctgtttagtgctgcgcttttggcaacacgctctgttattactataaataagaacggacctttcgattttgctgctcagcctgtcgatgaagtgcctytctacatcacagcttccttaatttctccttctcctttggaattggcttacgtgccttccagaagtactgtggttcagggtattattgaaagagtgaaaat

SEQ ID NO: 425623 - DNA, 201 bp, Homo sapiens
cctgaccaatgacctgactgaggaagtgatggaggaggtgctgcaaaagaaggcagacctcattctctcctaccatccgcctatcttccgacccatgaagygcataacctggaacacatggaaggagcgcctggtgatccgggctctggagaacagagtcggtatctactctcctcatacagcctatgatgctgcgcccca

SEQ ID NO: 425624 - DNA, 201 bp, Homo sapiens
tcattctctcctaccatccgcctatcttccgacccatgaagcgcataacctggaacacatggaaggagcgcctggtgatccgggctctggagaacagagtyggtatctactctcctcatacagcctatgatgctgcgccccagggcgtcaacaactggttggctaaagggcttggtgagaagcctctttcatatttgatat

SEQ ID NO: 425625 - DNA, 201 bp, Homo sapiens
taataaccatgccttgggttagctatgcaatatcaaagaatgacctgtttgcttatattaaaacatgttttttttaaaatgcagtaagaacaattcatatmctggtgatgagaccaggagtgaaatctgtattatgtttaggattcttggtacaaattataatagtaaaatgaaagggaattgtaaagtattggtctcttg

SEQ ID NO: 425626 - DNA, 201 bp, Homo sapiens
ggggcttgggaaaaggaaaggtaatatttagagaaatggattagggaggaggttggttgaagcaagggtagggagaataagaacaagggtgtgcaaggcargagatgggatggacgtttgtgtattatgtaccaggctttgctaggttacataattcattagctcctctggatggcctgtgaagtgggttatagtatctct

SEQ ID NO: 425627 - DNA, 201 bp, Homo sapiens
tttccctgcaaatactttgaaactttaggatgtctttccagtaaagttttaactgctttagggttggggagggcatgattccatttttatataataatttwaaaataatgttgctgaaatttggcagttaaattgcatttgaaaaaggaaacattttttattcttatggagtaaggagagcagaagtcttccttactggac

SEQ ID NO: 425628 - DNA, 201 bp, Homo sapiens
gagataattggtttacgttattgattagggtgggccaggttctgatgtggaatacatctcattgacttaatcaatgagatttatttctctgtcatgctatrtgttcatttcaagttggtcattgtaggaagtctgaccattgtagactggttgctgttgcagagggagggagttttgcagggtcttaaaccatcagtttaa

SEQ ID NO: 425629 - DNA, 201 bp, Homo sapiens
ggtatttctgcttttgtgtttcctcattccacagattccatatttagcatttaagaatttgctcttccctttttggtaggtgagatgtcccatcatgataytttggatgctgcttcccaaggaataaatgtcatcctctgtgaacacagcaacactgaacgaggctttctttctgaccttcgagatatgctggattctcac

SEQ ID NO: 425630 - DNA, 201 bp, Homo sapiens
gtgaggtccttggaccagcaacatcagcatcacctggaacttgttagaaaggtaacctctcagacccccacctagatataatgaatcagaaactccagggrtggggcccagcactctgtgttttaataatcctccaggtgattctgatgcccagtagagttagagaaatgctattctagaaaatggattagtttcagatta

SEQ ID NO: 425631 - DNA, 201 bp, Homo sapiens
tgcagtaagaacaattcatatactggtgatgagaccaggagtgaaatctgtattatgtttaggattcttggtacaaattataatagtaaaatgaaagggarttgtaaagtattggtctcttgtttcctctgttttgaagagtctcaagtcaaagtcgtggccctgtgtgctggttctgggagcagcgttctgcagggtgtt

SEQ ID NO: 425632 - DNA, 201 bp, Homo sapiens
atgagaccaggagtgaaatctgtattatgtttaggattcttggtacaaattataatagtaaaatgaaagggaattgtaaagtattggtctcttgtttcctytgttttgaagagtctcaagtcaaagtcgtggccctgtgtgctggttctgggagcagcgttctgcagggtgttgaggctgacctttacctcacaggtagga

SEQ ID NO: 425633 - DNA, 201 bp, Homo sapiens
aacaaaggaataataaccatgccttgggttagctatgcaatatcaaagaatgacctgtttgcttatattaaaacatgttttttttaaaatgcagtaagaayaattcatatactggtgatgagaccaggagtgaaatctgtattatgtttaggattcttggtacaaattataatagtaaaatgaaagggaattgtaaagtat

SEQ ID NO: 425634 - DNA, 201 bp, Homo sapiens
gggatggacgtttgtgtattatgtaccaggctttgctaggttacataattcattagctcctctggatggcctgtgaagtgggttatagtatctctgtttcrtaggtgagaaaacaagattggagaggttaaatggcttacctaagttacagtgtgctggtaagtggcagagccactatttgaacccagatctctatgacga

SEQ ID NO: 425635 - DNA, 201 bp, Homo sapiens
acagcacaaagatatgtggcctccaactcccaacatcctgggctgaatagtggtcccagacccatagttttcaagtctatctagcctgcctgaggacatgmcaagagaaagccttcgcatagagtcccgagttcacgtggcaggacgccagaggcatgttctagaacagtaggtgccgaaggcacagcacaaggaaacact

SEQ ID NO: 425636 - DNA, 201 bp, Homo sapiens; identical to SEQ ID NO: 340088

SEQ ID NO: 425637 - DNA, 201 bp, Homo sapiens; identical to SEQ ID NO: 340089

SEQ ID NO: 425638 - DNA, 201 bp, Homo sapiens
ttggatgtctttctctctctctctctctctctcgcaaagagctgctctcccatatcctttttctgtctattaaactttccactccttaactcacccacatrtatctgtgtcctgaattctttctccacacacaacgaacgccagggtatataccccagagagtatacagccttcacttgggtgtacatgggtacttgggac

SEQ ID NO: 425639 - DNA, 201 bp, Homo sapiens
gggacatcaagttcaacaaacatcctcacgagcccaggcggcacagtgtgaagacagagtctacctccttaggaagtaaaaggaatgttagtgtgggattwtgcattggaggctagtgctgaccccactgcagtggaacacagcactgggcagagcctccaaggcccttgattctaggctggaggccacagagggagcatt

SEQ ID NO: 425640 - DNA, 201 bp, Homo sapiens; identical to SEQ ID NO: 340102

SEQ ID NO: 425641 - DNA, 201 bp, Homo sapiens
gtgccagcagcagtggtagtggcagcatggtaggttgcacgcttgtcagctgaggcagagtgctagcaggtgccagagtgcctgcctcccttcatcatagkggtggaggcaatgcagctgtgggggtgggagcttggtggagaagcctgattgcaattgtgtgcatggtcatactggtggtggtattggcttgggggtagg

SEQ ID NO: 425642 - DNA, 201 bp, Homo sapiens
aggctcccagagagcaggaaccaggtgaaatacaagagcacagtcctcccagccggtggcatggggataatcggacaatacaactctccacccttttttayggtaagatatgaataaggggtccacaggagcaacctgagtccctgcaactacatttcccaggggcccctggggtaaccctaatgtgactctgggggcggg

SEQ ID NO: 425643 - DNA, 201 bp, Homo sapiens
cagttctgcttttcctggacctgttccaagctctcacgttccacatcacacatgggacatctagtgtcaggctcccagagagcaggaaccaggtgaaatayaagagcacagtcctcccagccggtggcatggggataatcggacaatacaactctccacccttttttatggtaagatatgaataaggggtccacaggagca

SEQ ID NO: 425644 - DNA, 201 bp, Homo sapiens
cttttgggagtagtaccaggaattgctttggactcagagaacatgacctttgagtgtgtgatggctgataagtcactggtgacggctgcagttttggaagyagctcatagcatttacaatgagtggttattacagctgggggctactcgtttctttgtgcatttaggtaagaaaagcatgatctgcaagcaaaaaacaaac

SEQ ID NO: 425645 - DNA, 201 bp, Homo sapiens; identical to SEQ ID NO: 340106

SEQ ID NO: 425646 - DNA, 201 bp, Homo sapiens
ctatctgaaaaagaaatcaggaaaacacaatccatcataatagcatcaaaaagaataaaatagagggtggaacaaggtggccaaatagaaccttccagtastcattcccctgcagggacatcaagttcaacaaacatcctcacgagcccaggcggcacagtgtgaagacagagtctacctccttaggaagtaaaaggaatg

SEQ ID NO: 425647 - DNA, 201 bp, Homo sapiens; identical to SEQ ID NO: 340093

SEQ ID NO: 425648 - DNA, 201 bp, Homo sapiens
cctcataccacacacatggggctctttcagacacattgcccagtgccttcaggtagagaggccagtgggaatgaggatgatggatgaagggaagaaaaatktttaaaagaagtctaatgggaactgatgaagaaagtataccataaacttggagtgtgattaaagccttccatcttcctcttttgcctcctctaggttacc

SEQ ID NO: 425649 - DNA, 201 bp, Homo sapiens
tatggtggctgaagggtctccttctgctggagttccagagactcgtggtgaaagtgagttgctccataccagttcaactcacctgttcccctggagctgcyggggcacagggacaacaccaggtatgcagcagacccatgtagggttcccaggtttccccctctcagtccaccttctgtgtgttccctctgttcactttca

SEQ ID NO: 425650 - DNA, 201 bp, Homo sapiens
gcttgtttttgtcaggtttgttgaagattagatgattgtagatgtgtggtcttatttttgagtttctctattctgttacattggtctatgtgtccgttttwgtatcagtaccacgctgttttggttattgtaaccttgtagtatgatttgaaggtgggtagtgtgatgcctccagctttgttctttttgcttagcattgtc

SEQ ID NO: 425651 - DNA, 201 bp, Homo sapiens
gctctttcagacacattgcccagtgccttcaggtagagaggccagtgggaatgaggatgatggatgaagggaagaaaaatttttaaaagaagtctaatggkaactgatgaagaaagtataccataaacttggagtgtgattaaagccttccatcttcctcttttgcctcctctaggttaccagttctgcttttcctggacc

SEQ ID NO: 425652 - DNA, 201 bp, Homo sapiens
aaaccctctgggctccacatcggctggtttgctgcctcctatttcttctctaagcagctctccctgccaacttgtgtctatggtggctgaagggtctcctkctgctggagttccagagactcgtggtgaaagtgagttgctccataccagttcaactcacctgttcccctggagctgctggggcacagggacaacaccagg

SEQ ID NO: 425653 - DNA, 201 bp, Homo sapiens
ctgactttgtcctctggctccttgagtttaggtatccactgtgttgaggggggtcgaggtactcccggaccattggtcactacactccgatgggtggtgtyggccaaagcatttcatagtgcggttacagcaagatccattcttgctcacacgtgccagcagcagtggtagtggcagcatggtaggttgcacgcttgtcag

SEQ ID NO: 425654 - DNA, 201 bp, Homo sapiens
tccaggaccaaaccctctgggctccacatcggctggtttgctgcctcctatttcttctctaagcagctctccctgccaacttgtgtctatggtggctgaasggtctccttctgctggagttccagagactcgtggtgaaagtgagttgctccataccagttcaactcacctgttcccctggagctgctggggcacagggac

SEQ ID NO: 425655 - DNA, 201 bp, Homo sapiens
ttttgagtttctctattctgttacattggtctatgtgtccgtttttgtatcagtaccacgctgttttggttattgtaaccttgtagtatgatttgaaggtrggtagtgtgatgcctccagctttgttctttttgcttagcattgtcttagctatccaggctcttgttttggttccatatgaattttaaaatagtttttttt

SEQ ID NO: 425656 - DNA, 201 bp, Homo sapiens
actcataagtgtgagctgaacaatgagaagacatggacatagggaggggagcaagacacactggggcccgttggggtgaggagggtgggggtatggggagrgagcgcatcaggaaaaatagctaatgcatgatgggcttaatacttagatgataggttgataggtgcagcaaaccaccatggcacacattgacctacgtaa

SEQ ID NO: 425657 - DNA, 201 bp, Homo sapiens
ctactcaggaggctgaggcaggagaatggcgtgaacctgggaggcacagcttgcagtgagccgagatcgcaccactgcattccagcctgggcgacggcgaractctatctccaaaaaaaaaaaaaaaaaaaaatctgacttattttgctcaacgttttttctgtgataccgtatcatttcacttatgtatctcttccctgt

SEQ ID NO: 425658 - DNA, 201 bp, Homo sapiens
gaaagtacacttggaagagtcccaagtgggcaacttgaagggcaagtgcagtgtttaaccttggtcctacccctttacagtcttgcctacctccagtgtcstgtgcctctctcccctgattcttcccttagggtgagctgaccacatgcgcagtgtcctccttacccttgggaagtgagcacatgcagggtgtttaggaag

SEQ ID NO: 425659 - DNA, 201 bp, Homo sapiens
aaaagctttagagcaggaaagaatggaaagtacacttggaagagtcccaagtgggcaacttgaagggcaagtgcagtgtttaaccttggtcctaccccttwacagtcttgcctacctccagtgtcgtgtgcctctctcccctgattcttcccttagggtgagctgaccacatgcgcagtgtcctccttacccttgggaagt

SEQ ID NO: 425660 - DNA, 201 bp, Homo sapiens
gaagtgggggcagcagggagtgttgggtggaagatgtctcggaggaaagagagaacaacctggtcctggaagctgtgccagggcagtgccaggtgctgctrccacagaggtgaatgtgagagagcccccctgcccatgcgcacatgtggtaagggagacagatattcactcatgcaacacatttttattgagcacctacta

SEQ ID NO: 425661 - DNA, 201 bp, Homo sapiens
ttattaaaaagctttagagcaggaaagaatggaaagtacacttggaagagtcccaagtgggcaacttgaagggcaagtgcagtgtttaaccttggtcctasccctttacagtcttgcctacctccagtgtcgtgtgcctctctcccctgattcttcccttagggtgagctgaccacatgcgcagtgtcctccttacccttg

SEQ ID NO: 425662 - DNA, 201 bp, Homo sapiens
ggtcggcgtgcaggatatttcgctggaccctagaaaagccaccacgacctgtgggccatgatgctaccccaatggctgctgctgctgttccttctcttctyctttctcttcctcctcaccaggggctcactttctccaacaaaatacaaccttttggtaagaaagctggagagtgcagtcacctccccctccactgtccta

SEQ ID NO: 425663 - DNA, 201 bp, Homo sapiens
ggaggccgaggcaggcagatcacgaggtcaggagatcaagaccatcctggctaacacagtgaaaccctgtctctactaaaaatacaaaaaaaattagctgygcgtggtggcgggtgcctgtaatcccagctactcaggaggctgaggcaggagaatggcgtgaacctgggaggcacagcttgcagtgagccgagatcgcac

SEQ ID NO: 425664 - DNA, 201 bp, Homo sapiens
ttacattgattaaaattcaacaaaatttaaaattcaagccaggtgtggtggttcatggctgtaatcccaacattttgggaggccaaggtgggaggattgtytgagcccagaggttcgagaccaacctgggcaacaaagcaagactcctgtctcttactggtggaaggtatctgagttattggcaatgaatctgtatgcatt

SEQ ID NO: 425665 - DNA, 201 bp, Homo sapiens
ccagtctttcaggttaaattttagagtgccctggccaaggaaggagtcgactgagatggctgtggattggtggtggtgggaggcttcaaattttatttttrgtttacactagccacatatagttacttagatttacattgattaaaattcaacaaaatttaaaattcaagccaggtgtggtggttcatggctgtaatccca

SEQ ID NO: 425666 - DNA, 201 bp, Homo sapiens
acacagttacaatattctcatttattcaacagttatgcattcagcacctgcaatgtgtaaggactttagtccaagggggctaagaaatatagcagtgaacrtgagagcagaagatccatgtcccagagctgaggttgctagcgggggaaataaattatttttaaacatataaataagatgatttcagagagtcataagtgt

SEQ ID NO: 425667 - DNA, 201 bp, Homo sapiens
ccattccaggtcataggtagatttaaacaaattctgattggcagttggttgaacagctattatcagcagaagggaatgtctgggttaagataaggggttgwggagagcaaggttttatcatgcagatgaagcctccagtaataggcttcatagaaaatagattgtacatgtttctgatcagacttaaggtctttgttaatg

SEQ ID NO: 425668 - DNA, 201 bp, Homo sapiens; identical to SEQ ID NO: 118156

SEQ ID NO: 425669 - DNA, 201 bp, Homo sapiens
tacagcctcaggtggctggggtgcaccttgctttttttttgttttttgttttttggggtatagcttgcttttatacacattggggagacataatatgtcartcagtacctgtaagatttacattcgtttgatctggaagggtgggacaacttgaagtggggggcatgacttccattccaggtcataggtagatttaaacaa

SEQ ID NO: 425670 - DNA, 201 bp, Homo sapiens
ctggctgctgccaacgtgctccagacaattgcgagtcgcactgcgcggagaaggggtccgagggcagtctgtgtcaaacgcaggtgggtatcgccgcccgsggggagccagaggggatccaggggaagtgggagccagggcgggcccagattcctggggaggaaagaagggtaggtgggcggaaatgccctggagcctgga

SEQ ID NO: 425671 - DNA, 201 bp, Homo sapiens
gcagttttaaatggggtgctcagggaagagtttactaagaatgtgaaattttagcaaagacctaaagggagggaagtccttcctaaccggcaaagcagggrggtctctgggagaagagcattcaaggtggagggaacagccagggcaaaggtctgggggcggaaatgtgctggcatattcaaggaatagcaaagaggagta

SEQ ID NO: 425672 - DNA, 201 bp, Homo sapiens
catgtcccagagctgaggttgctagcgggggaaataaattatttttaaacatataaataagatgatttcagagagtcataagtgttgtgaacaaagtacarccaggtgatggggactgctctgctggtgtccaggaagtcttcagcctgaggcaggagggggaggcagccgggcaaagagtgcaggacagggtgctctggg

SEQ ID NO: 425673 - DNA, 201 bp, Homo sapiens; identical to SEQ ID NO: 118160

SEQ ID NO: 425674 - DNA, 201 bp, Homo sapiens
ctgtgcgtggtggcgggtgcctgtaatcccagctactcaggaggctgaggcaggagaatggcgtgaacctgggaggcacagcttgcagtgagccgagatcrcaccactgcattccagcctgggcgacggcgagactctatctccaaaaaaaaaaaaaaaaaaaaatctgacttattttgctcaacgttttttctgtgatac

SEQ ID NO: 425675 - DNA, 201 bp, Homo sapiens
gtgcgtggtggcgggtgcctgtaatcccagctactcaggaggctgaggcaggagaatggcgtgaacctgggaggcacagcttgcagtgagccgagatcgcrccactgcattccagcctgggcgacggcgagactctatctccaaaaaaaaaaaaaaaaaaaaatctgacttattttgctcaacgttttttctgtgataccg

SEQ ID NO: 425676 - DNA, 201 bp, Homo sapiens; identical to SEQ ID NO: 118198

SEQ ID NO: 425677 - DNA, 201 bp, Homo sapiens
ttattggcaatgaatctgtatgcatttacagcaacctcaattcttgcctcctcagaagaaagaattcaactgaggggcataaagcagaaaaagagactgargcaggtttcagagcaggagtggaagtttattaaaaagctttagagcaggaaagaatggaaagtacacttggaagagtcccaagtgggcaacttgaagggc

SEQ ID NO: 425678 - DNA, 201 bp, Homo sapiens; identical to SEQ ID NO: 118201

SEQ ID NO: 425679 - DNA, 201 bp, Homo sapiens
agtctcgctttgtcacccaggctggagtgcagtggtgcaatctcagctaactgcaagctccacctcccgggttcacgccattctcctgcctcagcctcccragtagctgggactacaggcacccgccaccacgcccagctaattttttgtatttttagtagagacggggtttcaccgtgttagccaggatggtctcgatct

SEQ ID NO: 425680 - DNA, 201 bp, Homo sapiens; identical to SEQ ID NO: 118202

SEQ ID NO: 425681 - DNA, 201 bp, Homo sapiens
ccaccacgcccagctaattttttgtatttttagtagagacggggtttcaccgtgttagccaggatggtctcgatctcctgacctcgtgatctgcccgcctsggcctcccaaagtgctgggattacaggcgtgagccaccatgcctggccctgtccccggaaattcatactcctccattttttctcttaatgtgcattcccc

SEQ ID NO: 425682 - DNA, 201 bp, Homo sapiens
caggtgataagcaaggaaagggaaaataagaatcgagctgtgggagtggtggtgtgagaagggtttgcaggtgttttttttttttttctttttctttttcttttttttgggacagagtcttgctttgtcacccaggctggagtgcagtggggcaatctcggctcactgcaaacttagcctcctgagttcaagcgattcccc

SEQ ID NO: 425683 - DNA, 201 bp, Homo sapiens
tttttttttctgtatttttagtagagacagggtttcaccgtattggtcaggctggtcttgaactcctgacctcaagcaatccacccgccttggcctcccamagtgctaggattacaggcgtaagccaccgcacctggccagggtttgcagttttaaatggggtgctcagggaagagtttactaagaatgtgaaattttagc

SEQ ID NO: 425684 - DNA, 201 bp, Homo sapiens
gaattgcttgaacccgggaggcagaggttgaactaagccaagaaagtgccattgcactccagcctgggcagtagagtgagactttgtctcaaaaaaaaaarggggggctgggcgcggtggctcatgcctgtaatcccagcattttgggaggccgaggcaggcagatcacgaggtcaggagatcaagaccatcctggctaac

SEQ ID NO: 425685 - DNA, 201 bp, Homo sapiens
agttttggggcgagaaggctctgcagcagaatgaagtgcaagagagagacaggaaagtctagaccactctggtgtgtatgagaagcagcctatgttgaggrcaccaagagtaaaccttttaaaaactgttcagtcccctccaggcatccaccgtctgcacagacttaccccggcccccacgtagagaccaccctgcctggc

SEQ ID NO: 425686 - DNA, 201 bp, Homo sapiens
ctacagtgagctataattgcaccactgcactccagcctgggtgacagagtgagactttgtcaaaaaaaaaaaaaaaaaaaaggaaaggaaagaaagagggytgggcgcggtggctcatgcctgtaatcctagcactttgggaggccgaggcgggtggatcacctgaggtcagaagttcgagaccagcctggccagcatggc

SEQ ID NO: 425687 - DNA, 201 bp, Homo sapiens
ggaggcacagcttgcagtgagccgagatcgcaccactgcattccagcctgggcgacggcgagactctatctccaaaaaaaaaaaaaaaaaaaaatctgacytattttgctcaacgttttttctgtgataccgtatcatttcacttatgtatctcttccctgtcttccctctctagagctgtgtgtgtccaatagtgcagtt

SEQ ID NO: 425688 - DNA, 201 bp, Homo sapiens
aggcaatgtgataactgttgaaccatcacctgacattcctggtgggtgggggagagccctctcctaccccactcatgcctgtctaactacctgtaacatckctacaaaaaataaaaaaattagctgggcatggtggtgtgtgcctgtggtcccagctacacgggaggctgagccaggaggattgcttgaacctagaggttg

SEQ ID NO: 425689 - DNA, 201 bp, Homo sapiens; identical to SEQ ID NO: 118178

SEQ ID NO: 425690 - DNA, 201 bp, Homo sapiens
tcctgactcaaggaaagtgttccatgattcagagcaattgttgtgaattgataactcaccagccaagaagattgtctgtagttttatactgcaaaaacagttttttttgttttccaaatataaaattatatttccacattgaagatgtgctttcagataaggatattcccatatatagctccactggagtgggactgtgtc

SEQ ID NO: 425691 - DNA, 201 bp, Homo sapiens
gctcacgcctgtaatcctagcactttgggaggctgaggtgggcggatcacgaggtcaggtattcgagactagcctggccaacatagtgaaacgccatctgyactaaaaatacaaaaaattagccgggtgtgatggcgggtgcctgtagtcccagctactcgggagcctgaggcaggagaattgcttgaacctgggaggcag

SEQ ID NO: 425692 - DNA, 201 bp, Homo sapiens
ctctgtctatcctcaggtcaagagaaaatggacttcaaaaagatgctgaagaagaggtgaggctggcaggtccttctgcccaagatattgtctcctcatcmaggccaaagcctctcaaaggcctctcaacaaggccctgagttccaagaatccatggagtagggaggggtttctcaaggttggagaggcattgtgtacaag

SEQ ID NO: 425693 - DNA, 201 bp, Homo sapiens
atgccagaaactgcagatagagttacaaggcaggggaagccctgccttctgggagctcacagccaagggggagagtccgatggagaagcagacagttttaytgctatggaatcaggctacaaacatgcatactcacactgactgctagctggtacctccaaatcatacaggctgctcaatcctccacacatatacccaaca

SEQ ID NO: 425694 - DNA, 201 bp, Homo sapiens
tggcagtacctgagtctcaccccagaccattcaatcaggtatttcttataaagttctccatggattatatatgtgcagccaaagctgtagaccactgaccracagggcccaggcagggaacataaatgtggggaaaagactggggtaaactagagactgtatatcccatctaaaggggcagccactattcacctcccactg

SEQ ID NO: 425695 - DNA, 201 bp, Homo sapiens
acccgatttcccgttgtgaaaggcaaagagcctccttttttccccacagacagaagtagtctgctcccaaagacccatcatcactggaccctaagcccccyacagcacacacgagctgccccagtccccctgatggccacctcttacacaagctcattcattcagcagacactttctgagagccttggcttctgagagcct

SEQ ID NO: 425696 - DNA, 201 bp, Homo sapiens
ggggctccgggctcttcagctgaaccctccccaaggaccgaccatccttaggtctaaccagcttctggatcactttctgagagctgggcctacccagctgyaacccctggctccaggcccttcgaggaaagggagggatggatcacggggagatctaggcctataattacttatgatcctataatcactcgggtcctgacc

SEQ ID NO: 425697 - DNA, 201 bp, Homo sapiens
agggtggcagaggctctagcctggtggctaagaggcgaaaacgcgtcctgtgctcatcgcaggggacaaagccgtgttccgagcccgggtgcaggggaacsccaaaccccacatctcctggaagagggagagcggcatccccatcaaggagtccgccaagatattctacgacagcattaacaaggaacacgtgctgaaggt

SEQ ID NO: 425698 - DNA, 201 bp, Homo sapiens
taggagacttggggctaccagtggagaaagaaggtgaacacataaacaagaaggtgaccttaccttccaggcttttagccctctggggccagacttggaaragggcagatccaagggaaagctgagaaatggtctcagagctgaacagagtgttttagtcacgtctctagtggaaagagattaaaagatggccgggggcca

SEQ ID NO: 425699 - DNA, 201 bp, Homo sapiens
gtggctcacgcctgtaatcccagcactctgggaggccaaggtgggtggatcacctgaggtcaggagtttgagaccagcctggccaacatgatgaaaccctrtctctactaaaaatacaaaaaaaacaaaaaaaaacaaaaaaaaaaccgctgggtgtggtggcacacacctgtaatcccagctacttgggaggctgaaaca

SEQ ID NO: 425700 - DNA, 201 bp, Homo sapiens
ctaccccaacgacctccaatgctaaaccctggcagagcctggccgagggttcctcccctgcccggggccaggcccaggtgtctgggaggaggcagagagcmggcagagggtggcagaggctctagcctggtggctaagaggcgaaaacgcgtcctgtgctcatcgcaggggacaaagccgtgttccgagcccgggtgcagg

SEQ ID NO: 425701 - DNA, 201 bp, Homo sapiens
gaggtaagtaccctgcagggagcaggggcctgcaggctaggggcagggcttcacccaaagtgctagtgcctgtgtatttctcagcaagaaggtctccccarttctgcacacacatactcagaggcgtactctccactgtgaaagcagcaagggagcacaagtcaccttccttctacttctgtcttcaccactcccaaacat

SEQ ID NO: 425702 - DNA, 201 bp, Homo sapiens
agatcaatcatgtggatgtgtgtgaatgattgataaactcttaattgctgaaggagatcagagccataggtgaacagattctatctccaaaggtagaattycaggcataggggaaattaggaaggtagccaccttatctacatatcagtaatgctgaccctgctccacttaagaaataggagacttggggctaccagtgga

SEQ ID NO: 425703 - DNA, 201 bp, Homo sapiens
ctgtagtcccagctactcgggagcctgaggcaggagaattgcttgaacctgggaggcagaggttgtcgtgggccaagatcgtgccactgcactccagcctkggcaacagagcaagactctgtctcaaaaaaacaaaaacaaaaaaactgcaatgctggccacatgcagtggctcacacctataatcccagcactttgggag

SEQ ID NO: 425704 - DNA, 201 bp, Homo sapiens
caacagtcagttcctattgtcccctaaaaaaaaaaaaggcctcctaccttatctgacagaaagtctccctgtggttccttttccttcccccactaatggcsggactttgatccagctggagccactgacttcggatgactctgacaactataagtgcattgcaagcaatgaccatgcagatgccatctataccgtatctct

SEQ ID NO: 425705 - DNA, 201 bp, Homo sapiens
ttttcctatttgcatgatggaggtctagaaggagcctagagactggctacctgttgcaatggggaaggttgtaagatagacgcaggagtgggagggagccygtccatatggatttttatattgttttattctttaactatgtgattgaattaccagttcaaagaaaaatgtaagaaaaactaaacctttgcctttaccatg

SEQ ID NO: 425706 - DNA, 201 bp, Homo sapiens; identical to SEQ ID NO: 105799

SEQ ID NO: 425707 - DNA, 201 bp, Homo sapiens
cagatgtagggctacttttttgtttaaacattgtggaggtcacataaaagacatctgcaggccaggtgtccactgcactctgcctgtttgagacctcttgytagtatttaaaagcaggccatgagagcttcttaacacacttttccccctctgtcagattagtgggataataaaggcacctacttcagtgggatgctgtga

SEQ ID NO: 425708 - DNA, 201 bp, Homo sapiens
aaaaaaaaaaaaggcctcctaccttatctgacagaaagtctccctgtggttccttttccttcccccactaatggccggactttgatccagctggagccackgacttcggatgactctgacaactataagtgcattgcaagcaatgaccatgcagatgccatctataccgtatctctgctggtaacagaaggtgagttggcc

SEQ ID NO: 425709 - DNA, 201 bp, Homo sapiens
ttcagcagacactttctgagagccttggcttctgagagcctagcaggcttctgcaagcaccatgcagacgggcatcaagtcagccttactcaccactgttscttctggggctcagcccagtgtctggtacagaggagtaaattgtattaaatgaagtctcagccagatgatgccagaaactgcagatagagttacaaggca

SEQ ID NO: 425710 - DNA, 201 bp, Homo sapiens
ccctgaatggggatcctaccactcaaaagcaaatatgtctcagctgtcttcagccaaggggcatgcccagaaggcatcttttaaatctattactgtaaacmactgatggttttttggaattttgctgagaatggtgtatgggttggggacaacaggatggttagtttggactatttgatggctctaagatcttgtaccaag

SEQ ID NO: 425711 - DNA, 201 bp, Homo sapiens
taacacccattttccttctgagttttctttggctccatttttattaatttttccttttctgcagcagacaaggtaggggttgcagcagggggaggaagacraggggttaagtgaaaggtgtttcagatgaaatggcagcctgtttagccacttgatctgcaaggttatttccctgacttgtaaaggaaaagtcgttttggt

SEQ ID NO: 425712 - DNA, 201 bp, Homo sapiens
tgcaaagtgaaaccagcactgaggcgaaagttttctcagcaaggcagtttacttctgcagaagggtgctgcttgtgtcaatcacgattgcaagagcacacygaacaaaggaaagcaggggtttttattcctaatgcaatccctccctctgtgtcactccttcatgggctgtggttggactgcacaatctaaactgacccga

SEQ ID NO: 425713 - DNA, 201 bp, Homo sapiens
agttgaggaaatgcccatctgatggtgcctatgctctctgctgaaagtgaggaagacggggtggagttagaggttaaagagagaatctaagggccgggcaytgtgaggagggcaaggcaggattggtggagcccaggagttcaagaccagcctgggcaacatagaccctgtctctacaaaaaaattaaaaattagctgggt

SEQ ID NO: 425714 - DNA, 201 bp, Homo sapiens
gtttcgaagggaggaaggggtgaagagtgggtaaccaagggaacagatgtgagttattgattagaactgacaggaaggttgtttacagttacagtaactasgggcaaggaggcatagagaacaagaaagttgagtttgagaacaaagaacaaggaagttaacaggctaaacctttgaagaggaattttattgtatcctaca

SEQ ID NO: 425715 - DNA, 201 bp, Homo sapiens
tcgaagggaggaaggggtgaagagtgggtaaccaagggaacagatgtgagttattgattagaactgacaggaaggttgtttacagttacagtaactagggrcaaggaggcatagagaacaagaaagttgagtttgagaacaaagaacaaggaagttaacaggctaaacctttgaagaggaattttattgtatcctacatac

SEQ ID NO: 425716 - DNA, 201 bp, Homo sapiens
taagcttgccctaagttggccaggataagtattaggatttctcaggtgatggacagggccataaagctcccaagagtttatggcttttgtgatcagctacyagggcgggtagagaaatactgtcaggttggggcagggttaggtgagtctgagctcagactctttctgggaatctgttactgatttgtaatttttaattcc

SEQ ID NO: 425717 - DNA, 201 bp, Homo sapiens
actgcacaatctaaactgacccgactggctatttgtgaatactttcccaaataaggaagggaagggaaatgtgagttacagtggtgggacgtgcggtttckaagggaggaaggggtgaagagtgggtaaccaagggaacagatgtgagttattgattagaactgacaggaaggttgtttacagttacagtaactaggggca

SEQ ID NO: 425718 - DNA, 201 bp, Homo sapiens
agtggagtgtaaataaggcaatccatagagcatcttgtaaggggaaaggccagtatcttttcgaggagcagtttggattcttttttttttatttggttttktcaaatgttttattgagtgtagacatctggagtactataaaacatgcattatctgtagattcaaaaaggagcaagccacattgttctcactgtcaaatgt

SEQ ID NO: 425719 - DNA, 201 bp, Homo sapiens
cctccatgggctgtggttggaccgcacaatctaaactgacccaattggctatttgtgaatactttcccaaataaggaagggaagggaaatgtgagttacartggtgggatgtgcggtttcaaagggaggaacgggtgaagagtgggtaaccaagggaacagatgtgagttattgattaggactgacaggaaagttgtttac

SEQ ID NO: 425720 - DNA, 201 bp, Homo sapiens
ctaagttggccaggataagtattaggatttctcaggtgatggacagggccataaagctcccaagagtttatggcttttgtgatcagctaccagggcgggtrgagaaatactgtcaggttggggcagggttaggtgagtctgagctcagactctttctgggaatctgttactgatttgtaatttttaattccacagtgtttg

SEQ ID NO: 425721 - DNA, 201 bp, Homo sapiens
catcacgcccagctaatttttgtatttttagtagagacagggtttcaccacgttggccaggctggtcttgaactcctgacttcaagtgatctacctgccaygctggaattataggcatgagccactgcaccttgttgtaatttttgtatataatgtaagatttatttcaaggttcattttcttgcctatgaatatctgatt

SEQ ID NO: 425722 - DNA, 201 bp, Homo sapiens
gggagccagaagctggatggccctctggggctgacccgcaggatattgaactttgggatagagcaaagagagagcttggcatgattgattgccccaagctrtggaatcctggaagagagctaccatgctgcccatgcctggttgactgggggaccagccgagtgtaaaggggtctatctgggtctctggctggccgtgagc

SEQ ID NO: 425723 - DNA, 201 bp, Homo sapiens
ggaggatcacttgagctcagaagttccaggccagcctggtcaacatagtgagactctgtacaaaaaataaataaataaatcagaaaaaaattagctaggtmaggcacagtggctcatgactgtaatcccaactacttgagaggtcaacatgggaggatcgcttgagtccaggacttcgagaccagcctggacaacattggg

SEQ ID NO: 425724 - DNA, 201 bp, Homo sapiens
aagactctttctcaaaacaaaaaatgtagacagtagtcccagttgagtcatgattttagtttttcttcttctctttctttagttttttgtgcatctattawataattaattcatccaaattttctgccaaaaatagaaatctctttgcagtacatttagacagatcacgtcatttctccatatgatcattttcatggagac

SEQ ID NO: 425725 - DNA, 201 bp, Homo sapiens
catgttcttcctctgtgagaacttgtcttgacaaaaaagaaacgtatttattagacatctttccttgcctcctagtctgttgtctctgctgcctgtttcaraaacatctaaacaacaatttagctgttggagctcctgacctcttctctgttctttctggaaaatatttttttcaagtttagcttctatactttgattaga

SEQ ID NO: 425726 - DNA, 201 bp, Homo sapiens
tgaaggtcttcattatcttatagcttcaaaggttggtgttgagaagtctgatgaatattgaattcctgaagctcagacttttttctctctggaagtttttrggttccactctgtcctcagtgttgtgaaatttcttgacaacaaaattggggctgggtccccttcattcattgtcatgaacacttggtgtttccttctcta

SEQ ID NO: 425727 - DNA, 201 bp, Homo sapiens
cttctctttctttagttttttgtgcatctattatataattaattcatccaaattttctgccaaaaatagaaatctctttgcagtacatttagacagatcasgtcatttctccatatgatcattttcatggagacatacctcaggagccctccatctccctgattccatctggatggggcaccctggaggtctgctgcccag

SEQ ID NO: 425728 - DNA, 201 bp, Homo sapiens
gctaggtatagaattctagattggaaatattttctctcagattttgaaggtcttcattatcttatagcttcaaaggttggtgttgagaagtctgatgaatrttgaattcctgaagctcagacttttttctctctggaagtttttgggttccactctgtcctcagtgttgtgaaatttcttgacaacaaaattggggctggg

SEQ ID NO: 425729 - DNA, 201 bp, Homo sapiens
gtccctgtgacctggcacagtacagcccccattccggctgctttcatgggtgggcattgagtgtctgcagcttttctgggtgcatggtgcatgctctcagyggatttaccattctgaggtctggagaacagtggccctcttctcacagctccactaggcagtgccccagtgggaattctgtgtggggggctcccaccccat

SEQ ID NO: 425730 - DNA, 201 bp, Homo sapiens
ctccctgagttaaggagacagaattcagagtttgcaaaggccaaagctgctagaattcacagcacagagtaccagagaggagagttgcatagagagaggaytgtggaaatatgaacaaggagttccctaaagtctttggttgatagcacatgtatgtaatgaaacaaccaaggccaagtaaataaccaacagaaagcagta

SEQ ID NO: 425731 - DNA, 201 bp, Homo sapiens
ttactgtggccaagtacttgataaatacatttcattttagaagttatttttgtcagtttcttttacttattgacatttttcattaccaattagcttttccmatttcctttacttttgcagtttgctttggtatttacaagtttcttgaccatttgcaggggctgaaaaagaactgggaagaggtgcataaagaattccagt

SEQ ID NO: 425732 - DNA, 201 bp, Homo sapiens
gaggactgctaagagggggttaaagggggacgatgtgaaggagagaacctgtggtccttcagaaggcgaagaagaaagaaaggggaagcagtgaagaaagrgacggagatactgggacagggagaaaaaagttgtggagagtagcttttaaggagtcatttggtggccatggatccaacgtgctcttctgagtgcatttat

SEQ ID NO: 425733 - DNA, 201 bp, Homo sapiens
tttgttgccattgcttttggtgttttagacatgaagaccttgcccatgcctatatcctgaatggtaatgcctaggttttcttctagggtctttatggttgyaggtctaacgtttaagtctttaatccatcttgaattaatttttgtataaggtgtaaggaagggttccactttcagctttctacatatggctagccagttt

SEQ ID NO: 425734 - DNA, 201 bp, Homo sapiens
ctttgggtatatacccagtaatgggatggctgggtcaaatggtatttctagttctagatccctgaggaatcgccacacttccacaacggttgaactagttkacagtcccaccaacagtgtatttaatgcagtgaacagcattagtttttgtttaatgtggttctgtttttcattgtgattaattgtaacacataatcagtg

SEQ ID NO: 425735 - DNA, 201 bp, Homo sapiens
aagatttgatgtggtctggccccttgtctatgatctttttagcttgatttcttgaaatgctgcttcttccctacccactgtaactggcattcccatagtaytgaggtactagagacctctgagatctgcacacatggttccctccacccagaaaactgcccttttctttctctcatcctacatagctgcctggcaaatccc

SEQ ID NO: 425736 - DNA, 201 bp, Homo sapiens
agaggactgctaagagggggttaaagggggacgatgtgaaggagagaacctgtggtccttcagaaggcgaagaagaaagaaaggggaagcagtgaagaaasggacggagatactgggacagggagaaaaaagttgtggagagtagcttttaaggagtcatttggtggccatggatccaacgtgctcttctgagtgcattta

SEQ ID NO: 425737 - DNA, 201 bp, Homo sapiens
ccatttgcaggggctgaaaaagaactgggaagaggtgcataaagaattccagtccctctcggtctttatagattctataccaaagaagatccgcaagcagrggctggaagaagaaatgaaacaactagaacacgacattggcataattgaaaagcacaagattatttatattgccaataagtaagaatggatctttaaagt

SEQ ID NO: 425738 - DNA, 201 bp, Homo sapiens
ctacacaaaaatatattgaatcatgggtttacaaatttaaaagaggtggaagtaaagacaccttttttttttaccccaaatgaaattatcttattaatcaygagaccatatctgccagccccaacttctgtgggcattttaaggcacagatttggtttgaacattatttcttgaaactatctaatgagctcattcagtttg

SEQ ID NO: 425739 - DNA, 201 bp, Homo sapiens
aagtacttgataaatacatttcattttagaagttatttttgtcagtttcttttacttattgacatttttcattaccaattagcttttcccatttcctttayttttgcagtttgctttggtatttacaagtttcttgaccatttgcaggggctgaaaaagaactgggaagaggtgcataaagaattccagtccctctcggtc

SEQ ID NO: 425740 - DNA, 201 bp, Homo sapiens
gacaggaggactgctttagcccaggagtacgagaccagcctgagcaacaaagtgagaccctatctctataaaaaattttttttaattagctaggtgtgctratgcacatctgtggtcccagctatatgggaggctcaggtgggaggatcacctgagcccaggaagttgaggctgcagtgagctatgattgcatcactgcac

SEQ ID NO: 425741 - DNA, 201 bp, Homo sapiens
ctatattaaaatagatcaatgggaatgatcaaactgaagaggctgtgtaaaaacggccaataagcaagaaatacttcttccttgtatttatatactgttcatatatatatatatacacacacacacacacacacacatatatgatcttttttgagacagagtctcactccgtcacccaggctggagtacaatggcatgatc

SEQ ID NO: 425742 - DNA, 201 bp, Homo sapiens
tatattaaaatagatcaatgggaatgatcaaactgaagaggctgtgtaaaaacggccaataagcaagaaatacttcttccttgtatttatatactgttcatatatatatatatacacacacacacacacacacacatatatgatcttttttgagacagagtctcactccgtcacccaggctggagtacaatggcatgatct

SEQ ID NO: 425743 - DNA, 201 bp, Homo sapiens
agtacagtaacaacaaaagcagagcaaacaaatactcccagtgggaactgagcacacagtcaaggatgggatttggcctctgtacagtatttttggttacygtggccaagtacttgataaatacatttcattttagaagttatttttgtcagtttcttttacttattgacatttttcattaccaattagcttttcccattt

SEQ ID NO: 425744 - DNA, 201 bp, Homo sapiens
aaattttctgaacttttatgctctgcttccttttaaacataagttgccatttgtcaattttggcttttgttgccattgcttttggtgttttagacatgaaraccttgcccatgcctatatcctgaatggtaatgcctaggttttcttctagggtctttatggttgcaggtctaacgtttaagtctttaatccatcttgaat

SEQ ID NO: 425745 - DNA, 201 bp, Homo sapiens
aggttctccatgagggctctgccccgaagcacatctttgcctagacatccagacattttgatacaacctttgaaatctaggtggaggttcccaaacctcarttcttgacttctgtgcacccgtagtcccaacaccatgtggaagccaccaaggcttggggctcgcaccctctgaagcaatggcctgagctctacgttgtcc

SEQ ID NO: 425746 - DNA, 201 bp, Homo sapiens
aggcaggagaatggtgtgaacccgggaggcggagcttgcagtgagccgagatggcgcctctgcactccagcctgggtgaaagtgcgagactccatctcaakaaataaacaaacaaacaaataaataaataaataagaaacctatacataatataacgtggtaaaaggcattagcacacctctctggcatttcatatataca

SEQ ID NO: 425747 - DNA, 201 bp, Homo sapiens
tagaagtataaatgctacaacttttaaaattcaattttaggtacatatccatttttaaggcaactgtaaaagatgacatgcaaaaagctaaaactgcaatraaaactatgggaccagcaaaagttgaagtaccttctccaaaggatttcctaaagaaacattcaaaggaaaaaactctaccacccagtaggttttatcatg

SEQ ID NO: 425748 - DNA, 201 bp, Homo sapiens
ctactggccaaagtttgttgacaggcaaggttacgataaacagttgttaaaagaaaaacgttagataaaatgaacctgagtttatatgaacaaagaacaawtcatgaatcatgcagcactcagaaccagaagaggttcagagaactctgctctacaactggccagtgagtatgtatagacagaacatggaagtaaagtaca

SEQ ID NO: 425749 - DNA, 201 bp, Homo sapiens
ttttaagtgtatttatgtgattggcttattcattttatgctttagcagtttctttaatgacttttttctttattatttctgtttcatgtgtgaagctcctrtggagagcataaatggaaaattgcctaaccttggctacccgtgttcattaaaagaacttaatatactataatttaagcagatactttaagtacaacttag

SEQ ID NO: 425750 - DNA, 201 bp, Homo sapiens
tctactaaaaatacaaaaaattaaccaggcgcagtggcatgtgcctgtagtcccagttactcaggaggctaaggcaggagaatcgcttgaatccaggaggyggaggttgcagtgacccgagatcacgtcactgcactccagcctggacgacagagtgagactccgtctcaaaaaaaaaaaaaaaaaaagattagaggggta

SEQ ID NO: 425751 - DNA, 201 bp, Homo sapiens
tcacgcctgtaatcccagcactttaggaggctgaggcgggcagatcacgaggtcaggagatcgagaccatcctggctaacatggtgaaaccccgtctctaytaaaaatacaaaaaaattagccaggcttggtggcatacacctgtagtcccagctacttgggaggctggggcaggagaatggcatgaacccaggaggtgga

SEQ ID NO: 425752 - DNA, 201 bp, Homo sapiens
ccagcacttagggaggcagaggcgggaggatagcttgagcccagtagatcgagatctgcctgggactgtagcgagacccggttcttgggggaaaaaaaaaaccaaaaagaatatagggcatcctaaagaccaacaactgtgatttttaaatgcgctatagtgaaataccatctaagcctctgaaatcctacttgggagtga

SEQ ID NO: 425753 - DNA, 201 bp, Homo sapiens
cgacagagtaagactctgtctcaaaaaaaaaaaaaaaaaaaaaaaaaaaaagtgtagtcctttataggggcccctacaaaccaaactgatcaaaattaatsaaatcaaaatttaggcaagatagatagttcaacagtatttgagtcaaattggtcatagtctgttcagggaatgatggtgattaaggaccatagtttactg

SEQ ID NO: 425754 - DNA, 201 bp, Homo sapiens
ctaattaaaaattagaaaaagatgctcataaagaggcttcatttttggtgtataattttgtgataatactacctatatttaaatatgtatatttaaaagtrtacagtcatgtgctgcataatgacattttggtcaacaatggaccacatatatgacaaaggtttcataagattatgataccggatttttactgtacctttt

SEQ ID NO: 425755 - DNA, 201 bp, Homo sapiens
gtaatcccagcactttgtgaggctgaggcggacggatcacaagatcaagagatcgagaccatcctggctaacatggtgaaacctcgtctctactaaaaatmcaaaaaaaaaaaaaaaaaagctgggcatggtggtgtgcacctgtagtcccagctactcgggaggttgaggcaggagaatcgcttgaacctgggaggtgaa

SEQ ID NO: 425756 - DNA, 201 bp, Homo sapiens
aatcacgctggttttgccagttgacagcaatacaacccaaggattgctagtctgaactagctatttactattcaaaatttgaacttttctctatgggactrtgtactttgtaaatatacatatacgtattttcctaatttttgtgaaatctgcattaaaggttgcaaaattcagaatataatgtagattgaacattatatt

SEQ ID NO: 425757 - DNA, 201 bp, Homo sapiens
acttttctctatgggactgtgtactttgtaaatatacatatacgtattttcctaatttttgtgaaatctgcattaaaggttgcaaaattcagaatataatstagattgaacattatattttccgtatcatgggtatatttcctaaatcatggtgtgggtgtaggtgtgtgtctctctgtcttgttttcttttttttttttt

SEQ ID NO: 425758 - DNA, 201 bp, Homo sapiens
tatgggactgtgtactttgtaaatatacatatacgtattttcctaatttttgtgaaatctgcattaaaggttgcaaaattcagaatataatgtagattgawcattatattttccgtatcatgggtatatttcctaaatcatggtgtgggtgtaggtgtgtgtctctctgtcttgttttctttttttttttttttaaccaac

SEQ ID NO: 425759 - DNA, 201 bp, Homo sapiens
cataacacatgcagtaaactgaggtatctggtagatatttaggtgtgcatgtgtgcaggtgcatggctcagttcagctgagtgcagctttctgcattaacytagtgtttctcatctgaattttgcacctaagcaaatgcgaaattcatgttatgctcaaattgttccctaatacatgaattgtattggatcaaactcattt

SEQ ID NO: 425760 - DNA, 201 bp, Homo sapiens
ctttgtaaatatacatatacgtattttcctaatttttgtgaaatctgcattaaaggttgcaaaattcagaatataatgtagattgaacattatattttccrtatcatgggtatatttcctaaatcatggtgtgggtgtaggtgtgtgtctctctgtcttgttttctttttttttttttttaaccaacacaattgtatttta

SEQ ID NO: 425761 - DNA, 201 bp, Homo sapiens
ctggtagatatttaggtgtgcatgtgtgcaggtgcatggctcagttcagctgagtgcagctttctgcattaacctagtgtttctcatctgaattttgcacytaagcaaatgcgaaattcatgttatgctcaaattgttccctaatacatgaattgtattggatcaaactcattttctcaaaacaagtgttagagcagaatt

SEQ ID NO: 425762 - DNA, 201 bp, Homo sapiens
tgcccttatgtaagttagaatagccaattttaaattataaggttaccttcctagtccagactcaaacatctttctgtttatagtacatattaattttattrtgtagtttaaggaatattgtgtcagtagttcagataatacatattcatctaaagcccaacattggaactttctcaattacttcttgttctagatgatcat

SEQ ID NO: 425763 - DNA, 201 bp, Homo sapiens
tgttcaaagcacacaaagcagtccttttagcaagagttcctgacttctattttcatactattggacagacatcaaatagtttaacaaatcaggagcctatwgctgtggagaatgttgaagctttagaatttagaacgtttttacagtaagtgctttctttatccatgtaagtctaatatgtaattgcttatttttaacatg

SEQ ID NO: 425764 - DNA, 201 bp, Homo sapiens
aatcacctggtggatgcatggtttcatctataccctttattattattatcacacagtgctatgatatattttgcctttccctgttgtatcatgtatcaaaytgattgtctcaaattattagcattgtggcatataaagctgttggaaggctaaaggggattaaggaattttactttaaaaaattacatcttttaggaattt

SEQ ID NO: 425765 - DNA, 201 bp, Homo sapiens
agatcaataaattgattaaacttttatcaaactttaaaaattactactttttaaattttaggatatcttttctaaacagcaaaagaaaagaaaaaacatakttaagaatataggggctgggtgcggtggctctcgcctgtaatcccagcactttgtgaggctgaggcggacggatcacaagatcaagagatcgagaccatc

SEQ ID NO: 425766 - DNA, 201 bp, Homo sapiens
ctcagacctcctcaaacgaaacatccagcagtacaacagttttgtgtcactgtctgaaatctgcctcttgggcctcccttttctcctctcctcaatccgtacttcactcatgcagaccgctttattttcgctatttgcagtgccaaatggacactggcatcacagcttcttgtctgtttatatattaaaagttgcacttat

SEQ ID NO: 425767 - DNA, 201 bp, Homo sapiens
tctctcttatataatcctattctgttgtcttcatggcactttgactatcaaaattatctttttaatattgcccatgtccttccactagaatgttaaacttcttatatctacaaagtttagaatgagcctgtcattcaaaaatattaattatgaatgaacaaagaatgagtgaatgaatggagtctctgtgtccccttagcc

SEQ ID NO: 425768 - DNA, 201 bp, Homo sapiens
atagttggaaggaaattttcctgctctagcagacagaaagggaaaattttccacatactataatgtaaattgaaccacagccaacacttctgtgaaggaaytccacttgtttcattttattaattaaaagtcttccagtggtgcctgggctttggagcataaatttggattttcctatctcccttgagagattcctgggat

SEQ ID NO: 425769 - DNA, 201 bp, Homo sapiens
gatatagttggaaggaaattttcctgctctagcagacagaaagggaaaattttccacatactataatgtaaattgaaccacagccaacacttctgtgaaggaactccacttgtttcattttattaattaaaagtcttccagtggtgcctgggctttggagcataaatttggattttcctatctcccttgagagattcctgg

SEQ ID NO: 425770 - DNA, 201 bp, Homo sapiens
ggatatagttggaaggaaattttcctgctctagcagacagaaagggaaaattttccacatactataatgtaaattgaaccacagccaacacttctgtgaaggaactccacttgtttcattttattaattaaaagtcttccagtggtgcctgggctttggagcataaatttggattttcctatctcccttgagagattcctg

SEQ ID NO: 425771 - DNA, 201 bp, Homo sapiens
cagttttgtacttttagcttttccatttaggtctttgatctattctggttaatttttgtatatggtatgaggttagcgtctaacttcattcttttgcattyggatgttcacttgtctcagcaccatttatgggggagactgttctttccccattgtgttattgtctggacacccttgtcaaaaattagttgcccataaatg

SEQ ID NO: 425772 - DNA, 201 bp, Homo sapiens
tggcactgtgtccgaagatcattgttttgtatgtccttgaaaaagctaaaagttttttcagaagtggtatgatttagtaattgagaagttggtctttttgygtttagattatgatcccaccgcttatttttaaaattccaccacttattaattgttgagaagttacttaatctctccaagtttcaatatttttatctgtaa

SEQ ID NO: 425773 - DNA, 201 bp, Homo sapiens
aggatatagttggaaggaaattttcctgctctagcagacagaaagggaaaattttccacatactataatgtaaattgaaccacagccaacacttctgtgaaggaactccacttgtttcattttattaattaaaagtcttccagtggtgcctgggctttggagcataaatttggattttcctatctcccttgagagattcct

SEQ ID NO: 425774 - DNA, 201 bp, Homo sapiens
aaaggcacccatcagagaagcgcctgttttctagggctagacctgccttattgtccttgctggcctcagtcattgtcaggaagtagcttctggtgagatgrccttgtgacctaggtggaataaatttccgagtgctgtagctgaagctatcagtcattatgcagtcaaagattagaggggtaggcccggtgcggtggctca

SEQ ID NO: 425775 - DNA, 201 bp, Homo sapiens
aaggatatagttggaaggaaattttcctgctctagcagacagaaagggaaaattttccacatactataatgtaaattgaaccacagccaacacttctgtgaaggaactccacttgtttcattttattaattaaaagtcttccagtggtgcctgggctttggagcataaatttggattttcctatctcccttgagagattcc

SEQ ID NO: 425776 - DNA, 201 bp, Homo sapiens
catagaaggatcataaaccttggtgtccttacaggcagtagtatatccagtcctaacttgttttatgactttggggacattccttaactttcctgagcttyctgaggtggttgaaagtattaaatgagatacagtaaggaaagaaactggcatagtatgtagtgctcattaatattgactgttctttctttctctaaatta

SEQ ID NO: 425777 - DNA, 201 bp, Homo sapiens
ttataccactacattccagcctgggtaacagagccaaaccctgtctcaaaaaaaaaaatatatatatatatttacacacacacacacacacacacacacamatatacgcacacacacatatatatacacacagtatatattttatataacttaaagtatctccagttatctcaaaaggatcttaattgtttaaactgttaa

SEQ ID NO: 425778 - DNA, 201 bp, Homo sapiens
aaaaaaaaaaaaagattagaggggtatattctcatgactgctacacatataaatcatgacatgctatgtattcatatacctttaccactaggcatagtcarataaagtaagaaataattgttaaaaaaaacacttattatttgctaagtattgtggtgctgagattgggattcataaagaaatgaatgaagcactgaggat

SEQ ID NO: 425779 - DNA, 201 bp, Homo sapiens
ttctagccttacgagttacattattccaatgatacccaacagtttatttttattttttttttgaggcggagtttcgctcttgttgcccaggctggagtgcrgtggtgcgatctcggctcactgcaacctccacctcctgggttcaagccattctcctgcctcagcctcccgagtagttgggattacaggcacccgccacca

SEQ ID NO: 425780 - DNA, 201 bp, Homo sapiens
aggttggaggcagagtagggtggacagaggagcagaggagagaagagggaagctcatgaaagccacgtggagagggagtgaagagcagaagaaagaatagrggggacctgagacactcagagagagacagaaccatggcgtctggtgacactgctgccagagaggaggagcatagcctttgagaatgtgagctctacctcc

SEQ ID NO: 425781 - DNA, 201 bp, Homo sapiens
ttgttgaagtgggaagattggggccttctgattattttggtgaatttgcattcctgatgaatcaccctcctgctgccacagtggttgtacatggccccttraagtacattaagctggaccagcctagatttgaatgtgctcttgcccaggctcagacctcctcaaacgaaacatccagcagtacaacagttttgtgtcact

SEQ ID NO: 425782 - DNA, 201 bp, Homo sapiens
ggcctatgccctgtttataatccataaagggtgtatgttatgtaaggcagaaaattagaattaaaatatttcagattattcttttttaaaaacagactatrtattatcaataaattagtatgtgttgtgccttgatttttaaattggagaattaacagtgcatctatttttattttagtcagatactcaatatggctgata

SEQ ID NO: 425783 - DNA, 201 bp, Homo sapiens
tattaacatcttatagtacatttgttacaattgagtcaatatcaatacattgttattaactaaagtctgtagtatattcagatttccttggtttttacctrgtgtccttttgtatttgaggaatcaatccccgatctcacattatgcttagttgtcctgtctccttaggctcctcttggctgtaacagtttttcagacttt

SEQ ID NO: 425784 - DNA, 201 bp, Homo sapiens
ggctcagacctcctcaaacgaaacatccagcagtacaacagttttgtgtcactgtctgaaatctgcctcttgggcctcccttttctcctctcctcaatccgtacttcactcatgcagaccgctttattttcgctatttgcagtgccaaatggacactggcatcacagcttcttgtctgtttatatattaaaagttgcactt

SEQ ID NO: 425785 - DNA, 201 bp, Homo sapiens
ttcacatcttgatgataatgagagaagtgatatatttgatgccatatttccatgtctcctttatcactggagagagacagtgattctgcaaggtgatgaargggataacttctaggtgattgagcaaggagagagggatgtctgtgtcaatgatgaatgagcaaccagtgttgaagaaggagggagctttggagaatttgt

SEQ ID NO: 425786 - DNA, 201 bp, Homo sapiens
gagccaccgcgcctggcctatacgcttttttctgttaaaaaatatttttaagtttttaaacttttgttaaaaattgagacagaagcaaacacattacttastaggcctacacagagccaggattatcagtatcaatcccttccgcctccacatcatgtcccactggaaggtcttcggggcagtaacggacatggagctgtt

SEQ ID NO: 425787 - DNA, 201 bp, Homo sapiens
ccttttgcttttgtctggctggcagactagatgctgatcactttgttccagtcaggaaccgagataattcaaaactggctttcaagtctaataagggcttrtctatttcctgttcactcttctgtttagaatgtggccgttcgggatccaactgaaatcctgggttatctactaaaacccctcctctttgatggtccccaa

SEQ ID NO: 425788 - DNA, 201 bp, Homo sapiens
ttagtagagacgggatttcaccatgttggccaggatggtcttgatctcttgacctcgtgatctgcccaccttggcctcccaaagtgctgggattacaggcstgagccaccgcgcctggtcttttttgtttgttttgttctttttttagacagagtctcactctgtagcccaggctggagtgcagtggcatgatctcggctc

SEQ ID NO: 425789 - DNA, 201 bp, Homo sapiens
cagtaggtttatttataccagcacctccacaaacatgtgagtaatgctttgcacttgaccttctgtcagctatgacatccctaggttgcaggatttttcascttcattataatcttatgggaccatcttcatatgtgagtggtctcttgacccaaacattgttatgtagcacatgactgtaaattttggaatcaccttgtc

SEQ ID NO: 425790 - DNA, 201 bp, Homo sapiens
taaaataacaatataaaatgtagtacaataaaataataagccagtaacgtagttgtttattatcaagtatgtactgtacataattgtatatgctagacttytatacagctggcagcacagtaggtttatttataccagcacctccacaaacatgtgagtaatgctttgcacttgaccttctgtcagctatgacatccctag

SEQ ID NO: 425791 - DNA, 201 bp, Homo sapiens
tggattgtatagctataccacaatttgtttattcattctcctgttgatggaatattggttgtttccagtatttagctattattattattatttttttttttgagacggagtcttgctctgtcaccaggctggagtgcagtggtgcaatctcggctcactgcaacctccgcttcccaggttcaaacgattctcctgcctcag

SEQ ID NO: 425792 - DNA, 201 bp, Homo sapiens
aatcttacattcctgaaataatttcggtttggttgtgatgttttattcattctatttcgtgctgaattcagtttgctaatattttgtttaggaattttgcrtctatgttcatgagacagatcggcctgtaattttacttttttgtaatgtccttgtcaggtttaggcctcaaagttatgttgactttataaaatgaactgt

SEQ ID NO: 425793 - DNA, 201 bp, Homo sapiens
ccggctaattttttgtattttagtggagatggggtttcaccatctctaacttgaactcctgatctcaagtgatccacccgcctcggccttcaaaagtgctrggattacaggtgtgagccaccgcgcctggcctatacgcttttttctgttaaaaaatatttttaagtttttaaacttttgttaaaaattgagacagaagca

SEQ ID NO: 425794 - DNA, 201 bp, Homo sapiens
atcacagcttcttgtctgtttatatattaaaagttgcacttattgtacggtttttaatttggagcagtaattaaatgcttgtacacaattaaatagagttytatggagtctttgctgttactgcttcattttgggcaatgttagcattcaacctctgagcagtgagtgccatgcttttgggtgaaggcagatcccagcatc

SEQ ID NO: 425795 - DNA, 201 bp, Homo sapiens
cacattacctaataagtttttaatcaaatgccagacattataaatattatgtttttgaatgtttgaactttattgtttttcttgaaaaagattattaaaggttttttttttagcaggcatttaagttattgtggatcagcttcatgtttatgaagcttctttttaaattttgttagggtgcatctaggatagcctttgctc

SEQ ID NO: 425796 - DNA, 201 bp, Homo sapiens
agtgtgatactgcatgcctgtagtgttagcttcttgggaggctgaggtgggaggatcatacgtgagtctaggagttcagggctgtagtaagctatgatcaygccactgcattccagccagggtgacagaggaagatcctgtctcttaaaacaaaaaacaaaaaaaaaacccttaggtataaatataagcttataagtttta

SEQ ID NO: 425797 - DNA, 201 bp, Homo sapiens
tgaatccaggaggcggaggttgcagtgacccgagatcacgtcactgcactccagcctggacgacagagtgagactccgtctcaaaaaaaaaaaaaaaaaaagattagaggggtatattctcatgactgctacacatataaatcatgacatgctatgtattcatatacctttaccactaggcatagtcagataaagtaagaa

SEQ ID NO: 425798 - DNA, 201 bp, Homo sapiens
ttaaaaaattaaagaaccttcaaagaaaaaaaaagacagcaagggcattggaattaatgttttaaacaatcaaaatgcttagttataaatcccagcacttyaggaatagggggattgcttgaggtctagagtttgagaccagtctggacaacatagtgagaccccatttctacaaaaaatttaaaaatcaagttgagtgtg

SEQ ID NO: 425799 - DNA, 201 bp, Homo sapiens
aaaaaaaaaaaaaaaaaaaaaaaaaaaagtgtagtcctttataggggcccctacaaaccaaactgatcaaaattaatcaaatcaaaatttaggcaagataratagttcaacagtatttgagtcaaattggtcatagtctgttcagggaatgatggtgattaaggaccatagtttactgtagaatgatctgatttcaaaagg

SEQ ID NO: 425800 - DNA, 201 bp, Homo sapiens
tttctagccttacgagttacattattccaatgatacccaacagtttatttttattttttttttgaggcggagtttcgctcttgttgcccaggctggagtgyggtggtgcgatctcggctcactgcaacctccacctcctgggttcaagccattctcctgcctcagcctcccgagtagttgggattacaggcacccgccacc

SEQ ID NO: 425801 - DNA, 201 bp, Homo sapiens
agaagtaaacagagcgagtacgcctgcgcacgctcttcctgggtcaagagccggctcggttctgggattctgaggctccccaccgcggtccggcttctctkggagactgtctacaaaccgacgagaggcgtcaaccttttaccctagggggcggatttgggtaggagccgagcgttcggtcggaaacgcccccttcttcct

SEQ ID NO: 425802 - DNA, 201 bp, Homo sapiens
ggtctcatcgtgttgcccaggccagtctcaaactcttgatctcaagtgatcctcccaccttggcctcccaaagtactgggattatagatgttagccaccgsacccagcttaaatcacatttgtcaaatcataattcagagttcattctaccacagtcattgaagaaatttaaaagttttccgattggtatgtgttcttgag

SEQ ID NO: 425803 - DNA, 201 bp, Homo sapiens
aaaggggattaaggaattttactttaaaaaattacatcttttaggaatttgtatattgaaacaatacacaaaacaaattccagtttcccattaacttacaytgtaaacctgggcagatgtttccatgagaagtgtggtgtcatagaaggatcataaaccttggtgtccttacaggcagtagtatatccagtcctaacttgt

SEQ ID NO: 425804 - DNA, 201 bp, Homo sapiens
gtaaacctgggcagatgtttccatgagaagtgtggtgtcatagaaggatcataaaccttggtgtccttacaggcagtagtatatccagtcctaacttgttwtatgactttggggacattccttaactttcctgagcttcctgaggtggttgaaagtattaaatgagatacagtaaggaaagaaactggcatagtatgtagt

SEQ ID NO: 425805 - DNA, 201 bp, Homo sapiens
catgtatgtttttatttaatatattttcatatgtattttgtaacctgataagaaaaatccattcacttaaattccaaattatcttagtaattagtgttgayagaggctaagtgttaatattagtactagtagtactaatattagcttagtactggtagtacaatattagcttagtactggtagaggctaagcattaaccta

SEQ ID NO: 425806 - DNA, 201 bp, Homo sapiens
ttatatgtaagtaggagtactctaaaataacaatataaaatgtagtacaataaaataataagccagtaacgtagttgtttattatcaagtatgtactgtasataattgtatatgctagacttttatacagctggcagcacagtaggtttatttataccagcacctccacaaacatgtgagtaatgctttgcacttgacctt

SEQ ID NO: 425807 - DNA, 201 bp, Homo sapiens
agctccttgagattagattgtctcactgatgtgcacatctccattggtgcctcatgtagtgtcttgcatatagaaagcacttgtgacgtacccttttttgstttcaaagcagattgttttgacatttgtctgtatgaaaagaaggcaaaaggaagggagtacaatggaaaatgttgacatgaaaatttcttctagtgaaaa

SEQ ID NO: 425808 - DNA, 201 bp, Homo sapiens
aatttctgtacattttaaacactcatgaatgtccttgcttccttccttcttactcccctattgttgaatctcattttactagtctataccacaggacagtyatcagcagactgccagttcagtcctccttccataaagattttagctactattgtcaattttcctaagtatatgtgttagtaattgcaattgctatgtaga

SEQ ID NO: 425809 - DNA, 201 bp, Homo sapiens
ttactagtctataccacaggacagtcatcagcagactgccagttcagtcctccttccataaagattttagctactattgtcaattttcctaagtatatgtrttagtaattgcaattgctatgtagatgatgtttccagtaacttggcctctcagtgccttcaattcctgtcttccagtaatcttgttgtccactctacctc

SEQ ID NO: 425810 - DNA, 201 bp, Homo sapiens
gacacaatcatggctcaggagtttgaggctgcagtgggccatgattataccactacattccagcctgggtaacagagccaaaccctgtctcaaaaaaaaawatatatatatatatttacacacacacacacacacacacacacacatatacgcacacacacatatatatacacacagtatatattttatataacttaaagt

SEQ ID NO: 425811 - DNA, 201 bp, Homo sapiens
tctttcttgagtaaattttgttttcattctttttttatagttaagtatattgagttagaatgcatacacaaacaaatgcacacaacttaaagtccagttckatgaattttgactaatgtataaacctgtttaacttccactgtaagcaaaatatagtgaattttcgtcaactaaaaagtccccttgtacccatttaccttc

SEQ ID NO: 425812 - DNA, 201 bp, Homo sapiens
gtttagacatagtgagccacctttacatttagagaatgctaagaacagcgcccaaatccatgtttccagatatcagccaagggccaagtttataaataaayctttcaaggtatagcagtcaggcctgctatgttacctattttcccctacatatagatatactgtattttgtttacccagtcatcagatgataggcttttg

SEQ ID NO: 425813 - DNA, 201 bp, Homo sapiens
tgagttagaatgcatacacaaacaaatgcacacaacttaaagtccagttcgatgaattttgactaatgtataaacctgtttaacttccactgtaagcaaartatagtgaattttcgtcaactaaaaagtccccttgtacccatttaccttcagtacctatccctaccccagccacaggcaacaaatgattttcatgtgctt

SEQ ID NO: 425814 - DNA, 201 bp, Homo sapiens
taaagtccagttcgatgaattttgactaatgtataaacctgtttaacttccactgtaagcaaaatatagtgaattttcgtcaactaaaaagtccccttgtrcccatttaccttcagtacctatccctaccccagccacaggcaacaaatgattttcatgtgcttatttgccatctgtatacctctttggttagttttctgt

SEQ ID NO: 425815 - DNA, 201 bp, Homo sapiens
aatgtttctcaatttttctggagtaatacatatctctagtttccaaggcatgtttgctttttaatcatcctttaaccaagtttactggtgctctgctcagmcaggtcagaccatgctaaaacataaaaatattcatagaaaagtgtctcccaatagttggttatctgaagtcagatgggaatttataaaaccagatataga

SEQ ID NO: 425816 - DNA, 201 bp, Homo sapiens
tattctacctttcctagaatttcatgtaaatggactcagacatactgttgtgtctggcctcttttgttcagtgtaatgtttttgagcttcatccttgcatrttatgtgtatcagtgattgattcaatttttattgctgcatagtattggattgtatagctataccacaatttgtttattcattctcctgttgatggaatat

SEQ ID NO: 425817 - DNA, 201 bp, Homo sapiens
tgtctcataacacatgcagtaaactgaggtatctggtagatatttaggtgtgcatgtgtgcaggtgcatggctcagttcagctgagtgcagctttctgcawtaacctagtgtttctcatctgaattttgcacctaagcaaatgcgaaattcatgttatgctcaaattgttccctaatacatgaattgtattggatcaaact

SEQ ID NO: 425818 - DNA, 201 bp, Homo sapiens
taacacatgcagtaaactgaggtatctggtagatatttaggtgtgcatgtgtgcaggtgcatggctcagttcagctgagtgcagctttctgcattaacctrgtgtttctcatctgaattttgcacctaagcaaatgcgaaattcatgttatgctcaaattgttccctaatacatgaattgtattggatcaaactcattttc

SEQ ID NO: 425819 - DNA, 201 bp, Homo sapiens
ccccttaaataaatggtattctgtaatttttttgagcttcatatccaaccactgactaaacatacctgttaaagtctaccttattattattttttttttttgagaaggagtctcactccgtaacccaggctggagtgccgtggcacaaatcttgtctcattgcaacctccgcctcccgggttcacgccattctcctgcctc

SEQ ID NO: 425820 - DNA, 201 bp, Homo sapiens
tactttaagtacaacttagaaaatcactatcatttttcagtacaggttatataggctcatcattgagtttgaaataccaatttttttttttttttttttttgagacgggagtcttgctctcattgcctaggttggagtgcaatggcatgatttcggctcactgcaaccttcacctcccaggttcaagcaattctccagcct

SEQ ID NO: 425821 - DNA, 201 bp, Homo sapiens
aggaggatcacttgagcccagaggcagagtagttagctgagatcatgccacagcaccagcgtgggcctcagagtgaggctatctccaaaaaaaaaaaaaaagaaaagaagaggcaccagagagcttgtgtgcatacttactctatccctgccatccaaggacacagtgaggcgatggtgtctggaagccaggaagccctca

SEQ ID NO: 425822 - DNA, 201 bp, Homo sapiens
taaactccttaatgtttaagccagtctaagtcagattttcagatttgtaacataacaaaatatacttgaaactgataaaaatggttctatcaaataaaaarcactgtattttcacattaacaattttatacacacttttttttttccatttagcaagtactcatgagcatctgttagcaacaaggtgggttccctcctgat

SEQ ID NO: 425823 - DNA, 201 bp, Homo sapiens
cccagccaggattctacattttgaagtgctttctgtcaaaaactcacccatacttaaggctccgatagctataaacagaatttatcaaagtaaaaaaaaaatccctttaatttgggactatctactggggaagctactttgtctctaccagggagggactgatgaaaaagatggaaaaaataatactaaagttgttaacgt

SEQ ID NO: 425824 - DNA, 201 bp, Homo sapiens
aagacaccaaggtcatgaagatttatgcctatgtttacttaaaacagttttgtacttttagcttttccatttaggtctttgatctattctggttaattttygtatatggtatgaggttagcgtctaacttcattcttttgcatttggatgttcacttgtctcagcaccatttatgggggagactgttctttccccattgtg

SEQ ID NO: 425825 - DNA, 201 bp, Homo sapiens
ctcatgcgtgaaatctcagatcaagcatcaccttcccagactgtcacctaatatagctacagaccaactcctcagttactctctcttatataatcctattstgttgtcttcatggcactttgactatcaaaattatctttttaatattgcccatgtccttccactagaatgttaaacttcttatatctacaaagtttagaa

SEQ ID NO: 425826 - DNA, 201 bp, Homo sapiens
gaaaattcaattcttgaagcagatgctatgtgccccaagtgcttttgccccccacaacttgactctgatttagttgggtatgaaaagaatgatccaatttktataatcaacttacacaacaccttatagcctgaaggcaattttataaagtattttaaatagttttgtgaatgaaacaaattttgtgtatattgaaccatc

SEQ ID NO: 425827 - DNA, 201 bp, Homo sapiens
attcactccctttagtatagaggaatagaggctggggtaagatgcaagacgctatgtagcagtgctctcaacaagatgggaataacagaaagaggactaaktttggtgtggggagtaagaagaaggtcatgaatttagagtttgagatatggcactcaattggatataaaggttatcattccaaactacctcttaagtcat

SEQ ID NO: 425828 - DNA, 201 bp, Homo sapiens
agatgaacattaactatatctgtaaaaccatcccaccctggagcttctatcagagacgaagagaaagtgataagaaatttcttaggagagcttggagtatrtctgagaagccagtgagaatatacttgagtgaggagatttctaaagagagaaggcttgctggagaagccaaaaccagccttggtgtaaggaactacagtt

SEQ ID NO: 425829 - DNA, 201 bp, Homo sapiens
tttcttctttacccatgggttgtctagacgtatgtttaatttcaactgtttgggaattttccagataattctccattattgatttctagtttaattccatkgtggtcatagaacatattttatattattttagttttgtttaaatttattgagacttttcgatggcccagaatacggtctgtgttagtgaatgttccacat

SEQ ID NO: 425830 - DNA, 201 bp, Homo sapiens
ccatgccaaaggcacccatcagagaagcgcctgttttctagggctagacctgccttattgtccttgctggcctcagtcattgtcaggaagtagcttctggkgagatggccttgtgacctaggtggaataaatttccgagtgctgtagctgaagctatcagtcattatgcagtcaaagattagaggggtaggcccggtgcgg

SEQ ID NO: 425831 - DNA, 201 bp, Homo sapiens
attattgatttctagtttaattccattgtggtcatagaacatattttatattattttagttttgtttaaatttattgagacttttcgatggcccagaatayggtctgtgttagtgaatgttccacatgtacttaaaaagaatatgtgttctgttgtcctgtggtggagtgttctataaatgaaaaaattggttgatagtgt

SEQ ID NO: 425832 - DNA, 201 bp, Homo sapiens
aagcaaggagccagagaccacaaggggttttatgccctgagccccggattccatccaagccactaggggtttaatgccctgggcttatattgtggtgcggsagggcagccttccaccctttggcacagagcttggtgttccaaaggccacaaggggttttagaccctggaccgcagacatgttccaaaatcttttacatta

SEQ ID NO: 425833 - DNA, 201 bp, Homo sapiens
tccactctgcaccccggttacacatggtccacagcgaaggaggaggaccttaatggtttcatgaaagttagaggagactgatacagggctagatgacaccrtgtcccacttggggaggtattgtgcatcgtgagccacttgaagagttcttatctacagagaggccaggttgaagcttgatctgccactaaaggagccatt

SEQ ID NO: 425834 - DNA, 201 bp, Homo sapiens
aaaaaaaaaaaaaagtgtagtcctttataggggcccctacaaaccaaactgatcaaaattaatcaaatcaaaatttaggcaagatagatagttcaacagtwtttgagtcaaattggtcatagtctgttcagggaatgatggtgattaaggaccatagtttactgtagaatgatctgatttcaaaaggtatccaagtttgtg

SEQ ID NO: 425835 - DNA, 201 bp, Homo sapiens
catgttagtgtcttctctgagctgagattcttcagtaagccagttaaagcttatttaagagccttaaaagctgtaaaaatagtcttttatgagtagtcttkggaccattgcctctattttttttttaatatgtggatgagtatatgtgggttttatgcagcttcttgtattttattttcaataattcactttattttaaaa

SEQ ID NO: 425836 - DNA, 201 bp, Homo sapiens
acttcttgttctagatgatcattgtcagcattcttctagtggtgtggctaaaaatccttttgtaatatggctactttaattttttaattatacatacttayatattaaaagatcaatacaagtacttacaaaggaccaggatttatgactggaattttattcagtttaggtatcaacatttttaaaaccttagtttgctag

SEQ ID NO: 425837 - DNA, 201 bp, Homo sapiens
cgggatctcagctcactgcaacctccagctgcctcccaggttcaagtgattttcctgcctcagcctcctgagtagctgggattacaggcatgtgccaccaygcctggctaatttttgtatttttagtagaaatggggttttgccatgttggccaggctggccttgaactcttgacctcatgtaatccaccttgcctcgaca

SEQ ID NO: 425838 - DNA, 201 bp, Homo sapiens
tttttatctgtaaaaggaatagtagtagaaattatagcatgggtggctgtgaagattgaatcagataatgcacatgaagcacttagcatagtacctggcayattgtaagctttcaaaagtaaatgttagttgctataagtgtgtgatagatatctgtaagactggcacatatgttgcctgttctagcttgtcttatatcag

SEQ ID NO: 425839 - DNA, 201 bp, Homo sapiens
actcaggaggctgaggcaggagagtcgcttgaacccaggaggcggagattgcagtgagctgagatcgcaccactgcactccagcctgggtgacagagtgaraatctgtctcaaaaaaaaaaaaatacatcatgtaattatgatctaattaaattcttcttatctgagatcaatatagggcctctcattgcacaattacttt

SEQ ID NO: 425840 - DNA, 201 bp, Homo sapiens
tttgtatgaggcaacaaaaaagcagagacaagtaatgccacagggacctgcaagtctaaagtgcctttcaagagtcacttgggtttgttcccaaacctgcrtatgccatttgaatttattattttgatgacaatgaatataagtcaatgatacataaaatatgaaagagaaaagttattgttccagtgaaaactcggatga

SEQ ID NO: 425841 - DNA, 201 bp, Homo sapiens
aattaaaatcaaactaggtatcatagtgtatatatgtattgtttttgtgaaaatgaggcttatatcagcaaacccatgttaaaaaaaagatgggccttatrataaaagatttgtgaattaaatgcatatttcttcttaagttagagtaaaattatagtatacaaaaatagcttttttaattcctcatttttttcaattaac

SEQ ID NO: 425842 - DNA, 201 bp, Homo sapiens
aaccttgatgatgaccttgttttcatctggtttctccactataagttactcctctcctcacttcccatttccagactctgctctctggaaggaagtcactrtgtgtagcccatatttaagtgatagaaagtaatgttctacctccttgaaccaggggtattatccacataaattatttggaattcttctgcacaaaaaact

SEQ ID NO: 425843 - DNA, 201 bp, Homo sapiens
gttcctatggcatatttctggtcacaaaaagatcatcagccttctagtagagacccaagacacttcttatattgaatattgaaataattgtgagctatacatacatttcagaaatattaataaaaacaagataagtacccagtttttggtgaatctgtgagtggcagtaatagcaatggtgggttaaatcaaggaataaat

SEQ ID NO: 425844 - DNA, 201 bp, Homo sapiens
ttatccagctagtgccaaatattgatcatatgctgaattgaggatcagaattcgaggtctacactcctggttgttaatttagagcttttggttaatgtacmtccttcagttgactctagtatgatctcctatgcttatcaagctgattccaggagattgaatttgctacaactagattcagttggaacgaaagtcataaca

SEQ ID NO: 425845 - DNA, 201 bp, Homo sapiens
ggacagcagaattctataatctggccgggcacagtggctcacgcctgtaatcccagcactttgggaggctgaggcgggcggatcacaaggtcaggagatckagaccatcctggctaacacggtgaaaccccatctctactaaaaatacaaaaaattagccgggcgtggtggcgggcgcctgtagtcccaggtacttgggag

SEQ ID NO: 425846 - DNA, 201 bp, Homo sapiens
ctactttataaaaatatgtatacgttttttagtatcactaattaaactatgattcctttttattccttataggcttctaagggaagaattccatacagatrttaccttctctgtgggttgtactttgttcaaagcacacaaagcagtccttttagcaagagttcctgacttctattttcatactattggacagacatcaaa

SEQ ID NO: 425847 - DNA, 201 bp, Homo sapiens
gtagcccagttagtttcaaaatgtcatctgaataagtagaccatacactgtattagtgccaggcatgaccaggctcacccctcttacagtattttcccttmacttttactgtaagcaaggctttgcttctcactggttcattttacctagagctgctttattaacagtggaggctcacctctaattggcttattgactcct

SEQ ID NO: 425848 - DNA, 201 bp, Homo sapiens
aatgtaaattgaaccacagccaacacttctgtgaaggaactccacttgtttcattttattaattaaaagtcttccagtggtgcctgggctttggagcataratttggattttcctatctcccttgagagattcctgggattgccctggccttcaatataagttttgaaatataaatgagatgtattttctgtcctgactaa

SEQ ID NO: 425849 - DNA, 201 bp, Homo sapiens
tccaataagttcattcctgcatcagggcctttgtttttttggcttcctctgcctaagagtttttcacctagtattttgcatggctggcttcttctcatgcrtgaaatctcagatcaagcatcaccttcccagactgtcacctaatatagctacagaccaactcctcagttactctctcttatataatcctattctgttgtc

SEQ ID NO: 425850 - DNA, 201 bp, Homo sapiens
ctcttatataatcctattctgttgtcttcatggcactttgactatcaaaattatctttttaatattgcccatgtccttccactagaatgttaaacttcttrtatctacaaagtttagaatgagcctgtcattcaaaaatattaattatgaatgaacaaagaatgagtgaatgaatggagtctctgtgtccccttagcccac

SEQ ID NO: 425851 - DNA, 201 bp, Homo sapiens
ttcttaccctttttatagtatcatatatattgatatataggttcaaatgtctagattttgctgtttattttaatatgacttatttttatttagtcattatsttttgcttaacatatcaagtattttttaagaaactattatttcaacataaatagccaattcttattaatgttgataagaatcgttctggaaattctgagg

SEQ ID NO: 425852 - DNA, 201 bp, Homo sapiens
tcagatcttagaatctttgcatatgtagtaatgagaaatcttgggacttggggatggggatgatgcctaagtctaaacacaaaatttatttatgtttcgtrtacactgtcaaattcaaaataaaatatagagacaaatctctaaattaaatgttttatttgagaatcatagaattacaattcagagcctacacacagactg

SEQ ID NO: 425853 - DNA, 201 bp, Homo sapiens
aataacaatagtatccagaaagtactagaatctgcctatagtttcattaagggatgggaaaaaggggagatttgacatagtgtggttgaaagcattcgttsggaaaataaaaagtctcatgttagtgtcttctctgagctgagattcttcagtaagccagttaaagcttatttaagagccttaaaagctgtaaaaatagtc

SEQ ID NO: 425854 - DNA, 201 bp, Homo sapiens
atggtccgcgcctgagccatgggaggcggggtgcccgccggcagaagtaaacagagcgagtacgcctgcgcacgctcttcctgggtcaagagccggctcgsttctgggattctgaggctccccaccgcggtccggcttctctgggagactgtctacaaaccgacgagaggcgtcaaccttttaccctagggggcggatttg

SEQ ID NO: 425855 - DNA, 201 bp, Homo sapiens
atatagttggaaggaaattttcctgctctagcagacagaaagggaaaattttccacatactataatgtaaattgaaccacagccaacacttctgtgaaggaactccacttgtttcattttattaattaaaagtcttccagtggtgcctgggctttggagcataaatttggattttcctatctcccttgagagattcctggg

SEQ ID NO: 425856 - DNA, 201 bp, Homo sapiens
aatacaaaaaattagctggatgtggtggtgtgcacctaatagtcctggctactcagaaggctgaggtaggaggatcacttgagcccagaggcagagtagtkagctgagatcatgccacagcaccagcgtgggcctcagagtgaggctatctccaaaaaaaaaaaaaaagaaaagaagaggcaccagagagcttgtgtgcat

SEQ ID NO: 425857 - DNA, 201 bp, Homo sapiens
aaggaaggggccgtgtgagcggcgccggctgaaggcgacggtgtcggagcagctcagccaggatttgctcaggtaggaggaggcgggaactctggctgctwcagttcctaaatcgcccacctccgccccgaagctgaggcttctttcggctctgcctccccctccctcagcacttggttctcctcgcctcaggcgactgcg

SEQ ID NO: 425858 - DNA, 201 bp, Homo sapiens
tatagttggaaggaaattttcctgctctagcagacagaaagggaaaattttccacatactataatgtaaattgaaccacagccaacacttctgtgaaggawctccacttgtttcattttattaattaaaagtcttccagtggtgcctgggctttggagcataaatttggattttcctatctcccttgagagattcctggga

SEQ ID NO: 425859 - DNA, 201 bp, Homo sapiens
aatgcaagagccaaagttggcttgcttactgtatccctctaaaacagctcacctgagagaaagtttgaatctgcatggcagatatacttcttctccatcayctcttcccactggttcagcagagaagaaaggagaacatatatcagattacctcttatctggagttcctcccaactgataaccagttgttgtccaccaacc

SEQ ID NO: 425860 - DNA, 201 bp, Homo sapiens
taaactccctgaggataggtattatgttttagtcatctttatgttcccagtgcttagtacatagtatgtgctcaataaatgtttagtgctgagttttatcrgcagtgtaaattgctttagataagttatgctatggtttgaatgtttgtcctctcaaaactcatgttgaattttacaggcctggctgggcacggtggctta

SEQ ID NO: 425861 - DNA, 201 bp, Homo sapiens
ctcctggcttcattcatctgtgcggtagttttctcatcttcattctcattttcatctaactcctcttctacacaaatttatatattttgaaaaataaattygccattgtttcaaaccatttgcagggcaaacacacctgatagcaataatgtaggcatacacttaaaatgaccctgtatggtggatgtacctgcgtgtgtt

SEQ ID NO: 425862 - DNA, 201 bp, Homo sapiens
gatatcctacatacccactttcttccacacatgcatagcttcccccattatcaacgtcccacactggagtggtacctttgttacaaccaatgagcatacarttacacattatcatccaaaattcatggtttacaatagagtttgctgttggtgttgtacattttatgggtttatacacatgtataatgacatgtatctacc

SEQ ID NO: 425863 - DNA, 201 bp, Homo sapiens
gtctgcaccgatgtcattgatgggtccttggaatcttagaatcttggaatctaatttgacgttaagcaaaacaatgtatagcaaaactaattttactataractaatggatatgaacaagagttaagttcctatggcatatttctggtcacaaaaagatcatcagccttctagtagagacccaagacacttcttatattga

SEQ ID NO: 425864 - DNA, 201 bp, Homo sapiens
acttcaggaatagggggattgcttgaggtctagagtttgagaccagtctggacaacatagtgagaccccatttctacaaaaaatttaaaaatcaagttgartgtgatactgcatgcctgtagtgttagcttcttgggaggctgaggtgggaggatcatacgtgagtctaggagttcagggctgtagtaagctatgatcacg

SEQ ID NO: 425865 - DNA, 201 bp, Homo sapiens
aaagttagaggagactgatacagggctagatgacaccgtgtcccacttggggaggtattgtgcatcgtgagccacttgaagagttcttatctacagagagrccaggttgaagcttgatctgccactaaaggagccattacatcaataaaggcctccagtatctgaattagaacaaagctaaggacatctccctactaccat

SEQ ID NO: 425866 - DNA, 201 bp, Homo sapiens
ataaaatcctctatgctctgactgctcatctttccctccccattaacccccagcaaccactgacctttttactgtctctgtagttttgtttttttccgggrtgtaatatagttgcaatcatacagtatatagccttttcagattggcttcttccacttagtgatatgcatttaagatccccccatgtcttttcatggcttg

SEQ ID NO: 425867 - DNA, 201 bp, Homo sapiens
actctttttttaatggatataattttcacatactataaaattgaccattctaaagtgtatgagtcagtggttttaatatattcacaatgttgtgccaccarcatcactaattccagaatatcttcatcatcccagaaagaagccccatagccattagcagccacccctatttcctccttcagccagcccctggtgaacaac

SEQ ID NO: 425868 - DNA, 201 bp, Homo sapiens
atgtgatgtgctagaaattattatactacttttgctttaaaaaagatatttaacctaaaataaattagaataaaaatcgtgtgcattcttgacagccaaaagagttcaaatgatatgccataaaattaaaagttgttagtgacacttggttttaaaagaataacagactttaaaaaaaaacaaaacttagagcatttttag

SEQ ID NO: 425869 - DNA, 201 bp, Homo sapiens
ttgtgccaccaacatcactaattccagaatatcttcatcatcccagaaagaagccccatagccattagcagccacccctatttcctccttcagccagcccstggtgaacaacctactttctgtctttaaggatttgcctattctggtcatttcatataaatggaatcatacaatatatggccttttacgtgtggctttcca

SEQ ID NO: 425870 - DNA, 201 bp, Homo sapiens
cattagcagccacccctatttcctccttcagccagcccctggtgaacaacctactttctgtctttaaggatttgcctattctggtcatttcatataaatgraatcatacaatatatggccttttacgtgtggctttccaaactcgacatggtattttcacagttcatctatgttgtgacacgtatcaatactttattccct

SEQ ID NO: 425871 - DNA, 201 bp, Homo sapiens
agccacccctatttcctccttcagccagcccctggtgaacaacctactttctgtctttaaggatttgcctattctggtcatttcatataaatggaatcatwcaatatatggccttttacgtgtggctttccaaactcgacatggtattttcacagttcatctatgttgtgacacgtatcaatactttattccctttatggc

SEQ ID NO: 425872 - DNA, 201 bp, Homo sapiens
tttattccctttatggctgtatattttattatatgataaatcaggggtcataggattatcctcaggtttgatgatttgctgagaggactcacagtactcarcatatagtcatactaaaggctatgatttactacagagaaaggaaacggaaaagctgcgtggggcaaagttcatgaaaatcaaggcataagtttctaaggg

SEQ ID NO: 425873 - DNA, 201 bp, Homo sapiens
cttccacatcacagggtagttctctctgaggaatattctgagttgtcattttcagtctcatatcccaagctctgaagggcacaaggatcaactcaggccasgtgtatggatacttgacattgatggttgctggaccttagccatttatgcccatccacatggctccagccatctcggtaaaagtaatgccttccaagcaaa

SEQ ID NO: 425874 - DNA, 201 bp, Homo sapiens
cagactcttttccaaaatgactgtaccattttacattaccaccagcatgtacaaaatttccaatttctccatattctcaacatgttatctgtttttttttwaaattatacctatcctagtggctgtgaactggtattattgttttcatttgcattcccatggtagctaatcatttgcatttccatgataggtaatgatctt

SEQ ID NO: 425875 - DNA, 201 bp, Homo sapiens
tactggtgtgtaaagcaacaacagttactcatctgatttatcctggttagattcctgttatattacagtcaacatatctaattatgagtgaatgaatacayattctaggccttgaggtagatcattcatatgctttatttaatttagtctcataaaaccctaggaagtgttacagactgatgttatcaataagacccagat

SEQ ID NO: 425876 - DNA, 201 bp, Homo sapiens
catatctaagacaccaaggtcatgaagatttatgcctatgtttacttaaaacagttttgtacttttagcttttccatttaggtctttgatctattctggtkaatttttgtatatggtatgaggttagcgtctaacttcattcttttgcatttggatgttcacttgtctcagcaccatttatgggggagactgttctttccc

SEQ ID NO: 425877 - DNA, 201 bp, Homo sapiens
atttatgcctatgtttacttaaaacagttttgtacttttagcttttccatttaggtctttgatctattctggttaatttttgtatatggtatgaggttagygtctaacttcattcttttgcatttggatgttcacttgtctcagcaccatttatgggggagactgttctttccccattgtgttattgtctggacacccttg

SEQ ID NO: 425878 - DNA, 201 bp, Homo sapiens
ggacaggataccattccagcgcagggtgcactcacagcacagaacactcacttatactgggacattgtagagatgccagttcactaaatgtgcacatcttkgggatgtgggaggaaactggagtgtccagagaaaacccatgcagacatggggaaaacatgcaaactctacacagacaatggcctggccaggaatcctttt

SEQ ID NO: 425879 - DNA, 201 bp, Homo sapiens
tctcttcagaagcatgaaattccagaggatatcagtgacagagatgatgatttcatttccaatggtgaggtattttttatggagttgtatttatagccgtraaaataattatattctgatacagttagagaaaagcatacttcaaaaatatgctttactgattttttttttaataagcatggagaactgaaaacactagta

SEQ ID NO: 425880 - DNA, 201 bp, Homo sapiens
ttctggagtaatacatatctctagtttccaaggcatgtttgctttttaatcatcctttaaccaagtttactggtgctctgctcagacaggtcagaccatgytaaaacataaaaatattcatagaaaagtgtctcccaatagttggttatctgaagtcagatgggaatttataaaaccagatatagatgggtgtgtctcata

SEQ ID NO: 425881 - DNA, 201 bp, Homo sapiens
ggctggagcctgtctgcagctaaggacccaaggttggaaccaaccctggacaggataccattccagcgcagggtgcactcacagcacagaacactcacttrtactgggacattgtagagatgccagttcactaaatgtgcacatctttgggatgtgggaggaaactggagtgtccagagaaaacccatgcagacatgggga

SEQ ID NO: 425882 - DNA, 201 bp, Homo sapiens
cttagaatctttgcatatgtagtaatgagaaatcttgggacttggggatggggatgatgcctaagtctaaacacaaaatttatttatgtttcgtatacacygtcaaattcaaaataaaatatagagacaaatctctaaattaaatgttttatttgagaatcatagaattacaattcagagcctacacacagactgttgtga

SEQ ID NO: 425883 - DNA, 201 bp, Homo sapiens
tttagcagtttctttaatgacttttttctttattatttctgtttcatgtgtgaagctcctatggagagcataaatggaaaattgcctaaccttggctaccygtgttcattaaaagaacttaatatactataatttaagcagatactttaagtacaacttagaaaatcactatcatttttcagtacaggttatataggctca

SEQ ID NO: 425884 - DNA, 201 bp, Homo sapiens
aagacatcactcacagataaaaacagatgtaattccatcctcctatagtacagctgcaaccaaactgtgccctttctcacagaggctgacacacagggagwtagaaggcacctgagatactgtctcaaccacaccatattttacaaaccagctccatttaatacattatatttccatttcttattttccaagaaacaactt

SEQ ID NO: 425885 - DNA, 201 bp, Homo sapiens
tgtctcaaccacaccatattttacaaaccagctccatttaatacattatatttccatttcttattttccaagaaacaactttcattaatgtattatttttrgcatagctttatggtaatgaagtacaaaagtcatctctattttcaactgaaggaactataagagagaatttgtcctagtcaatccactaataaacttctg

SEQ ID NO: 425886 - DNA, 201 bp, Homo sapiens
gctttcaataacaggaaaaaaaccaatcaaaagggaaaaaaggagactatcatatctgcaagcaaacaagaactccttagactttgactgcctcaatgctacacagattaaagcaactttatctcataagctgtgggttaagataaacttgatagaaattctgagctctggtatttggcaaatatattcaattaaaaaaat

SEQ ID NO: 425887 - DNA, 201 bp, Homo sapiens
ctctattttcaactgaaggaactataagagagaatttgtcctagtcaatccactaataaacttctgcaaagcgcctaccaaagccataccactcaatcagrttctgcctgctcagtgacagagttcacggcaatgtaaggtcctgtattcagattgtctgattcccaaaccagggcttctactactgggttgccctgtttt

SEQ ID NO: 425888 - DNA, 201 bp, Homo sapiens
tggagtgcaatggcgcatctcggctcaccgcaacctccacctcccaggttcaagcgattctcctgcctcagcctctccagtagctgggattacaggcatgygccaccacacccggctaattttgtatttctagtagagatggggtttctccatgtcaggctggtctcgaactcccgacctcaggtaatccacctgccttgg

SEQ ID NO: 425889 - DNA, 201 bp, Homo sapiens
ctttcaataacaggaaaaaaaccaatcaaaagggaaaaaaggagactatcatatctgcaagcaaacaagaactccttagactttgactgcctcaatgctacacagattaaagcaactttatctcataagctgtgggttaagataaacttgatagaaattctgagctctggtatttggcaaatatattcaattaaaaaaata

SEQ ID NO: 425890 - DNA, 201 bp, Homo sapiens
ttttaaaagactatctaggaataaagataaactgagtcaacatcttagtataacaaaatgactacagatcatggaagaaaatcagcaaatctcctaaagarataccatttctggtatatttttacctttcagcaaatgatttatgttttatattttataatatttaacacaagttgtataacaactttccccctttaatat

SEQ ID NO: 425891 - DNA, 201 bp, Homo sapiens
agagctcaagttcaaattctcagtttatggaaaggatataatcaggtgagaagtttacttttattaaactacaagcctgacttaaattttttccctccaayaaaactgaagaaacaggcaacaagatataccgaaatgcctttcaatagagccctaaacacaggctttcaataacaggaaaaaaaccaatcaaaagggaaa

SEQ ID NO: 425892 - DNA, 201 bp, Homo sapiens
taccaaagccataccactcaatcaggttctgcctgctcagtgacagagttcacggcaatgtaaggtcctgtattcagattgtctgattcccaaaccagggyttctactactgggttgccctgttttccctaagtacttgttcccataatggaactggactgggaaagaatgatgccaattgtccatgagggtacccaggtg

SEQ ID NO: 425893 - DNA, 201 bp, Homo sapiens
ctccttccccctcccaaccttcctctttccctctgccacccatgtatgtatcctagacacactcctcctggcccacaggctccttcacctacccctctacrcttaatgcttcctccagacacgctgcctgaaaactcaggaccctacctactgggagaggggccggtgtatggaggtggtcttgggagggtagaaatggaa

SEQ ID NO: 425894 - DNA, 201 bp, Homo sapiens
cactcacagataaaaacagatgtaattccatcctcctatagtacagctgcaaccaaactgtgccctttctcacagaggctgacacacagggagttagaagrcacctgagatactgtctcaaccacaccatattttacaaaccagctccatttaatacattatatttccatttcttattttccaagaaacaactttcattaa

SEQ ID NO: 425895 - DNA, 201 bp, Homo sapiens
cacagaggctgacacacagggagttagaaggcacctgagatactgtctcaaccacaccatattttacaaaccagctccatttaatacattatatttccatytcttattttccaagaaacaactttcattaatgtattatttttagcatagctttatggtaatgaagtacaaaagtcatctctattttcaactgaaggaact

SEQ ID NO: 425896 - DNA, 201 bp, Homo sapiens
tattttccaagaaacaactttcattaatgtattatttttagcatagctttatggtaatgaagtacaaaagtcatctctattttcaactgaaggaactatargagagaatttgtcctagtcaatccactaataaacttctgcaaagcgcctaccaaagccataccactcaatcaggttctgcctgctcagtgacagagttca

SEQ ID NO: 425897 - DNA, 201 bp, Homo sapiens
agttatctgggttagcagatcaagggacaaaaggagggagaagtcagcaaacatgcaaaagttgaattagaaagttctcatctttgcttcccctcagccarttctcataaacccaaagacaggttacaacaaacagttctacagagcagagaatgtcattcttgcccagagaatcagagcttagttacagatataaaaaga

SEQ ID NO: 425898 - DNA, 201 bp, Homo sapiens
agagcagaccagctttgctatttatctatttatttagccagctgctaaagttgaaatactttctttagatttttaaataggtaatatattcatatggttcaaaaaaagtctaaaaatgtatacatagtatgaacgtgtacagtttattgtgtcacttatacatcaataaaggtgtttaaaattgccacgatattgaaactt

SEQ ID NO: 425899 - DNA, 201 bp, Homo sapiens
ttgaaagatgacaagagaatattttgcttgcaacatcaccaagctaatcttacccagaatttctataagtcaaggggaataaaaatttttacaatgaaccrcaaaggctcaagtccatagaacaaaatccagagcagaccagctttgctatttatctatttatttagccagctgctaaagttgaaatactttctttagatt

SEQ ID NO: 425900 - DNA, 201 bp, Homo sapiens
accacaaaggctcaagtccatagaacaaaatccagagcagaccagctttgctatttatctatttatttagccagctgctaaagttgaaatactttctttaratttttaaataggtaatatattcatatggttcaaaaaaagtctaaaaatgtatacatagtatgaacgtgtacagtttattgtgtcacttatacatcaata

SEQ ID NO: 425901 - DNA, 201 bp, Homo sapiens
gagcagaccagctttgctatttatctatttatttagccagctgctaaagttgaaatactttctttagatttttaaataggtaatatattcatatggttcaaaaaaagtctaaaaatgtatacatagtatgaacgtgtacagtttattgtgtcacttatacatcaataaaggtgtttaaaattgccacgatattgaaacttc

SEQ ID NO: 425902 - DNA, 201 bp, Homo sapiens
cctgaccctttgcgcttcctgagtgaggcaatgcctcgccctgcttcggctcgtgcacggtgcactgcacccagtgtcctgtgcccactgtctggcactcyctagtgagatgaacccggtacctcagatggaaatgcagaaatcacccgtcttctgcgtcactcacgctgggagctgtagaccggagctgttgctattcgg

SEQ ID NO: 425903 - DNA, 201 bp, Homo sapiens
gaacttgacctttatgtgtgcaatggctggtgggtcactggcaagaactacagtttgggaagttctgacagtgattgcaataaatggttgtcactacaggyggctatgtatttctttgtgtttagatgagaaaggtgcagtttgaacacttggagtctatgagagtgctcaccacagagggatgagactctcatgggagat

SEQ ID NO: 425904 - DNA, 201 bp, Homo sapiens
ggctggggtagaagcagccaggatacagggagcagtatcccaaggctgcacagggcagtggggccctgggcctggcccaggaaaccattcttccctcctaygcctccaggtctgtgatgggacgggctgccataaaggtctctgaaatgccttcaaggcctttcctccattgccttggatattagcacttggctcctctta

SEQ ID NO: 425905 - DNA, 201 bp, Homo sapiens
gaaactactgatgagttagtcactgcattattttctcctggaccatctgatggggtgtacacacgtcttcttactgggtctcaaagctggcttcatattaraatcacctgggaagcttttaaagcaatagagatgacagccaccctatggcaactcagcatggaggagtgtgcaggagggaggcctgggcaatggtacatt

SEQ ID NO: 425906 - DNA, 201 bp, Homo sapiens
gtctttctttcacaagctttggtttcacttttaaacatgttgacaaaggaaatttaaccagacagaaaaatgtacttaatgtcagccacaatggcaaggayttgggcagcagttatggctcacttatgtgaaccgttttgaaaaatactttgcccatggtatgtaaaagtcagtgattaaatacgtgctttaaatgcacct

SEQ ID NO: 425907 - DNA, 201 bp, Homo sapiens
tggcagagtcatttcagtcactgtgcacatgccactctcccatctacctctcctggcattctctcttccttagagttccatcaaatgccattcacagccartcattgagtggccttggttttcataaccctcatctcacaaccttctgaattttattcttcacaatgctgtctctgccatcctagctcaccatacacatct

SEQ ID NO: 425908 - DNA, 201 bp, Homo sapiens
cacagtaaggacactggattaattctgaatatgagagaacatttgtagtgtctgagcaaatgagccacaggaaatgattttctaactcaaaagctccaactggctgctgagtgaagactagagagtaagaagtgggaaggaaagaaacagctagaaggtgagtagagtagggttcgggaagaaggggggtggcctgaggca

SEQ ID NO: 425909 - DNA, 201 bp, Homo sapiens
atgtaaagtgaaaagtccaaggatggagcttcaggttaacttggacccacgtgctcaatgtcatcacgtgttggactccagctcttggctttgctttcttytcaggtagactttccctttacagtgacaatgatggccaccagcagcttcagtgattgctaaataggtagattatcaacaattgccaaataggtaagctta

SEQ ID NO: 425910 - DNA, 201 bp, Homo sapiens
tcttctggctggtctggaacctcatacgtcctctcattttggattgtgtcatagatggtgctgtagtcttcgtcattcatgcttattgatccgagagatcygtttacagggagacctgagtagatctgaaatgaatgaagggacagaggatgctgcaccaccttgcagaggaatcaacgagctcttaaaaggcagcaacta

SEQ ID NO: 425911 - DNA, 201 bp, Homo sapiens
cagactcaagagagtacttactatacgatttaatttcttttatatgaagctatagaaggcaaaacaaatctatagtttgttaaaaggcaaaacagtggttrcttgaaaaccagagtaagcagagattatttggaagggccatgagggaacttcctagggggatgggatattctacatcttcataggactttaggttacata

SEQ ID NO: 425912 - DNA, 201 bp, Homo sapiens
ctctaaacaaatttttgactatcgttaatgatatgttgctgaaatgtttggaggtgaagagtactgatgtctgtagttgacagtgcattaaaaaataagaygtgcattaaaaataatatgaatggatggatggatgactagatatgtaggtaaaacaaatatagcaaatgtttattgtagaatctgagtagcaggcatgtg

SEQ ID NO: 425913 - DNA, 201 bp, Homo sapiens
gaaggtgaaagggggcacaatgaatatttatggggcacaacaggcataaactaggactatcctgggcactttacatatagacgcctttctccctactacaytgtaaactttttgagggtagagataatgttttagtcatccctttttctacaatacaaaaagtatagtgctttgcacctcattaagtactaaatgaagtat

SEQ ID NO: 425914 - DNA, 201 bp, Homo sapiens
atgaatataacccttccattgagatgcccctgtcctcctggggctcacctggatgagcctcctggagttcagagtatatctcatcaggcaggaggtagccwctgtcttctgactggacagaggccaagctggtctcttcacccttaatggtatagactgacacaaaatcatactcatgggtattcagctgagtggcatata

SEQ ID NO: 425915 - DNA, 201 bp, Homo sapiens
tgcactgcacccagtgtcctgtgcccactgtctggcactccctagtgagatgaacccggtacctcagatggaaatgcagaaatcacccgtcttctgcgtcrctcacgctgggagctgtagaccggagctgttgctattcggccatcttggctgcccttcgtgaatgtcttaagtgatagataagtggacaattagagtgga

SEQ ID NO: 425916 - DNA, 201 bp, Homo sapiens
tcttggctcctaccattcataacattcaaactaaacagaaaataagtagtggcgtatctctaaattccagataatccacaccaaaatcagaattattcccttttgtgtgtgtgtgtgtgtgtatacatatctgtatttatacacgtgaaattatatttgcaatcaatttccctgctagtatttgttgcacctttggtgact

SEQ ID NO: 425917 - DNA, 201 bp, Homo sapiens
ggctcctaccattcataacattcaaactaaacagaaaataagtagtggcgtatctctaaattccagataatccacaccaaaatcagaattattcccttttgtgtgtgtgtgtgtgtgtatacatatctgtatttatacacgtgaaattatatttgcaatcaatttccctgctagtatttgttgcacctttggtgactttac

SEQ ID NO: 425918 - DNA, 201 bp, Homo sapiens
tataagaaatacataaatatagtcataatgtaagaaattaaggcaatatgaaagaattataggggccaagggaaaacttccactttgtcctctgaagtttygctgaaaaatcaactcacaaaaggcaggattaattggagaaaaggcatacaaatttattcgtgtgcacacagagggaaccacagagcgattaccactaac

SEQ ID NO: 425919 - DNA, 201 bp, Homo sapiens
ttagcacttggctcctcttatgcaaatttctgcagcctgcttgaattcttcccctgaaaatgggtttttcctttttactatatagctaggctataaatttyccaacttttatgctctgcttcccttttaaaaataagttccaatttcaggtcatttctttgctcatgtatatgaacataagttgttagaagcagccaggtc

SEQ ID NO: 425920 - DNA, 201 bp, Homo sapiens
gagaacttacttttggcttggtgacatggaacttcagcaggagtgactgcattttggtttggtctgttgaacctagtgcaggggctcaatctaaaccaacracctcatatgaagtttatttaataatgtaaaatgcaggtttaaatttgataatttccaaagtcctttttgactttttctttaatcattcataagctaaat

SEQ ID NO: 425921 - DNA, 201 bp, Homo sapiens
ttatttctgatgccttcatttggggatattattttctgagcttcagtgtaatgtttcctgcttctgtatttgccagctgactccagccatcttcaaattayagatatagaagaaagggttaataaaatacgcatcacagagctcatagggtagttgaatttctggattgtttttttaaagcatgattcaagcatacaaagg

SEQ ID NO: 425922 - DNA, 201 bp, Homo sapiens
ggcctcctctccttgccctcccataatgcattttgccaccagaatctgttttgccatgatccaagctgccattctttctgcaacctcaggatggcatacattcttaactccattggagggtggggtagtcactctgtggttttccttcatgtgcacattaacaaatttgtatgccttttctccaattcatctgagttgatt

SEQ ID NO: 425923 - DNA, 201 bp, Homo sapiens
agctccactcttctggaagctgcagctaagggaacccaggacctgacaagccagcagaagggtaagagattcttacccatcaggctcccagcctctgtttrtctctctctggtggagcaaatggtaaaaagcactgtttctttttcacctgcaaggttttgattaataggagaaaaggacttgtgtgactagtcttggtgt

SEQ ID NO: 425924 - DNA, 201 bp, Homo sapiens
taatattcataagagatagtaaaacattttttgtttacattttatataaactgcaaaaaaaaagggaagagagagattttgtttgcctctttatcgggtctttgtgtgtgtgtgtgtgtgtgtgtgtgtgtgagagagagagagagagatggagtttcattcttgttgcccaggctggagtgcaatggtgcggtcttggct

SEQ ID NO: 425925 - DNA, 201 bp, Homo sapiens
ttgtttacattttatataaactgcaaaaaaaaagggaagagagagattttgtttgcctctttatcgggtctttgtgtgtgtgtgtgtgtgtgtgtgtgtgwgagagagagagagagagatggagtttcattcttgttgcccaggctggagtgcaatggtgcggtcttggctcactgcaacctccacctcctgggttcaagc

SEQ ID NO: 425926 - DNA, 201 bp, Homo sapiens
gtttacattttatataaactgcaaaaaaaaagggaagagagagattttgtttgcctctttatcgggtctttgtgtgtgtgtgtgtgtgtgtgtgtgtgtgwgagagagagagagagatggagtttcattcttgttgcccaggctggagtgcaatggtgcggtcttggctcactgcaacctccacctcctgggttcaagcga

SEQ ID NO: 425927 - DNA, 201 bp, Homo sapiens
actcagtgagggctttacctatgtgagaaagataaactttatccttttgcatttacaaaggtacagtttgaatccaaatgccttttaaactagtgagtttyaatggtctcatgactaaaattttaaagtcaaagctataaagtctttttttatgtttgtatttttatatatacgtgggtacacatctatgtttatatattg

SEQ ID NO: 425928 - DNA, 201 bp, Homo sapiens
gacagtgcattaaaaaataagacgtgcattaaaaataatatgaatggatggatggatgactagatatgtaggtaaaacaaatatagcaaatgtttattgtrgaatctgagtagcaggcatgtgggtgttcttcaacttttctgtatgctggaaatttttcataatacaatgtctaaaagaaaaaaacaacaacaatgagga

SEQ ID NO: 425929 - DNA, 201 bp, Homo sapiens
tctaaaaccccttgtggcctttggaataccaaattctgtgctaaagggtggaaggctaccctcacccaccataatctaagcccagggcataaaatccctcrtggcttggatagaatccagggcttgtggctctggaacgggtctagacttgctggctccttgctccttgctctcccaggatcgactgtatcttgagttaaa

SEQ ID NO: 425930 - DNA, 201 bp, Homo sapiens
tgaacccttaattctttccttgttacaagtctccaaactaatgttttcacatttttcttctatttctctcacttggaatcactagaaatcaaacctgtccttttttttttttttggaaacagacaacttgaattaaactctagaagaaatcaccacagcaacttataaacagccttcatgcctgatgatgtatggactact

SEQ ID NO: 425931 - DNA, 201 bp, Homo sapiens
atcctgaaagtccaagagagacttattaggctaatttagtatgttaaagtgatatggcaagcattgtcaaataagaaatggtgtttaacttgtataaataygttattaatgtgccccaaggttatatagattccctaaattcttacatgtcttaggatatgtcatcagtaataattatgattattacattaaattgttgta

SEQ ID NO: 425932 - DNA, 201 bp, Homo sapiens
taaatatgttattaatgtgccccaaggttatatagattccctaaattcttacatgtcttaggatatgtcatcagtaataattatgattattacattaaatygttgtatgccactggaataaccaacttttcttattaattgtgtctttatagatatttctaagtattttgtcacccatagacaattattcttttacttttt

SEQ ID NO: 425933 - DNA, 201 bp, Homo sapiens
tgtgtctttaaacccagaaaaagtaggaatctagttctgtagtaaaatagttttttaaattgcaaaatgtatactcttgcccacctatttaattaagggtrgatgtgtggatacattggcctttgagctggcattccctgtgtctatctctctggggaaaaggaatgaaaaattattaaaatgcacacttccttgttaaca

SEQ ID NO: 425934 - DNA, 201 bp, Homo sapiens
aagaataaaagaatttacccaattcatgtggatattacaagcacagtctgttggcaaactcttggcttgattttctagcctcaagccttttaaaagtctartcttagattcttcatgattttctccagcaaagccaacttaaaaacctacatagtcaatcactgtgtttgctgcattttatgcaaataatgaagccaaata

SEQ ID NO: 425935 - DNA, 201 bp, Homo sapiens
atattttcagatatctttatcccaacccctggtaccatttttctgtattagtctgtactaagctgcttccatattttcagatatctttatcccaacccctgtaccatttttctgtattagtctgttcttgtactgctataaacaaatacctgacattgggtaatttataaaggaaagaggtttaattgactcactgctcta

SEQ ID NO: 425936 - DNA, 201 bp, Homo sapiens
agctatactgtaaggttcagaccaaggggaccaacgtcagaatttgttatctaaggtccagtactgcagtttactaatccaggtactggatttacagctaytaaatacttaacacttgaggatatcacatgtgattaatattcttaatttatttgtactttttatttgagctggagatacagtagtgaacaagaaagaaaa

SEQ ID NO: 425937 - DNA, 201 bp, Homo sapiens
agaatttgttatctaaggtccagtactgcagtttactaatccaggtactggatttacagctattaaatacttaacacttgaggatatcacatgtgattaayattcttaatttatttgtactttttatttgagctggagatacagtagtgaacaagaaagaaaataccttctggagcctgcattttaacaagcgggacaatt

SEQ ID NO: 425938 - DNA, 201 bp, Homo sapiens
tagtaaagtgtgtttcatcagaaatgttactgggaactggggaagagagaaatgagtatgaactatggtttctgtaggtttataatcatttttattggcargaaagagcagcatttacaaatatatttatataataaatgtgaaaacatttctaaaaatcacataaatatgaatattgtgggggagatgttggggaaaaag

SEQ ID NO: 425939 - DNA, 201 bp, Homo sapiens
ctgccatcttgattaataaagatgatttgtttaggtctgaaacactttacattttgataatatttataaccataactttattactttatcatctaatacaragatcaccaaggttctgtttagatatcgtaagcattaaacattaacactggtagtgtcttactactactgaaatcatttgacttcatcaaatttttagtt

SEQ ID NO: 425940 - DNA, 201 bp, Homo sapiens
ttaagttgtgaagtatgatgcagagttgagaattcttaatgatggagagtaatcctgattggatggagtgtgtggattgtgggaaaagtagagaagaggayagtactgggctagactgtggatggccttgaatgctaagatcagaaatctgaattttatgctcataggatgatactgaaaatgagcagccacataacacag

SEQ ID NO: 425941 - DNA, 201 bp, Homo sapiens
ctttcctgtgctgttctcatgatagtgaataagtctcatgagatctgatggttttataaagagaagtttccctgcacaagttctctcttgtctgccactaygtaagatataaactttcaccttccaccatgattgtgaggcctccccagccacgtggaattgtgggtcaataaaacctctttttctttataaattaaccag

SEQ ID NO: 425942 - DNA, 201 bp, Homo sapiens
ctgaagcagggcgaggcatcgcctcatcagggaagtacaaggggtcagggaattccctttcatagccaagcaaggctgtgacagactgcaccttgaaaatygggtcactcccaccctaatactgcacttttctaatggtcttagcaaacggcacaagaggagattatatcctgcacctggcttggagggtcccacgcccac

SEQ ID NO: 425943 - DNA, 201 bp, Homo sapiens
agctttgaagagagtagtggttctcccagcatgcagtttgagatctgagaatggacagactgcctcctcaagtggttccctgatgcctgagtaggctatcwgggaggcacccaccagtaggggcagactgacacctcacacggccgggtactcctctgagatgaaaccgccagaggaacgatcagacagcaacatttgctg

SEQ ID NO: 425944 - DNA, 201 bp, Homo sapiens
ctctgtggtttgccccccacgtgcatgttaataaatttgtatgccttttctccaattaatctgacttttgtgggttattagcaattgtatacacttattartaaacacagtttctcttgcagagatttaatgaatatggggatgagaaattcaaagctttgtgtggagggtggtttaggcagtggggatgcagcaaaggtt

SEQ ID NO: 425945 - DNA, 201 bp, Homo sapiens
cagtaggggcagactgacacctcacacggccgggtactcctctgagatgaaaccgccagaggaacgatcagacagcaacatttgctgttcagcaatattcrctgttctgcagcctccactgctgatacccaggcaaacagggtctggagtggacctccagcaaactccaacatacctgcagctgagggtcctgactgttaa

SEQ ID NO: 425946 - DNA, 201 bp, Homo sapiens
atgcctgtaattctagaactttgggagaccaagatgggcagatcacctgaggtcaggagtttgagaacagcctggccaacatggtgaaaccccatctctasttaaaatataaaaattagccgagtgtggtggcaggcacctgtagtcccagctactcaggaggctaggcaggagaatcacttgaacccaggaggtggaggt

SEQ ID NO: 425947 - DNA, 201 bp, Homo sapiens
cagtgattgaagatcaaattaatgaaatgaagcaagaagagaagtttagagaaaaaagaataaaaagaaatgaacaaagcctccaagaaatatgggactaygtgaaaagaccaaatctatgtctaattggttacctgaaagtgacggggagaatggaaccaagttggaaaacactctgcaggatattatccaggagaactt

SEQ ID NO: 425948 - DNA, 201 bp, Homo sapiens
atgaagcaagaagagaagtttagagaaaaaagaataaaaagaaatgaacaaagcctccaagaaatatgggactatgtgaaaagaccaaatctatgtctaaytggttacctgaaagtgacggggagaatggaaccaagttggaaaacactctgcaggatattatccaggagaacttccccaatctagcaaggcaggccaaca

SEQ ID NO: 425949 - DNA, 201 bp, Homo sapiens
gagcgagaatctgtctcaaaaaacaaaaagaataagtagtaggccaggccaggttgttaaggatgatgtatatgagattgtgagttggagggaactgaggwctgggaaatacgcaactactcaggggtcagatcctgtgaggcaccatcagccacagtaaggacactggattaattctgaatatgagagaacatttgtagt

SEQ ID NO: 425950 - DNA, 201 bp, Homo sapiens
ttagagaaaaaagaataaaaagaaatgaacaaagcctccaagaaatatgggactatgtgaaaagaccaaatctatgtctaattggttacctgaaagtgacrgggagaatggaaccaagttggaaaacactctgcaggatattatccaggagaacttccccaatctagcaaggcaggccaacattcaaattcaggaaataca

SEQ ID NO: 425951 - DNA, 201 bp, Homo sapiens
tcattgtcaaattcaccaaagttgaaatgaaggaaaaaatgttaagggcagccagagagaaaggtcgggttactcacaaagggaagcccatcagactaacwgctaatctctcggcagaaactctacaagccagaagagagtgggggccaatattcaacattcttaaagaaaagaattttcaacccagaatttcatatccag

SEQ ID NO: 425952 - DNA, 201 bp, Homo sapiens
  misc_feature (1)...(201): n = A,T,C or G
ttactgtgctgaatggtgaagcttgaaggagaaggcagatcttccttcatcacactcccattctcctggagttctgctgcgcagagttgctggtcctgggntgatgaatataacccttccattgagatgcccctgtcctcctggggctcacctggatgagcctcctggagttcagagtatatctcatcaggcaggaggtag

SEQ ID NO: 425953 - DNA, 201 bp, Homo sapiens
aaatgtaaatggaataaatgctccaattaaaagacacagactggcaaattggataaagagtcaagaaccatcagtgtgctctattcaggaaacccatctcwtgtgcagagacacacataggctcaaaataaaggatggaggaagatctaccaagcaaatgaaaaacaaaaaaaggcaggggttgcaatcctagtctctgat

SEQ ID NO: 425954 - DNA, 201 bp, Homo sapiens
gaaatgattttctaactcaaaagctccaactggctgctgagtgaagactagagagtaagaagtgggaaggaaagaaacagctagaaggtgagtagagtagsgttcgggaagaaggggggtggcctgaggcattgctggaggaggtaagaaacaagttgtggggcagctttgcaaacaggtgatgtcaggaatcaggctgtg

SEQ ID NO: 425955 - DNA, 201 bp, Homo sapiens
atttgataatttccaaagtcctttttgactttttctttaatcattcataagctaaatacccctagaaataaccattccatacattacaccattcctggggsaaaaaatattttaggctcattccaggtacattctagaatattgagaaaaaaaaaagaagtgtgtgtgttgggggtgggggtggtatgaggagtgagataa

SEQ ID NO: 425956 - DNA, 201 bp, Homo sapiens
tagcagaaggcaagaaataactaagatcagagcagaactgaaggagatagagacacaaaaaacccttcaaaaaatcaatgaatccgggatctggttttttraaaagatcaacaaaattgatagaccactagcaagactaataaagaagaaaagagagaagaatcaaatagatgcaataaaaaatgataaaggggataccac

SEQ ID NO: 425957 - DNA, 201 bp, Homo sapiens
tgttggtcaagccactaagtttgtggtagagcagtcataggaaactacttacaccatgctaatctgcaagaattaatcaaacaccagctcatcctgaatcmatttcctgacttcttgcagctgaatttaacctctgcctgatttaacctcttctccttttgggactcttttatagcaattacctcacttgatagtatagtg

SEQ ID NO: 425958 - DNA, 201 bp, Homo sapiens
ttgtgtgtccctgcccccttaaagttcatatattgaagtcctcacccctagtacctcagaatatgactgcatttggagacagggcctttaaagaggtaatyaatttaaaatgaggccacagaggttggccccaatctgaccaacgtccttatcaaaagagatgaggacataaacatgcacagtggggtaaaccacatgaag

SEQ ID NO: 425959 - DNA, 201 bp, Homo sapiens
acaaggatatctaagcactgacgatgagttatgtggagagaaaaggagaagacaggggatttgagtagtagcttagcaactccattgaatccctggagacyggaccatagtaggtgaccctggagagattctggacctctggttgagagcttaggaggatagttggaaaccatgatgctaagagtaatttgaggaattggg

SEQ ID NO: 425960 - DNA, 201 bp, Homo sapiens
attctggacctctggttgagagcttaggaggatagttggaaaccatgatgctaagagtaatttgaggaattgggcctagaggttatttatgggcagtcagyaatgacaccactatcatccaaacaggaacagtgagaagccagtactctactagctcctagaaaagaggtcagaaatccacctccattttcactgaggcca

SEQ ID NO: 425961 - DNA, 201 bp, Homo sapiens
acttaacacttgaggatatcacatgtgattaatattcttaatttatttgtactttttatttgagctggagatacagtagtgaacaagaaagaaaatacctyctggagcctgcattttaacaagcgggacaattaaattcaatagtgatttagcaagtacttctataccaagttctgtttggcactacagataaaaagaaaa

SEQ ID NO: 425962 - DNA, 201 bp, Homo sapiens
agagtgagtattcaaaccaggttctagggtctgcaggttctagggattcagctacagacccactaccatcccctccagctctgaaagcccatggatctaakatgcccatattcaccaatgcacaggccaacctgagacttaaaactggaattaatttatcaaggcacaaactaataatcaacggaatacatctattgccaa

SEQ ID NO: 425963 - DNA, 201 bp, Homo sapiens
atctcggctcactgcaacctctgcctcccaggttcaagtgattgaggttcctacctcagcctcctgaatagctgggcctacaggagcgtgccaccatgccmagctaatttttgtatttttagtagagacagggtttcaccatgttggccaggatggtctcaatctcttgaccttgtgatccacctgcctcagcctcccaaa

SEQ ID NO: 425964 - DNA, 201 bp, Homo sapiens
ttccctggtcattcagagcaaaataaaacaccagccataatatctgcatgaacagggtatgcctgtcagaggcagaccttaccttcacaaagaggtaaatytcagggttcatgtgagctccctccttttcttccaaaccttcagcatcagaatagcaggaatacttggtggtagagaaggccttactgtgctgaatggtga

SEQ ID NO: 425965 - DNA, 201 bp, Homo sapiens
tgaaggaaataaaaatatttcaccccaaagtatacttctttgacatacttcgaggtggggtggctgttcagagaccctgcaaacagaagtaaccctgcaargctgcctttcataggggacatttacatctgtagacaatctgcactgatgcagctaggttttgtctgaggcctttccttgtctaagaaagattaatgagag

SEQ ID NO: 425966 - DNA, 201 bp, Homo sapiens
tagatctgaaatgaatgaagggacagaggatgctgcaccaccttgcagaggaatcaacgagctcttaaaaggcagcaactagcaactgctatcaatgacakgtctctaacaattatttactggagagttttataagcaaaccacaagtccattggacagaagataaagcttacacactcagttaactccttcactcctaaa

SEQ ID NO: 425967 - DNA, 201 bp, Homo sapiens
agccaaatcatgagtgaactcccattcacaattgcttcaaagagaataaaatacctagaattccagcttacaagggatgtgaaggacctcttcaaggcgarctacaaaccactgctcaatgaaataaaagaggatacaaacaaatggaagaacattccatgctcatggataggaagaatcaatattatgaaaatggccata

SEQ ID NO: 425968 - DNA, 201 bp, Homo sapiens
ctatttccacaagcctgcctacatttgaagctccagtgccaactgtgcatctcactggccacagcctgcccagctcacccaggctgcagggatgtctctcytcttcttacagctcttgctgtctgtagcacctattttctgtttctcttgcttagcatttatgctgctgctttgttgaccaaatattatttgttatcttat

SEQ ID NO: 425969 - DNA, 201 bp, Homo sapiens
ccttgccgacccagctccagacaattgagccttgtttctatacctggaacactcctggatattcccatattagaccttttacattggctattctctctaasagaacacacattccctggatatttgcatagtcaattcccccaactcctataaatttttgctttaatgtccccttctcaatgagactacactgactgtcct

SEQ ID NO: 425970 - DNA, 201 bp, Homo sapiens
cttatcttggtgcctttgtcaatgctattgcctcagccagacattaatagtcacccaaagatgtctacatcctaatccccagattgtacaagttaccttaygtgataaaggggacctaccaggcataattaagtaagggtcttgagaaggggagatattatcttgcatcatctaggtaggcccaatgtgtaatcacgatgt

SEQ ID NO: 425971 - DNA, 201 bp, Homo sapiens; identical to SEQ ID NO: 186155

SEQ ID NO: 425972 - DNA, 201 bp, Homo sapiens
atcttaatccctgttccattactaaaaacccttaccctactttcccccccttttccataatatttatcaccctctaataagatatatacataacttatttwttatgtctagaggttttattttctgtcttatcctactagaatgtaaaccctatatggcggcgaatctctgtctactttttcatcattatctcaagtacct

SEQ ID NO: 425973 - DNA, 201 bp, Homo sapiens
agtgaactttgtggccggcttcccagcacccattccaactcatttccattgagaaaaaaagtaaagtttgggtgagacctcagtttaagatgtggactgcrttggtctacaggtaaccatatcctttgctggcttagatttggatatgtgacacaattctgtccaaagtgattaaaggagacagttgctgaagacttctaa

SEQ ID NO: 425974 - DNA, 201 bp, Homo sapiens
gaacaatgagaacacttggacccaggaaggggaacatcacacaccagggcctgttgtggggtgggaggagaggggagggatagcattaggagatatacatratgtaaatgacgagttaatgggtgtagcacaccaacatggcacatgtatacatatgtaacaaacttgcacgttgtgcacatgtaccttagaacttaaagt

SEQ ID NO: 425975 - DNA, 201 bp, Homo sapiens; identical to SEQ ID NO: 186161

SEQ ID NO: 425976 - DNA, 201 bp, Homo sapiens
tccctctacacactgctttgaatgtgtcccagagattctggtatgttgtgtctttgttcttgttggtttcaaagaacatctttatttctgccttcatttcrttatgtacccagtagtcattcaggagcaggttgttcagtttccatgtagttgagcagttttgagtgagtttcttaatcctgagttctattttgattgcac

SEQ ID NO: 425977 - DNA, 201 bp, Homo sapiens
tttgttggtttaaagtctgttttatcagagactaggattgcaacccctgcctttttttgttttccatttgcttggtagatcttcctccatccttttatttkgagcctatgtatgtctctgcatgtgagatgggtttcctgaatacagcaccctgatgggtcttgactctttatccaatttgccagtctgtgtcttttaatt

SEQ ID NO: 425978 - DNA, 201 bp, Homo sapiens
ctttttttgttttccatttgcttggtagatcttcctccatccttttattttgagcctatgtatgtctctgcatgtgagatgggtttcctgaatacagcacmctgatgggtcttgactctttatccaatttgccagtctgtgtcttttaattggagcatttagtccatttacatttaaagttaatattgttatgtgtgaatt

SEQ ID NO: 425979 - DNA, 201 bp, Homo sapiens
ttgcttggtagatcttcctccatccttttattttgagcctatgtatgtctctgcatgtgagatgggtttcctgaatacagcaccctgatgggtcttgactytttatccaatttgccagtctgtgtcttttaattggagcatttagtccatttacatttaaagttaatattgttatgtgtgaatttgatcctgtcattatga

SEQ ID NO: 425980 - DNA, 201 bp, Homo sapiens
cagagtgagtattcaaaccaggttctagggtctgcaggttctagggattcagctacagacccactaccatcccctccagctctgaaagcccatggatctamgatgcccatattcaccaatgcacaggccaacctgagacttaaaactggaattaatttatcaaggcacaaactaataatcaacggaatacatctattgcca

SEQ ID NO: 425981 - DNA, 201 bp, Homo sapiens
aatagaagtcctcagacaccacataagatttactagatccaaatcttcaaaggaggggcttgggacatttttaacaaaagccacaagtgattctgtaattcagcaggtttgggaaacagtaaactaatacatgcaaatgtgttggttaactaatatattactctatctggactcaacccaattaaaatgtatagctctttt

SEQ ID NO: 425982 - DNA, 201 bp, Homo sapiens
tgctattcggccatcttggctgcccttcgtgaatgtcttaagtgatagataagtggacaattagagtggaagagggaagttaagttgtgaagtatgatgcrgagttgagaattcttaatgatggagagtaatcctgattggatggagtgtgtggattgtgggaaaagtagagaagaggacagtactgggctagactgtgga

SEQ ID NO: 425983 - DNA, 201 bp, Homo sapiens
gtaaaattcatctatgttgttttattacttagaggagatgaggaaggaaaacacaaaaggggacattaaatattgcaaaactgagacagatggaatcttcytcactgaaaccatcttgtttgataggtttatttaaataaacttaataaagaaattgagcacccaaacaccaccattacaccaaaacaatatgataggatg

SEQ ID NO: 425984 - DNA, 201 bp, Homo sapiens
gtttgataggtttatttaaataaacttaataaagaaattgagcacccaaacaccaccattacaccaaaacaatatgataggatgaactaaataccctcaarctttgaggcagggcttcccctgcttcatcctctccctgcccctactgctctgccctggcactgtcatcttacttaggttgggacccaaccccagcacctg

SEQ ID NO: 425985 - DNA, 201 bp, Homo sapiens
tgtgtgtgtgtgtgtgtgacactgtataatatatacttctcaatatagtatatattataaaaattgttactctgaaccatccaggaaagataaagaaagtrcttaaggctttggaaataccacttgactcctataatttcactggtatggggacacatgccccaaattatctgtcccttcatacttcagttttatagtact

SEQ ID NO: 425986 - DNA, 201 bp, Homo sapiens
ccaccttcaaaagacattaacagacagtatttttcgtgatttgcacaggaatgcagtaagccaggctgctttctgctgtttgtaataagattagggtgcaygtcccccaacagctgacactaaacttctagcactaaaatttgcttccattacttaaaaacgacaacaaaaaacgaaatatatgctctataaaaaagtagg

SEQ ID NO: 425987 - DNA, 201 bp, Homo sapiens
gtacttagtttttgtgtattgataaataatatttctatacatttatagggcagatgtgatattttgttacatgcattgaacgtgtaacaatccagtcaggrtatttagggtatccattacctcgagtatttatcatttctatgtgatgggaacatttcaagtcctgtcttctagctattttgaaatataaaatacatttaa

SEQ ID NO: 425988 - DNA, 201 bp, Homo sapiens
actgctgcagcctggatttcattgtccatatcacatattactatcagcattttagtcacagcaatttaacaatactctaggaagtcccaaactttcccccrtcttcctatcttcttctgagccttctacattcttccaactcagttccaaagctgcttccatattttcagatatctttatcccaacccctggtaccatttt

SEQ ID NO: 425989 - DNA, 201 bp, Homo sapiens
gccttctacattcttccaactcagttccaaagctgcttccatattttcagatatctttatcccaacccctggtaccatttttctgtattagtctgtactawgctgcttccatattttcagatatctttatcccaacccctgtaccatttttctgtattagtctgttcttgtactgctataaacaaatacctgacattgggt

SEQ ID NO: 425990 - DNA, 201 bp, Homo sapiens
tgtcttttaattggagcatttagtccatttacatttaaagttaatattgttatgtgtgaatttgatcctgtcattatgatgttagctggttattttgctcrttagttgatgcaatttcttcctagcatcagtggtctacattttggcatgattttgcagtggctggtagcagttgttcctttccatgtttagtgcttcctt

SEQ ID NO: 425991 - DNA, 201 bp, Homo sapiens; identical to SEQ ID NO: 186178

SEQ ID NO: 425992 - DNA, 201 bp, Homo sapiens
gagcatttagtccatttacatttaaagttaatattgttatgtgtgaatttgatcctgtcattatgatgttagctggttattttgctcgttagttgatgcartttcttcctagcatcagtggtctacattttggcatgattttgcagtggctggtagcagttgttcctttccatgtttagtgcttccttcaggagctctttt

SEQ ID NO: 425993 - DNA, 201 bp, Homo sapiens
aaatcgttgagttgctaactcaaccagtcctgaagtctgccttacctctggacttcttgttccacaagacgataaatatccttactataacaggattttgrttgtggttgaaatggtaaatatatagaggataacaaaagtttagggccaaaggtccttatgtgtcattttgtccctctgttcctgaccactttatcttac

SEQ ID NO: 425994 - DNA, 201 bp, Homo sapiens
ctctgtctactttttcatcattatctcaagtacctagaacagtgtctggtacatattatatatatgttgaatgaatacgtatttgttgaatgaatttttawgattgctgacatatttatccttcattgggtacttacgtttcacgagaacaaggcccatgcctattttttcacgttgctatatagctaaagtctagcagat

SEQ ID NO: 425995 - DNA, 201 bp, Homo sapiens
tcctatagctcggagtagtttgatcgtctgaagccttcttctctcaactcgtcaaagtcattctccgtccagcttttttccattgctgctgaggaactgcrttcctttggaggaggagaggcgctctgctttttagagtttccagtttttctgctccgttttttccccatctttgtggttttatctacttttggtctttga

SEQ ID NO: 425996 - DNA, 201 bp, Homo sapiens
ctactttttcatcattatctcaagtacctagaacagtgtctggtacatattatatatatgttgaatgaatacgtatttgttgaatgaatttttaagattgytgacatatttatccttcattgggtacttacgtttcacgagaacaaggcccatgcctattttttcacgttgctatatagctaaagtctagcagatatctga

SEQ ID NO: 425997 - DNA, 201 bp, Homo sapiens
atcgtctgaagccttcttctctcaactcgtcaaagtcattctccgtccagcttttttccattgctgctgaggaactgcgttcctttggaggaggagaggckctctgctttttagagtttccagtttttctgctccgttttttccccatctttgtggttttatctacttttggtctttgatgatggtgacgtacagatgggt

SEQ ID NO: 425998 - DNA, 201 bp, Homo sapiens
aacagtgtctggtacatattatatatatgttgaatgaatacgtatttgttgaatgaatttttaagattgctgacatatttatccttcattgggtacttacrtttcacgagaacaaggcccatgcctattttttcacgttgctatatagctaaagtctagcagatatctgatatgtaatagctgcctattaaatatttgttg

SEQ ID NO: 425999 - DNA, 201 bp, Homo sapiens
cagtctttttgtttgtctgtgccctgcccccagaggtggagcctacagaggcaggcaggactccttgagctgtggtgggctccacccagttcaagtttccmggctgctttgtttacctaagcaagcctgggcaatggcgggtgcccctcccccagcctcgctgctgccttccagtttgatctcagactgctgtgctagcaa

SEQ ID NO: 426000 - DNA, 201 bp, Homo sapiens
gtagagcctcaacttttgcactctgtgcacccacagacttaacaccacgtggatgccaccagtcttatggcttacaccctctgaagcagcagcctgagcartacccaggcccctttaagccacggctggggtagaagcagccaggatacagggagcagtatcccaaggctgcacagggcagtggggccctgggcctggccc

SEQ ID NO: 426001 - DNA, 201 bp, Homo sapiens
tgaatacgtatttgttgaatgaatttttaagattgctgacatatttatccttcattgggtacttacgtttcacgagaacaaggcccatgcctattttttcrcgttgctatatagctaaagtctagcagatatctgatatgtaatagctgcctattaaatatttgttggataaataaattaaaggaagaagatgtatctagc

SEQ ID NO: 426002 - DNA, 201 bp, Homo sapiens
gctgccttccagtttgatctcagactgctgtgctagcaatcagtgagactccgtgggcgtaggaccctccgagccatgtgtgggatataacctcctggtgygccgttttttaagcccgttggaaaagcgcagtattagggtgggagtgacccgattttccaggtgccatctgttacccctttctttgactaggaaagggaa

SEQ ID NO: 426003 - DNA, 201 bp, Homo sapiens
tatatagctaaagtctagcagatatctgatatgtaatagctgcctattaaatatttgttggataaataaattaaaggaagaagatgtatctagcattcatrtccttttactcctggctcagttttctgagccattaattttttgaagggttttttctgtctctatttccttcagttctgctctgattttagttatttcttg

SEQ ID NO: 426004 - DNA, 201 bp, Homo sapiens
ctgtgctagcaatcagtgagactccgtgggcgtaggaccctccgagccatgtgtgggatataacctcctggtgcgccgttttttaagcccgttggaaaagygcagtattagggtgggagtgacccgattttccaggtgccatctgttacccctttctttgactaggaaagggaactccctgaccctttgcgcttcctgagt

SEQ ID NO: 426005 - DNA, 201 bp, Homo sapiens
ttttacttattttttacagttcatttaacaacccacatttaatttttaaaaaatgtttagattgacaagtaaaaattgtatatacttatgatgcacaacaygatgccttaatatgtgtatacattgtggaatagtcaaatcaagccacttaacatacgtattaactcacatacttattttttgcctgtgcaatgagaacac

SEQ ID NO: 426006 - DNA, 201 bp, Homo sapiens
gttggaaaagcgcagtattagggtgggagtgacccgattttccaggtgccatctgttacccctttctttgactaggaaagggaactccctgaccctttgcrcttcctgagtgaggcaatgcctcgccctgcttcggctcgtgcacggtgcactgcacccagtgtcctgtgcccactgtctggcactccctagtgagatgaa

SEQ ID NO: 426007 - DNA, 201 bp, Homo sapiens
ccagcagggcagtcattaaatcttaaagctccaaaataatcttctttgacttcatttctcacatccagggaacactggtgaaaggggtgggcccccaaagmcttaggaagctcctcctttgtgactttgcagggttcagctcccacagctgctctgatgggctgtcactgagtgcctgtggcttttccaggtacatggtgc

SEQ ID NO: 426008 - DNA, 201 bp, Homo sapiens
tccaggtgccatctgttacccctttctttgactaggaaagggaactccctgaccctttgcgcttcctgagtgaggcaatgcctcgccctgcttcggctcgygcacggtgcactgcacccagtgtcctgtgcccactgtctggcactccctagtgagatgaacccggtacctcagatggaaatgcagaaatcacccgtcttc

SEQ ID NO: 426009 - DNA, 201 bp, Homo sapiens
aatgacaggatcacattcacacataacaatattaaccttaaatgtaaatgggctaaattctccaattaaaagacacagactggcaaattggataaagagtyaagacccatcagtgtgctgtattcaggagacccatctcatgtgcagagacacacataggctccaaataaagggatggaggaagatctaccaagcaaatgg

SEQ ID NO: 426010 - DNA, 201 bp, Homo sapiens
gataaagagtcaagacccatcagtgtgctgtattcaggagacccatctcatgtgcagagacacacataggctccaaataaagggatggaggaagatctacyaagcaaatggaaaacaaaaaaaagcaggggttgcaatcctagtctctgatgaaacagactttaaaccaacaaagatcaaaagagacaaagaaggccatta

SEQ ID NO: 426011 - DNA, 201 bp, Homo sapiens
ctaacatcacaattaaaagaactagggaagcaagagccaacattttcaaaagctagcagaaggcaggaaataactaagattggagcagaactgaaggagayagagacacaaaaaacccttcaaaaaatcaatgaatccaggaactggttttttgaaaagataaacaaaattgatagaccactagcaagactaataaagaag

SEQ ID NO: 426012 - DNA, 201 bp, Homo sapiens
ttggagcagaactgaaggagatagagacacaaaaaacccttcaaaaaatcaatgaatccaggaactggttttttgaaaagataaacaaaattgatagaccrctagcaagactaataaagaagaaaagagagaagaatccaatagatgcaataaaaaatgataaaggggatatcaccaccaatcccacagaaatacaaacta

SEQ ID NO: 426013 - DNA, 201 bp, Homo sapiens
aatgcaagggacccaaaacagacaaaatgattttggggaaaaaaaaaaaaaaatggaggacttgcacatcccaaatctaaacttactaccaagctacagcmatcaagacagtgcggtgctggtataacgacagacatatagggcaatggagtaagactgagaatccagaaagtcttatatttatggtcaactgttctttga

SEQ ID NO: 426014 - DNA, 201 bp, Homo sapiens
caatatacaaaagtccattaatacaacatattaataaaggacaaaacaacatgaaaatcttgatacagaagaagcatttaacaaaacccacagcccctccttttttttttttgattaaaaaacactcagtaaactaggtttaataaaagaatttcctcaacttgaagcaaacccacagctagctaacatcatactcaatgg

SEQ ID NO: 426015 - DNA, 201 bp, Homo sapiens
cattctactgcatgctcggtcattttcaatcatttaggtggcaacactgacaagataacagaaagatggaggtaataacatgtgaaaggcaaaatggtttktttttttttttaaaaatgacagtctctatcatgaatttacttacactccaggcaaaggttattagaagaaaaaaagatgtaagaaaattccttaactgaa

SEQ ID NO: 426016 - DNA, 201 bp, Homo sapiens
ggttgatgaagtcttcatggatgaggtactttaaatatctggtcatgaagagtatttgagaaatatgacaagtgaagatgctgggtaggaatgcagcgagraaagtgtgtaacacaaggccaaattggaaaggtcagtgagggggcaatctgtggaggcactgaatgcagaggatattaaaattagcaagatagtgttcta

SEQ ID NO: 426017 - DNA, 201 bp, Homo sapiens
ccagctcatttgctggagctgccaaggtccagaaaagtttggctgcaggctgttttcatgttttatgtatgtttgaaatgttctataataataaaaggttraaaaagtttacatttatttggaaaaccagttactttagtttatggttcctttttttccctccagagcttcctggagattgaggtctaattcaaagaaaac

SEQ ID NO: 426018 - DNA, 201 bp, Homo sapiens
ataattgatgatgtaactgatgatgattttggagtttatacatttccaaagtttcaaaatattttcacttggttgatttatctttatggtgatgacactamgtagatatatgcccttcttaaaagttacagtaagaggctgggagcggtggctcacgcctataatcccagcactttggaaggccgaggtgggcagatcatg

SEQ ID NO: 426019 - DNA, 201 bp, Homo sapiens
tttgtgtatcagttctaccaggttttagttttgttctggtggagacattacagttttttgtatatggttatgtcatcagtaattacagatgatttaacctrttcctttcctattaggatgccttttttttctttctcttgtccaactgctctggttaggacttctagtactatgtcaaaaagtgatgagggtcgtacatgg

SEQ ID NO: 426020 - DNA, 201 bp, Homo sapiens
tgttatttttactgtggagtattttctaagattatttttgctttttttttctttcatgttttgctgagatagaaggcctggaatctgatcctccacttcaragaacaggggtgagtagctaagccattatcttttgaaattcatatgtcatgtgctctttgctaggtctttaggtcgttttgtacatcttttcagaagctt

SEQ ID NO: 426021 - DNA, 201 bp, Homo sapiens
ttagtgcaatgaattttcctctagaactgcctttaaatgcatattacagattctcatatgttgtatattttaaaataatatgtaaatatatatttgcataraaaaacatatttacatacaaaatatgtatttacatatttaaacatatgtattttctgtttatatttttccttttactcaggagttaataggatattttta

SEQ ID NO: 426022 - DNA, 201 bp, Homo sapiens
ctagcatgtcttggactgtggcctcccttctatcttcagattatctgcctttttagaattatggcaataacttaactgcaaagaccacatgtgcacttgtsctctttcagtttgtaataaatataaaatgaaaagtgattatgtctttgcttaacgtctgcaaaataaaagtccaaagtccttggtatggtctataaggcc

SEQ ID NO: 426023 - DNA, 201 bp, Homo sapiens
tagcatgtcttggactgtggcctcccttctatcttcagattatctgcctttttagaattatggcaataacttaactgcaaagaccacatgtgcacttgtgstctttcagtttgtaataaatataaaatgaaaagtgattatgtctttgcttaacgtctgcaaaataaaagtccaaagtccttggtatggtctataaggccc

SEQ ID NO: 426024 - DNA, 201 bp, Homo sapiens
gcagaactgaaggagatagagacacaaaaaacccttcaaaaaatcaatgaatccaggaactggttttttgaaaagataaacaaaattgatagaccactagmaagactaataaagaagaaaagagagaagaatccaatagatgcaataaaaaatgataaaggggatatcaccaccaatcccacagaaatacaaactaccatc

SEQ ID NO: 426025 - DNA, 201 bp, Homo sapiens
ccttttattttataatgcaataaaagaaattaacaacatcacatacacagaagactaggaaaggggaaactacttacttctggaaatcagtaatgtaaacytacttgtacttttccatagtacatgaaagtaacgtttaacatgttttgaattaattaattaaatttaatctgtggggctatacaatgtaattcttaggag

SEQ ID NO: 426026 - DNA, 201 bp, Homo sapiens
tgaacatcgatgcaaaaatcttcaataaaatactggcaaaccgaatccagcaacacatcaaaagctaatccaccacgatcaagttggcttcatccctgggmtgcaaggctggttcaacatacacaaatcaataaacataatccatcatataaacagaaccaaagacaaaaaccacatgattatctcaacagatgcagaaaa

SEQ ID NO: 426027 - DNA, 201 bp, Homo sapiens
tccttgaagactgtactttcggtgaaactaccatgcattagtagcctttcacagtgatatctaccccacacctgcatcaaaatcttgcagtgcctattaayaaatgccaacccactaacggggaggggagaaaagacttgggactctgtacttgtaaaaccctctaccctccccaggcaattctttacacactaacactgt

SEQ ID NO: 426028 - DNA, 201 bp, Homo sapiens
gcttcaaagaataaaatacctaggaatccaacttacaagggatgtgaaggacctcttcaaggagaactacaaaccactgctcaacgaaataaaagaggacrcaaacaaatggaagaacattccatgctcatggataggaagaatcagtatcgtgaaaatggccatactgcccaaggtaatttatagattcaatgccatccc

SEQ ID NO: 426029 - DNA, 201 bp, Homo sapiens
gaaatcttcctcatcgtaaatatcatcatcctaaatgtcccgagtctttccatgggtctaatttaccaaatcatgaagactctctttctcactgtgtatgygtagtgggagaggcagagacagaacggtttttttttttttttgcaagtctgctctctggattcgtttttctggggatgaaatctcaggctatgtagcttt

SEQ ID NO: 426030 - DNA, 201 bp, Homo sapiens
acgaggctacagtaaccaaaacagcatggtactggtaccaaaacagagatatagaccagtggaacagaacagacccctcagaaataataccacatgtctamaaccatctgatctttgacaaacctgacaaaaataagaaatggggaaaggattccctatttaataaatggtgctgagaaaactggctagccatatgtaaaa

SEQ ID NO: 426031 - DNA, 201 bp, Homo sapiens
tgctgaagtttataaggttgacatattgccagcttcaataatgtaaagatgaagtgtatactgaattcttaatgcaaataacaactctattggaaagtaayccagttatagaagtgctaatttgtcaggagctgccttaccaagatcatgatgagtacagttatctcaggattctgaaagattgttttccgatttcaacta

SEQ ID NO: 426032 - DNA, 201 bp, Homo sapiens
taaatggtgctgagaaaactggctagccatatgtaaaaagctgaaactggatcccttccttacaccttatacaaaaattaattcaagatggattaaagacytaaatgttagacctaaaaccataaaaaccctagaagaaaacctaggcaataccattcaggacataggcatgggcaaggacttcatgactaaaacaccaaa

SEQ ID NO: 426033 - DNA, 201 bp, Homo sapiens
ctgccttacaagacatactaaggggagttcttcaagctgaaatgatatggcaatagttagtaatatgaaatgataaacctcactggtaaaggaaagtacayagtcaaatttagaacactttgatactataatgatggtgtataaataattttactgtgctatgaaggttaaaagacaaaagtattaaaaaaaacccatagc

SEQ ID NO: 426034 - DNA, 201 bp, Homo sapiens
gaaaaaaatcaaccccatcaacaagtgggcaaaggatatgaacagacacttctcaaaagaagacatttatgcagccaaagacacatgaaaaaatgctcatmatcactggccatcagagaaatgcgaatcaaagccacaatgagatcccatctcacaccagttagaatggcaatcattaaaaagtcaggaaacaacaggtgc

SEQ ID NO: 426035 - DNA, 201 bp, Homo sapiens
ttttgcccacttgatctgtctttttctgataatggtgtattatagttttctattatgggatcatctatgtcttgtctccttacatctcatacatctcatgyagttttttattcataaaggtggttattatgttatttggtatataagtctccataagggtcaaatcttcatgtgtattatatcttttagcataaaaaaagt

SEQ ID NO: 426036 - DNA, 201 bp, Homo sapiens
atctcacaccagttagaatggcaatcattaaaaagtcaggaaacaacaggtgctggacaggatgtggagaaataggaatacttttacactgttggtgggayggtaaactagttccaccattgtagaagacagtgtggcaattcctcaaggatctagaactagaaataccatttgtcccagccatcccattactgggtacat

SEQ ID NO: 426037 - DNA, 201 bp, Homo sapiens
atttgttttagattcatctctcatagaaaacatattatgttttattttgtgagcccactgaaaatatttttcttctagtaggtgtgtggagtccactcacgtgtgtgtgtgtgtgtgtgtgtgtgtgtgtgtagctatgactgatatttattgtgtttgtattttctttatatttgctacgctcttttgtcacggtgtagt

SEQ ID NO: 426038 - DNA, 201 bp, Homo sapiens
tttgttttagattcatctctcatagaaaacatattatgttttattttgtgagcccactgaaaatatttttcttctagtaggtgtgtggagtccactcacgtgtgtgtgtgtgtgtgtgtgtgtgtgtgtgtagctatgactgatatttattgtgtttgtattttctttatatttgctacgctcttttgtcacggtgtagtc

SEQ ID NO: 426039 - DNA, 201 bp, Homo sapiens
ttattccatttggacagcaatacccaggtaagaaaaagagacacagaaatttaaaaagaagaatatacattattccttaggaacataaatgcaaagaaatstaatcaaaattttggcaaatgaaatgtagaaatactttatgaccaagtgagagttacccaaagaatttaaggttggttttatatgtaaagatcaaccaat

SEQ ID NO: 426040 - DNA, 201 bp, Homo sapiens
ctgaggcacaagaatcacttgaacccaggaggcagaggctgcagtgagctgagatcacaccattgcactccagcatgggtgacaagtgagattctgtctcaaaaaaaaaaaagtgaaggtatgatgacaatgtcacacaaaatagtgaataccaataaaaagatagaaattattaaaaagaaccaaatgaaaattctggag

SEQ ID NO: 426041 - DNA, 201 bp, Homo sapiens
tgagattctgtctcaaaaaaaaaaaagtgaaggtatgatgacaatgtcacacaaaatagtgaataccaataaaaagatagaaattattaaaaagaaccaartgaaaattctggagttgaaaagtacaataactaaaatttaaaaatttattagaaaggctcaatagtagatttgaactgggagaagaaacaagaagtaaac

SEQ ID NO: 426042 - DNA, 201 bp, Homo sapiens
ttgttttagattcatctctcatagaaaacatattatgttttattttgtgagcccactgaaaatatttttcttctagtaggtgtgtggagtccactcacgtgtgtgtgtgtgtgtgtgtgtgtgtgtgtgtagctatgactgatatttattgtgtttgtattttctttatatttgctacgctcttttgtcacggtgtagtct

SEQ ID NO: 426043 - DNA, 201 bp, Homo sapiens
aaccacaagcagagcaactttcagagctggtcggccagcgttggcacccagggaagcaagtgctattccatatttggagagaacataaaactcaaggaaayagagaagtcctactcaataccgttctcaactgaaaacaagagaacttgcaaaaaagaaacccagttttctggagtccatggagaaatatgaagccaatgc

SEQ ID NO: 426044 - DNA, 201 bp, Homo sapiens
tgttttagattcatctctcatagaaaacatattatgttttattttgtgagcccactgaaaatatttttcttctagtaggtgtgtggagtccactcacgtgtgtgtgtgtgtgtgtgtgtgtgtgtgtgtagctatgactgatatttattgtgtttgtattttctttatatttgctacgctcttttgtcacggtgtagtctt

SEQ ID NO: 426045 - DNA, 201 bp, Homo sapiens
tgtgtgtgtgtgtgtgtgtgtgtgtgtgtgtacctgacagggaagcaagaacatcgagttgccaatgcactctgtctatggttagaatcatgctgaaaacrtggctcccccagttctggaatgagcccacagatcaagcattccccaaagacatagcaggctcaaatccctgtgtacacaatattttatgattatcttatg

SEQ ID NO: 426046 - DNA, 201 bp, Homo sapiens
tctgtgttttcctagttaatcttttacttctgatttatcagtttgggggatgttcttcagcactcccctattctcatgcaaagtgctttcggttttcctctttttttttttttcctcctcctgtgtttagttgtcttatttctactttgtcacaatattagtgacatttgtatgctagtcttctaccctggatagggaata

SEQ ID NO: 426047 - DNA, 201 bp, Homo sapiens
aagaacatcgagttgccaatgcactctgtctatggttagaatcatgctgaaaacatggctcccccagttctggaatgagcccacagatcaagcattccccraagacatagcaggctcaaatccctgtgtacacaatattttatgattatcttatgtcagtactttcaaagtatacagtttgtgtgaagacaaatccaatgt

SEQ ID NO: 426048 - DNA, 201 bp, Homo sapiens
gtcagacatccacctgtgctgttttctgctataagctgaatgcaggggatacaatgttaggagcatcagtgtggtatgaggaatgtttacttattggtagyagacttgtctggatcaaggataagtacaagtatctgagatgctgaggtgtggctgaatgaatggccatctgttctattgcaacaggataaataacacatt

SEQ ID NO: 426049 - DNA, 201 bp, Homo sapiens
tgtattttaccttaagaaacttagaaaagaacaaattaacccagacttaagtaaaataaaggcactaataaagataagagcagaaatcaatgaaatataaracaacaaaacacagagaaaaattgagaaaatttaaaaatagcctagtgagaagatattgataaacttgtaaccagaccaatttaagaaaaaaagtcaaaa

SEQ ID NO: 426050 - DNA, 201 bp, Homo sapiens
tgtttcttctctttgtttaaatctctttttgagatgacctaaacaactgtggagaatcattgatatatttccttttttcactgttcatgttgggtgaaaayaatcttgtagtgaaattcacatgttctaaatattgtttttttacatctttatctggcacattcataacatagatgtttctatacatattagtactgtaat

SEQ ID NO: 426051 - DNA, 201 bp, Homo sapiens
attaaatattgacttgaattagtcttttcctcattgttgcaacaaggtaagttatataggaaattttcttctcttgatggcatgtctgagataatcatagatataagacacctggctggtttctagaatgcatgtaatttttatttcttgatctgtgtgttgagtacttgctgtgattgcatcatgcaaatacattgagct

SEQ ID NO: 426052 - DNA, 201 bp, Homo sapiens
ttaaatattgacttgaattagtcttttcctcattgttgcaacaaggtaagttatataggaaattttcttctcttgatggcatgtctgagataatcatagatataagacacctggctggtttctagaatgcatgtaatttttatttcttgatctgtgtgttgagtacttgctgtgattgcatcatgcaaatacattgagctt

SEQ ID NO: 426053 - DNA, 201 bp, Homo sapiens
actcgggaggctgaggcaggagaatggcgtgaacctggtaggcggagcttgcagtgagccgagatcgcgccactgccctccagcctgggagacagtgcgasactccgtctcaaaaaaaaaaattatgtatatatttataaattaatacttaataaattaataacttgtgataggcaatgcaaagatgacagtaaaaggaca

SEQ ID NO: 426054 - DNA, 201 bp, Homo sapiens
tgatttgcatttctctgatggccagtgatggtgagcatttttcaagtgtctgttggctgcataaatgtcttcttttgagacgtgtctgttcatatccttcrcctactttttgatggggttgtttgtttttttcttgtaaatttgtttgagttctttgtagattctggatattagccctttgtcagatgagtagattgcaaa

SEQ ID NO: 426055 - DNA, 201 bp, Homo sapiens
aaacagacagaaaagaccaatggaacagaatagagagcccagaaataaactcacgtttatagagtcaactaatattcaacgaaggtgccaagagtacacartggggaaagtatagtctctacaataaacagcactgggaagacaatatccaaatgcaaaagaatgaaattacacccttatcttataccatacacacaaatc

SEQ ID NO: 426056 - DNA, 201 bp, Homo sapiens
aatcgacacctttgcatttcatatttaaagtccagaaaatcatagactaagggaaaagcttgataggagcaataggaagaaaaccatcttacctatggagsaacaagaataaaaattgctttgaaattatcttcagaatccatgaaagcaagaagtgagtcagggtgaaatatttagtgttaaaagtaagaaacaaaaaaa

SEQ ID NO: 426057 - DNA, 201 bp, Homo sapiens
ggggtttcaccatcttggccaagctggtcttgaactcctgaactcttgatccacccaccttggcctcccaaggtgctgggattacaggtgtgagccactgygcctggacctggcccgaagtaaacttctttacccttgctaatgatctttgctctgaagcatgctttgctggtattaatatagtcattccttctttctttg

SEQ ID NO: 426058 - DNA, 201 bp, Homo sapiens
aggcaatttatgaaatgggagaaaatgtttgcaaaccacatatctgataaagggttaatatccaaaaatatataaggaatgcataaaattcaatagaaataaacaaacaaataatccaattttaaaatgggtgaagaacctgaatagacattttttcaaagaagacttacaaataggcaacaggcatatgaaaaaatgctt

SEQ ID NO: 426059 - DNA, 201 bp, Homo sapiens
ggcaatttatgaaatgggagaaaatgtttgcaaaccacatatctgataaagggttaatatccaaaaatatataaggaatgcataaaattcaatagaaataaacaaacaaataatccaattttaaaatgggtgaagaacctgaatagacattttttcaaagaagacttacaaataggcaacaggcatatgaaaaaatgcttg

SEQ ID NO: 426060 - DNA, 201 bp, Homo sapiens
gcaatttatgaaatgggagaaaatgtttgcaaaccacatatctgataaagggttaatatccaaaaatatataaggaatgcataaaattcaatagaaataaacaaacaaataatccaattttaaaatgggtgaagaacctgaatagacattttttcaaagaagacttacaaataggcaacaggcatatgaaaaaatgcttga

SEQ ID NO: 426061 - DNA, 201 bp, Homo sapiens
tatagacacagtggaatctatttagtgttcaaaaagaaggaaatccaacttttaaaatcctttaaaaagttaaactcataaaaacagagaggagaatggcrgtttccaggaactggagggtgggagaatggggagatgttggtcaaaaggtacaaactttcagttataaaatgaataagttctagagatctagtgtacaac

SEQ ID NO: 426062 - DNA, 201 bp, Homo sapiens
caatttatgaaatgggagaaaatgtttgcaaaccacatatctgataaagggttaatatccaaaaatatataaggaatgcataaaattcaatagaaataaacaaacaaataatccaattttaaaatgggtgaagaacctgaatagacattttttcaaagaagacttacaaataggcaacaggcatatgaaaaaatgcttgac

SEQ ID NO: 426063 - DNA, 201 bp, Homo sapiens
gaagaaaacctaggcattaccattcaggacataggcatgggcaaggacttcatgtctaaaacaccaaaagcaatggcaacaaaagacaaaattgacaaacrggatctcattaaactaaagagcttctgcacagcaaaagaaactaccatcagagtgaacaggcaacctacaaaattttcacaacctactcatctgacaaag

SEQ ID NO: 426064 - DNA, 201 bp, Homo sapiens
tttggtttgcctttccctaatgactaatgatgttgagcatcttacaatgtacttgttaactatttgtgttctttagagaaatgtctattcaagtgccttgyccattttaaaaatcgagttgtcttgttgacttatgagttctttaatacagtaaacgcttatcagatatgatttataagtattttaacccattctgaaggt

SEQ ID NO: 426065 - DNA, 201 bp, Homo sapiens
attcaagtgccttgtccattttaaaaatcgagttgtcttgttgacttatgagttctttaatacagtaaacgcttatcagatatgatttataagtattttawcccattctgaaggtcaccttttcacttttgtggtagaccattatgcacaaaggttttaattttgataaatccaatttatccgcttttgttgttgtttttg

SEQ ID NO: 426066 - DNA, 201 bp, Homo sapiens
ctatatatcttgctctgtgaatagataattttacttcttgatctccaatatggatgcctttctttctttttcttacctaattgctgtagctagaattttcmgtataatgtatgatagaagttgttcacaactatccttgtcttctttctgatcctaggggtatagctttcagtctttcaccattaagcacaatgttagctg

SEQ ID NO: 426067 - DNA, 201 bp, Homo sapiens
attcttcctatccatgagcacggaatgttcttccatttgtttgtgtcctcttctatttcgttgagcagtggtttgtatttctgcttgaagaggtccttcaygtcccttgtaagttggattcctaggtattttgttctctttgacgcaactgtgaatgggagttcactcatgatttggctctctgttagtctgttactggtg

SEQ ID NO: 426068 - DNA, 201 bp, Homo sapiens
ttctaaatatacaatcatgtcatctgcaaacagggacaatttgacttcctcttttcctaattgaataccctttatttctttctcctgcctgattgccctgrccagaacttccaacactatgttgaataggagcggtgagagagggcattcctgtcttgtgccagttttcaaagggaatgcttccagtttttgcccattcag

SEQ ID NO: 426069 - DNA, 201 bp, Homo sapiens
catactcttggcagaagcacttggccaccagacagcatgtcctgtcaacctacagagttcttaaaaacaaacactgggacccagaatagtaccctgtggtyatagtgcccacagttcactaagcaccctcacaggtctttgacagaacactgactgccaggtcacctggtgggcagagaaatggaagattcccaggcccaa

SEQ ID NO: 426070 - DNA, 201 bp, Homo sapiens
gggctgcaggtggagctgcctgccagtcctgcgccatgcgcccgcactcctcagcccttgtgtggttgatgggactgggcaccgtggagcagggggcggcrctcgtcggggaggctctggctgcacaggagcccatggagggggtgggaggctcaggcatggcaggctgcaggtcccgagccctgccccgagggaaggcag

SEQ ID NO: 426071 - DNA, 201 bp, Homo sapiens
gtctgggcttgccatcttcatggccacttgtcttagtttgctagggctgccataacaaaatatgagagactgagtggcttaaacaagagaaatttattttytcacaattctgaagaccagaagtccattaccctgaaatctctctccttggcttgcagatactgccttcttgccgtgtcctcacacagccttttctctgtg

SEQ ID NO: 426072 - DNA, 201 bp, Homo sapiens
cttagtttgctagggctgccataacaaaatatgagagactgagtggcttaaacaagagaaatttattttttcacaattctgaagaccagaagtccattacyctgaaatctctctccttggcttgcagatactgccttcttgccgtgtcctcacacagccttttctctgtgtacacatccctggtgttttttaagcctgtcc

SEQ ID NO: 426073 - DNA, 201 bp, Homo sapiens
tattaagctcttccaaaaaaattgaagaggagaaaacactttcaaattcattataagaggccagttttaccttgatatcaaagatttaaaaagaacacttygagaaaggaaaattacaggccaaaacccttgataaatatagatgcaaaaatgctcagcaaaatactagcaaacctaattcagcaacacattataatggca

SEQ ID NO: 426074 - DNA, 201 bp, Homo sapiens
cctgtagtcccagctactcaggaagctgaggcaggagaatggcgtgaacccgggaggcggagcttgcagtgagctgagattccgccactgcactccagccwgggcaatgagcgagactccgtctcaaaaaaaaaaaaaaaaaaaaaaaaaaagttacagtgagagttgacattgagaaaagggaggcccagccagggttat

SEQ ID NO: 426075 - DNA, 201 bp, Homo sapiens
cctatcaagatcccagctgttttgcaggaattgacacaatgatcatataaaaattcatatgcaatgcaagggacccaaaacagacaaaatgattttggggaaaaaaaaaaaaaaatggaggacttgcacatcccaaatctaaacttactaccaagctacagcaatcaagacagtgcggtgctggtataacgacagacatat

SEQ ID NO: 426076 - DNA, 201 bp, Homo sapiens
tgcaatgggtaaatccctagaaacatacaacctacaaaaactgaatcatgaagaaatggaagatctgaacagatcaataatgaataagggaattgaatcartattcaaaaatctcacaaaaagaaaagctcaggatcagatggcttcactggtgaagactgccaaccatttaaaaaaattaataccactctttattaagct

SEQ ID NO: 426077 - DNA, 201 bp, Homo sapiens
ttttggggaaaaaaaaaaaaaaatggaggacttgcacatcccaaatctaaacttactaccaagctacagcaatcaagacagtgcggtgctggtataacgayagacatatagggcaatggagtaagactgagaatccagaaagtcttatatttatggtcaactgttctttgacaagggtaccaggaccattcatggggaaat

SEQ ID NO: 426078 - DNA, 201 bp, Homo sapiens
tccaacagtggtagaattcacattcttctcaagcacacatggaacattctccaggatagattatatgttagctcacaaaataatattacaaaatttaatamagctgaaatatcaattattttgcaccacaatagtataacactagaaatcaataacaagatggaaactggaaatttacaaatatatagcattaacatattc

SEQ ID NO: 426079 - DNA, 201 bp, Homo sapiens
gagaaaagggtagaaaacttatttaagaaataatggctgaaaactctccaaatctaggaaaagatatgagcatccaggtatatgaagctcaaagatccccrtacaggatacattccaaaaagacttcaccaaaacacatgataatcaaactgtcaaaagcaaaatcaagacgatgaataaaccaccaatcactaagaggga

SEQ ID NO: 426080 - DNA, 201 bp, Homo sapiens
ttgaatcatgcgggtggacttccctcttgctgttcttgtgatagagttgttatgagatccagttatttgaaagtatgtagcatgtcccccttcactctctkgcactcctgctccaccttggtaagacttgcttgctacccctttgccttctgccatgattgtaagtttcctgaggcctcccagctatgcttcctgtatggc

SEQ ID NO: 426081 - DNA, 201 bp, Homo sapiens
gcacctggcctggctttatgcaacctagagaaggtgatatgatttggctctgtgtccccacgtaaatctcatgtcaaattgtaatccccacgtgttggacragggacttggtgggaggtgattgaatcatgcgggtggacttccctcttgctgttcttgtgatagagttgttatgagatccagttatttgaaagtatgtag

SEQ ID NO: 426082 - DNA, 201 bp, Homo sapiens
cttactagacacagacattgaaccagctattaaaaatacgtacacagaactaagaaaaacatgtcaaaagggttaaagaaaggtataaaaatagtgtcttrccaaatatagactaccaataaagagatagaaattataagaaaagacaacatgaaaaaatataaagcaaaaaaattagacaattgaaacaagagggcctct

SEQ ID NO: 426083 - DNA, 201 bp, Homo sapiens
tgtctcaaaaaaaaaaaaaaaaaaagccacatgcatgtaattgtttacctctggctttccttttatgctctgggcaagctaaggaagagttgtgaactacytaagtgctgaatgggaaccataacacacacacacacacacacacacacacacacagcaccttagtaaagggtgagaggcatgttagttagaagcattaaa

SEQ ID NO: 426084 - DNA, 201 bp, Homo sapiens
aactgaaaactaaaatcttgggaatgagatatctacaggatgcttcaaaaagctttgatacattcctgtttatctagaaagctacatgcaggctgggtgcrgtggctcacacctgtaatcccagcactttgggaggccgaggcgtgcggatcatgaggtcaggagtttgaggccagcctgaccaacatggtctctactaaa

SEQ ID NO: 426085 - DNA, 201 bp, Homo sapiens
aaagttggagaatctactgctctcaaaacccccttaaaagagttctctaaatacttaaagaagttattcaagctgaaagcaagtgagcctaggtagttatkcaaatcaacaactacaaagcaaatgcttgtaaaggtaattatataaatataaaagacagtagaaatgtaatttttctctgaagtgattttaaaataaatt

SEQ ID NO: 426086 - DNA, 201 bp, Homo sapiens
ctgcccaagagatccactttattttcatctcacccagaatattgaggtgatcagcaaggtggagtggttgggagagggtaaaagcaggaaagagagatggsgactcaaacagcagcccatacttggaactgccatagatcctaccagttacttcatggactccatcaggaacccacctataagccacaggggatgcatccc

SEQ ID NO: 426087 - DNA, 201 bp, Homo sapiens
tccacctctaggggcagggcatagcagaacaaaaggcaacagaaacttctgcagacttaaacatccctgacagctttgaagagagtagtggttctcccagyacagagtttcagatctgagaacagacaggctgcctccttaaatgggtccctgacccccaagtagcctaactgagagacacctcccagtaggggctgactg

SEQ ID NO: 426088 - DNA, 201 bp, Homo sapiens
ctgaaggtcacagaagtctcaagataaatttttaaaatatttcaaactaaatggaattgaaagcacaacttatcaaaaatttaggaacgcaacaaaggcaktgcctactgggaaatttataccactgaatgtatgttaaaaagaacaaagatctaaataaataatccttcccattggaaagctagggggaaaattcaaatt

SEQ ID NO: 426089 - DNA, 201 bp, Homo sapiens
ctgaatgtatgttaaaaagaacaaagatctaaataaataatccttcccattggaaagctagggggaaaattcaaattaaattcaaagtaagcaagtaaaasaaataataaaatatgaatacaattctgagtggcctgatatctgatttctggaagctgagttttatgtggctttagaagtttcatgttatgagtgtgaaat

SEQ ID NO: 426090 - DNA, 201 bp, Homo sapiens
tggggcaatatggagatgttatattgtcttcgacagggaagatgacataaaaattatgttcaataggattatgtggagacttaacataagtgacaaacctragacaagaagttagaaatccttgtttcttttaggtgaataattttggagcttgagaaaaagacaccattgtggcgaacttgctttgccaaaccctgtgta

SEQ ID NO: 426091 - DNA, 201 bp, Homo sapiens
tatgtggagacttaacataagtgacaaacctaagacaagaagttagaaatccttgtttcttttaggtgaataattttggagcttgagaaaaagacaccatygtggcgaacttgctttgccaaaccctgtgtatgcatttttgggtaaacaacacattttcatcctttaagcattgtttccattatttataattcctaatag

SEQ ID NO: 426092 - DNA, 201 bp, Homo sapiens
tatcttcaggagacgtaataatgtaaaaatcatgctcaatagaattaagctgaggctcaaaatagtgccaatccttgcaagaaggtgtgagaagtcattaratttggggggtatgggttattccattttgaacttggtaggaagaaacccttgggggaatcttacatcatttgcctctacctacttctaaaggaactttta

SEQ ID NO: 426093 - DNA, 201 bp, Homo sapiens
tgtgtgagatcagatgacagaagggagaactacctttaggcagaggcttctcatgtcccctggagtggccatgtgctgttctacatgactacttccacttyggttatgtagaagctatttaaagcacacagatgtttgtgatgagaaaaaagccacccttaattgaataatggaaattataagcatgatttgagggtgggg

SEQ ID NO: 426094 - DNA, 201 bp, Homo sapiens
tcccttggactttgcaatcacggtggcattcatacattcattcaacaagtatgtatgtacaggacagtggagtaaagaaaacagatagttcttactctcaygaggcttaaaatttcaggagggaactaggcagtcatgaagtaaacataaaaacacagattgtaataggcactagagaataatgaagactttggggaacac

SEQ ID NO: 426095 - DNA, 201 bp, Homo sapiens
ttagcatcctggattcctgcaccggcttttgaaccttatgtttcctgcaccccaagaagccatgttatctggacattgtcctctctgtgatgggaaagaasagttttttcaacaaatgttgctaggacaactggatatctagatacaaaagatactgcatttatgttaccagttttctgtgtcagtccattttgctctgat

SEQ ID NO: 426096 - DNA, 201 bp, Homo sapiens
tttttatcttctgtgtacgtttttctctagacccatatttttaattgccttaggacagctctccctggatatccctcagacacaactaaaacatcattcarttgtactattaataattttcccttcaaaatccactcctcttctctatagacctaacagcaacactgtccgtccagctctcaaaacctgaaatgtgggagt

SEQ ID NO: 426097 - DNA, 201 bp, Homo sapiens
ttagcataaaaaaagtgtccttctttgccttgattaacatggtgggacttgaatacattgtgtgatataagaattactacgcttgcatgcgattggcatgaaaaaaaaaagattactcctatctctttttgttttcatgtgcctgatatactttcgcccatccctttattttcagtcttttagaatccatttgttttagat

SEQ ID NO: 426098 - DNA, 201 bp, Homo sapiens
cattagataaccatgcacaaaataagcctggctgtggaaacgcttatttgttgggagggtgcttgtttggatcgatgatgagaataattgtctgaggatgstgagggactcattccagatgtcaatctgaggtccagatgtgcggccctccaataggacaaataagactctcagagcctggctctatttggggatccctca

SEQ ID NO: 426099 - DNA, 201 bp, Homo sapiens
taccaatatttgaaaatgtaggagggcaaatcattacagattctatgaatactaaaatgataataaggaaaaattatttaaaaggggcatgtcagccaggcatggtggcttacccctgtaatcccagcactttggcaggccgaggtgggaggattgctagagctcaggcattcgagaccagcctgggcaacatgttgaaac

SEQ ID NO: 426100 - DNA, 201 bp, Homo sapiens
agcccgtttgtacatgcctttcttttctctcagaaaatggcactatcataatagctttcttacacagacttcaccttagggttttacattaagggaggggyctggtgtttcatttattttgaagtatttgttgttgattgtgtacagtgcttgagtaaaaaattgaatatagaaacatctagaatatttttttaaaggatc

SEQ ID NO: 426101 - DNA, 201 bp, Homo sapiens
ttttatatatgtcaaaagtgccatctcccaaactgtgctatccccttcaggagaagagactctgctgaagtttataaggttgacatattgccagcttcaayaatgtaaagatgaagtgtatactgaattcttaatgcaaataacaactctattggaaagtaacccagttatagaagtgctaatttgtcaggagctgcctta

SEQ ID NO: 426102 - DNA, 201 bp, Homo sapiens
gagatcgcgccactgccctccagcctgggagacagtgcgagactccgtctcaaaaaaaaaaattatgtatatatttataaattaatacttaataaattaawaacttgtgataggcaatgcaaagatgacagtaaaaggacaaaattgattagattgataaagtcctgttaacatgaagaaattgaccaggataccatccac

SEQ ID NO: 426103 - DNA, 201 bp, Homo sapiens
cccttggtttggataaacacatctaagagaaaaatggaaaaacacacatggcagggaagccttgatagagccaaaatataggattgtatgtagtaatgcartccatagatgagcatttggcagtaatattatttttcagatatggataaaaattgcttaggagagtaaagagagacaaagttgaaagcaggtttatagtag

SEQ ID NO: 426104 - DNA, 201 bp, Homo sapiens
tttaaaatcagcggcgaagtgttctatctcatttcacccatatatatcagagactcaaatcctgaaaaataccaagttgacctgcccattcttgagttctrctgaatggtgtgttcccagatcactatggatattgctgtttacttgaccaattacttttagtcaacaagatttgaacaatgcttttgattcacacagcgt

SEQ ID NO: 426105 - DNA, 201 bp, Homo sapiens
taataatgtaaatgagatacctagaacaatataagcattcaggaattattaactcaattccaatccttcctccacctccacctctttctctgtgagattayagaaaagatgacaaaaaggatgttttctgagccctttaattgttgagaatgatctttgagaaaaagaaaaaaaatgaaagcactaggaatgtacaacagc

SEQ ID NO: 426106 - DNA, 201 bp, Homo sapiens
tttctaagattatttttgctttttttttctttcatgttttgctgagatagaaggcctggaatctgatcctccacttcagagaacaggggtgagtagctaarccattatcttttgaaattcatatgtcatgtgctctttgctaggtctttaggtcgttttgtacatcttttcagaagcttattggaggacattttcatgata

SEQ ID NO: 426107 - DNA, 201 bp, Homo sapiens
tctcttcgaagagggcagtggcatcctgtcttatgagtcagtgtgcactttagtgtgcctagtgacccaagacttgctttaattgtagatagatacttacrtataggaaatatttcttaagtaacaaatgaaaaactttagaagattgaattaagggtcaagcaactgtgatatgtctgaaaatctcattagtgttgtgct

SEQ ID NO: 426108 - DNA, 201 bp, Homo sapiens
caaacagcagcccatacttggaactgccatagatcctaccagttacttcatggactccatcaggaacccacctataagccacaggggatgcatccctcccrtcttgccaacaaaaccccgaatgctccaaatgcctcacccactctttggctggctcccaagtgcgctcctgtgaaaagcgagtgagtatctctgcagatg

SEQ ID NO: 426109 - DNA, 201 bp, Homo sapiens
aaaaaaagtttcccatagaaatcttcctcatcgtaaatatcatcatcctaaatgtcccgagtctttccatgggtctaatttaccaaatcatgaagactctstttctcactgtgtatgtgtagtgggagaggcagagacagaacggtttttttttttttttgcaagtctgctctctggattcgtttttctggggatgaaatc

SEQ ID NO: 426110 - DNA, 201 bp, Homo sapiens
aaaaaaattgaagaggagaaaacactttcaaattcattataagaggccagttttaccttgatatcaaagatttaaaaagaacactttgagaaaggaaaatyacaggccaaaacccttgataaatatagatgcaaaaatgctcagcaaaatactagcaaacctaattcagcaacacattataatggcatacatcatgaccaa

SEQ ID NO: 426111 - DNA, 201 bp, Homo sapiens
aatttatctaccaattcaactaaatccctatcaagatcccagctgttttgcaggaattgacacaatgatcatataaaaattcatatgcaatgcaagggacscaaaacagacaaaatgattttggggaaaaaaaaaaaaaaatggaggacttgcacatcccaaatctaaacttactaccaagctacagcaatcaagacagtg

SEQ ID NO: 426112 - DNA, 201 bp, Homo sapiens
tctagctagagcaattaggcaagaaaaaaggcacccaagttggaaagaatgaagttaaattgtctctgtagatgacatgatcttatatatagaaaacactraagactccaccaaaatgctgttttaattagagcttaaaaaaataattcactaaagttgcaggatacaaaatcagtatacaaaaatcagttgcatttctaa

SEQ ID NO: 426113 - DNA, 201 bp, Homo sapiens
cactacctaacttcaaaattttattaatcaaaacagcatgacataaaaacagacagaaaagaccaatggaacagaatagagagcccagaaataaactcacrtttatagagtcaactaatattcaacgaaggtgccaagagtacacaatggggaaagtatagtctctacaataaacagcactgggaagacaatatccaaatg

SEQ ID NO: 426114 - DNA, 201 bp, Homo sapiens
ggtactttaaatatctggtcatgaagagtatttgagaaatatgacaagtgaagatgctgggtaggaatgcagcgaggaaagtgtgtaacacaaggccaaaytggaaaggtcagtgagggggcaatctgtggaggcactgaatgcagaggatattaaaattagcaagatagtgttctagcacaatgaaaaggattggaagag

SEQ ID NO: 426115 - DNA, 201 bp, Homo sapiens
ataaggaatgcataaaattcaatagaaataaacaaacaaataatccaattttaaaatgggtgaagaacctgaatagacattttttcaaagaagacttacarataggcaacaggcatatgaaaaaatgcttgacatcactaataatcagggaaatgcaaatcaaagctccagtgaaataccacctccaactattaggatggc

SEQ ID NO: 426116 - DNA, 201 bp, Homo sapiens
aattcttgagaaaaattcctcgaaggggcctgaaatctcagaatggtcatgtttttaatgggaatagggagtgatgctgccccattacaaccatctgttcwaacagaatgtctgtaccgaggagggatgagtaacatcggcaagttctgttcgaagcctttttcaagtttctttttgatatgtatctatctatctatcatc

SEQ ID NO: 426117 - DNA, 201 bp, Homo sapiens
cagaatggtcatgtttttaatgggaatagggagtgatgctgccccattacaaccatctgttctaacagaatgtctgtaccgaggagggatgagtaacatcrgcaagttctgttcgaagcctttttcaagtttctttttgatatgtatctatctatctatcatctccctatacaagcaagcatccccaaaagtagttgtctc

SEQ ID NO: 426118 - DNA, 201 bp, Homo sapiens
cactgcatgttctcactcatagatgggaattgaacaatgagaacacatggacacaggaaggggaacatcacactctggggactgttgtggggtcgggggakgggggagggatagcattaggagatatacctaatggtaaatgacgagttaatgggtgtagcacaccagcatggcacatgtatacatatgtaacaaacctgc

SEQ ID NO: 426119 - DNA, 201 bp, Homo sapiens
ttttgctcttccttattgttcagggacattccattaaatagtaatgaaaaggcagcaaaagtaagaggagtgacaacatgcccggcataattaagcaagcyagagcagctattctgtgcaaccgacgattttttttctctaaaattttaagggtaggttcattctgactctgttaaaagtctacttgatgtgaacaactct

SEQ ID NO: 426120 - DNA, 201 bp, Homo sapiens
ttataaagcatgcccgttttgtattgttagcagagtattctagaaatgtcaatgagatcttgttggttgatggtgcttttcagttctatatctttgctaattttttttttttttgcttagtagctatatgagattctgagagaggaaattgaagtctccaaccataattgtggatttgtctatttctcctatcagttctat

SEQ ID NO: 426121 - DNA, 201 bp, Homo sapiens
ggagtggtaaagtctctattattgtagaactctctgtttttcaagtctatcaatatctgtttcatatattttggagctctgtttgctgcatatgtgtttamaattgttatatcttcttggcaaattgaccagtttcatcaacataaaatataattcttattgtcttctaacagtttatttttctttttacataaagcctat

SEQ ID NO: 426122 - DNA, 201 bp, Homo sapiens
taatctcagcctatctgtgccattgaatttgaagtgagttttcatatagagaacatattattgaatcatcattttaaaaattccttttgccaatctttttkatactgaggtaaaattgacataaaatttatcattttaaagtgtacaatacagtggcatttggtaatacacatgttatgcaacgttaactctacctggctc

SEQ ID NO: 426123 - DNA, 201 bp, Homo sapiens
ctatttggggatccctcagtgacaacatagtacccctgtgagcgtgccttttctatctcttcgaagagggcagtggcatcctgtcttatgagtcagtgtgyactttagtgtgcctagtgacccaagacttgctttaattgtagatagatacttacatataggaaatatttcttaagtaacaaatgaaaaactttagaagat

SEQ ID NO: 426124 - DNA, 201 bp, Homo sapiens
aacccactgtgatggctttcctactatttaaggttggtggtgtcaaagagacaccctcctgtacagtgtgcagtgaatcaacatcatttccacaaaacctscttcctgcacaaaggaattatcatactttgttacgaagtaaaattttcctgtatcagtcacaggagttcaccagttaagatactgttagttgaagacttc

SEQ ID NO: 426125 - DNA, 201 bp, Homo sapiens
cccggaggaggacttgcgttcggcccgctggtcccagtgtgtccggaattggtgggttcttggtctcactgacttcaagaatgaagctgcggaccctcgckgtgagtgttacagctcttaaggtggcatgtctggagtttgttccttctgatgttcggatgtgttcggagtttcttccttctggtgggtttgtggtctcgc

SEQ ID NO: 426126 - DNA, 201 bp, Homo sapiens
gatacagagtgtctattggtgcattcacaaaccctgagcttgacacagagtgctgattggtgtgtttgcaaaccttgagccagatacagagcgcggattgktgtatttacagtccctgagctagacataaaggttctccaaggccccaccagagaagctagatacagagtgtcgattggtgcattcacaaaccctgagcta

SEQ ID NO: 426127 - DNA, 201 bp, Homo sapiens
agctagatacagagtgtcgattggtgcattcacaaaccctgagctagacacagggtgctgattggtgtgtttacaaaccttgagctagatacagagtgccrattggtgtatttacaatccctgagctagacataaaggttctccaaggccccaccagactcaggagcccagctgtcttcacccagtggatcccgcactggg

SEQ ID NO: 426128 - DNA, 201 bp, Homo sapiens
ctagatacagagtgtcgattggtgcattcacaaaccctgagctagacacagggtgctgattggtgtgtttacaaaccttgagctagatacagagtgccgaytggtgtatttacaatccctgagctagacataaaggttctccaaggccccaccagactcaggagcccagctgtcttcacccagtggatcccgcactggggc

SEQ ID NO: 426129 - DNA, 201 bp, Homo sapiens
ggaggggcatccaccattgctgaggcttgagtaggtaaacaaagcggctgggaagctcgaactgggtggagcccaccacagctcaaggaggcctgcctgcytccgtagactccacctctaggggcagggcatagcagaacaaaaggcaacagaaacttctgcagacttaaacatccctgacagctttgaagagagtagtgg

SEQ ID NO: 426130 - DNA, 201 bp, Homo sapiens
aactgaaaattctaaaaatcagagcacctcttctcctccaaaggaatgcagctccctgccagcaatggaacaaagctggacggagaatgactttgacgagytgacagaagtaggcttcagatgatcgctaataacaaacttctctgagctaaaggatgaggttcaaacccatcgcaaagaagctaaaaaccttgaaaaaag

SEQ ID NO: 426131 - DNA, 201 bp, Homo sapiens
ctcttctcctccaaaggaatgcagctccctgccagcaatggaacaaagctggacggagaatgactttgacgagctgacagaagtaggcttcagatgatcgstaataacaaacttctctgagctaaaggatgaggttcaaacccatcgcaaagaagctaaaaaccttgaaaaaagattagatgagtggctaactagaataaa

SEQ ID NO: 426132 - DNA, 201 bp, Homo sapiens
ctgatgcttcagataggaggaagggaaaagcaactattttgaaataagcccaggggacaagtagttatttctaaacactctcagagcattttctttcacayggcagggggctccctgcaagggaagctactttgcctgagccttgtctgatgtaggagaaaaggaattggatggctcaagctccatctagcctttctgatt

SEQ ID NO: 426133 - DNA, 201 bp, Homo sapiens
gtgccattgaatttgaagtgagttttcatatagagaacatattattgaatcatcattttaaaaattccttttgccaatcttttttatactgaggtaaaatygacataaaatttatcattttaaagtgtacaatacagtggcatttggtaatacacatgttatgcaacgttaactctacctggctcctaaatgttttcatca

SEQ ID NO: 426134 - DNA, 201 bp, Homo sapiens
gcaaacctacttttctgtctctatgaatttacctattatggatattttgtataaattgaattatacaataagtgacctttatgtttggcttcgttcgcttmgcatactatttttcgatattcaaccatgttgtagtatgtatcagttttatttgaataactcaattctttttgttgtatagctaaaagttgattcctaggt

SEQ ID NO: 426135 - DNA, 201 bp, Homo sapiens
tgcagctccgccccatctaatttacattattgatgtcgcaaattccatctttgtacatagtttacatattaacatggatttatacatttttatgtatttgktttttaaatcctgtagaaaataaaaagtcaacacaccaatattaaaataatactggtttttatatttgtccatgtgcttacctttatcagtgttctttac

SEQ ID NO: 426136 - DNA, 201 bp, Homo sapiens
aattccatctttgtacatagtttacatattaacatggatttatacatttttatgtatttggtttttaaatcctgtagaaaataaaaagtcaacacaccaawattaaaataatactggtttttatatttgtccatgtgcttacctttatcagtgttctttacatctttatacgggtttgagttactgtcttgtgtcctttag

SEQ ID NO: 426137 - DNA, 201 bp, Homo sapiens
gtcaaaagtttaaggtcttctcaggtcttttctgagtatacatgtttcctatgcctgtgtgaaatgttctcaatttccctatataaacagctacttcttcttttttttttttttttgagatggagtctcgctctgtcacccaggctggagtgcagtcatctcagctcactgcatcctccacctcccaggttcaaacaattc

SEQ ID NO: 426138 - DNA, 201 bp, Homo sapiens
tgttatttccccatttccaaattctccagggagatggaatgtcaaagatagtatgactgtagcacctaaatcctgggttccagaagcagagaagagaatayactgaagctgtagaaaggcctattagtccatgtcagagattaactggatgcgaggaccatttctgggatggtgtatacagaactggagaactggataggg

SEQ ID NO: 426139 - DNA, 201 bp, Homo sapiens
gttatctttcatctttttcataaaagccattatataataggtgtgaagtgacatctcactgtggttttgatttgcattactctaataattagtgtgagcatttttttttttcatgtaccgaatgtcttttgagaaaggtctcttcattcctttgcccattttaaaatcaggtggttttcttgctcttgagttgtttgagtt

SEQ ID NO: 426140 - DNA, 201 bp, Homo sapiens
accactggctcctccagggctggccttttttagtctctctgtagaggttcctgtagctggttggatataggctttcacagaagggtcagtgccttgggtcwggttacaggactgttaatcttgctttgttaagagtaatgttatttccccatttccaaattctccagggagatggaatgtcaaagatagtatgactgtagc

SEQ ID NO: 426141 - DNA, 201 bp, Homo sapiens
gtaatcccagctactcgagaggctgaggcaggagaattgcttaaacccgggaggtggaggttgcggtgagctgagatcatgccattgcactccagccttgmcaatagcaaaactccgtctcaaaaaaagaaaaagaaaaagaaaaaaaagtgagtctcttataggcagtatgtggttgtgacttaaaaaaaaaaaaaaatc

SEQ ID NO: 426142 - DNA, 201 bp, Homo sapiens
gagaatgagaagtctcccactgcccacacattttttcttcagagatttcttttccaagagccccttgaataaaggaagggagggagcactgaatgccccasaaatcagaatgcatggtgcgggaagacgacaggaaatagttctcaaagagatcagaaaataaattggaagcaatttcattaccacaaagaacagacattt

SEQ ID NO: 426143 - DNA, 201 bp, Homo sapiens
ctcacattatacaggagagagtcagaagatcccagtggctggtgtcatcgggccatatttgcccgaagtgcctattccttataggaacccactcccagggytgatgggctacatccttaggaggctttatgcctatgttctcctgaccactggctcctccagggctggccttttttagtctctctgtagaggttcctgtag

SEQ ID NO: 426144 - DNA, 201 bp, Homo sapiens
aaagctacagtgttccaatgacacagggactcctccatgtatgtatgagtgcccagctggctctgtaataaatcttatttttatttattaacttttcttgygcattggcttgatgcatcagttggaagtcagaggccaaacgaagtgaacactgagccaaaggaagttctcagcctttagggaggcagaattcactttaaa

SEQ ID NO: 426145 - DNA, 201 bp, Homo sapiens
ttaggtcaaaacaccttgaaaggagctcagtttaaggaaatcagtggtgtcacagtgccccactagcgtgtaaaagttttcatagtttgactatcggatgygcttagtttcacagctgagtcttaccttgtgatacttttagagcaaaagtcaaatcaaagatgatttaaaaaaacatttcaaagattcataaagaataaa

SEQ ID NO: 426146 - DNA, 201 bp, Homo sapiens
gtatgtaaaagctatatccgacccaaaggccagttaggtcaaaacaccttgaaaggagctcagtttaaggaaatcagtggtgtcacagtgccccactagcrtgtaaaagttttcatagtttgactatcggatgtgcttagtttcacagctgagtcttaccttgtgatacttttagagcaaaagtcaaatcaaagatgattt

SEQ ID NO: 426147 - DNA, 201 bp, Homo sapiens
atccatattttcttgtactttgttgaacttaagaggattagtctaaattatttgtcatttcacaggtctccatttcttctgagtctgttactggagctttsatatccaatgtacaccagaaactttgctaattccacagtaaatgttagaaatgggtttttattgataaaatcagtggcttgctaattagtatgttagaag

SEQ ID NO: 426148 - DNA, 201 bp, Homo sapiens
tgaagcgttctacttagattttcagttcagttactgtattctttatctttagaatttctattgtttttgtttatatttgttaaacttctcattctgttcakatgttgttttccaaatttcatttttctatccatattttcttgtactttgttgaacttaagaggattagtctaaattatttgtcatttcacaggtctccat

SEQ ID NO: 426149 - DNA, 201 bp, Homo sapiens
ttttgatgtcaaagtttacacttttttaaatttgtatctcttattgtagctacagttacaattacttcttgtagctacaacttattgtagctacagttgtytttaatagtttcatcttttaaacctcctaataggaataacattgctttacctgccacctttacaatactagagaattctgactatgaattacttatacca

SEQ ID NO: 426150 - DNA, 201 bp, Homo sapiens
gaatgactttgacgagctgacagaagtaggcttcagatgatcgctaataacaaacttctctgagctaaaggatgaggttcaaacccatcgcaaagaagctraaaaccttgaaaaaagattagatgagtggctaactagaataaacagcatagagaagaccttaaatgacctgatggagctgaaaccatggcacaagaacta

SEQ ID NO: 426151 - DNA, 201 bp, Homo sapiens
agaagctaaaaaccttgaaaaaagattagatgagtggctaactagaataaacagcatagagaagaccttaaatgacctgatggagctgaaaccatggcacragaactacgtcacacatgcacaagcttcagtagccgatttgatcaagtggaagaaagggtatcagtgattcaagatcaaatgaatgaaatgaagcaagaa

SEQ ID NO: 426152 - DNA, 201 bp, Homo sapiens
gatggagctgaaaccatggcacaagaactacgtcacacatgcacaagcttcagtagccgatttgatcaagtggaagaaagggtatcagtgattcaagatcraatgaatgaaatgaagcaagaagagaagtttagagaaaaaagagtaaaaagaaacaaagcctaaaaaagtaaaaaagtaaaacaaagtaaaaaagaaaca

SEQ ID NO: 426153 - DNA, 201 bp, Homo sapiens
aaagagtaaaaagaaacaaagcctaaaaaagtaaaaaagtaaaacaaagtaaaaaagaaacatgggactatgtgaaaacaccaaatctacgtctgattggygtacttgaaagtgatggggagaatggaaccaagttggaaaacactctgcaggatattatccaggagaactcccccaacctaggaaggcaagccaacattc

SEQ ID NO: 426154 - DNA, 201 bp, Homo sapiens
aaatactttacagacaagtaaatgctgagagattttgtcaccaccaggcctgccctacaagagctcctgaaggaagcactaagcatggaaaggaacaaccrgtaccagccactgcaaaaacatgccaaattgtaaagatcactgatgctaggaagaaactgcgtcaactaacgagcaaaataaccagctaacatcacaatg

SEQ ID NO: 426155 - DNA, 201 bp, Homo sapiens
gcaactattttaaaagagcaaacctgggtgtggggagggattaggagtagagtttgggatggcagcctcagaaggacaaacttaggccaaggagggagggrgttggggtggagactgagcttctccagttggaggtctggagctaggactcttcattgaaaccggagagaaggaaaaggagagagtgaggctgacttttta

SEQ ID NO: 426156 - DNA, 201 bp, Homo sapiens
tagtaagaaatctgaaaacccaagtattgatttttccatttgcaggttatcatctctttgaaatgatttaatttttaatcctgaaagtctattctagtagrtacgccttcatcaacataaaataaaacatcattatttttaggccatgttgggtaattcctgcaagtttgaggagagtccactcattctactgtaacactc

SEQ ID NO: 426157 - DNA, 201 bp, Homo sapiens
cagtctgtgttttctctaaaataatctgagttttttggaactctttatttaaatatgtgtgtttttcagtattcaaataagatcaggaagccaattttctrtgtatgaatatgctttaacctaggatttcagtccactctgactgactttctaaactttaacttgggtttttacagtgactatgcattagtgctgactctt

SEQ ID NO: 426158 - DNA, 201 bp, Homo sapiens
agtgcccaattcatagttggtgggctacagggcactgggggaaggaaaacaatgtttccctgtttttttgttttgtttttttcatcttattttctattggwtagtcagctctgaaattaagaagaaaagaaaagacacatcttcagagtacttatttgccctctttattctctgttttactcatttgtttggggcaatatt

SEQ ID NO: 426159 - DNA, 201 bp, Homo sapiens
ctcacctatacaaccctcttcttcatgaaatcttgagggcctattctaacacactctttgggaaatggtacaatatcaatattagtgtattaaaatgctcstaagagtatgctaagatttttgttgtttttggtatattggtactaagggtgttgttgtcatttacctttttaaattttgacatttcgacagtatttatag

SEQ ID NO: 426160 - DNA, 201 bp, Homo sapiens
tgagctgcagatttcacatgtgggtattagttactgctgacaccagacttacttgaaaggagtcactctggccaggtgtcttctctttgcaatttgatctstttgtaagtagctcttcatcagagccagcatttcagtgtttaatttgagccctggccaagtgtccttcaccttcaccttcattagatgcacctatcccac

SEQ ID NO: 426161 - DNA, 201 bp, Homo sapiens
gcagacagtacagaaaaatagcaagcctggaggccccttaagatcaaatccactggtcagctactgagtggttcccagtggtgtccagagatcactggggwctcaccagagaacgtaatgctacctgccatggagctggtctgggttttgatccaggtagactgtaggtgctagtggggagaacattctaaagtgctttat

SEQ ID NO: 426162 - DNA, 201 bp, Homo sapiens
aaaggagggaagaattttaaaaacctgtagctgtcccatattgtctaaagaggcagttattaccataaatccctctggtctctctcatgctcattcaggartgagatgttatgattaatcaatttttcagacagtaaattagacttaacaaattacttctataatgttcaaaaaaagaataataaaatagattgactgaat

SEQ ID NO: 426163 - DNA, 201 bp, Homo sapiens
ctgtatccctgacttttaccttttttattcacagcagaggtaaaaatgccctgaccgtgggaaagaaaggagggaagaattttaaaaacctgtagctgtcycatattgtctaaagaggcagttattaccataaatccctctggtctctctcatgctcattcaggaatgagatgttatgattaatcaatttttcagacagta

SEQ ID NO: 426164 - DNA, 201 bp, Homo sapiens
gactttttaaaaataagaaaaattaaagaagggtaggaaatattggtcacatctccgcgtgattctaggtcctcacttctgctacccagtaattaaaatamcctgcgttatcctttagaaattacacgcctgtgtctttaacaaactgtaagagagaagggggcgggtctcgggaacggcgaaggctctgattggccctcc

SEQ ID NO: 426165 - DNA, 201 bp, Homo sapiens
tttactatgtaattggcattttttaatgtattttggtttgcttcttaaaaagaggtgaagaatcctaacggtattcacatgtgccgtgttactcctttgtkattatacacaagtgcgttcagggtaatgatgagagcaaacggtggtgtatggtaaggacgtctttaaactgttagtgcttagagaatttggggacctagg

SEQ ID NO: 426166 - DNA, 201 bp, Homo sapiens
aggagaatcgcttgaatccaggaggcggaggttgcagtgagccaaaatcgtgccactgtactccagcctgagcaacaaagggagactgtctccaaaaaaawaaataaataaataaacctttatggccagaataccattcatatcctcatttcaccgataagaaaaatgaggcaaagcaaggctgagtacttcattcaaggt

SEQ ID NO: 426167 - DNA, 201 bp, Homo sapiens
aatgtgattttgttgaagaaatggaaatgcacatggtcaacattcagcacaaaattgagaaacaattacaaaggaacatgttagaaattatcaacctgatatagaaagacaggtggtcatacttgcagtcagagaatactttcacttcttattttttcataaatctgaaaagaagaaaacataataattgatgagccatta

SEQ ID NO: 426168 - DNA, 201 bp, Homo sapiens
atgtgattttgttgaagaaatggaaatgcacatggtcaacattcagcacaaaattgagaaacaattacaaaggaacatgttagaaattatcaacctgatatagaaagacaggtggtcatacttgcagtcagagaatactttcacttcttattttttcataaatctgaaaagaagaaaacataataattgatgagccattaa

SEQ ID NO: 426169 - DNA, 201 bp, Homo sapiens
tgtgattttgttgaagaaatggaaatgcacatggtcaacattcagcacaaaattgagaaacaattacaaaggaacatgttagaaattatcaacctgatatagaaagacaggtggtcatacttgcagtcagagaatactttcacttcttattttttcataaatctgaaaagaagaaaacataataattgatgagccattaac

SEQ ID NO: 426170 - DNA, 201 bp, Homo sapiens
gtgattttgttgaagaaatggaaatgcacatggtcaacattcagcacaaaattgagaaacaattacaaaggaacatgttagaaattatcaacctgatatagaaagacaggtggtcatacttgcagtcagagaatactttcacttcttattttttcataaatctgaaaagaagaaaacataataattgatgagccattaacg

SEQ ID NO: 426171 - DNA, 201 bp, Homo sapiens
gctaatggttttcaaggcaaggttcctaatgtctcctaatcgaacactgttaaaaagctattattcccacataaaatagactgcctcctccagtgttttgmtaagtaaaatgctaccttgcgccagtgtttagacagtctaaataacgtaaagctctgagttgtataagaaactaaaactgattcaaccccataaaatcac

SEQ ID NO: 426172 - DNA, 201 bp, Homo sapiens
tgttttacaactgaaattatcttggcttttattttaaaattgaagcagagggtatgaaatagtgaagagattggttaacatgaacttttaatagaactcaracgtcatttccactgcagcctacatatttacacctgtgagttgtcatagtgcaattttacaagctgtatccctgacttttaccttttttattcacagcag

SEQ ID NO: 426173 - DNA, 201 bp, Homo sapiens
gtcttcagagcagtactctccttggaatgttctgcagtaatggaaatgttgttatttccatcgcgacagccactagccacatgtggctattgaacattctraatgtggctagcatgactaagattgaattttaaattgtgtttacttttaattaacttatattactgtagacatttatggttagagggtatcatactggac

SEQ ID NO: 426174 - DNA, 201 bp, Homo sapiens
attacttagtgtgtctagaggaaaaaaactgaacattccactccagagctgagaagcttttaatataaaacctgtcaccaagctcgaccaaaatgaaagaygaaacaaaacagtgatttcccccaaagtttaaagtgtgttccttccatagtagctgacttgcataagacttgccaatacaaaaactgttccatactcacc

SEQ ID NO: 426175 - DNA, 201 bp, Homo sapiens
caaagctaatttgcctttgcctggggtgttcagcttgaaagaataaagctcatttggtttagttaaatgtcttactctactgtgcctatgcttttagctgygttactaagcaagggaaaaataacagtttctctgagccagagaagacttgatcacagttctccaagcatcgtgatagcaatgcttaaccccaggaagatt

SEQ ID NO: 426176 - DNA, 201 bp, Homo sapiens
tctcagaggtcaaactaccaaagatggttactttcctaaactgacttccctctgtgatcttctcccctacttgctggttcctgaggcttccccttttggtmtctgatgaaaagggtggggctttgatgaccctgctgtgccatgtctatgactatgcatgcatctggggccaggtgatgtggaggacagagaagtaaagca

SEQ ID NO: 426177 - DNA, 201 bp, Homo sapiens
aatcgtgccactgtactccagcctgagcaacaaagggagactgtctccaaaaaaaaaaataaataaataaacctttatggccagaataccattcatatccycatttcaccgataagaaaaatgaggcaaagcaaggctgagtacttcattcaaggttatagagctagtgacaatgttaaggttcaacccaaacaagcctgg

SEQ ID NO: 426178 - DNA, 201 bp, Homo sapiens
gagcaacaaagggagactgtctccaaaaaaaaaaataaataaataaacctttatggccagaataccattcatatcctcatttcaccgataagaaaaatgargcaaagcaaggctgagtacttcattcaaggttatagagctagtgacaatgttaaggttcaacccaaacaagcctggctcttgagtcctgctctttaccct

SEQ ID NO: 426179 - DNA, 201 bp, Homo sapiens
aagagagaagggggcgggtctcgggaacggcgaaggctctgattggccctcctggcaggaactgggcggtaaaatagcccttctgttactgtccggggctrcggggtgagaggccagggccgagaagggcttcaggacgcgggaggcgcacttgcttcaagtcgcgggcgtgggaacggggttgcaaaacggggcctcttt

SEQ ID NO: 426180 - DNA, 201 bp, Homo sapiens
taatgtattttggtttgcttcttaaaaagaggtgaagaatcctaacggtattcacatgtgccgtgttactcctttgtgattatacacaagtgcgttcaggrtaatgatgagagcaaacggtggtgtatggtaaggacgtctttaaactgttagtgcttagagaatttggggacctaggaaacctgaagttctttgtaccgg

SEQ ID NO: 426181 - DNA, 201 bp, Homo sapiens
gagatggggtttctccatgttggtcagactggtctcgaactcctaacctcaggttatccgcccacctcggcctcccaaaatgctaggattacaggcattarccactgtgcccggccttcagtgactttttaagacactgattcagtgtgtgcagaagtttaaaattatttttcatttgcctttaagaagaataacgtaatg

SEQ ID NO: 426182 - DNA, 201 bp, Homo sapiens
gtgcattgatgtcaaaaaaaggtgagaaagagaaaaatcaaagaagaggctgggcgcagtggctcacacctgtaatcccagcactttgggaggccgaggcrggtggatcacgaggtcaagagatcaagaccatcctggccaacactgtgcaaccccatctttactaaaactacaaaaattagctgggcatggtggctcata

SEQ ID NO: 426183 - DNA, 201 bp, Homo sapiens
ttacacgcctgtgtctttaacaaactgtaagagagaagggggcgggtctcgggaacggcgaaggctctgattggccctcctggcaggaactgggcggtaamatagcccttctgttactgtccggggctgcggggtgagaggccagggccgagaagggcttcaggacgcgggaggcgcacttgcttcaagtcgcgggcgtgg

SEQ ID NO: 426184 - DNA, 201 bp, Homo sapiens
tgagttttcctcttgattgccacattgtaataatatataaggctcaaacttacagatctttttctaatatatatggagtttctattattttgttattcctkgccaaaaaaaaaaatcactagttaattctagtactgattacaaaagaatgacttaaacttctaaattggccattcacatgtactcatattattattgtga

SEQ ID NO: 426185 - DNA, 201 bp, Homo sapiens
taaataaagtaaaaaccaggaggcattcacggggccggggctaatcagaagtctgtgtagaggattagcctacaagatggagtcacttttatctccacagkgtactccatagcactgacaatccgttccgtaaagtactatttataatgagcctgagaggtccttatgaccccctgatgtagaggctgaattagagacctg

SEQ ID NO: 426186 - DNA, 201 bp, Homo sapiens
gagacggctcgatggccctggagctggaggaagggggatacctgggcgccggccgccgccctcgcaactcggccgaggcccctatctcaacctagtttctstttttcccctgttctgcaggcttgcttccggcgtcatggctcaaagggccttcccgaatccttatgctgattataacaaatccctggccgaaggctactt

SEQ ID NO: 426187 - DNA, 201 bp, Homo sapiens
cacaaggcatttggacagtgagcctcaatttttatgtctgctaaaggatctcttctgttcactttttgggggatttttggggggataaatttaccagtgtctataaaatattttgaaattttccaagcaatattttatctgttctttgtttccagggagattgatttggattttgattcacaacaccttaaagttttgtgt

SEQ ID NO: 426188 - DNA, 201 bp, Homo sapiens
cctgaatgagaaagacttgtgatacactatctcatttaatccccaaagtaccttttgaaattggcgtggcagttattattatcctgactttatggaggtawttgaaacataaagaagttatgagttgagcaagatcagctaatagcgggtaaggatgtagacaggctcattcattgagaaacatttgtgaagcccgtattc

SEQ ID NO: 426189 - DNA, 201 bp, Homo sapiens
ataagaaactaaaactgattcaaccccataaaatcacagtgttaataccttctcctcccattatgttatagctttccaagtatcacttattcataactgcmgttttattaccaagaaatgcattcacaaatacaataaaaatatttggtgttgtatgtcaaagcaatgtttacataattatatgtagatttttatgttact

SEQ ID NO: 426190 - DNA, 201 bp, Homo sapiens
ctataaaatattttgaaattttccaagcaatattttatctgttctttgtttccagggagattgatttggattttgattcacaacaccttaaagttttgtgttttttttttttcattcagtaagtctttgcgtaaagcctgccacagaaagtaagtattataggaatgtcgaatcataattttcctagagctaagtgtaact

SEQ ID NO: 426191 - DNA, 201 bp, Homo sapiens
ttctaatatatatggagtttctattattttgttattccttgccaaaaaaaaaaatcactagttaattctagtactgattacaaaagaatgacttaaacttytaaattggccattcacatgtactcatattattattgtgagttactttgctttaggaggaaaaaaaaggggattgatttcaagtttgaattaagtttgaca

SEQ ID NO: 426192 - DNA, 201 bp, Homo sapiens
attctctgccagacactgtgctggacgtgggtttatgatgctaagtttgatattctttctattctgcttaaggctcttgatatacatgaatttgttttgcytttctttggctacttcattttttttaaatccttttttttaaataagagcaattagatgtttctttagggaatttaccttgctgcagcttgaatactaaaa

SEQ ID NO: 426193 - DNA, 201 bp, Homo sapiens
ttttgtctcccccaaaacttaactactaatagcttgctgttgaggaagccttcctgataacataaatagttgattaacacatattttgtgtgttacatttaatctgttctgtatttttacaataaggtagaaaaaagaaaatgttaagaaaatcataaggaagggaaaatacatttactgttcattgagtggaagtggatc

SEQ ID NO: 426194 - DNA, 201 bp, Homo sapiens
agagacaataagggaaaatgctagcccttatttcattttttttcccactcttaactgtgacgattcttaggggaaatgatgatcagctcacacttaaaaaraaaaatacatacaggactctagggacttctgttctgaaagacatgacccaatcttctgtaaccgactcacaaagttaatgaggctaaaattggcatgtat

SEQ ID NO: 426195 - DNA, 201 bp, Homo sapiens
gtcggacgtttttgctttttcatttctctaaaaatatctgtacgttggcaattcttccaccatttgctttagtgtcagtgcccataccatatacgaatccrtgtcagaaatgaagtaaaaagcagtattgaataatcaaaacccttttgccagactgtctaacatcagttcattttctggtgctgcttcttctatatcttc

SEQ ID NO: 426196 - DNA, 201 bp, Homo sapiens
catcaagttgctttctgttaattcctctggtgtggcgtctattagctcttgaatttctccaagattcatatcttgaaatccttcatccccatcccccacctttttttttgccatatccacatctctctcatgatctccttgattggtgcctgtgaagtcatgcacactatctgaacccagttttctccagcaggaatttat

SEQ ID NO: 426197 - DNA, 201 bp, Homo sapiens
taacttgcactctaaatgcaagtcattatagtgtttcaagatgctgttcctctgatctaccaaatgtatagcctttgagctgcagatttcacatgtgggtrttagttactgctgacaccagacttacttgaaaggagtcactctggccaggtgtcttctctttgcaatttgatctgtttgtaagtagctcttcatcagagc

SEQ ID NO: 426198 - DNA, 201 bp, Homo sapiens
atgacacatcatttcgacatcaagaagaatacattaacacaataaccagagtacaacaaagactaataataggctgtgtgtctctttattggccagagccktagagaccttattatttaatagagttgtcataatgaggaaactgaggacaagtaagtggttggcttatgctggttcgtagagttgcttactaatagagct

SEQ ID NO: 426199 - DNA, 201 bp, Homo sapiens
tgactctttggtataagccataaaatattttccttcctatcaatttatctgaactttggtcttttcactaaattgtacagtattctacttctgtttaaaamggggagatgagaaagggaatactatctaaccaataacttgaacaaaaacactaaactaagcatttaatagaaatgctttttattgaggaggtattatcca

SEQ ID NO: 426200 - DNA, 201 bp, Homo sapiens
tgggattcactgattttttttgaagggtttttcatgtctttatctccttcagttctgctctcatcttacttatttcttgtcttctgctagcttttgaattygtttgctattgcttctctagttcttttaattgtgatgttaaggtgtcgattttagatctttccttctttctcttgtgggcatttagtgctataaatttcc

SEQ ID NO: 426201 - DNA, 201 bp, Homo sapiens
atgtttggtaaatggcagggctgtgacttgaacttgtctggctccattctttctccagtcttccaccgggatataaggctgaacacctcactagtgatctyttctaatgttgaactgcagtgtatgtaaacgtagatagattcacacttcatttaaatcattgccgttaatattgtaatgttgttaatgttaaaaaatgga

SEQ ID NO: 426202 - DNA, 201 bp, Homo sapiens
ttgcttctctagttcttttaattgtgatgttaaggtgtcgattttagatctttccttctttctcttgtgggcatttagtgctataaatttccctctaaacrctgctttagctgtatgccagagattctggtacattgtgtctttgttttcattggtttcaaagaacttatttatttctgccttaatttcgttatttaccca

SEQ ID NO: 426203 - DNA, 201 bp, Homo sapiens
ttaaaaatcaattagcacatgtaataccacagtcccaatactggtagtcatcaggtgactcccttttatggagccaggcacatgttgggcattttgcagaygccctcataaatcattcagcaaaaacatacaggcactactaccttcatgtcatagccgaggagactgaggctcaggagcttatgtttggtaaatggcagg

SEQ ID NO: 426204 - DNA, 201 bp, Homo sapiens
ctgtctaatattgacagtggggtgttacagtctcccactatttttgtgtgggagtctaagtctctttgtaggtctctaagaacttgctttatgaatctggrtgctcctgtattgggtgcatatacatttaggatattcagctcttcttgttgcattgatccctttaccattatgtaatggccttctttgtctcttttgatc

SEQ ID NO: 426205 - DNA, 201 bp, Homo sapiens
aatgtagattcctaaaagctttcaggaaagaagagtcttctgaagtttcaaggttagttagaatcaaacatactagaggccctctccaaagaggattagamagccttatcgaaatttcattgaaacaaataatcaggagacatagttggttagtgactagacagcctcatcaaactttcattgaaacaaataatcaggaga

SEQ ID NO: 426206 - DNA, 201 bp, Homo sapiens
ttttcaatccatatctaaactattacttgccttagacccttgatctgctaaagaattagtaaaaatgtcaacatttacatccctgaatgagaaagacttgkgatacactatctcatttaatccccaaagtaccttttgaaattggcgtggcagttattattatcctgactttatggaggtatttgaaacataaagaagtta

SEQ ID NO: 426207 - DNA, 201 bp, Homo sapiens
tggaggatctcctttggtggtgcctagaggagtttatgcttttctttgacaggcgaactcttgtaaactgtaatgcaaagagctcaagatcctctacgccytcccccttctaggctaaatacagtcccacacacttctctgatggagaattaaactgtgcctttccctggctataagctggtgtctaatttgtcatgttcc

SEQ ID NO: 426208 - DNA, 201 bp, Homo sapiens
ataattcgtatatacacaatgctttgttggtaagggtgatatgtacaggtttaaatagaaatgtaacagaagcaaataattgcttaagaaagtactttacrcttactttacaaactgttttacaactgaaattatcttggcttttattttaaaattgaagcagagggtatgaaatagtgaagagattggttaacatgaact

SEQ ID NO: 426209 - DNA, 201 bp, Homo sapiens
actttttccactggaaagtgtaacaaaaagaaggggtgggagtcttgctccacccaaaatgatttgggaatcattatattggatcattttctgaattgacrtattcttcaaaacacctttttttaaatacatgcctatgctacatttcttaggggctagacattacatagtataactttaaaaacacattacttagtgtgt

SEQ ID NO: 426210 - DNA, 201 bp, Homo sapiens
tttgctgcccactcccctccccccaaaaagggaacattctcagaggtcaaactaccaaagatggttactttcctaaactgacttccctctgtgatcttctmccctacttgctggttcctgaggcttccccttttggtctctgatgaaaagggtggggctttgatgaccctgctgtgccatgtctatgactatgcatgcatc

SEQ ID NO: 426211 - DNA, 201 bp, Homo sapiens
agaatatagcatgtacaacttgcagttaagtcctagtaatcatcgaacccaactaatgaattttagtgatttgaattcaaatccagaaaaaaagggatatrcttcctttattaccctaaactgtattgttttaataagatgctctgagcaatactgtattttagataaatatttgaaaggtatttgctacctactttgaat

SEQ ID NO: 426212 - DNA, 201 bp, Homo sapiens
gaggcacaagaatcacttgaacccgggaggcagaggttgcagtgagccaagatcacaccattgtactccagcctgggtgacaagagtgaaactccatctcaaaaaaaaaaaaaaaaaaaaaaaaagcaggtctcccaggaggttgtagaaagagttctagttcatctgatttaattcatttatccctaaaaccataggtct

SEQ ID NO: 426213 - DNA, 201 bp, Homo sapiens
gaggctgactttttaactgaactccaaaattctctgagcaatagaatgggcctaatatgtaccaggtgggatttaattttaaatgaaagaaaaatgtttcmgatagcagggactgttaaaacattgaaattgaatgttgtggatctcctgctgtgttggttttcagtattttttagagctttgttatccagtattatagtc

SEQ ID NO: 426214 - DNA, 201 bp, Homo sapiens
tgctgtgtttttcagctccatcaggtcgtttatgttcttctcaaaactggttattctagttagcaattcctctaagcttttttcaagggtcttaacttccrtgcatttggttagaacatgctcctttagctcaggggagtttgttattacccaccttctgaagcctacttccgtcaatttgtcaaattcattctccaccca

SEQ ID NO: 426215 - DNA, 201 bp, Homo sapiens
cttttcttaaagggatctataactccccaaaaggagggtgtgtgtgtgtatgttcatgttcaaattgtcctacaaatggctggggagtggaggggaggacratacattgcattaatttgttctactgcctgatacatatcagatctgttttcatcccacccacttctacacatcagtgccacaacatgaataaagtgtgtt

SEQ ID NO: 426216 - DNA, 201 bp, Homo sapiens
ccactttttgatggagttatgtttttttcttgtaaatttgtagattctggatattagccctttgtcagatggatagattgcaaaaattttctcccattctrtaggttgcatgttcactctgatgatagtttcttctgatattcagaagctctttagtttaattagatcccatttgtcaattttggcttttgttgccattgc

SEQ ID NO: 426217 - DNA, 201 bp, Homo sapiens
tggcatctgtcagaaaaaaatagaaaagaaaaaaggacttttagagacttcagattatagctagagtttgaatgatttggtggtgtaccacaagcaatcartattctcacagaggtcacctttattaaatgcagaatgtgccaaacagaaagtaacttcccttcataaggctgagagattctcattattcttgatctcttg

SEQ ID NO: 426218 - DNA, 201 bp, Homo sapiens
cacctgctcccagcatgagattgctttgtagcttggggcacaagagaactgagaaaaggaaaataaagaaaaatggagggttaacccattctctctgataytaggagttctctttgttcagacagcactagagggcttcttctgggtctctataagcctacttgtgcctacttttgggttttgtgctgtactgagttcaga

SEQ ID NO: 426219 - DNA, 201 bp, Homo sapiens
atttttgttgtttttggtatattggtactaagggtgttgttgtcatttacctttttaaattttgacatttcgacagtatttatagccagtaggcttgttamggttaaaaatatagtatgtgaatataataggaaaatacactatttgtggctatagctttgatttttttcagattttttattttatacaaaacagaaaaag

SEQ ID NO: 426220 - DNA, 201 bp, Homo sapiens
caccgcacccggctaattttttgtatttttagtagagacggggtttcaccttgttagccagaatggtctcgatctcctgacctcatgatccacccgcctcrgcctcccaaagtgctgggattacaggcgtgagccaccgcgcccggcctgtacgcataagttttaataaattttagctttttataatagatttgtgtatat

SEQ ID NO: 426221 - DNA, 201 bp, Homo sapiens
tagtggtttaaataactgtatttttctcttgtaaaagaaggccagaaagagttggtcagtccaggcctgatagtgtagcttcaggatgttaataggaaccscagctccttcctttctgctccatcattcctcagcctctagcttctacctcttgctcaaggtggctgctgaagatccagtcattacatcagcttttcaggc

SEQ ID NO: 426222 - DNA, 201 bp, Homo sapiens
tagaaggtacttattagaattctgctaaagtacttctgagtgttaaacatgcttagtaaaatgattattacaattagttaggactttacaattttattttrttgtttcattccccagtagtatgtagatggtctgataattaacgctagttcagataagattaggatttagaataggattattccaaataattcgtatata

SEQ ID NO: 426223 - DNA, 201 bp, Homo sapiens
attagttactgctgacaccagacttacttgaaaggagtcactctggccaggtgtcttctctttgcaatttgatctgtttgtaagtagctcttcatcagagccagcatttcagtgtttaatttgagccctggccaagtgtccttcaccttcaccttcattagatgcacctatcccacccagccagaggtgttaggacaagta

SEQ ID NO: 426224 - DNA, 201 bp, Homo sapiens
aagacacatcttcagagtacttatttgccctctttattctctgttttactcatttgtttggggcaatattattaaattaaaggtgtggagtcactagtttyctccccagatcatctgtgaaagcactggagtatttgaaagccacggcccacaatgctcagctttagtcagacagctgggcatatgtcctactcagtggat

SEQ ID NO: 426225 - DNA, 201 bp, Homo sapiens
aattatgaagaattattaaatgtttgtactaatagactttaattgttgccttaccagagtttattaagcactctttcggagttctaagaaccctggctgcsgtgcaactctgcatgcatcgctcttaggctccactgcgcgtgctaacactccagcaacgttttaaccagtgactgtccctgagttgaccatggtgtttga

SEQ ID NO: 426226 - DNA, 201 bp, Homo sapiens
gctttggggccagtacttagaatgatgaagcgctctggctttctggtccagaaatatataacctcccttcttgtagtgtgacgagtcagtaatggacatcttttttttttttttaataagcagaaaagggatttaaaaatatttattgtggtaaaatatacataacataaaatttgcaatttaaccatttttaaatgtaca

SEQ ID NO: 426227 - DNA, 201 bp, Homo sapiens
tgcattggccagaacatagtcacgtagtcactcttgttagcaaggaagggtagtaaatgcagtcttttagcttgggttctgttaatagaggaagaggagartgaactttgggataagacctagtagtctttgctgtaacttctatataacaagaaaaatgatttttttcttgacttctatgttttgcacaaggcatttgga

SEQ ID NO: 426228 - DNA, 201 bp, Homo sapiens
atccatcttgagttaatttttgtataaagtataaggaagaggtccagtttcagttttctgtatatggctggccagttatcccagcaccatttattaagtarggaatcctttccccattgcttatttttgtcaggtttgtcaaagatcagatggctgtacgtgtgtggtgttatttctgaggcctctgttctgttctattgg

SEQ ID NO: 426229 - DNA, 201 bp, Homo sapiens
taaataatagacgattactattaggtggaaaattactgtgagccagtttatcattggcagtctgttttagtatttaactaaaaattttatttaaaacatgyataagttacaacggtattttataaattttgttaatgtgatgttgttgtttaagaatagaaaataaattgtttagtcttccaggtggaaaaatatgtccta

SEQ ID NO: 426230 - DNA, 201 bp, Homo sapiens
ctcggaccgccgagacggctcgatggccctggagctggaggaagggggatacctgggcgccggccgccgccctcgcaactcggccgaggcccctatctcarcctagtttctgtttttcccctgttctgcaggcttgcttccggcgtcatggctcaaagggccttcccgaatccttatgctgattataacaaatccctggcc

SEQ ID NO: 426231 - DNA, 201 bp, Homo sapiens
tgtgcctttcttcttgaataaccttgtagatacgtgactcagacagctcattaaattcctcccatgctgtgtactctttcaaaccatccttttctctgcattaatctcctttctctgatgtgaaggtagtgtttgatttttcagagtaatttgtatagacaacctcttaacttttggggttgtctctggaagaaatcacta

SEQ ID NO: 426232 - DNA, 201 bp, Homo sapiens
cggggtgagaggccagggccgagaagggcttcaggacgcgggaggcgcacttgcttcaagtcgcgggcgtgggaacggggttgcaaaacggggcctctttrtccgggtgggttaagggccctggcagctttttcgcgaaggcgccatgtcctagcagttgggccgcagtgggcccgaggtccactcggaccgccgagacgg

SEQ ID NO: 426233 - DNA, 201 bp, Homo sapiens
tatccccccaccccccgccaaattttatctattgcgaacagcagaaataccagcatgttcagatctaaaagcagtctgtttcttctccaggttaaaaaaawatatacttcttatgactctggacttaaatttgactttttaaaaataagaaaaattaaagaagggtaggaaatattggtcacatctccgcgtgattctagg

SEQ ID NO: 426234 - DNA, 201 bp, Homo sapiens
gggctgcggggtgagaggccagggccgagaagggcttcaggacgcgggaggcgcacttgcttcaagtcgcgggcgtgggaacggggttgcaaaacggggcytctttgtccgggtgggttaagggccctggcagctttttcgcgaaggcgccatgtcctagcagttgggccgcagtgggcccgaggtccactcggaccgccg

SEQ ID NO: 426235 - DNA, 201 bp, Homo sapiens
ttgaaggccaggcaagatgataaattatatatgatctatatacagtagatgacgtgttctcaatatagatgcactcttctatctagctgagatttataggscttttgtattaacattgaagtatattttatcctactaaatgtattttcaagtctagttgaaatcttaacctctttgcagaaattgttaaataatgggagt

SEQ ID NO: 426236 - DNA, 201 bp, Homo sapiens
tgttactgtccggggctgcggggtgagaggccagggccgagaagggcttcaggacgcgggaggcgcacttgcttcaagtcgcgggcgtgggaacggggttrcaaaacggggcctctttgtccgggtgggttaagggccctggcagctttttcgcgaaggcgccatgtcctagcagttgggccgcagtgggcccgaggtcca

SEQ ID NO: 426237 - DNA, 201 bp, Homo sapiens
gagtcagaaccaccaaatagaaagcagctcggtggctcacacctgtaaatctcagcactttgggaggctgaggcaggcggatcacctgaggtcaggagttygagaccagcctggctaacatggtctactaaaatgacaaaaaattagccaggtgtggtggcaggcgcctataatcccagctactttggaggctgaggcaca

SEQ ID NO: 426238 - DNA, 201 bp, Homo sapiens
gcgggtggatcacgaggtcaagagatcaagaccatcctggccaacactgtgcaaccccatctttactaaaactacaaaaattagctgggcatggtggctcrtacctgtagtcccagctactcaggaggctgaggcaggagaatcacttgaacctgggaggtggagattgcagtgagatgagatcactccactgcactccag

SEQ ID NO: 426239 - DNA, 201 bp, Homo sapiens
caccctccagtgcggccttgatccagaccttagggacgaggccatcactggtgggcaccctttgttgatgtttgtgtgtttgaatagactgaaatgctgtkactttttttgtcaataaagatatgggggaaaaagaaccatcctatgaaatggagtcatttggtataataacttttgcctctttctctttcttcaggaatg

SEQ ID NO: 426240 - DNA, 201 bp, Homo sapiens
accccatctttactaaaactacaaaaattagctgggcatggtggctcatacctgtagtcccagctactcaggaggctgaggcaggagaatcacttgaaccygggaggtggagattgcagtgagatgagatcactccactgcactccagcctggtgatggagcaagactccatctcaaaaaaaaaaaaaaaaaaaaaaatca

SEQ ID NO: 426241 - DNA, 201 bp, Homo sapiens
aatttttaaatgaaatcacaaaagcttaaaataaaggcatccaataggtggaaaaattggatgaaatccaaaacctcttaatgaccttccatttccccttrgccatgctttttttctggtttaaatatactgagacctaggaaggtttatttgcttcagcagaactaataatttccttctcatttttagcccagccttcaa

SEQ ID NO: 426242 - DNA, 201 bp, Homo sapiens
gggcatggtggctcatacctgtagtcccagctactcaggaggctgaggcaggagaatcacttgaacctgggaggtggagattgcagtgagatgagatcackccactgcactccagcctggtgatggagcaagactccatctcaaaaaaaaaaaaaaaaaaaaaaatcaaagaagaaaagttgaagaactgcaattaattta

SEQ ID NO: 426243 - DNA, 201 bp, Homo sapiens
tacacgcctgtgtctttaacaaactgtaagagagaagggggcgggtctcgggaacggcgaaggctctgattggccctcctggcaggaactgggcggtaaawtagcccttctgttactgtccggggctgcggggtgagaggccagggccgagaagggcttcaggacgcgggaggcgcacttgcttcaagtcgcgggcgtggg

SEQ ID NO: 426244 - DNA, 201 bp, Homo sapiens
gccacattttgagggagacacaaggtgcagagcatgcttgctccatcttacctgaaatcagaactgaaagtaactttttctgagaagctcaactgagtctrtccgtagggattgaatgaactataattcagtggggttctatgcaagtattacaaagaatgtgactactctgtgtgctgttatggaaccattgtcaagatg

SEQ ID NO: 426245 - DNA, 201 bp, Homo sapiens
ctgaggcaggagaatcacttgaacctgggaggtggagattgcagtgagatgagatcactccactgcactccagcctggtgatggagcaagactccatctcaaaaaaaaaaaaaaaaaaaaaaatcaaagaagaaaagttgaagaactgcaattaatttaccaaatgtagagaaacaaaagacagctgtgtaatctggaaga

SEQ ID NO: 426246 - DNA, 201 bp, Homo sapiens
ttagttaagcacctccagtgagccttgtagatctaaaatctgaacatgattttccctaccagagtacatgaagggagtctttaaatgcccttgaactgcaygaaaatgcctcacagagctaaagtaccgtggcacaaagctttttacatcactgtaagctggtcgtaaaacaaatgaaaaatgttgaggaataatctgtag

SEQ ID NO: 426247 - DNA, 201 bp, Homo sapiens
aacgtttcaagtagggaaaaatgtatttgaacttagattggaacacccaagtgccccctcctttgggaagttcctgtctccatgtcattctaaactaatgrgtgttagttaagcacctccagtgagccttgtagatctaaaatctgaacatgattttccctaccagagtacatgaagggagtctttaaatgcccttgaact

SEQ ID NO: 426248 - DNA, 201 bp, Homo sapiens
tgttaaaaagctattattcccacataaaatagactgcctcctccagtgttttgataagtaaaatgctaccttgcgccagtgtttagacagtctaaataacrtaaagctctgagttgtataagaaactaaaactgattcaaccccataaaatcacagtgttaataccttctcctcccattatgttatagctttccaagtatc

SEQ ID NO: 426249 - DNA, 201 bp, Homo sapiens
atgatttttttcttgacttctatgttttgcacaaggcatttggacagtgagcctcaatttttatgtctgctaaaggatctcttctgttcactttttggggratttttggggggataaatttaccagtgtctataaaatattttgaaattttccaagcaatattttatctgttctttgtttccagggagattgatttggatt

SEQ ID NO: 426250 - DNA, 201 bp, Homo sapiens
ccttcctttgtggggatgcaggccccctggcagtggccgctgtgctatatcacaagatgaacaatgagaagcaggcagaagattgcatcacacggtaatcrtgtttctatatgaggattattttctagcatcattatgcattaattctgcatgtgttaacaaaagaacattctagtgagtttacttttctcttagcagata

SEQ ID NO: 426251 - DNA, 201 bp, Homo sapiens
ctttgaatttctttagttcacaacaaaccctttcttattaaataattattggtaaatcaattacatttatttggaaccctagtttaatgacacatcatttsgacatcaagaagaatacattaacacaataaccagagtacaacaaagactaataataggctgtgtgtctctttattggccagagccttagagaccttatta

SEQ ID NO: 426252 - DNA, 201 bp, Homo sapiens
cctacacacaaggttttgtacacttgtctacaaaccttaagcattgatgcatctgatcatcagcttgtgggattactaacaccaagccactttgaaagagyagtcaaggttattaactttggcaggaaatgaaaatttggccttaatatacatgtgaaattgaattgtctgtagcacaaagctttggagattacccatgca

SEQ ID NO: 426253 - DNA, 201 bp, Homo sapiens
  misc_feature (1)...(201): n = A,T,C or G
atctgaaagaaaaacaatcactgggcttgtgtttaatcactttttattttctcagatctccatcatgtcattatctggctttggtgcttacataacttaantaggagagttcaggcagcaatgggaataggagggcaaaatgaaaggttaacaatttaaatggatcacctgcagatgcgtgatatggatggagatgaagcc

SEQ ID NO: 426254 - DNA, 201 bp, Homo sapiens
gaagttgtgtttttatttcccaccttgccaaccatccctgagtctttggtattgattcaaaggtggtggtgtatgcatggttattgtcaacagttgaggaycataaagatcaggtttaagacatttggccacaagcagtcctcccttttttctgtcattaggacacattctattattttctattatataaaatactgatga

SEQ ID NO: 426255 - DNA, 201 bp, Homo sapiens
taacagatagcacataagcatattattagaaatagacagatactagagaaaatggctgaaactgatgaaaatggttgcctctggaaggcaggaacacagtraaccagaggactggtgttttgcatattaaatctttcagtactgtataattttttccatgaagaacatatatattttgataaacattgcatttgaaggcat

SEQ ID NO: 426256 - DNA, 201 bp, Homo sapiens
ttgtctgatcttacgatgccctgccttttactagctactttagaaatagaaaatgtgaagagtgactatttacatgtatactcctttggctgctagaactyatctgtagtcctttattatttacactgaattccaatttcatttctgcttccgctaagtaagagcacctcattcctgtgttttctctactattgagctgta

SEQ ID NO: 426257 - DNA, 201 bp, Homo sapiens
tttgagaagagctgtcttccttaggattaggcctaccaggacatggcaatacatctaaaataacagtggctttaacagaaccgaagtttatttttctcttrtgtaagtaggcaatccatggactggtgtggcagcttcacagtcctccaggattaggtggctttgatctttgaaactttaccaccctcagcacagagcttc

SEQ ID NO: 426258 - DNA, 201 bp, Homo sapiens
attaatggatacaactgtactctttcctcccaaacctgattctccaacagaggggtttgccatctcagtggatggcaccattttccatttagctgttgaarttagtcatcgggaggcattttgacatcttcttctccgccatcccccaccaggttctgctgattttactttctagacaggtatctttccagttcattctga

SEQ ID NO: 426259 - DNA, 201 bp, Homo sapiens
gggaggtggagattgcagtgagatgagatcactccactgcactccagcctggtgatggagcaagactccatctcaaaaaaaaaaaaaaaaaaaaaaatcaaagaagaaaagttgaagaactgcaattaatttaccaaatgtagagaaacaaaagacagctgtgtaatctggaagaaagcatagtctagagactcagtgttt

SEQ ID NO: 426260 - DNA, 201 bp, Homo sapiens
ggaggtggagattgcagtgagatgagatcactccactgcactccagcctggtgatggagcaagactccatctcaaaaaaaaaaaaaaaaaaaaaaatcaaagaagaaaagttgaagaactgcaattaatttaccaaatgtagagaaacaaaagacagctgtgtaatctggaagaaagcatagtctagagactcagtgtttc

SEQ ID NO: 426261 - DNA, 201 bp, Homo sapiens
aatctggaagaaagcatagtctagagactcagtgtttcccattcgctttaaagagtgggcaaggaggaataagcttgcaatccagggaattttaatttgaktttaaggagtggaatttgtcataaaaatggcctcatagcagagattgtgattcagtagatcttgagcagaacccaggaatttgccttttatagccatcag

SEQ ID NO: 426262 - DNA, 201 bp, Homo sapiens
gtctcctaatcgaacactgttaaaaagctattattcccacataaaatagactgcctcctccagtgttttgataagtaaaatgctaccttgcgccagtgttyagacagtctaaataacgtaaagctctgagttgtataagaaactaaaactgattcaaccccataaaatcacagtgttaataccttctcctcccattatgtt

SEQ ID NO: 426263 - DNA, 201 bp, Homo sapiens
actgtctaacatcagttcattttctggtgctgcttcttctatatcttcctcatcctctagcactggttcataagaactcatcttcatcaagttgctttctrttaattcctctggtgtggcgtctattagctcttgaatttctccaagattcatatcttgaaatccttcatccccatcccccacctttttttttgccatatc

SEQ ID NO: 426264 - DNA, 201 bp, Homo sapiens
cactagtttcctccccagatcatctgtgaaagcactggagtatttgaaagccacggcccacaatgctcagctttagtcagacagctgggcatatgtcctaytcagtggattgttgacagttcaggcatggggagagtgctgtgcacagtaacaacagtgctctaaagacaaatgtgattttgttgaagaaatggaaatgca

SEQ ID NO: 426265 - DNA, 201 bp, Homo sapiens
catggtcttggtcagccacaaggcaggaagatctcaacactgctactccagagacccagggcttacataccatagggaaaggcaaccctcaaaaacaggcragacggctatgtgtatcacagcctataatttgtgcattagcaccaaggttcctttgttcttatactaggggcagtaaataaagtaaaaaccaggaggcat

SEQ ID NO: 426266 - DNA, 201 bp, Homo sapiens
ctagtggcactttgtatgtgtcccatggtgttattcaaggtttacaatattgcactaaaaacaattaaaaatatgcaagaatcagaagagattactctttmctgtgatatgtaatttactggagagacagagataatgatctcaagcagagataattcacatcacatgttattttaagtggagcaacacttgatttcacat

SEQ ID NO: 426267 - DNA, 201 bp, Homo sapiens
tgggaggtggagattgcagtgagatgagatcactccactgcactccagcctggtgatggagcaagactccatctcaaaaaaaaaaaaaaaaaaaaaaatcraagaagaaaagttgaagaactgcaattaatttaccaaatgtagagaaacaaaagacagctgtgtaatctggaagaaagcatagtctagagactcagtgtt

SEQ ID NO: 426268 - DNA, 201 bp, Homo sapiens
ttattttaagtggagcaacacttgatttcacatcagcaacaggaggtggctaagaagttattgctgtactacagtatgcactggagttaatttacgaagtyatttttcatctttacattttttgacatctctcttgactgcaggtggcactatgtacagtctgtacgcataagtttttttttttttttttttgagacggag

SEQ ID NO: 426269 - DNA, 201 bp, Homo sapiens
tggcgcaatctcggctcactgcaagctccgcttcccgggttcacgccattctcctgcctcagcctcccgagtagctgggactacaggcgcccgccaccgcrcccggctaattttttgtatttttagtagagacggggtttcaccttgttagccagaatggtctcgatctcctgacctcatgatccacccgcctcagcctcc

SEQ ID NO: 426270 - DNA, 201 bp, Homo sapiens
tacgtttgtattctttcattttatgaatgtatttgtcagttccattgttaagtgaagaaatttaatggagggctaatctgtgaaccgtgactgttctataratagatattatatatgtataaatacatattttgtgtgcatgtatatttttttcaatgtaccatttttaagtatacaccaatacctggttcctttcaaatt

SEQ ID NO: 426271 - DNA, 201 bp, Homo sapiens
agcttaaaataaaggcatccaataggtggaaaaattggatgaaatccaaaacctcttaatgaccttccatttccccttagccatgctttttttctggtttraatatactgagacctaggaaggtttatttgcttcagcagaactaataatttccttctcatttttagcccagccttcaagtgagccaagggaagttacata

SEQ ID NO: 426272 - DNA, 201 bp, Homo sapiens
aggcatccaataggtggaaaaattggatgaaatccaaaacctcttaatgaccttccatttccccttagccatgctttttttctggtttaaatatactgagwcctaggaaggtttatttgcttcagcagaactaataatttccttctcatttttagcccagccttcaagtgagccaagggaagttacatagtttggtcaagc

SEQ ID NO: 426273 - DNA, 201 bp, Homo sapiens
catgggagcgtaatgcatcatgatattgatgtatgacatatgcctgcaataagcattgagttgttcatttttagccttaatcttttcccagtagacttacmggaattatgtgctcatggcttgtgtagcaggggacacattttagttatttaggaaccccattaagagttgttatatatgactctacacatagcagcagac

SEQ ID NO: 426274 - DNA, 201 bp, Homo sapiens
gatcttacgatgccctgccttttactagctactttagaaatagaaaatgtgaagagtgactatttacatgtatactcctttggctgctagaactcatctgwagtcctttattatttacactgaattccaatttcatttctgcttccgctaagtaagagcacctcattcctgtgttttctctactattgagctgtagacgaa

SEQ ID NO: 426275 - DNA, 201 bp, Homo sapiens
aactgagtctatccgtagggattgaatgaactataattcagtggggttctatgcaagtattacaaagaatgtgactactctgtgtgctgttatggaaccaytgtcaagatgtattgttaaatagcaagctgtagaatatttatacatatgtatatttatgcttatgtgtacataaaatctaggaatacacacaaaaaaatg

SEQ ID NO: 426276 - DNA, 201 bp, Homo sapiens
ggatgaaatccaaaacctcttaatgaccttccatttccccttagccatgctttttttctggtttaaatatactgagacctaggaaggtttatttgcttcakcagaactaataatttccttctcatttttagcccagccttcaagtgagccaagggaagttacatagtttggtcaagcccagtgtagactacgtctgccagc

SEQ ID NO: 426277 - DNA, 201 bp, Homo sapiens
gtgcctttccctggctataagctggtgtctaatttgtcatgttccccagtacctcttagcaaaaaagtctttacctcctccaggaagatttttgttcagtkaacttgttattttggttggttttctccctgtagatttgtgaaacaattttaacctctggagaaaacctagctaggaagagaaacttcacggcaaagtctc

SEQ ID NO: 426278 - DNA, 201 bp, Homo sapiens
ttattatttacactgaattccaatttcatttctgcttccgctaagtaagagcacctcattcctgtgttttctctactattgagctgtagacgaactgtttytctaattataaagcaaactgtttgggatattcagggaaactaccccaatgttatgttgtcatttaatgggaaaggctgggatcatatgtatttctatgtt

SEQ ID NO: 426279 - DNA, 201 bp, Homo sapiens; identical to SEQ ID NO: 127601

SEQ ID NO: 426280 - DNA, 201 bp, Homo sapiens; identical to SEQ ID NO: 127810

SEQ ID NO: 426281 - DNA, 201 bp, Homo sapiens; identical to SEQ ID NO: 127853

SEQ ID NO: 426282 - DNA, 201 bp, Homo sapiens
ttgctcaggctggtcttgaacccctggactcaagcaattcgcctgccttggcctcccaaagtgctgggattatagatgtgagccaccaggcccggcttcawacacacttttaaggccaccttcatttgctgtcttaagcagttgaccctattccagcacggataaagtcgattcacctgacttattcaaaaatgggtcacg

SEQ ID NO: 426283 - DNA, 201 bp, Homo sapiens
ttttggaaaacagtttggcaattttcttttctgtcttttttattttctttccttccttctcttctttcatttcctcccctcaccccttttttttctttctytcttttttaaagagacaaggaaggtctcactctatcacccaggctgtagtgccacggcatggtcatagctcactgctgcctccaacccctgggctcaggc

SEQ ID NO: 426284 - DNA, 201 bp, Homo sapiens
ctcagctcactgcagtctccacctcctgggttcaatctattctcctgcctcagcctcttgagtagctgggattacaggcacccaccaccacacctgcctatttttttttttttttttttgtagttttagtagaaacgtggtttcaccatgttggcaggcaggtcttgaactcctgacttccagtgatccccccccgcctca

SEQ ID NO: 426285 - DNA, 201 bp, Homo sapiens
tgcctatttttttttttttttttttgtagttttagtagaaacgtggtttcaccatgttggcaggcaggtcttgaactcctgacttccagtgatcccccccmgcctcagcatcccaaagtgctgggattactggtgtgagccaccgtgcccagaccagttagtgcttcttaatggcattttgcacactgttttgcgtaatat

SEQ ID NO: 426286 - DNA, 201 bp, Homo sapiens
ctggagaaaaggatatccttgttctatagtggcagaaagcctagctgagttatgtcctgcagttctgtggaaaggagaacttactgtaagcaatgaacttrgatgtttagctgaggaggtttttatggaaagtattggaggtgtggcctgatttctggctgcttatagtaaagtgatgaaagagataaattgagggaagaa

SEQ ID NO: 426287 - DNA, 201 bp, Homo sapiens
tggagaaaaggatatccttgttctatagtggcagaaagcctagctgagttatgtcctgcagttctgtggaaaggagaacttactgtaagcaatgaacttgratgtttagctgaggaggtttttatggaaagtattggaggtgtggcctgatttctggctgcttatagtaaagtgatgaaagagataaattgagggaagaac

SEQ ID NO: 426288 - DNA, 201 bp, Homo sapiens
ttttaaaaaccttaactaacatactatactgttttactcatcactactttggattttaattgctacacaacacatctattacagctatccctcattatgayagtttccttgatagctgttgaaattgtactgatactataaaatatgcttacgatggcctcttcatgttagcaatttcaaggaaaaatatttatcaaatag

SEQ ID NO: 426289 - DNA, 201 bp, Homo sapiens
ctatagtggcagaaagcctagctgagttatgtcctgcagttctgtggaaaggagaacttactgtaagcaatgaacttggatgtttagctgaggaggttttyatggaaagtattggaggtgtggcctgatttctggctgcttatagtaaagtgatgaaagagataaattgagggaagaactgttaaacaaaaaggatacagg

SEQ ID NO: 426290 - DNA, 201 bp, Homo sapiens
catgttgctcaggctggtcttgaacccctggactcaagcaattcgcctgccttggcctcccaaagtgctgggattatagatgtgagccaccaggcccggcytcaaacacacttttaaggccaccttcatttgctgtcttaagcagttgaccctattccagcacggataaagtcgattcacctgacttattcaaaaatgggt

SEQ ID NO: 426291 - DNA, 201 bp, Homo sapiens
actgtcacaaatccaggtctgtaagaattgtgtcacattctaaggataaaagaatgatatatccattcatataatttatgttatttcctaaatatgtatatttttaagttatcatcttagtttgagtttggcatatgagggaattgtgacccatctagttgtgagattgctattcatttggtcagactctagtctcatctc

SEQ ID NO: 426292 - DNA, 201 bp, Homo sapiens
gatggcatgctcctgtagtcccagctacttggaaggctgagacagaaggatctcttgagcccaggaggtcaaggctgcagtaagctatggttacactactrcattccagcctaggtgacagagcaagactcttgtcttaaaaacaaaaacctcctgccttttcttgggggtaatttcattgccttttagtgaagtagtggg

SEQ ID NO: 426293 - DNA, 201 bp, Homo sapiens
taatccagcaagttttagtaaattatatctgatatactgttggtaatactgtgctagacacaagtatggaaaatgaaatatattacttcatactgtatgtyataactttcctctgcagaagtagcagttcctaaagaattaacaattaaaccaactttttcagggctttaaactgattttaactgttgactttacctcttt

SEQ ID NO: 426294 - DNA, 201 bp, Homo sapiens
gttccttatattaagctgcaaacaaagtattatcagtcataatggcttatttaaaactggaaatttttttgcatgttttttgacttatgtgaaaatttcargtaaaaatgtggcctgagtagtttttctcaactgtaactcattttcctatgatacctatttcctaaacttttctgagggtatagaagttacttaaaattt

SEQ ID NO: 426295 - DNA, 201 bp, Homo sapiens
ggaggctaaggcaggagaattgcttgaacccaggaggtggaggttgcagtgagccaagattgcgccattgcactccagcctgggtgacaaagcaagactcyatctcaaaaaaagagagagagatgagtatgcatctgtggtagactgaataatggttccccccaaaagatatccatgtcctaatatctggaacctgtgaat

SEQ ID NO: 426296 - DNA, 201 bp, Homo sapiens
aggttgaggctgccgtgagccaagatcgtacactgcactgcagcctgggtgagtgagaccctgtctcaaaaaaaaaaaaaaaaaaaaaaaaaaaaaaaaaraaaaaaaaaaaaagaaatatctccatttagttagatcttttaaaacttttctcaacaatgttgttttcagtatacaagttttgcactacttttgttaact

SEQ ID NO: 426297 - DNA, 201 bp, Homo sapiens
tgggcgcagtggtgcatgcctgtaatcccagctactcgggaggctaaggcaggagaattgcttgaacccaggaggtggaggttgcagtgagccaagattgygccattgcactccagcctgggtgacaaagcaagactccatctcaaaaaaagagagagagatgagtatgcatctgtggtagactgaataatggttcccccc

SEQ ID NO: 426298 - DNA, 201 bp, Homo sapiens
aatacaaaaattagctgggcgcagtggtgcatgcctgtaatcccagctactcgggaggctaaggcaggagaattgcttgaacccaggaggtggaggttgcrgtgagccaagattgcgccattgcactccagcctgggtgacaaagcaagactccatctcaaaaaaagagagagagatgagtatgcatctgtggtagactga

SEQ ID NO: 426299 - DNA, 201 bp, Homo sapiens
ttgttagttgtgcatttgtttataattgtaatatcttcctgatgaataaacttttttatcattataaaatgtgccccttttttgtcttaaactcttttttwaaaaaaaaaaaaatagagacagggttttgccatattgcccaggctggtttcaaactccggagctcaagcgatctacctgccttggcctcccaaagtgttg

SEQ ID NO: 426300 - DNA, 201 bp, Homo sapiens
tgccttctcttatttacttttatattatgctcatctcagttttgtgtgatgcagtttgtgcacaggaagctcatccttttccaattcgctgtgtgtttacktctttagttttcaaccaaagttttgtaatttgtgttggttttgtcagttttaaagaaataaaccatattcaacttaaagtcgaatttgttattaattttt

SEQ ID NO: 426301 - DNA, 201 bp, Homo sapiens
catgagccactgtgcccagctgcaacataggtttttagtgcttattttgaattgtttcagttttttatactgtatattttttctgagtattgtggtaatayatattttgcagaaaatttggaaagtagataaaagtatatgaaataaaaattatccataattcatcactcaaaatacctacctctgtattataatttggag

SEQ ID NO: 426302 - DNA, 201 bp, Homo sapiens
cctcccaaagtgctgggattacaggcatgagccactgtgcccagctgcaacataggtttttagtgcttattttgaattgtttcagttttttatactgtatwttttttctgagtattgtggtaatacatattttgcagaaaatttggaaagtagataaaagtatatgaaataaaaattatccataattcatcactcaaaata

SEQ ID NO: 426303 - DNA, 201 bp, Homo sapiens
ttggcctcccaaagtgctgggattacaggcatgagccactgtgcccagctgcaacataggtttttagtgcttattttgaattgtttcagttttttatactrtatattttttctgagtattgtggtaatacatattttgcagaaaatttggaaagtagataaaagtatatgaaataaaaattatccataattcatcactcaa

SEQ ID NO: 426304 - DNA, 201 bp, Homo sapiens
cgtactgtctggattagtgtaactttctattgattcctggtagtgtgagtcccacatctttattttttaaagattgtttcgattattcttgaccttatttstgtatacattttggaatcaggtggttaatttctatttaaaaagttctgactaatcttaagattacattgaatctaaaattgaatgtggggagaattgcta

SEQ ID NO: 426305 - DNA, 201 bp, Homo sapiens
attctgggctttttctgagagagtggctcactccattgccaaggctggagtagagtggcgtgattgtggctcactatagccttgacttcccaggctcaagygaacctcccacctcagcctcctgaatagctgggactataggtgcgtgccaccatgcttggcaaaatttttttttttttctagggacagggcctcactata

SEQ ID NO: 426306 - DNA, 201 bp, Homo sapiens
gccgagtgtggtgcatatgcctatggtcccagctgctcaggaggctgaggtgggaggatggcttgagtctaggaggttgaggctgcagtgaactatgatcrtgccacattaaattatccataccataatcatttgtgttacccactagactgcttgagggcaactacttttattgcctttcctctggtttctagcacaatt

SEQ ID NO: 426307 - DNA, 201 bp, Homo sapiens
atatgtttctagagtccttgaccccttggtcttcttgtgctgttccagttcatgccctcatcgttttttatgtgatgtaataactcagcttcttgattggkctctatgcacttctttttgctaccatttctttgtagctgaaagagtgacttatttaaaactcaaaatttgtgcatattgcttacattcctatttaaaatc

SEQ ID NO: 426308 - DNA, 201 bp, Homo sapiens
ttaaaacgataatgtcaagtttagcctgtcaaatatacgagttgaatttgtggaacatattttgcctgtgtgctgcaaggtaaacagaagtttcttgaaaygctcgatggtgtagggttaaaaatgggtcctagccctggccaggcaggtgggaatgggacaaagaagggtagagatggaggcttcagagtggactggctg

SEQ ID NO: 426309 - DNA, 201 bp, Homo sapiens
agatatttatttctcctagatttccatacccagtccttaaaaaacaaaactgcagatttttctactcttctgtcatttagttgcctgtttctccattattrtgtgtgcttttttagctttgtggttcttttgcaggctctggatctccatttgcaatccagaatattctttatattgagatggccttttgcttacttgaca

SEQ ID NO: 426310 - DNA, 201 bp, Homo sapiens
cacaacacatctattacagctatccctcattatgacagtttccttgatagctgttgaaattgtactgatactataaaatatgcttacgatggcctcttcaygttagcaatttcaaggaaaaatatttatcaaatagtactttaaaaataagcaaaaactgtcctatgaaatgcagtttatttgatctagagtgtgaatgag

SEQ ID NO: 426311 - DNA, 201 bp, Homo sapiens
catctgtaatctagcactttgggaggttgaggcaggcagattgcttgagcccaggagtttgagaccagcctgagcaacatggcagaaccccatctctacaraaaatacaagaattagccaggcatgatggtgtgcatctgtagttgctactcaggaggctgaggtgggaggatctgcctgagcccaagagttctaggctgc

SEQ ID NO: 426312 - DNA, 201 bp, Homo sapiens
tgtttgcttggtatatcttttttctttttttttttttttttgagacaaagtctcactctgtcactcagactggagtgcagtggcacaatcttggctcactrcaacttctgcctcccgggttcaaccagttctcctcccttggcctcccaggtagctggaattacaggtgcctaccaccacacctggttaatttttgtattt

SEQ ID NO: 426313 - DNA, 201 bp, Homo sapiens
tgaactcgggaggcagaggttgcagtgagctgagatcataccactgcaatccaggctgggcaatggagcaagactccatctcaaaaaaaaaaaaaaaattwaaaaaaaaaaaaaggccaggtgcggtggttcacgtctataatcccagcaatttgggaggctgaggcgggcagatcatctgaggtcaggagttcgagacca

SEQ ID NO: 426314 - DNA, 201 bp, Homo sapiens
gaactcgggaggcagaggttgcagtgagctgagatcataccactgcaatccaggctgggcaatggagcaagactccatctcaaaaaaaaaaaaaaaatttaaaaaaaaaaaaaggccaggtgcggtggttcacgtctataatcccagcaatttgggaggctgaggcgggcagatcatctgaggtcaggagttcgagaccag

SEQ ID NO: 426315 - DNA, 201 bp, Homo sapiens
gcaagactccatctcaaaaaaaaaaaaaaaatttaaaaaaaaaaaaaggccaggtgcggtggttcacgtctataatcccagcaatttgggaggctgaggcrggcagatcatctgaggtcaggagttcgagaccagcctggccaacatggtgaaaccctgtgtctactaaaaatacacaaattagccaggcatggtgggagg

SEQ ID NO: 426316 - DNA, 201 bp, Homo sapiens
tatctttatttcacctttattttgaaggatagttttgctggatacagaattcttggttgataggtttttttttctcctgttggtactttgaatatgtcatsccactgacttctgacctccttggtttctaatgagtcatttttctcttgctgctttaaagattttctgtttctctcacttttgacagtttgattatgacat

SEQ ID NO: 426317 - DNA, 201 bp, Homo sapiens
agtggcagaaagcctagctgagttatgtcctgcagttctgtggaaaggagaacttactgtaagcaatgaacttggatgtttagctgaggaggtttttatgsaaagtattggaggtgtggcctgatttctggctgcttatagtaaagtgatgaaagagataaattgagggaagaactgttaaacaaaaaggatacaggactt

SEQ ID NO: 426318 - DNA, 201 bp, Homo sapiens
taagaatacatgtgtgggaactagcaatggttaacagtacagctttgaagccaaattgcctgagttcaaatctagctccaacacttgctctgtgatttatsgcaatttaatttacctcgtgcctcagtttcctcattaataaaatgggaagataataggtgttattgctatattaagcataacaagcagaggaaagatgga

SEQ ID NO: 426319 - DNA, 201 bp, Homo sapiens
ttttactgccttcttttgtgttaaataatattttctattgaaccatttcaattcctttgtggttttttaaattttttttaagttattttcttaggctgggytcagtgactaatgcctataatcccagtactttgggaggccaaggaggaaggatcacttgaggccaggagtttcagaccagtctaggcaacatagcaagac

SEQ ID NO: 426320 - DNA, 201 bp, Homo sapiens
tttttactgccttcttttgtgttaaataatattttctattgaaccatttcaattcctttgtggttttttaaattttttttaagttattttcttaggctggkctcagtgactaatgcctataatcccagtactttgggaggccaaggaggaaggatcacttgaggccaggagtttcagaccagtctaggcaacatagcaaga

SEQ ID NO: 426321 - DNA, 201 bp, Homo sapiens
atataattattgagtacagttgctcaatgataaaatgttgttgctgcatttatatatactatacctatagggttatacatcacaatagctgggaacataartgaccaagttgattctacattacaatttgagaaagtaaattaactaactgtatcaggtacacatagttttggttttcctttgtaaatttaaagaaaattt

SEQ ID NO: 426322 - DNA, 201 bp, Homo sapiens
agccctgtctgctttttaactgtcactgtactagcaggtttctgacctttctccttttatcactgtatatgctttcctcaggtgaccttaaccagccttayggttttaactcttacctatatactgacattgcttaaatccttgcccttagactagaattttcttcagattttctattttctgctgcctcccaaatctctc

SEQ ID NO: 426323 - DNA, 201 bp, Homo sapiens
caaatacgaaaattagctgggcgtggtggcgcgtgcctgtaatcccagctactcaggaggctgaggcagaagaatcgcttaaacctgggaggcggaggttrcagtgagccgagatcatgccactacactccagcctgggcaacagagagagacttcatcttaaaaaaaaaaaaaagaaaagaaatttgtttaatagctcag

SEQ ID NO: 426324 - DNA, 201 bp, Homo sapiens
gcctcccaagtagctgggattacaggcgcccgtcaccgtgcccggctaatttttgtatttttagtagagacgggtttcaccatcttggcgaggctgacctygaactcctgaccttgtgatccacccacctcagcctcccagagtgctgggattacaggcgtgagccaccgtgcccagctggcattcttaatacatttattt

SEQ ID NO: 426325 - DNA, 201 bp, Homo sapiens
aaaaaaaaagtttaaatttgaaatgggtagcttttgattcacaaatattaatacaaatgtctttgcaaaaggattggatttattattttgacaaagataayagttttatttataaggaataatcctttcatgttgtaacttttgtatgtgtaattttttaaattacacattaaaaattttgtatttttttatgtgtaatta

SEQ ID NO: 426326 - DNA, 201 bp, Homo sapiens
cccttttaattcttgtgatttttgtaaagttggtaggaatatcccttctttcatgcctgattttggtaaatgttgttttctctcttttttttcagtcattctaactaaaagtttgtcaattcatcgatcatttcaaagaaccaactttgtgtttatgtgaacttgtctatttttgttttctttttcattgatttctactct

SEQ ID NO: 426327 - DNA, 201 bp, Homo sapiens
ggcctcccaaagtgctaagatcacaggtgtgagccatcatgcccagccctttttcatttattgagttttgttttctgttcaagcttagaggtcagcaaactttttttttttttttttttaaggataggttgtattttatgctttgcaagctacacacagtctctgttgcatactcttggtttttgttgttgttttggttgt

SEQ ID NO: 426328 - DNA, 201 bp, Homo sapiens
attattgggacagtataatgatatttttcccaggaaagaaaaactattgtttatgaggcttgagttttccttcattatgctttgggagaccttgagaatasagctgaattaaatgctgttgtccgttagggccctgaatgtaggcttaaacagtaaaatgagctttgcctgtgttttcttttacttgccacctattcatct

SEQ ID NO: 426329 - DNA, 201 bp, Homo sapiens
tttaacaagggtaattttaatctccgagtttagttttgttgtccagtcttgtctcttttttactgtcacaaatccaggtctgtaagaattgtgtcacattstaaggataaaagaatgatatatccattcatataatttatgttatttcctaaatatgtatatttttaagttatcatcttagtttgagtttggcatatgagg

SEQ ID NO: 426330 - DNA, 201 bp, Homo sapiens
aattagctggttgtggtggtatgcacctgtaatcccagctacttgggaggctgaggcaggagaattgcttgaacccaggaggcagaggttgcagtgagccragattgcaccactgcactccagcctgggtgacagagtgagactccgtctcataaaaataaaaaaataaaaaaataaaaaaaataaataaaataaataaaa

SEQ ID NO: 426331 - DNA, 201 bp, Homo sapiens
tcttattgtatattgctaatatatagaaataagattgatatttgtatattgatcttatattctgcaacattgctaaactcatttattagttctggtaattwtcctttttattctatcagtttttctacgctgatggtcctgtcgtctgtgaataaagacattttcacttctttattttcagtctggattcctttgatttct

SEQ ID NO: 426332 - DNA, 201 bp, Homo sapiens
tcacccaggctggagtgcagtggtgcgatctcggcttactgcaacctccacctcccaggttcaagtgatcctcctgcctcagcctcgtgagtagctgggaytacaggtacgtgccaccacacctggctaatttttgtatttttagcagagacggggtttcaccatgttggccaggctggtcttgaactcctatacttggtc

SEQ ID NO: 426333 - DNA, 201 bp, Homo sapiens
gagacaggtctcaatcaatttagaaagtttattttgccaaggttaaggatgtgcctgtgacagcctgaggaggtcctgacgacatgtgcccaaggtggtckgggtacagcttgctttcatacatttttagtgagacataatacatcaatcaatatatgtaagatgtacattggtttgatctggaaaggcgggccaacacaa

SEQ ID NO: 426334 - DNA, 201 bp, Homo sapiens
ctataataagtttagtgaaaggtgtatggaaagtttctagttattgctccacatgttctttttccttgtccttgggagcatgccactttctcttcttcacrccatattctactctcaaaaggaaatgctttcgaatgtttttttttttcatttagacaatgaaaataatatttgattattacaaaaattcagaaaaaatgg

SEQ ID NO: 426335 - DNA, 201 bp, Homo sapiens
aaagataaaagaataacaatcataaaatgagccccaaatccaagatagggatagaaaaaaaatatgaattatttagaagaatatgcaatttaacaggctayatggtcacaactatgtcaaggaaagacatcaacaacagtggggttctaggtaatagaaatgccatatactttttcctgctactctctatttccatatttt

SEQ ID NO: 426336 - DNA, 201 bp, Homo sapiens
caagtcatcatcctctcattctctcagcagactgttttgtctttgcctttacgatttgacattaaatgcaaaaagattgtttcagaacttgcttcgaagtyatctcagtctctgaacacatctgtctccaagcccagcttagctttgaggaggtcatcccgctcagctgctaagcagaccatgttcagtctaactttgcct

SEQ ID NO: 426337 - DNA, 201 bp, Homo sapiens
ttcctaatcagttaactattttttattaggaattggcatttctttgagtttgtattattttgtggtaaagttttggccacgaatactctagtaaatgttaygaatttacatataaaaggagtttgtacatgagaacagagggacaagagcatagaaagtcagctggtcacattgtcttatgaatcaggaggttgaaggatc

SEQ ID NO: 426338 - DNA, 201 bp, Homo sapiens
cgtggccacctccgcagactctcctggaggccccatgctgctgccctgggttggtggcaacttggaccaaactttataggctgcttctcccatctctccarctgcatctgaatgtttttcctaatttagaaatatatagagagagtccttataggtggcaggaccctcaaaggtaacaaataatagtgacgataaccattg

SEQ ID NO: 426339 - DNA, 201 bp, Homo sapiens
tgaatttactgtcatttgtttcaaccaccccctcctcatcctcatacctgttaactacagacttcgatggtacctcaccagagagtcattgttccttcacyctgtgtatgccagtcatctttgtccatactcctctcagccacagataagagttaactctgtgatgtggccaccagagaagctaatcctaggttgcattaa

SEQ ID NO: 426340 - DNA, 201 bp, Homo sapiens
ttgtagcaacccacctcatcaaaataattcttaaacctctctagagtaaatatatttatcttttgaacttagtaaagctatgggaagaaaaagaacctccmacacacacacacacacacacacacacgcacgtgcacacacactggaaacatatgcagtatttatatttgtaatgcccttttttctatctaaagtcagctt

SEQ ID NO: 426341 - DNA, 201 bp, Homo sapiens
ctggtgagaggaaagttctgttttggtgtttgtttttgaactacatagggaagtactatgacctggagttactttggaggcaatggagggtactcaaatasagggtgcagtaggaggagatggtggatggggaaggataaaggtgaatagtcaggagtaagtcctgtttggaaaagaattttattagtgagtgttgactga

SEQ ID NO: 426342 - DNA, 201 bp, Homo sapiens
tatcactggttttggagttggcaaacccagatctagctcttggctctcttgtttaccagcttagtggccttggggaagctgctgaataattttttcatctrtaaaatggggatagtaatacataggacacagctgttgtgatgaatacatttgatactgatattaaaattcttattgtagctgactagtgcatggtggata

SEQ ID NO: 426343 - DNA, 201 bp, Homo sapiens
gaaaaataaaatgcccaacaatagggaaatagttggatatattctattgcattaatttcagacaatattttttagccattagaaagaggtagaccacatakgcataacagaaaaaatgtttgatgtatcagttaggattgtctaagtaatgctgcagtaacaacaacccctgaacctcagggaattaaaccaaccaaggtt

SEQ ID NO: 426344 - DNA, 201 bp, Homo sapiens
gtgctcagaagaaggagggaaaccagatcttggtgaacagctatgagtggctaccacatatgtgttgtgctgttttgtagataaagcaaaatccagaagtrtgttaatatcctacttatgccaaaaatgtaaaagttgtgtgtgcatgtatatttatataaatatttcaaggaatgtatatcctttgaagaaatgctagca

SEQ ID NO: 426345 - DNA, 201 bp, Homo sapiens
gtctgaacctttttcataaaacagagcttaaacatattaaacttggacatgtgatgttgacctctttataaaatgttgaggttattgaacattgccgatgttttgtctttctttcctgacagcttctctagaaattcagctgtaagatttttttttttttttttttttttgagctggagtctcgctctgtcgcccaggctg

SEQ ID NO: 426346 - DNA, 201 bp, Homo sapiens
gtaccatgctgttttggttactatagccttgtagtattgtttgaagttgggtaatgtgatggctctggctttgttatttttgcttaggtttactttggctwttgaggctcttttttggttccatatgaattttagaaatgtgttttttctaattctgtgaaaaaaatgacattggtaatttgataggaattgcattgaatc

SEQ ID NO: 426347 - DNA, 201 bp, Homo sapiens
caatgcaaattaaggattatagggtttttacttctttgattttatatatttacatgtaatcttgcttcataagtacattagctgaattacttatcctaacmtaaataaaaatatacaaccatataataatttttaattaataataacattattaacaatttgagttttgaaaatagtttaagatttctttatagctatttc

SEQ ID NO: 426348 - DNA, 201 bp, Homo sapiens
cttccatggaactaagaggaacagtgttaaaagtgacatttaacccaggaatgaagatcacataatttatgtatgttcatggagcaaatattattatggcyaagaatgtcataaaagtggagataaatctataaatctatttgtggaaaagaacatataagctcttgggttggttagtaagggagtcatacttggtccctt

SEQ ID NO: 426349 - DNA, 201 bp, Homo sapiens
atgattcattctaccacttactaataattatcataaaagctaacatttatatgcttgctgcttaccatgtgacaaatgttgcactaaatgctttctacatrttaactcatttactcctcacagcaatcctacaaagtgggcactattattattcccattttgcagatgaggaaactaagaagcagagaggttaaggaatgt

SEQ ID NO: 426350 - DNA, 201 bp, Homo sapiens
gaaactctgtgcctggaccaaattttatattttaaagtgtgtgttcaaaaagatttaagaatctgattatattactgataattatttgatatgagtaagtsttgaattactaaattgattacaagcaccaatatggcacagactgtgttttgtattcaaccgttgtgtgatcaataagtacctgtgggtttatttggaggc

SEQ ID NO: 426351 - DNA, 201 bp, Homo sapiens
tagtcatgccaaggactataatgaggtggaaaagtggtgtagtcagtggcgtagtatggaggctctgacactacaggaagacacagtgagaatggcttctyttcagagaatatgactgtggttccacctacatcagaccagtcactccctgaagaggggcgctcaattgccatcttttctttgtgcttttgaattactgaa

SEQ ID NO: 426352 - DNA, 201 bp, Homo sapiens
tatcttggagatcacttggtagtggtatatagggctcttcctcatttctttttatagttacatagtactccattttgtagacttacaatagtttattcaaccatccccttttggtgtacagttacattatttccagtcttttgttatccaataatgttgcaataaatagccaaactgtgcttcaaaagacactatcagaaa

SEQ ID NO: 426353 - DNA, 201 bp, Homo sapiens
agaattctgaattgaaatttcaagctaatactctaatagtgcaaaaatggagttttgcatgctatgtcaattagaataacaatagcaattggcatcactgracttaaaaaaaagtgtgtgtgttttgttgttttgagtttgaatgtgtgaattcacaactcacaagccaagagttttggagaggttttagtaatagttcct

SEQ ID NO: 426354 - DNA, 201 bp, Homo sapiens
ctgtggtccctgctactagggaggctgaggtgggaggatcacctgaacctggggaggtcgaggctgcagggagctgtgatcacaccactatactcttaagytggacaacagagtgagaccctgtctcaaaaaacaagcaaacaaacaaaaaacaaaacccaaaacacaaaaaacataaagcaacaataagccaagttgctt

SEQ ID NO: 426355 - DNA, 201 bp, Homo sapiens
ctatatagtggtagcgattatccattaataataggagtgatactttgtattgatgtagtgctaagggccttagaatattttgtaaatttttgagcatattraaaggtacattttaattggcagtaggcattattcctcatttcataagtataaactctgagagtctctcactgaaagactgtgctccaggccaagatgagc

SEQ ID NO: 426356 - DNA, 201 bp, Homo sapiens
taagttactttcagagagctctagcttttatctctgtctcttcaatcttattctctccctctctccataataacttaaagaaaaaactttatttagtttgrggttatcctctttctcttcctccttctcttctttcttttttttttaatttttaaaacagcaaattgttaaatttattcacatgttccccttttattcaat

SEQ ID NO: 426357 - DNA, 201 bp, Homo sapiens
aggactgttctagagacctctttgtaaagttgcatgagcagagaaaaactaaaccacgcagtacaggagaatccatacagattctgaaaagttagttttaytgtgtgaaaagttagtttttgtttgtttgttgtaggaaactagttacgttattgtaaatcaaaagtatctgagaaaggtctcaatcaatttagaaagttt

SEQ ID NO: 426358 - DNA, 201 bp, Homo sapiens
aaaatacaaaactagccgggcgtggtggcgcatgcctgtaatcccagctactcgggaggctgagacaggagaatcacttgaacctgggaggcagaggttgyggtgagccgagatcgcaccattgcactccagcctgggcaacaagagtgcaacttcatttcaaaaagccaacaaacaaacaaaaaggcaaataatccagtt

SEQ ID NO: 426359 - DNA, 201 bp, Homo sapiens
taatatcaggttcagttcttcctcccactttatttttctttgtcaagattatttgtcttttttttgtttttcctaatatataaagaaaattactctttagrtcagttaataatcttattctgctaaaaaaattaaaagatagcttttagagactgcatgcgttagtttgtaatgctttctcctgaaagtaatggaatacct

SEQ ID NO: 426360 - DNA, 201 bp, Homo sapiens
atagctcactgcagcctcaaactcctaaacttcaagtgatcttcctgcctcagcttcccaagtagctgggattataggtgcatgccaccatgcccagctatttttttttttttttggtagagatgggttctcactatgttgccctgactggagtacagtggcatggtcatagctcactgcagcctcaaactgctgggctga

SEQ ID NO: 426361 - DNA, 201 bp, Homo sapiens
gaggaaatatttataaagcatattatctgataagggactatattcagaatatgtaaataactcccaaaactcaataataaaaagacaaataggccaggtgyggtggctcatgcctgtaatcccagcactttgggaggctgaggcaggcggatcacctgaggtcaggagtttgagaccagcctgactaacatggagaaacct

SEQ ID NO: 426362 - DNA, 201 bp, Homo sapiens; identical to SEQ ID NO: 141724

SEQ ID NO: 426363 - DNA, 201 bp, Homo sapiens
aggcacagatattctctcacttagtcctaaccactgtctcgtgaagcaggtattattattctcactttagacatggcaagcctctggagaagtaaagtgastgctccagcatcacatgacccatagaggcaaagctggaaggtgaatgccaggcttctgatgccaggtctcctgtcctatcctttatgaccctattactcc

SEQ ID NO: 426364 - DNA, 201 bp, Homo sapiens
atatttaattggggagtttccttacttgaattcctgacctcaggcgatccgcctgatgagttttgaaagtcatttttaatatagtctggatacaagttggrtgcaagtctattattgaatgtatggtctgtaaatattttgttccagtctatggcttgaattttcattctcttaaagcaaggctaaaaaatatgtacatat

SEQ ID NO: 426365 - DNA, 201 bp, Homo sapiens
ccatgtttttcaacaattggatctgaatgcctttcacacattaagctgtcttctagtcaggaagctgtggatgtttattagattatcttttgatggtcttraggatgagttgtcctggaaagtccagtaatgtgggagcctggcctctggaggacctacatgtttcttatccagtgctgaggccaccaagtcatcatcctc

SEQ ID NO: 426366 - DNA, 201 bp, Homo sapiens
taaaagggacatttccagccaaagccaaaaatcctttctgcagtattttggacagatggttgtgtggcccatcctgatcctgagtgtctctaatgaatgawgaagagctcactctttctgctttttttttttggagatggagtctcgctctgtcacccaggctggagcgcaatggcgccatctcggctcactgcaacctct

SEQ ID NO: 426367 - DNA, 201 bp, Homo sapiens
gaacttatgtgccccttacttagctgccagtggtcagtcaaaagcaatagattgatttctgtccacggctaggtgatacgcaacctgtatttctctctctsaaatacaagaagtatggtgccttctaaaatatgaacatttgtacctctgatgacattacaattattttgatatgagttgaaaaccttagggaaatatcac

SEQ ID NO: 426368 - DNA, 201 bp, Homo sapiens
gtaagccatcatccatcatgactgtcggctatggcctgtagccaatggcctgtagcctggattctcattggactcccttggttatccctctgcctggcccmtcagcagcccatggtgagccatggggctgtaatttaactctcactccattatgtgactatctatggtctcagcatgttgccctggcactgtcatggcctg

SEQ ID NO: 426369 - DNA, 201 bp, Homo sapiens
aaaaaataaataaaataaaatatgacctgttctccaaaaataccacccttgactggggttgccagatttagcgaataaaaatacatatctcaaatactgcrtggaacctgtttatgggaaaggattatttattgtttaccaaatttaactgagaatcttgtattttatgtgacaactctacctatgaacctttctgttcat

SEQ ID NO: 426370 - DNA, 201 bp, Homo sapiens
tcaaaactgtactttgaaatgtggttctaatcatatccatttttggtttttttctagagatgtgaagatgtttggcttggtatgccatcacctattcctgygaaatacattgactactggacctttttgaaggacgcgtttggcttagaggaggaataaccatgccagttttggtcaattctctatgatttacttctctca

SEQ ID NO: 426371 - DNA, 201 bp, Homo sapiens
tttgtgatccgcctgcctcggcctcccaaagtgctgggagtacgggcatgagccaccgtgcctggccctattaatctgctctttattgacaggcattcagrttgtttttacatattttgcctctgaaaacatattttactactttaatttttattttcctgatgactattgagtttgaatgagatcctgtcatctttttgt

SEQ ID NO: 426372 - DNA, 201 bp, Homo sapiens
tgattgtgtgactgtgttccaataagactttttttatggacactgacattcaagtttcatgtaatttttacatatcacaaaatattactcttattttgatyttgccaaccgtttcaaaatgtaaaaaccattcttatctcaaaagtcatataaaaacaggtggcctggtagatttggctcactgactgtggtttgccaacc

SEQ ID NO: 426373 - DNA, 201 bp, Homo sapiens
tggtgtatagagtgcatgttataataacaaatgatggcatgaaaaatcaccctatgtcagtggcccaggaagctacgggcagaattttggagcagggaggaaaactgagagactcattcctcctgaatatactcctgactagtagcacttctttctttccacatctgacttttacatgtttactacctggaaaatcatgtc

SEQ ID NO: 426374 - DNA, 201 bp, Homo sapiens
actacatggagcagaatacagataaggtgaatttactttgtataattcttgacttgcctctcagccctccgcagtctgtgtttttctttctctagggcctyttcttcttcatcttgccaccagttgtacattgtgcattcacacatgtgggcatgaataatggattcgtgtgacttggccacatgtcccatcacagaggcc

SEQ ID NO: 426375 - DNA, 201 bp, Homo sapiens
aacttaaaagacaagggacagactaagagaaaatatttataaccagtgtaagagccaggggattaacattaagtacttaagaactcctataaaatcaacasacaaaaatggatcaaaggcaggaatagttcacagaagaaatacaaatagtctttaaacctatgaaaagatgcccaataatgacacaaactgaaacaatga

SEQ ID NO: 426376 - DNA, 201 bp, Homo sapiens
tgcaccatttacctttcagggactaccctgagaaaaagaagagctgatgacatctcaagggacccttcggactcattattctttcactccacatttgcagmagtgtcttgctggcttcttggcactcaaatgtaccaatttattctccacaacaatggccctttcatttttaaaaaattggagttaatcaataaacgattt

SEQ ID NO: 426377 - DNA, 201 bp, Homo sapiens
ggattttgctgtttgagtcctcatttattgaggtaaacttcattttaattcttaaaatcaactttattgaggtataatttatatgtaataaaatgagcctttttttttttttttttttttttttgagacagagtctcactctgttgcccaggctggagtgcaatggcgcggtctctgctcactgcaacctctacctcctgg

SEQ ID NO: 426378 - DNA, 201 bp, Homo sapiens
ttcctaacaattctctatggataggctcattatccccattttagaggtgaaaaaaaccgaggcttaaagggggctcatttgtccaaggttatacagtgagyaaagagtgagccaagatttgaacttgtctgcctgatgctgggggggtaaatgttttggtttagcaatcgaaatggaaatctgaatgcttttcttttcact

SEQ ID NO: 426379 - DNA, 201 bp, Homo sapiens
ctttggaattgcttttcaaagccttttgaaaagaatttcctccagagtggcaaatctttgtcctttgaccatggatcagagttttaacaagagccaatgtygtttggagaggagtgaagcaggggactcaggtggagaattgggaccactttttttttttttatggaaagcacagcatggccatgaaataaggagatttat

SEQ ID NO: 426380 - DNA, 201 bp, Homo sapiens
ttctgttcttttttcaggaatgtaatacatcctcatatctcacatctttccctgtgttccctgaattgcctttggttccttttgttttttgtttttttttstgttgctgttttggcttctgtctttaatgttggatgctttggtcaggggaaggggtttgttgattagtggatttcactacccagtcaactcctgagcctt

SEQ ID NO: 426381 - DNA, 201 bp, Homo sapiens
gattttgctgtttgagtcctcatttattgaggtaaacttcattttaattcttaaaatcaactttattgaggtataatttatatgtaataaaatgagcctttttttttttttttttttttttttgagacagagtctcactctgttgcccaggctggagtgcaatggcgcggtctctgctcactgcaacctctacctcctggg

SEQ ID NO: 426382 - DNA, 201 bp, Homo sapiens
tttattccttttaattgaaatatcctttgttcttttctcccttgtgcctcttggggggattcccacacacactgagatcctctaagacagaactgaaaagraaaacttggagtattttaccacattaccacaactcttcctttaggcctggctctgggattttggaaagatgaactcgttcaagcattttttctcaaaaaa

SEQ ID NO: 426383 - DNA, 201 bp, Homo sapiens
tgcttatctccattcttttttcaatgttgtcccatttccttttcttttattccatctctctcaaccttcttgtcccttcccttctggtgtttttttttttwaattttatttttatttttatttttttaccttttttctgttttcttttctcttttattggacttctgtctcttcatcctcattctctttactttcatccat

SEQ ID NO: 426384 - DNA, 201 bp, Homo sapiens
ttagaatccacctgtccttcccttccttattccctaccgcccccatacaagatgagtctgagtctagcattgggctaggctccttgaggttcccgaagtgtaaggtggggtctccagggcattggatgaatttcagatatgcctgcttgaattgcctgaaggcaagcaatcatcaggactaacagtcaggataattttatg

SEQ ID NO: 426385 - DNA, 201 bp, Homo sapiens
gatccactgagctagaccacttggctccctggcttccacctcctttccaggggagtgagcagttctgtctcactggtgttccaggcgccactggggtatgaaaaaaaaaaaaaactgcagctagcttggtgtctgcccaaacagctgcccagttttgtgcttgaaacctagggccctggtggtgtaggcacttgagggaat

SEQ ID NO: 426386 - DNA, 201 bp, Homo sapiens
atgtatcagttaggattgtctaagtaatgctgcagtaacaacaacccctgaacctcagggaattaaaccaaccaaggtttattgtttgctgactttatgtrtccattgtggttgtcaggggaattttgttcatagtagccactcagagactgaggctgacagaatagccactaccttgaatgttcgcagtcacattgccat

SEQ ID NO: 426387 - DNA, 201 bp, Homo sapiens; identical to SEQ ID NO: 141721

SEQ ID NO: 426388 - DNA, 201 bp, Homo sapiens
gatggagatctttgatttgattctgtcactgtctggtggtggtgtttgtattggtgagggcttagttttaaaaaggaatatcctctctggctagttaagcaaaaaaaaaaggaatttattaaaaggagcctgggtggttcacagtgtctttggaagggctggagaaacaagctcaaggctgaactataggaacagtgccca

SEQ ID NO: 426389 - DNA, 201 bp, Homo sapiens
ttttaccacagccataactaccactatttctggcaatcgtcctttaccacccctgaaggctgggctcctttgacaccaaacgtggcccaccctgagctgcttttcttctgttaatcccttctgaggcacagtcttaagtaagcttccctgattggtagagagcctgggtcacctgcatatttctaactgcaaggaagtctg

SEQ ID NO: 426390 - DNA, 201 bp, Homo sapiens
gctcctctcaccctggaatatgttgttgttgcttctgctgctgctgctacagctgctcttcccagcctgcaatgtgttactgctgctgcccaaggagggayagcaagaagacttggtactgctgaaccaagagctggtgtagtcatgccaaggactataatgaggtggaaaagtggtgtagtcagtggcgtagtatggagg

SEQ ID NO: 426391 - DNA, 201 bp, Homo sapiens
cgcctctgcttccacatttctggagtagtaaaataaggaagaattcttggatctgccttcctctgtcatcttcagatctctggatgtgttttcggagctcrctggaaaactggtggaataatcactcaggaagctctggtggctgctcctctcaccctggaatatgttgttgttgcttctgctgctgctgctacagctgct

SEQ ID NO: 426392 - DNA, 201 bp, Homo sapiens
ctctcttgtccaatgggtagaatttattaattctttcacttcacttgcagccttttacagttctagctttatgcataggtttaatgtgtaggagttcccarttgctactctcctggactggaggtcttgtcgtttgtgccctggtgagtgttaaaaaatctaagctcttacctgctaaagggtttgatcccacttcctccc

SEQ ID NO: 426393 - DNA, 201 bp, Homo sapiens
cagtgagaatggcttctcttcagagaatatgactgtggttccacctacatcagaccagtcactccctgaagaggggcgctcaattgccatcttttctttgygcttttgaattactgaatgggagttatagttatccggaacatttaaaggtggagagcttttttcacaaatgactctactttggttgctaagtcgcttttg

SEQ ID NO: 426394 - DNA, 201 bp, Homo sapiens
acttaatccagaatatgatgaaaaaatcaaaattaagaactcaggaggacatcatatctttaaaaattggagcagcattggacattaaaacaggttttatmcacacacacacacacacacacacacacacacacttacatatgtgaattcaaagtgaaaacattgtttcaaagaggtgaatgacatgattagaaaaattaa

SEQ ID NO: 426395 - DNA, 201 bp, Homo sapiens
ttggcatccagtttgggttttcctggaagcagcaggtttgtctatgcatattcatcagtcaggactcctaaggagaccattctcccctcagtaggattccrgctatgctaatggtaaagggatttcttaggccatttcctgggggagtttattctgtttctatagttgcagaaagggcagagccaacttcttgcagagggg

SEQ ID NO: 426396 - DNA, 201 bp, Homo sapiens
ccaggcacctcacactacctgcctttgtcttgtggttgtcaagcatctgggcttttgagtgtaggctagaaagaaacaagagactgctgtgctggagttcwgaaatagaggttgcaaacagatcaacagctcctgatgtagatgactatagccagcttctcagtttggattaactttacggtttctgtagcggccttgata

SEQ ID NO: 426397 - DNA, 201 bp, Homo sapiens
aatcattgctgtcggtatggttaagtcaccaactcagtatctagttaggttcatttgtttcattgtgcttttgtttctgaacttaaaaaaaggcatttgtrtggtctcaaagtcaaatttgcaaagtaagttactttcagagagctctagcttttatctctgtctcttcaatcttattctctccctctctccataataact

SEQ ID NO: 426398 - DNA, 201 bp, Homo sapiens
tactcttgaagcccctgttgactgttcttggtatcaactgagagcctagcagtgtgacagcctcctccccagcttgttccttggttatttcctgatcttcwattcatggtagggaactgagaggagagtggttatgccataagaggccatggtggagtcagaccagatgtgtaggtcccgggggtgcaactgggcagagaa

SEQ ID NO: 426399 - DNA, 201 bp, Homo sapiens
ctgatccaccttggtcattctaagaacagcagcatcctgggccatgttcttttcatggtgatggcagaggcacagaaggccaagccaaatgatgccagcaygctagagcctctgtccatgatatgtctgctaatagtacataggtcaaagccagtcatgtggccaaccccatatcaaaggaacaggaaaatatacccttct

SEQ ID NO: 426400 - DNA, 201 bp, Homo sapiens
atggtatgtttgacatcccaaaggagggaatggtcaaaacaactagatttttttggggttgggggtggggggaagtttaggtcaattgcatggtttaactstaatttagactaccttttcttcttcacatgaatttggtaattgaaacatactgttctgttaaattcaagcacagatgtttgtttaatcacttacaggact

SEQ ID NO: 426401 - DNA, 201 bp, Homo sapiens
cttaatccagaatatgatgaaaaaatcaaaattaagaactcaggaggacatcatatctttaaaaattggagcagcattggacattaaaacaggttttatacacacacacacacacacacacacacacacacacttacatatgtgaattcaaagtgaaaacattgtttcaaagaggtgaatgacatgattagaaaaattaaa

SEQ ID NO: 426402 - DNA, 201 bp, Homo sapiens
cctttccaacagtggtggaatgggaatcagggagttgagatgccaaggagcactgacctaggatctaggaatagttatgttcctaactttatcatttgctragacatttgctaatttccttaaattgagactgagtaccaatacacagtcactatggcaaaggcaggttgccatgccatcttaagaggctataatggcaaa

SEQ ID NO: 426403 - DNA, 201 bp, Homo sapiens
ctctgtccatgatatgtctgctaatagtacataggtcaaagccagtcatgtggccaaccccatatcaaaggaacaggaaaatatacccttcttactccacrggaggttctacagagtcatatgacaaagagtgtgggcacataattcttatacagggagggaatgaagaatcaagaacaagtatccagtagaccacaaagt

SEQ ID NO: 426404 - DNA, 201 bp, Homo sapiens
gttcctcacagcacggtccctcacggcttcccttggctaggggagggagttccctgaccccttgtgcttcccgggtgaggcgatgccccaccctgcttcasctcgccctccgtgggctgcacctactgtctaagcagtcccaatgagatgagccggatacctcagttggaaatgcagaaatcaccctccttttgcattgat

SEQ ID NO: 426405 - DNA, 201 bp, Homo sapiens
ggaacaccatccgaagggaataattgtaaatacagacaaatgtttatgcatatagatgctcattatggcattatttatataaaaatttggaaaaaaaatgwgtaatatctagtaacagaagtatggtttagcattttggtttcagaatagtctgtaataacatggaaatgtattagttaagtgaaaaagatgaaaatatgt

SEQ ID NO: 426406 - DNA, 201 bp, Homo sapiens
tgcttgtgggtcaagagactagtcactgtttggaatgttgtgtgttatgactatatgatgatagtaaccatgcactagtgcaggtatttagaaacctttcrttttgtgccctctattaatacacatctgtgaaagtaatacagagaatatgatcaattagagttggaacattgaagttaaggcaagtaaaggaaaaaagtc

SEQ ID NO: 426407 - DNA, 201 bp, Homo sapiens
taagtaattatataccgttagagtgtgatgaatgacactgaggaaaagaaagcaggaaaagggttaagaagtgccagagttgtagaggaaggggtcacactttttttttttttttttttttgagatggaattttgctcttattgcccaggctggagtgcaatggcgcaatctcagctcactgcaacctctgccttccaggt

SEQ ID NO: 426408 - DNA, 201 bp, Homo sapiens
aagtaattatataccgttagagtgtgatgaatgacactgaggaaaagaaagcaggaaaagggttaagaagtgccagagttgtagaggaaggggtcacactttttttttttttttttttttgagatggaattttgctcttattgcccaggctggagtgcaatggcgcaatctcagctcactgcaacctctgccttccaggtt

SEQ ID NO: 426409 - DNA, 201 bp, Homo sapiens
tataggaattgctggtgggatgttcttgaaaagaagtcgcgttaagaagcctggacaagaagtctttaaaagtgaactatctgaatatatcaaggccgagsagctgtacattggagtcacggtgaatgtgaatggttacctatttcgtttgctcaatgctgatgagtataccttaaactacatggagcagaatacagataa

SEQ ID NO: 426410 - DNA, 201 bp, Homo sapiens
tagttattgctccacatgttctttttccttgtccttgggagcatgccactttctcttcttcacgccatattctactctcaaaaggaaatgctttcgaatgtttttttttttcatttagacaatgaaaataatatttgattattacaaaaattcagaaaaaatggaaatacttttttttaaaagacatctcaaccattcagg

SEQ ID NO: 426411 - DNA, 201 bp, Homo sapiens
actgctgggctgaagcaatcctacctcagcctcccagacatcataacttcttttttttaacttttagatttattcttctataatcttcttttttatttttwtttatttatttatttatttgagacagagtctcactctgtcacccaggctggagtgcagtggcatgatctcagctaccgcaacctctgcctgttgggttca

SEQ ID NO: 426412 - DNA, 201 bp, Homo sapiens
atgaagttcagtataagctatttcttatacattgattgtgtgcgtgttgagcttcattaagtcattgttacatacaactggatgcaaacaacttaatgtgttttttttgcattcatcttacagaccttatacagtggggagaaatataaatttactgatttcatctggaattagaaaaatcttagttcttgctctagcttc

SEQ ID NO: 426413 - DNA, 201 bp, Homo sapiens
taaatccgattatagacaaaattatgaagaaagtgcctttccctctacttaattgatgcccctcaccccatcccctgagccttggaaacctcccctgtttyctaaccttcctttggtcccaaatttgattccattagtcaattgtaagccaataggtgtgataatctccctgaaattgggggttggcaatagatggaccca

SEQ ID NO: 426414 - DNA, 201 bp, Homo sapiens
attgtgaattccaataccaattttcatacttccatgtgtacattctcaggaaacatcacaaatgtattttctttcctatagtatgtaattattactaaagrtatacaaggtatataaaagctcatttacgttgttttaatgcagaaaaaatgtattacccaccaaagacattaaaaggctgtgcaaatcctccagattacc

SEQ ID NO: 426415 - DNA, 201 bp, Homo sapiens
ttttctttgtgcttttgaattactgaatgggagttatagttatccggaacatttaaaggtggagagcttttttcacaaatgactctactttggttgctaaktcgcttttggattattacatgggggttatagtcatccagaaaatttgaaggctgagagcatttttcacaaatgagtgtattttgtgttttaggtcgcccc

SEQ ID NO: 426416 - DNA, 201 bp, Homo sapiens
actttggttgctaagtcgcttttggattattacatgggggttatagtcatccagaaaatttgaaggctgagagcatttttcacaaatgagtgtattttgtkttttaggtcgcccctcactgaatttctcaggaggattaacagtcaccctcttgtcacaggagctgctcatttctggggctgactctttctctttttgagg

SEQ ID NO: 426417 - DNA, 201 bp, Homo sapiens
aaaggcagaaatatacaccatggtcccagagtttaaaaaatgtgtcatctagttgagacaaatcaaacacgagtatgtgcacatattatggtgcatgtacmcgacgaagggctggtggtcagagaaggcctcatgaatctgcccatccctgggcttggtcatcatatagctcatttgtggtgtgtgaatctcatgctggct

SEQ ID NO: 426418 - DNA, 201 bp, Homo sapiens
gttctgatttctgtcaccgtagattagttttgtctgttcttaaataagaattttaaatctttttgaaaagtcagttttaaaaaatattaaagaagtatagktttttctttttttaatcttttttttttttttttttttttttttttttttttttttttttttttttacagagtattgctctgtcacccaggctggagtgca

SEQ ID NO: 426419 - DNA, 201 bp, Homo sapiens
aagccatattatatcttttgcagacttttaaaaacataatatgtggaagattacctgtataatgctctaactctcatttctcttccatttagctatggctmcaaaagcaatatactccgtttttttgcaaaactagtcacagacaaatgtgttgacttggacaggatgtttgttatttcatattatctcggtgatgacacc

SEQ ID NO: 426420 - DNA, 201 bp, Homo sapiens; identical to SEQ ID NO: 25697

SEQ ID NO: 426421 - DNA, 201 bp, Homo sapiens
tgataaaagtattaaataatctttatgtattgtatcttagattgtatatccattcgcatggctgatgtgtagaatgagttcttggaaaaattctctctacytttttctttatattaacaaaaagtatacaggcagctgctttgttaattttaagtttgctgaattttcttttcatttcttagtttctaattattattccaa

SEQ ID NO: 426422 - DNA, 201 bp, Homo sapiens
atgatctcagctcaccacaacctccacctcccaggttcaagcgattctcctgcctcagcctcccgaatagctgggattacaggtgtgtgccaccacatccrgctaatttttgtattgttagtagagacaaggtttcaccatgttggccaggctggtctcgaactcccggcctcaagtgatctgcctgccttgacctcccaa

SEQ ID NO: 426423 - DNA, 201 bp, Homo sapiens
ttttagtgttttatttttagtgtttctccctttgtctttatttgtttaaattgacaaacataattgtatatatttatggtgtacaacatgatgttttgaartatgtatacactatggaatggctaaattgagctaattaacatatgcgttacctcatgtgcttctctttttttgtgatgaaaacactattgtcttacaatt

SEQ ID NO: 426424 - DNA, 201 bp, Homo sapiens
cacctattcctgcgaaatacattgactactggacctttttgaaggacgcgtttggcttagaggaggaataaccatgccagttttggtcaattctctatgakttacttctctcattttgccacatttactttagtagatataatttcattaaaaacaaaaaagaaacaaggtttatattaaatggaaatccataaaccacaa

SEQ ID NO: 426425 - DNA, 201 bp, Homo sapiens
tacaggtttctcccaagagtctgcccttaataaatcacatgcactaaaatccctgtttcaggctctgcctctatggaaccccaacctaagacaacattccrggttttaatccataattctgaaagcaaccaccaaaatgccttgctcaagtagactatcacattacaagcagagaaaatgccttttgcaatcatgaaaagg

SEQ ID NO: 426426 - DNA, 201 bp, Homo sapiens
gcaccatttacctttcagggactaccctgagaaaaagaagagctgatgacatctcaagggacccttcggactcattattctttcactccacatttgcagcwgtgtcttgctggcttcttggcactcaaatgtaccaatttattctccacaacaatggccctttcatttttaaaaaattggagttaatcaataaacgatttc

SEQ ID NO: 426427 - DNA, 201 bp, Homo sapiens
tgcccatttttgctgtagttgcctgtgcttgtggggtattacccaagaaatctttgccccgactgatgtcctggagagtttcccaatgttttcttgtagtrgtttcatggtttgaggtcttagatttaagtctttaatacattttgattttatttttgatttgatatggtgagagataggggtctcatttcattcttttgt

SEQ ID NO: 426428 - DNA, 201 bp, Homo sapiens
ccacacactgtgccgtcccagttaattggcacaggccaacagagaaggccaagacctgaacaaacagaaacctcaagggaactgaatagttgctgggtttrcaacttcccataacagtagccacctgaggcctaaataaggatttaaggataaactggcaacagtgagctcaaagagtttttttttttgaaataagatggc

SEQ ID NO: 426429 - DNA, 201 bp, Homo sapiens
gcctttatatactgcctgcctttagcttttcaaaagactgcatgctactgtttaggctgtctaacctgctggcagtggtgaatataaacatgccattagcrtgtagttattgattgtgacttaccagctttctaccctctgcatgtcaacattggctgggtctctcactcctccgtggcatacttgtatcctttcaggtgc

SEQ ID NO: 426430 - DNA, 201 bp, Homo sapiens
ggtgggctgtgctcccctctcccttaggggcagcccacaatgaaattagatctccaggggacctactggtcccctgtgcttgccaaaattatagtgggttytggggtatgtttgtgggttgtctggtggtgcagtggctcaaatgcagaggatccctgggcacggcagtgacaccacatgtgcacagctggtgtggtaccc

SEQ ID NO: 426431 - DNA, 201 bp, Homo sapiens
tgtataatgctctaactctcatttctcttccatttagctatggctccaaaagcaatatactccgtttttttgcaaaactagtcacagacaaatgtgttgayttggacaggatgtttgttatttcatattatctcggtgatgacaccatttcagtgtttgaacctatagagaggaattcaggtaagagatatactcttcaca

SEQ ID NO: 426432 - DNA, 201 bp, Homo sapiens
ccctaaccacagcctcaagtataaactagcacagaaggccagaagtttggccccagcttctccttctaaccatctctcttgccactttgcaccatgtgccrcaaaccacactgggctactcaccctttcttgaaaatagattttagatctccaggcctttgcttacgctggtccctatgcctggaatacccttcacaaccc

SEQ ID NO: 426433 - DNA, 201 bp, Homo sapiens
ccaacaatcttgcaagaataagtattatccccaatttatagacaggaagctgaggctcggagatattcctaatggtaaggattgtatagtcaggggctggygccaattttttaaataagtaaagttatttctaatatttgtggttgaatataacagtcgaaataaaaggttgttaaccattcctcttagacttaaaaaata

SEQ ID NO: 426434 - DNA, 201 bp, Homo sapiens
gtctaatgtgcaggatgtttttttgggagtgtccttgggatcaactcccatggaaggtgggggaaaaaaagaagaatgggcagagggagaagtcgaactgygatggaagcccaaagatatccttggccaacccatagggagctctggagttagcatgtcttttcagcgttgtcctgagttgggccagaatggcctggcctt

SEQ ID NO: 426435 - DNA, 201 bp, Homo sapiens
atcgagaaaagtaagcttttgttttattgattctaatcatttacatttctgtgaacctgagtaatgaaggaatttctattttatcaaaaagtgcaaaaagraaatagacatgtgtcatcatactcatactctactatttagcacaaacaccttaaatcattttcggagaagtatttaggtacagatatttcccagtgatgg

SEQ ID NO: 426436 - DNA, 201 bp, Homo sapiens
atatttttcattcagaatttcaaagcatttatttttgcatttatatttacatatcaaaaatatcatattttaatagttttacatattaaaactattttcarttctggtctacttggcttttacagtcagctttatgaattgaagctttggttcttatgggtaggtaatggagataatattattgtgtgttcccagctttct

SEQ ID NO: 426437 - DNA, 201 bp, Homo sapiens
atttttttatttttagtggagatggagtttcaccatgttggtcaggctggtctcgaactcctgacctcaggtgatccacccacctcagcctcctaaagtgytgggattacaggcatgataaacaaatattcttaatacggctactttgaattaatctgcctttatgtttgggagaagaaagctgagacattgcatgaaaga

SEQ ID NO: 426438 - DNA, 201 bp, Homo sapiens
ctcaaagtcaaatttgcaaagtaagttactttcagagagctctagcttttatctctgtctcttcaatcttattctctccctctctccataataacttaaaraaaaaactttatttagtttgaggttatcctctttctcttcctccttctcttctttcttttttttttaatttttaaaacagcaaattgttaaatttattca

SEQ ID NO: 426439 - DNA, 201 bp, Homo sapiens; identical to SEQ ID NO: 141720

SEQ ID NO: 426440 - DNA, 201 bp, Homo sapiens
ttctagattactggctactttcacagctctctgatgcctccaggatgggagagtagacacaccaaatgccagaaaaataaatgctaaataataattcttcraggttcaatggaatatctatcacttaagtagcaaactatttactaagtgtcccaaattttgcacatttgcattgcaagattttactagtaacatgagtaa

SEQ ID NO: 426441 - DNA, 201 bp, Homo sapiens
aatatctcaagcactgatgttaggttttcctttttttttttttttttttgagatagagtctcactctatcacccatgctggagtgcagtggcgtgatcttrgctcactgcaacctccatctcctgggttcaagcgattctcctgcctcagcctcccaagtagctgggactacaggcgtgtgccaccacgcccggctaattt

SEQ ID NO: 426442 - DNA, 201 bp, Homo sapiens
tgtggcttattctgattagtccaaagttaaaattgtctttttgaactttaacttttgtaggtaccactacatccccattagaatggctataattttaagaytcttaccactaagtgtcggtgatcatgtagagaaactagaaccttcatacattcctggtaggaatgtaaaatggtgctgccattttgaaagacagtttga

SEQ ID NO: 426443 - DNA, 201 bp, Homo sapiens; identical to SEQ ID NO: 141723

SEQ ID NO: 426444 - DNA, 201 bp, Homo sapiens
aacaaatcatcaggcattggattctcataagtagcgtgcaacctagatccctcgcatgcacagttcacgaaaaggtttgcactcctatgataatctaatgytgctgctcatctgataggaggcagagctccggcagtaatgcgagcaatggggagtggctgtaagtacagatgaagattcgcttgctctcttgcccaccca

SEQ ID NO: 426445 - DNA, 201 bp, Homo sapiens
actgacttgtggtaatctgattgtatgtgtgagcaagtgtgtgtgtgtgtatgtgtgagagagagagacagagagagagagtggagggaatggtggaggtrgcgacaattgattccctaagggacagagccagctacagctcaccatcctaaccactgcatctagctttcctctcccagccctagagctgggctgttatct

SEQ ID NO: 426446 - DNA, 201 bp, Homo sapiens
cctagccaaggagcctggctgaattaagctgctgggcttgtgagccatcctggaacctccattcctcccctcccccaagcctgtttgttttcattggctawagggatgactgtcttagctaagcagggcctttctagggaaagctgctgcacacacacctggtttacttctgtgtgatcctatttaccccgagaggaccga

SEQ ID NO: 426447 - DNA, 201 bp, Homo sapiens
tttctccttgatattttggattcctttcagcattcttgtccattgtgtggtaagtcatcaacttttaagtaattaaatgttttatttaaattttgatcaaytccaaccatgtaatctctggaaaaggtaaaacttgttcttagcaaagtttggcctgatatttccaatagctttttttgttgttattcctaggggaacatg

SEQ ID NO: 426448 - DNA, 201 bp, Homo sapiens
tcgaaacacaatggacctaagtataaaacttccctgaaaaatcatctaatacttttattattaatatcagtggcaaaggtttaagcctgaggaaaaaagcktacctctacgtattgacaactttgagttctgtagataacaagcagatttgggtctcctgtgattggctaatggtctccatctcccagcagacttaattca

SEQ ID NO: 426449 - DNA, 201 bp, Homo sapiens
tgttttcctagattacttacagaactgactaagattgcaaaattattcagggtgtgattttgaaacaggtgctgaatgagtaggaaagacctagaaggctrcttgacttacttaagccagacccttttgttctctagagaagcataatttttctcatgcagaatgatgggagagggttttaagatttacgaggcttcacag

SEQ ID NO: 426450 - DNA, 201 bp, Homo sapiens
tccttgatttttgtctcctggtaattctaaatcacttgtaaaaatggagtaattatgaaagtgttaatgacagatgttctactttcttgggtactcattaygcggaagttattgccttgtgtcaaagatgggaaaacgtttgattttaatgaagccctttacatgtcagttatttttataaagctacattgcttctgaata

SEQ ID NO: 426451 - DNA, 201 bp, Homo sapiens
tctcggtagtatgtctagccagcagctctggcatttgacacaatggtaatatcctaagagcatttcactttagatttgtgaagtacttggtcaagacattmactgtttggaattgttcacaggaaagtttttagcagacaacatcgttgggtctgtcctggttttctccttgatattttggattcctttcagcattcttgt

SEQ ID NO: 426452 - DNA, 201 bp, Homo sapiens
gtgttttaatatataaatttcttaggaattttatacttttaagcataggagactgtttaactggatttgtccaggtcctttgatgagtaaagcccttattkaagagcattttcaggctgacttcgttgcaatagagcaaatatcaaacatcggcatttcagatgttccccatatatcatgtagattattggcagcagatgg

SEQ ID NO: 426453 - DNA, 201 bp, Homo sapiens
ggagactgtttaactggatttgtccaggtcctttgatgagtaaagcccttattgaagagcattttcaggctgacttcgttgcaatagagcaaatatcaaayatcggcatttcagatgttccccatatatcatgtagattattggcagcagatggctatgtcttcagccttctgcacaaataggatgtagggactggggccc

SEQ ID NO: 426454 - DNA, 201 bp, Homo sapiens
cttgggtgagaaatggattgtcatctgttgagcctgctatcactttctacaactcaggttctaagttcttcagttagtgttaggaatagcctgtgatgaartagtactcactaactgaattgtatttgtagggaatgaccttcttgctgtttctttctaggataagaaattggataaacagtatgaatctctgtctctgtt

SEQ ID NO: 426455 - DNA, 201 bp, Homo sapiens
actgtttggaattgttcacaggaaagtttttagcagacaacatcgttgggtctgtcctggttttctccttgatattttggattcctttcagcattcttgtycattgtgtggtaagtcatcaacttttaagtaattaaatgttttatttaaattttgatcaactccaaccatgtaatctctggaaaaggtaaaacttgttct

SEQ ID NO: 426456 - DNA, 201 bp, Homo sapiens
ttgacagcaaagaaacagagtgctaatttagttctcagctcttctgacttaagtgtgcaaaatatttttatagatttgacctacaaatcaatcacagcttrtattttgtgaagactgggaagtgacttagcagatgctggtcatgtgtttgaacttcctgcaggtaaacagttcttgtgtggtttggcccttctccttttg

SEQ ID NO: 426457 - DNA, 201 bp, Homo sapiens
ttgttactcagatacttgttatactaatacttgaacttgtaccttatggtatttgctatcttttaactagtcatgatattcttatactttagttacacttytggaatttgatacaaggttgagtggggtgtgtgggtgtatgtatgagtgaaacagttctcaaaagaatgtaagaaaaaccatttttataaaattgtgact

SEQ ID NO: 426458 - DNA, 201 bp, Homo sapiens
gaaatgctgagcagcatggattctgcatcggttcgcattatcaaaccctttcctgcgccccagactccaggccgcctgcagcctgcccctgtgatcccttyggcgccagcagctccaaaactggaccaccagagaatggacaccatccaggaagaccccagcacagactcacatatggacgaggatgggtttgagaaggac

SEQ ID NO: 426459 - DNA, 201 bp, Homo sapiens
tctctactaaaattacaaaaattagcccggtgtggtggcgcacgtctataatcccagctactcgggaggctgaggcaggagaaacgcttgaatccgggagrcggagcttgcagtgagccgagatcgcgctactgcactccagtctgggcgacagagcgagactccgtctcaaaaaaagaaaaaaagaaaaaaaaaaaaaag

SEQ ID NO: 426460 - DNA, 201 bp, Homo sapiens
gttgggggctgtccccacaagacttgatacttcagaaaccctttttattgacccacaagcagatatttgaattacttcttactttattgctccaggattcyggatgggctgcatttactgtgtgaaggataaaaatcattagcctggattctgatttctataaattgccattaaaagctttttttcccctaagaactgaaa

SEQ ID NO: 426461 - DNA, 201 bp, Homo sapiens
ataaatctagtatacattgtctctaaattgtgggtctatttctagttattacccaaagtttttatgtagcagggaaaatatatatctaaatttaaaaatcrtttgggttaatatggctcttcataattctaaaactaatgctctctaaaaacctaaccacctaccttacagtgagggctatacatggtagccagttgaatt

SEQ ID NO: 426462 - DNA, 201 bp, Homo sapiens
ctgttcagaactatccttcatccataagacggatccctaagacattttccatccataagaactcaagtatcggaaaccattctcacctgaccagcctgtcrgccagcgatgctccccatccaccctgctggaaggaaaactggaggaagaaaagcccattattactactaatgactgtaaccgggcatctcagcgagggca

SEQ ID NO: 426463 - DNA, 201 bp, Homo sapiens
aggtgaatctagcttattttgaggctttcaggttttagtttttaaaatatcttttgacctgtggtgcaaaagcagaaaatacagctggattgggttatgartatttacgtttttgtaaattaatcttttatattgataacagcactgactagggaaatgatcagtttttttttatacactgtaatgaaccgctgaatatga

SEQ ID NO: 426464 - DNA, 201 bp, Homo sapiens
atttccttaggttgaatttctacacgtgggccgtcccttggcgcatattgccacacagctttccagaggatcacaagctattctctcaccaggaatgtaasagttccaatcttatttcatgcgtgtcagctgtaagtattactgcttcatattgcttttctgagtcaaaaaatcaaaataccttgttttaattggcatttt

SEQ ID NO: 426465 - DNA, 201 bp, Homo sapiens
atcacttaagcccaggagttggaggctacagtgaggtatcattgcaccactgagttccagcctgggtgatagactgtctccccccacagcgcgcgcgcgcrcgcgacacacacacacacacacacacacacacacacacacacacacaaaaaggccggggagggagggtataacttttctaaatgccagtgtgtaccattc

SEQ ID NO: 426466 - DNA, 201 bp, Homo sapiens
cccggtgtggtggcgcacgtctataatcccagctactcgggaggctgaggcaggagaaacgcttgaatccgggaggcggagcttgcagtgagccgagatcrcgctactgcactccagtctgggcgacagagcgagactccgtctcaaaaaaagaaaaaaagaaaaaaaaaaaaaagctaaacagaaatctaagttcaggaa

SEQ ID NO: 426467 - DNA, 201 bp, Homo sapiens
tttttgttgttattcctaggggaacatgtcttgtagaaagcttaactaatggtcttttaaaaaaaatactatttttgtgtgttggtgttttaatatataartttcttaggaattttatacttttaagcataggagactgtttaactggatttgtccaggtcctttgatgagtaaagcccttattgaagagcattttcaggc

SEQ ID NO: 426468 - DNA, 201 bp, Homo sapiens
ggggctatggatagtattagctatttaaataaaaaataaatgtgatttcttacctctttgggagcatggtcagggaggaaagaggaggcaggaggagaggyaggtctcagaacaatccagctgtcaatgcgtgttctctgttccagaaactgacaactcctgcaaggtgtgctgcagggacctttctggccgctgtgtgcc

SEQ ID NO: 426469 - DNA, 201 bp, Homo sapiens
gtcttgctttgctgcccaggctggagtgcagtgacatgatcatggctcactgcagcctcaacctcctgggctcaagcgatctttctaacctcagccccctragcagctgggactacaggcacgtgccaccatacctggctacctggctaatttttgtgctttttgtagagatgggtctctcattatgttgcccaggctggt

SEQ ID NO: 426470 - DNA, 201 bp, Homo sapiens
caaagagcttcccgcacactggatccttccttcccttgagtacttcaaatatcatcagtcccgtccaagctttctctctggatcccagcatagcaatgaartagcctttaatgtgccctactgaacaagctctttacaaaagagtagcacaaggtcacagaaaaattaaaaaagaccagtgcctgtctgcccctcttcacc

SEQ ID NO: 426471 - DNA, 201 bp, Homo sapiens
gatgcgggccacaggaggacctatgctggcccaggctctacatcacagcgaagaaactattcaccagctttgattcatacttgggatcaattgtttataawattcacctagattataactagctaccccatccctacaaaaaaatttaaaaaattagctgagcatggttgcacatgcctgtggttccagctacttgggagg

SEQ ID NO: 426472 - DNA, 201 bp, Homo sapiens
tccccgtttgtctgtgcctccggtgtgtggcaccccttggcatatgctgtttgtgacttgagaacgcattggatccttctctaaggatgacaggccctttkagagcaagggacatagctacaaccccactcaacagtaaactcatacaacagtaaggacttgagctgtgaagtcacacttgctggatttgattcctggttg

SEQ ID NO: 426473 - DNA, 201 bp, Homo sapiens
tcattgtttaccatttgctaaccacatgtaagtacagtataaaggaaaaaagtcaccaatgttcctaccacccagaaaaccactgttggcatttggatgtrtatctttccggtcttttcatgaagatacatacacttttaaaaaaatgagtttgcactgaagattatattcacactgaagacttcatattttgcttttctc

SEQ ID NO: 426474 - DNA, 201 bp, Homo sapiens
gaatgttctgttcagaactatccttcatccataagacggatccctaagacattttccatccataagaactcaagtatcggaaaccattctcacctgaccascctgtcagccagcgatgctccccatccaccctgctggaaggaaaactggaggaagaaaagcccattattactactaatgactgtaaccgggcatctcagc

SEQ ID NO: 426475 - DNA, 201 bp, Homo sapiens
cttgttttaattggcattttttgataagttttcacacattttcaaatatgtatttgctgttaaatttcgccttttatctattcctgtcctttgcctacatyttctattggagttggtatttttcttattgatttctacactaaagacattactctcttgtctgccacattttgcagatattttccttaacacatcattttc

SEQ ID NO: 426476 - DNA, 201 bp, Homo sapiens
cagcgtcagaatcgtgttgacagcaaagaaacagagtgctaatttagttctcagctcttctgacttaagtgtgcaaaatatttttatagatttgacctacaaatcaatcacagcttgtattttgtgaagactgggaagtgacttagcagatgctggtcatgtgtttgaacttcctgcaggtaaacagttcttgtgtggttt

SEQ ID NO: 426477 - DNA, 201 bp, Homo sapiens
tcccaaatataatggttagtgtgcagtctccaccgatacctgtcatctacgtaatctttctcctagagagcaagaattcctcttactgcagttggtgttcyttcatgtccagcctcaactcagaggtctcctacggtgtgcccgtgaatagcagaccacagcacttctgtgacacaagtagggtaacaaaagaaatctctg

SEQ ID NO: 426478 - DNA, 201 bp, Homo sapiens
tggctgggagtggtggctcatgcctgtaatcccagcacttggagaggctgaggttgcgccactacactccagcctgggtgacagagtgagactctgcctcaaaaaaaaaaaaaaaaaaaaaaaattcactatctacaaacctagaatatttaaaatacaaagattgcctgttttcaaacactattgaataagagggtgaga

SEQ ID NO: 426479 - DNA, 201 bp, Homo sapiens
cgatagcacgcagaaggcttttttcaagagtagaaggggaagaaaggcctcttacatggctagctttcctctagtcacagcagcaattcttcagcagtcarggagagaccatctccttttccaaacccacgttcaccattgcccaggattcaagcctaactgaggtcagggtggctgctgccctgacatatccctccctaa

SEQ ID NO: 426480 - DNA, 201 bp, Homo sapiens
ggctgggagtggtggctcatgcctgtaatcccagcacttggagaggctgaggttgcgccactacactccagcctgggtgacagagtgagactctgcctcaaaaaaaaaaaaaaaaaaaaaaaattcactatctacaaacctagaatatttaaaatacaaagattgcctgttttcaaacactattgaataagagggtgagat

SEQ ID NO: 426481 - DNA, 201 bp, Homo sapiens
tgaccctgggcacgctgtgctccttcctcacatgtaaagtgaggagaatcccagttaaggattcgcatcaggcagtaggtttgaaacccctcagagaataycagtcacataagagggactctttttttcttagtcttggtaaaatgatatgatttgggatttgcttcagaataatccataggagggatggatgggctcatt

SEQ ID NO: 426482 - DNA, 201 bp, Homo sapiens
gcccaggagttggaggctacagtgaggtatcattgcaccactgagttccagcctgggtgatagactgtctccccccacagcgcgcgcgcgcgcgcgacacrcacacacacacacacacacacacacacacacacacacaaaaaggccggggagggagggtataacttttctaaatgccagtgtgtaccattctctcatttg

SEQ ID NO: 426483 - DNA, 201 bp, Homo sapiens
aagcccaggagttggaggctacagtgaggtatcattgcaccactgagttccagcctgggtgatagactgtctccccccacagcgcgcgcgcgcgcgcgacrcacacacacacacacacacacacacacacacacacacacaaaaaggccggggagggagggtataacttttctaaatgccagtgtgtaccattctctcatt

SEQ ID NO: 426484 - DNA, 201 bp, Homo sapiens
cttaagcccaggagttggaggctacagtgaggtatcattgcaccactgagttccagcctgggtgatagactgtctccccccacagcgcgcgcgcgcgcgcracacacacacacacacacacacacacacacacacacacacacaaaaaggccggggagggagggtataacttttctaaatgccagtgtgtaccattctctc

SEQ ID NO: 426485 - DNA, 201 bp, Homo sapiens
gcctgtcagccagcgatgctccccatccaccctgctggaaggaaaactggaggaagaaaagcccattattactactaatgactgtaaccgggcatctcagygagggcagttctgattggcaacttctgttttctcggcgctcccttcttggctttgattgcttcactccaggaggtcattttggggattacaggtaagtac

SEQ ID NO: 426486 - DNA, 201 bp, Homo sapiens
cacttaagcccaggagttggaggctacagtgaggtatcattgcaccactgagttccagcctgggtgatagactgtctccccccacagcgcgcgcgcgcgcrcgacacacacacacacacacacacacacacacacacacacacacaaaaaggccggggagggagggtataacttttctaaatgccagtgtgtaccattctc

SEQ ID NO: 426487 - DNA, 201 bp, Homo sapiens
ggctgaggttgcgccactacactccagcctgggtgacagagtgagactctgcctcaaaaaaaaaaaaaaaaaaaaaaaattcactatctacaaacctagamtatttaaaatacaaagattgcctgttttcaaacactattgaataagagggtgagatatttcttaacaacaacaacaacaaaaaaaacaggttgttttgaa

SEQ ID NO: 426488 - DNA, 201 bp, Homo sapiens
ggcctattaacgtaatcagcaaaaatgaaaaatttggtattaggagtgttcaggggccccatgagtcaatattgtttttgactctaggcaggtttttaggyagaaagaacttctaccatctaacctagaacagtaattgctgggacacaggagtccagtctccctcccattgccctgaactcaagagtacatatttaaaaa

SEQ ID NO: 426489 - DNA, 201 bp, Homo sapiens
ggtcaagtacgtcagtcccacagtcttgggccacttgtaaacacgcattggcatattcaccaacaacagagttcaggcgatttagtttgcaacctattgamgagaagaaatagaggtggcagttggtaaacccaagtgctggcccttgtgtaagttctgctccactcatctagacagtttcaaaatgccattaaatattga

SEQ ID NO: 426490 - DNA, 201 bp, Homo sapiens
gaggctacagtgaggtatcattgcaccactgagttccagcctgggtgatagactgtctccccccacagcgcgcgcgcgcgcgcgacacacacacacacacrcacacacacacacacacacacacacaaaaaggccggggagggagggtataacttttctaaatgccagtgtgtaccattctctcatttgtggccctgcgac

SEQ ID NO: 426491 - DNA, 201 bp, Homo sapiens
gccagaatcccttttctaggtcaaaaaaggtctcaggtataacataatggaagctataatttaataattttggattgaaaacagactgaaatggacatacygagcccctaagaaacagaagccccaggcaggaaaccactgtcctatcagagttcctccctcagcattcctatccagatttgccgagattggctgtggttt

SEQ ID NO: 426492 - DNA, 201 bp, Homo sapiens
aggaaagccctgtacagtaggattttgtgacatgaatgtgagtatttatgtacagctttttctgtaacagccagataggaagtttttattttgtaagtacwtgattttgcagatgaaaacaaatcaaaacacaagtggggctacatccttctggcccattgttatctacgggtattacttaggaggagaagacggagtgct

SEQ ID NO: 426493 - DNA, 201 bp, Homo sapiens
ccaccctgctggaaggaaaactggaggaagaaaagcccattattactactaatgactgtaaccgggcatctcagcgagggcagttctgattggcaacttcygttttctcggcgctcccttcttggctttgattgcttcactccaggaggtcattttggggattacaggtaagtacacctggcagcactttagcagaggggg

SEQ ID NO: 426494 - DNA, 201 bp, Homo sapiens
ttcctgaaggcgttttacttccaaggtcaacccctaacggccccacctgtgcccgcagggaatggggcgagagagctcctggcgcctctgcccggagctgrccgcggggcctcctgggacacagcgcgcggtcgcccgcggccgctaacccggacccggaggggaaaggccgctgcccaggagggcgctgaggggaagacc

SEQ ID NO: 426495 - DNA, 201 bp, Homo sapiens
ttggggattacaggtaagtacacctggcagcactttagcagagggggatttttctctatcaaaagctaaacagcctgtattcccagcactttgggaggccraggcgggcggatcacatgaggtctcgagttcgagaccagcctggtcaacatggcgaaaccccgtctctactaaaattacaaaaattagcccggtgtggtg

SEQ ID NO: 426496 - DNA, 201 bp, Homo sapiens
cacacacctggtttacttctgtgtgatcctatttaccccgagaggaccgagcaagccaccgtacctggctgtcctgcatcagggtccacaggtcaagtacrtcagtcccacagtcttgggccacttgtaaacacgcattggcatattcaccaacaacagagttcaggcgatttagtttgcaacctattgaagagaagaaat

SEQ ID NO: 426497 - DNA, 201 bp, Homo sapiens
agatgggaggatcacttaagcccaggagttggaggctacagtgaggtatcattgcaccactgagttccagcctgggtgatagactgtctccccccacagcrcgcgcgcgcgcgcgacacacacacacacacacacacacacacacacacacacacacaaaaaggccggggagggagggtataacttttctaaatgccagtg

SEQ ID NO: 426498 - DNA, 201 bp, Homo sapiens
ttgtccaagtagcctaaacctaacagctaggaatagaggaaaccggtgaggctgtgagtcttcccgtttgtccaaagagcttcccgcacactggatccttccttcccttgagtacttcaaatatcatcagtcccgtccaagctttctctctggatcccagcatagcaatgaagtagcctttaatgtgccctactgaacaag

SEQ ID NO: 426499 - DNA, 201 bp, Homo sapiens
gctgaggcagaattgcttgagcccaggaggcaaaggttgcagtgagccgagatcgtgccactgcactccagcctggctgacagagccagactctatctccaaaaaaaaaaaaaaaagagaacttccataatgcacattttcaacattaacatacagctgacccttgaacaacacaggtttgaaccgtgaaggtccacttat

SEQ ID NO: 426500 - DNA, 201 bp, Homo sapiens
aaatggagttcacaacagatagataatctgagcaagtatctcaggtaaaaagtcactaatatcctggaacttaaatagtttagtttggtttatatttaaayagtctatagaatatttgagatttctggttttgattaaatagttttagtaaatacattcgttgtgtttcaacttaaaccggttaatactttttgtttcctt

SEQ ID NO: 426501 - DNA, 201 bp, Homo sapiens
ttagtaaatacattcgttgtgtttcaacttaaaccggttaatactttttgtttccttcttaaaaacagttggattcacagtactgtaggtgtaatgggggaaaaaaaaaaaaaagccgggttgcctggatttgtttctcggctccctgtgtgactaggcgtgaccctgggcacgctgtgctccttcctcacatgtaaagtg

SEQ ID NO: 426502 - DNA, 201 bp, Homo sapiens
gagctgagtcaatttctgtgatgacattagaaaagtgtgctttcagagtgatgtgctttaattctgcagtagaaggtggaactattcacagctttagttakgaaacaactttgttggctagaataaaatgaactcatagatagtctgtccccgtggagcttggatgcacagattttctgacaagggaaataaagtcaaaat

SEQ ID NO: 426503 - DNA, 201 bp, Homo sapiens
ctccccacagagcaccttgtgacccccttcccctgctaacaatagataaccacctttaactgtaattttccactacctacccaaatcctatagtactgccmtacccatctccctttgctcttttcagactcagcccacttgcacccaagtgaataaacagccttgttgctcacacaaagcctgtttggtggtctcttcacg

SEQ ID NO: 426504 - DNA, 201 bp, Homo sapiens
gccatttccttgatttgtctgagtctacccagccatcagtgctcaaccctaaaatatctaattggtcagactgagtgaagagtaaatgttttctgttccttctcctatatactgattaggggaggcaagcaaaattaataaaggaggaatgttctgttcagaactatccttcatccataagacggatccctaagacatttt

SEQ ID NO: 426505 - DNA, 201 bp, Homo sapiens
ccatttccttgatttgtctgagtctacccagccatcagtgctcaaccctaaaatatctaattggtcagactgagtgaagagtaaatgttttctgttccttctcctatatactgattaggggaggcaagcaaaattaataaaggaggaatgttctgttcagaactatccttcatccataagacggatccctaagacattttc

SEQ ID NO: 426506 - DNA, 201 bp, Homo sapiens
atttccttgatttgtctgagtctacccagccatcagtgctcaaccctaaaatatctaattggtcagactgagtgaagagtaaatgttttctgttccttctcctatatactgattaggggaggcaagcaaaattaataaaggaggaatgttctgttcagaactatccttcatccataagacggatccctaagacattttcca

SEQ ID NO: 426507 - DNA, 201 bp, Homo sapiens
tacttccaaggtcaacccctaacggccccacctgtgcccgcagggaatggggcgagagagctcctggcgcctctgcccggagctggccgcggggcctcctrggacacagcgcgcggtcgcccgcggccgctaacccggacccggaggggaaaggccgctgcccaggagggcgctgaggggaagaccgcgcatctcgacccg

SEQ ID NO: 426508 - DNA, 201 bp, Homo sapiens
ggcaggaggagaggcaggtctcagaacaatccagctgtcaatgcgtgttctctgttccagaaactgacaactcctgcaaggtgtgctgcagggacctttcyggccgctgtgtgccctatgtcgatgctgaacaaaagaacttatttttgaggaaaggaaagccctgtacagtaggattttgtgacatgaatgtgagtattt

SEQ ID NO: 426509 - DNA, 201 bp, Homo sapiens
ctccgtctcaaaaaaagaaaaaaagaaaaaaaaaaaaaagctaaacagaaatctaagttcaggaaataaagtcaaaggtcagtgaggaaatgaaggccacrccgcctcactgctttgctggttaccgagctgagggtgaacactttttcatacacattcccatggaattcggcagctctgactgccccatatgcctaaaca

SEQ ID NO: 426510 - DNA, 201 bp, Homo sapiens
cgtctataatcccagctactcgggaggctgaggcaggagaaacgcttgaatccgggaggcggagcttgcagtgagccgagatcgcgctactgcactccagyctgggcgacagagcgagactccgtctcaaaaaaagaaaaaaagaaaaaaaaaaaaaagctaaacagaaatctaagttcaggaaataaagtcaaaggtcag

SEQ ID NO: 426511 - DNA, 201 bp, Homo sapiens
caatctcggctctctgcaacctctgccttccgggtttaagcgattctcctgcctcagcttcctgagtagctgggactacaggcgcatgctgccacggcccrgataattttttgtattttagtagagatggggtttcactgtgttgcccaggctagttgtgaattcctgacctcacctgatccacctgcctcggcctcccaa

SEQ ID NO: 426512 - DNA, 201 bp, Homo sapiens
cctggggatagtgaatgaatattaggccggaggtcagccggctggcaagacagtgcaggtttgtgaaatatttgttagggccagtggcagcactcgcttgygccgggatttaaaaggtaaacaaagcagctgaggaaaaatgtatcctccaggggccgaaggcttcttccatttccgaacgttgttgccctcctagactgc

SEQ ID NO: 426513 - DNA, 201 bp, Homo sapiens
caaggggggcagatcacttgaggccaagagttcaagaccagcctggccaatatggcaaaaccctgtctctactaaaaatacaaaaattagctgggtgtggyggtgcatgcctataatcccagctactcgggaggctgaggttgaactgcttgcttgaactcaggaggcagaggctgcagtgagccaagattgtgccactgc

SEQ ID NO: 426514 - DNA, 201 bp, Homo sapiens
ctcccaaagcgctgggattacaggcctgagcccttgtgcccggcctattaatacttttttatggggctgatcaatcctatttaaatgaggagctggttgcrgtgactggttatattccatagattcttcttttaaaataatctggcaaaaccttaccgtaccaccatcagaccagttctgtctctcaataatctaattcat

SEQ ID NO: 426515 - DNA, 201 bp, Homo sapiens
tacaaaacattttaaaaaatcagctgagtgtggtgttatgcactggtagtcccagatactcagaaggccaaggcagggggattccttgagcccaggaagtsaaagttgcagtgagccatcattgtacactgcactccagcctgggtgacagaacagtaagactgtctcaaaaaaaacctgaaatgaagtttcatatcttta

SEQ ID NO: 426516 - DNA, 201 bp, Homo sapiens
ttcagagactggggaggttgtaggcctaaagttgtggaggaagtcgtattagttggagttctccagagaaccagtaggatgtgtttatatcctagagattytgatgtattttcaaggtttattttgaagaattggctgatgtgactgtgggggctgcaagtctgcaatctgcagggcgggctgaagacccctgggagtggg

SEQ ID NO: 426517 - DNA, 201 bp, Homo sapiens
tttattaagaaaactatgttttagataacagggaattcaggccattaagagcccccttataattagggccactcctgtttgcagagtgattggtttgtaarcattcctggcagttggtcttaaacgtgaccaatttcttaaggtgaataggggcttccttttctctcctgtgttggaagggcccatgcaacctgccccccc

SEQ ID NO: 426518 - DNA, 201 bp, Homo sapiens
gaggcaggagaatcgcttgaacccaggaggtggaggttgcagtgagccgagatcgcgccattgcactccagcctgggcaacaagagcagaactccgtctcaaaaaaaaaaaaaaaaaaaagaactcacggtagtttggacaagtataattactttccagcatttagttgggaatataaagtcattccaacaaactacatta

SEQ ID NO: 426519 - DNA, 201 bp, Homo sapiens
ggaagacgagatgtcacagaggcccactcagtgacaaacacacactgaaggcctgaggaagacgagatgtcacagaggtccactcagtgacaaacacacaytgaaggcctgaggaagactagatgtcacagaggtccactcagtgacacacactgaaggcctgaggaagactgaggacatgggctcagtggtggcttccca

SEQ ID NO: 426520 - DNA, 201 bp, Homo sapiens
tcctctttctcccttcaggaacctgtcctagtgaatctgtaacagaaaatgttggagcattaggtccattgtctttcctgccagatgcctttaaaattatkaaagttgtggacatctttttgttacataacctaaaagtaatcatatagtatttccttaatatggttgaggttataagtcgtttgtaggagtttttgtgtt

SEQ ID NO: 426521 - DNA, 201 bp, Homo sapiens
aatcaagtagaagtcaacttcatctgaaagttcagctgttttcaaactgcaatgctgaaatgttatgcaaataatgaagttatcccttgctctagattttytgaagaaaatggattgtgtaaaatgctgatcatttgtttattaaaatgtgtcctattacacagtgagttaactctcaatgaagtcatctattttctgggc

SEQ ID NO: 426522 - DNA, 201 bp, Homo sapiens
aatgctgaaatgttatgcaaataatgaagttatcccttgctctagattttctgaagaaaatggattgtgtaaaatgctgatcatttgtttattaaaatgtrtcctattacacagtgagttaactctcaatgaagtcatctattttctgggctaaaaaacttcatttgtctttttcaacttctaataagcttaacctaagtg

SEQ ID NO: 426523 - DNA, 201 bp, Homo sapiens
atgggctcagtggtggcttcccagtcatggtatcactggcatggacctctgtccggcagaggtgtggactggagaccaggattcatgctggtctggaacartgacattgccaacttaagacacacaaagcagattttcagaagtgtctggtcaagataacatgctggccaaccacaattcctagagttaagagaaccttaa

SEQ ID NO: 426524 - DNA, 201 bp, Homo sapiens
gcccgccaccatgcccagctaatttttgtatttttggtagagacggggttttaccatgttggccaggctggtctcgaactcctgacctcaggtgatccacycacgtcagcctcccaaagtgctgggattacaggcgtgagccaccacacccagccatatttttttttttaagtagagacggggtttcaccatgttggccag

SEQ ID NO: 426525 - DNA, 201 bp, Homo sapiens
gtggcatttgagcaggggcctacaggagaagtggggccatgataagatctggaaggatcgcagtttagggagaggagagagcaaaggcccatgggaggagygagcctgtgtgtttgggggacagcagggagaccagcgtggcctgggcgaggcaggtgcaggtgttgtgaagacctgggcttttactctgagagtaaagca

SEQ ID NO: 426526 - DNA, 201 bp, Homo sapiens
aaaaaaagttgcttttcccgatgtaactgttaccaatatttgttttttcaggggatcttctctggatcaagcaatggtggtgaaaaatgtttcgcaagggyaaaaaacgacacagtagtagcagttcccaaagtagcgaaatcagtactaagagcaaggtagggaaatggaatttggaacagaatcataaagcagggagag

SEQ ID NO: 426527 - DNA, 201 bp, Homo sapiens
gccgggcgtggtggcgcatgcttgtaatcccagctacttgggaggctgaggcaggagaattgcttgaaaccagaggcagaggttgcagtgagctgagaatygcaccactgcactccaacctgggtgacagaataagactccatctcaaaaaaaagaaaaaaaaagaaatcaagaggtggtttctaaccttagctccctaag

SEQ ID NO: 426528 - DNA, 201 bp, Homo sapiens
catgcctgtaatccctgcactttgggaggttatggtgggtggatcacttaaggtcaggagttcgagaccagcctggccaacatgatgaaaccccatctgtmctaaaaatacgaaaattagccggatgtgctcacttgaaccaaggaggcagacgttgcaacgagctgagatcatgccactgcactatagcctgggcgacag

SEQ ID NO: 426529 - DNA, 201 bp, Homo sapiens
acagtgagttaactctcaatgaagtcatctattttctgggctaaaaaacttcatttgtctttttcaacttctaataagcttaacctaagtgtcacagaagmctaggtgtcacagaggtccactcagtgacaaacacacactgaaggcctgaggaagacgagatgtcacagaggtccactcagtgacaaacacacactgaag

SEQ ID NO: 426530 - DNA, 201 bp, Homo sapiens
ttgtaaacattcctggcagttggtcttaaacgtgaccaatttcttaaggtgaataggggcttccttttctctcctgtgttggaagggcccatgcaacctgccccccccacccccaaacacacagatggctccgaatgcattttcaactaagggcccctcatcaattaagagcagctgtcagcttggacggtgggcacagac

SEQ ID NO: 426531 - DNA, 201 bp, Homo sapiens
atctttttgttacataacctaaaagtaatcatatagtatttccttaatatggttgaggttataagtcgtttgtaggagtttttgtgttggctggatgttgyggcacacacagctcttcaaccgttgctgttacgttaagagaatttctgcctggcattattccatcgacattaaaaagacaaactatgtggtctttctgat

SEQ ID NO: 426532 - DNA, 201 bp, Homo sapiens
atgcaacctgccccccccacccccaaacacacagatggctccgaatgcattttcaactaagggcccctcatcaattaagagcagctgtcagcttggacggygggcacagacactgggatagtcagtttagatcactgcactcctggcttgctgggatctgaaggcattgcccgagactgagcatacaggacatcccttggg

SEQ ID NO: 426533 - DNA, 201 bp, Homo sapiens
gagttaactctcaatgaagtcatctattttctgggctaaaaaacttcatttgtctttttcaacttctaataagcttaacctaagtgtcacagaagcctagrtgtcacagaggtccactcagtgacaaacacacactgaaggcctgaggaagacgagatgtcacagaggtccactcagtgacaaacacacactgaaggcctg

SEQ ID NO: 426534 - DNA, 201 bp, Homo sapiens
gaataaaatatgttggtgccattgagaaactgaaactctccgagggaaaaggccttgaagggccattagacctgataaattatatagacgttgcccaggtaaaaaaaaaaaattccgtaactctctggttatgagagtctggggagccaactcatggctttggggcaaaatgctcactcctcgggtccactgggtgccgct

SEQ ID NO: 426535 - DNA, 201 bp, Homo sapiens
gggatagtgaatgaatattaggccggaggtcagccggctggcaagacagtgcaggtttgtgaaatatttgttagggccagtggcagcactcgcttgtgcckggatttaaaaggtaaacaaagcagctgaggaaaaatgtatcctccaggggccgaaggcttcttccatttccgaacgttgttgccctcctagactgcgtga

SEQ ID NO: 426536 - DNA, 201 bp, Homo sapiens
agctgaggaaaaatgtatcctccaggggccgaaggcttcttccatttccgaacgttgttgccctcctagactgcgtgatcagcctttgcaggctgcagtcrctgtttgctttcctctgaaggagggcagaaagggcccacgtgcagggaagctcatagtatgggttccactgacccaggcaggcatgtgtggtcggcttgc

SEQ ID NO: 426537 - DNA, 201 bp, Homo sapiens
actgcgtgatcagcctttgcaggctgcagtcgctgtttgctttcctctgaaggagggcagaaagggcccacgtgcagggaagctcatagtatgggttccaytgacccaggcaggcatgtgtggtcggcttgcttaggagaggtcttaagagggtcaggtgtgtgcctctgctagccaaattaagttcacgaagagacagat

SEQ ID NO: 426538 - DNA, 201 bp, Homo sapiens
gtggtgcaatctcggctctctgcaacctctgccttccgggtttaagcgattctcctgcctcagcttcctgagtagctgggactacaggcgcatgctgccayggcccagataattttttgtattttagtagagatggggtttcactgtgttgcccaggctagttgtgaattcctgacctcacctgatccacctgcctcggcc

SEQ ID NO: 426539 - DNA, 201 bp, Homo sapiens
gtcatctccttaactacgcttaatagagaggggaggtgaggtgctggcacctgggaatgtctttgtgtcagcttttacttaaaggtatttcaaaacttcargaaaaatgcacatttctgagaggtgtgtatatcttagccctaccaagtatagaatgtgaaactgagagggttactgaatcttagtatctcgactgaaaag

SEQ ID NO: 426540 - DNA, 201 bp, Homo sapiens
gagttctgtgagctgtgcagcttcatgtaggttagttaatttgccaagtatagtatatgctgtccttatgcaactggcaaggatgaatcttagtttccaakgcatttattattattaatttcaaaaaaagaaatatgtaacacagactctgggaggcaaggtcatctccttaactacgcttaatagagaggggaggtgagg

SEQ ID NO: 426541 - DNA, 201 bp, Homo sapiens
ctggtaccccacaaataaagcaaaaatatagaaataaattggatgatgaggctgattaaaaagcttgggctcagtggtcagacttgggcaagtggcctaaygtcgtcccctagtaagtggacttagagtggggtctccaaatacggagaatctttgggttgcagcaggagctttcactgactgctgcgtgagttgctcgtt

SEQ ID NO: 426542 - DNA, 201 bp, Homo sapiens
ggaatgaatgaataaatcagattttcctggtaccccacaaataaagcaaaaatatagaaataaattggatgatgaggctgattaaaaagcttgggctcagkggtcagacttgggcaagtggcctaatgtcgtcccctagtaagtggacttagagtggggtctccaaatacggagaatctttgggttgcagcaggagctttc

SEQ ID NO: 426543 - DNA, 201 bp, Homo sapiens
gatgcatccccgacacctggtaggtgctcactgactatccaggaatgaatgaataaatcagattttcctggtaccccacaaataaagcaaaaatatagaartaaattggatgatgaggctgattaaaaagcttgggctcagtggtcagacttgggcaagtggcctaatgtcgtcccctagtaagtggacttagagtggggt

SEQ ID NO: 426544 - DNA, 201 bp, Homo sapiens
cttatccagtggagttagttcgctatctggcagccagggtcatcgtttaaaaaacagaagacacctgattgtgtcgctaaactgctttttaaaagcctccmttccagaagatcacagcagataagcaaaaaataaataaaaagccttcagagtattcctcttaaactaaagtccactgttaccgcggcctgcctggccttc

SEQ ID NO: 426545 - DNA, 201 bp, Homo sapiens
tgtcacatcctccgcacccagcgcttggaaggtgctccatcacggtgacagacaggtgccaagcaggctggcgtctgggaggaacttcggagccggctctycctaggccccgagcttggccgcatccgtccttactctggtgaccctgggcaggtcactgactcttcgggcgctttggcatcctcgtttgaaaggggctgt

SEQ ID NO: 426546 - DNA, 201 bp, Homo sapiens
tgccattgagaaactgaaactctccgagggaaaaggccttgaagggccattagacctgataaattatatagacgttgcccaggtaaaaaaaaaaaattccrtaactctctggttatgagagtctggggagccaactcatggctttggggcaaaatgctcactcctcgggtccactgggtgccgctccgcttgctctcgact

SEQ ID NO: 426547 - DNA, 201 bp, Homo sapiens
aatcccagcattttgggggaggcagagtagggggatcacctgaacccaggagttcaaagccagcctgggcaacacagtgaaacctcatttctacaaaaaaracaattttaattgctgagtacagtggctcatgcctgtaatcccagcactttgggaggccaaggggggcagatcacttgaggccaagagttcaagaccagc

SEQ ID NO: 426548 - DNA, 201 bp, Homo sapiens
gggaaatggaatttggaacagaatcataaagcagggagagttttgtttcttctagctgatattgtatggaggatactgaccgtgggcagatctcctgatartcttcaaactagtgtgttttaacatttactttttgcactagagatgcattctatgcttggcttcattttgtctgttctggtaggttttctgaaattctta

SEQ ID NO: 426549 - DNA, 201 bp, Homo sapiens
gaatatttaaactttttccattgccagatttaaccacttatgatacagtgaaacactacttggtattgaatacaccacttgaggacaatatcatgactcayggtttatcaaggtaaggattgttttagttggactctgttttttttttttgtatcactttttcttccatatttgacataaattctttaggctcatttgatt

SEQ ID NO: 426550 - DNA, 201 bp, Homo sapiens
tttactctgtgacttacttgggtatatccttttctttacttgatctgaaatctcttacctaggccctgtaccagctcagtattggttcactataaaattcrtgaaattaatggcaactttaaaaagaatttccttctgcaattaggaaatcagtcattggagggatgatggctggtgttattggccagtttttagccaatc

SEQ ID NO: 426551 - DNA, 201 bp, Homo sapiens
tccagataattgagcatttactgcagatgtatacagacatacatgtatatacatatataaattgcatatatagagatatttagtattttactgttgaaagrattcttatagagtacctttttattcctctttttattaagaactctcggctttagagtcagacagggatgggctcaaattcctgctctgctactgtataac

SEQ ID NO: 426552 - DNA, 201 bp, Homo sapiens
gatgaactgtcatgaaatctgtaaaccactttaaaatatttaattaagcaaaaaacaatgaagcaagccagatacagtggcttatgcctataatcccagcwgtttggaaagccgaggcgggataattgcttgagcccaggagttcgagaccagcctgagcaagatggcaagaccctgtctctacaaagagtaagaaaatta

SEQ ID NO: 426553 - DNA, 201 bp, Homo sapiens
tttgtacccaaattgccttaagttatggacttaaaataataattacaatataagtccagataattgagcatttactgcagatgtatacagacatacatgtrtatacatatataaattgcatatatagagatatttagtattttactgttgaaagaattcttatagagtacctttttattcctctttttattaagaactctc

SEQ ID NO: 426554 - DNA, 201 bp, Homo sapiens
aattttagttacagtgatcatcattcatgatcataacttctcatgtatcataacagcaattatgtgtgtccaataaatatgtgatattatctttttggtgrgattcagagagtgtgatgcctgagtaaaagccacacaggctagtaagtggtgaaggtggcatgtgacttcaggtttttctgactgcataaagctcagact

SEQ ID NO: 426555 - DNA, 201 bp, Homo sapiens
agaaagataaaaaaaatcaagttgagatgatgtttgaatttcaagaaaagaggctgctttctgtcagtgccctctcattagatctgtgttaattagttagyactccactgcacatgctaatgacttcctctgacagccacacaccgaatcttgatgaaaaaagagaagagcatttgccttgttacatagtctgttacaagc

SEQ ID NO: 426556 - DNA, 201 bp, Homo sapiens
attatctttttggtgggattcagagagtgtgatgcctgagtaaaagccacacaggctagtaagtggtgaaggtggcatgtgacttcaggtttttctgactrcataaagctcagactttcttttaatgccagaagttttcatatttgtttatgcttcttcagcaccattcttcatctatctatagagaaatgagcaagataa

SEQ ID NO: 426557 - DNA, 201 bp, Homo sapiens
tttaatgccagaagttttcatatttgtttatgcttcttcagcaccattcttcatctatctatagagaaatgagcaagataaagatagtctactaaattttyttgaagctaaaattcttccgttttaagaactttttatgaaattgtcctttttacttcttagtctgtcattttttatgagattaattgttgttaatgtcat

SEQ ID NO: 426558 - DNA, 201 bp, Homo sapiens
cctggaagagaaaagatagaatgaattctaaatataagaccaagggtggcatgaatcagaagagttaaccttgaaaatatctttaagatcaaaacaagttwtctgtatctgtagaaccacaaatatttttctaaactagcagaaattttatttatttatttattttttttgagacagagtctcactctgtctctcaggctg

SEQ ID NO: 426559 - DNA, 201 bp, Homo sapiens
gacccgcggccggccaatcagagacgtagcggagcccggcggactacattgcccagtaacctcctgggctccgctgtgtttttctattctggggtgtaagrggcagctggaccactccagctgggactgctaggaaggttgcgggtccacccggccgagccgaacgagggaaatggtcctcacccggccactcgccggttg

SEQ ID NO: 426560 - DNA, 201 bp, Homo sapiens
gatgcctataaaatctttcttagggttaaaaaaatctaagtcacagctataaaaaggggcaatatgtagagtttcacctttcaggcaacatttctttatcytgtttttgaaaaattgtaatgtactaagctatactaattgctttcccagagtcaattatggaatagatttatagtccttgcgttttggaatttcttccag

SEQ ID NO: 426561 - DNA, 201 bp, Homo sapiens
gctgcgtaccaaggtatgtactagggcatctggggtaagtaaaaacaaacacatagagcctgcctggagaagctcatggtctgatggaaagataagcaagragagttaatttctaatcaatatgataaaaaggtcagagagcagtttctgaaaaacatgtttttgagttgagtcctgaaagacaaggagatgttagtaaag

SEQ ID NO: 426562 - DNA, 201 bp, Homo sapiens
tttactgttgaaagaattcttatagagtacctttttattcctctttttattaagaactctcggctttagagtcagacagggatgggctcaaattcctgctstgctactgtataacctggacaaactgcttcaccttttttatcttcagttttcacagctatagaagtaatacaaaccattaagtgtttttataggacacgg

SEQ ID NO: 426563 - DNA, 201 bp, Homo sapiens
atgtaaaattgtacatttgtacccaaattgccttaagttatggacttaaaataataattacaatataagtccagataattgagcatttactgcagatgtayacagacatacatgtatatacatatataaattgcatatatagagatatttagtattttactgttgaaagaattcttatagagtacctttttattcctcttt

SEQ ID NO: 426564 - DNA, 201 bp, Homo sapiens
cacagagcatcgactacttgacctctttgagtgtaattcatctatactgtttaccttgcaggattctgagaagtcaataatatatgattgctaaacccaargcaggacacccattagttgcgacatttttataattcctacaataccagggactgtggatatatatttgaaaagacccagttctgaccttcttacaggctg

SEQ ID NO: 426565 - DNA, 201 bp, Homo sapiens
gagtgatttatttgaaacacagatattaacacattattggtgtccctaaaacttgtcactggcttatcatcacccacaaaataaagtggaaattttggaawgtgacttagaagatctgcaaaatctggcctgtgccttcagagaactaagcaattcattgattctcttgcaaagagtggtgcagtaatgagctgaaagatt

SEQ ID NO: 426566 - DNA, 201 bp, Homo sapiens
ctgggttaaagttgaccggagtctagcctttgtctgttaggctgactacatctatgcagtttttattcccctgtagttggaattaaactacaattaaattrtcaattcagatgtgtatatctttgaagcaactgctctttcctttggatttcaggccatataaggcctgaaattttcactcattgtactcctttaacctcc

SEQ ID NO: 426567 - DNA, 201 bp, Homo sapiens
cagtttacatctttagcatttatgtcctcttctaacccttattcttttataattcctttagatgtagccataccttcattcaagttaaagacaagcctttytgaactggaagggcttttttctatttaatgtgaatttttatataaatgttgtgagacatcaggtgttggttttatgacctaaatctccatggataatctt

SEQ ID NO: 426568 - DNA, 201 bp, Homo sapiens
attattattctccttagatttcgtggtgtacatcatgcatttgcaaaaatcttagctgaaggaggaatacgagggctttgggcaggctgggtacccaatayacaaagagcagcactggtgaatatgggaggtaatgaaaactttgttaaattctaaaaagtcctaattgccttaatagctgtaagcacttatattagggaa

SEQ ID NO: 426569 - DNA, 201 bp, Homo sapiens
tcacaaaaactcgactccaaatgcaaggagaagcagctcttgctcggttgggagacggtgcaagagaatctgccccctataggggaatggtgcgcacagcyctagggatcattgaagaggaaggctttctaaagctttggcaaggagtgacacccgccatttacagacacgtaggtatttatcttgattctagctggtaag

SEQ ID NO: 426570 - DNA, 201 bp, Homo sapiens
tcctactgtccggctgcgcggctaccgtggccgagctaggtacccggctgcccacgcctgggcctcccgggccagtggcacgcgccgcgctgggggagggwgcgcgggcggcttcgcgcccggcagtgcgcatcggagaggtcgccccttccatgcccgcctggcagaggtggcggtggaggccaggcccgcggtgggagg

SEQ ID NO: 426571 - DNA, 201 bp, Homo sapiens
ttcactgcctaatccaacactggctgtagtgtaaatgcaacacaggtgatttttgccccagttccaaggctacctaactagctatgtgggccttagtcacycttaaaggaagatggttgcaactatgccagttagaacatttttctgctctgcttccacagtggcactcacaagaggaggacttgattttatagcttgtgt

SEQ ID NO: 426572 - DNA, 201 bp, Homo sapiens
tagcggcaccggtccggcctttttgcccctcgctttgatcccccagcagtctgaccggcttcctactccccatggcgtctttgtctccctggggataccasctctgagcttccgctcggctcagcccagcccccaactcccggggtcggcttcgcgggagaggaaaatataggatggctttctgtaccgcgtctgatgatg

SEQ ID NO: 426573 - DNA, 201 bp, Homo sapiens
ctcccacgtagctgagattacaggtgcacaccaccacgcccagccaatttttttatttttagtggagacagggtttcaccatgttgtccagactggtctcraactcctgacctcaggtgatccgcccgcctcagcctcccaaagtgctgggattacagccatgagccatcgtgctcggccggcaggagctatcttaatctt

SEQ ID NO: 426574 - DNA, 201 bp, Homo sapiens
gtccagaggatcggacacggcccggcccggccatggcctcgttgctgaaggtggatcaggaagtgaagctcaaggtagcggcaccggtccggcctttttgyccctcgctttgatcccccagcagtctgaccggcttcctactccccatggcgtctttgtctccctggggataccagctctgagcttccgctcggctcagcc

SEQ ID NO: 426575 - DNA, 201 bp, Homo sapiens
attgcactccagcctgagcgatagagcaagaccgtgtctcaaaaaaaaaaaaaaaaaaaaatacagtaagtcttcacttaatgttgtccataggttcttaraaactgcgactttaaaaatgatgtatatcaaaaccaagtttttttttcattaacattgtaacaaaatgacatcgaacaaaatgatgttatttgaaaccag

SEQ ID NO: 426576 - DNA, 201 bp, Homo sapiens
ttctttcagggagcggatcacaagtgaggtgagtgaaataaatagaaaaatggttgttggttgagaatttcccaaagaggagatacctggagagagagagrgagagagagagagagagagaccttcccacagatattaattcagctgtattttccctcttccttaggcagaagacttggtggcaaattttttcccaaagaa

SEQ ID NO: 426577 - DNA, 201 bp, Homo sapiens
caatattctgtagagagggagtcaggatgctgtcttcccacgaatagtactcagtaacaaaccaattgcattttagttgggcagtgctcccacccaccctscagatcccttccagctaaaacccttcccccttccctccatgtgtttctcagtttcccgtttcgtttgttggactgttccactgcccctcctcctcaccct

SEQ ID NO: 426578 - DNA, 201 bp, Homo sapiens
acaggcgtgagtcactgcacggggactccagtatattccttttagaccctcagtttcatttacgacgtgaagtgaatgtgctaatgctactgtcagtgttrgagtgagtttcaaataaaagagaactagcttaggccaggcaccttggctcacgcctgtaatcccagcactttgggaggccgacgtggacggatcatgagg

SEQ ID NO: 426579 - DNA, 201 bp, Homo sapiens
cacgtgttggactcagggctttaggcccgtgacagctggtaatcccccagcccaacaacgtccctggacactgcccctgcccttggcggctggcctgcctrgtatcatagactaggtctgggtgggggttggcacgtttgtgagctcacatcttccctaactacctgtcttttgtctgcttatcaaattcagacagcttca

SEQ ID NO: 426580 - DNA, 201 bp, Homo sapiens
gtgggataaatttgttcccaggagagagtatgggaaaggcgagtgggaatgggaagtttccaggctggcagacccttcatagccactgagggagaagagtscacaggcccacgccagccctctcctccccgctgcttctctctcaccccatcctgctctcaaaccaagcctagcattctcacctccttcctcatgtgggag

SEQ ID NO: 426581 - DNA, 201 bp, Homo sapiens
tagaacttgcagagcctgacagaaaccatgtcctgaaggagaaagcctaggatctgagcccctcagctgggtcctgcctacctgggaaagttgggaaggartggcttttaatttggaacatgttccttcagagataagactgggtttagaaaagacatttagaggccaggcacggtggctcacgcctgtaatcctagcact

SEQ ID NO: 426582 - DNA, 201 bp, Homo sapiens
ttgttcccaggagagagtatgggaaaggcgagtgggaatgggaagtttccaggctggcagacccttcatagccactgagggagaagagtccacaggcccaygccagccctctcctccccgctgcttctctctcaccccatcctgctctcaaaccaagcctagcattctcacctccttcctcatgtgggagagtcctgaggg

SEQ ID NO: 426583 - DNA, 201 bp, Homo sapiens
ctgccctctgcttgcgggctctgctctgatcacctttgatgaccccaaaggtaagctcatggggagcctcaggagggaggtggggagggttcccagtactraccctgtttcccaccacccagtggctgagcaggtgctgcaacaaaaggagcacacgatcaacatggaggagtgccggctgcgggtgcaggtccagccctt

SEQ ID NO: 426584 - DNA, 201 bp, Homo sapiens
taaataaaaattaaaaaaataaatcaataaaataaggatcacaggatatctatcttagataccctgttgttctaagaattgaatgaaataattcatcagaygggcttagcacagtgcctggcatatagtaagtacttagtaaacgttagttaagaatatgactgtatgacattttgcaactagtctcccctcctcttggag

SEQ ID NO: 426585 - DNA, 201 bp, Homo sapiens
gggtggagggggccaagaccagcccagggcagcacaaaggggttgggttgttcttgagcttagcatcaactctgcttttggagcgtccagaataggccccmcttcccctgggcttgttgattctctggaagggcgggtagaagtcttgttgtttccttctgccccaacaggccctccacgcccttcaggaggagcaggcca

SEQ ID NO: 426586 - DNA, 201 bp, Homo sapiens
ccttgctccccacagtggctcagcgtctgtgccaaatcggccagttcacagtgccactgggtgggcagcaagtccctctgagagtctctccgtatgtgaayggggagatccagaaggctgaggtaagcaggaggggtgaagaacaggggctgggctgggtaacctgtctgcctgccaggaacttgcccaatgaaggatcag

SEQ ID NO: 426587 - DNA, 201 bp, Homo sapiens
gagctactgccagggagtgtcatgctggggtttgctagggatggaggtgagggctatgcaggcctcctgcaggggagagggtatagggtgtgcaagattayggtgcagggagaggagagggcttgatgctaaaggcccacccctccttgctccccacagtggctcagcgtctgtgccaaatcggccagttcacagtgccac

SEQ ID NO: 426588 - DNA, 201 bp, Homo sapiens
cagtcgtaccccaaggacagcagggcctagcagtcttcacctctgagtcaggctaggggcctccccttctcatcctccccacccccccgccaaggttctcmcactggcctgggcttgggtgcccatataggaggtctgtatgttcaccaacagtgcggaggggtcacacattgcaaaacactgcccagaacagtaaaaaga

SEQ ID NO: 426589 - DNA, 201 bp, Homo sapiens
gatggtatgacagaatcctggggcatgcaaagcatgccatgcacctgggcatggggaagtggagctgtgtctgggaccaccccttgctgtctccccctagrtgtccagccagttgagtggccggagggtgttggtcactggatttcctgccagcctcaggctgagtgaggaggagctgctggacaagctagagatcttctt

SEQ ID NO: 426590 - DNA, 201 bp, Homo sapiens
agtgccggctgcgggtgcaggtccagcccttggagctgcccatggtcaccaccatccaggtgatggtatgacagaatcctggggcatgcaaagcatgccaygcacctgggcatggggaagtggagctgtgtctgggaccaccccttgctgtctccccctaggtgtccagccagttgagtggccggagggtgttggtcactg

SEQ ID NO: 426591 - DNA, 201 bp, Homo sapiens
aggctcctcccaggggtggggaagcctcggcagggggcggcatgtgagcgccagaaggcagggatttcacggaaatgaaagtggaagcaaacagcctgcgrgcagagcctcctgaggtgtatttcgggtcttgctggggctgagagagaccacagccctttggggggtacaaacaagagttcagttgctgtgaattctgcc

SEQ ID NO: 426592 - DNA, 201 bp, Homo sapiens
gggtgagactccatcccaaaaagaagaaaaaaaaaaaatagctggcatgatggcacacgcctgtactcaggaggctgagatgagaggattgattgattccrggaggtcgaggctgcagtgagccataatggagcaattgcactccagcctgggtggcattgagactttgtctcaaaaaacaaaacaaaacaaaaacatggg

SEQ ID NO: 426593 - DNA, 201 bp, Homo sapiens
atcttccactgcctgtgtcagtgccgagcactttctagcaggagcttaatcagtgtttgttgaactctagatctgtggtcacgaacaagtcatggacgctrcaaaggctcctgccctttcaagagcagctgagatgaggccagccaagccctgggtggagggggccaagaccagcccagggcagcacaaaggggttgggtt

SEQ ID NO: 426594 - DNA, 201 bp, Homo sapiens
caggattcctaaccacagggtgaactctgctctattccacaaacaaaggtgcatttattggtatccctggtgtcacttccctgcctgtgatgtcagttctstctctggacccattccagatcacacccagcctaaaaggttacttggtgtacagtggaaagtgtgacagtccagggacaagctagaattgatgggtaaact

SEQ ID NO: 426595 - DNA, 201 bp, Homo sapiens
ggccccccttcccctgggcttgttgattctctggaagggcgggtagaagtcttgttgtttccttctgccccaacaggccctccacgcccttcaggaggagsaggccagactcaagatgaggctgtgggacctgcagcagctgagaaaggagctcggggactcccccaaagacaaggtaaggtgggagatctggtgttgttt

SEQ ID NO: 426596 - DNA, 201 bp, Homo sapiens
gagtctctccgtatgtgaatggggagatccagaaggctgaggtaagcaggaggggtgaagaacaggggctgggctgggtaacctgtctgcctgccaggaayttgcccaatgaaggatcagaggccccaaaccccactgacctacctacccaccatcagcctctccaggcctcccgacctcatacccccatggggcactgcc

SEQ ID NO: 426597 - DNA, 201 bp, Homo sapiens
aaattgggccatctttttcaaataaaaatccagattttttgttttttggagacaagatctcactgttttttccaggctgcagtgcagtggctggatcatgkctcactgcagccacctccacctctagggatcaatagatccttccatctcagcctcccgagtagctgggactacaggcatgtgccaccatgcctggctaat

SEQ ID NO: 426598 - DNA, 201 bp, Homo sapiens
gtcctggagatccacttccagaagcccacccgcgggggcggggaggtagaggccctgacagtcgtaccccaaggacagcagggcctagcagtcttcacctytgagtcaggctaggggcctccccttctcatcctccccacccccccgccaaggttctcacactggcctgggcttgggtgcccatataggaggtctgtatgt

SEQ ID NO: 426599 - DNA, 201 bp, Homo sapiens
ggtactggtgctcaacattcctgatatcttggatggcccggagctgcatgacgtcctggagatccacttccagaagcccacccgcgggggcggggaggtaraggccctgacagtcgtaccccaaggacagcagggcctagcagtcttcacctctgagtcaggctaggggcctccccttctcatcctccccacccccccgcc

SEQ ID NO: 426600 - DNA, 201 bp, Homo sapiens
ctgagttgggcagatcacttcaggtgggaagtttgagaccagcctggccaacatggtgaaaccccatctctactaaaaataaaaaattagagccgggcacrgtggctcactcctgtaatcccagcactttgggaggccgaggtgggtggatcacgaggtcaagagattgagaccatcctggccaacatggtgaaaccccat

SEQ ID NO: 426601 - DNA, 201 bp, Homo sapiens
gtgtacacttctctggagagagaatctgtagtttccatcagatactcagcgggttctgtgacccaaataacaattgttctaggccgggcgtggtgtctcaygcctgtcatcctagcactttgggaggccttggcaatacagtgaaaatccgtctctactaaaatacaaaaaattagctgtgtgtggtggtgtgcgcctgta

SEQ ID NO: 426602 - DNA, 201 bp, Homo sapiens
gggcctccccttctcatcctccccacccccccgccaaggttctcacactggcctgggcttgggtgcccatataggaggtctgtatgttcaccaacagtgcrgaggggtcacacattgcaaaacactgcccagaacagtaaaaagagcctgcatgccatgatgttcttcctcatttcactcatgaaaggaaacgtgatttgg

SEQ ID NO: 426603 - DNA, 201 bp, Homo sapiens
gagaatgaagtgaactgggaggcgaagcttgcagtgagcagagatcgcgccactgcactccagcctgggcgacagggtgagactccatcccaaaaagaagaaaaaaaaaaaatagctggcatgatggcacacgcctgtactcaggaggctgagatgagaggattgattgattccgggaggtcgaggctgcagtgagccata

SEQ ID NO: 426604 - DNA, 201 bp, Homo sapiens
gctactcgggaggctgaggcaggagaatcgcttgaacccgggagtcagaggtcgcagtgagccgagatcctgccactgcattccagcctggcgacagagcragactctgtctcaaaataaataaataaataaaaaataaaaaaaattagccaggagtggtggcaggtgcctgtaatcccagctacttgggaggctgaggca

SEQ ID NO: 426605 - DNA, 201 bp, Homo sapiens
cagggtgagactccatcccaaaaagaagaaaaaaaaaaaatagctggcatgatggcacacgcctgtactcaggaggctgagatgagaggattgattgattycgggaggtcgaggctgcagtgagccataatggagcaattgcactccagcctgggtggcattgagactttgtctcaaaaaacaaaacaaaacaaaaacatg

SEQ ID NO: 426606 - DNA, 201 bp, Homo sapiens
gagactccatcccaaaaagaagaaaaaaaaaaaatagctggcatgatggcacacgcctgtactcaggaggctgagatgagaggattgattgattccgggargtcgaggctgcagtgagccataatggagcaattgcactccagcctgggtggcattgagactttgtctcaaaaaacaaaacaaaacaaaaacatgggtaga

SEQ ID NO: 426607 - DNA, 201 bp, Homo sapiens
ggacttttcttaaaataaatgttaactgagttctgtaattaaagaaaaaaataacctcttggttgttcagtattattaatgaaatcacaacttaaaatggyaggtaggtatattttttaaacatcctattggaattgagtgatctacctatcagtgtaactaaaaagaaagagcttgcttttacttgtcatgaaatgttga

SEQ ID NO: 426608 - DNA, 201 bp, Homo sapiens
ggctgaaaacagcacatttattctcttatgggtctggaggcgagcagtctgcaatcaggatgtggccagggttgattcctttttccagggctctgagggakagtctgtttcatgaccttcccctcacttcagtggttgctgacagtccttggcattccttggctgtagatgcatcattccaatatttgcctctatcgtcat

SEQ ID NO: 426609 - DNA, 201 bp, Homo sapiens
tttaggaataagtaaaactgggttttagcattaagataaaatgagtagtgtactttaaagaaataacactggaagtcatatatatagcactattatttgtwtttgaaaatgaacctacaaatagtgatcaatgtctgtgttagtccgttctcacactactaataaagacatacccgagactggataatttataaaggaaag

SEQ ID NO: 426610 - DNA, 201 bp, Homo sapiens
tgggaggctgaggcaggggaattgcttgaacccaggagatggaagctgcagtgagccaagatcgtgccgttgcactccagcctgggccacacagcaatacwccatctcaaaaaaaaaaaaatagcgtgatggtatttgaagtaaagatgctctaggcttttacttacaagcaaatttattttttccgccacagcgtcctcc

SEQ ID NO: 426611 - DNA, 201 bp, Homo sapiens
ttaacagaattcaaattatgattattttaggaataagtaaaactgggttttagcattaagataaaatgagtagtgtactttaaagaaataacactggaagkcatatatatagcactattatttgtatttgaaaatgaacctacaaatagtgatcaatgtctgtgttagtccgttctcacactactaataaagacatacccg

SEQ ID NO: 426612 - DNA, 201 bp, Homo sapiens
taagaaacctgtggtctagagaggctgacttacccagtgtctcacagtttggttagggtggaactgggacttgaactgtggttttatgacttctagtcacrtggttttattcatctaccacgtggtcatttaaattaccgcagttctttttcaagcagtatcacttaatcctcatttttattcttgcttcacttagcatag

SEQ ID NO: 426613 - DNA, 201 bp, Homo sapiens
tctataatgaggactgcaccttcctttgtctcatttagtcagggtagacaaggttatactatactaaaacccccaaatctcagtgacttagtgtcacacarggttatttctaattaatacaaagtctgctatggcaaaaatgggggaccattacctttcactacctttttactattgatatagcaatctaggctacttttt

SEQ ID NO: 426614 - DNA, 201 bp, Homo sapiens
ctgggactacaggcgcatgccactacacccggctaatttttgtatttttagtagagagggagttttgccatgttggtcaggctggtttcgaactcttgacytcatgtgatccgcctgctttggcctcccaaagtgctgggattccaggcatgagccactgcacccagtgcaatttctatttcttttgtgaagaagacaagc

SEQ ID NO: 426615 - DNA, 201 bp, Homo sapiens
cccgccaccacgcccggctaattttttgtatttttaatagagacagggtttcaccatgttagccaggacagtctcaatctcctgacctcgtgatccgcccrcctcggcctcccaaagtgctgggattaaggcgtgagccaccgcgcctggccaaacatcttttatggatattttctgggtcttggttattattttattttt

SEQ ID NO: 426616 - DNA, 201 bp, Homo sapiens
tgagagtgaaaaactggaaacaacctaaatgtgaaataggagaggaataatgtcagtaagttgtggtgtatctatataataatgttcttcaccattaaacrtaatgtttagggagaatttttcattttatggaaagattctgataaaaaatgagcatatacacatgtgcacacacacacacacagtttgatctatgcatag

SEQ ID NO: 426617 - DNA, 201 bp, Homo sapiens
ctctacattacagcatgagtctgaaggcatggccacatcatcatttaaatagtaaagcttcagtcatgagcagaactcgtttttgtcttagtcatccactrataatcctggaagttgcatccgtaactctaaactcagcacatctagaatccatcgttgcctttaagaataaataatttttttacgtctcatgattttctg

SEQ ID NO: 426618 - DNA, 201 bp, Homo sapiens
agtcatctagttcatctttattacgaaatgaaaatggtattgatgcggagccagctgaggaggcagttattcaaaaacctcggaggaagacaaagtaggartttatttattcttctaactattctccaggattaccctgatgctttgtttggagctccgaagcagtagcttctcattaagtcttattacatacttgtattt

SEQ ID NO: 426619 - DNA, 201 bp, Homo sapiens
atttgtttcccattgaattaaaacaaaatccaaacttcccttggtctgcaaggccctaactaatctggctcctgcctacctctccttggtaattgtgcggsagccttgctgtccttttacctgaaacattccaagcccaatttaacctaaaaatatttgcatttgttccggttgctgctttctcattcaggtctcagctca

SEQ ID NO: 426620 - DNA, 201 bp, Homo sapiens
agccatcaactaaagaactcaaagagcacccagaggctcctgttcaaagaagacagaaaaagacaaggctacctcttggtatgtgaagaaaccaaggttargttgtgatagcacttgtgattttgatgacatgataaaaacctctctgctttcatttctttccccctatccatatcccacaggtggtttcttgcttttatg

SEQ ID NO: 426621 - DNA, 201 bp, Homo sapiens
caagtgacagaatccacctttacacaccttcttctgttaatggtagcctctggtaagaattcacaatgacattagcaattgttaatggcaataacagcaayttttcttatccttccattctttttcaactgcaaataatgaaggctctgtttttgtttccaaatatatggcaagaaaatacttattcctttggttaatggg

SEQ ID NO: 426622 - DNA, 201 bp, Homo sapiens
gttgtatttataactattaccttaaaaagcactggtttagaaaaagccataacttaaatagtgttataaaatatatatcaggtttaaacataaatttagcraatatggtagaagggaaaaaagccttcatttttgacctccccttactgaataaattgaaatatgaagtttgtcttttctgaaactggcttagtgattgag

SEQ ID NO: 426623 - DNA, 201 bp, Homo sapiens
gtgtatatatatatatatgcacacacgatatgtatacaagatatgtcttaaatatagcatataaatatattttatcgtacatgctgcatataatatatagkatatattatcatatatatatttttaacattgtttctaatactcaaccactagaatgtaagtttcataagagcagagttctctccattgtgttcattagtg

SEQ ID NO: 426624 - DNA, 201 bp, Homo sapiens
ccaggcttgtcttgaactcctgacctcaggtgatccgcccacctcggcctcccaaagtgctgggattacaggtgtgagccaccgcgcctggccatttcttytagcttcttatggttgttgacagtccttggcattgtttgacttgtggtggcataatgccaatctctgcttccatcttcacatttttccttgtgtgtctgt

SEQ ID NO: 426625 - DNA, 201 bp, Homo sapiens
gcgcggcccgatgacgcattgcgcctgcgcgcgcgaccgagccgggaggggtggggcgccaggtgcttgggggccggcggccgccgaggccggctaaacgsagaatggggaagaatcctgtggtaagcgagccttagctacttttaattgttaggatttttgtcttcagttgagccgtcctacttttgaggattagaggtt

SEQ ID NO: 426626 - DNA, 201 bp, Homo sapiens
ttgaacccaggagatggaagctgcagtgagccaagatcgtgccgttgcactccagcctgggccacacagcaatactccatctcaaaaaaaaaaaaatagcktgatggtatttgaagtaaagatgctctaggcttttacttacaagcaaatttattttttccgccacagcgtcctccacgagctcttccacctgtgccaagg

SEQ ID NO: 426627 - DNA, 201 bp, Homo sapiens
agggagtttcatatcccagaacagtgatgggagtgagtagctgggatagattcagaaaaccaagcaatgctagaaagagcggaacagggagagccaacatytgcagatcagcggccagccatgaagctgacaggatggctgagattatagttcataaaacttagagaagcagtcttttttttttttttttttttttttccc

SEQ ID NO: 426628 - DNA, 201 bp, Homo sapiens
ctggagtgcaatggtgtgatcttggctccctgcaacctccacctcctgggttcaagcgattctcctgcctcggcctccttgagtagctgggactacaggcrcatgccactacacccggctaatttttgtatttttagtagagagggagttttgccatgttggtcaggctggtttcgaactcttgacctcatgtgatccgcc

SEQ ID NO: 426629 - DNA, 201 bp, Homo sapiens
gcggccgccgaggccggctaaacgcagaatggggaagaatcctgtggtaagcgagccttagctacttttaattgttaggatttttgtcttcagttgagccrtcctacttttgaggattagaggttgggtctctgggtgggtggaacgtcatttttgcgggacttttgaaatcagttacgtgaacagagccctgggatcgat

SEQ ID NO: 426630 - DNA, 201 bp, Homo sapiens
ggtaagcgagccttagctacttttaattgttaggatttttgtcttcagttgagccgtcctacttttgaggattagaggttgggtctctgggtgggtggaasgtcatttttgcgggacttttgaaatcagttacgtgaacagagccctgggatcgatcgcgcgcgcttcgtagcatctttagaacaatagcgcgttcctgtg

SEQ ID NO: 426631 - DNA, 201 bp, Homo sapiens
acttattcctttggttaatgggtaactattgttatgtccacctgcatttttaatgaaatatcttccttttaaaaatctgttttagatcttcaagttatagtttttttttttttcgagatagagtctcgctgtgtcacccatgctggagtgcaatggcactatctcggctcactgcagccaccgcctcctgggttcaagcga

SEQ ID NO: 426632 - DNA, 201 bp, Homo sapiens; identical to SEQ ID NO: 418410

SEQ ID NO: 426633 - DNA, 201 bp, Homo sapiens
tccaaggtacactctaggtggtgaaatgttttctactctgagaagcagaggttaagctgcatgtcatacatacaaatacatgcatacatacaaaagtaacyggggcagcccagttactttttgacaaacatctctaggaattgaagattaggttttttctcctttttgtaaaactttatcatctttcaataaacaacaaaa

SEQ ID NO: 426634 - DNA, 201 bp, Homo sapiens
tctctggccaagtcagctggtccctatttggtagataccggccagatgcagcttagattctattccatgaggagggtgtgtgtgtgtgtgtgtgtgtgtgtgtgcgcgcgtgcgtgtgtgtgtgtgtgtgtgtgtgtgtgtgtgtgtgtgtgtaatgcatcatcattctcatatgcaagaagagtggtatcccagcacttt

SEQ ID NO: 426635 - DNA, 201 bp, Homo sapiens
tctgtcatttaggattcagaacctttaccgcatacatatactagctattttctataaaagaaatgtttaaagtatgttatatgtcatttctcaactaataytctttatatataagaatattgggaaaatctttttaagattttgcttaaggtgatcagaataatgtgcatcttacagagatattataaaagatacatttgg

SEQ ID NO: 426636 - DNA, 201 bp, Homo sapiens; identical to SEQ ID NO: 418271

SEQ ID NO: 426637 - DNA, 201 bp, Homo sapiens
gttcatttaagctacattttaagtaactattcctgccaacagcagctcattccttgtcttaaacctcttttgttgttgttgttgttgttgttgttgttgttctaggactatcctcaagttctctttcttatctatgaacaaaatctgcattttccatgcaaagatataatgtcatagtgtgtgtcaagtgcctatttggta

SEQ ID NO: 426638 - DNA, 201 bp, Homo sapiens
tgttcatttaagctacattttaagtaactattcctgccaacagcagctcattccttgtcttaaacctcttttgttgttgttgttgttgttgttgttgttgttctaggactatcctcaagttctctttcttatctatgaacaaaatctgcattttccatgcaaagatataatgtcatagtgtgtgtcaagtgcctatttggt

SEQ ID NO: 426639 - DNA, 201 bp, Homo sapiens
gtgttcatttaagctacattttaagtaactattcctgccaacagcagctcattccttgtcttaaacctcttttgttgttgttgttgttgttgttgttgttgttctaggactatcctcaagttctctttcttatctatgaacaaaatctgcattttccatgcaaagatataatgtcatagtgtgtgtcaagtgcctatttgg

SEQ ID NO: 426640 - DNA, 201 bp, Homo sapiens
gagctggaacttttcttcattcacctgcttgacagttgatgctggctttcagctgggggcataatgaggttgttggccagaacatgtaaacatggcctctrcgtgtgacttgggcttcctcataatatggtagctgggtttcaagatccagcttcccgtgagaaggagacacagaagccatgttggcttttatgagttagc

SEQ ID NO: 426641 - DNA, 201 bp, Homo sapiens
ctacatttacgaagtcccaaaccaaagggtgttttaaaatattgtgaattggcattgaggtatgtgttggtgtggacagagtcctggcctagagaggcccctttttctagagtggaccaaaccgtgaacttaaagccagaggaccctgagtaggggtccatcttaattgtgtcccaatgtatgaactgagacataggacct

SEQ ID NO: 426642 - DNA, 201 bp, Homo sapiens
gaaatctttcttgataaacagagatctactttactctttttaacagctgtagtgatctacatcagacgtgtcataattcttttttttctttttttttttttgagacagagtttcgctcttgttgcccaggctggagtgcaatgacgcgatctcagctcactgtagcctccacctcccgggttcaagcgattctcctgcccc

SEQ ID NO: 426643 - DNA, 201 bp, Homo sapiens
tttgggaggccaaggtgtgaggatcgcttgagcccaggaattcaagaacagcctaggcaacatggcaaaacctcatctctaccaaaaaaaaaaaaaaaaaattgcccaagcatggtgatgggcccattagtcccagctacttgggaggctgaggtgggaggatcacttgagtctgggaggtggaggttgcagtgagccaag

SEQ ID NO: 426644 - DNA, 201 bp, Homo sapiens
acctggattgagacatagtccattgaagtaatgctcacctgcaggacagaaaaatagaagttcagttcagaagtatagttcagaggtagcaagactaaagrcctacaggagccaagcaggtaacagaaattgcagtaggctaggtgaagccaagagtctatgagcactttaaggcactcacctctcagttccaggtggttt

SEQ ID NO: 426645 - DNA, 201 bp, Homo sapiens
ccacacccagctaatttttgtatttttaatagagatggggcttcaccatgttggccaggcttgtcttgaacttcttacctcaggtgatccacctgcctcarcctcccaaagtactgggattacaggcatgaaccaccgcaccaggccttcatatgcagatttgttacatgggagtattgcgcccaggtagggagcacggta

SEQ ID NO: 426646 - DNA, 201 bp, Homo sapiens
gtagtaaagaaccaaaacagtttctcatctatattacgacaagaaatatttcccccatggttttctacagggaactaaaaacttggtttaaaaaaaggcgsggggtaggggggttgtctcactgaaaagcaatctggagactatttaaatgaccctgactaggagtaactgattaaggttagtagagcaaggctatattga

SEQ ID NO: 426647 - DNA, 201 bp, Homo sapiens
aagcacattgcataactagattatgctaatatatcagttatgaaaatccagaggaaaagatccctacatctttgaatatactgtctcaaaactctctgtcrctatcaaaatgaaagcattgatttttaaagacatagtagctacaacaccaaaaatcggtagccctgtatagccacccccatccccaccaggccatgaagc

SEQ ID NO: 426648 - DNA, 201 bp, Homo sapiens
ccttcaaggaggctgttggaaacaaaaccttgtatggaaccattctagaatagtttgggtgcttgtagtcatgttccttcaagaatggaacatgacagccrggtgtggtggctcacgcctgtaatcccagcactttgggaggctgagatgggcagatcacctgaggtcaggagttcgagaccaccctggctaacatggtga

SEQ ID NO: 426649 - DNA, 201 bp, Homo sapiens
tcccgagtagctgggactacaggcacctgccaccatgcccggctaatatttttgtatttttagtagagacagggtttcaccgtgttagccaggatgatctyaatctcccgatcctcgtgatctgcccgcctcggccgcccaaagtgctgggattacaggtgtgagccacctcggctggcccttgactttttaataatagct

SEQ ID NO: 426650 - DNA, 201 bp, Homo sapiens
ttgacctggcttccttcacgtggaacaagttaacacagacaggttatctcagactatgcgggtttccaagaatctttctacccaaaagtatttcactgctrtagtcaaaagagtgtgagggtgccttcaaggaggctgttggaaacaaaaccttgtatggaaccattctagaatagtttgggtgcttgtagtcatgttcct

SEQ ID NO: 426651 - DNA, 201 bp, Homo sapiens
ctgccaccatgcccggctaatatttttgtatttttagtagagacagggtttcaccgtgttagccaggatgatctcaatctcccgatcctcgtgatctgccygcctcggccgcccaaagtgctgggattacaggtgtgagccacctcggctggcccttgactttttaataatagctgttttgactggtgtgagatggtatct

SEQ ID NO: 426652 - DNA, 201 bp, Homo sapiens
gagaatatgaaggaaaagtattcatgaataaccctgatgcagtacaacactagccacagtagtggtctctaggagagagagaggaattctgtcaaggagamtcattcttgataatgatgcaaactactaaatgtcatcctaaaggaagagataatcttcgttgcttctgcttatagttctaattgttaagactatttagag

SEQ ID NO: 426653 - DNA, 201 bp, Homo sapiens
gcgtgaaccctatcgtgaactgcacatgcaagggatctaggctgtgcactggttttgagaatctaacgcctgatgatctaaggtggagctgaggcactgawgctagcattgaggagcagctgcaaatacagattaacattagcagagaggtttgactgcacagagaccatcataaatcaactgcttgcagacttatatcaa

SEQ ID NO: 426654 - DNA, 201 bp, Homo sapiens
cccaatgatgagacagcagaagacttttaagactggcaacaaaatgaaagctgcatttaaaagaaaataccaagagtcctatttaaattacgggtgcattsaacctgctttgtataatatgtggtaactagctatccaacgaagccatgaaaccttcaaaactgctttgctacatggagaccaagcacctcgcattaaaaa

SEQ ID NO: 426655 - DNA, 201 bp, Homo sapiens
gcaaaaaggcattttttttttttttttgagacagggtcttactctgtcactcaggctggagtgcagtggtgcaatcagagctcactgcagcctcaacctcytaggcacaagcaatcctcctgccccagcctcccaagtagctgcgaccacaggtgcacgccaccatacccagctaatttttaaattatttgtagagacaag

SEQ ID NO: 426656 - DNA, 201 bp, Homo sapiens
agaactatttcattattccaagaatgattgactggaaagtacttgacttacaggaaaatcacagtgatacaatacagctcctacttttaaagcactttccrtttaaaaaaaaaatcataccagtgtataaaaatagttataccgaagatgtgaatcaacagccaagtaatttattggcacttgaaagctttgtggtataaa

SEQ ID NO: 426657 - DNA, 201 bp, Homo sapiens
ggaggataaagtgagtgtgcatttgcacatggggggacataagaaaactaaatgcttattttccataattggaactcaagagataatatctaaaattgactttttttttttttgagacaggttctcactctgttgcctaggctggagtgcagtggctccatcttggctcactgcaacctctgcctcccaggctcaggtgat

SEQ ID NO: 426658 - DNA, 201 bp, Homo sapiens
atgccatcaccccttttggcacaaaaataattttcagtaaaaggttaaaaccatcatgttgtatcaatgagaactatttcattattccaagaatgattgaytggaaagtacttgacttacaggaaaatcacagtgatacaatacagctcctacttttaaagcactttccgtttaaaaaaaaaatcataccagtgtataaaa

SEQ ID NO: 426659 - DNA, 201 bp, Homo sapiens
cttccctgattccccagcttcctcaatgggcaccactagaactcagaacccagaagtgtcaaggacctcaggaaggcaggggtttcagatgccacacccaytctataagagcagctcttccttaagaggaaatcactgtgagaaggcaaagggtagtagccacatgggtattatattgaaggaagatgaattatgccatca

SEQ ID NO: 426660 - DNA, 201 bp, Homo sapiens
aattaatacttaataacacattttgtataatgactttacaagggcgattgtattcataacactgcagaatatcatttgcttggctttgtttagttttaatrtaataggtggaatttctttataggccagaatatcattgtcatagtggctggagcaaatttacttttgaatacggaggatctgagggcagcagccaatgtc

SEQ ID NO: 426661 - DNA, 201 bp, Homo sapiens
gattaacatggaagtgtgctctgctggggatgtcacacatttatgccagctccacagcgtttattagagagcagagccttaagaagcagggacatgagtcrggtaccttcagtgaaggaactaacccatggccatagtcaagggcccaggcaggcaagggacaatgggagggagagaggagtgaggcagctatggacagac

SEQ ID NO: 426662 - DNA, 201 bp, Homo sapiens
ctcccctgggttctgatgaaaacaaaggccataacctggaaagcactcagcagagagcctgactctgagcagagcctcaaaacaaaagctatcgcagaccrgcagactcagattaacatggaagtgtgctctgctggggatgtcacacatttatgccagctccacagcgtttattagagagcagagccttaagaagcaggg

SEQ ID NO: 426663 - DNA, 201 bp, Homo sapiens
aagatggcccagggttgctgctggcgtctgtgacaccctgtgcaaattattatagaagaagctgcccctcttgctaggcacacagcttggtgagctggccrtggcccacagcccactctcagccctcagctgggcacccttgcgcaatgccactttgcctaatcgcacaccgcagccccaaataagcctacctcccctggg

SEQ ID NO: 426664 - DNA, 201 bp, Homo sapiens
ataccccccaacttcctttcctgctccatgtctgtttatctaggacttgggcgcctacatgaccatttttctctctgtcccaatgctgtcatgatgtgggwtgacttcagtgccatgaggatgaaccattaccaagtctcatagctcctagatgccctctattctggtgactcttcacctccactccactgcagcctccca

SEQ ID NO: 426665 - DNA, 201 bp, Homo sapiens
aggatcgcttgagcccaggaattcaagaacagcctaggcaacatggcaaaacctcatctctaccaaaaaaaaaaaaaaaaaattgcccaagcatggtgatrggcccattagtcccagctacttgggaggctgaggtgggaggatcacttgagtctgggaggtggaggttgcagtgagccaagattgcgccactatactcca

SEQ ID NO: 426666 - DNA, 201 bp, Homo sapiens
ctagagtgagatggtggcagtagctgcagatgtcctcagctcagtttggaagacatgacagatgtgtctcttctcccatttctatatgttatctgaatctyagcctccaaatgacagagagtgcatgtccgccctctcttcttccaacctgaatgttagggggtttgcctgcttgcatttgggattgcactgagtaagcac

SEQ ID NO: 426667 - DNA, 201 bp, Homo sapiens
aagacagaggagagtctgggctaaagatactgatttaggacccattatattcatagcagctgaaactgtatggctacataccccccaacttcctttcctgmtccatgtctgtttatctaggacttgggcgcctacatgaccatttttctctctgtcccaatgctgtcatgatgtgggttgacttcagtgccatgaggatga

SEQ ID NO: 426668 - DNA, 201 bp, Homo sapiens
gaatcactcactctgtaataacgcatgggtatgtaagtaagctgagaacaaacaaaagccaggggcacagggaatttatctttcctattctttattctcctttctttctatccttcacatttgagtcctatagtgttcagagttgctgatgaggcactaggcagcagcagccagctgcatgggtgtcccataactactcag

SEQ ID NO: 426669 - DNA, 201 bp, Homo sapiens
cccatcctcctgacagttcttggttcggtcagtgcctacctcagctatggtccaggccttgcactaggtctcaggacagggaggtgatgaagacaggcgtsctaccctcaaggggagggcagggggcagccagagggcctgagactggtggtttccgggacagcacagtgctttgaacatagtgctaggcaataaatatgt

SEQ ID NO: 426670 - DNA, 201 bp, Homo sapiens
tgttaaattcctcactccaggggttgagtgtccctaggactcactggtggccatggagactgtaaatggaggtaaacaggagaggaactggctgacagagstagggatttctggctcagtgaggaaagcagggaggtattagcgtgcattgaacttagagttgctgcgcagggcttcttaactcactagaagtccctgact

SEQ ID NO: 426671 - DNA, 201 bp, Homo sapiens
aagaataataaattagtgtaatgaattttaattgggtaataattaatagtacaatctcctgttatagaggcttctgttgtcagaagcttgcagccaaaagragaaaagatcagtgcaaaagccaaaaagcaacacatttggtgacttttggctgaagccaatattagcatgacctctttggttgaaagacttttcatcccc

SEQ ID NO: 426672 - DNA, 201 bp, Homo sapiens
gcttatcttttgatattcttttgaagggcagaggctttaaatttggataaatttcagtttatcaggttttttaatctttgtgcttttggtgtcctaagaartctgcctagcacaaggttacagcttttctcctgtcttcttctagaagtttgttgtttcaactcttacatttaggtttgtgacccattttgagttaattgt

SEQ ID NO: 426673 - DNA, 201 bp, Homo sapiens
aagccctcccaaagctcttcttcaatgcagaaagatccctcccagtgataagagtgaaggaagcacctcagcccccttagctgaagaaatgctcttgttcmtcatacacccagcccttttgctttccatgacccttgctgcattgtcaaatacagaagccactagccacatgtggatatttagatttaaatgtaatcaaag

SEQ ID NO: 426674 - DNA, 201 bp, Homo sapiens
tagcttcaggtcatagttctggactctggaagccctcccaaagctcttcttcaatgcagaaagatccctcccagtgataagagtgaaggaagcacctcagyccccttagctgaagaaatgctcttgttcctcatacacccagcccttttgctttccatgacccttgctgcattgtcaaatacagaagccactagccacatg

SEQ ID NO: 426675 - DNA, 201 bp, Homo sapiens
acagagtgagaccctgtgtcaaaaacaaaagtgcgtggcatcttccccgtcactctcttttgctcctgctctccccatgtgccatgcctgctcctgcttcrtcctccaccatgagtgaaagctccctgaggcctccccagaaaccacgcaggtgccagcaccatgcttgtacacctgcaaaaccatgagccagttaaatct

SEQ ID NO: 426676 - DNA, 201 bp, Homo sapiens
ttttgttttgtttttgtttgtttgagatagagtctcattctgcccgcccaggctggagtgcagtggcatgatctcagctcactgcagcctccacctcccakattcaagtgattcttatgcctcagcctcccaagtagctgggattacaggcaggcaccaccacacccagctaatttttgtatttttaatagagatggggct

SEQ ID NO: 426677 - DNA, 201 bp, Homo sapiens
acataagtgttgttatggaaacatttattacatggaacaatggttattttttagtaatgtggttgatttttaaaacatcaaatagtggggaaaaacatcaytaagacacaatagcacaggctattttaatattttttattaagggctataaaaatacccagaaagataaataaatgtgatgcaatgatatctgtcctaata

SEQ ID NO: 426678 - DNA, 201 bp, Homo sapiens
atgacattgtgaaaggctggtcacttctggctagagtgttgtttgtccactctacaaattccagagtagctgcatcttcagacaaaatgacattttagtcrcagacattttagctaggaaaagatatgagtttcacgcctgtaatatcagtgctttgggaggccaaggtgggaggattgcttgaggccaggagttcaagag

SEQ ID NO: 426679 - DNA, 201 bp, Homo sapiens
gtaagactgtaacatgggagaagaccatatgtactaatctttattgtctctctcattgcctggtacactttttcacacataagtaagttttaaataaatarggctcaaggatatgacattgtgaaaggctggtcacttctggctagagtgttgtttgtccactctacaaattccagagtagctgcatcttcagacaaaatg

SEQ ID NO: 426680 - DNA, 201 bp, Homo sapiens
agatgaggtttcaccgtgttagccaggatggtcttgatctcctgacctcgtgatctgcccacctcagcctcccaaagtgctgggattacaggcgtgagccrtcgcgcccggcctaaagaatgtttgaatggcaaacaagccttggaagttaaagacctgtggagagattcagagacttctccccaagataatttgttttcc

SEQ ID NO: 426681 - DNA, 201 bp, Homo sapiens
taaagtggtatggtactgtttgaaaataaagtgtgatcagtttaagatgcatattgtaaaccctagatcaaccacttttaaaatactaggggaaaaaatcwgccaggcatggtgacttatgcctgtaatcccaacactttgagaggccaaggtaggaggctcactttaggccaggagttcaagaccagccctgggcaactt

SEQ ID NO: 426682 - DNA, 201 bp, Homo sapiens
agtctagtttttagaaaacagtagtagggcaaacaaaacatatctagcagtcagattcaactttcagcccaccaatttacaacctctgctgtagattcaastgtagagttcaagccaaggtccagccaaggtagcagtcagacaaatggttagcattagaggggtatgggagaagataacaagggtgtcctgactagcaca

SEQ ID NO: 426683 - DNA, 201 bp, Homo sapiens
accgttcattcaaaaatatttacttctgcccatgttggagtaactagtgagcatccagagatcactagacatgcaaagaatcaggaaaatgtgatctatarccaagagtggggagaaaaccactcagtcaaaataaacacagaaaaacagggatggtggaattagcaaaaaggcattttttttttttttttgagacagggt

SEQ ID NO: 426684 - DNA, 201 bp, Homo sapiens
agcctcaacttccaggctccagcaatcccccgacattaacctcccaaatagctggaaccgcaggcacacaccagcatgcccagctaatttctgtttttttktttgtttgtttgtttgtttgtttgttggttggtttgcagagatggggttttgccatgttgctcaggctagtctcgaactcctgggctgaagcaacccacc

SEQ ID NO: 426685 - DNA, 201 bp, Homo sapiens
taattaattggcaaaatagaaaataaaatattggttttgtagttatttgtcactgtcatttttattattttacaaatgcatacttttcttgtcttcagtgratttaaaagcagttcatcaggaacttttgacaaatgactttgttccaccaaaccctttctgctctgtttttcagcattctgattttcccactttccagtt

SEQ ID NO: 426686 - DNA, 201 bp, Homo sapiens
gactataaatcatgctgctataaagacacatgcacacttatgtttattgcggtactattcacaatagcaaagacttggaaccaacccaaatgtccaacaaygatagactggattaagaaaatgtggcacatatacaccatggaatactatgcagccataaaaaatgatgagttcatgtcctttgtagggacatggatgaaa

SEQ ID NO: 426687 - DNA, 201 bp, Homo sapiens
agttaatgggtgcagcacaccagcatggcacatgtatacatatgtaactaacctgcacattgtgcacatgtaccgtaaaacttaaagtataataataattaaaaaaataaaaaataaaaataaactgattaaaggcaaaaaaaaagaatgacagccagatttatatttcacatagttcacttagtgctaaagtcagattta

SEQ ID NO: 426688 - DNA, 201 bp, Homo sapiens
aaattatctctgtttgtatatggttgatgtgttttctaaataaaagctgagagttttgtttttgctttgggtttggggttttttgtttcagggtgttttgtttttttttttgtttgtttcccagatacatcacatattaggtactggcttgtctctcatggtcaaaaatacgttcaaatgcaattcttctgtatcattgca

SEQ ID NO: 426689 - DNA, 201 bp, Homo sapiens
attatctctgtttgtatatggttgatgtgttttctaaataaaagctgagagttttgtttttgctttgggtttggggttttttgtttcagggtgttttgttkttttttttgtttgtttcccagatacatcacatattaggtactggcttgtctctcatggtcaaaaatacgttcaaatgcaattcttctgtatcattgcaga

SEQ ID NO: 426690 - DNA, 201 bp, Homo sapiens
aggctgtccctgccagcagtaaccctgttcccatcctgtcctgcagccttacccgccccagctctaggcctctgtccagacgcctctctcagtgttctccytctgcacgtcctccccaaatgaaagcatggggaatggatttcagagaccccagcacacaatgttgaccatggctggaactctctggagcctggcatccct

SEQ ID NO: 426691 - DNA, 201 bp, Homo sapiens
gtcacagcataaaccccttgtctcacaatcctatggattgtgccctaggatggtgacctactttgtttcttagaagccttgtctggccccctctgacctargtcatgggctttctctgccaaaaacttgagcaacttaaggggccactgagataataccatctttgtctgcctcacctttgttgaacacctgctctgtgcc

SEQ ID NO: 426692 - DNA, 201 bp, Homo sapiens
gctaagccttttcacatacattacttaattcagtcttcacaatggccctatgaggtaagttcccattgtacagataaataaacccacagaaaagctgagtracttgccagaggtcacacagctagtaagtggtgaaattaggacttaaacccaggtctgtctgaaatccaaaccatttactgcattgtcccagttgaaaaa

SEQ ID NO: 426693 - DNA, 201 bp, Homo sapiens
gccgggcacagtacctcattcctggaatcccagtactttgtgaggccaagacaagaggatcgcttgagcccaggagttgctgggcaacaatagagagaccycatctctacaaaaaaattttttatagccaggcgtggtggcaaatgcctgtagtcccagctactcaggaggctgagttgggaggatcgtttgagtccgggg

SEQ ID NO: 426694 - DNA, 201 bp, Homo sapiens
tctgccttgccttaccttctttatgatttttatatcactagtttgacttggagtgtttcttgtatacatacagaaggctgctataaattatctctgtttgyatatggttgatgtgttttctaaataaaagctgagagttttgtttttgctttgggtttggggttttttgtttcagggtgttttgtttttttttttgtttgt

SEQ ID NO: 426695 - DNA, 201 bp, Homo sapiens
cccagctggtgcatgatcacctatctcagcttttaaaggagtttgagcattacttcccaaccacaaaagaccccccagactgggaaggaatggatctgcarcccatttgtggataagccaaggtgaatcgactttgtccgtgctggaaaaggaccaactgcttgagatcgcaaatgacggtggccttaaaagtatgttgaa

SEQ ID NO: 426696 - DNA, 201 bp, Homo sapiens
tatatttccatagcaatagactctgatgtcaactaaaactctgtgttatctttttacatgctgccaattaaaagtgatggcttgagagataagactcgtgwtcacccaagcatctaagcttaatcctgccaaatcaggaaatgagtgcctaattttcaaaaggtttaattggatagtggaataagtgaatttagaagcttt

SEQ ID NO: 426697 - DNA, 201 bp, Homo sapiens
cagattcaaagcaagaaaccctcttttgctaagattgagctcttgatagatttaaaatatcagtgtaattaatcagcaattaattatgttccaggaattaygggtctgtgagaggtggctgattaaaaacttaggcctgacccatctcatacctgattagctatggagcgtttggagagtaatcagatggtgctgacttaa

SEQ ID NO: 426698 - DNA, 201 bp, Homo sapiens
taaatcaagattttcttcattgaatacaattttaatcactttttagtactttctacacagtgatgaactacctttttgtcatatgatcttcaaggacaagktttctttgaattgtagaaggttcctcttatgacaactgattgaagacacgtttgaggccttaaattcttcatatgagcatttaaaatatttctatctgcc

SEQ ID NO: 426699 - DNA, 201 bp, Homo sapiens
cctcctagggcactacaacatttaaaggataaatttttaataaaattgacttcctgtctctcttcaagtctctctgcagtcctaaaacttgctttgagacrtgcttaatacaaacctatgtttatatttccatagcaatagactctgatgtcaactaaaactctgtgttatctttttacatgctgccaattaaaagtgatg

SEQ ID NO: 426700 - DNA, 201 bp, Homo sapiens
tccaaccctaagattatgaaattgattttattttaggtctgttgaatttgaggcaaagaaagaaatgacaaagagaaatatttgagttatggaactgaacktgggaaatgaatcctaaaaccatatgagtggataggagaggaatagaagcagggggctgtattttgggaaatgttccagttaggaggttgattaaagcaa

SEQ ID NO: 426701 - DNA, 201 bp, Homo sapiens
attgttaactttataaactgataaggaataacaactaaggatttataattttcaagtctaaagatagtatctttattactgtgccttattcctaaatttamctgtaactagcctggacacgcatgcctattctttagtatcacttcagaaataaaactgcttcaataactaagcccttttagatggcatccaagcccaact

SEQ ID NO: 426702 - DNA, 201 bp, Homo sapiens
gttttttgatgtaagatactattattagtagtagtattttttgagacagaatctcactctgtcaccaggctggagtgcagtggcatgatctcggctcaccrcaccctccgcctcccaggttcaagcgattgtcctgcctcagcctcccaagtagctgggactaacaagcgcatgccaccacgcctggcaaatttttgtatt

SEQ ID NO: 426703 - DNA, 201 bp, Homo sapiens
tctactctcttaggctgagaacctaaaactgtttttaaaataaagtctagtttttagaaaacagtagtagggcaaacaaaacatatctagcagtcagattsaactttcagcccaccaatttacaacctctgctgtagattcaactgtagagttcaagccaaggtccagccaaggtagcagtcagacaaatggttagcatta

SEQ ID NO: 426704 - DNA, 201 bp, Homo sapiens
cacacatgccctttcatgccacagcatttttacttttctctaatgttcctgttgcctttgccttaactctataatcacgttgactgttatattgctctttyccctggaagctgaaatgttgtaaagtacaaagtaaagaaaatggaaatagggaattggtacccagctgtcgtgaagattgagatttcagacttttctcta

SEQ ID NO: 426705 - DNA, 201 bp, Homo sapiens
ctcagcctcctgcaggcaagaacaaggcagaagccccatttttagaacttggaagagagcgcagagcaagcctggcccctgggccagcctaagtatgagcyatctcagcagctggcgcagccctccttgaaacactctcccttgaagaaattctgacctaaacccagtgtagccagcaaggctgaccctgttggtggaatc

SEQ ID NO: 426706 - DNA, 201 bp, Homo sapiens
gcttttcctcttccctgtatgtatttagttttgtttttgttgaaaagtaagtggaaaaaaaagtattttgttgttgagaataagttgcagacaacatgatrcctcaccccaaatacttcggcatacatctcctaagaggaaacacaataccattatcacacctaggaagattgtcagtaattccatgctatcatctaatat

SEQ ID NO: 426707 - DNA, 201 bp, Homo sapiens
ctctctctgtgtgcacacaaagagtcatgtgagcacacagcaagatggtggccacctacaagccaagagaagaggcctcagaatgaaacctactttgccartaccttgatcttggacttcccagcctccagaactgtgagaaataaatttctattatttaagctattcagtccatggtattttgtcacagcagccctagca

SEQ ID NO: 426708 - DNA, 201 bp, Homo sapiens
atcacttgagcctgggagaccaaggctgcagtgagctgagatcatgccactatattccagcctgggcaacagagtgagaccctgtctcaaaaagagggggraaaaaaaaccacctagagccaaaccatagagcccatggcagtgggagccatgcccactgccctcaatgcccattgctgctgatggagttggacaaggaaa

SEQ ID NO: 426709 - DNA, 201 bp, Homo sapiens
cacaacatctctgaaatcagcatcatagaataaagaaaacccaaatgaggttccgaaacagccctcttaaccttagaaatgatgttagtaaaactctgcasactctggtggctggaaaaaatgaagaagacaaaaagttgttcactgactgtaaggaaaggacagaggacaaggtaattgcagaagagatggatagacaag

SEQ ID NO: 426710 - DNA, 201 bp, Homo sapiens
acaaatcccaggccccaccttagatttaatggatcagaaactttggggatggagcccagcagtcggtgttttaacaaaccctccaggcgattccagtgcaygctcaagtttaagaatcactgactgagatgaaatgtgcctccattgaggatattcaaagatatgctacagattttgaaggtactgaaagagaagtttcaa

SEQ ID NO: 426711 - DNA, 201 bp, Homo sapiens
actacatgtaaagctgtctatttttcttgttgtatagatgatgggtataaattagcactaattacttatttttttttatcattccagatggttaaaggttwaaaaggttttccaaggattagtgttgtattgaaattgttaaaataaattatccatgccagcctgtatacatgtgattgtaattttcttttttctttcaga

SEQ ID NO: 426712 - DNA, 201 bp, Homo sapiens
taggccgggcgcggtggctcacgcctgttatcccagcactttgggaggccaaggcgggtggatcacgaggtcaggagatcgagaccatcctggctaacatrgtgaaaccctgtctctactaaaaatacaaaaaattagctgggcgtggtggcaggcacctgtagtcccagctactcgggaggctgaggcaggagaatggct

SEQ ID NO: 426713 - DNA, 201 bp, Homo sapiens
caggatcaatggcttccaaactagacacagagaaagggggacttggcagggcaagaaggagtgggagaaggtcagagtgtgaaccagcagtgaagtgaacrtgcccagtctgcgtggagggtgtgcaaaagagcaagggaggtcaagggaggaagtggaaaaataaatgaagaaacgacatgtgttaagagttctgttcat

SEQ ID NO: 426714 - DNA, 201 bp, Homo sapiens; identical to SEQ ID NO: 418523

SEQ ID NO: 426715 - DNA, 201 bp, Homo sapiens
agattcttcataaatattgaggattgatgatggtagataactctatctcagtgggaattatcacatgaacagctcaaaatgagaatgacttaatgagtgaygttcattaaatacttcacattttaagtaggatataagtgaaacattatataacaattctttgggctgcaatcaagtctagcatcttatattaagaagatt

SEQ ID NO: 426716 - DNA, 201 bp, Homo sapiens
agttgcaggatgttaatagtgggggatactagttgccggaggagacagagagtatatgggaactctgtactttctactctcttaggctgagaacctaaaastgtttttaaaataaagtctagtttttagaaaacagtagtagggcaaacaaaacatatctagcagtcagattcaactttcagcccaccaatttacaacctc

SEQ ID NO: 426717 - DNA, 201 bp, Homo sapiens
aagcgattgtcctgcctcagcctcccaagtagctgggactaacaagcgcatgccaccacgcctggcaaatttttgtatttttagtagagacggggtttcascatgttggccaggatggcctcgatctcttgactttttgatctacccccctcagcctcccaaagtgctaggattacaggcatgagccactgtgcccggcca

SEQ ID NO: 426718 - DNA, 201 bp, Homo sapiens
tacaacattgctacaaagagaagcctaaattgggtttcttcacaggcagtgatcacagtcaaggtcctcaggctgcctttcatcttattctcagagcatcrtgggagttccaagactaatgatacaaaagcagcctctagaactgaaaacagttccttaagaaataggaaatattctattggaaagaatggcaaaatggaa

SEQ ID NO: 426719 - DNA, 201 bp, Homo sapiens
agttcttgaatgatgtgagttccgcccaggacagttgcctcctagttgagtggctgcaccttcctccattctgacagtgattgtacaatgttaaaactaarctgtaagctaagtgaagacagggtctgaatatctccagaacttcacacagagtctggaatgtagtaattgtaacaaatatatgcggagaatggactgagt

SEQ ID NO: 426720 - DNA, 201 bp, Homo sapiens
ctgtaatgtccccattacccttcatgtgaacttataattgacatttgtctctaaaagcagtcaagcattcatctgtcatttcagttacactaggtaagtawatgtaaataggtgcaaagaaaagtttgatgagtcatatttatagaatatgttctgagcaaatggcagcaactaattacatccaacttatcgttagtgttc

SEQ ID NO: 426721 - DNA, 201 bp, Homo sapiens
gattattccaatttcttccatagttatcatactaaatcaagattttcttcattgaatacaattttaatcactttttagtactttctacacagtgatgaacwacctttttgtcatatgatcttcaaggacaaggtttctttgaattgtagaaggttcctcttatgacaactgattgaagacacgtttgaggccttaaattct

SEQ ID NO: 426722 - DNA, 201 bp, Homo sapiens
taaaatatccaagtttcttctcttcacatgaatcagtaaaaattttactgatgattagcaaaatcactagtaaaaattttactgatgattagcaaaatcaytagtaaaaattttactgatgattagcaaaatcattagtaaaatcatcagtaaaaaatcattagtaaaaactgtattcccatatagactctctctgctaat

SEQ ID NO: 426723 - DNA, 201 bp, Homo sapiens
tattccaatttcttccatagttatcatactaaatcaagattttcttcattgaatacaattttaatcactttttagtactttctacacagtgatgaactacytttttgtcatatgatcttcaaggacaaggtttctttgaattgtagaaggttcctcttatgacaactgattgaagacacgtttgaggccttaaattcttca

SEQ ID NO: 426724 - DNA, 201 bp, Homo sapiens
tcataaacttgaaaaattataagtcgaaccatcataagttgggaccgcttgtgtgtgtgtgtgtgtgtgtgtgtgtgtgtgtgtgtgtgtgtgtgtactgwggccctttggagagcatttgtgtaatatctaagatttttttcacgcactgccaccaagaatggattttgacccctttcggggagatatagccccagttgg

SEQ ID NO: 426725 - DNA, 201 bp, Homo sapiens
aaaaaaaaaaaaaatatatatatatatatatatatatatttttttttttttttttcccagctactcgggaaactgagacaggaggctggcttgtgctccaraggttggggctgcagtaagccatgggtgacagagtgagaccctgtgtcaaaaacaaaagtgcgtggcatcttccccgtcactctcttttgctcctgctct

SEQ ID NO: 426726 - DNA, 201 bp, Homo sapiens
accagcatgggcaacatagcaagactctctctctaaaaaaaaaaaaaaaaaaaaaaaaaatatatatatatatatatatatatattttttttttttttttycccagctactcgggaaactgagacaggaggctggcttgtgctccagaggttggggctgcagtaagccatgggtgacagagtgagaccctgtgtcaaaaac

SEQ ID NO: 426727 - DNA, 201 bp, Homo sapiens
tgcttctgcctgctgccccaggagtatccctagctgaggaatacttttattttgatctcttggcttgtgaatttctggccacacaggtagtataaatttcttttttttttttaatggcttctttttgtctgtttatttctgctttatattatgaaacctttgttaaaatgtactacagcatataaaactacatattttaga

SEQ ID NO: 426728 - DNA, 201 bp, Homo sapiens
ctcacgcctataatcccaacactttgggaggcaaaggcaggtggattgcctgagttcaggagttcaagaccagcatgggcaacatagcaagactctctctytaaaaaaaaaaaaaaaaaaaaaaaaaatatatatatatatatatatatatatttttttttttttttttcccagctactcgggaaactgagacaggaggct

SEQ ID NO: 426729 - DNA, 201 bp, Homo sapiens
ttaatagtaataaggcttctgttttatcccagagttctgagtatcttgtagaaggagagttttcagatctctaggctacaacattgctacaaagagaagcytaaattgggtttcttcacaggcagtgatcacagtcaaggtcctcaggctgcctttcatcttattctcagagcatcatgggagttccaagactaatgatac

SEQ ID NO: 426730 - DNA, 201 bp, Homo sapiens
atgccaaggaaacttttttgagactttttttcctaatcaccctccctcttcccccgtgaaatttttataccacgtacacacatacacacacacacacacamaaacatatgttccttgacctacaatgggattacattcagataaaccaaccgtaaactgaaaatataattaatagaaaatgcatttaatacagctaaccta

SEQ ID NO: 426731 - DNA, 201 bp, Homo sapiens
tgcaggtatacacgttagtaaaggcaacatggagagaaagaaattaatgaaccataatagttaaatttctactttttgtttttgagacaggaactcactgtcacccaggttggaatgcagtggtgtcatcatggctcactgcagcctctacctcccaggtttaagcaatcctcccacctcaacctcccaagtagctgggac

SEQ ID NO: 426732 - DNA, 201 bp, Homo sapiens
agaatcactcactctgtaataacgcatgggtatgtaagtaagctgagaacaaacaaaagccaggggcacagggaatttatctttcctattctttattctcctttctttctatccttcacatttgagtcctatagtgttcagagttgctgatgaggcactaggcagcagcagccagctgcatgggtgtcccataactactca

SEQ ID NO: 426733 - DNA, 201 bp, Homo sapiens
taagacctctcagaagtgagagaaccaatgagagagactgttgccaggctacaaactccagcagaaggcagaagagatgggtagacaggcgggggtgttgrgctatctgtaaaggacaatataataacagtaataatcctttacatttgtacagcaggttagattttacactgggcttttacatccattttctaatttaag

SEQ ID NO: 426734 - DNA, 201 bp, Homo sapiens
aatcactcactctgtaataacgcatgggtatgtaagtaagctgagaacaaacaaaagccaggggcacagggaatttatctttcctattctttattctcctttctttctatccttcacatttgagtcctatagtgttcagagttgctgatgaggcactaggcagcagcagccagctgcatgggtgtcccataactactcaga

SEQ ID NO: 426735 - DNA, 201 bp, Homo sapiens
atcactcactctgtaataacgcatgggtatgtaagtaagctgagaacaaacaaaagccaggggcacagggaatttatctttcctattctttattctcctttctttctatccttcacatttgagtcctatagtgttcagagttgctgatgaggcactaggcagcagcagccagctgcatgggtgtcccataactactcagag

SEQ ID NO: 426736 - DNA, 201 bp, Homo sapiens
ctcttgatttggtgacagtctgcctagccttcactctctcttatttgacattccagcactgactttccttgtcacttgtcatgatacaggctccttgtctrtagatcttcagaagcggccagatcttgaaaaggccttgcttactttgtacagtacactgcagcctcgtttaaatgaaataatccacgtataccctgagaa

SEQ ID NO: 426737 - DNA, 201 bp, Homo sapiens
atgatacaggcgtctataattactccttttctgtagaccttcagaagctgccagatcttgaaaaggccttgcttaccttgtacagtatactgcagcctcakttaaatgaaataatccatgtataccctgggacagtgcttccttccaccatgattgtaagtttcctgaggcctccacagccatgcggaactgtgagtcagt

SEQ ID NO: 426738 - DNA, 201 bp, Homo sapiens
aacctttcacaggtgagaatagagtaatccggatgggcaggcagcctaccctggggctgtcattgggtggggtccagaaaggcttcctccatcaccttccrtgtagctcttccagttgggagctggaggacccaggacagcaggaagcggggtaggtgacagtgggccacagaccacttggcctacttcacacttttatta

SEQ ID NO: 426739 - DNA, 201 bp, Homo sapiens
gaatggctgaacccaggaggcggagcttgcagtgagccgagaccagcctgggtgacagagggagactcctcaaaaacaaaaaaacaaaaaaacaaaaaaamacatatccttagattgttttacctacagtcatacaaagaccaggccaaaaaaaactaagttacagagagtgcacaacatctctgaaatcagcatcataga

SEQ ID NO: 426740 - DNA, 201 bp, Homo sapiens
ctatctaaagctagttaaccttttttggtcacacctaccctctttttatctgctccctctggcccttggcccacttctctgtggccagctagccagtgttygtgccacctgagcccatcttcttcacttgccctagaactccccagaatgcctctttcattttaaagtcaatcatttccttccatccttcaaatattttat

SEQ ID NO: 426741 - DNA, 201 bp, Homo sapiens
agaagcctaaattgggtttcttcacaggcagtgatcacagtcaaggtcctcaggctgcctttcatcttattctcagagcatcatgggagttccaagactartgatacaaaagcagcctctagaactgaaaacagttccttaagaaataggaaatattctattggaaagaatggcaaaatggaatgaggcacatcccactgt

SEQ ID NO: 426742 - DNA, 201 bp, Homo sapiens
gacagcttaggggctccctgaggggatctgggcccctggccctgcttcagaactcaaatacggccagggactgaaagaggaatatggtagtagaagtgggrtatggaagtggatgtacagtacagaaaaggaaccattgtttcagccttggaaaaagtcaagagagaaagaactaaatctagatttagaatgttctgtgga

SEQ ID NO: 426743 - DNA, 201 bp, Homo sapiens
attgacatctctaagacctctcagaagtgagagaaccaatgagagagactgttgccaggctacaaactccagcagaaggcagaagagatgggtagacaggmgggggtgttgagctatctgtaaaggacaatataataacagtaataatcctttacatttgtacagcaggttagattttacactgggcttttacatccattt

SEQ ID NO: 426744 - DNA, 201 bp, Homo sapiens
ctgtcctaaaaatatcattttatgcctgtgcaggggtgtctggaccttcaaggaggaagctcagtgctcattgccacacattaatcactgcagagagaccraaaagaaaagccctcaagaaaatcaggtctatggaaaccaagatttacagaccaaaccagttaatgcaagtttgtccaacacaaatttgtaaactttctt

SEQ ID NO: 426745 - DNA, 201 bp, Homo sapiens
gagttccgcccaggacagttgcctcctagttgagtggctgcaccttcctccattctgacagtgattgtacaatgttaaaactaaactgtaagctaagtgargacagggtctgaatatctccagaacttcacacagagtctggaatgtagtaattgtaacaaatatatgcggagaatggactgagtatcataaaaaggatct

SEQ ID NO: 426746 - DNA, 201 bp, Homo sapiens
tgatccacccgcctcagcttcccaaattgctgggattacaggcatgagccaccacgcccagcctatgtcataattttttaaaccaatcccctttagtaaargtttctttttgtgttttctattgcaaacagagctgtacaaacaacattgtatatcatctttgcatgcttatggatttctgtaggatgggtttagaaaagg

SEQ ID NO: 426747 - DNA, 201 bp, Homo sapiens
atacacatatacatatatatatatacacacacaaacacacacacacacactctatacacacacacacacacacacacacacatcagctggccaggcatggkggttcacgcctgtaatcccagcactttgggagggcgtggcgggtggatcacgaggtcaggagctcgagatcaggctggccaatatggtgaaatctcatct

SEQ ID NO: 426748 - DNA, 201 bp, Homo sapiens
agaccagcctgggcaacatggtgaaaccacatctctctctctctctctctctctctctctctacatatatatatacatatatatatatatatatatatatacacatatacatatatatatatacacacacaaacacacacacacacactctatacacacacacacacacacacacacacatcagctggccaggcatggtgg

SEQ ID NO: 426749 - DNA, 201 bp, Homo sapiens
aagaccagcctgggcaacatggtgaaaccacatctctctctctctctctctctctctctctctacatatatatatacatatatatatatatatatatatatacacatatacatatatatatatacacacacaaacacacacacacacactctatacacacacacacacacacacacacacatcagctggccaggcatggtg

SEQ ID NO: 426750 - DNA, 201 bp, Homo sapiens
aacccctgcatctcacatctggtgagaaggtggagactggggcaactgagagacggtccatcagcaagcattaattgaacacacaggacttttaagggatkgtaaaactctaaggagtcagcagggaaagacatggacgagatttccgacctctcgtaagagtttaacacatggagattgcctctgtcatggttcttggtt

SEQ ID NO: 426751 - DNA, 201 bp, Homo sapiens
tcttgtctttgacccgaaggcccctgtcagccaggagcctccctgcttctttgtggtttggggctcagtagtccaactgctgccctctttgtgcagaaaamcacagaacccctgcatctcacatctggtgagaaggtggagactggggcaactgagagacggtccatcagcaagcattaattgaacacacaggacttttaa

SEQ ID NO: 426752 - DNA, 201 bp, Homo sapiens
ttgccatgttgcccaggctggtctcaaactcctgagctcaagcaatctgcctgccttggcctcccaaagtgctgggattacaggtgtgcaccaccagcccraaggcctttttttttttttttttttttcagagacaggttgcctgggctgtagtactacggtgctacagctcactgcagcctcaaactcctgggctcaagc

SEQ ID NO: 426753 - DNA, 201 bp, Homo sapiens
ttaggtgggagagttgattgaacccaggaggtggaggctgcagtgagccaagatcgcacgactgcactccagcctgggcaacagagtgagaccccaaaatktatcttaatttttttttaatttttaaaatggtaagaataaatggatattttaccttatttcctttgtactatctttgaaatccgcttgtattttacttga

SEQ ID NO: 426754 - DNA, 201 bp, Homo sapiens
tattccaagaatgattgactggaaagtacttgacttacaggaaaatcacagtgatacaatacagctcctacttttaaagcactttccgtttaaaaaaaaaatcataccagtgtataaaaatagttataccgaagatgtgaatcaacagccaagtaatttattggcacttgaaagctttgtggtataaatagattcaacaat

SEQ ID NO: 426755 - DNA, 201 bp, Homo sapiens
ctggccaagtcagctggtccctatttggtagataccggccagatgcagcttagattctattccatgaggagggtgtgtgtgtgtgtgtgtgtgtgtgtgtgcgcgcgtgcgtgtgtgtgtgtgtgtgtgtgtgtgtgtgtgtgtgtgtgtaatgcatcatcattctcatatgcaagaagagtggtatcccagcactttggg

SEQ ID NO: 426756 - DNA, 201 bp, Homo sapiens
tagggaagtggaaatggggatgctgagaagtgggtttgagagctcatgggaattcagatgacataaagatagttcatttccttaaaaaaagtgggggcagkggggcgataactaagatggttatttcatagttgaaacaaacagatcattctgtcagtctgagtggttttcagcatattttttactccgactcacataaag

SEQ ID NO: 426757 - DNA, 201 bp, Homo sapiens
caacttctttggaagccctaacaatggcccgcaggagtggaggtaattatacatatttgtcattctttctataaaagcttttatcgctgtcttaattaaasttaaccttttaagttaagcaaagcaatactctttctgtcgtaaaatattctttcttccatctgtgagattcacagtcttgtggttcttgataatgttaga

SEQ ID NO: 426758 - DNA, 201 bp, Homo sapiens
tctggccaagtcagctggtccctatttggtagataccggccagatgcagcttagattctattccatgaggagggtgtgtgtgtgtgtgtgtgtgtgtgtgtgcgcgcgtgcgtgtgtgtgtgtgtgtgtgtgtgtgtgtgtgtgtgtgtgtaatgcatcatcattctcatatgcaagaagagtggtatcccagcactttgg

SEQ ID NO: 426759 - DNA, 201 bp, Homo sapiens
attttgggcagaatggggttttcagcaattttcagcctccacaggccattcttctcagcagcttgccagccagcagagcggtgagggccatggctgggagsagcacctgcccctgaacttgaagagaggctagagcagcccaatgggctcctggcccaagcccactctcagggtgacagtgtccttcacatgttcctcagg

SEQ ID NO: 426760 - DNA, 201 bp, Homo sapiens
ctctggccaagtcagctggtccctatttggtagataccggccagatgcagcttagattctattccatgaggagggtgtgtgtgtgtgtgtgtgtgtgtgtgtgcgcgcgtgcgtgtgtgtgtgtgtgtgtgtgtgtgtgtgtgtgtgtgtgtaatgcatcatcattctcatatgcaagaagagtggtatcccagcactttg

SEQ ID NO: 426761 - DNA, 201 bp, Homo sapiens
attttaccttatttcctttgtactatctttgaaatccgcttgtattttacttgaagcacacctcagtggactagccacatttctttttttttttttttttkctgagacagagtctcactcactcttgcccaggctggaatgcaatgacacaatctcaggtcactgctacctccgcctcccaggtttaagcgactctcacgc

SEQ ID NO: 426762 - DNA, 201 bp, Homo sapiens; identical to SEQ ID NO: 418394

SEQ ID NO: 426763 - DNA, 201 bp, Homo sapiens
agtagggagatgtcgataagatgccagcattagtatcaaaggccttgcaatcatagttttctggttttgagccacagacctaaaggcctggcccctgcaartggctggccaggcagagaagagtgcctgttctgaaagagctagagggctaaccagatgattaggatacacactcatgctgacaaaaacaggggagatcca

SEQ ID NO: 426764 - DNA, 201 bp, Homo sapiens
gtcatagttattagaatcagcagcctcttaactaattgcggtttcataggatatataaatgtttcaagccattattgctgaatggttctttagttattaayctagacccaaatcaaagaccagttggatttatgatattttttatttgttcttgcagccaaagtgccagtttctttaatatgtgaccaagaacacaaggag

SEQ ID NO: 426765 - DNA, 201 bp, Homo sapiens
aagaaattagtgtactgtaatccctttaaaattgtgtctgattcatcacttcatttttctcagcactttgtatagtttatacatgatagatgcttagtatrtatttatggaacaaatagacttaccagatttgtttaaaatataaaccaacagtgaaagcttattataagtcatcttattatcctacgcattttactgagg

SEQ ID NO: 426766 - DNA, 201 bp, Homo sapiens
gtagcctgtcataaattctgttagccaaacactctctttatcctaaggcaaaatagaacctaaaacctgtttataattaaaattatatatatatatatatwttttttttcttttcttttctttcctgatgctgttaaattatgttttaagcttcaggattgacttaaaccaaacagttggtattatgatttgattgatcac

SEQ ID NO: 426767 - DNA, 201 bp, Homo sapiens
ttgttcgcatatctcttaagatccacctgtggaacccaggttacagattgctgttaaagaaattagtgtactgtaatccctttaaaattgtgtctgattcrtcacttcatttttctcagcactttgtatagtttatacatgatagatgcttagtatatatttatggaacaaatagacttaccagatttgtttaaaatataa

SEQ ID NO: 426768 - DNA, 201 bp, Homo sapiens
cagtttctttaatatgtgaccaagaacacaaggagcatccatatggccaaataaatacactgaattttagaaaaacatattactttgaattcaaattgtcrtgaaaaccagaacagtgtttgtccatgttgcatgtaatgaaaataaatccctgctctgagaaaagctctttgaagcaaaaaccaaacttttttttttttt

SEQ ID NO: 426769 - DNA, 201 bp, Homo sapiens
agaagagtacctatcttttgtggggagtaaagtgatattctcagctgggcgcagtggttcacgcctgtgatcccagcactttgggaggccaacgcaggcgratctcctgaggttgggagttcgagaccagcctgaccaacatggagaaaccccatctctactaaaaatacaaaattagccgggcgtggtagcgcatgcctg

SEQ ID NO: 426770 - DNA, 201 bp, Homo sapiens
tgattttcccccagttttcaacagttgtcttacccatacctaattcaatagcaattcatatgattcctagtcatcctaaaatagtcacttaggttatatgraatcagtcactctttttgcacccacatttcatcagtttccataatatttatgtcacacaaatagaatgacagatacgactgatatgaacacgtcaagaat

SEQ ID NO: 426771 - DNA, 201 bp, Homo sapiens
gctactcgggaggctgaggcaggagaatggcatgaacctacgaggcagagcttgcagtgagccgagattgcgccactgcattccagcctgggcgacagagygagactccgtctcaaaaaaaaaaaaaaaagatttccaaggttacaatgtgtatttttgaataataaaatatggttttaagaaaaaatagcctctggaaat

SEQ ID NO: 426772 - DNA, 201 bp, Homo sapiens
gtttcgtatctagtatatgaggatcattacaaaaactcattttgtaaaaatgttagggaagcacatttaaatcagagtattattgccattttaggggaaartatttctttttttcactcctgtcactataagatggcatttttatatagtggaagcccttttatctaaaaggattgagtcagttaattaaaaatgtcagct

SEQ ID NO: 426773 - DNA, 201 bp, Homo sapiens
aacagccctgaaactgttcttgtcgagatcacaagtgaccttttagagtgacttcaatctactggctttaaattcaagctatatgttatatatatatatawgtaataatattattatatatatattataatattattatatatatataactcccaaatttatacctctggcctgacttctctgagctctaaacgtatatct

SEQ ID NO: 426774 - DNA, 201 bp, Homo sapiens
tgtgcagagaataatttggggattctatatttggaacctggcgttcaggaccctccacactaaggccccaacttatttttccagcttcatcttcactgagscttatcctcttcacattttgaccaaacaaaatactctttgtgcccatgtgtactctaagctttctatgcctttcctcagaatgtgtcctttatctagttt

SEQ ID NO: 426775 - DNA, 201 bp, Homo sapiens
gtctttctaccctaccctttgaccatttttgcacctcccaacgaccatacagtcctatatattttgtactcagaatggtctcagttctgcacctccttgtstatttctgttgccttcccccagccccagatctcatcagctctcctcccatataaaaatgtgcagttaaaccccaacgacacctttctgtcttggcaattc

SEQ ID NO: 426776 - DNA, 201 bp, Homo sapiens
agttctccacttgtagaatttgtaaaagttctgtgcaccaaccaggttctcattactgccagggctgtgcctacaaaaaaggtaagtttcttttaataccrttttctattcataaaaccgacttcatttgctgctaatttggttaacagaaaagatgtagcctgtcataaattctgttagccaaacactctctttatccta

SEQ ID NO: 426777 - DNA, 201 bp, Homo sapiens
aagttctccacttgtagaatttgtaaaagttctgtgcaccaaccaggttctcattactgccagggctgtgcctacaaaaaaggtaagtttcttttaatacygttttctattcataaaaccgacttcatttgctgctaatttggttaacagaaaagatgtagcctgtcataaattctgttagccaaacactctctttatcct

SEQ ID NO: 426778 - DNA, 201 bp, Homo sapiens
ttctagattttatgctatatagagtaaatatagacccattcctaaagtactcccttgagtctgagaaataaaatgattgtattttatacaaatttttactrtttccctaataaatattttctttttaagcagtatcttaataacctattaaatgaggatttaaaaattagatatagactactattttggtagaaagtcaag

SEQ ID NO: 426779 - DNA, 201 bp, Homo sapiens
ccacagttaatatgagtctcagttgattggctgctctcccagcattaacaggctcctacggtaataccattgatagtcgataccattgtgaaccttaggcrcaatgtaatgcacttattaaataataaagtttaattttccttttactatcttgttctaacaggtgaaaagaaacttggtactgttatcactccagataca

SEQ ID NO: 426780 - DNA, 201 bp, Homo sapiens
agttatttccccctcggcagctcaggaggaacatctctgagttgattgcaaagcccaagccaaagaggaccccaaggtttctcacgagtccagcaaaaggygtggtgtcaatgtggatccagtcggggttagcacaccactttttggctatgggcacggaccacagcaggtcaatgttgagcaccctaagaagcaggtaaa

SEQ ID NO: 426781 - DNA, 201 bp, Homo sapiens
atacattaaggcatacaggtcacagtctcattagaataaacttttaagacacccaaattcctttagttgtttgttttttatattatccaatactactctamcaagtggaatatgtgatagatcttgactttttttattttagaaaactttttaataatggcatatgttacagtatttttttaaggttaacttgcaaatcta

SEQ ID NO: 426782 - DNA, 201 bp, Homo sapiens
agaaagctgaaggccctattctgtgtactgagcagaaagaagagctggttgtctctagctatccttggggattagagagaaattattcagccagtctttcrgaaatgaaaattttgacaaacgacaaacttcttcctcacatcctggttggggaggagcactcacagaataaaaaacaatagacaacctgaggctgcccta

SEQ ID NO: 426783 - DNA, 201 bp, Homo sapiens
acagtgtgcagggctcagagtcattaagttccctcacgcaagacacaagcacactgtctgaagtgatggtttgggagttagacttagctctaatttcactkcagaaaagcctacctcatgaagcaattgtgcatttacgccactgagattgtgccactttgtacatggaggctatgagaggtgtgttgtaccacgtcagct

SEQ ID NO: 426784 - DNA, 201 bp, Homo sapiens
aggaatcagatgcagcctggccttaagaagataaaggaatcatagtggggctcctgctgggatgctgaagactgtgagaaaatggagtccttgcctcctamtggggactgttagtatgcagctctggtcagttgtctccagctggggatgcaggctctgtgttgtcatactatcagatttttcaagaaatacagaacttcc

SEQ ID NO: 426785 - DNA, 201 bp, Homo sapiens
agaaaaaaagacaagacacaggctatatgtaatgtttagaagtgggtagaaataagaaaaattgagttaaattgagcctgagaaacactgtctcaaaaaawttttttcccagattttcaggttcattgaattccagaaatcaatatactcaaggctaattaagaactcaggcagttgcacccaaatctgccacagccctac

SEQ ID NO: 426786 - DNA, 201 bp, Homo sapiens
agatgcagcctggccttaagaagataaaggaatcatagtggggctcctgctgggatgctgaagactgtgagaaaatggagtccttgcctcctactggggaytgttagtatgcagctctggtcagttgtctccagctggggatgcaggctctgtgttgtcatactatcagatttttcaagaaatacagaacttccgattttt

SEQ ID NO: 426787 - DNA, 201 bp, Homo sapiens
ctatgtttggtgaaaagactttgcaaataattattgcatgtcaaatagcccataaagccctgcattttaatttaagataggctgtggctctctattttatygggtctttgaggaaaatggttgaataaatatctgggtatgaaaaatatatgatatgacagattatgttctgatcactgatttaaaataagaatagttcaa

SEQ ID NO: 426788 - DNA, 201 bp, Homo sapiens
aagaaagatggaaggaattcattcactgaccaaatacttgttgagctactgctgtataccaggtaatcttctaggaagatactgcagagaacaaaatagcytaaagttctggagccataaattctaattatcacaagaaggaagatcatctattgaaagtgagaggtatttactatgggcaggcttttacattattataaa

SEQ ID NO: 426789 - DNA, 201 bp, Homo sapiens
aaaagtgtttgatctacgtaattcataatactcattttcttcagaaatgtcttatccttaaatcaggatgtgaatgatatcaaatacattttgtcttccamttaaaaattaaacttcctgctcttcagcacctcagagtctgtgattagcctttcatctatggtagttaatttagaaagattttctctcgagaactacctg

SEQ ID NO: 426790 - DNA, 201 bp, Homo sapiens
agtttgttttcacgttggaaatcacagcctggggattgaaaagctagagttctctcagctctgttagtactctgacagtgtttttctccatatttttactrctattcttgccatcttatttctactactctccaggttgtccagagtaaaccagtagtttttactgaattcttacacacaggacacaaacatgtgtccaca

SEQ ID NO: 426791 - DNA, 201 bp, Homo sapiens
atccctcagctttttgctttggaatcaccgaaccactaatatcaagttcagtttatttaccttttagaaagttcagttgccttttagaaagaaagctattragtgcgttttataaaagcaatgacacatgctctatacatatacttggaaaggagtaattaatactttgattttttgaggtttgttatcctcagctactat

SEQ ID NO: 426792 - DNA, 201 bp, Homo sapiens
cttatccttaaatcaggatgtgaatgatatcaaatacattttgtcttccaattaaaaattaaacttcctgctcttcagcacctcagagtctgtgattagcytttcatctatggtagttaatttagaaagattttctctcgagaactacctggttctgtagactgtgggataattaagtgaagcaaaagcatcttgatttct

SEQ ID NO: 426793 - DNA, 201 bp, Homo sapiens
ctacagagtgagactctgtcaaaaaaaaaaggcaggtggttactgatagtttagagtgcattcacgagtttattttctttttattaaagagagggcctatrtaacaggggctttatagaggggcctatataaagccatttaacaggggctttagatttcacaaaacctggaactgcccctgggcccatcatagttatttag

SEQ ID NO: 426794 - DNA, 201 bp, Homo sapiens
ttaaagagagggcctatataacaggggctttatagaggggcctatataaagccatttaacaggggctttagatttcacaaaacctggaactgcccctgggyccatcatagttatttagtaaatgtttattgagtgaatgaattattgaacaaagttgatatgagtactaaattataaagagcctgtgttttaaaactatgt

SEQ ID NO: 426795 - DNA, 201 bp, Homo sapiens
atacttattttatagatgtgactttgaaaccatgtaaatattttacataactatacaacaaaattaaaattaagatgtgattcatacaaaattttaaaaaygaaagaagtgaaaacaccacttgatccattatactggtgagctattcttcccagcacttacatgtattttatgatttgtttctgtgggaaatctctttct

SEQ ID NO: 426796 - DNA, 201 bp, Homo sapiens
ttttgtacagttcatttcctccaaggtcagacattagcaatttctatgtttggtgaaaagactttgcaaataattattgcatgtcaaatagcccataaagycctgcattttaatttaagataggctgtggctctctattttattgggtctttgaggaaaatggttgaataaatatctgggtatgaaaaatatatgatatga

SEQ ID NO: 426797 - DNA, 201 bp, Homo sapiens
tcatacaaaattttaaaaatgaaagaagtgaaaacaccacttgatccattatactggtgagctattcttcccagcacttacatgtattttatgatttgttyctgtgggaaatctctttctacacatttctttagtcctcctcatctaccgtctgccactcgagttgccacggcttagggtggggatgttcctgtatcctat

SEQ ID NO: 426798 - DNA, 201 bp, Homo sapiens
ttttgactataagacaagaaagcagaaatgaaagtcatttggataatagaaatgtgttaggatcaaattgtatcttttattaactagagaatacagttgaraggaatagggaatgattcatgtgacaaagataggaatagacatcaaagggcttttgaccaatcaggaaaatggtttgttgagaacagagtgttaaacaga

SEQ ID NO: 426799 - DNA, 201 bp, Homo sapiens
gtcacttaaattgttgtttttgataatttggtccagttttatagtttctttttgggggataaaatttggtgacttccttctaccacacagatccaaaccayatcagacctccagcatagtggtgggaggggattggatcatgagggtggatttcttatgaatggtttaataccatcctcttggtactgtctttgtaacagt

SEQ ID NO: 426800 - DNA, 201 bp, Homo sapiens
atgaaaggagatttatcatagtaaactctatgtctaactgtattaatagcagtctctaggctgcaaggtgacttttgggtatattgtgaagtgttaaataytcataataacttgtcctgatttcataggtcttaatttagttcttggataaagaatggctaatatctggtcctctgagaatgttttttacatatttacttc

SEQ ID NO: 426801 - DNA, 201 bp, Homo sapiens
tacagaacttccgatttttatgtcaaatattcttgtatctaaatattggtaactgaaggattaaaaaaaaagaccagtgcgaaggccaaactaaacatctytatggggaatggggcctgtgccgctattctgtgaagtcggattagaagcctctggtctgtgcctactctgtggctctactggtggatggagaagggtgat

SEQ ID NO: 426802 - DNA, 201 bp, Homo sapiens
gaaaggagatttatcatagtaaactctatgtctaactgtattaatagcagtctctaggctgcaaggtgacttttgggtatattgtgaagtgttaaatattyataataacttgtcctgatttcataggtcttaatttagttcttggataaagaatggctaatatctggtcctctgagaatgttttttacatatttacttctt

SEQ ID NO: 426803 - DNA, 201 bp, Homo sapiens
agcctagagtccggctgttggctagagtgggcgcggatctggtgtggggaaggcggcgggactcaggcctgcctgcgaaggtaagggagttgggcgccgasctgggctccttggcccccctgtcgcaataagggaaagtgaatttgagggcgggatgtgtgtatttgcggcggcgtttgtgaaatgcgcatcttgttgctg

SEQ ID NO: 426804 - DNA, 201 bp, Homo sapiens
tgcattaaagatttgccacagttttcaatgacaaagggcattagacacagaggttctatccattttccaaagccttttttaggcagtaactaaaaatgcargtttgcccacggtgttttcattattcatactagtccagaaggatcgttctggagttggtggcactgactgacaacccgctttttagacagagcactgatc

SEQ ID NO: 426805 - DNA, 201 bp, Homo sapiens
atggacccagggtcatagtgcgtgtgagtgtcctgtgcagttacacttacctactaacaagctgctaggaggtaaaggtgtcctgaattattgctgcacgktaacaacagttaagcccaggtggcttgatctacccttgaatacctagaattaaagataagttgctattttctagcaaaggacaaattgccaaaatactgt

SEQ ID NO: 426806 - DNA, 201 bp, Homo sapiens
agactaaagaatttattttggatttcggcactgtttagagaataatctacctcttgaacattgatttgatatttcatttatcatattaacttcctaactgycaacgtttgtttggcatatcttttataatatttagaagcataaaatatctcttcatatatccagatcaaatatgtgtctcagacaagctttgcagttttt

SEQ ID NO: 426807 - DNA, 201 bp, Homo sapiens
aaataggaaaaaattacaatttttaaattattctaatgtagctactgatgctgtagttatttatcattcggtattttaataaatgtatttttggcatgatkgtcaacatgcaaataatttttgttcttcctatcagcattgtattctgagcatttcctcagttgctatagtcttcataatggtaatttttaagtagtgatg

SEQ ID NO: 426808 - DNA, 201 bp, Homo sapiens
ctgaattttctgtttgttacctctgtaaacgagattttcctgttgcctgaggaatgcttgtcttgagagatgttgttcaagcactgagaattccatgctcwcttcaatttgggaaacagatcatagtgtatttctcttttgaagatttatggtatttaaagtcttcataaattcagtgatggactaacttgtttaactttg

SEQ ID NO: 426809 - DNA, 201 bp, Homo sapiens
acctctgtaaacgagattttcctgttgcctgaggaatgcttgtcttgagagatgttgttcaagcactgagaattccatgctcacttcaatttgggaaacakatcatagtgtatttctcttttgaagatttatggtatttaaagtcttcataaattcagtgatggactaacttgtttaactttgagaaaaagattactcatc

SEQ ID NO: 426810 - DNA, 201 bp, Homo sapiens
ggagcttttgtggaggagatggcaagtggctgggccttgagatatgagtagaatttagaaatgcaaactgtaggatgaaagggaaaaaatattcaagaatrtaaatgagataataccattatcacacctaaagacattaacattaattgattaatgtatttaaaagctgtaaaagaaatcctcatttttgacatttatgag

SEQ ID NO: 426811 - DNA, 201 bp, Homo sapiens
ttgaatacctagaattaaagataagttgctattttctagcaaaggacaaattgccaaaatactgtatacccgattggaatatgtgggtgatttgatttcartaacttaaaaaatgcaatatgtattctgtttttagcattgtcctacataatggtagaggacgaactggcacttttcgataaaagcataaatgaattttgg

SEQ ID NO: 426812 - DNA, 201 bp, Homo sapiens
ccctcgagctcaggagttgaagaccagcccaagcaacatggtgaaaccctgtctctacaaaagatttaaaaaaaaaattaaaaattaaaatatatatatayacatatatatagacacatacacacacaaatacatacacattaacacatatacatgtgcttatatataggaataaacattgacatactatacagtttaaga

SEQ ID NO: 426813 - DNA, 201 bp, Homo sapiens
actctcttttttcctctatcctggctccccttttttcatactaatatttagtcatctaagtgttttaattggtcactgtcaactccaacagagcagagacragtctgaattgctcactattgcatctgggaatccagccaaatgccctacacattaggagatggttttcaaaaattatacagccagccaccattcctgact

SEQ ID NO: 426814 - DNA, 201 bp, Homo sapiens
ctttagctctgccccccaagatgcaaagtatctacccagcaagtgtatgtgtaatagaggacaatgatcttttatccttataccccattatcattcacccwttggagaaagaattaagttttcaggggaggagcaatggagcattcaatctgagcaagactataaccaccatccagaaacacctccagcctgggaacatgt

SEQ ID NO: 426815 - DNA, 201 bp, Homo sapiens
ctaaaggaagtgaatatagtcttgatttatagatactgtctaagatccttaataagtagcatctcttcaggatggcacagtgccacagtgtctgaacaatmtaaaaacaaagatcattgcatttatgtgcaaatatgaattgtccttttagataacttttttaaaaggtgaagctttaaagaaaatggctgcttaaatgtg

SEQ ID NO: 426816 - DNA, 201 bp, Homo sapiens
accactttttggctatgggcacggaccacagcaggtcaatgttgagcaccctaagaagcaggtaaaagccaactgcaaacaggaagagaaagaggttggtyttcaggtatgtgcccagactggccgtttggatgcctggagtgtgttcaaaggcctctgccaccagcatgcctgaggattggaaagagacactgacaatga

SEQ ID NO: 426817 - DNA, 201 bp, Homo sapiens
ctgaggcaaaagaattgcttgaagccaggaggcagtttgcagtgagctgggatctcaccactgtacttccaggcttggtgacaaatcaagaatctgtctcaaaaaaaaaagaaaattgttccttttttttttttaattccagtggtcagaaatgaaaagtcagtcagaccaaagtgttgcagataaaaatgacttaacagt

SEQ ID NO: 426818 - DNA, 201 bp, Homo sapiens
tttggctatgggcacggaccacagcaggtcaatgttgagcaccctaagaagcaggtaaaagccaactgcaaacaggaagagaaagaggttggtcttcaggkatgtgcccagactggccgtttggatgcctggagtgtgttcaaaggcctctgccaccagcatgcctgaggattggaaagagacactgacaatgactgtgtg

SEQ ID NO: 426819 - DNA, 201 bp, Homo sapiens
tctggtaatggaatttgggcattggtattattaaaatacttctcaagtggttccaatgtggtataaggggcttagaatcattgcactaaggcaattcatayaaggaattatccttgactaattagagtctatgcttctggcttttctttgttttgcatattcaggttctgtaatttccataatctctttaatgagccatga

SEQ ID NO: 426820 - DNA, 201 bp, Homo sapiens
gctacccatatcatcttggttccaactgtctgattaaattgaaaacaaagtggaaaataaatgaaaaagatattcctggggtctccaacattggacataamatttagaaaagtgtagtaagctcggtagtccttctgcaaatgctgaattatgagcactccattcctgtgaaggaaatccatcttgaaaaagaggcaattc

SEQ ID NO: 426821 - DNA, 201 bp, Homo sapiens
gcatgtcaaatagcccataaagccctgcattttaatttaagataggctgtggctctctattttattgggtctttgaggaaaatggttgaataaatatctgrgtatgaaaaatatatgatatgacagattatgttctgatcactgatttaaaataagaatagttcaattttctttatccaagagaatgatagaatatatatg

SEQ ID NO: 426822 - DNA, 201 bp, Homo sapiens
tacatgctgatctgtggcaattcgagggggaaatttggatagaaacacaatgaatttcttatgcaacctcccttttgtgcgaacagttggatcatgtttgyttgaaattttttgtacagttcatttcctccaaggtcagacattagcaatttctatgtttggtgaaaagactttgcaaataattattgcatgtcaaatagc

SEQ ID NO: 426823 - DNA, 201 bp, Homo sapiens
tgaggcaggagaatggcatgaacccaggaggcagagcttgcagtgaaccgagatcgcgccactgcactccagcctgggcaacagagcgagactccgtctcaaaaaaaaaaaaaatgcacttcctcagttgcatcagctacatttcaagagctcaataaacatctgtggccagtggctactatattggacagcacagataga

SEQ ID NO: 426824 - DNA, 201 bp, Homo sapiens
ctagacacacatggctattgaaatgtaaattaaaagtaaatgaaggttaaaaatgcatttccggcagggcttggtggctcacgcctgtaatcccagcactytgggaggctgaggcgggcgggtcacgaggtcaggagatcgagaccatcctggctaacacggagaaaccctgtctctattaaaaatacaaaaaaattagcc

SEQ ID NO: 426825 - DNA, 201 bp, Homo sapiens
gcatctaaaggtacagcatggtgggacatagggtgggactgaaccaatgagcaacggtcatcacctgaagaatcattcttctctacttctttcatcccaawtgtcccagcaacatgagacaaatttcattcttaagctattctttcttaatccctcagctttttgctttggaatcaccgaaccactaatatcaagttcagt

SEQ ID NO: 426826 - DNA, 201 bp, Homo sapiens
tgtgcaggtttgttacatatgtatacatgtgccatattggtgtgctgcacccattaactcgtcatttcattaggtatatctcctaatgctatccctccccsctcccccaacccacaacagtccccgttgtgtgatgttccccttcctgtgtccatgtgttctcattgttcaattcccacctaggagtgagaatatgtggtg

SEQ ID NO: 426827 - DNA, 201 bp, Homo sapiens
cactactgtaaaacagagaccagaagtgaagcagaggttcaagtccatactgtagcctggcctgttctgttgtccctggacccgtgtgtatatacatctgragccactgttggtcccacctagaccctgcatgtatgtgtggggtataagtcaaagaggatgcagtatttcaatgtcatttctgaaaaggtagctgattta

SEQ ID NO: 426828 - DNA, 201 bp, Homo sapiens
tgggaggctgacatgggtggaacatcctcaagggaactccttgaggccaggagttcaagaccagcctgggcaaatatagtaagaagctggctctaaaaaawattcaaaaattagccaggcatggtggtgcacacctgtagtcttagctaatgggaggctgaggagggaggatcatttgagccaggagtttgaggctgcagt

SEQ ID NO: 426829 - DNA, 201 bp, Homo sapiens
cccacggtgttttcattattcatactagtccagaaggatcgttctggagttggtggcactgactgacaacccgctttttagacagagcactgatctaggtrcttgcaattaacatttcaattgccatagccaattagcctttgaaaggtaaggtggtgctgaacaatggaaactgagtcatggtgaacactgcttcaggaa

SEQ ID NO: 426830 - DNA, 201 bp, Homo sapiens
gtcttagctaatgggaggctgaggagggaggatcatttgagccaggagtttgaggctgcagtgagccgctatccaccactgcactccagcctgggcaacagagcaagtccctggttctaaaaaggaaacatacaaacaaaaagcatgtgcatgtgtgcacactcaaacacacagtgtaatggggatatgtgtcagaagcct

SEQ ID NO: 426831 - DNA, 201 bp, Homo sapiens
tggaaatagctatgagctaattaggctattatcttaaagcaaaatattagttttctattcattttgttattttgtctatgaaagaatagaataagcacatkttattcattgactaaaactgcactaaaattaatttttagacaagactttctgtattaaaaactgtcatattccagtgctacagaaactgcagcaaagctg

SEQ ID NO: 426832 - DNA, 201 bp, Homo sapiens
tctggggcaaattttttcattgggtttaattgcacagattttcaaaagtccttgtttcttgttttttttttttcttttgttttgggttttgttttgtttgtttttttttttttgagacacagaaaatagagaacaggggaattgacctataggttatacactttggattaaaaacagcaatgcacaaaaaacataaaaaaa

SEQ ID NO: 426833 - DNA, 201 bp, Homo sapiens
tttatgttgttgttttgggttgggcaataaatacattaaggcatacaggtcacagtctcattagaataaacttttaagacacccaaattcctttagttgtktgttttttatattatccaatactactctaacaagtggaatatgtgatagatcttgactttttttattttagaaaactttttaataatggcatatgttaca

SEQ ID NO: 426834 - DNA, 201 bp, Homo sapiens
aaagctggaatatatgttactgaaatcaaaagcattggctattcgaagaaggaagcataattttactgaataaactgatgcagtcaaggagaatgatgatkctcaaaacttccagttaattttaaagcaagggaatgtgcatgcaaaaatgtttccttatgctgtataattttagacgacttatttatgagttatcaaaat

SEQ ID NO: 426835 - DNA, 201 bp, Homo sapiens
ccacagccctactcattcttcaatatttggttgtttttaattgacaagcaaaagtattaggttaatgcaagagtaattgcggtttttgccattgaaagtartggcaaaaaccgcaattacttttgcaccaccctaatgcttgtattggatcttcagttggcttattttccttgggctgagaagtcaaactctaaaggatat

SEQ ID NO: 426836 - DNA, 201 bp, Homo sapiens
ttaaggtggagaaaatatatataatgtgtattctagaaagggctaatatatttgtatgtgtatatgtgtgtgtgtgtacatacatatataaatatgtatgyagatgtgtgtatatgtatatatacatatattagccctttgtgtgtgtgtgcatatatgtatatatacaattatatatacatatataacatatatacacac

SEQ ID NO: 426837 - DNA, 201 bp, Homo sapiens
tattttcacaaacatatcatagtctaagattaaaataataactttgacttcattattttagccaactttattttccattcttcagaaagcatattctctasgttctttccctagttttctttcttcctcagctttaccaagaaggattcaaataccgaatctatgtcacctttcagagtttctggacaacgctgattccct

SEQ ID NO: 426838 - DNA, 201 bp, Homo sapiens
taaattcagtgatggactaacttgtttaactttgagaaaaagattactcatccttggagcacatatttacttgtaattatgatactggaattaaatgacartatagatagtttggtttatttgatacaattctagactactggcattaattggcattcgattttaaagtgtttagatttcatttaagtattagtaaaacta

SEQ ID NO: 426839 - DNA, 201 bp, Homo sapiens
cggttgtatctttcttccaacaaacagaggaagaagtggccctgccagggttactcctttcccagcagagaggtttggccaggtttatgcacaggcattgytgtttttattttgagcatgtgtgtgagaaaggggtgggtagttgcagaagctgagtgtttaagagggctagggcaagaagaacttgtacagagagtgaca

SEQ ID NO: 426840 - DNA, 201 bp, Homo sapiens
gaatggggcctgtgccgctattctgtgaagtcggattagaagcctctggtctgtgcctactctgtggctctactggtggatggagaagggtgatctgtgayacagagcactaactctaggcaccactctactgactcttctttccgctttgtttcattaacatatgaacagagtagggaatgaaagcaaccacagttaggg

SEQ ID NO: 426841 - DNA, 201 bp, Homo sapiens
ttaaaacatttaatattgtgtgtgttttttaatcagctatttctactgctaataaagcgaatgcagagaggttgaaaaggctgcagaaatctgcagacttstataaagatcgacttggactagaaattcgaaaaatttatggtaagtttgttaatataaataaaatataggagattacaaaagtatgtcttttcttaagta

SEQ ID NO: 426842 - DNA, 201 bp, Homo sapiens
tcccggggtagcatttagtatcagtgacttcacagaattacctctgaaattggaaagttgattaccggggacaatctgatacccttaaacataatgaaacyaaagctttcaaaggacacagctaaaggtaagtgatcatatttaccaccaattactccaagaataacttgatgaggaaaatgtgttgctatgaatactctg

SEQ ID NO: 426843 - DNA, 201 bp, Homo sapiens
aacttgatgaggaaaatgtgttgctatgaatactctggagatgcagacactgatttgaatcaaccaaaaaacactccaaagaaatgaccaggtcagtctaygatggaagaatagatacaagcgtaaaaagcaaagaaactggatcactcaaaattagagggggtgacatcagatgatccttctcagaagaatcttctaact

SEQ ID NO: 426844 - DNA, 201 bp, Homo sapiens
acttcacatgtttcagagagaatggcacagtgtgcagggctcagagtcattaagttccctcacgcaagacacaagcacactgtctgaagtgatggtttggragttagacttagctctaatttcacttcagaaaagcctacctcatgaagcaattgtgcatttacgccactgagattgtgccactttgtacatggaggctat

SEQ ID NO: 426845 - DNA, 201 bp, Homo sapiens
atgccctgttcccccattttcccctcgagaatccaagggtgagttcaaccaatcctgtcaaggagagcctgcgctatcggccaatcagaaggccagcctgmgcctggaggcgggtggcgggaagtgcactaggtttgaaatcggaaagttggcggggctgcgggagctgagcctagagtccggctgttggctagagtgggc

SEQ ID NO: 426846 - DNA, 201 bp, Homo sapiens
ttcacgatcattcctatctttagctctgccccccaagatgcaaagtatctacccagcaagtgtatgtgtaatagaggacaatgatcttttatccttatacsccattatcattcacccattggagaaagaattaagttttcaggggaggagcaatggagcattcaatctgagcaagactataaccaccatccagaaacacct

SEQ ID NO: 426847 - DNA, 201 bp, Homo sapiens
tttgaaatacgaatcctgcaaatctcacacattgataataaaggttagttactgattctgcagctggccaaaaggcctttgatttataaggaatatatatyattgataataatgtgaacaagaagagaatagaaatatatttatctcttgtttattcttctaatgcccctgtacaagtaatccttaatttattggaattca

SEQ ID NO: 426848 - DNA, 201 bp, Homo sapiens
cagtagaatttattgaaatattggtgagcactactgtaaaacagagaccagaagtgaagcagaggttcaagtccatactgtagcctggcctgttctgttgyccctggacccgtgtgtatatacatctggagccactgttggtcccacctagaccctgcatgtatgtgtggggtataagtcaaagaggatgcagtatttcaa

SEQ ID NO: 426849 - DNA, 201 bp, Homo sapiens
acactgttattttccatttatttatttgccatcctactgggtatgaaatggtatctcattgtagtttcggcttgcatttacataatgactaatgatgttgrgcatctttttgtggacttaatggccatttttatatattctttggagaaatgtcctttcagattttttgcccattattgaattgggtggtttttagttgca

SEQ ID NO: 426850 - DNA, 201 bp, Homo sapiens
cctgcgctatcggccaatcagaaggccagcctgcgcctggaggcgggtggcgggaagtgcactaggtttgaaatcggaaagttggcggggctgcgggagcygagcctagagtccggctgttggctagagtgggcgcggatctggtgtggggaaggcggcgggactcaggcctgcctgcgaaggtaagggagttgggcgccg

SEQ ID NO: 426851 - DNA, 201 bp, Homo sapiens
gaacaatgttccattgtatgtgtgtactatatccattcatctgttggtgggcactgggttatttccactttttggctactatgaataatgctgctatgaayattggcatacagttatctacttgagtctccgttttcaattctttcagctctatacttaggagtggaattgctgggtcatattgtaattctgtatttaaac

SEQ ID NO: 426852 - DNA, 201 bp, Homo sapiens
cgatggctcaagccaaagtaatcccagcactttgggaggctgaggcaggaggattgcctgagtccaggagttcaagaccagcctgggcaatatagtgagamcttgtctcaataaaaattaaggaaaaattagccaggtgtggtggtgggcacctgtagtcccagctactcaggaggctgagacaggaggatcgcttgagcc

SEQ ID NO: 426853 - DNA, 201 bp, Homo sapiens
taagatttactgcagcaaaaggatacagaacagaatcagcaaagaaacaatagcacgtggggcaaagtctacaggaaacctggcacaagctttcaagagtsctaacccagtagagtcaaacaggatgtgctaattccttcagcatcaaattgtgacaacacacgtgaagtgttgtctaccaggaagctcattagaggttct

SEQ ID NO: 426854 - DNA, 201 bp, Homo sapiens
tttctttgcatggtttttcatagaattgtttcccagagaggaattagtaggctaaaacacatgaatattttgatgcctgttgcatgtatatcacatgtacrtcgctaatgtatggcaatgtctgttgtgtctgggcttcccaagatcactctcaggtttggtgattcactagaaggaattagcatatagtcatattcatag

SEQ ID NO: 426855 - DNA, 201 bp, Homo sapiens
gagacaggaggatcgcttgagcccaggagattgaggttacagtgagccgtgatcatgccacttcactccagcctgggcgacagagtgagaccctgtctccaaaaaaaaaaaaaaaaaaagattgtattcgttgttagaataatgtaatagatgctgtgtgaggatagaatctggagggtttggttcttccagtgaggaatg

SEQ ID NO: 426856 - DNA, 201 bp, Homo sapiens
ataatgaaactaaagctttcaaaggacacagctaaaggtaagtgatcatatttaccaccaattactccaagaataacttgatgaggaaaatgtgttgctaygaatactctggagatgcagacactgatttgaatcaaccaaaaaacactccaaagaaatgaccaggtcagtctacgatggaagaatagatacaagcgtaaa

SEQ ID NO: 426857 - DNA, 201 bp, Homo sapiens
atgtgaatattagaatttatccaagtagatgattttaaaatcaaatgtaaagtcaccagaatttaacaatttattttcccaaaaataatttttgaaatacraatcctgcaaatctcacacattgataataaaggttagttactgattctgcagctggccaaaaggcctttgatttataaggaatatatatcattgataata

SEQ ID NO: 426858 - DNA, 201 bp, Homo sapiens
acttccaggtcacttaaattgttgtttttgataatttggtccagttttatagtttctttttgggggataaaatttggtgacttccttctaccacacagatycaaaccacatcagacctccagcatagtggtgggaggggattggatcatgagggtggatttcttatgaatggtttaataccatcctcttggtactgtcttt

SEQ ID NO: 426859 - DNA, 201 bp, Homo sapiens
catatcatcttggttccaactgtctgattaaattgaaaacaaagtggaaaataaatgaaaaagatattcctggggtctccaacattggacataaaatttaraaaagtgtagtaagctcggtagtccttctgcaaatgctgaattatgagcactccattcctgtgaaggaaatccatcttgaaaaagaggcaattctaaaca

SEQ ID NO: 426860 - DNA, 201 bp, Homo sapiens
acaagtgtgtatatgttgtgtgtgtgtatatatatatgtgtatatatatgtatatatatgtgtatatatatatgtatatatatgtgtatatatatatgtayatatatgtgtatatatatacatatatgtgtatatatatacatatatatgtgtgtgtgtatatatatatatatacacacacacacacacacacacacacac

SEQ ID NO: 426861 - DNA, 201 bp, Homo sapiens
aatctgaatttcttgtgtagtacaattctacttaatttttttctttaaatagtagcatttttctttctagtaagatgtttatttttaaattatacttgacrtaatatatgatcatgttcatattcttagaacatacagaaaagcaaaaaatatcacctgtaatgttgagaaccatatttaacaaaacaactttctagcttt

SEQ ID NO: 426862 - DNA, 201 bp, Homo sapiens
acttttacccatgtttactttctttctttattttctttctttctttttttttttttgagatggagtctcgctctgttgcccaggctggagtgcagtggcaygatctcggctcactgcaacctttgccttctgggttcaagtgattctcctgcctcagcctcccaagtagctgagactacaggtgcgcaccaccacgcacca

SEQ ID NO: 426863 - DNA, 201 bp, Homo sapiens
tgtatgagcacagatgacaatccggtccatgctgttcatcagacaaagcctgaatcctggaaaaagccaactctttgaacaggaattagagtgtgatcggstcagttgacgtacaggggtaggtgagtgcgagagtaaagaagctcttctttgtcttcggtagtgctgggtttcttttccaggcacacagatggcctgctc

SEQ ID NO: 426864 - DNA, 201 bp, Homo sapiens
caaatgttataataaaaacactctcatatgtggtatttatgtgtcactagtttaaaagtttttgtattattattactggatactctaaccccagtgaatgrggtagccaatgttatccccattttacaaatgagcaaaagagtttcagaagtcgtgattttgaccgagatctttgggtaagaactgataagctgaatcaga

SEQ ID NO: 426865 - DNA, 201 bp, Homo sapiens
aacctccgactccctggttcaagctattctgcctcagcctccctagtagctggaattacaggcacacgccaccacgcccagctcatttttgtatttttagyagagacgaggtttcaccatgttggccaggatggtctcgatctcctgacctcatgatccgccagcctgagcgttgcaaagtgcagggattacaggcgtgag

SEQ ID NO: 426866 - DNA, 201 bp, Homo sapiens
tgctatgaatactctggagatgcagacactgatttgaatcaaccaaaaaacactccaaagaaatgaccaggtcagtctacgatggaagaatagatacaagygtaaaaagcaaagaaactggatcactcaaaattagagggggtgacatcagatgatccttctcagaagaatcttctaactgtgacatagcatcatgattct

SEQ ID NO: 426867 - DNA, 201 bp, Homo sapiens
agatcagaaatgaataatagaatagcatattccccatgaaaattatgagtaactcagaaaaaaagacaagacacaggctatatgtaatgtttagaagtggrtagaaataagaaaaattgagttaaattgagcctgagaaacactgtctcaaaaaatttttttcccagattttcaggttcattgaattccagaaatcaatat

SEQ ID NO: 426868 - DNA, 201 bp, Homo sapiens
gtttgtttggcatatcttttataatatttagaagcataaaatatctcttcatatatccagatcaaatatgtgtctcagacaagctttgcagtttttttcaracagagcctacatatttcttgatctaggttgattctgaattttctgtttgttacctctgtaaacgagattttcctgttgcctgaggaatgcttgtcttga

SEQ ID NO: 426869 - DNA, 201 bp, Homo sapiens
catcctcactcatgagattttctttactaccctatataatatcagttcctagatgataaccctgtgtaatgattctctattggaagatcttcagtaactgsagcctgctgtaatagcttacctggacctgtttcacatgtagtagggaactgttcaaggcatggacttgagtgatttgggtaaatctgagtttcttggacc

SEQ ID NO: 426870 - DNA, 201 bp, Homo sapiens
gactattgtgctaacttaaaaaaaaaaaaaaaagaaaaaactaaactagcatgaaataaggctgacctctcataagaaatagttatgttaaaggaagagamcattttcccatgaagcaattggttatctagaaaaaaagcacagtagtataaatgaagtctatttctatgccagccatacaaatccctggcctatttactt

SEQ ID NO: 426871 - DNA, 201 bp, Homo sapiens
acaaaaacgaatattgcagctattaatattagtataaacatctattcttacctatgtattaatcactggtgttatgtacaaaaactattgatttttttggkgtgtagtaccacaaattctgataggttttcagtagatttttctgagtattctagatagatgtctattgtctacatataatgaaaaatagttcttgttttt

SEQ ID NO: 426872 - DNA, 201 bp, Homo sapiens
tctggtcactcaagagcgctgatggagattagtgttgttttcatgcctactaagacaacatccattctgcagcccatggatcaaggggtagttttgacttwcatgtctcattatttaagaaataaggttatagctacccaaatagtgattaactctgatagatctgggcaaaataaattgaaaaccttccagagaaaggat

SEQ ID NO: 426873 - DNA, 201 bp, Homo sapiens
agctaaatatcttgtcttggccagaaacttctagggaaatattaaataacagtgctaactggcatctattttattccttttggaaatgccaaatatatatkatgagatttgaaaggtttttgatttgtttctatcatgttaaatgtccttccatttatagttaagaatagtcaggagtggatgctgaattcatatgaaatg

SEQ ID NO: 426874 - DNA, 201 bp, Homo sapiens
tatcaacatgaacaagagcttggaagaagttgattttaaccctcatggatgactttgagaggttcaagacttcaatggagaaagtaactacagatgtggtrgaaatcacaagagacctagatttagaagtggagcctgaagatgtgaccgaattgctgccatctcagataaaacttgaatggataaggagttgcttcttat

SEQ ID NO: 426875 - DNA, 201 bp, Homo sapiens
agcattagagtgaggcttttcctcaaagcactgtttaaaaccatcttctagagtttggttgttggccaggcgtggtggcttgcactggtaatcccagcactttgagaggctgaggtaggaggattgcttgagcctaagagtttgagactagcctgggcaacatagtgagacaaaaaaatttaaaaatcagccaggcgtgat

SEQ ID NO: 426876 - DNA, 201 bp, Homo sapiens
agccaggaggcagtttgcagtgagctgggatctcaccactgtacttccaggcttggtgacaaatcaagaatctgtctcaaaaaaaaaagaaaattgttccttttttttttttaattccagtggtcagaaatgaaaagtcagtcagaccaaagtgttgcagataaaaatgacttaacagtttttaaaaaaagtttaaatagt

SEQ ID NO: 426877 - DNA, 201 bp, Homo sapiens
tcaatgtggatccagtcggggttagcacaccactttttggctatgggcacggaccacagcaggtcaatgttgagcaccctaagaagcaggtaaaagccaastgcaaacaggaagagaaagaggttggtcttcaggtatgtgcccagactggccgtttggatgcctggagtgtgttcaaaggcctctgccaccagcatgcct

SEQ ID NO: 426878 - DNA, 201 bp, Homo sapiens
tactggtggatggagaagggtgatctgtgacacagagcactaactctaggcaccactctactgactcttctttccgctttgtttcattaacatatgaacasagtagggaatgaaagcaaccacagttaggggaatggatgcacttttacaaaaagacagcacataaaataaatgctcttcgtgagtcgggatctggaggaa

SEQ ID NO: 426879 - DNA, 201 bp, Homo sapiens
tggatggagaagggtgatctgtgacacagagcactaactctaggcaccactctactgactcttctttccgctttgtttcattaacatatgaacagagtagrgaatgaaagcaaccacagttaggggaatggatgcacttttacaaaaagacagcacataaaataaatgctcttcgtgagtcgggatctggaggaaatggta

SEQ ID NO: 426880 - DNA, 201 bp, Homo sapiens
ctctactgactcttctttccgctttgtttcattaacatatgaacagagtagggaatgaaagcaaccacagttaggggaatggatgcacttttacaaaaagrcagcacataaaataaatgctcttcgtgagtcgggatctggaggaaatggtagagctgcagtattgtcaatgaggtcaaggcacagagcaaccggaagctc

SEQ ID NO: 426881 - DNA, 201 bp, Homo sapiens
agaatggcacagtgtgcagggctcagagtcattaagttccctcacgcaagacacaagcacactgtctgaagtgatggtttgggagttagacttagctctawtttcacttcagaaaagcctacctcatgaagcaattgtgcatttacgccactgagattgtgccactttgtacatggaggctatgagaggtgtgttgtacca

SEQ ID NO: 426882 - DNA, 201 bp, Homo sapiens
tactgtgtagagaaattgtgtaaagcagtggctctcaaactttaatattcatccaactcccctgaagggcttgttaaaacacagatttcagggactcctartctttgattcactaaaaatagagtggggtctgagactttgtatttctaagttcccagataatggtgatgttgctgggtggagaacctctcacttttgaga

SEQ ID NO: 426883 - DNA, 201 bp, Homo sapiens
ctgattataccacactactttggagaaaatcacataaaggagggttagggatgttcaacagagtcagcattacattctgggaagagggaacagcacatggaatatggcaggaacatgagagcttgttaagttctgggatggctagagtaccctgtggatggggagtggtggagaagtggctggaagaactcgttggccaga

SEQ ID NO: 426884 - DNA, 201 bp, Homo sapiens
tcttcaaagtagagttaatatattgtatagctgtgttcatttttatagatgacttaaaaagtactgtgtagagaaattgtgtaaagcagtggctctcaaaytttaatattcatccaactcccctgaagggcttgttaaaacacagatttcagggactcctaatctttgattcactaaaaatagagtggggtctgagacttt

SEQ ID NO: 426885 - DNA, 201 bp, Homo sapiens
actggatatggctgtggtccccactaaaatgtcaacaggaatcagatgcagcctggccttaagaagataaaggaatcatagtggggctcctgctgggatgytgaagactgtgagaaaatggagtccttgcctcctactggggactgttagtatgcagctctggtcagttgtctccagctggggatgcaggctctgtgttgt

SEQ ID NO: 426886 - DNA, 201 bp, Homo sapiens
atttatttactcattactgtgtgccaggtactgtgctaaatgccttacattgaccacctccttcagtcctcatgatagttctccagggttggtatcatttwttattattattcctacttttctgatattgcagtcccagagagattatgatttgccccagatcatcagattaactccagaagccttactcatcttcagagc

SEQ ID NO: 426887 - DNA, 201 bp, Homo sapiens
ctgaagcaggagaattgcttgaacccaggaggcggaggttgcagtgagctgagattgcaccactgcactgcagcctggcgacagagcgagactccatctcaaaaaaaaaaaaagaaaaaaaaatggtcatacagcatcgaggactcctatatttgtattggccacaaatcacacagttcttcaaatgttataataaaaaca

SEQ ID NO: 426888 - DNA, 201 bp, Homo sapiens
accattcagagatatttgactttagcttgtgttacttatgaggtggcagtaaacaacaatatattttgtaggcattgacctttaatgtctctgcatggtcrttatccttttaccacaaacttatctgccttttctaaaataaactatttgagatctctccagtgtcaccttgcaatttaaaatggatttatttcagatgga

SEQ ID NO: 426889 - DNA, 201 bp, Homo sapiens
gagattaaaatggtaacccattgttggaggaggataatttaatgggcaaagcattgcctttgaagtcaagacctgagtttgaatgcagtctgtctgtctgwttatttatttatttatttatttttgagacagggtctcgccctgtcaccaggctggagtgcagtggcgtgatcgcagctcactgcaacctccgactccctg

SEQ ID NO: 426890 - DNA, 201 bp, Homo sapiens
tataattaatattagttattcctattttgccaaatagtctgtaaatgtggaactgaattcaagctctgacattcttgatcagagtagaagtagggtaaagygatacaattttgctcttatacacaattcttatgttgcttctcttttgtactctgacatctctgcctctaccccactctctctgttctctcctctcttttc

SEQ ID NO: 426891 - DNA, 201 bp, Homo sapiens
tctagccccctgattggcattttggggacaccatctctgtgcaatgggccccaagtagcagcggttgtatctttcttccaacaaacagaggaagaagtggycctgccagggttactcctttcccagcagagaggtttggccaggtttatgcacaggcattgctgtttttattttgagcatgtgtgtgagaaaggggtgggt

SEQ ID NO: 426892 - DNA, 201 bp, Homo sapiens
tttaatgggcaaagcattgcctttgaagtcaagacctgagtttgaatgcagtctgtctgtctgtttatttatttatttatttatttttgagacagggtctygccctgtcaccaggctggagtgcagtggcgtgatcgcagctcactgcaacctccgactccctggttcaagctattctgcctcagcctccctagtagctgg

SEQ ID NO: 426893 - DNA, 201 bp, Homo sapiens
agcttgtgttacttatgaggtggcagtaaacaacaatatattttgtaggcattgacctttaatgtctctgcatggtcattatccttttaccacaaacttawctgccttttctaaaataaactatttgagatctctccagtgtcaccttgcaatttaaaatggatttatttcagatggaatttagaccctagtgactttcag

SEQ ID NO: 426894 - DNA, 201 bp, Homo sapiens
gcattcgtcctttacagagccgaaaatgaagcacttctaagtcttagaatcttctcgtgaatttctgtcatttggcagaaatttctggagtcgttgcttcktatagatcttttctactgttaactttaaaaaaatagacttttaacaattggcaaatggcaccacattaccttcagagtgaaatcaccatctgaaagcatt

SEQ ID NO: 426895 - DNA, 201 bp, Homo sapiens
ggatagaatttctccaatatgtttcaccacatcaaatattatataaccacaagatatttcttattgaaccattcatgtctggattatagtgcttgctacarttcaacaccattcagagatatttgactttagcttgtgttacttatgaggtggcagtaaacaacaatatattttgtaggcattgacctttaatgtctctgc

SEQ ID NO: 426896 - DNA, 201 bp, Homo sapiens
tcctcatttttgacatttatgagacaatttaaaaattgtacctagagtagtcagattcatagagacagaaagtagaatggtggttgccaaggtgtgagggraggaaagacagatttgttatttgatgggcagagtttttaataaaaagagttctggagatgaatagcggtgatggttccataatgctgtgaatacactcaa

SEQ ID NO: 426897 - DNA, 201 bp, Homo sapiens
ttgccagtaattgacaaaaaccagtttcagaacatctccagcaccccagaaagttccttcatgcatgttggcagtcagtgcctgggtctgctcccagcccsatgcaaaaactgaactgctctctgtgtctgggaatctgccttttctggttattttatgtaaattaaatcatagtatatgtagtcttttgcacccggattc

SEQ ID NO: 426898 - DNA, 201 bp, Homo sapiens
gaaatctgataatgggtgaatttcttttcctttgaccaccttcactggagacttgtcccagtgtaccagctggtacaactacatacaaggacaatactgtkattcgtgactttgagtctcatttgattaatagcccctgtaaataccactcttggaatagcaaccacattttctaatgcctgccatttcacttggaaaatt

SEQ ID NO: 426899 - DNA, 201 bp, Homo sapiens
atagatactgcttttttatgacaaaataagcacagagaggttaagcaactttctcaaggtcagatagctgataatgaacagaaatatgatttgaacctgcrgtctgattataccacactactttggagaaaatcacataaaggagggttagggatgttcaacagagtcagcattacattctgggaagagggaacagcacat

SEQ ID NO: 426900 - DNA, 201 bp, Homo sapiens
gatttgggtaaatctgagtttcttggacccaccagtaaggtcgatgaccaaataatatcctgtatttaaagaattataaacatgcatatatatttaaatayacagctattatttaattggagattagcaattctttcctataaaaaatgactcaagcgcagggttaattgtgaaagttcatgattaagagactttgaaaaa

SEQ ID NO: 426901 - DNA, 201 bp, Homo sapiens
ataaacatgcatatatatttaaatacacagctattatttaattggagattagcaattctttcctataaaaaatgactcaagcgcagggttaattgtgaaarttcatgattaagagactttgaaaaaacttaggtcttggtctctcacacattattaaaggtggtagccatttggtattttggcaccctggtttcccatgaa

SEQ ID NO: 426902 - DNA, 201 bp, Homo sapiens
cctcaaatttggcataaactgcattcgtcctttacagagccgaaaatgaagcacttctaagtcttagaatcttctcgtgaatttctgtcatttggcagaartttctggagtcgttgcttcgtatagatcttttctactgttaactttaaaaaaatagacttttaacaattggcaaatggcaccacattaccttcagagtga

SEQ ID NO: 426903 - DNA, 201 bp, Homo sapiens
aattggtggcaaagagtgaagtacatgctgatctgtggcaattcgagggggaaatttggatagaaacacaatgaatttcttatgcaacctcccttttgtgygaacagttggatcatgtttgcttgaaattttttgtacagttcatttcctccaaggtcagacattagcaatttctatgtttggtgaaaagactttgcaaat

SEQ ID NO: 426904 - DNA, 201 bp, Homo sapiens
tcaaaaaactttttaaaacagtcttagaatcaactatcacaataaagattttatactcatacagaatcttacctagaataaaaaagaagtggcccaagaakcctacttgtgtacagagaaaaaatatgttttaaagagattgttctagggttagaaatagtctttactggctatagtaacattgagaagtccttacctttc

SEQ ID NO: 426905 - DNA, 201 bp, Homo sapiens
gctatgaatactctggagatgcagacactgatttgaatcaaccaaaaaacactccaaagaaatgaccaggtcagtctacgatggaagaatagatacaagcrtaaaaagcaaagaaactggatcactcaaaattagagggggtgacatcagatgatccttctcagaagaatcttctaactgtgacatagcatcatgattcta

SEQ ID NO: 426906 - DNA, 201 bp, Homo sapiens
gaagtggaaagcaccaaacaaatgctaagaatgaacagaagggtagcgcaaagaggctgtggatctaagtcataggtccataatctacggctgtggactaygactagactatagaccaggactctggtcctggactatagactacgactggaccctggactatggaccagggtagactgagaatgaacagaagggtagcac

SEQ ID NO: 426907 - DNA, 201 bp, Homo sapiens
agtgaagtacatgctgatctgtggcaattcgagggggaaatttggatagaaacacaatgaatttcttatgcaacctcccttttgtgcgaacagttggatcrtgtttgcttgaaattttttgtacagttcatttcctccaaggtcagacattagcaatttctatgtttggtgaaaagactttgcaaataattattgcatgtc

SEQ ID NO: 426908 - DNA, 201 bp, Homo sapiens
agtcttttgcacccggattctttcacttagcataatgtttttgagtagtttctcatgaataaatgcttcttagtttgctgcaatctgttagtcaacttccrggtcacttaaattgttgtttttgataatttggtccagttttatagtttctttttgggggataaaatttggtgacttccttctaccacacagatccaaacc

SEQ ID NO: 426909 - DNA, 201 bp, Homo sapiens
tcatagtaaactctatgtctaactgtattaatagcagtctctaggctgcaaggtgacttttgggtatattgtgaagtgttaaatattcataataacttgtyctgatttcataggtcttaatttagttcttggataaagaatggctaatatctggtcctctgagaatgttttttacatatttacttcttgttggtgtttgta

SEQ ID NO: 426910 - DNA, 201 bp, Homo sapiens
gcttcatgtactcaaaaatggactttctttcccaattatttcccaacaccatagtagtctgctgggaaggaatgaggtattcagcagcaagaacatgttgygtttgtcctctttatttgggtttgttctgttcgaggtcgtgccatagacccagtacagcatgtagcctctgaaatccggtgtgaatatctgttcttagaa

SEQ ID NO: 426911 - DNA, 201 bp, Homo sapiens
aggatctgtcaatgccttctgcaatcccgtcactggccagtgccactgtttccagggagtgtatgctcggcagtgtgatcggtgcttacctgggcactggrgctttccaagttgccagccctgccagtgcaatggccacgccgatgactgcgacccagtgactggggagtgcttgaactgccaggactacaccatgggtca

SEQ ID NO: 426912 - DNA, 201 bp, Homo sapiens
gctctctctaggcatgagtgtcggtgcactggtgagctttcagtcaataagctaaacatcttgtgtttggttttatcgggtgacaggttccagatgtgacractgtgcctcaggatactttggcaatccatcagaagttggggggtcgtgtcagccttgccagtgtcacaacaacattgacacgacagacccagaagcctg

SEQ ID NO: 426913 - DNA, 201 bp, Homo sapiens
cctgagccattggtcaattgttgtcgatggttgacaccttcccattttcacagtgaagtgagtattctaaatgccacatcttgtcactgaggttcatgatyaagtagatcagctagcattgcttattcccttctagcctgtgactgtgaccccaggggcattgagacgccacagtgtgaccagtccacgggccagtgtgtc

SEQ ID NO: 426914 - DNA, 201 bp, Homo sapiens
acttcggtaggcatacacaatcattacatgaatgggaacacacctacatatacacttaccagaaaagtacatttgttatctatgaacagaaattcttacawctcaacattaaaggattcctttaataaatctaaactactccgttagcatggatgctaaaaataagtggagataggttttcaaggaataaaaggactctga

SEQ ID NO: 426915 - DNA, 201 bp, Homo sapiens
aaatacagaataaccattgtttgccatgccctcagggggttagcatagtggagcggcaatatatccaggaccggattccctcctggactggagccggcttygtccgagtgcctgaaggggcttatttggagtttttcattgacaacataccatattccatggagtacgacatcctaattcgctacgagccacaggtaaaga

SEQ ID NO: 426916 - DNA, 201 bp, Homo sapiens
tttcaagtcaccatttcagagccagacgttgactgctgacttttttcctttggaattatcgatgcagagctttgtttttaatttttattttttggatgcaygaaggttgactttcgttgttgtctttcttttttgtttgggggcagatatgtcgtccttcctcggccggtgtgctttgagaagggaacaaactacacggtg

SEQ ID NO: 426917 - DNA, 201 bp, Homo sapiens
aatagaggaagcctactggccacagaacagagagtgtgtttacagatgaaagtcaaattattatggcttgttaaaatgagtatctcatttaaaaaatactrttcttcatcttcatgatttgttcatcttaaagattaggcaacaacttttgctatgtatgctctcctttccaagagaaagtttctgattctctgccaagta

SEQ ID NO: 426918 - DNA, 201 bp, Homo sapiens
tcaaagaagcatttgggttttctacacgtttgcttgcttaaacccatgccatggggcaccactgtaaggatgtttggccgttctcatttcttcacagcttsttctcatgccatactgtaaatcactggacatcttcaccgtgggaggttcaggagatggggtggtcaccaacagtgcctgggaaacctttcagagataccg

SEQ ID NO: 426919 - DNA, 201 bp, Homo sapiens
cctgtgctagacaggcagctcatttctgcaggtaaaattatattcatctcccaactttcattccaaaattgaacctatattactgaggccaaaaagggaaraggataaaagagaatgtcagaaaaaagaaaatcccatgtaagaaataaaaattatttaaattgcccttgcttttagtaaatagaaatgcctaagtaaagt

SEQ ID NO: 426920 - DNA, 201 bp, Homo sapiens
tggaggctcactccgtaatccccagcactttgggaggccaaggcaggtggatcacttgaggtcaggaattcgagactagcctggccaacatggtaaaaccktgtctctactaaaaatataaaaattagctgacatggtggcatatgcctgtaatcccagctactcaggaggctgaggcaggagaatcgcttgaacccagga

SEQ ID NO: 426921 - DNA, 201 bp, Homo sapiens
ccacgtgcagccgcctccacccactgcctggaaaacaccttgttgcccttttaagatccagtttggcccaggcgcgggggctcacacttgtaatcccctcrctttgggaggccaaggcaggtggatcacctgaggtcaggagttctaaaccagcctggccaacatggtgaaaccccatctctactaaaaaatagaaaaatt

SEQ ID NO: 426922 - DNA, 201 bp, Homo sapiens
ggtcaaggctgcagtgaactatgattgtactagtgcactccagcctgggcaacagagcaagactctatctcaaaaaacaaaacaaacaaacaaaaaaaagmcacaaaaaactcataggtcttttgtttattataaatttggaggcaactgtgcagcaatggcaggcctgggaaggttgatgactaagcagagagtatggaa

SEQ ID NO: 426923 - DNA, 201 bp, Homo sapiens
aggtcaaggctgcagtgaactatgattgtactagtgcactccagcctgggcaacagagcaagactctatctcaaaaaacaaaacaaacaaacaaaaaaaamccacaaaaaactcataggtcttttgtttattataaatttggaggcaactgtgcagcaatggcaggcctgggaaggttgatgactaagcagagagtatgga

SEQ ID NO: 426924 - DNA, 201 bp, Homo sapiens
gagcccgggaggtcaaggctgcagtgaactatgattgtactagtgcactccagcctgggcaacagagcaagactctatctcaaaaaacaaaacaaacaaamaaaaaaaagccacaaaaaactcataggtcttttgtttattataaatttggaggcaactgtgcagcaatggcaggcctgggaaggttgatgactaagcaga

SEQ ID NO: 426925 - DNA, 201 bp, Homo sapiens
gcctcctgggtttaagcaattctcctgcctcagcctcctgagtagctggaactataggcacatgccaccacacctggctaatttttgtatttttggtagargcaggtttcaccatgttggccaggctggtctcgaactcctaaccgcaagtgatcctcccaccttggcctcccaaagtgctgggattacaggcgtgcctac

SEQ ID NO: 426926 - DNA, 201 bp, Homo sapiens
gactgtttgtttgtttgtttgtttatttttgaggcagagtctccctctttcacctaggctggaatgcaatggcgcaatctcagcttactgcaacctccacstcctgggttcaagtgattctcctgcctcagcctcctgagtagctgggattacaggcacatgtcaccacgcccagctaattttttgtatttttagtagagg

SEQ ID NO: 426927 - DNA, 201 bp, Homo sapiens
tagattggacccacccagatcatccaataatcgctccatcttgatgtccttacccttaatcacatctgcaaagttccttttgccatatgaggtaacatccyacagataacagggatgaggatgtggacatctttgggggccattattctgcctcacacaggccttatttattttatgtccttattctcccttactgattta

SEQ ID NO: 426928 - DNA, 201 bp, Homo sapiens
gatcatgcctgtaaacaaacagtcactgcactccagcctgggaaatatagcaagaccctgtttcttgaaaaaaattgttctgaaaagcaaattagaaaatmattataggtgagatgtggcttgatgatgcaagttaataattggggttctgtttttcaggggccctagggggcaggaagtgttttaggttagtaacaataa

SEQ ID NO: 426929 - DNA, 201 bp, Homo sapiens
tttagaatgcatggaaaacttaatgttttttataagaaatatactgtgactaccagatattaaaagtactcattacgaatttttcatagggatctagcacyttgctctaaaaatcctctttatctcttaaaagaagtaatgcaaacataattccattaaattcttttgtttctcagaaagttaatgttttcgttccaattt

SEQ ID NO: 426930 - DNA, 201 bp, Homo sapiens
agtgaggaaatatgtaaataaataataacatgccacagacctttccaagccctgttgcaaaagagcacttagatgctggcatggggctctcgacacctacrattgaagtgggagtcccttttcctagtcaatggagaccttctcaggtaaacagttcattcctacttctaagtggcagctagaaaaaaaagatgacaactg

SEQ ID NO: 426931 - DNA, 201 bp, Homo sapiens
actgtaacgaaagactgaaggtgacggtgtaacagcagagagatgcatgatcctagaagatgggcatgcaccagccagcccgagccagggctaccaaaacrttttcctagagaatcagagctaggccttaaagtgtgaatggaattgtggaaagttggcacaaaagtaagaaatagtgtgagtggaagagagaagagaggg

SEQ ID NO: 426932 - DNA, 201 bp, Homo sapiens
ctgtatatcatttagccagaaataatagacttagtgaggaagtaaggattcattcagaacaaagttcacaatggactaaaatgtgagaatacctgcactgrgaagcaaggctgctagggccaatatttgatcagtaaatatttgctgaagagtatgaggagtgtggctcattggaaagcaaagagtcggcaccagaaagag

SEQ ID NO: 426933 - DNA, 201 bp, Homo sapiens
gatgccttcttctctgtgaagtattcctagctttttttttcttggcagtaaaatatccataacagaaagtttaccattttaaccatttttaagtgtataawtcaatggtgttaggtatagtcacaatgttgagcaaccactaagactgtctatttccagaactttttcatcaccccaaacagaaattctgtggccactgtc

SEQ ID NO: 426934 - DNA, 201 bp, Homo sapiens
gattcatggcatcattgttcgccaacttctttgttcctttcatccagaagaaaggtcagctcattacgtaagaaacttttcatcaggaaaagcaaacaacygataaaaaacagaaactaagtattctgcaaggaaacctggtttaaggagaatgtattgaaactggatatgtctgttcctttttactcctccctttggcat

SEQ ID NO: 426935 - DNA, 201 bp, Homo sapiens
gattttcccccctttccagcccaccccccgcttccgtgggagcgacaggaaatggaagggcgcctcttctctctttgaacatttgccttttttcccctcckttccacctctccagaaaggaagacgggaagaaagggcaggcggctcggcgggcgtcttctccactcctctgccgcgtccccgtggctgcagggagccggc

SEQ ID NO: 426936 - DNA, 201 bp, Homo sapiens
gggagtgtgacaataagtaaatgtgatgttcttttgcagagtgtgtctgtaattacctgggcaccgtgcaagagcactgtaacggctctgactgccagtgygacaaagccactggtcagtgcttgtgtcttcctaatgtgatcgggcagaactgtgaccgctgtgcgcccaatacctggcagctggccagtggcactggct

SEQ ID NO: 426937 - DNA, 201 bp, Homo sapiens
cagtgcatgcctgggtttggaggccgcacctgcagcgagtgccaggaactcttctggggagaccccgacgtggagtgccgaggtgagttgtgggcgttctygcattgacttgatcagagagtggagggaactggggttctacaagagccttctgtaaattataaaacacagtacaaattaacgtgtctataagaacctgta

SEQ ID NO: 426938 - DNA, 201 bp, Homo sapiens
atgttacaaattactgaattggtttgaaattagtaatggatacagtactagtagaaaatatgaaacgtgaaagttctcccttgggtttattttatgtaagyaagcttaactttctctttacaggaaactgattaaagatgttacagaaatgatggctcaagtagaagtgaaattatctgacacaacttcccaaagcaacag

SEQ ID NO: 426939 - DNA, 201 bp, Homo sapiens
gaaagccatggacttggaccaagatgtcctgagtgccctggctgaagtggaacagctctccaagatggtaactcagtggatggcctcagtttttgttatgyatgtttgctttcagctgtggactaaaggatctgaaagggagaaatcaattctaaatgctaactgaaatgaaaagggcatatcacaatcaaatatgaaagt

SEQ ID NO: 426940 - DNA, 201 bp, Homo sapiens
gaagttactaaaacgctagttaatagatcttttctgtcaccatatttactggaggagttaacatggtgctggtgctggtcccaaagatggttcacaatagsttttttttttaaactctaactggttagaaaaaaaggaaggcattccttggcccttgcactggcagaattcaacttgatatagcagatgtttgcatcctgg

SEQ ID NO: 426941 - DNA, 201 bp, Homo sapiens
ttataacacaaagcaggaaagtaagctcgtggaaatctagaaaccctgtggaacacttttctgttattaaacattagaaagattaacttaagttttactcstgcctttctttatccaactcctagcaaaagtatctcaaagctgtgaggttaccaaatagtagtcagaagaaagaaataatatcatccagggaatcacaag

SEQ ID NO: 426942 - DNA, 201 bp, Homo sapiens
ctacaacttttctatagaaaagtaataatcaggagaatgaggacttagccctaaggatttgctgcaactccagaattttttgaaatgttctttaaaatcakgtcaattttgcattcaattccactgtttgaagataaaattttaaattacttaccagtgaatatccttggtggcccttaatccagaatgcatgccatgatt

SEQ ID NO: 426943 - DNA, 201 bp, Homo sapiens
aagcaagtcttcacaaatcctaatttagtcaagatccaaagagcctccacttcttcaatatgggcttctctaatgtctaatctacttttgaaaaatctgcrcttctctatgtaatttgcaatacaattatgctacaacttttctatagaaaagtaataatcaggagaatgaggacttagccctaaggatttgctgcaactc

SEQ ID NO: 426944 - DNA, 201 bp, Homo sapiens
tacctatgtgaaataatttggagggtattttttatagactaaggtttgtgttctcttagcccagagacacagagaaagttaaagatggaaggtacataggygcagaagagttcaaacttcattacagctttgtcttagtgatgcttcctccctcctctcatcactttctctgaaatagacaaaattggtcacaatataaga

SEQ ID NO: 426945 - DNA, 201 bp, Homo sapiens
tatgggtttccagccttcccctcttctgtttctctgtggtcctcaactaaagaatgaatcatgactattctcccatactgttttagctactcagtgacacygcactgaaacttgatcctttttacactgtggacatttctttaatattttttttcctaagtagagacagggtctcactacattgctcaggctagtcttgaa

SEQ ID NO: 426946 - DNA, 201 bp, Homo sapiens
acccatgcaactgcaatgctgctcattccttcgggccatcttgcaatgaggtgaggggctgctgctggggatgatgcctttatgagctcaggtgtcagccyatggtgactttgccccagttagagcaaggcaccagggcacacagcttgaaacacagcgtggcctggatcttagccctcatttgtaccccttggctgggtc

SEQ ID NO: 426947 - DNA, 201 bp, Homo sapiens
ctgttttgctgcagcagattcactatccgaagtattgtgcctgatccttggcttgttgcagacctgtggaacacccccaggggcctcctgttccgagactkaatgtggcgggccaaactgcagaactgacgaaggagagaggaagtgtggggggcctggctgtggtggtctggttactgttgcacacaacgcctggcagaa

SEQ ID NO: 426948 - DNA, 201 bp, Homo sapiens
aaaaactcagatattcggggtgagcattttttggtgcaaatagtcccagacaatggatttaacgatatgtctaacgttttaatatagcacttttggggaaraaaaaagttttctaataaattttaaaacttttgctcatccagtttctggcacaaatgaggatcaaagtccccattttacaaatgtgggacttgggcacag

SEQ ID NO: 426949 - DNA, 201 bp, Homo sapiens
ctttgtttttaatttttattttttggatgcatgaaggttgactttcgttgttgtctttcttttttgtttgggggcagatatgtcgtccttcctcggccggygtgctttgagaagggaacaaactacacggtgaggttggagctgcctcagtacacctcctctgatagcgacgtggagagcccctacacgctgatcgattct

SEQ ID NO: 426950 - DNA, 201 bp, Homo sapiens
gcaggaggaatgcttgagatcatgagtttgagaccagcaagaccccatctctaaaattttttaaaatcataaataaaataggctgggcacaatggctcacmcctgtaatcccaccactttgggaggctgaggcaggtggatcacttgtcaggagttcaagactagcctggccaacatgatgaaacgccatctctactaaaa

SEQ ID NO: 426951 - DNA, 201 bp, Homo sapiens
gtgtgtttgctatttaggcctgtttataatcagcttctaaagagaaacagtttacttatccagtagggtggggaaaagtatacattttagaggttagacaytttccttgcaagaagagtctctgtggaacagcttgaattatttgaaatccagccacagtctgaaatacaaaccatatgcagttcaagtttgtggcatgca

SEQ ID NO: 426952 - DNA, 201 bp, Homo sapiens
ttcaattcttccgggtgtatacctaataatgtggaattgctcgattttccagcttcttgagttattaatttcttcctcttgcttttccaaagcacattgcrtgcaaccctactatggtgtttgacatagcatattgcaaattattgacacccatatctgcacctcattggactgtgtataacatatacaacatatagtcca

SEQ ID NO: 426953 - DNA, 201 bp, Homo sapiens
taactgtgcacagagtccccatcagacacatccatagcatttcagtagagggtcccagctgcagatgcagactcacttaacaatagacaagggtgtgctayttctcttcagtacctgggcgctgaagcagactcttttcttagcttctcgaaaggaaccaattagccatacccagcattgtaaaaagtgctgttgtttcct

SEQ ID NO: 426954 - DNA, 201 bp, Homo sapiens
tgtctgatgggtgtctccaagtggacatcacacatgtgactaattagcctacaaccaaatgctttcacgcctcttccacgttgtcgtcattggcaacacakctacctggctacccaagttcaggtgcctgtatttctttcctcaccctgccttttccactacaatctaattgatcaccaagtgtaattcaatagagtcttc

SEQ ID NO: 426955 - DNA, 201 bp, Homo sapiens
aagtgatttgccacttagaatagcagtcaagatgaggctcgctttttaaatatggcaggagagagtggggggagcatatttgctctactgaggggtttccrcaaaggtcagttcaagggtttctaaatactccagctgctcttcaagtttgttgtttggcctcttgtcaataggcgcttgtgctcattttgtgcaggagga

SEQ ID NO: 426956 - DNA, 201 bp, Homo sapiens
agtcccacgttgctttgaggcaaggtccacggcagaagaaaaccccattacctgaatcttagggtgtagcagtttctctgtcccaaggcaaatttaagttkccaacaaaaaggaggataatcagcccagtactgagtgaccaatggtatagagtggggagtggacacagagagaacagctgatactgttctgccacttgca

SEQ ID NO: 426957 - DNA, 201 bp, Homo sapiens
ttttacctacaatattatgctaacacttacttgagaggccaggacatcctgtaaatgaatcaccagattctgaaatcagctttgaccaaaatgagaatcasactgtttgtattaaaagcaactggaaagactatcctctcagtgatgatttctatagttcgttactagagaagtttctctaaacatgtagagagcatcaga

SEQ ID NO: 426958 - DNA, 201 bp, Homo sapiens
acaaaaatgtttctaactatcttataataacaatgagaactggagtgctttgataaatcttttcctacctgaatggaattttctcatgttgaaactgacaytaattgctgtgggaagcagatggcattgtgctacttcaaattactgtctgcccgcaggttccagcagtcatgcagctgcgttcttataatttctccactt

SEQ ID NO: 426959 - DNA, 201 bp, Homo sapiens
gtggaccaaaatgttgcttaaaaacttgaaatgttctctccttaggttgtagttattctatagcgttaacactattttggtaacttggatgtcatttaagyggtgggaaatttcaaattttcccttccaaaaatagagacaaaaatgtttctaactatcttataataacaatgagaactggagtgctttgataaatctttt

SEQ ID NO: 426960 - DNA, 201 bp, Homo sapiens
tcaccatattggtcaggctggtctcaaactcctgacctcatgattcacccgcctcggcctcccaaagttctagaattacaggtgtgagccactgtgcctgrccaggactcttaaatttttaaaatgaccgttttctttttttggacacaactacagcaagaaataatacagatcttcaagttggcaactcattcaatatct

SEQ ID NO: 426961 - DNA, 201 bp, Homo sapiens
attaaaaaaagtagagactaccaataaaaaacatcaaatgagatttttgctcctgcctttagacattccgtccagctgctatgctgatagaacgatcgtcygactttgggaaaacctggggtgtgtatagatacttcgcctatgactgtgaggcctcgtttccaggcatttcaactggccccatgaaaaaagtcgatgaca

SEQ ID NO: 426962 - DNA, 201 bp, Homo sapiens
tggtttcctagggatgccataacaaagtgtcacggactgggtggcttaaacaacagaaatgtgtcttctcacagttccataggctaggaatctcagggtawggtgttggcagggttggtttctgctgaggcctctctccttggttcgggatggctgtcttctccctgtgtcttcacatggtcttccctctgtgcatgtgtg

SEQ ID NO: 426963 - DNA, 201 bp, Homo sapiens
tgggagggagttcaggtaagaacaacaatgtgaagcacaaggccgcaaggatgttcttgaaaccatcacagagtccatgctgggaaggattactccaaggytcacttcaaccagtgtattgagagcagtactctgttgggcaccaaggatgtgagtagataagacacagtccctcttctgcaggctgttgtgttgcagggg

SEQ ID NO: 426964 - DNA, 201 bp, Homo sapiens
agtatagactccggagttgcaaagaactgaatcagaattctggcgtggccttttccttgcagtgagacttggggcatgttacataatctctctgatctctsagttcccacatctgtgaaatagtgattattataacacgtatcccatagggttattgtgagagttaaatgggatcattcatataaaacatttctgtttaaa

SEQ ID NO: 426965 - DNA, 201 bp, Homo sapiens
aaaggcctgattgtgtgtgtgttttttaaaactttagttttggaagtgtgcattaaaggtgatttatcctctttttaaaacccttgggtttccccaccccyctctaccgcatcttcacttgagtaaagaggattccagcaatgacaggcgtcttgcaaggtgattccaatcactgaacgaacccgttttcctctcctcatt

SEQ ID NO: 426966 - DNA, 201 bp, Homo sapiens
aactggatacttagaattcctttgggttttgttttgttttgatcatgtttattgcatttcatcaagtatgttttgttgtgagatagagtcaggtacgtaargagcttctcatttgtgatgtatccgatgccaggtggcacattatcaggatgtaacctggattgtttgtacagacatggtctgtggggaaatcctaagtaa

SEQ ID NO: 426967 - DNA, 201 bp, Homo sapiens
gcacagccactgtgctaagtaatctcagccacagctactggccaagaacacattttgtcctgtacggcacgtgattttcctgtgccatttggctttgcatraggtgccaaccctattgggcctgtgagacgctgagactgaatggctcccaagatccctgcttgtagtactggcagtggtcatcacaatggcagacacccc

SEQ ID NO: 426968 - DNA, 201 bp, Homo sapiens
tgcacagctgttttgctgcagcagattcactatccgaagtattgtgcctgatccttggcttgttgcagacctgtggaacacccccaggggcctcctgttcygagactgaatgtggcgggccaaactgcagaactgacgaaggagagaggaagtgtggggggcctggctgtggtggtctggttactgttgcacacaacgcct

SEQ ID NO: 426969 - DNA, 201 bp, Homo sapiens
ttactcttttttttcaacatactatccaaggatacatgttttaggaaccaaagtggccttattttaaaatacgatgttagatttgcttgttttaaaaaaaattgtatcattttatgagacctgagaagaaatgaaagccttctgtgagtcatataattaataaaagcaaagcactgaaaaaagaaactatgtatattagcc

SEQ ID NO: 426970 - DNA, 201 bp, Homo sapiens
ctaaaacaaattctagtagtactcaattgtctgcagttacttttttgtgtgtgtaggtctcatctcccctcaaaatcccagatagattataaactcttaawcaggaagttagtgtctcttggtgtgtaaccccaccatgctagtccatagtagatgaccagtaagtggttgaatgaatgaaccatctattcttttcacctc

SEQ ID NO: 426971 - DNA, 201 bp, Homo sapiens
tacagacctagaggattttaaggccagataggacttatgagatcacctagaccaactattggtgatagagcccaaggattaagtaatttactagagagccytaagtaaatgagcagcaggtggaagctcaagcctctcctcactcagccccagggttccttcccctaagctgtggcctcccctcatgaaggctgtgcttat

SEQ ID NO: 426972 - DNA, 201 bp, Homo sapiens
tctgacttttcctttgtgactcccagaacacatgttgaatcctttagtaaatgactcctcagttcaaagctgtcatcactcctaaagtccttcttgatgakataaaagtggcatatgcaattccccaaattatgtcataaactcaggaatgtcctatgattcttaaccctaagtaagttttgttcctacactcccttcctc

SEQ ID NO: 426973 - DNA, 201 bp, Homo sapiens
gatagtgctgatttggacagcattgaagcagttgctaatgaagtattgaaaatggagatgcctagcaccccacagcagttacagaacttgacagaagatayacgtgaacgagttgaaagcctttctcaagtagaggttattcttcagcatagtgctgctgacattgccagagctgagatgttgttagaagaagctaaaaga

SEQ ID NO: 426974 - DNA, 201 bp, Homo sapiens
tctaaacttcaaatttttgaataatcatgacgttattggcaaatacatataaataaacatataaccggaacacgtttttcccctttatccaatggaaataygatcaagcatcactcttagcagaagactaccagacacttgtagggacacgaaaagtgataataaaaacaatttatttattgaatgcttgctatagaccag

SEQ ID NO: 426975 - DNA, 201 bp, Homo sapiens
agggaggctctcgctgctggacagacctgatgacgtgtgtgggtttctttccgtgtccttctcctttcggagtccctgccttcccagcctctcctgcgctyatctctccattgtcttttctgtgcattttgctttcttccgaatggactgtcctctctccgcacccactcccccgcccccgcttgttcgtttttttcgggc

SEQ ID NO: 426976 - DNA, 201 bp, Homo sapiens
aactggataaaaacaatataaaacagtttttcctgcagaactcttctgagtctgtaatatgctgacacttgtttttaatcttcaagataaggatacagaayttttcatcatgggatagttttttcaaggaacacatcatagaacgtatggtctacggatcaccattaaagttatccatggtttgcctaaacagcttcctga

SEQ ID NO: 426977 - DNA, 201 bp, Homo sapiens
aaactttctaattcccttctttgggctcgggggctcccggagcagggcgagagctcgcgtcgccgggtgaggagaacaaagtggctgcacgattttccccmctttccagcccaccccccgcttccgtgggagcgacaggaaatggaagggcgcctcttctctctttgaacatttgccttttttcccctcctttccacctct

SEQ ID NO: 426978 - DNA, 201 bp, Homo sapiens
tggctgaactggttgttgacttctggagagagccgaagctctgctagctcattggaactcttacccaggctaatttccctcggccagataaagagggaagmcttatctgccttttaagtctttcagggttgggctgttttccccttaaagatgcctatgacagaatgggagcaagacatgtctttggcaacgaaataaatg

SEQ ID NO: 426979 - DNA, 201 bp, Homo sapiens
agtccctgccttcccagcctctcctgcgctcatctctccattgtcttttctgtgcattttgctttcttccgaatggactgtcctctctccgcacccactcscccgcccccgcttgttcgtttttttcgggctccactccctgcttgtgtccccccaactctgttgcctgtccttcccgcagccctgtgcagagcccgagtg

SEQ ID NO: 426980 - DNA, 201 bp, Homo sapiens
tttgaactcaccgtggtgaagccccgaaccctcccttgatgcattgcttctgcatctcttttagcatttattttgctcttatagttgtgttaaaaaggtcyctttggacagagattatgtcatctttgtttttgcatctcacttggcacccagcacggtggacctggcaggtactcaataaatgagggactaaaatttatt

SEQ ID NO: 426981 - DNA, 201 bp, Homo sapiens
ggaaatccctcttcgcacagctgcttatttgtgaatgttctttagccaaagtttgcaggtgtccttaaaatgctttctcaacacatcatgctccttggggrggtggggttttttgtttttttttactgtcagaaaaaattttacatcaatctcagcttagatcatcagaagtactgaaagaatgaagtgaatatatgaaat

SEQ ID NO: 426982 - DNA, 201 bp, Homo sapiens
tggggggagcatatttgctctactgaggggtttccacaaaggtcagttcaagggtttctaaatactccagctgctcttcaagtttgttgtttggcctcttktcaataggcgcttgtgctcattttgtgcaggaggatttgtgcaggagaaaatgttggcgttcataactgccattcagttggggagtaccacggtttctct

SEQ ID NO: 426983 - DNA, 201 bp, Homo sapiens
aaaggactcaaccatctgctccctttaaggtgaaatttgtgggacttggaggatgtgttgtctttataattttgattcttttgtcttttgtggttaaatgrcatcggagaatctttttctatgttacggaagcatgcatgttagctgatcatgcatttgatttactttgtaatcaagggagcaatatctctttagttgtct

SEQ ID NO: 426984 - DNA, 201 bp, Homo sapiens
aactggcttctggcctgaagcctgcttgaccaaggtctgtgttctggccgcagttcacggggcagtgccagtgcatgcctgggtttggaggccgcacctgyagcgagtgccaggaactcttctggggagaccccgacgtggagtgccgaggtgagttgtgggcgttctcgcattgacttgatcagagagtggagggaactg

SEQ ID NO: 426985 - DNA, 201 bp, Homo sapiens
gagaggaaaggaaggaaggagagagaggaaagaaaaggaaaagagaggaaggaagatgggagggagttcaggtaagaacaacaatgtgaagcacaaggcckcaaggatgttcttgaaaccatcacagagtccatgctgggaaggattactccaaggttcacttcaaccagtgtattgagagcagtactctgttgggcacca

SEQ ID NO: 426986 - DNA, 201 bp, Homo sapiens
gtcttttctgtgcattttgctttcttccgaatggactgtcctctctccgcacccactcccccgcccccgcttgttcgtttttttcgggctccactccctgyttgtgtccccccaactctgttgcctgtccttcccgcagccctgtgcagagcccgagtgcgcgctcaggaacccgagttcagctacggctgcgcagaaggc

SEQ ID NO: 426987 - DNA, 201 bp, Homo sapiens
tctagagcaaaatggcacagcagacttttaaatcttcctccaaacttgtactcatagtaattccatttcttaaactaatgtcttgctggaaaattgacatrcttttagattgagtctgaaacagcagcttctgaggaaaccttgttcaacgcgtcccagcgcatcagcgagttagagaggaatgtggaagaacttaagcgg

SEQ ID NO: 426988 - DNA, 201 bp, Homo sapiens
ctaaacatcttgtgtttggttttatcgggtgacaggttccagatgtgacgactgtgcctcaggatactttggcaatccatcagaagttggggggtcgtgtsagccttgccagtgtcacaacaacattgacacgacagacccagaagcctgtgacaaggagactgggaggtgtctcaagtgcctgtaccacacggaagggga

SEQ ID NO: 426989 - DNA, 201 bp, Homo sapiens
gaatagcttgaacccgggaagtggaggttgcagtgagccgagatcatgccactgcactccagcctgggagacagagtgagactcttccaaaaaaaaaaaaagtttttcagaggcaaatcacagctattgacccaagagtggctcacacctgtaatctcagcactttgggaggccaaggcaggcagatcacctgaggtcggg

SEQ ID NO: 426990 - DNA, 201 bp, Homo sapiens
agaatagcttgaacccgggaagtggaggttgcagtgagccgagatcatgccactgcactccagcctgggagacagagtgagactcttccaaaaaaaaaaaaagtttttcagaggcaaatcacagctattgacccaagagtggctcacacctgtaatctcagcactttgggaggccaaggcaggcagatcacctgaggtcgg

SEQ ID NO: 426991 - DNA, 201 bp, Homo sapiens
ctcgagagcttggaatgtagggggagaacaaagacaataaaaagataaactagcaatacaaggcaggatgtggtgagggccaaatgaatgggccacaaacacacacctctgggttgaaaggatggtgatgttatagcagatctcaggaccctcagtataactggttctgggagatgttccattagaaagtttttcagagga

SEQ ID NO: 426992 - DNA, 201 bp, Homo sapiens
actcgagagcttggaatgtagggggagaacaaagacaataaaaagataaactagcaatacaaggcaggatgtggtgagggccaaatgaatgggccacaaacacacacctctgggttgaaaggatggtgatgttatagcagatctcaggaccctcagtataactggttctgggagatgttccattagaaagtttttcagagg

SEQ ID NO: 426993 - DNA, 201 bp, Homo sapiens
cctcttttactttagatcttgaatttgcaaggaaggaggaaattattttcaagactattttagactcagcaagttaaaagtgaaagatgtgatacaaatcwcctaagcaattttcacacaattatttttcttgaagctaataggttgatttttgtattaggagcttcatggggtttttttaattaaaaatgtttttaatga

SEQ ID NO: 426994 - DNA, 201 bp, Homo sapiens
cactcgagagcttggaatgtagggggagaacaaagacaataaaaagataaactagcaatacaaggcaggatgtggtgagggccaaatgaatgggccacaaacacacacctctgggttgaaaggatggtgatgttatagcagatctcaggaccctcagtataactggttctgggagatgttccattagaaagtttttcagag

SEQ ID NO: 426995 - DNA, 201 bp, Homo sapiens
ttttactttagatcttgaatttgcaaggaaggaggaaattattttcaagactattttagactcagcaagttaaaagtgaaagatgtgatacaaatctcctragcaattttcacacaattatttttcttgaagctaataggttgatttttgtattaggagcttcatggggtttttttaattaaaaatgtttttaatgagatt

SEQ ID NO: 426996 - DNA, 201 bp, Homo sapiens
accattgtttgccatgccctcagggggttagcatagtggagcggcaatatatccaggaccggattccctcctggactggagccggcttcgtccgagtgcckgaaggggcttatttggagtttttcattgacaacataccatattccatggagtacgacatcctaattcgctacgagccacaggtaaagaaaccacttagtg

SEQ ID NO: 426997 - DNA, 201 bp, Homo sapiens
ccactcgagagcttggaatgtagggggagaacaaagacaataaaaagataaactagcaatacaaggcaggatgtggtgagggccaaatgaatgggccacaaacacacacctctgggttgaaaggatggtgatgttatagcagatctcaggaccctcagtataactggttctgggagatgttccattagaaagtttttcaga

SEQ ID NO: 426998 - DNA, 201 bp, Homo sapiens
aataagcccatgggattattatttagtttcagcttcagcttaaggtagaatgcgaggataatttctatggggaacataaaagtaatttaaaaaatagtctsaactattcacagatgtttctatttacagtttcatttattgttttattttttttaaatctcctgtaggtgtggaaaatgtaactatccaactggatttgga

SEQ ID NO: 426999 - DNA, 201 bp, Homo sapiens
gagtacgacatcctaattcgctacgagccacaggtaaagaaaccacttagtggactggtggaggagggaggggagaatcagtagaaaaatagtacttctamtgggtattatatatagttatgaaatatggaggttgcattagaacagatcagattcctatagtctcacctcctccatggaagttaaaataaatgtaccatt

SEQ ID NO: 427000 - DNA, 201 bp, Homo sapiens
aattattatggcttgttaaaatgagtatctcatttaaaaaatactattcttcatcttcatgatttgttcatcttaaagattaggcaacaacttttgctatrtatgctctcctttccaagagaaagtttctgattctctgccaagtaatcccatttcttaaaataagactgctttatctaggtcatttggattctgattcct

SEQ ID NO: 427001 - DNA, 201 bp, Homo sapiens
atcccaacactttgggaggccaaggcgggcggatcacttgaggtcaggagtccgacaccagccggaccaacatggtgaaaccccatctctactaaaaataygaaaattaatcaggtgagatggcgcacacctataatcccagctacttgggaggctgaggcatgagaatcgcttgaacccaggaggcagaggttgcagtga

SEQ ID NO: 427002 - DNA, 201 bp, Homo sapiens
aactctgtttttatattctttctttcctacttgattttcttccctgtttttaattgatcattatggataaaaattttctgtagtttcttaagtgctctttsgtatatttgttgcacatctgaaattataggtctctgttggactcttgaattttttttttttttgagacggagtctcgctctgtcacctaggccggaatgc

SEQ ID NO: 427003 - DNA, 201 bp, Homo sapiens
gcctgtgacaaggagactgggaggtgtctcaagtgcctgtaccacacggaaggggaacactgtcagttctgccggtttggatactatggtgatgccctccrgcaggactgtcgaagtaagatgcacatttattctgcccacttcttagaatgacttccacctttttttcattatcagcagattttattcttcctgtattta

SEQ ID NO: 427004 - DNA, 201 bp, Homo sapiens
ctgctttcaatacccaattctagagaaacctaatagagcacttatagctaaacaatctgttctgtttagaatgcatggaaaacttaatgttttttataagraatatactgtgactaccagatattaaaagtactcattacgaatttttcatagggatctagcaccttgctctaaaaatcctctttatctcttaaaagaagt

SEQ ID NO: 427005 - DNA, 201 bp, Homo sapiens
ccaacctgggtgataaagcaaggccccatgtcttaaaaaaatgtaatccttggattaggatttctacatgaagctatgctttacattgttagtttgctccyaacatgctccacccccatgtgctcagaagctaaagtctcatgtgctaggacctaactgtccacagccgctgtggcctctggggcagttgcaacactgtta

SEQ ID NO: 427006 - DNA, 201 bp, Homo sapiens
atttaaattaattttacatgtggcccagcctgtctctggtctgtaatttactcattcattctcttgtaaaacaaatatttaatagatgtgtccagctctgygccaatttctgagtgagccatgaggcctttcctgcatgtctcaaagtgcagttatgaaaaacgtccacaagggctctgggacagacaccccctaagtccc

SEQ ID NO: 427007 - DNA, 201 bp, Homo sapiens
ctaacttgctttctaaccttgggtgagttaggatatccagcttctagaaaatttttttgagacggagttttgctcttgttgcccaggctgaagtacagtgstgcaatctcagctcactgcaacctctgactcgcaggttcaagcaattctcctgcctcagcctcccaagtagctgggattacaggctttttgttgttgttg

SEQ ID NO: 427008 - DNA, 201 bp, Homo sapiens
agtccatgaggataaagcatttccataagcagggtagggagaggggaatggaatcagagaagcatcaaatacctgaaatgtatgtttttctctttgaaacrtcagaccatcctctgaaggtcactgggctttggtctaatgtcctgtgatatttgagctttgaaggcaaggggagaaaacattaatgacctcctgcctaga

SEQ ID NO: 427009 - DNA, 201 bp, Homo sapiens
ctttaaggcatccatagtttatttaaaagtgaaaaatatattcactttgtcttgagatcatcatagtataaattgctcagactttatatatatatatatcyccacagatttagaaagaaaatatgaagacaatcaaagatacttagaagataaagctcaagaattagcaagactggaaggagaagtccgttcactcctaaa

SEQ ID NO: 427010 - DNA, 201 bp, Homo sapiens
tgaaaaagggttttaaactttcaattgattatggagaaacgtggctattcatacatctcttcctttgttctctcctgtttttataactttcaaggttcacrgacactgcatgtgcaggcataacaccaagggcttaaactgtgaactctgcatggatttctaccatgatttaccttggagacctgctgaaggccgaaacag

SEQ ID NO: 427011 - DNA, 201 bp, Homo sapiens
aaagcttttcttgacgttgctcttgtcacgcagaatgtaactgcaatgaacattccatctcttgtcactttgacatggctgtttacctggccacggggaaygtcagcggaggcgtgtgtgatgactgtcagcacaacaccatggggcgcaactgtgagcagtgcaagccgttttactaccagcacccagagagggacatcc

SEQ ID NO: 427012 - DNA, 201 bp, Homo sapiens
ttgacatggctgtttacctggccacggggaacgtcagcggaggcgtgtgtgatgactgtcagcacaacaccatggggcgcaactgtgagcagtgcaagccrttttactaccagcacccagagagggacatccgagatcctaatttctgtgaacgtatgttgagaaatgtcactcactgtgtgggacctacttcagattgcc

SEQ ID NO: 427013 - DNA, 201 bp, Homo sapiens
caggagtttgagaccatcctgaccaacatggtgaaaccccgtctctactaaaaatagaaaagttagccaggtatggtggtgcgtgcctgtcgcttgaaccygggaggcagaggttgcagtgagctgagatcacaccattgcactccagtctgggtgacagagcaagactctgtctcaaaaaaaaaaaaaaaaaaaaaaagg

SEQ ID NO: 427014 - DNA, 201 bp, Homo sapiens
agaggcctaggcgggtggatcacgaggtcaggagtttgagaccatcctgaccaacatggtgaaaccccgtctctactaaaaatagaaaagttagccaggtrtggtggtgcgtgcctgtcgcttgaacccgggaggcagaggttgcagtgagctgagatcacaccattgcactccagtctgggtgacagagcaagactctgt

SEQ ID NO: 427015 - DNA, 201 bp, Homo sapiens
ttagtatttttctaatattttgcgagttttcaagtcaccatttcagagccagacgttgactgctgacttttttcctttggaattatcgatgcagagctttstttttaatttttattttttggatgcatgaaggttgactttcgttgttgtctttcttttttgtttgggggcagatatgtcgtccttcctcggccggtgtgc

SEQ ID NO: 427016 - DNA, 201 bp, Homo sapiens
ttacaggcgtgagccaccacacccagtcaaaacgtaccattttcttgaatccagtttctcaaacgtagtgatcttttgtgaggcactcaaccttgctgacractgaggtggtgatgaggatgtatgagatcctctccttccctcacaacctggctgtgcagtgacagactgaagccccgaactgtaacgaaagactgaagg

SEQ ID NO: 427017 - DNA, 201 bp, Homo sapiens
tggcgatagtgagatttcttagatggcttccagcttccaaaaagaggaaacaagctgccagctctctgaaagcttggactcagaagtcctagaaagttcckcaggttctgttggtcacaagtcacaaggattcatggaaaggataacatagtttgcacctcttgatgggtaaggccacacacgggtacatacagatacata

SEQ ID NO: 427018 - DNA, 201 bp, Homo sapiens
tacagaaaactctcaagtgaaagggacttaatcaaaaaggatgtttattatctcacatcttaataagatatccagtagcaggatagcttcctgggtctgcsacccacatacttttcatctttctactctaccatcttaagcatatcagctttgtcctctagctcctcatggttacaaggtagctgccaaagttccagacat

SEQ ID NO: 427019 - DNA, 201 bp, Homo sapiens
atgtgccaccacgcctggctaattttgtatttttagtagggatggggtttcatcatgttggtcaggctggtctcgaactcccgacctcaggtgatccgccygccttggcctcccaaagtgttgggattacaggcgtgagccactgtgcctggcgatagtgagatttcttagatggcttccagcttccaaaaagaggaaaca

SEQ ID NO: 427020 - DNA, 201 bp, Homo sapiens
tgctctgggacagccaagctggagatgttcttcagggagctggatatttgagcctaaatctcaggaaataagcaaaagatgtaacatgccaaagcaagaargtttgggatgtggaaaaccttcatgtgatgcggacggcgtgttagtcaagagagggcaagggaggtaaaaccgagaagaccaggttctcagccacgcttc

SEQ ID NO: 427021 - DNA, 201 bp, Homo sapiens
cagaaagagaagccgttttcagaggatgggttatggaggctgcagaaagccaggcagaggcatcatggcttgatatcataagaaacaattgtgggttttcrtgaaacaatgaaagcagcactgtaggaagatcggttggcccgtggtagacaggatggactaggcagaagaggaagaagaatttgagaggtcagtttagga

SEQ ID NO: 427022 - DNA, 201 bp, Homo sapiens
caccctctttgctcctgttattcctgtcctctctctgcctgtcaagtcctctccaggctttaaggacacctctttcatgacgcctccctcagtcttctcartcagatgaatcatatcttcttctcccttagtgctttgcttgtaactctatcaatgcataggttcttactgcattttgatttgttgcattggttaatttct

SEQ ID NO: 427023 - DNA, 201 bp, Homo sapiens
ttactttaaggcatccatagtttatttaaaagtgaaaaatatattcactttgtcttgagatcatcatagtataaattgctcagactttatatatatatatmtctccacagatttagaaagaaaatatgaagacaatcaaagatacttagaagataaagctcaagaattagcaagactggaaggagaagtccgttcactcct

SEQ ID NO: 427024 - DNA, 201 bp, Homo sapiens
ccatgtctattatattgacaactaacctgaactttggaataattaaagaagtggccaggcgcgttggctcatgcctgtaatcctagcactttgggaggccrgcgcgccagatcacctgaggtcaggagttcaagaccaaccaggccaacatggtgaaaccctgtctctactaaaaatacaaaaattagccaggcgtggtgg

SEQ ID NO: 427025 - DNA, 201 bp, Homo sapiens
tgctgattgagtagaatttaaaaataaaagatttctaagatgttaaaaactagatatgtactccttagagaggcaatctctaaatgtgatcccagacactmcttagttactttgttgagggacagaattaaccataaaaatcactggaagtggtaaaagctttaagatgttttgtatagtgagctaaatggatttttggta

SEQ ID NO: 427026 - DNA, 201 bp, Homo sapiens
ctcctacctcccctctcttgcccctaaacatcccaactccttttgccaaaaaggaacccccaaaacagcacaataagacctaagtgctaaaggacaaaaayagaaaagggtatgaggcatctgtgcttccctagatgctatggttttttcactgcagactcaccatctaggcctgaggggactgcttcacagttaaatcct

SEQ ID NO: 427027 - DNA, 201 bp, Homo sapiens
gtcgaccatgtgactgtgaccttgggggagccttaaacaacaggtaaatggagctctacgtatgctcttgtcctcagtcttccaggaaagtcatgacttayaggaatgggtgacattcagttgtttctcaaaaagacatgcaaaatattttttgtatgtcttgataaatgtgtgtaggtacctctatggactagattccca

SEQ ID NO: 427028 - DNA, 201 bp, Homo sapiens
tcctgggcagagctcatatagtattttaactcatttgggcagaagatattgatgagttgtaaacttccattgtttccttggaaataagcaggttagtttaytcctaaactctctgctcctctctccattctgtctcccaaacactgttttcaagcacccttgctgaggaccacctacacattctctggggccacccaggcc

SEQ ID NO: 427029 - DNA, 201 bp, Homo sapiens
tctgattggacagtgtttgttagtggaagcctagagaattgaccttctcaaggatcatttatctaccctttctcctacctcccctctcttgcccctaaacwtcccaactccttttgccaaaaaggaacccccaaaacagcacaataagacctaagtgctaaaggacaaaaatagaaaagggtatgaggcatctgtgcttcc

SEQ ID NO: 427030 - DNA, 201 bp, Homo sapiens
cctcgggaaacagtctcagctggagagtcatggagagatttggtttcaccagattgtgtgaagccttcggtgctgggccattaagggtagactttgttcartgggcacaggaaggtctggaggaggagagggaaggatgtaaaggaagcaggcaagttaggtctatgtgataaatgggtacatagactatttcccattgtg

SEQ ID NO: 427031 - DNA, 201 bp, Homo sapiens
tggaaggagaagtccgttcactcctaaaggatataagccagaaagttgctgtgtatagcacatgcttgtaacagaggagaataaaaaatggctgaggtgamcaaggtaaaacaactacattttaaaaactgacttaatgctcttcaaaataaaacatcacctatttaatgtttttaatcacattttgtatggagttaaata

SEQ ID NO: 427032 - DNA, 201 bp, Homo sapiens
aacttttcagttgtcagaagagggcaagatcagtaggaaatggagtcattagggaagggtttgcagaaaagattagctctagtggccatctacagagaacrtgctgagtgccaagcacttttaggcatattatataagtattcttaattttatccttgcaacaaagaacctatgggggtaagtatcatctccatttcacac

SEQ ID NO: 427033 - DNA, 201 bp, Homo sapiens
tgaggaaatatgtaaataaataataacatgccacagacctttccaagccctgttgcaaaagagcacttagatgctggcatggggctctcgacacctacgaytgaagtgggagtcccttttcctagtcaatggagaccttctcaggtaaacagttcattcctacttctaagtggcagctagaaaaaaaagatgacaactggc

SEQ ID NO: 427034 - DNA, 201 bp, Homo sapiens
atgatccagtcctaactagatgggaagttactaaaacgctagttaatagatcttttctgtcaccatatttactggaggagttaacatggtgctggtgctgktcccaaagatggttcacaataggttttttttttaaactctaactggttagaaaaaaaggaaggcattccttggcccttgcactggcagaattcaacttga

SEQ ID NO: 427035 - DNA, 201 bp, Homo sapiens
tttgtatttttagtagagacggggcttcaccatgttagtcaggctggtctcaaactcctgacctcaagtgatccacctgcctctgcctcccaaagtgcagrgatacaaaagaggcatgagccactgtgctcagcctcttttttgtatttttaataagaaatgaatgatcatttcttgccaaaatttgccactatgaggtga

SEQ ID NO: 427036 - DNA, 201 bp, Homo sapiens
caatgcataaatgtcactggaaaatggaaatgcgattacagtaattcacaaactaatatttaatgctgggttgataattttacctgacttagaggcaggtrcctgaaaaaaaatcagtattctgttagcaagaaaaaaggcatggctaataaggagtcaacagtatttgctaaggatatcttaggtaatattttatggaag

SEQ ID NO: 427037 - DNA, 201 bp, Homo sapiens
ggtttattcacatggttagagttagaccaccaccactatgtcctcacctcaactcgggagaagagggaagacgaggcaagcaaattccatttaaagatgakacatgggccaggcgtggaggctcactccgtaatccccagcactttgggaggccaaggcaggtggatcacttgaggtcaggaattcgagactagcctggcc

SEQ ID NO: 427038 - DNA, 201 bp, Homo sapiens
ggctaatttttgtatttttggtagaggcaggtttcaccatgttggccaggctggtctcgaactcctaaccgcaagtgatcctcccaccttggcctcccaargtgctgggattacaggcgtgcctaccgcgcctggcctgttcccttctgttctgggaactgggataatcttgttgccctggcggatagtgggaacctgaaa

SEQ ID NO: 427039 - DNA, 201 bp, Homo sapiens
agtagagacgggttttcaccatgttggccaggctgggtctcgaactcctgacctcaggtgatccacccgcctcagcctcccaaagtgctgggattacaggygtgaaccagcgcgcctggcccaaataaaagttttgatggtaaacagcagccatggaataagtcttactcagaatctaaatattcagtgctaaatctacct

SEQ ID NO: 427040 - DNA, 201 bp, Homo sapiens
taggaaataaaattcatcaaggaaaacaaaatctggaaggaaatacaccaaaaagttcactgtaataattccaagtaggataattatgagataagtttttwaaaatctgtatttttaataacattgttatactttctaatttagggaggattcactacccccaaattattaccattaaatatgtatatttatatataatct

SEQ ID NO: 427041 - DNA, 201 bp, Homo sapiens
gccagattattatttgaaactcacgtggtctgtgtttctccacttcattttgttttaatacagcttgtgcttgcaatcctctgggaacaattcctggaggraatccttgtgattccgagacaggtcactgctactgcaagcgtctggtgacaggacagcattgtgaccagtgcctggtaagtaaatcctcattacgtggga

SEQ ID NO: 427042 - DNA, 201 bp, Homo sapiens
tgaaggccgaaacagcaacgcctgtaaaagtaagtctgtgttgaagggacattttaaatccattcaggctctagtatccatttcctaattagaggtactgyaacagtgtactgttttgcagagggtagaaaagttactgtcttttttccagcttcaccctgatactcctagacaaccaacaatctgcattcagttaattaa

SEQ ID NO: 427043 - DNA, 201 bp, Homo sapiens
aactggagttacaggcaagcgccaccacgcccggctaatttttgtatttttagtagagatggggtttcaccatattggtcaggctggtctcaaactcctgwcctcatgattcacccgcctcggcctcccaaagttctagaattacaggtgtgagccactgtgcctggccaggactcttaaatttttaaaatgaccgttttc

SEQ ID NO: 427044 - DNA, 201 bp, Homo sapiens
tgctgagatcgtgccactgcactccagcctgcgcaacagagcgcgactccatctcaaaaacaaacaaaaaaacagccaggtgtggtggtgtgtgcctgtartcccagctacttgggaggctgaggcaggagaatcacttgaacccaaaaaacagaggttacagtgagctgagatagtgccactgcactccagcctgggtga

SEQ ID NO: 427045 - DNA, 201 bp, Homo sapiens
gtatctctttaaccaatgaaacttctaagaaggacctatgcgagtctctctgggtcatttcaggaaggctattctttaaagaaaagaacactgagagtacwtttttcatgttcagcaacaatatactgtctcattattttttactcagcaaaagtgcaacagatgttaaagtcactgcagatatggtaaaggaagctctgg

SEQ ID NO: 427046 - DNA, 201 bp, Homo sapiens
aaattgatttagaggtaacttgtatttgagaaaaaataatttgccccacatcctaatactaagcttatttatgcttatgtcactatataatattgagaaaygtggaaacgttttgtaaaactgggacaaaaaagttgtggaccaaaatgttgcttaaaaacttgaaatgttctctccttaggttgtagttattctatagcg

SEQ ID NO: 427047 - DNA, 201 bp, Homo sapiens
tagatcctgttttagaaactctgcaaagagtgagattcatggcatcattgttcgccaacttctttgttcctttcatccagaagaaaggtcagctcattacrtaagaaacttttcatcaggaaaagcaaacaaccgataaaaaacagaaactaagtattctgcaaggaaacctggtttaaggagaatgtattgaaactggat

SEQ ID NO: 427048 - DNA, 201 bp, Homo sapiens
aagctgagaacagaagtttcactcttgttgcccaggctggagtgcaatggcgtgatctcagctcacctcaacctctgcctcccgggttcaagcgattctcstgcctcagcctcccaagtatctgggattacaggcctgcgccaccacgcccagctaattttgtatttttagtagagatggggtttctccatgttggtgagg

SEQ ID NO: 427049 - DNA, 201 bp, Homo sapiens
gcttgaacctagaaaacagaggttgcagtgaaccaagatcacgccattgcactccagcctaggcaacagagcaagactctgtctcaaagaaaaaaaaaaaataataagacctaattaatttaaataatctaactgaagccaagttaatgaagttttgcctagtagattacctgttttaatgaaaaagaattggcattggtt

SEQ ID NO: 427050 - DNA, 201 bp, Homo sapiens
ctttgggaggctgaggcaggaggattgcttgagcccaggagtaagagaccagcgtgggcaagatggcgagacaccatctctccaaaaaaaaaaaaaaaaaattttacaaaattagtcaggtgtagtgccgcaaacctgtagtcccagctgctgggaaagctgaagtgggagaattccttgagcccggaaattcagggctgc

SEQ ID NO: 427051 - DNA, 201 bp, Homo sapiens
gagggaagacgaggcaagcaaattccatttaaagatgagacatgggccaggcgtggaggctcactccgtaatccccagcactttgggaggccaaggcaggyggatcacttgaggtcaggaattcgagactagcctggccaacatggtaaaaccttgtctctactaaaaatataaaaattagctgacatggtggcatatgcc

SEQ ID NO: 427052 - DNA, 201 bp, Homo sapiens
aaacgctagttaatagatcttttctgtcaccatatttactggaggagttaacatggtgctggtgctggtcccaaagatggttcacaataggttttttttttaaactctaactggttagaaaaaaaggaaggcattccttggcccttgcactggcagaattcaacttgatatagcagatgtttgcatcctgggcagagctca

SEQ ID NO: 427053 - DNA, 201 bp, Homo sapiens
tcatagtgactgcatctgacctattcttggctattttatgtggaatgatccagtcctaactagatgggaagttactaaaacgctagttaatagatcttttmtgtcaccatatttactggaggagttaacatggtgctggtgctggtcccaaagatggttcacaataggttttttttttaaactctaactggttagaaaaaa

SEQ ID NO: 427054 - DNA, 201 bp, Homo sapiens
ctgtatttttaataacattgttatactttctaatttagggaggattcactacccccaaattattaccattaaatatgtatatttatatataatcttaatayattcttaaaggagatttctggaagtctaaattgatgagcctggtcaggtgtgatgactcatacttgtaatctcagtgctttgggtggccaaggcaggagg

SEQ ID NO: 427055 - DNA, 201 bp, Homo sapiens
ccccacctctgggaatctattctaatgaaataatcagaaaattggacaaagatttattctccagaagactcattgcatcttttattaatcatagcagaagrcttggaaacaacagtggaaaaatagttaagtgtggggacttctatacaatgtaatatttggttgccactgaaaatgacaataacatcaggaaatgctcat

SEQ ID NO: 427056 - DNA, 201 bp, Homo sapiens
gtgggcatccatattggtttgtacttttgtgaaaagcattttggagatacatatcagtagcttgtagaaatgggcataccctttgacccagtaaccccacytctgggaatctattctaatgaaataatcagaaaattggacaaagatttattctccagaagactcattgcatcttttattaatcatagcagaagacttgga

SEQ ID NO: 427057 - DNA, 201 bp, Homo sapiens
ttgtctactttctttcatagtgactgcatctgacctattcttggctattttatgtggaatgatccagtcctaactagatgggaagttactaaaacgctagktaatagatcttttctgtcaccatatttactggaggagttaacatggtgctggtgctggtcccaaagatggttcacaataggttttttttttaaactctaa

SEQ ID NO: 427058 - DNA, 201 bp, Homo sapiens
catttcagaagcatttttatagctttgtcagtgagcacaaaataaggatcaggaccatgccttcctgagaagagtcatatttaaagctaagtaattctatmactcacaaattggctttggagcattcactgataaggcttttggttggtttaagaaatgtgtctttacaagaaacttttcttctctctacttatgctccaa

SEQ ID NO: 427059 - DNA, 201 bp, Homo sapiens
ctttgacatggctgtttacctggccacggggaacgtcagcggaggcgtgtgtgatgactgtcagcacaacaccatggggcgcaactgtgagcagtgcaagycgttttactaccagcacccagagagggacatccgagatcctaatttctgtgaacgtatgttgagaaatgtcactcactgtgtgggacctacttcagattg

SEQ ID NO: 427060 - DNA, 201 bp, Homo sapiens
gcggacggcgtgttagtcaagagagggcaagggaggtaaaaccgagaagaccaggttctcagccacgcttctggagtttgggattaatccataggcactayttttttccacatatgtattttctgaagaaaacaagaacatgctatgtatttggtcctgtgtactgagtaatggcagctgtagagctgcttctggcgggtt

SEQ ID NO: 427061 - DNA, 201 bp, Homo sapiens
aaagtttgggagttttcttgtgtttgaaattcccattttactttgtaattccaaagccagattattatttgaaactcacgtggtctgtgtttctccacttyattttgttttaatacagcttgtgcttgcaatcctctgggaacaattcctggagggaatccttgtgattccgagacaggtcactgctactgcaagcgtctg

SEQ ID NO: 427062 - DNA, 201 bp, Homo sapiens
caggagacaaagttatgaagcatgaaatgccaattctctccatctttcccttcagcattgattccttccttacatattgtagttaaaaaaaaaaaatcagytatcacaaacaagttctgtgtgacctacaagaaacagctaagcatgctaaaggatttttgtcttgaaccggaggcatctccgtgggcggcagggagatgc

SEQ ID NO: 427063 - DNA, 201 bp, Homo sapiens
ctgagatgacaggcatgtgccaccacacccagcttggacattccttttttagtttgttctgatttgaattataaaacccatctcagtgtaggaattcagartcattctagaaggggcttccattaaaaattaaagggagcaaaagaattttttcacgggtattagctattatgttcctttgttccagtaactttacctggt

SEQ ID NO: 427064 - DNA, 201 bp, Homo sapiens
accagcacccagagagggacatccgagatcctaatttctgtgaacgtatgttgagaaatgtcactcactgtgtgggacctacttcagattgccttccaaaytgaatagtcagtagtctcagagctcatagtatgagcagtaaagccagcattgttattgtaattgcagttgaagacgctgggagtggaatttacttggtag

SEQ ID NO: 427065 - DNA, 201 bp, Homo sapiens
agtttgggatgtggaaaaccttcatgtgatgcggacggcgtgttagtcaagagagggcaagggaggtaaaaccgagaagaccaggttctcagccacgcttytggagtttgggattaatccataggcactacttttttccacatatgtattttctgaagaaaacaagaacatgctatgtatttggtcctgtgtactgagtaa

SEQ ID NO: 427066 - DNA, 201 bp, Homo sapiens
agagagggacatccgagatcctaatttctgtgaacgtatgttgagaaatgtcactcactgtgtgggacctacttcagattgccttccaaactgaatagtcrgtagtctcagagctcatagtatgagcagtaaagccagcattgttattgtaattgcagttgaagacgctgggagtggaatttacttggtagttgtgctgct

SEQ ID NO: 427067 - DNA, 201 bp, Homo sapiens
atgtggaaaaccttcatgtgatgcggacggcgtgttagtcaagagagggcaagggaggtaaaaccgagaagaccaggttctcagccacgcttctggagttwgggattaatccataggcactacttttttccacatatgtattttctgaagaaaacaagaacatgctatgtatttggtcctgtgtactgagtaatggcagct

SEQ ID NO: 427068 - DNA, 201 bp, Homo sapiens
ccaggttcaagcgattctcctggagtagctgagattacaggcacgcgccaccatgccctgctaattttttttgtaattttagtagaggagaggtttcatcrtgttagtcaggctggtcttgaactcctgacctcaagtgatctacccaccttggcctcccaaagtgctgggagtttacagatgtgagccaccgcgccaggg

SEQ ID NO: 427069 - DNA, 201 bp, Homo sapiens
cctaatttctgtgaacgtatgttgagaaatgtcactcactgtgtgggacctacttcagattgccttccaaactgaatagtcagtagtctcagagctcataktatgagcagtaaagccagcattgttattgtaattgcagttgaagacgctgggagtggaatttacttggtagttgtgctgcttttagtcgacttttgtgag

SEQ ID NO: 427070 - DNA, 201 bp, Homo sapiens
tgtactgagtaatggcagctgtagagctgcttctggcgggttgactcgcgtgaccatgaactcagctgatgtggctcctcctcccttccagttgctttgcrgagtcaggccagtgctcatgccggcctcacatgattggacgtcagtgcaacgaagtggaacctggttactactttgccaccctggatcactacctctatg

SEQ ID NO: 427071 - DNA, 201 bp, Homo sapiens
ggtatgtatgcatttagttctacattataacttttgtagatttctattacaataggttttcttaaaaaaatcttaagtaactagtttttttttttttttttaattttaagtaattttcttcatctgggttcttttcatagatactcagtaaaatatttcttgtgcatccactatgtaataggaacattctagagatgaggc

SEQ ID NO: 427072 - DNA, 201 bp, Homo sapiens
ctgtgtgggacctacttcagattgccttccaaactgaatagtcagtagtctcagagctcatagtatgagcagtaaagccagcattgttattgtaattgcasttgaagacgctgggagtggaatttacttggtagttgtgctgcttttagtcgacttttgtgagatttagagggaggaagggaatatatgtatttatacaaa

SEQ ID NO: 427073 - DNA, 201 bp, Homo sapiens
cctttgatctttttcccttgtaatctgacttccaattccccaaaatgcatcactgtgttggttagtgtcaaaacctttgcctgtttgcctatttttcagcrctctttctgcttcatcttttacttccagttgaccctgttcactacaccctcctaaatctccctcctgccttggtttcagaagactgcctttttttctctt

SEQ ID NO: 427074 - DNA, 201 bp, Homo sapiens
tggtatgtatgcatttagttctacattataacttttgtagatttctattacaataggttttcttaaaaaaatcttaagtaactagtttttttttttttttttaattttaagtaattttcttcatctgggttcttttcatagatactcagtaaaatatttcttgtgcatccactatgtaataggaacattctagagatgagg

SEQ ID NO: 427075 - DNA, 201 bp, Homo sapiens
cctcgctggacggccccgccgcgcgccgttctgggacgcgcaccccggggcggacccgccctgggacctggaagcgccccagccccgcagcgatcgcagaytcggctttcaaacaaaagaggcgccccggggggtgggaccgggacctcacccggtcctcgcagagttgcggccgcccgccccttcagccccggctctccg

SEQ ID NO: 427076 - DNA, 201 bp, Homo sapiens
atgaaaactgtacttcataaatattttttcttgaattttaaaactttacagtaaatttaggacccgaagacaccaaatatagacactgcttggggaggaarcctagtatgatgaggttaactgtgggcaatttcatttcctaccctaggtgccttggatagcattaccaagtatttccagatgtctcttgaggcagaggag

SEQ ID NO: 427077 - DNA, 201 bp, Homo sapiens
ggtaattgagcagtttttaaaacgagcatgaataactgcatttaacaaatactctatcttcatgacaataagtagaaagagcctctattctaaggtaattsaactgtaaacttttaattaggtatctttttatttccccatagagtaaggcagtgttgacccttttccaaaccgcaataaaacatctggagagtaaatccc

SEQ ID NO: 427078 - DNA, 201 bp, Homo sapiens
ggcaattttccagcaagagtttatttcaaaaggtcctcctgatttcctgaaaatacaccagtctgtgacatgattcattctgacacattcctgtctttccscatttaagacttcttttgctctcaagatggaccccaaaagctctctcaaacacaagaagcgtggcaagcctcccttgctgaacaggcaggcttgagagct

SEQ ID NO: 427079 - DNA, 201 bp, Homo sapiens
gtggtatgtatgcatttagttctacattataacttttgtagatttctattacaataggttttcttaaaaaaatcttaagtaactagtttttttttttttttttaattttaagtaattttcttcatctgggttcttttcatagatactcagtaaaatatttcttgtgcatccactatgtaataggaacattctagagatgag

SEQ ID NO: 427080 - DNA, 201 bp, Homo sapiens
tatggtaaaggaagctctggaagaagcagaaaaggcccaggtcgcagcagagaaggcaattaaacaagcagatgaagacattcaaggaacccagaacctgytaacttcggtaggcatacacaatcattacatgaatgggaacacacctacatatacacttaccagaaaagtacatttgttatctatgaacagaaattctta

SEQ ID NO: 427081 - DNA, 201 bp, Homo sapiens
ctcccaacctttcagcatctttacattttcctggttttttatactattatatcgccaagaagacaattacattcaattaggtgaaccagtaatacccagargtaaaatctgctcaaatattactttctttacaatacacatacaaccctacccacacccacctggagcacactcgcatgtgcacacacacacccatatcca

SEQ ID NO: 427082 - DNA, 201 bp, Homo sapiens
tggctcttggtattgcttcttggttcttctcttcctttgggagagtaagaggaagaggatgcagtcttagtagtttcccttaaaaaaaaaaaaaaaaaaaagcaactggagccaggctctctggtatatatgattagccatgcatttgtgaagtgcttttcacagatagcagggcctaaagaaagggactggacatatgct

SEQ ID NO: 427083 - DNA, 201 bp, Homo sapiens
taaattggtttccaggtggtatgtatgcatttagttctacattataacttttgtagatttctattacaataggttttcttaaaaaaatcttaagtaactagtttttttttttttttttaattttaagtaattttcttcatctgggttcttttcatagatactcagtaaaatatttcttgtgcatccactatgtaataggaa

SEQ ID NO: 427084 - DNA, 201 bp, Homo sapiens
ggaggctgaggtgggaggatcactggagcccaagtgttcaagaccagcctggacaacatagactcagtctctacaaaaaatttttaaaacttagctgggcrtggtggtccacacctgtggtcccagctgtctgggaggctgaggtgggaggatcacttgagcccagtaggtcgaggctgcagtaagcgataatcagtccac

SEQ ID NO: 427085 - DNA, 201 bp, Homo sapiens
ataaattggtttccaggtggtatgtatgcatttagttctacattataacttttgtagatttctattacaataggttttcttaaaaaaatcttaagtaactagtttttttttttttttttaattttaagtaattttcttcatctgggttcttttcatagatactcagtaaaatatttcttgtgcatccactatgtaatagga

SEQ ID NO: 427086 - DNA, 201 bp, Homo sapiens
ggtctccagcaatcctcctctcacctcagcctcctcccaaagtgctgggattacaggctaacaccccagcccacccccacccccgctttttttttttttttaaagagatggagtctcactacgttgcccaggctgacctcaaactcctaggctgaagcgatcttcccacctcaccctcctgagtagctgagatgacaggca

SEQ ID NO: 427087 - DNA, 201 bp, Homo sapiens
ttttttaaaactttagttttggaagtgtgcattaaaggtgatttatcctctttttaaaacccttgggtttccccacccccctctaccgcatcttcacttgrgtaaagaggattccagcaatgacaggcgtcttgcaaggtgattccaatcactgaacgaacccgttttcctctcctcatttggtgctgttcccaactagat

SEQ ID NO: 427088 - DNA, 201 bp, Homo sapiens
taaaaggaaaacataaatgtaaatgtgataaatgattaatttttaaaattttactgtcattgaaagaaaaatttaagtgctatgcctgaagtaaaaaaaaactaaaataagctagctaacaaaaacctttttaaaaaaatggtgatttggctaagtggtaaatcgtgcagtaatataaattggtttccaggtggtatgtat

SEQ ID NO: 427089 - DNA, 201 bp, Homo sapiens
agtagagacagggcttctccatattggtcaggctgatctcaaactcctgacctcaagtgatccgcacacctctgcctcccaaagtgctggaattacaggcrtgagccaatgcgccctgcccacggctggaaaattttaacccacacccatgggatatcattttagggatcaaatggagttggtttctttctatcttttcct

SEQ ID NO: 427090 - DNA, 201 bp, Homo sapiens
cccgggaggcagaggttgcagtgagctgagatcacaccattgcactccagtctgggtgacagagcaagactctgtctcaaaaaaaaaaaaaaaaaaaaaaagggctttggagtcacaaagtcctggatttaaatgtgttcataaatcataaatgtgttcagtacatcaaagctgttgctacatttgttgctgttgatgttg

SEQ ID NO: 427091 - DNA, 201 bp, Homo sapiens
cttcttcgccttcgtcaaatctacaatggaacctttgtgaagctcaacaaggcttcgactaacatgctgaggattgtagagccatatattgcatgggggtmccccaatctgaagtcagtaaatgaactaatctacaagagtggttatggcaaaatcaataagaagcgaattgctttgacagataacgctttgattgctcga

SEQ ID NO: 427092 - DNA, 201 bp, Homo sapiens
ttccggctggaaccatggtgggtgtagaagagaagaagaaggttcctgctgtgccagaaacccttaagaaaaagcgaaggaatttctcagagctgaagatsaagcgcctgagaaagaagtttgcccaaaagatgcttcgaaaggcaaggaggaagcttatctatgaaaaagcaaagcactatcacagggaatataggcaga

SEQ ID NO: 427093 - DNA, 201 bp, Homo sapiens
tcagagctgaagatgaagcgcctgagaaagaagtttgcccaaaagatgcttcgaaaggcaaggaggaagcttatctatgaaaaagcaaagcactatcacarggaatataggcagatgtacagaactgaaattcgaatggcgaggatggcaagaaaagctggcaactactttgtacctgcagaacccaaactggcatttgtc

SEQ ID NO: 427094 - DNA, 201 bp, Homo sapiens
cttattagaagaatgaactaaggtgtctaccatgactatttctctaagctggttggttaataaacagtacctgctctcaaattggaaaaaaaaaaaaaaaraaagaaaactggtaactaaatacaaataaattaagcatttctctttcctttcctgtaaaatttgtaaaatttgcctttgagaatacccaaatagcttcag

SEQ ID NO: 427095 - DNA, 201 bp, Homo sapiens
tttgtacctgcagaacccaaactggcatttgtcatcagaatcagaggtatcagtggcgtgagcccaaaggtccgaaaggtgttgcagcttcttcgccttcrtcaaatctacaatggaacctttgtgaagctcaacaaggcttcgactaacatgctgaggattgtagagccatatattgcatgggggtaccccaatctgaag

SEQ ID NO: 427096 - DNA, 201 bp, Homo sapiens
atccaagataatttcaaaagtcgtatctctaaaaccttaaaagagagattaaatcctgaagattaaaggagtaagattaaatgagaacatcaactatttcygtaattcttctgatatttactgacaaactcatgctgccctatcagcaacttgcaggcttccctcatgggcacttcccattggacttctcacctttttggg

SEQ ID NO: 427097 - DNA, 201 bp, Homo sapiens
aaatgcgtaatagtatgcatttaaactgtgtagtagtaaaatgtcacttaccatggagagacacttccccaaaaataaagttgcttctctatagaaatttytaaattaaaaaaaatctaacccttttgtttaaaaaaaaaaaaaaaacctccatgaccaaaacatattactcaagtcacacattctagcagataagctatt

SEQ ID NO: 427098 - DNA, 201 bp, Homo sapiens
cctcttaagaggaaaaaccctagggttatagtcaataatgagccagggcctcttctttgtatcacagagagtggaaattctggactctcaggcccggaacrctggggtccaaatgcctgaggagatgggggagttacggaaggagcagtactcccaagacaggatagaggcaaagaggcacatgtgagggtctcgagtcac

SEQ ID NO: 427099 - DNA, 201 bp, Homo sapiens
gaataaaagacacaaaaatttctgctaccaaagtggggtaatgtttataggatttatagtattaatttttaagcataatctggtttatgtttgaaaatttktagtgtacagtcaaatataaagagacaaactctgatgcatcttaactctccttccctcccaacacatcctcatcccattcaactcattttttttcaaaat

SEQ ID NO: 427100 - DNA, 201 bp, Homo sapiens
cccaagtgtttcattcactaagtataaacaaatcaaggttttcataagacaccacatagtacaaactaagagtttaaagatataacttcatgatactatayagtaccacaggaaaagcagaatgagaatttgggaagaagctaatttatctatctgaacttaaaataatcctgtagcatagtccattattccaagagtcct

SEQ ID NO: 427101 - DNA, 201 bp, Homo sapiens
ctgaaagttagaaccaaacaaatgttattctacaagatcaatcttaattattttgtgatacttttccaaaatcaaaggtccttctatagaaaaagagattrgacccatgttaatagattaaagtattcatgattttagagttgatttacttatgacaataatttgaaagaaagcatcattttccaatgaaaggtctttgcc

SEQ ID NO: 427102 - DNA, 201 bp, Homo sapiens
ctgctgtgactgatgcccttgaccaaatgtatgctgaagtctgtttataagcactactatgattcaatttctaatcaggtattctgatctttaggaattcrtcactgatttacatttgttgttgttgttgttgttgttgttgttgttttttgagacggagtctcgctctgtcgcctaggctggaatgcagtggcgcgacct

SEQ ID NO: 427103 - DNA, 201 bp, Homo sapiens
gcacagtggcaaacatgagggaaacagaccctggtagcaacgatataaagtgaccctggtagcaattctatttttaagagctagaagagtccttagagatyatctagtctgaccccttcattttgcagtaagaaagttgcagcacagaaggattaagtaagaatctatgagatcataaagctgagaccagcatttagacgt

SEQ ID NO: 427104 - DNA, 201 bp, Homo sapiens
gtatacttccacttaatgagaaacctaaaatagtcaaattcatacagacagaaagcacaatagtggttgccagggactgagggtagggggaaatgggactyactatttaatgagtacagagttccagtactggatgatgacagagttcttaaggatagtggtgatggctgcatgacaatgcaaatggatgtaatgccacta

SEQ ID NO: 427105 - DNA, 201 bp, Homo sapiens; identical to SEQ ID NO: 132476

SEQ ID NO: 427106 - DNA, 201 bp, Homo sapiens
gagattaaagattaccatgaaagaatgcaacccaaatttcatgccctcttttcttctatacacattgctaagaagtatagctcatttagctaaatattccrtaacttaaaaaatttttgacttgctttaacaaaataaaccagcaaaatttcattacagtatgaatcacaaagaaattctcaagtaagtctgtcctaacac

SEQ ID NO: 427107 - DNA, 201 bp, Homo sapiens
gagacagaggctgcagtgagctatacttgcgctactccactccagcctgggctacagagtgagaccttgtctccaaaagaaaaaaaaaaaaaaaaaaaggmcaagattaagaaaacaactctatgcatactaaaataactctattaccttctaaaatgatggagggaaaaactaagttggttaaaatagctaattataagg

SEQ ID NO: 427108 - DNA, 201 bp, Homo sapiens
gccatcagcagaaattctacttaaccatttaaaattactatagctgggcagcctggccaacatggtgaaaccctgtctctatcaaaaatacaaaaattagmcgagcagggtggtgcatgtctgtaatcccagctactctagaggctgaggcaggaaaatcacttgaacctaggaggcggaggttgtagtgagccaagattg

SEQ ID NO: 427109 - DNA, 201 bp, Homo sapiens
tattgagagtctttggagctttgcgggagttccagtcacttgtaaccagaagaaataagtaacactgtaattacagtcccaattaagagatagaaaatgamgctaaaacttgagttgtattctattttcagaaacttaacagaagacataagcttttcctcaagaaaatatttttttaaataaaaaaagagtcatccaggg

SEQ ID NO: 427110 - DNA, 201 bp, Homo sapiens
ttgcaacaacatatatctgtaagggtcataaaatgaagaatcatcaatattttcagaaattttactcttataattttaataacagactggtgttcagaacrcagtgataccacagaatacagcctctctttacacaggtgaacttcatacgcatttgaattttgccactttctagacagttgtttttagtactttcctgtt

SEQ ID NO: 427111 - DNA, 201 bp, Homo sapiens
tctgctttcaattcatcttcaactttctcagcattctcagcagcagttttatatctcagaacctgtccctcaagccggctaatctgtaagtatgagaacayaggcctctagtactgggcactagaagtcaccactttttggtagccaggatggaaatacaatgtcattataaatgccaagtaatctactaacaagtcccct

SEQ ID NO: 427112 - DNA, 201 bp, Homo sapiens
acccttatcgtatcagccacattcattcaaaacctattttcttgagtgcctaataggagacacacatcgtcctaggtgctaaagataagctacgaacaaayatcgaaaagagcaagccccaggaccaggtgtcccagtagaaaatagccatattttaaatttgtgtctgcttatggaacagtacatctttggggtattttt

SEQ ID NO: 427113 - DNA, 201 bp, Homo sapiens
gaatgctcgatttatgtccgaaataactgcacagggccctaaatacaattctgcaattacaagcaggatcaattattaaaggctgattatacacatttttrgtattatattttccctgcctccttcattgcctctccagtaggtttgactgtcttttacttatcgattcattcaatacacatttatgaaggacctatttag

SEQ ID NO: 427114 - DNA, 201 bp, Homo sapiens
aagttacattaaagaaagccaggagcggtggctcatgcctgtaatcccagcactttgggaggccaaggtgggtggattgcttgaggtcaggagttcaagaygaacctgaccaacatggtgaaaccccgtctctactaaaaatacaaaaattagccgggtatggtggcgggtgcctgtaataccagctactcgggaggccga

SEQ ID NO: 427115 - DNA, 201 bp, Homo sapiens
gtattagtaataataaactttcctgataaaaggatggaggggagagtggttgagagcatcccaaaggcaaacataataacagtaatgtcacaagcaatgasccaacatcctttttcaataggatacatcataccaccatgcttggtcaccaatcagacaatcttttctttatttttatgggtttttttccacttcaagtgt

SEQ ID NO: 427116 - DNA, 201 bp, Homo sapiens
ttagagactcatttaagaaattacatgctaagtcacatttatagagaaatcaccaattattaggacaaattagtgcttgagtttatgtactaagggaacayctaatccatgcacaacaaagtgaatcacaccatatcctcaatattctaaacagtgagtacagattaacgcaacaatcaaaaatttctacaaagcatgcag

SEQ ID NO: 427117 - DNA, 201 bp, Homo sapiens
ttctgcagtatacatgacactaaaatcatgtgtccttaactattttggagaaaagctgtcaagccatagagttagcaccatgacattgaccccaccagcastgcacacactggaagaggaaaatacaaaccagactggcacttctcagcagaccagaatttgcagtaggagaggcctaagaaaaaagtgtattattaaacc

SEQ ID NO: 427118 - DNA, 201 bp, Homo sapiens
ttgcagtgaactgagatcgcgccactacaatcctgcctgggcgaccgagtgagacttcgtctcaaaaaaaaaaaaaaaaaagatgtgggcatccatgggtrgatctgcggcttggtggcagcaccattagggctcactcctagcctgtggaggtttgactcttcccaagcctgcattaaaataggccccttcagctgagga

SEQ ID NO: 427119 - DNA, 201 bp, Homo sapiens
agtcactattcttattggaaaaatgaaaatctcctctgtccgagaattacacataatcactaacaaaggctaactacaaattcctgctgaaatcttcctactatgggaattagtgtgactgcagtgatcattttattatgaggtcagaagtagaaaaatgagaaaaactggaataattcgggtaaaatgaatagaatagac

SEQ ID NO: 427120 - DNA, 201 bp, Homo sapiens
aggggaacagcaagataacccaaggagttggttcagggtcaaaaggagagaacaggaatcgaatttgatgcaaggccaacattttaggtagcatgtggaaraggagcatctttgaaggagaaagacgtgaatgaaaaaatcattcaggagaacaattcaggagaaaacctgaatgattttctcattcagacaggaagacct

SEQ ID NO: 427121 - DNA, 201 bp, Homo sapiens
tagcagtgtggataattttttctgtgagaaccataagccaacataggctgagcctaatgtgtggcctcattattgaggctatttcaaatacagactccctytcttggaaggtacacaatgattgggcctggaaattgtgcagtcagatggaagtagcatcatgatcagaatgtaagaagcacattttctctgaatcaggat

SEQ ID NO: 427122 - DNA, 201 bp, Homo sapiens
atacagactccctctcttggaaggtacacaatgattgggcctggaaattgtgcagtcagatggaagtagcatcatgatcagaatgtaagaagcacattttytctgaatcaggataaacctcactgatcagggcttacctctttctacctctgagattctttttttttttttttttttttttgagacagagtcttgctctgt

SEQ ID NO: 427123 - DNA, 201 bp, Homo sapiens
acagactccctctcttggaaggtacacaatgattgggcctggaaattgtgcagtcagatggaagtagcatcatgatcagaatgtaagaagcacattttctytgaatcaggataaacctcactgatcagggcttacctctttctacctctgagattctttttttttttttttttttttttgagacagagtcttgctctgttg

SEQ ID NO: 427124 - DNA, 201 bp, Homo sapiens
gcagggacaaaggatgaaaaacagctaaatcctcatcttccataaaaggatgtcaatatagaatgcctgaagcagaacaatcaagatgcaacataagtatkttatacagagatacaaggacagtacacaagaatcagctaaaagtatttaacagaaatggtcaggggcgaggtcagaggagccagggcaggggactgctgt

SEQ ID NO: 427125 - DNA, 201 bp, Homo sapiens
tctgtaccgcatgcttttcttatattatcctgaaactaacagaaaacacaataaaaaatattattattgcatgtgtaacaaaatcttgttacaaaattttytaaaatgcgtaatagtatgcatttaaactgtgtagtagtaaaatgtcacttaccatggagagacacttccccaaaaataaagttgcttctctatagaaat

SEQ ID NO: 427126 - DNA, 201 bp, Homo sapiens
gcagaggttgcagtgagctaagatcgcgccactgcactccagcctggcaacagagcgatactccgtccccctgccaaaaaaaaattacaaaatacaaatgyacacacaacaaccacagcatcttcagcagcccaggttctggactgtatatactacaagatgctctagcatatatgttactacagtatcccttgcagcaag

SEQ ID NO: 427127 - DNA, 201 bp, Homo sapiens
ccgcaacatcgaactcctgggttcaagtgatcctcccacttcaggctcccaagtacctggaactacagaactacaggaacatgccaccatacttacctaatttttttttttttaattttaggagatggggtcttgctatgttgcccaggttggtcttgaactcctgggctcaagcaattctcctacctcagccttccaaag

SEQ ID NO: 427128 - DNA, 201 bp, Homo sapiens
aaattcattgaaaatgttattgtaataaataccaattttattggagcaaaatatctgtaccgcatgcttttcttatattatcctgaaactaacagaaaacmcaataaaaaatattattattgcatgtgtaacaaaatcttgttacaaaattttctaaaatgcgtaatagtatgcatttaaactgtgtagtagtaaaatgtc

SEQ ID NO: 427129 - DNA, 201 bp, Homo sapiens
catagagttagcaccatgacattgaccccaccagcactgcacacactggaagaggaaaatacaaaccagactggcacttctcagcagaccagaatttgcartaggagaggcctaagaaaaaagtgtattattaaaccccaaaaaaagcaactggtagctctaaaggcagaacattcctcagaaagtactaaccctgtcact

SEQ ID NO: 427130 - DNA, 201 bp, Homo sapiens
actaagtggtaccattttaccactggtataaattcattgaaaatgttattgtaataaataccaattttattggagcaaaatatctgtaccgcatgcttttyttatattatcctgaaactaacagaaaacacaataaaaaatattattattgcatgtgtaacaaaatcttgttacaaaattttctaaaatgcgtaatagtat

SEQ ID NO: 427131 - DNA, 201 bp, Homo sapiens
gtgtgtctacttggtagatcaaattgttcttctcattgtctaactgtgcattggaaaccatggctttcttgtatttttcttccacttcagacaaagattcytaaatgagagttaagtcatcagtctgatatctaaaatgttaattgaatacatgcaatataacaggaaattatagcactgccacaaacacataaagatgca

SEQ ID NO: 427132 - DNA, 201 bp, Homo sapiens
taatgatgacaaaaattaacacgtcttcaaatttaaagtcatttctttttctctattaaatggtttttaaaaatcatttgtagagagacatattaagaggyaggtccgaggggaaagagagaaagagggagagaaaaagaaaggctaaggtctgagtagccaggaatgtggacaagtgtggttgtgagatctctctcctgg

SEQ ID NO: 427133 - DNA, 201 bp, Homo sapiens
ctacatacaacaaggttgaatcatgaaaacatgagaagtgataaaagccagacacaaagattacatattgaataacttcatttatgtaaaatgtccagaayaggtaaatccatagggacagaaagtataacagactagtgctttccacaaagtctcgggtaaagaggaaatggagagtgactgctatggtatgaagtttcc

SEQ ID NO: 427134 - DNA, 201 bp, Homo sapiens
ctaactgtcaaaacaagaatactgggtgggcatggtggctaacgccttgtaatccagcactttgaggggccaaggtgggcagataccttgagcaagagttytagaccaacctgggcaacatggtgaaatcctgtctctacaaaaaaaaaaaaatatagctggttgtggtggtccacacctgtagtcccagctactccagag

SEQ ID NO: 427135 - DNA, 201 bp, Homo sapiens
catcaaactttccatgcaatctaccacagtccctctctttgtcctcgcatctgccagccagatgcaggaaattcaaagtctctgaggccccagtgggtggyagaatcactagctgaaagcagcctgagtccctcaatgactctgtggaacagaccaccactctgtcactgcttttcaactcacagcaaagatgtgagtgag

SEQ ID NO: 427136 - DNA, 201 bp, Homo sapiens
aactcacagcaaagatgtgagtgagaaataaattttgtgttaaaaaccactgatttggtaattattcattaaagtagttcagcctatcctgactaacagayttagagaggtagtagagctttttggtttttcaaaattaaaaattttggccaaaaatacatgtatggacatggaggatattgcaggcttgagcagagaatg

SEQ ID NO: 427137 - DNA, 201 bp, Homo sapiens
aaaactctgggcagggcgcggtggctcacatctggaatcccagcactttggaaggcaggcagatcacgaggtcaggagttcaaggccagcctggccaacayggtgaaaacccgtctctactaaaaatacaaaaattagccaggcatggtggcgcatgcctgtaatcccagctattcaggagactgaggcaggagaatagct

SEQ ID NO: 427138 - DNA, 201 bp, Homo sapiens
tctatattgtaccacaattttaaaaacaaaacaaactttatttgattgcaaaggatgaatctggcaagacaagaacaatgccctctcatttccttgactgytcacctagatacagcattatctgtgacaagggaaaaaacatctaatctaaagctgaatttttttctacatttagtcctataatccttaggtcacttaact

SEQ ID NO: 427139 - DNA, 201 bp, Homo sapiens
ttaagccatttaacagggaaataaatattttaacatcctaatcctctgcatacagtacggtatactctaacttacaaaacagaaagccaaaagatttcttstagctgttaatatatttctacttaggaaagtgggcatgtaaggaacaacatgctcagaacagtaacataaaaattaaatttgcttccctaaagcagtaaa

SEQ ID NO: 427140 - DNA, 201 bp, Homo sapiens
tttattatgtatagattaggatgtggaaggtaaaggaaaaaaggaggtagattatttacttctttcctgactaataatatagtagccgacttatgcagggmaagaatttaaactatacacaatgcttttaattgatactggtcataaaattctgaaacaatcaacctacttaagatgtagccatttaactattatcaaata

SEQ ID NO: 427141 - DNA, 201 bp, Homo sapiens
tgaagacgcatgaccttaaaattatttctggagaagaatgcttgcgcgagaggtgtgggggggggggcggggagcgggatggagggaggagtatagagtcygttaaaaatctgatagacacggacttgttatttattccggaaatatctaacgaggcccaccaggttcaaggcactggggaaggaccagggtcgtgcattt

SEQ ID NO: 427142 - DNA, 201 bp, Homo sapiens
tctacttaaccatttaaaattactatagctgggcagcctggccaacatggtgaaaccctgtctctatcaaaaatacaaaaattagccgagcagggtggtgyatgtctgtaatcccagctactctagaggctgaggcaggaaaatcacttgaacctaggaggcggaggttgtagtgagccaagattgcgccacagcactcca

SEQ ID NO: 427143 - DNA, 201 bp, Homo sapiens
gcgggcggatcacaaggtcaagagatcgaggccatcctggccaacatggtgaaaccccatctctactaaaactacaaaaattagtggggcatggtggcacrcgcatgtagtcccaactactccagaggctgaggcaggagaatcatttgaacctggtaggtggaggttgcagtgagtggagatcacatcactgcactccag

SEQ ID NO: 427144 - DNA, 201 bp, Homo sapiens
tgtatgtaaaaataattggggctgggcacggtggctcacgcctgtaatcccagcactttgggaagctgaggcgggcggatcacaaggtcaagagatcgagrccatcctggccaacatggtgaaaccccatctctactaaaactacaaaaattagtggggcatggtggcacgcgcatgtagtcccaactactccagaggctg

SEQ ID NO: 427145 - DNA, 201 bp, Homo sapiens
tttaaatttcatctaataaagataaacttggattaacaaaatacttctaggaaaattctgaaactactcaatttagtgtgaagtagttccaaatagattcrtccaattatccaagacaaattccagagaaaaaactttaatggggaagggtgcttgctgtatgggagcttaaagatgacaaatggatgtggaaaaggacag

SEQ ID NO: 427146 - DNA, 201 bp, Homo sapiens
gcttccgtttttctgctttcaattcatcttcaactttctcagcattctcagcagcagttttatatctcagaacctgtccctcaagccggctaatctgtaartatgagaacacaggcctctagtactgggcactagaagtcaccactttttggtagccaggatggaaatacaatgtcattataaatgccaagtaatctacta

SEQ ID NO: 427147 - DNA, 201 bp, Homo sapiens
aactaggccaaagcattcaggttacaaaaagtcacagtgaaaagttaagttcttgtctctgcaggaagcaggcaagagccccaccctcctgggcgcagccrcagctgcccaaactgcagctgcagacccaggcatctctgcactctctggggccaggaagggcccccctgcccctgcagactcagaggtgtctgttcccac

SEQ ID NO: 427148 - DNA, 201 bp, Homo sapiens
gggaagccgtctgaacctgggagatagaggttgtatgttgcagtgaactgagatcgcgccactacaatcctgcctgggcgaccgagtgagacttcgtctcaaaaaaaaaaaaaaaaaagatgtgggcatccatgggtagatctgcggcttggtggcagcaccattagggctcactcctagcctgtggaggtttgactcttc

SEQ ID NO: 427149 - DNA, 201 bp, Homo sapiens
gttatttattccggaaatatctaacgaggcccaccaggttcaaggcactggggaaggaccagggtcgtgcatttgaaaagcttaccttagtggaatagackggctgaagcaaacaaacaaggtaatgacaggtgtagtatggctttgcaggaaacacacagagtgatgaaaaagattttgtagacgaagcctctggctgga

SEQ ID NO: 427150 - DNA, 201 bp, Homo sapiens
ccttagtggaatagactggctgaagcaaacaaacaaggtaatgacaggtgtagtatggctttgcaggaaacacacagagtgatgaaaaagattttgtagaygaagcctctggctggataggatggctaaaaaagacctctaggaggaagtgatagttgaggagcctcctgacaaaaaaggcacgaaatacacctaaccacg

SEQ ID NO: 427151 - DNA, 201 bp, Homo sapiens
agaattcctatctagatttattttttcatgttgttatttttttcttttttactttttatttggatataattattaaaaagttgcaaaaatagtatagcggkcatgtgtagtatttgcccagtttaccctattgatatcttacatatctataataccttattaaaaccaggaaattgacatactacagtctttaggttttta

SEQ ID NO: 427152 - DNA, 201 bp, Homo sapiens
tttaacatgaaagatcattttactgattaagaaaactacatggaagtatacatacagcattgtaaccaaaatgcaattgtaccctaaaagctattaaaataaaaaaaattttaaataaaataaaatggaaaaaaagaaagtatacatacagcattatcaatgtgcaaaataaaagtgctgctttaaggtgtaaagcatact

SEQ ID NO: 427153 - DNA, 201 bp, Homo sapiens
atttgtaaggtggttgctttctctggtcatactgttccatgtcatcctgccctaataaacctgcaacattatacaacttgtgtgtgtatattttaacacawcttctgaccactgcagttttttcacagattgttatcaaaggaaaacagaggaatacaagactcgtcatttgactggattttttaaaaaagtttctaaaca

SEQ ID NO: 427154 - DNA, 201 bp, Homo sapiens
tttgcaaatgctagacatccgacgggaagcaaaaacaaaaatgtttctttttcttatgaaactggtaagttagacaatctcacaaaagtacctttaaaatytaacaggtattacaaagggtaggtatgtgctgccatgagggcataaaagcattgggacttgacctaacctgaggtatcagaaatgccttctcctgggaat

SEQ ID NO: 427155 - DNA, 201 bp, Homo sapiens
gagcaacatgatcagatttgtattttcaaaagaccactctgacttcaatgttaagaattcattcatgcatagtgtcatgcacctgtggtcccagctactcrggaggctgaggcacaagaatcgcttgaaccggggaggcgtaggctgcagtgagtcgagatcatggcactgcactccagcctgggccacagagtaagactt

SEQ ID NO: 427156 - DNA, 201 bp, Homo sapiens
ttaaaggatagagagttaccttcccatcctttaacaaattactgtagcaaggaaaactcttgtgctatgattagccaaatttgagtcatatgctttacctstggtccacccaaagatcatggactataggagaggagtggttcccggaagaacaaaatggagtactgtcaccaaaatatagaaatggatactgatggtgaa

SEQ ID NO: 427157 - DNA, 201 bp, Homo sapiens
gagaggagtggttcccggaagaacaaaatggagtactgtcaccaaaatatagaaatggatactgatggtgaaaacacaatgcttactacaccaactaactsaaaggcctatgcattgtttcttccttaagcttttgaaagaagttagtcactgccatggcactcactttgaatctcttccaattccacacacaatactgca

SEQ ID NO: 427158 - DNA, 201 bp, Homo sapiens
gtacatcacttttcaggacactcccaactggtattgcaggtagtttcttgtccttaaaattctttcctgttgtcaagctacctgaaacgtatttgtcctcrataccctaggggcagggtggctgataactaaggtgcctgggaaacacttcagaagcaagtgacaatgaattggcttaagaagccaattcatcttttagat

SEQ ID NO: 427159 - DNA, 201 bp, Homo sapiens
aatgtcctagtagcacaccaaagcaatcataatccttaagttcctaacagtacttcgtgaattgtgatatgagagacaacagaactaaccagtaggtcttyatgagaatcagaagacctcttcttcattccatgagagtgactgtaagaatgattctggaagtaaatattccaagttaacttcaatgattgcatagcgaag

SEQ ID NO: 427160 - DNA, 201 bp, Homo sapiens
tcacttttaacagagaaattagtcaccaaatacctcttcccactaccaaattattccaataaattttagaatatttaattttatactaattactaaaactyctacttcttttcactatgctacccacagcaatctgtgtgtattataatattagcctcagaaagctgccatcagcagaaattctacttaaccatttaaaat

SEQ ID NO: 427161 - DNA, 201 bp, Homo sapiens
taaatttcagttgtttataagccacaaaagctatattttgttatagcagtccaaatggactaagacaaataccaatatgacagaatcaaaataaaaaactmaaaattaaatctaggctgggctgtaatcctgtaattccaatgatttgggaggccaaagtgggaggatcacttgaacccaggaatttgagatcagcctggg

SEQ ID NO: 427162 - DNA, 201 bp, Homo sapiens
atacagaattcataaacagtttacctgaaccaacaagaaaagacatcaaatagtgcttgacttcattacttattaggcagatgccaaatacttttctttctttttttttttttttttttttgagacagggtctcactctgtcacccaagttggagtgcagtggcaagatcatggctcattgcagcctccacctcccatgct

SEQ ID NO: 427163 - DNA, 201 bp, Homo sapiens
tacagaattcataaacagtttacctgaaccaacaagaaaagacatcaaatagtgcttgacttcattacttattaggcagatgccaaatacttttctttctttttttttttttttttttttgagacagggtctcactctgtcacccaagttggagtgcagtggcaagatcatggctcattgcagcctccacctcccatgctc

SEQ ID NO: 427164 - DNA, 201 bp, Homo sapiens
ttttgctgccagccttgcctctgcctgaaaagtaatataaaactcagctttatacaacaaaaacaaaaacaacctgtacaccagatttgaaaataaagaaygggacattaccacgcaaaaggggtgggcaggagaagatattatctatcagcaagcaagtttgattgattgttttaatcaactcttataaactcatttctt

SEQ ID NO: 427165 - DNA, 201 bp, Homo sapiens
atagcagtgtgaatctaaggcttgagagaagggagagaaggctgtggccttagtgtccagcctgctcagcatcccttctcccctcttctggtagcagcacttttttttttttttttttttttgagggaaggtctcactctgttacccaggctggagtgtggtggcacgatcttggctgactgcaacctccacctcctgggt

SEQ ID NO: 427166 - DNA, 201 bp, Homo sapiens
ctctgttctaggacgtgcttcaagtcggtcatgagactggcagaaaatcaaaccaaactaaatgaatggttgttgaagttaatctcccatcctggagctgygcatgccatggagtagccagcttttaacaggcacaatcctgatcaaaatcactgctctgtggtcctgctcatcagaatattatggaaactagatttaggc

SEQ ID NO: 427167 - DNA, 201 bp, Homo sapiens
tggagtagccagcttttaacaggcacaatcctgatcaaaatcactgctctgtggtcctgctcatcagaatattatggaaactagatttaggcctggtttcyttaaaaatagatgtgataatgaaataatcatgtattatagccattacaatttctattgtaggagaaagtggataatgttttaacgtaaaacagtaggtta

SEQ ID NO: 427168 - DNA, 201 bp, Homo sapiens
aatgactttacagtgttttactatatagatatcataatataattaatccaaattttaggacaattaaagctatactacactttgtcattgctaaagctacyttagctaatgtaagtgaagcactcataatactagtaacttataacaatggacacgataatagctataaatgtgtttgttgttactacttaaaacaaatat

SEQ ID NO: 427169 - DNA, 201 bp, Homo sapiens
atgtgatgggtaaccaaggcctgacctaacgtggctttggaaatatgacccaatactttatgggacaacctcagttggaatcctgagggaaaaattaattsattgcccttcctatccctaggcattagtaactagaaatgttgctgggatcactccctgtctttaatcctccaggaatttgccttgctggggagctaattt

SEQ ID NO: 427170 - DNA, 201 bp, Homo sapiens
ccatgaggacctctccatagggctgcttgagtgtcctcacaatatggcagctggtttcctccacagtgaatgatccaagagagaatggcagaagaagctgyaagtgtctttaatggcctagtcttagaagaaatgcaccattacttctacatatcttgtcattcacacagactagccatgattcagtgtgatggggatgat

SEQ ID NO: 427171 - DNA, 201 bp, Homo sapiens
ctaggataacattttccacatatccaactgcaccatcacttgcagcatcagacccagaggaggcaggtagcatgatgccttctccctccctccatcagctycaaggctcacacatcgaactggccctggggcagggaaggtcactcctccgctgaccctgactgaggtgttgagacagtcttttctcaccaggcctccatt

SEQ ID NO: 427172 - DNA, 201 bp, Homo sapiens
gaacctatataattatttctcctacttttatagtcatttgtcctaagaattatcaaaaatatttttaaagtatcatattttgactacccactatcctcatrtctccaacacaactgataatctttccatttcctcccttcatataacatgccagtggttgcatttctttacttggtagttatgttattctataaatgaaca

SEQ ID NO: 427173 - DNA, 201 bp, Homo sapiens
gacccagaggaggcaggtagcatgatgccttctccctccctccatcagctccaaggctcacacatcgaactggccctggggcagggaaggtcactcctcckctgaccctgactgaggtgttgagacagtcttttctcaccaggcctccattagcagaagaagccaccattctgagtagtcctgcaagcatgtttctctctg

SEQ ID NO: 427174 - DNA, 201 bp, Homo sapiens
gcaagccctttcccctaaagggcagtagaggaaaagggtcaccatgaaaggcagatcatacttaggaaatgccaaggagcacctaaaatccccttatgtamccccagagatatgtatgtcccactgacatttgggacacaccaacttgcagcatctattctggagtggagaatcatctaattattccgtcctcccatccct

SEQ ID NO: 427175 - DNA, 201 bp, Homo sapiens
cagagaagtacctaattcaaataagcaaagataaaggcataaaaagcaagaaagcagtcaaaagattggaaacaaacagtcagatatgggaggaaatacaragttacatggatatacatctccagaagagacttctcatagaaactggttctcatgcatcaatttggcaaaacatgtttaatcacatcaagcagggaaata

SEQ ID NO: 427176 - DNA, 201 bp, Homo sapiens
actatagaaatcaagcattatattcttcttaaatgcaattacaattaattactagaacactttaccagtcctaacttaagctattgaatttgagaagcagcccccaaagcaggtttattattttatgtggttggcattttggcacaaaaagataaaagaacaaaaagggaaagaatttcacattattttaaaataccagca

SEQ ID NO: 427177 - DNA, 201 bp, Homo sapiens
tggtcgatgggtatgtgtggcccagagacccaaactaggccattcacactctctcttccaaggatttgaatctttttttttttttttttttttgagacggkgtctcgctctgtcatcgtccgggctggagtgcagcggcatgatcttggctcactgcaacctccgcctcccgggttcgtgattctcctgcctcagcctccg

SEQ ID NO: 427178 - DNA, 201 bp, Homo sapiens
atcttcaaggccaattggcacaaatatagacatagccattgtgttatcataaactgcaggtgggtcttttccttaggatattgaagcatagggatttattwatttatttatttatttatttatttatttatttattggggatggagtcttgctctgttacccagactggagtgcagtggctggatcttggctcactgcaac

SEQ ID NO: 427179 - DNA, 201 bp, Homo sapiens
tacaggttatataaacagcttctctccctttattatgtgcaaattcagattgctgtttctaacaatttatcaatatgcacttcctaaattattttctggattttttatattggcaatgtagtagcaatccatttctggcaataatacccatttgacctctgcttgaactgacatcaacccttcaaaaagtctaaaacatat

SEQ ID NO: 427180 - DNA, 201 bp, Homo sapiens
tctcctatcctcagtacctccctccacaacccctccataacccattattctgttctggatctcaaacatgctttctttactattccttgcacccttcatcycagcctctctttgctttcacttggactgaccctgacacccatcaggctcagcaaattacctgggctgtactgccacaaggcttcacggacagcccccatt

SEQ ID NO: 427181 - DNA, 201 bp, Homo sapiens
tttctcaccaggcctccattagcagaagaagccaccattctgagtagtcctgcaagcatgtttctctctgctggccttgtccagaactggcaagccctttcccctaaagggcagtagaggaaaagggtcaccatgaaaggcagatcatacttaggaaatgccaaggagcacctaaaatccccttatgtaaccccagagata

SEQ ID NO: 427182 - DNA, 201 bp, Homo sapiens
tttttagttttcagcttaagtgagtggttctccagcattactgagtagaaaaaccatctgcaggtgattcttttttttttttttttttttttttgagacaragtctcaggctagagtgcaggagcgtgatcttggctcactgcaacctctgcctcctgggttcaagcaattctctttcatcagcctcctgagtagctggat

SEQ ID NO: 427183 - DNA, 201 bp, Homo sapiens
aggggttgttgctgaggcagaatttcgagatgaaggctagaaagagaaatatgacccttctaagtctcatttctttaaaaatatgtttgctgtggaaactraaaacagggcagggtggttgggggaagatgtgggtttcagatgaagaagttaccatgtgtaatcaatggtcaatttagattggctttgcaggtatccagg

SEQ ID NO: 427184 - DNA, 201 bp, Homo sapiens
tgaggcagaagaatcgcttgaacctgggagacgaaggttgcagtgagccgagatggcaccactgcactctagcctgggcagcagagcaagactctgtctcaaaaaaaaaaaaaaaaagacagtgaaaatcatgggctttgatcactcccagaacaaatgcattaggttgtatttaaactcacagaacttttaaatttgtag

SEQ ID NO: 427185 - DNA, 201 bp, Homo sapiens
cctgcccctgcagactcagaggtgtctgttcccacttcctggactctctctgctcctggcacccactccgatcttggagcaaggttggggtcaagcctggrtgctgtcacagcccagccaggttgtgacacagcagccccctgctgccttggccccctctggactttgggcactgatcagtacgagagggaggctgaggtg

SEQ ID NO: 427186 - DNA, 201 bp, Homo sapiens
aggtctccagtgaagctccaccttcaagctggggagagcctgaagcctgatggccaggctgttggtcccatggaccagagtggaaacttgtggtgcttttyctgggcctgcccatggctgcccatggaccaatcagcatgcacgtcctctgctctgaagcccataaaaaccccagactcaggcagacttggggagatgaca

SEQ ID NO: 427187 - DNA, 201 bp, Homo sapiens
attctcatcatcataaatgtgaacagctgcaaataactgaaggcaaaggaaaactaaatttcctccagtcacaacctaatctaaagcaaaaaagtgggggkggggaggtccatctgcaggcttgcatctgtaaattaagtttgtatgctgaattcttcaaacaatcttgaccgtaatacaaagctgctgttaaatatggtg

SEQ ID NO: 427188 - DNA, 201 bp, Homo sapiens
gtaagtggcaggcttttattttctgccccaagagaaaatacaagataagcattacctttgatttttcttcattttctctataaaattctgccatctgttcytcctgctcttcaataacatccttgagtgtgtctacttggtagatcaaattgttcttctcattgtctaactgtgcattggaaaccatggctttcttgtatt

SEQ ID NO: 427189 - DNA, 201 bp, Homo sapiens
atccagttagaagcgcagaaagaaactatttcaagtaacttctaaaaacaatagtttggccacacacagactagtggcaaaaataacagccaagcaaaacmaacaaaataaaaatcttttaactattttcagtaattaaattgttggtgttaatgttggtattgctattctaggcaacttcggataaagcaaagagaacag

SEQ ID NO: 427190 - DNA, 201 bp, Homo sapiens
ggggtaaattttatgacacacgagtagtacctcaataaaaaaattagttttacaaaactcaggttgggaaataaagttcaagaagtcttacagaaaacagaaaaaaaaaaaaaagagagagaggtagaaaataagaaagaaaaatatataaggttaaagtatcagtccatagggactaacgttcaaataactggagaaaga

SEQ ID NO: 427191 - DNA, 201 bp, Homo sapiens
ttcaagaagtcttacagaaaacagaaaaaaaaaaaaaagagagagaggtagaaaataagaaagaaaaatatataaggttaaagtatcagtccatagggacyaacgttcaaataactggagaaagagaaaacaggctgggtgcggtggttcatgtctgtaatcccaacattttgggagaccaaggcaggtggatcccttgag

SEQ ID NO: 427192 - DNA, 201 bp, Homo sapiens
tttgtttgaggtttcattccacaaataagcagcagataaaatactttacaaggtacagcacagttgtattgaagaaaaaaaggacccaactcttactttargagtattaggcctggacttcccctgccccatgcaataaagcaagttttatatacactccccatatttttttctaacattttcttatataaatttaaatat

SEQ ID NO: 427193 - DNA, 201 bp, Homo sapiens
tgctaaactgtatgtatattcaaaactgtatgtttatttttcttttaaacaacaaaattcataatcagtaatagtgatatgattcaatctcagtacactayagcacaaaacatcctaagggagcctttaaatacaagaattaagcattctaaagtcaaaaatgctttttaagaaaattattatcacttttaacatcatttc

SEQ ID NO: 427194 - DNA, 201 bp, Homo sapiens
acaaaactgagaatgtagactcaaaggaaaccttaaataattttgtttctgatcctaaaggacttgcagtaaatttctaccctaaggtttcctcaagaacmcttttcttcaggagcacattaactccttccagtgtttccttggtggtatcaaacaacttaaagaactaaaccttttcctcaattggtaagaacaaaactg

SEQ ID NO: 427195 - DNA, 201 bp, Homo sapiens
aatataaaactcagctttatacaacaaaaacaaaaacaacctgtacaccagatttgaaaataaagaatgggacattaccacgcaaaaggggtgggcaggasaagatattatctatcagcaagcaagtttgattgattgttttaatcaactcttataaactcatttctttctctagttcctaagtctttcctcaaatccggg

SEQ ID NO: 427196 - DNA, 201 bp, Homo sapiens
tctctactaaacaaatacaaaaattaaccaagcgtggtggcaggcgcctgtaatcccagctactcgggaagccgtctgaacctgggagatagaggttgtaygttgcagtgaactgagatcgcgccactacaatcctgcctgggcgaccgagtgagacttcgtctcaaaaaaaaaaaaaaaaaagatgtgggcatccatggg

SEQ ID NO: 427197 - DNA, 201 bp, Homo sapiens
gtggcgggcgcctgtaatcccagctacttgagatgctgaggcaggagaatcgcttgaacccaggagacggaggttgcagtgagctgagattgtgccactgmactccagcctgggcaacaagcgcgaaactccatctcaaaaaaaaaaaagaaagaaagaaagaaagaaagttgcttgtttagcagcaatcagacagtggtt

SEQ ID NO: 427198 - DNA, 201 bp, Homo sapiens
gaaagcaacaggtaaacagaaaattatgtaaatgtaaaaggcaaattttaactccctgaaaaaacaaagttaaacaagaaaggaaacaagtatgatatacyacatggctgatcagtaaacaatatttatttcattataatgaaaacaccaactattgatttaaaatttcaaaattggaatgttgcagggagggaaagtggg

SEQ ID NO: 427199 - DNA, 201 bp, Homo sapiens
gagggtcaaggacaggaaatagatgaagggaggaagagcagctacatcagaccaattgttgtaaaataaataatgaacaagttacagatagcaagtttaaytgaccttgagaatttcccttaggaatttacatactcactcttgtataattttcagcatactgtttgtcagatttttcatccaactagaaaagaacaaaga

SEQ ID NO: 427200 - DNA, 201 bp, Homo sapiens
aattaccttgctacagtaatttgttaaaggatagagagttaccttcccatcctttaacaaattactgtagcaaggaaaactcttgtgctatgattagccaratttgagtcatatgctttacctctggtccacccaaagatcatggactataggagaggagtggttcccggaagaacaaaatggagtactgtcaccaaaata

SEQ ID NO: 427201 - DNA, 201 bp, Homo sapiens
gttgtagatagttatcagttattatatactgccattcagattatttatatgtattactgtccacaactcacttgtgttctaaagggttttttttaataatrttcttgtcttcccaagcagattacatgctttttgagaaaagatctatttttttgtatacaccccgcaatgccatattcctagaaggcattttcaatgttc

SEQ ID NO: 427202 - DNA, 201 bp, Homo sapiens
ttgacagagtctcgctgctggccaggttggagtgcagtggtgcgatctcagctcagtgtaacctccttctccctgactcaagcaattctcctacctcagcytcctgaatacctgggattacaggcatgtgccaccacgcctggctaatttttgtatttttaatagagatggggtttcaccacgttggccaggctgttctca

SEQ ID NO: 427203 - DNA, 201 bp, Homo sapiens
taacctagtacttttaaaagaactgtattatttggaccctgtaggcagatttccttaccaatattagaaaaatgaccagactaggcaacatggtgaaattytgtctttacaaaaaaaaaaaattatccagacatgttgacgaacacctgtagtcccagctacttgggaggctgaggtgggaggactatgtgagccaaggga

SEQ ID NO: 427204 - DNA, 201 bp, Homo sapiens
ttacttgggaggctgaggcaggagaattgcttgatcctgggaggcagaggttgcagtgagccaaggtcgcatcactgcactccagcctgggtaacagagcragactcctctcaaaaaaaaaaaaaagtatgaaataaagcagaaaacaggaaaagactagaagtattagaaagaacaatataagcctaggtagcaaagaac

SEQ ID NO: 427205 - DNA, 201 bp, Homo sapiens
ctgaggcaggagaattgcttgatcctgggaggcagaggttgcagtgagccaaggtcgcatcactgcactccagcctgggtaacagagcaagactcctctcaaaaaaaaaaaaaagtatgaaataaagcagaaaacaggaaaagactagaagtattagaaagaacaatataagcctaggtagcaaagaaccaaagaatcaag

SEQ ID NO: 427206 - DNA, 201 bp, Homo sapiens
gagactcccacagactatataaattcagttaccaaaaactagtatatacgtagccatttacagattagttacagctagtcaaaatgcaaaatggggagatyagaaatatgttaaaagtgaatcaaacacataaagccaaaaaagtttagacaaacccgagtgtagtaggcagaggtgggtttgctatgtctaagactgcta

SEQ ID NO: 427207 - DNA, 201 bp, Homo sapiens
aaaagaagagggatgtggttgccatgatttgttttaaagtctcctataacaaaatgaacatgtcagtagccaattgtggttggcaaaagggtgtatttaayagaatctgcaggcagatttccaatctgcctgccctgccctaccctccccctttgggtttgtttgaggtttcattccacaaataagcagcagataaaatac

SEQ ID NO: 427208 - DNA, 201 bp, Homo sapiens
tagagtcattttagggccaatttcccatgctaagttttattatgaccatattgtttaagtgccaaagcaatataggaagagacactaaatggaaaagttcktacactttttggaatgcgtaagggattttattacaaatgatgatcttgaattctcctgaaatatctacaaaaactgatagctatagtttcctatggtttt

SEQ ID NO: 427209 - DNA, 201 bp, Homo sapiens
tagacacttctgaaaatgaaggtagagttagaattttcaatctgttgcaacttatgcccatttcaggtcagacaaataaagagagagccttctggggggtaaaaaaaaaaaaaaaaaaaggcccaggtttgtgcctgtagtagtaatgtcagctacctcaggaagcttgagcccaggagtccaaggcttatatggcaccac

SEQ ID NO: 427210 - DNA, 201 bp, Homo sapiens
aagcatcattttccaatgaaaggtctttgccaatattttatacttcttttaaaaacgcaaagaaatacaggaacattgtcagattgtttaggcaacattaytgaagaaagctcacacgtaagctttgtattgtgtagacaagttaaaataccaaccctgtgactgccaacacttcgaatggacaatgcatcctcaactccc

SEQ ID NO: 427211 - DNA, 201 bp, Homo sapiens
accattgcactctagcccgggcaacaagagagaaactctgtcacaaaaaaaagaaaagaaaagaaaagaaaagagaaagaaagagaaagaaagaaagaaagaaagaaagaaagaaagaaagaaagaaagaaagaaagaaagaaagagaaagaaagaaagaagaaaaaactcaaaatggatcaaagacctaaacaaatgagc

SEQ ID NO: 427212 - DNA, 201 bp, Homo sapiens
gtctttcctcttatcatcctctctatagcaccagtggcattttacacaggcataggatttaacaagccaaactggaaataacctgtttcaattttcctttyccaaaatataatgtagaattcagctggtttaaaaaaaaatgttgaatctatctggtaggaaaatccataatttgggcataccaatttctactagaacaat

SEQ ID NO: 427213 - DNA, 201 bp, Homo sapiens
cagcaagtatctcagtgagcactcatagaattgctgtctgtcctccagaacccgtgccaaggcctccgagtgcccagttactgaggcagctggggaaaaaygttgagtaaacatgattctacaattacggagataaaaaataaaaacagcatggactggttctaccctagaatcaaactacaacaaaatccaaagtgttca

SEQ ID NO: 427214 - DNA, 201 bp, Homo sapiens
aaggagaaacctaaagtcctaagaatgcagcataagaccataaatatatccacctcacattcaggtactgctaatgttcaaacatcaaatactacgttcaraaagtattagacctcttagtacacggccttaagtttttaaaaataactggctgagaaatgcataactccaaaattatatagcaaaccacaaggaaattta

SEQ ID NO: 427215 - DNA, 201 bp, Homo sapiens
gttaaacaaatatataatcaaatttcctaaggccacatacaaatttataaataaccggcttaataacaactgtgtgaaaatacacactgcgaacattatamtgaaaagcaaatgaaaaagccataaatacaagaagaggattattttcacagcctttgagacttaactttaaagcttttattgactgactccctgcatgat

SEQ ID NO: 427216 - DNA, 201 bp, Homo sapiens
ccataaatacaagaagaggattattttcacagcctttgagacttaactttaaagcttttattgactgactccctgcatgattctttacaaaatatttattytaatttttattttgagacagagtatcactctgtcacccaggctggagtgcggtggcacgatctcagctcactgcaacctccgcccacggatccaactgat

SEQ ID NO: 427217 - DNA, 201 bp, Homo sapiens
tttcatgactccccttaattataagtccttcccttgctgtattttatttgcatttttatgacatttgtcatgctttttaaacatcgtatgtgtaagcaagragaggggccctgtcttggccttcctaaatctacctatgtacctagccaagtgcacacagtgtatgcctaaataaatatatgttggaataaatgctgttca

SEQ ID NO: 427218 - DNA, 201 bp, Homo sapiens
ccactggttcatgactgacatcaccattgggagtgccatcggggattataactaagccatgtttctgcaggggggaaaaacccaccatcacaaaaggcccrtatggaagctgtaagctctgtgaggtcactctgcaacaatacatgtttgctacaggtaaaacctggttagaatcagttacatgaaatatagctctgtgta

SEQ ID NO: 427219 - DNA, 201 bp, Homo sapiens
tggggcaatctttactgaaaaaatgactcaaaaatccacaagcaatgaggtaatggtacaataaattagactacataaaaataaaaattttgggctgggcrtggtagctcatgcctgtaatcccagcactctgggaggctgaagcaggcagatcccttgagccgaagaattcaagaccctgcctgggcaacatggcaaaac

SEQ ID NO: 427220 - DNA, 201 bp, Homo sapiens
cagtgtttaggccatctacagaggacaaaagttgtctaacaattcagcttaatggaaaaattattttaaaagcaaataatttgatgaaaacttagaactcwcaatattatttgggtaaaacagaaaaagttttatctcaattatatttcttttaaatgaaattagtagtgagccttcagacttgtttccaggaaagtctaa

SEQ ID NO: 427221 - DNA, 201 bp, Homo sapiens
tcacacgtaagctttgtattgtgtagacaagttaaaataccaaccctgtgactgccaacacttcgaatggacaatgcatcctcaactccctgataaaaatraaaataaacacagtaaaagtttgtgagtgattacattaagctaatgaggaaaagtattagaggcaagtgtataggttattacaaaccagataaggacgat

SEQ ID NO: 427222 - DNA, 201 bp, Homo sapiens
atggattctcgcactgttgcccaggctggagtgcagaggcacgatctcggctcactgcaacctctgcctcccgggttcaagcaattctcctgcctcagccycccaagtagctgtgattacaggtggctaccaccatgcccagctaattttttgtatttttagtagagacggggtttcactatgttggccaggctggtctca

SEQ ID NO: 427223 - DNA, 201 bp, Homo sapiens
aaatgaaaatctcctctgtccgagaattacacataatcactaacaaaggctaactacaaattcctgctgaaatcttcctactatgggaattagtgtgactrcagtgatcattttattatgaggtcagaagtagaaaaatgagaaaaactggaataattcgggtaaaatgaatagaatagactttattttgtggacttattt

SEQ ID NO: 427224 - DNA, 201 bp, Homo sapiens
aatgaaaataaaggttcatcagcaagatccaatctctcaaatgaagccgatgcttattctatggtcacatcatagaacaaagcagacccttatcgtatcasccacattcattcaaaacctattttcttgagtgcctaataggagacacacatcgtcctaggtgctaaagataagctacgaacaaacatcgaaaagagcaag

SEQ ID NO: 427225 - DNA, 201 bp, Homo sapiens
gccattaaaaccacatgctttaaaagaaataaacaggatttaaaactactttatctggttctttctatacattattactagatgcttgaagcaacatggayaagcaggagtagcaaggagccaacactgattccaacctagtagacgaaatatatgctctataacttattgtgatatattttaaaattatttttgaataga

SEQ ID NO: 427226 - DNA, 201 bp, Homo sapiens
cccaagaccctaccttccagggcctctcgttaatttcctccccattacattctcccttctctcctcccttgtaccaaccaaagccttccaaccctctcccsgttcaacccatgggaaccctgaattagcaaggagttgggactgcacttcctttgccagtactgttgcagcctaacaggaaatgggtgtttccaatgtacc

SEQ ID NO: 427227 - DNA, 201 bp, Homo sapiens
gccctacctatcaagagccaaaggcaacagactgctctaggtaaaccatctcacatatatatagctgtattcccaatcaatgattaaaaactcattttacttttttttttttgaatatgcatctttttatacattactctgaatattttaagagatgtctatgtaatttagaaactcaggcaacctattgacaaaatatta

SEQ ID NO: 427228 - DNA, 201 bp, Homo sapiens
aatcacaaaaatgggtgatgctttccactcaaaagactattttgtatagtgcaaattctttcagtgaacattttcataccttagtgatggtagctctcctytccactgacatttacatctagaccccttcatttatcttcccacatctggcaaaaaaaaaagggggggaaggagtaaaatcaaagcaatcacttataaacc

SEQ ID NO: 427229 - DNA, 201 bp, Homo sapiens
gttaacactccattatgttaataattaataataactgaaacattgggaaaacaaagcacaacaatactttcccatgtgttgagtgtcactttatggattargtatttttggttactggtatctgcatgcatagttatgtcatgtatcaccacatataagtgggtaaatgatcactgtcacaacatgctctacataaacaac

SEQ ID NO: 427230 - DNA, 201 bp, Homo sapiens
agaggcctaagaaaaaagtgtattattaaaccccaaaaaaagcaactggtagctctaaaggcagaacattcctcagaaagtactaaccctgtcactcttayatgttgccagagggtcactgtacagggaagaagactgctaagagacaaaaacaaaataaataagcaaaaacaaaaacaaagatgaattggtctcaccatc

SEQ ID NO: 427231 - DNA, 201 bp, Homo sapiens
aacatcatttctggctctactcagaacacttcaccctaacttccacatatctgaaagtttttagtgttctttttattacccacacttatgtttataaatattctttattatgatgatagtattacatcagtaatataaacactatttttagacatttaactctttgttacttcttgctgtaaaaactctgaaaaagaaact

SEQ ID NO: 427232 - DNA, 201 bp, Homo sapiens
aaattacatgctaagtcacatttatagagaaatcaccaattattaggacaaattagtgcttgagtttatgtactaagggaacacctaatccatgcacaacraagtgaatcacaccatatcctcaatattctaaacagtgagtacagattaacgcaacaatcaaaaatttctacaaagcatgcagagactagacagctcacc

SEQ ID NO: 427233 - DNA, 201 bp, Homo sapiens
ggaagagacactaaatggaaaagttcttacactttttggaatgcgtaagggattttattacaaatgatgatcttgaattctcctgaaatatctacaaaaamtgatagctatagtttcctatggttttagagaaaacagaaggctaaaatgtcccaacaagtgctctctgctggcttttctattttaatacagaactattat

SEQ ID NO: 427234 - DNA, 201 bp, Homo sapiens
gccttggcactggcctagaacgctcccctcccagctcttcaagcaactggctcctcacatttcaggtctcagctcaaaggtcagtttctcagagaagcatytctaatcaccccatccaaagggtaacccacacacatagacccctccaggttccctatcacattatctgttctcttcacagtccctgacatttctttcttt

SEQ ID NO: 427235 - DNA, 201 bp, Homo sapiens
gcttttaaaagaatccaatttgttttctgcagttgtcagagagcaaatctgggccttggacaatgcgttatattctccatctgtacattttaacattacarcttataaacctctaaagaaaacatctttcaatttctgacccacatctccaaattgctgattttaaataactgattaaagacttctatccaattatttaga

SEQ ID NO: 427236 - DNA, 201 bp, Homo sapiens
tgcccaaactcctgattcatagtaacttagaaaaattgtgtattctatagaaaagttaagaaaattttaaaattccatcttgtataattatcaggaaaacstgaactaatcaatggcaaaattattaaaaacaaaagataatttagtaaagtaacaggttataaaatgaacatatacaattcaatgacattcatatacaaa

SEQ ID NO: 427237 - DNA, 201 bp, Homo sapiens
caaaatgtagcatacccaaaaaaatggaatattaataggctataaaaaggaattaagtattgatacatggtataacatggatgaaccttgaaaacatcacrctaagcgaaagaagccagtcacaaaagaccatgtattatatgactcctttcatatgagtctagaatagggaactctatagatagaaagtagatcagtggt

SEQ ID NO: 427238 - DNA, 201 bp, Homo sapiens
tatactaaaaaccactgaattgtacactttaaatggatgatttgtatgttatttgaattatatctcaataaagctgcttaaaaataacattaaataggccrggcgcagtggctcacacctgtaatcccagcactttgggaggccgaggtgggtggatcacctgaggtcagttcgggaccagcctgaccaacaaagtgaaac

SEQ ID NO: 427239 - DNA, 201 bp, Homo sapiens
aggcgtggtggtccatgcctgtaatcccagctactcagaaggctgaggcaggagaatcacttgaacccgggaggcagaggttgcagtgagccgagattgcrccattgcactccaccctgggcaacaagagcaaaactcgtctaaaaaaataaaataaataaaatttaaaaaaataaataaaataacataaaataaaataaa

SEQ ID NO: 427240 - DNA, 201 bp, Homo sapiens
ccagtttcttcaacatatatattataaggagaaaaaacatgaaagaggacctatacatgaaaagagacttaaaagatttatcaactcattctaaggtgtgmaacttacctggatcccgatttttttaagtgtaaaaaagaaaaatcatttatgacattttgaaactactgaaattttaacattgattagatatataatatg

SEQ ID NO: 427241 - DNA, 201 bp, Homo sapiens
aaaaaaaaaaaaaaaaaaaaaaaaaaaaagaagtgtggatgactaggtgaaaaaaaggcatgggaattaggaattgcaattaaaaatctagagtggaaaaraaaaggaaggcagaggtaatcatagcactgaagaatacctagtagttacatacacattaaaaataaagattatgcggggtgtggtggctcatgtctgtaa

SEQ ID NO: 427242 - DNA, 201 bp, Homo sapiens
gaaagaaaaagaaggggaggaaaaaaaggcagctggggttttgacacaaaaattagccaggtatagtggctcacacctgtagtcccagctacttgcagggytgaggcaggaggattgcttgagcccaatgagtaagccctatgcgcaaaaaaaaaaaaaaaaaaaaaaaaaaaaaaattcacttaaaagtctttaattaag

SEQ ID NO: 427243 - DNA, 201 bp, Homo sapiens
attcacttaaaagtctttaattaagtagttagacctccaggtcccctttccattgctaggctattacctcagcttcaacttcatctcctattctccaggayaccagaagttctagaagacaaaggggctctggggaagggaagggtaagcaatgggaacagggagggagtaggaagtgtgggcttaggtgaaagtatgcat

SEQ ID NO: 427244 - DNA, 201 bp, Homo sapiens
aatgagcagaagaatcagtttaatttttttctttttttctttttctttttatttattttgtttaccttcaaccaactcacaccaaagaatcagtttttttkttgttgttgttgttgtttgtttgtttgtttgagacacagtctcactctgttgcccaggctagagtgcagtggcacaatcttggcttactgcaacctccac

SEQ ID NO: 427245 - DNA, 201 bp, Homo sapiens; identical to SEQ ID NO: 23207

SEQ ID NO: 427246 - DNA, 201 bp, Homo sapiens
gaagtgggtttccttaggtcctcctgcatgctgctggttactcacaggcagggctgactggagttctgtaacttaacaatctgggtgtcaataacgcctcrtattagtcaagtattaacccagctagcgcctgttaaacccgcgcgatccagctcaggtcaaggaggaagaagtaaaattcccaaaaaatgctacgcccta

SEQ ID NO: 427247 - DNA, 201 bp, Homo sapiens
tgatatcatccacctcagagacaacacttcccctacgattggagcgactgaaataatcagcggcagatacctttcggtcagaaaaaaaacaagatgctttmaaggttaagaaaaaagaaagaaaaaaataagaacattggccaattagggaaaagttttttaaaattttgatgggtgataaagtaccaagaaataaaatga

SEQ ID NO: 427248 - DNA, 201 bp, Homo sapiens
aacacatcttctgaccactgcagttttttcacagattgttatcaaaggaaaacagaggaatacaagactcgtcatttgactggattttttaaaaaagtttytaaacatctaactgtcaaaacaagaatactgggtgggcatggtggctaacgccttgtaatccagcactttgaggggccaaggtgggcagataccttgagc

SEQ ID NO: 427249 - DNA, 201 bp, Homo sapiens
acctgtagtcccagctactccagaggctgaggtgggtggagcacttgagtcctggaggtcaaagctgcagtgagccatgactacaccactgcaagccagcytgggtgacagagcaagatcctacctcaaaaaaaaaaaaaaaaaaaaaaaaaaagaatgctgtggtttgttggttagtgtgcaaaatctcacttatggcta

SEQ ID NO: 427250 - DNA, 201 bp, Homo sapiens
caatctctgacttaaagactccatcagtgttgacagtggagttgaggacatccctactcccaccccatccctaccacccctagccctgccttcccacaccrctcctcactccccactcacaccctcaactaggcacctaaggctcacctctccccagagatcccaagaccctaccttccagggcctctcgttaatttcctc

SEQ ID NO: 427251 - DNA, 201 bp, Homo sapiens
gatatcctgcaggacataggaatgaaccattgcataaaaccatgcacaaacgtatcttaaatcgcaaaggattcagatgaaatgtgactcacttttgtatrttccagactaaaagcagagaaatcaaagtacaaaaacataactcccactcccaaccactgaaaagggcaaataggtcaggggatagtgggactgggggaa

SEQ ID NO: 427252 - DNA, 201 bp, Homo sapiens
aaacagcttttcttgctccatttgaaaaattggcctaaaaagacttctgaaaactacagaataaaatataaacccccatacaggtcagttaatttggacaragagtatagtttattccacagtcacaaactataccttaaataagcactgtccaatacaactttctctgaccatggaaatattctatatttgtgctaatgt

SEQ ID NO: 427253 - DNA, 201 bp, Homo sapiens; identical to SEQ ID NO: 324061

SEQ ID NO: 427254 - DNA, 201 bp, Homo sapiens; identical to SEQ ID NO: 324003

SEQ ID NO: 427255 - DNA, 201 bp, Homo sapiens; identical to SEQ ID NO: 324035

SEQ ID NO: 427256 - DNA, 201 bp, Homo sapiens; identical to SEQ ID NO: 324050

SEQ ID NO: 427257 - DNA, 201 bp, Homo sapiens; identical to SEQ ID NO: 324005

SEQ ID NO: 427258 - DNA, 201 bp, Homo sapiens; identical to SEQ ID NO: 324037

SEQ ID NO: 427259 - DNA, 201 bp, Homo sapiens; identical to SEQ ID NO: 324020

SEQ ID NO: 427260 - DNA, 201 bp, Homo sapiens; identical to SEQ ID NO: 324067

SEQ ID NO: 427261 - DNA, 201 bp, Homo sapiens; identical to SEQ ID NO: 324069

SEQ ID NO: 427262 - DNA, 201 bp, Homo sapiens; identical to SEQ ID NO: 324077

SEQ ID NO: 427263 - DNA, 201 bp, Homo sapiens; identical to SEQ ID NO: 324078

SEQ ID NO: 427264 - DNA, 201 bp, Homo sapiens; identical to SEQ ID NO: 324030

SEQ ID NO: 427265 - DNA, 201 bp, Homo sapiens
gaggcgatgtgcaaatttaacctttggatttatgactcaatttctttgtagcaaatgtcacgggaaatgtcaggccaaggctgaggctgggtgaggggccygtcgaggaagcgggtagggctaggcaggctagagtaccgaggaggggctcaggccagggtgggcttcaggcccctcacctcctcctgggagccttcctgg

SEQ ID NO: 427266 - DNA, 201 bp, Homo sapiens
ggactgggctcagaacctcccgtttttctgaggtcaggcctcagggggatcaatgggggcgttggcggcagtagagggcgtgggggacaaggttgtcccarcgctgcctccagggcgggcggtgagaggaggcagcaatgcccagacatccgcagcccgagggacattgagaggcttggctgggggaatcaggggtggtgg

SEQ ID NO: 427267 - DNA, 201 bp, Homo sapiens
tctttagtcattatggaaatgcaaaatagaacctcagtgagataatatttcacacccactaggatggctgtaatttaaaacagaaaatatcaagtgttagsaaggatgtggaggaactggaactctcatacgctgttggtgggaatataacatgatgcaaccactttggaaaatagtttggtagtttcttaaagagttaaa

SEQ ID NO: 427268 - DNA, 201 bp, Homo sapiens
cctcagggggatcaatgggggcgttggcggcagtagagggcgtgggggacaaggttgtcccaacgctgcctccagggcgggcggtgagaggaggcagcaaygcccagacatccgcagcccgagggacattgagaggcttggctgggggaatcaggggtggtggggcaatcagcatcccctccctggcagccttcgtgagac

SEQ ID NO: 427269 - DNA, 201 bp, Homo sapiens
tggttttatccgacttctgacctctgggcatggaggtctctctgcagaggcccaggcctgggcacgaagggagagaggcctccattgtcccacaggggcckaaatgcagactgtgcatccccggtgccctcaggaacccttctctgatcatcaggattctcttggactctggggtccttgtcctgctcaggcatccctgcc

SEQ ID NO: 427270 - DNA, 201 bp, Homo sapiens
tgggatctctggttttatccgacttctgacctctgggcatggaggtctctctgcagaggcccaggcctgggcacgaagggagagaggcctccattgtcccrcaggggcctaaatgcagactgtgcatccccggtgccctcaggaacccttctctgatcatcaggattctcttggactctggggtccttgtcctgctcaggc

SEQ ID NO: 427271 - DNA, 201 bp, Homo sapiens
tagcttgaacctgggaggtggaggttgcagtgagccgagattgtgccactgcacttcagcctgggcgacaagagcgaaactctgtctcaaaaaaaaaaaaagaatatgaacagtccttgaaattaatgaaattagtgcagtgtctctctctctttttatgtattctagatttcataatgtgacagccctaaatcataaatc

SEQ ID NO: 427272 - DNA, 201 bp, Homo sapiens
tcacttgtaccccttgacctcagcaacaggaccaagacctgtagaccccaccacttgcaccccttgacctgaaaaacaggaccacaacctacacccagccrtcctcacctggactatgaggatggtactgctcactggctccggacagctgtgtgactccaggggagccagctgtggttgagatctcgggggtcttggtaa

SEQ ID NO: 427273 - DNA, 201 bp, Homo sapiens
caactcttgagagctgggctctaagcatccgccttagctgccaacttggccaaaggctatgcgagcagtttcccgttgacgggcaatgcatctttccaacytgagcgagtgggtgtgtgtgcaaagatggtgcgagtcacggatctgcgcaggaagggtgactttaagggattagcatggccaggtatgcacacaaggcac

SEQ ID NO: 427274 - DNA, 201 bp, Homo sapiens
gcatgtgcctgtagtcccagctacttgggaggctgaggcagaagaattgcttgaacccaggaggcggacgttgcagtgagctgagactgcaccgttgtacyccaaaatgggcgacagagcaagactctgtgtcaaaaataaataaataaataaataaaaattatagccaggctttgctgtgcctgcagcagattagacaca

SEQ ID NO: 427275 - DNA, 201 bp, Homo sapiens
ctccacctcccgggttcacgccattctcctgccccagcctcccaattagctgggactacaggtgcgtgccaccacccccggctaatttttttgtatttttmgtagagatggggttccaccgtgttagccaggatggtctcgatctcctgacctcgtgatccacccgccccggcctcccaaagtgctgggattacaggtgtg

SEQ ID NO: 427276 - DNA, 201 bp, Homo sapiens
cctccgcctcccaggttcaagcgattctcctacctcaggctcctgagtagctgggattacaggcacctgccaccaggcccagctaatttttttttttttttgtacttttagtagagacggggtttcgtcatgttggccaggctggtctcgaactcctgacctcaggtgatcctcccaaagtgctgggattataggcgtgag

SEQ ID NO: 427277 - DNA, 201 bp, Homo sapiens
gagtcagccctggggcagggctggaggagggctgtggcttcctgtacaatgtgcaggggaagctgtcccacctgtgcccccatctcatgggcaaatggcaytccccagcaggacccagcctggagaggggttcagtgattagtggactttgttcatagaagggcagggttgggggttgtctcgtggccaggacgccgggca

SEQ ID NO: 427278 - DNA, 201 bp, Homo sapiens
aggcatttcgtttggggaaggagctcatccaggaggactgggatctctggttatatgtgacttctgacctctgggcatggaggtctctctccagaggcccrggcctggacacgaagggagagaggcctccattgtcccacaggggccgaaatgcagacggtgcatccccggtgccctggggaacccttctctgatcatcag

SEQ ID NO: 427279 - DNA, 201 bp, Homo sapiens
ttctgatgtgaagtggccctggtttctgtcacagtcttggaagggtgagtcagccctggggcagggctggaggagggctgtggcttcctgtacaatgtgcrggggaagctgtcccacctgtgcccccatctcatgggcaaatggcattccccagcaggacccagcctggagaggggttcagtgattagtggactttgttca

SEQ ID NO: 427280 - DNA, 201 bp, Homo sapiens
acgtctccaggtgtgagatgggcatcttcttgtggccactatgcccgctgagcctacccccaaacctgcccctcctcaaactaaatcttccattctaagcrctttgaacgaagcaaatcaaccaattaaaaaaatatattccaggattggccagagtctgtgaagatttccataacaaatccccgttacaagggttttcag

SEQ ID NO: 427281 - DNA, 201 bp, Homo sapiens
tgcttgaacccaggaggcagaggttgcagtgagcagagattgcaccactgcactccagcctgagcgacactgtgagacaccgtttcaaaaaaattaataawaaaaaataaattaattaataaatatgtccagccagtgtcagtgtgacagttgtggtcattttgataacagcaagggttcaagaaagccctgggagtgatg

SEQ ID NO: 427282 - DNA, 201 bp, Homo sapiens
tgggcatggtggcgcatgcctgtagtccaacctactcaggaggctgaggcgggaggattgctttagtccaggagatgaggctgcagtgagttgtgattatrcctctacagcccagcctgggcaacagagcaagaacctgtctgggtcgggggaggcaggggaagctgattctaaatagaaatagaaattttagactcacct

SEQ ID NO: 427283 - DNA, 201 bp, Homo sapiens
aaatacaaaaaattagccgggcatggtggtgtgtgcctgtaatctcagctactcgggaggctgaggcaggggaactgcttgaacccaggaggcagaggttrcagtgagcagagattgcaccactgcactccagcctgagcgacactgtgagacaccgtttcaaaaaaattaataataaaaaataaattaattaataaatat

SEQ ID NO: 427284 - DNA, 201 bp, Homo sapiens
ggagctgggtccccatgggtggagcaggtgggctcccggcccccacttggccatgctcttagaaaaatgattcagaggctgggcgcagtggctcacgcctrtaatcccagaacttttggaggccgagacaggcagatcacatgcagtcaggagttggagaccagcctgggcaacatggtgaaaccctgtctctactaaaaa

SEQ ID NO: 427285 - DNA, 201 bp, Homo sapiens
agccctgctgattcatccactcactccatggcaagacagccactgacagctgtgtcctggggcccacccgggcctggcctctgtgcaggctagcactcagyatgcttagtgccacactcggcccaggagaaatgacccagccctgggctcagagaccccacagtgggtggatggaaaacagagtcatttaaatacaactgt

SEQ ID NO: 427286 - DNA, 201 bp, Homo sapiens
ggagtcctcacgctctgctcacgttgcagaaggccccctggtaaggccagccagccggaggaccaccccgcagaccacacgcccagggcctggcaccgagrgggaggccccgatcagcaggtgaaagcgacaccctgatgacactggctagttcaccttcactctggtcatcgtttactgtaccccggggcagctcccgcc

SEQ ID NO: 427287 - DNA, 201 bp, Homo sapiens
ggactaggggacagggtgaggagataatggcctggactacatggaaggacgtcgccctgagccattgaaaagggctgtggggtccatgaccactcctggcyttcccttgactatgatggagacagtagcttccagtgtaaaatgtgagctcagttcctgactcgtgtctagcgggtggtgcctggtctttggctggcgatg

SEQ ID NO: 427288 - DNA, 201 bp, Homo sapiens
gcctggcaccgagggggaggccccgatcagcaggtgaaagcgacaccctgatgacactggctagttcaccttcactctggtcatcgtttactgtaccccgrggcagctcccgcctgagccctatgaccccaaccgccgcagcctctggtaaggcctgggtatggggcacatggagagggcccattccagaggctcctaagt

SEQ ID NO: 427289 - DNA, 201 bp, Homo sapiens
tggactacatggaaggacgtcgccctgagccattgaaaagggctgtggggtccatgaccactcctggctttcccttgactatgatggagacagtagcttcyagtgtaaaatgtgagctcagttcctgactcgtgtctagcgggtggtgcctggtctttggctggcgatgctccatgtcacctatgcccagaaactgggcca

SEQ ID NO: 427290 - DNA, 201 bp, Homo sapiens
tctctgcagaggcccaggcctgggcacgaagggagagaggcctccattgtcccacaggggcctaaatgcagactgtgcatccccggtgccctcaggaaccsttctctgatcatcaggattctcttggactctggggtccttgtcctgctcaggcatccctgcccccctcttcaggagggccctcaacacgatcttctctgg

SEQ ID NO: 427291 - DNA, 201 bp, Homo sapiens
agggggaggccccgatcagcaggtgaaagcgacaccctgatgacactggctagttcaccttcactctggtcatcgtttactgtaccccggggcagctcccrcctgagccctatgaccccaaccgccgcagcctctggtaaggcctgggtatggggcacatggagagggcccattccagaggctcctaagtcaaaagagatt

SEQ ID NO: 427292 - DNA, 201 bp, Homo sapiens
gtctagcgggtggtgcctggtctttggctggcgatgctccatgtcacctatgcccagaaactgggccatgccctttgtgaggacctgcccacaacgtcgtygttcccgcagggtcccctgggaaccgggctgcccgagacccggccctgccggggttccctgcgccccagaccggaacccccagggctttggtcgttccca

SEQ ID NO: 427293 - DNA, 201 bp, Homo sapiens
gcgggtagggctaggcaggctagagtaccgaggaggggctcaggccagggtgggcttcaggcccctcacctcctcctgggagccttcctggattgtccctygcttgcctggatccccggcactgtgtcctcaatttgtcccagctatcacaaccttgttgagatgttgcctttatttgccttctaccagggcccagatgag

SEQ ID NO: 427294 - DNA, 201 bp, Homo sapiens
tcccaacgctgcctccagggcgggcggtgagaggaggcagcaatgcccagacatccgcagcccgagggacattgagaggcttggctgggggaatcaggggyggtggggcaatcagcatcccctccctggcagccttcgtgagactcccccgccccactgggtgtgaggtcccgcagtggggggcaagggagggtgggctcc

SEQ ID NO: 427295 - DNA, 201 bp, Homo sapiens
gggcgggcggtgagaggaggcagcaatgcccagacatccgcagcccgagggacattgagaggcttggctgggggaatcaggggtggtggggcaatcagcawcccctccctggcagccttcgtgagactcccccgccccactgggtgtgaggtcccgcagtggggggcaagggagggtgggctccatgtgagttgggcatgc

SEQ ID NO: 427296 - DNA, 201 bp, Homo sapiens
ttaagcacagcctcacacctccacccagtcattcacatagaccctggggtgcgcagaggcagagggtcacccgcagaggagctgtccgcatgtccatggcrgcctcagtgtggcttctctgctcagcccagggtgtggtgattccgtcactgctttaaatgtggggttcaggaggaattctgatataacagggacgtctcc

SEQ ID NO: 427297 - DNA, 201 bp, Homo sapiens
cctcaggggtgcgcccaggagctgggtccccatgggtggagcaggtgggctcccggcccccacttggccatgctcttagaaaaatgattcagaggctgggygcagtggctcacgcctgtaatcccagaacttttggaggccgagacaggcagatcacatgcagtcaggagttggagaccagcctgggcaacatggtgaaac

SEQ ID NO: 427298 - DNA, 201 bp, Homo sapiens
catggcggcctcagtgtggcttctctgctcagcccagggtgtggtgattccgtcactgctttaaatgtggggttcaggaggaattctgatataacagggaygtctccacatgtcttccctgccttagcgtcttgaggtgtacgtggaaaaacctctggcagggctcactctgacagagtcccggcctctgacattgaatca

SEQ ID NO: 427299 - DNA, 201 bp, Homo sapiens
tgctcccaggaggtggaggttgcagtgagccgagattgtgccactgcattctagcctgggcaacaagagcgaaagtctgtctcaaaaaaaaaaaaaaaaaattggagactaatattaaagagcacaatctaaagtgtagggctggaatgaatgaatgagctctctaggcgagcaaagcctttcagggctgatgtccctcgg

SEQ ID NO: 427300 - DNA, 201 bp, Homo sapiens
gcatcccaggaggatgaacacgccatactccctgcgcactgaagatccggggccggagtgttccgagtgttcgctggcaccaagtcctattggtgacagcrggttgttttgtccaagtgcttaggtagaggttgagcatcctaatcctgaaatctgaaatgctccagaatctgaaccttcttgagcaccaacctgacactt

SEQ ID NO: 427301 - DNA, 201 bp, Homo sapiens
gagtgcagtggtgtgatcttgactcactgcaacctccacctcccgggttcaagcaattcccctgccgcagcctcccaagtagctgggattacaggcgcccrccaccacgcccagctaattttttgtatttttagtagagatggggttttaccatgttggccaggatggtctcgaactcctgacctcaggtgatccacccgc

SEQ ID NO: 427302 - DNA, 201 bp, Homo sapiens
gaagaaaaaggtagaaccgcttagaaacctgctacttcccttggagtccccagcgttcagggaggggagggctccccctgcgggcatcccaggaggatgamcacgccatactccctgcgcactgaagatccggggccggagtgttccgagtgttcgctggcaccaagtcctattggtgacagcaggttgttttgtccaagt

SEQ ID NO: 427303 - DNA, 201 bp, Homo sapiens
aattaaaatgaaaatccgaaaatgttttcaaacaaatgaaaatggaaacatcatataccaaaagcctttggattcagcaaaatcagtgctgtgagggaagkttgtagcaataaatacctacatccaaaaagtagaaagatgaaaaattaataaactgatgatgcaccttaaagaactagaaaagcaagaacaaagcaaaac

SEQ ID NO: 427304 - DNA, 201 bp, Homo sapiens
gttctccacgtgtgactctgtaaacagctttccctcctggtttctgtcttttttttttttttttttttccgagacatggtcttgctctgttgcccaggccrgagtgcagtggtgtgatcttgactcactgcaacctccacctcccgggttcaagcaattcccctgccgcagcctcccaagtagctgggattacaggcgccc

SEQ ID NO: 427305 - DNA, 201 bp, Homo sapiens
attccccagggagctggagtcctccatctccttcccagccaacttcttcaaaccacctgaagaaaaaggtagaaccgcttagaaacctgctacttcccttsgagtccccagcgttcagggaggggagggctccccctgcgggcatcccaggaggatgaacacgccatactccctgcgcactgaagatccggggccggagtg

SEQ ID NO: 427306 - DNA, 201 bp, Homo sapiens
cgagccccgcgccgtcccccgcgccgcgccccgcggcccgaccctgctgcggacgctcggcaccgtgagcgccctggtcgccgcctccaggcccgcagacracgccccggacggcccagcagaatgcggagcgcaccgagccccggtcaggaagaaccacaagaagatgccagtgccgcctggggccccgcaaggtggcgg

SEQ ID NO: 427307 - DNA, 201 bp, Homo sapiens
cacccaggcctgcctttccctgcctgcctgctctcaagggttaagctaactttctccatttgtgctaacattttccatacattctttatttatttttttttattttttgagacagagtcttgctctgtcgcccaggctggagtgcagtgttaccgtctcaatctaggctcactgcaacctctgcctcccgggttcgactga

SEQ ID NO: 427308 - DNA, 201 bp, Homo sapiens
atcaagagtttgagaacagcctggccaacatggtgaaacccattctctaccaaaaatacaaaaaattagccgggcatggtggtgtgtgcctgtaatctcakctactcgggaggctgaggcaggggaactgcttgaacccaggaggcagaggttgcagtgagcagagattgcaccactgcactccagcctgagcgacactgt

SEQ ID NO: 427309 - DNA, 201 bp, Homo sapiens
aggagtgcagtggcgcgatcttggctcactagagcctctgcctcctgggtccaagcaattctcctgcctcagccccggagtagctgggattacaggtgtgygccaccacaccctgctgtgtttttgtatttttactagagacggggtttcaccatgttggccaggctgatcaagaactcctggcctcaagtgatccacctt

SEQ ID NO: 427310 - DNA, 201 bp, Homo sapiens
gggaggccgagggaggcagatcacttgagatcaagagtttgagaacagcctggccaacatggtgaaacccattctctaccaaaaatacaaaaaattagccrggcatggtggtgtgtgcctgtaatctcagctactcgggaggctgaggcaggggaactgcttgaacccaggaggcagaggttgcagtgagcagagattgca

SEQ ID NO: 427311 - DNA, 201 bp, Homo sapiens
ggggtggctcacgcctgtaatcccagcactttgggaggttgaggcaggtgcatcatgaggtcaggagatcgagaccatcctggctaacacggtgaaatccygtctctactaaaaatacaaaagagaaaagaaaaaaaaatagctgggcgtggtggtgggcgcctgtagtcctagctcttagggaggctgaggcaggagaat

SEQ ID NO: 427312 - DNA, 201 bp, Homo sapiens
attccagcactttgggaggccgagggaggcagatcacttgagatcaagagtttgagaacagcctggccaacatggtgaaacccattctctaccaaaaatayaaaaaattagccgggcatggtggtgtgtgcctgtaatctcagctactcgggaggctgaggcaggggaactgcttgaacccaggaggcagaggttgcagtg

SEQ ID NO: 427313 - DNA, 201 bp, Homo sapiens
tgaggcaggagaatggcatgaacccaggagagctaagatcgcgccactgcactccagcctgggcaacagagcaaggctccatctcaaaaaaaaaaaaaaaatgagtgggtgaccagcattagagcatcagggaacaccctcacccaggcactcacctgtgggatgaagccacagcacatcaccatgtggaagccaaacttg

SEQ ID NO: 427314 - DNA, 201 bp, Homo sapiens
ggcagattgcttgagcccaggagttcgagaccagcctgggtgccatagtgagaccccatctctatttaaaaaaaaaattagccaggtgtggtggcatgctyctgtattcccagctactcaggaggctaaggtgggaggatcgcttgagcccaggaggttgaggctacagtgagctgagattgcaccactgtactccagcct

SEQ ID NO: 427315 - DNA, 201 bp, Homo sapiens
ctggtgcctaggggactggcattctgtcacatataaagagtgggtgaccgccaggtgcggtggctcacacctgtaatcccagcactttgggaggctgaggygggaggatcacgaggtcaggagatcgagaccgtcctggctaacacggtgaaaccccatctctactaaaaatacaaaaaattagctgggcgtggtggcggg

SEQ ID NO: 427316 - DNA, 201 bp, Homo sapiens
ccatctcaaaaaaaaaaaaaaaaaaaaaaaaaaggttcagcagcaaggcctccatttcctcatctgtaaatggagcctttgggaagacagtctgcaatgayacacccatggctcccaggggacaggtcctgggcttgggagatgttaggccgtgatcttgggggtttggcaggccttccagaccctcaggtgtgagactct

SEQ ID NO: 427317 - DNA, 201 bp, Homo sapiens
ggtggattccagctgggagtccacagtccccagttacatgtcccccctccaccgccacatgccagatgtcattccaaggccccacgctggcccgtcaccarctctgccctgcctcccaggcccgggcgggtcagggaatggtgactgcctcctccctgccgtgtgccaggcctgtgcactggagcaggggttcaggctccc

SEQ ID NO: 427318 - DNA, 201 bp, Homo sapiens
tcagcaggtgaaagcgacaccctgatgacactggctagttcaccttcactctggtcatcgtttactgtaccccggggcagctcccgcctgagccctatgaycccaaccgccgcagcctctggtaaggcctgggtatggggcacatggagagggcccattccagaggctcctaagtcaaaagagattccacaagtcaaaatc

SEQ ID NO: 427319 - DNA, 201 bp, Homo sapiens
ggtctttggctggcgatgctccatgtcacctatgcccagaaactgggccatgccctttgtgaggacctgcccacaacgtcgtcgttcccgcagggtcccckgggaaccgggctgcccgagacccggccctgccggggttccctgcgccccagaccggaacccccagggctttggtcgttcccacagccgtcccgcgggccc

SEQ ID NO: 427320 - DNA, 201 bp, Homo sapiens
ggacctgcccacaacgtcgtcgttcccgcagggtcccctgggaaccgggctgcccgagacccggccctgccggggttccctgcgccccagaccggaacccycagggctttggtcgttcccacagccgtcccgcgggccccctccacggtgcgtcgcctgggccccagcggtcgctaggctgcagcctggggctcccggcca

SEQ ID NO: 427321 - DNA, 201 bp, Homo sapiens
gggcctcttgagcccacttgggccaggagggcacccaggcctgcctttccctgcctgcctgctctcaagggttaagctaactttctccatttgtgctaacrttttccatacattctttatttatttttttttattttttgagacagagtcttgctctgtcgcccaggctggagtgcagtgttaccgtctcaatctaggctc

SEQ ID NO: 427322 - DNA, 201 bp, Homo sapiens
ccacggtgcgtcgcctgggccccagcggtcgctaggctgcagcctggggctcccggccatcccgggcgctggcggcggtggaggcagcagggcggatggcsacgcccggccgcccgtgggcccaggcgcgtagtgcgtacagagccagcgaggtgctgcggcgcgtcacgggccgccggcgggacccggggccgcaatcca

SEQ ID NO: 427323 - DNA, 201 bp, Homo sapiens
tccctgcctgcctgctctcaagggttaagctaactttctccatttgtgctaacattttccatacattctttatttatttttttttattttttgagacagartcttgctctgtcgcccaggctggagtgcagtgttaccgtctcaatctaggctcactgcaacctctgcctcccgggttcgactgattgtcttgcctcagcc

SEQ ID NO: 427324 - DNA, 201 bp, Homo sapiens
cggccgcacaagggcagcctaggcgaggtgcggaaggcgtcgcgctggctactctggtacccccaggacggggcaagtgagcagatcggtccccctcgtgkagcgtggctctgagtcaaaagggtgcccgggtgccgccagttagggctccggtactggagggagggggtgggcgcgggacgggcggagggtgggccacgt

SEQ ID NO: 427325 - DNA, 201 bp, Homo sapiens
aagcgacaccctgatgacactggctagttcaccttcactctggtcatcgtttactgtaccccggggcagctcccgcctgagccctatgaccccaaccgccrcagcctctggtaaggcctgggtatggggcacatggagagggcccattccagaggctcctaagtcaaaagagattccacaagtcaaaatcctgatcctgat

SEQ ID NO: 427326 - DNA, 201 bp, Homo sapiens
ctaggcgaggtgcggaaggcgtcgcgctggctactctggtacccccaggacggggcaagtgagcagatcggtccccctcgtggagcgtggctctgagtcaraagggtgcccgggtgccgccagttagggctccggtactggagggagggggtgggcgcgggacgggcggagggtgggccacgtgcgtctggggagtgcggc

SEQ ID NO: 427327 - DNA, 201 bp, Homo sapiens
tcatggacgtctccaggtgtgagatgggcatcttcttgtggccactatgcccgctgagcctacccccaaacctgcccctcctcaaactaaatcttccattytaagcactttgaacgaagcaaatcaaccaattaaaaaaatatattccaggattggccagagtctgtgaagatttccataacaaatccccgttacaagggt

SEQ ID NO: 427328 - DNA, 201 bp, Homo sapiens
aacatgactagagggacccagtcttctcctcagcagctgcttgaggacagtattagcggtcccctcaatcccccccccaacacatgcacacatgcactgayctgcaggggccagatcccggtggacccggggacacagcttccaggggctgtcttgccatgtcccttcccagatctgcctggattcatgccaggccaccct

SEQ ID NO: 427329 - DNA, 201 bp, Homo sapiens
tggccagctcctctccccagcctcctactgtaaaatgggagaggatcccagccctgctgattcatccactcactccatggcaagacagccactgacagctstgtcctggggcccacccgggcctggcctctgtgcaggctagcactcagtatgcttagtgccacactcggcccaggagaaatgacccagccctgggctcag

SEQ ID NO: 427330 - DNA, 201 bp, Homo sapiens
ctgattaaatgaactgtccccccagttcttgctgtcgacatctttgacaagttcaacttcacgggagccagagtcccatggttcgacgccattcatgaagmattccccagggagctggagtcctccatctccttcccagccaacttcttcaaaccacctgaagaaaaaggtagaaccgcttagaaacctgctacttccctt

SEQ ID NO: 427331 - DNA, 201 bp, Homo sapiens
ctggtcttgcccgctatggcctgcggggcctcttctgcggggcagcagggcagcggggcatggggtaatgctgacactgttctgcagctgtgtcctgtccratggaggcaacccacggcagccagaccaggaggtggagaagaaaggcagggctgttggcacacctcgagagtggccttaggagaggctgagtgggcacag

SEQ ID NO: 427332 - DNA, 201 bp, Homo sapiens
agctgggcctttgggccttgggtctgggtcagcctttgggccagggctgggtcagcctccaggggaacagccgagactcctcttccttggggtgactgcabgttctttttctttcaaggtctcagtgacgaggcagggtctccacgcactggaatagtgtcaaaccacacacaagagcacagaacccagggacacagggcg

SEQ ID NO: 427333 - DNA, 201 bp, Homo sapiens
aggcgccctgcccggccctggcacagggttagtgagggctcccgacgcttggctactgtctgatcaatgaggttcatgccgtcccgcccccattctggcargcctgacctctgatccccaggctggcctgcctgaccctctgcagccacccagggcctgggctttggggtctgcaggagccggcctggctgcctgctgcct

SEQ ID NO: 427334 - DNA, 201 bp, Homo sapiens
accaaaagcctttggattcagcaaaatcagtgctgtgagggaaggttgtagcaataaatacctacatccaaaaagtagaaagatgaaaaattaataaactkatgatgcaccttaaagaactagaaaagcaagaacaaagcaaaaccaaaattagcccatgaaaaaaataataaagatcagaggagaactaaataaaatagg

SEQ ID NO: 427335 - DNA, 201 bp, Homo sapiens
gcctcgagggctacttcagcaacgtggcacgcaacgtgcagtggacgtacctgcagccctttgtcatcgtcaccaccaacatgagtaaggcactggctgcrttgggggtggaggcctgcaaccctcaggggtgcgcccaggagctgggtccccatgggtggagcaggtgggctcccggcccccacttggccatgctcttag

SEQ ID NO: 427336 - DNA, 201 bp, Homo sapiens
ctcgtccctgccccagccttgaattcatgctttgtggcacggacggccctgtgcagccggtgcaacaccaggagggtccagctggtgaggacaggacgggygggaggcagaggagccctcctgctgtcctgggcctgtggcccggaacctctcaccgggagccttggtctgtgcacctgggaaaggggtcaagaacaggaa

SEQ ID NO: 427337 - DNA, 201 bp, Homo sapiens
agcacaatctaaagtgtagggctggaatgaatgaatgagctctctaggcgagcaaagcctttcagggctgatgtccctcggtcccacgagccaggcctccrcaggctgagcactgagcgctgtctgtctgaccagaacatcatccactcgggcagtgccctcctggccccggccaccagggcagcgtgggagcagatccag

SEQ ID NO: 427338 - DNA, 201 bp, Homo sapiens
cctgtgccagggtccttccactgggactggcagaaacgtaggtttgcatggagtgagaagcaggggagaggttgagggagggcctggcccagcaggtctcygaaagccagagggcttgtggagggtctatggaggacacccccacaggggctggggccctggaaggtgggggaaggtcctgttgtcctgggaggctgggga

SEQ ID NO: 427339 - DNA, 201 bp, Homo sapiens
tgctcagcccagggtgtggtgattccgtcactgctttaaatgtggggttcaggaggaattctgatataacagggacgtctccacatgtcttccctgccttrgcgtcttgaggtgtacgtggaaaaacctctggcagggctcactctgacagagtcccggcctctgacattgaatcacccacagtctctctagtttatgtgg

SEQ ID NO: 427340 - DNA, 201 bp, Homo sapiens
tggtgtgatcttgactcactgcaacctccacctcccgggttcaagcaattcccctgccgcagcctcccaagtagctgggattacaggcgcccgccaccacrcccagctaattttttgtatttttagtagagatggggttttaccatgttggccaggatggtctcgaactcctgacctcaggtgatccacccgcctcagcct

SEQ ID NO: 427341 - DNA, 201 bp, Homo sapiens
taaaagcccctagtcaggcaactcaggccacaggtgagtggagaggggacagggcagggatgctgcccagcttgggagaccctcccatagtaccttcactycctccctgccctccccctgttcctcacctgggggtctgtggaacccctgagcctcagtttccctgtgccagggtccttccactgggactggcagaaacgt

SEQ ID NO: 427342 - DNA, 201 bp, Homo sapiens
ggcagctgaagcagtggggctggccagtctctttttctaagcctcagttttcccatctataaagggggtactgttccctgttcttctctactgaggtgagraggaagtgagctcccatgccgggggtgggaatgggtggccatcagcacctagaccccacctggcagaggggcacgtgcagggcctgccgtggcagaaccg

SEQ ID NO: 427343 - DNA, 201 bp, Homo sapiens
ccaccagggctgaggcagtgatagatgatggtgggctggaacctgtctggtcagggaagacccatttcaggccatgaggtcaacactgtgaccaacaggcmagaccctgggcacccttggtggccgctgcagcttggctgactggagcacgtgacccagcgtgactgcagaggccccgcctccagtacctcagtttctcca

SEQ ID NO: 427344 - DNA, 201 bp, Homo sapiens
atctatggggcctagaggcctgggatgtgggggagccattcctgggggcaagtgtctgccctggtgctgcatctgctgccttttcacactgggtgagaccmcaagagacagcctgaggccggtcctcactcactgtctttgaggacctgaggggcagctgacagtgggatgaggctggccccctcctctttggtgacagga

SEQ ID NO: 427345 - DNA, 201 bp, Homo sapiens
actcctcactttgagggatttgggttctgagccagtagagcaggcaatgcaagaggatccgatcccacatccaggctgcatggctctgggagtcctcctgycagcactctccaccaggacccctgctgcccctcagagcaccccccaccagagtatgcagggcctcttgagcccacttgggccaggagggcacccaggcct

SEQ ID NO: 427346 - DNA, 201 bp, Homo sapiens
ctgtggcctaatctggagcagaggccctggaatgtgtgttgggggctcattgaatgcccccagcccagggtgtgaggggcagggtctcccagccactccgyacccaccagggctgaggcagtgatagatgatggtgggctggaacctgtctggtcagggaagacccatttcaggccatgaggtcaacactgtgaccaacag

SEQ ID NO: 427347 - DNA, 201 bp, Homo sapiens
tgggatgtgggggagccattcctgggggcaagtgtctgccctggtgctgcatctgctgccttttcacactgggtgagaccccaagagacagcctgaggccrgtcctcactcactgtctttgaggacctgaggggcagctgacagtgggatgaggctggccccctcctctttggtgacaggaagcctcccatggaactgtag

SEQ ID NO: 427348 - DNA, 201 bp, Homo sapiens
gtgcgtggactgagcacctactgtgtgcaggcccttctcaggggtgggagggaaggagtggtctcaccctgcagagctttcaggacaactgaggaagtttyccagggtccatgggaagtctgaaccaaaaactgcttcccagtgagtgggactcctcactttgagggatttgggttctgagccagtagagcaggcaatgca

SEQ ID NO: 427349 - DNA, 201 bp, Homo sapiens
gctgtggcctaatctggagcagaggccctggaatgtgtgttgggggctcattgaatgcccccagcccagggtgtgaggggcagggtctcccagccactccscacccaccagggctgaggcagtgatagatgatggtgggctggaacctgtctggtcagggaagacccatttcaggccatgaggtcaacactgtgaccaaca

SEQ ID NO: 427350 - DNA, 201 bp, Homo sapiens
tttggtgacaggaagcctcccatggaactgtaggagctcacgatggcattttgtttggtgcacgaactcatccaggaggtctgggatctctggttttatcygacttctgacctctgggcatggaggtctctctgcagaggcccaggcctgggcacgaagggagagaggcctccattgtcccacaggggcctaaatgcagac

SEQ ID NO: 427351 - DNA, 201 bp, Homo sapiens
tctgtgtcctcgcccccgcttgcacgcccacggccacacatgcatgtacgcgacatgcctgctgtggtctccacgggtggcacatgctggggcccctttcrcaatacccactcccgcacccacatgctcgtctgttgagtggggaggccaggcccacagacaggggcaagacatcctgggccccacctctgcctgcctgcc

SEQ ID NO: 427352 - DNA, 201 bp, Homo sapiens
actctctccaagacctggttctggcccagcaaagaggtctcggcaggggagcaggattcccggcccagcagctggctcaggaggtgacagctttgggattygcatctgagcatcctcctactcttctcctgggaactctgttggggagggttgctcagaacagaagtgcctgggacgcccagatcctgctggagtggcagc

SEQ ID NO: 427353 - DNA, 201 bp, Homo sapiens
gtgcatcgcagctgtgtgaacccggggtggtggtggttccagcagcggggcacgtggtggacgcaagacggccccgtttgagttttgctgctaggtgacaygtagaacttgaacttcagagggtgctccttggaggccctgatgagagagacacagaagggaagggagactgttcccatggtcctgcctctgcggcagcga

SEQ ID NO: 427354 - DNA, 201 bp, Homo sapiens
gcatccattcaagtgagggaaaggcgtttcgtacttagaaaaatgcaaaattaatgattctcacccacacatgagactgtggattcacccatgtatgagayagtggattcagagccatgctgtggctctcatctgctgggagccagtagtgtttgtgctttggttttgcttttttagctacatggtttatgtgaggtgcgg

SEQ ID NO: 427355 - DNA, 201 bp, Homo sapiens
ccctcctggccccggccaccagggcagcgtgggagcagatccagcggagcgagggtggcacggcacagctgctccggcgcctcgagggctacttcagcaaygtggcacgcaacgtgcagtggacgtacctgcagccctttgtcatcgtcaccaccaacatgagtaaggcactggctgcgttgggggtggaggcctgcaacc

SEQ ID NO: 427356 - DNA, 201 bp, Homo sapiens
ggacacaactttgctttggacagtgacaccaagaatactcacccctttacttagccagaccacaggcagccaccgggacacaaacatctctccagagtcascctccacacagactccacagcagaactcccagggaggcactggggcatggcttcagagcaccaggcagcgctccgcggtgcccagcacccgctcagccag

SEQ ID NO: 427357 - DNA, 201 bp, Homo sapiens
gagccattatcacgccactgcactcctgcctggacaacagagcaagaccctgtctccaaaaaaaaaaattacttcccctttgattatagaactttgtcacrtatcaagttgattaaatgaagataattcaagcattaagtaattatttaatgctttttgtgttcttctagtttgagttctatgattctatgatcttaagat

SEQ ID NO: 427358 - DNA, 201 bp, Homo sapiens
ctatgattctatgatcttaagatatttaccttaatatatagagagacatatatattaattattatataacacaaatcaattatttcaattaataatttgamgtttttttccatttacttggtacttagaatgcagggggaaatatgatataggatggttagtcatacataaggaaaattctttttgtacacttgacagtct

SEQ ID NO: 427359 - DNA, 201 bp, Homo sapiens
ctgcggacgctcggcaccgtgagcgccctggtcgccgcctccaggcccgcagacgacgccccggacggcccagcagaatgcggagcgcaccgagccccggycaggaagaaccacaagaagatgccagtgccgcctggggccccgcaaggtggcggggactgagggcggccgcacaagggcagcctaggcgaggtgcggaag

SEQ ID NO: 427360 - DNA, 201 bp, Homo sapiens
aaagggtgcccgggtgccgccagttagggctccggtactggagggagggggtgggcgcgggacgggcggagggtgggccacgtgcgtctggggagtgcggmtgggagccggggtccttgcgagagactgagtccggctagagaacagggtggagcccctttggaccttagagctgggcctttgggccttgggtctgggtca

SEQ ID NO: 427361 - DNA, 201 bp, Homo sapiens
tgacgaggcagggtctccacgcactggaatagtgtcaaaccacacacaagagcacagaacccagggacacagggcggctgagacactcagctggtgatggycctcaggatggtgtcaaccagtatgtaatcacattccacacggcaccaattggacagcggcctccggtcagcctcactctgactgcaaccccctctcact

SEQ ID NO: 427362 - DNA, 201 bp, Homo sapiens
acacacaagagcacagaacccagggacacagggcggctgagacactcagctggtgatggccctcaggatggtgtcaaccagtatgtaatcacattccacasggcaccaattggacagcggcctccggtcagcctcactctgactgcaaccccctctcactggacagcatcacctggacacagagcctcacctagtctgtgt

SEQ ID NO: 427363 - DNA, 201 bp, Homo sapiens
gatgtccatggtgccgcaggctgcacacacgtttccttgcacgtgcacatgtctacacggactgcacacttgcacacctctggtgcacatgcgtgccagcrccaccccagtgtacacatgcacgaacactgggtgcacacacggactctgagggtgcatatctgtgtcctcgcccccgcttgcacgcccacggccacacat

SEQ ID NO: 427364 - DNA, 201 bp, Homo sapiens
tctctactaaaaatacaaaaattagctggttgaggtggccggatacctgtaatcccagctactcgggaggctgaggcaggagaattgcttgaacttgggakggggaggttacagtgagccaagatcgtgccattgcactccagcttgggtgacagagcaagactttgtctcaaaaaacaagcaaactgtctgggtggggtg

SEQ ID NO: 427365 - DNA, 201 bp, Homo sapiens
ggggggcaagggagggtgggctccatgtgagttgggcatgccctgcctggagggtgctccccaggtgcccacccaggctgccctgctgatgtccatggtgycgcaggctgcacacacgtttccttgcacgtgcacatgtctacacggactgcacacttgcacacctctggtgcacatgcgtgccagcgccaccccagtgta

SEQ ID NO: 427366 - DNA, 201 bp, Homo sapiens
agggtctccacgcactggaatagtgtcaaaccacacacaagagcacagaacccagggacacagggcggctgagacactcagctggtgatggccctcaggayggtgtcaaccagtatgtaatcacattccacacggcaccaattggacagcggcctccggtcagcctcactctgactgcaaccccctctcactggacagcat

SEQ ID NO: 427367 - DNA, 201 bp, Homo sapiens
aaaggtcacatgtaatgtgattccactcatatgaaatatccagaataggtcaattcaaagcgacggaagatacattaggggttgccaggggccagggaacrgggaaatggggagtgactgctaatgggttctgctttagggtaataaaaatgttctggaattaaacagcagtgatgattgcacaccattgtgaatgtacta

SEQ ID NO: 427368 - DNA, 201 bp, Homo sapiens
cctccctggcagccttcgtgagactcccccgccccactgggtgtgaggtcccgcagtggggggcaagggagggtgggctccatgtgagttgggcatgcccygcctggagggtgctccccaggtgcccacccaggctgccctgctgatgtccatggtgccgcaggctgcacacacgtttccttgcacgtgcacatgtctaca

SEQ ID NO: 427369 - DNA, 201 bp, Homo sapiens
tgagtgaaagaagccagacacaaaaggtcacatgtaatgtgattccactcatatgaaatatccagaataggtcaattcaaagcgacggaagatacattagrggttgccaggggccagggaacagggaaatggggagtgactgctaatgggttctgctttagggtaataaaaatgttctggaattaaacagcagtgatgatt

SEQ ID NO: 427370 - DNA, 201 bp, Homo sapiens
gccataaaaaaataacattctaatacgtgctacaacatggaagaaccttgaagcatgatcctgagtgaaagaagccagacacaaaaggtcacatgtaatgwgattccactcatatgaaatatccagaataggtcaattcaaagcgacggaagatacattaggggttgccaggggccagggaacagggaaatggggagtgac

SEQ ID NO: 427371 - DNA, 201 bp, Homo sapiens
cggggccgggggtggcggcccgggggtccccgaggctgggccaggtccggggtgggggccgcgggctggaaggacggggtccggcctcggcgccgcggccmcgaaggggttaatgagcgggtttttttgcagaaacgcgggtaccgagagtaggtggaggtatcgggccgcctccgcccccgcctcgcggactgggctcag

SEQ ID NO: 427372 - DNA, 201 bp, Homo sapiens
gagaatcttgccctgagtgacctccagctggggaactcaccctccatctgcgccagggagagcttggtcattgtctgcagggacccaactaatcaggacgkgcttccacgaggagacagatttgaaagtatgctctcttcgggaagcagtagctttaaactggactagctcttatataatgggcactgtgtccctaacgaa

SEQ ID NO: 427373 - DNA, 201 bp, Homo sapiens
aggactgcctgttggctgggaaccgtaaatctgcttgggtttcatgagaatcttgccctgagtgacctccagctggggaactcaccctccatctgcgccarggagagcttggtcattgtctgcagggacccaactaatcaggacgggcttccacgaggagacagatttgaaagtatgctctcttcgggaagcagtagcttt

SEQ ID NO: 427374 - DNA, 201 bp, Homo sapiens
gtgctgtggtgactcggcccctgggctcaccctctggtgctgtgtgcacctcaagagcaggatggaaaggtcccctccccacagcctggctgtcagacccycggcacagaggtgcaccgtgcagcctcccgtcatttcccatttgcctgcccaagctctcagtgtctgagctctgtcctctttctggaagacagccaggtt

SEQ ID NO: 427375 - DNA, 201 bp, Homo sapiens
gttattttgtaaaactcttttgaggaggaccgtcctggtcagcggccctcaccatcgagactctccctgcacatgggtgctgtggtgactcggcccctggrctcaccctctggtgctgtgtgcacctcaagagcaggatggaaaggtcccctccccacagcctggctgtcagacccccggcacagaggtgcaccgtgcagc

SEQ ID NO: 427376 - DNA, 201 bp, Homo sapiens
tggagacacagacatgcaggcgcacaaagagatccctcaaggctgacacccaggaaggggcctctcacttgtgggactcccgagatgcagtggccaacackagtgtagtgcccagttcactgctggataagacagaggcctgttctggtcacacatgggaggcagaacccagagactgggcccaggagcccttctgctgac

SEQ ID NO: 427377 - DNA, 201 bp, Homo sapiens
ggatcgcttgagcccagaaattcaagaccaatctggacaacataggaaaaccccatctatactaaaaaagtttttttttaaattacctgggcatggtggcrcatgcctgtagtccaacctactcaggaggctgaggcgggaggattgctttagtccaggagatgaggctgcagtgagttgtgattatgcctctacagccca

SEQ ID NO: 427378 - DNA, 201 bp, Homo sapiens
ctgtgctctggcttcttgacctcaggctgcctcactggcccatcattaatacgtcgatggtgagcgcactggtgtacagcgagggggctccacttccgagmcccctggagaggcccgtcctggtggagttcaccctgctggagatggagaagcgaaccaagcctgtctgtgtgttctggaaccattccctggcgtaaatgt

SEQ ID NO: 427379 - DNA, 201 bp, Homo sapiens
agaccactgtcctgcagtgtccctgggagggaggttctgggtctgccacaggacaccacaccctggaacattgcacaccctttgcctggccttttcccagygtttctgtcagaaatgccccctcccaagcatacaccccatcttgtgccccgagggactcgattctctccccacacacccgacccgaggctgtcatgggta

SEQ ID NO: 427380 - DNA, 201 bp, Homo sapiens
caatggctcagcttctcttccaacctgtccataaacctccaggcagagatcacaaaactaacagctctttctgcaaatctggactctctcctgcaccttcktcaccgtccaggcctccctgtcatccgtcctggggacctcagagatctcttcatttcacaggtgaagacttggctcagagagggcagagcccctgggtca

SEQ ID NO: 427381 - DNA, 201 bp, Homo sapiens
gctgcggcgcgtcacgggccgccggcgggacccggggccgcaatccaatgggccgggccaggaagacgcccgagccccgggccggctggctcgcctgctcsgccagctccgggccgaagcggcttcgcggtccgaggtgccgcggctgctgaagctggtggagcgtgcgggggccggggcggcgggcgcgggcgagaggac

SEQ ID NO: 427382 - DNA, 201 bp, Homo sapiens
cagctgctggaggtcccagaggacgggtgactcagcaggaatgggggagtctgaggggttgacagagtgcccaattctcacctcctcctgcaccttccagrgagacgggctgcagggagtgattgagtggatgaacatgactagagggacccagtcttctcctcagcagctgcttgaggacagtattagcggtcccctcaa

SEQ ID NO: 427383 - DNA, 201 bp, Homo sapiens
ctctctccacataccaggagggagtggcaggaaggggagacactgtgccggactcagggagtcaagagcgtgagcacccccaggcttcaatctgctgaacrttgtgcatctgggggcgcccgtgcagcaggaacactctccccatcacaattcctctgggcacagtggagagccatgagtgggggctgtcctgggggctgc

SEQ ID NO: 427384 - DNA, 201 bp, Homo sapiens
taccgaggaggggctcaggccagggtgggcttcaggcccctcacctcctcctgggagccttcctggattgtcccttgcttgcctggatccccggcactgtrtcctcaatttgtcccagctatcacaaccttgttgagatgttgcctttatttgccttctaccagggcccagatgaggccagctcggggacatgccagaagt

SEQ ID NO: 427385 - DNA, 201 bp, Homo sapiens
gccatgccctttgtgaggacctgcccacaacgtcgtcgttcccgcagggtcccctgggaaccgggctgcccgagacccggccctgccggggttccctgcgscccagaccggaacccccagggctttggtcgttcccacagccgtcccgcgggccccctccacggtgcgtcgcctgggccccagcggtcgctaggctgcagc

SEQ ID NO: 427386 - DNA, 201 bp, Homo sapiens
ccgtgggcccaggcgcgtagtgcgtacagagccagcgaggtgctgcggcgcgtcacgggccgccggcgggacccggggccgcaatccaatgggccgggccrggaagacgcccgagccccgggccggctggctcgcctgctcggccagctccgggccgaagcggcttcgcggtccgaggtgccgcggctgctgaagctggtg

SEQ ID NO: 427387 - DNA, 201 bp, Homo sapiens
tgacctgcaggggccagatcccggtggacccggggacacagcttccaggggctgtcttgccatgtcccttcccagatctgcctggattcatgccaggccamcctccacaatttgctgagggaggccccagagtccagggcacccagagtgctaactagcccctgggggtacagggagaacagcatgctgtgtgggggatac

SEQ ID NO: 427388 - DNA, 201 bp, Homo sapiens
caccgggacacaaacatctctccagagtcaccctccacacagactccacagcagaactcccagggaggcactggggcatggcttcagagcaccaggcagcsctccgcggtgcccagcacccgctcagccagggcagcctgcagcggagcctggagccagcagcttctcatctcttggcctcgggaaatgtagctggagtca

SEQ ID NO: 427389 - DNA, 201 bp, Homo sapiens
ctctgggcatggaggtctctctgcagaggcccaggcctgggcacgaagggagagaggcctccattgtcccacaggggcctaaatgcagactgtgcatcccyggtgccctcaggaacccttctctgatcatcaggattctcttggactctggggtccttgtcctgctcaggcatccctgcccccctcttcaggagggccctc

SEQ ID NO: 427390 - DNA, 201 bp, Homo sapiens
gatcgctgaagattcctgctgagggttgaggctgctgggctggaggactgtatggtccatgcattgtaatgtccccttctctccctggcccggagccccargagctatccggactctctccaagacctggttctggcccagcaaagaggtctcggcaggggagcaggattcccggcccagcagctggctcaggaggtgaca

SEQ ID NO: 427391 - DNA, 201 bp, Homo sapiens
agcacagaacccagggacacagggcggctgagacactcagctggtgatggccctcaggatggtgtcaaccagtatgtaatcacattccacacggcaccaaytggacagcggcctccggtcagcctcactctgactgcaaccccctctcactggacagcatcacctggacacagagcctcacctagtctgtgtcccgtggac

SEQ ID NO: 427392 - DNA, 201 bp, Homo sapiens
acccagggacacagggcggctgagacactcagctggtgatggccctcaggatggtgtcaaccagtatgtaatcacattccacacggcaccaattggacagmggcctccggtcagcctcactctgactgcaaccccctctcactggacagcatcacctggacacagagcctcacctagtctgtgtcccgtggacacaacttt

SEQ ID NO: 427393 - DNA, 201 bp, Homo sapiens
tcagctggtgatggccctcaggatggtgtcaaccagtatgtaatcacattccacacggcaccaattggacagcggcctccggtcagcctcactctgactgsaaccccctctcactggacagcatcacctggacacagagcctcacctagtctgtgtcccgtggacacaactttgctttggacagtgacaccaagaatactc

SEQ ID NO: 427394 - DNA, 201 bp, Homo sapiens
aaagaacgggcgcgagtgacagagcgaccttaacggattagcaccttaacggattagcaccttaacggattagcgtggcaaggtatgcaagcaagtcaccwgctggcaatttgggggtggggagggggaggtgcgcaatacatactggaaggagaggcacccacacaaaggacgcaggaagaacaggtgcgcacaaaggca

SEQ ID NO: 427395 - DNA, 201 bp, Homo sapiens
tgactatgatggagacagtagcttccagtgtaaaatgtgagctcagttcctgactcgtgtctagcgggtggtgcctggtctttggctggcgatgctccatktcacctatgcccagaaactgggccatgccctttgtgaggacctgcccacaacgtcgtcgttcccgcagggtcccctgggaaccgggctgcccgagacccg

SEQ ID NO: 427396 - DNA, 201 bp, Homo sapiens
ggggatgaagatgccgtggggcccacagatccaagctctcggagtgtgattctgtctcccctagaaacacatccatggcatgtcctcagggcatttgtgcrtgggattaagcaaatgtttcctaatcatgtttgtccctgtgctctggcttcttgacctcaggctgcctcactggcccatcattaatacgtcgatggtgag

SEQ ID NO: 427397 - DNA, 201 bp, Homo sapiens
cgcggagcttcgagcggagctggacgctctgcgcgcgctgctgccgccgccgccgccgtccccgcctgcccgccgcgagccccgcgccgtcccccgcgccrcgccccgcggcccgaccctgctgcggacgctcggcaccgtgagcgccctggtcgccgcctccaggcccgcagacgacgccccggacggcccagcagaatg

SEQ ID NO: 427398 - DNA, 201 bp, Homo sapiens
ggacagggtgaggagataatggcctggactacatggaaggacgtcgccctgagccattgaaaagggctgtggggtccatgaccactcctggctttcccttkactatgatggagacagtagcttccagtgtaaaatgtgagctcagttcctgactcgtgtctagcgggtggtgcctggtctttggctggcgatgctccatgt

SEQ ID NO: 427399 - DNA, 201 bp, Homo sapiens
actcccagctacgtgtgggggtccccataccagacaaaggtccctgaccttagtcttgcccgagaggccgacacagcccagctttggggtctggctttacycacaagaggccacaccttgccacagcactgtttatctggcctgtttcagaagcaccgtcagagtggcgaaggcaggaggtggtgcacgagagtctacgtt

SEQ ID NO: 427400 - DNA, 201 bp, Homo sapiens
cttgagctcaggggctcagggttgtgctgacacgcctgcctgtccacccctcaccgacacctctgcagtcctcctcagggcccaacaggacccccaggacyccgctcccattctgcccttgctcctgccaacctgtcttctctatgcccatgactttggaaccctctgccacaagtgccagcccccacatctgtagcccct

SEQ ID NO: 427401 - DNA, 201 bp, Homo sapiens
ggtccatgcattgtaatgtccccttctctccctggcccggagccccaagagctatccggactctctccaagacctggttctggcccagcaaagaggtctcsgcaggggagcaggattcccggcccagcagctggctcaggaggtgacagctttgggattcgcatctgagcatcctcctactcttctcctgggaactctgtt

SEQ ID NO: 427402 - DNA, 201 bp, Homo sapiens
aggaagaaagattagttcaaagacaattttacttttattagcaggatataaaagaagattgaaaatataagaatatgttgagtttatttactggctaataraggagggacaaattggcaggaaagtggtatgactttcattgtgtgactttttggcatcatagttgatggccagtttttgtgaacagaaacaagtcttaaa

SEQ ID NO: 427403 - DNA, 201 bp, Homo sapiens
ctccggtgttgtgtagggtgctgagcagatggatgccatgctgcatgatgggcaagggtggcccactagcactgtggcaagggccctgggctggggcttgrattggcaggccacacctcctgctcccctggccaccaccagaggctcatctatagagtggggaccagcaggttatccttgtaggttgtgtgagggtgaaac

SEQ ID NO: 427404 - DNA, 201 bp, Homo sapiens
atgttttttggcttgtggccccttcctccatcttcaaagccaacagctggtcaagttgtcacattgcgtcactctgaccataggttatctgcttttaaggycttgtgtgatttgattgggtccacctggaccattcaggatcatcttcctgtccttaaaattcttaatcacatctgcaaactctcttgccatgtaagtgaa

SEQ ID NO: 427405 - DNA, 201 bp, Homo sapiens
catccctgcacttgagctcaggggctcagggttgtgctgacacgcctgcctgtccacccctcaccgacacctctgcagtcctcctcagggcccaacaggayccccaggaccccgctcccattctgcccttgctcctgccaacctgtcttctctatgcccatgactttggaaccctctgccacaagtgccagcccccacatc

SEQ ID NO: 427406 - DNA, 201 bp, Homo sapiens
ccatccctgcacttgagctcaggggctcagggttgtgctgacacgcctgcctgtccacccctcaccgacacctctgcagtcctcctcagggcccaacaggrcccccaggaccccgctcccattctgcccttgctcctgccaacctgtcttctctatgcccatgactttggaaccctctgccacaagtgccagcccccacat

SEQ ID NO: 427407 - DNA, 201 bp, Homo sapiens
tggcgtgatcacggctcagtgcagctttgacctccttggctcatgcgatcctctcatttcaaccttcccaatagctgggactacagacatgtgccactttrcccagttaaatttttaaattttttgtacagacagattctccttatgttgcccatgatggtgttgaactgggctcaagtgatgcacctcggcctcccaaaa

SEQ ID NO: 427408 - DNA, 201 bp, Homo sapiens
atcacctgcttcacggccatccctgcacttgagctcaggggctcagggttgtgctgacacgcctgcctgtccacccctcaccgacacctctgcagtcctcytcagggcccaacaggacccccaggaccccgctcccattctgcccttgctcctgccaacctgtcttctctatgcccatgactttggaaccctctgccacaa

SEQ ID NO: 427409 - DNA, 201 bp, Homo sapiens
gctcaagccagggtccccatcacctgcttcacggccatccctgcacttgagctcaggggctcagggttgtgctgacacgcctgcctgtccacccctcaccracacctctgcagtcctcctcagggcccaacaggacccccaggaccccgctcccattctgcccttgctcctgccaacctgtcttctctatgcccatgactt

SEQ ID NO: 427410 - DNA, 201 bp, Homo sapiens
cttcggcctcacaaagtgctgggattacaggtgtgagccactgtgcccagcctgttttttaaagacatgttcactgcctgtaagaaatgcataataaggtkgggtgtggtggctcacacttgtaatcccggcactttgggaggccgaggtgggcagatcatttgagctcacaagttcgagaccagcctgggcaacatggcg

SEQ ID NO: 427411 - DNA, 201 bp, Homo sapiens
acaaacaaggtcatcaccaggtaatgagcttgttacccacatcaggcaaggccattgctgggtaatgagttggcctcctgcagagccacctgcgctgggayggttcccagagatctggctagccagtgccacaggaggccggggcacagttccagggcctagtgggcaaggcaggggtattcagggacaaggtgcacctga

SEQ ID NO: 427412 - DNA, 201 bp, Homo sapiens
ggaacagacaaacaaggtcatcaccaggtaatgagcttgttacccacatcaggcaaggccattgctgggtaatgagttggcctcctgcagagccacctgcsctgggatggttcccagagatctggctagccagtgccacaggaggccggggcacagttccagggcctagtgggcaaggcaggggtattcagggacaaggtg

SEQ ID NO: 427413 - DNA, 201 bp, Homo sapiens
ccccatgcagtgcagactgggatgctggtgcctgtggcacagactggtcagacccaccccaggctagacattccttgcagggagagctgaggctgctgacrccaggaacagacaaacaaggtcatcaccaggtaatgagcttgttacccacatcaggcaaggccattgctgggtaatgagttggcctcctgcagagccacc

SEQ ID NO: 427414 - DNA, 201 bp, Homo sapiens
ggtgcgtcgcctgggccccagcggtcgctaggctgcagcctggggctcccggccatcccgggcgctggcggcggtggaggcagcagggcggatggcgacgyccggccgcccgtgggcccaggcgcgtagtgcgtacagagccagcgaggtgctgcggcgcgtcacgggccgccggcgggacccggggccgcaatccaatgg

SEQ ID NO: 427415 - DNA, 201 bp, Homo sapiens
actcattgcaatggctcagcttctcttccaacctgtccataaacctccaggcagagatcacaaaactaacagctctttctgcaaatctggactctctcctrcaccttcttcaccgtccaggcctccctgtcatccgtcctggggacctcagagatctcttcatttcacaggtgaagacttggctcagagagggcagagccc

SEQ ID NO: 427416 - DNA, 201 bp, Homo sapiens
ggaggtctctctgcagaggcccaggcctgggcacgaagggagagaggcctccattgtcccacaggggcctaaatgcagactgtgcatccccggtgccctcrggaacccttctctgatcatcaggattctcttggactctggggtccttgtcctgctcaggcatccctgcccccctcttcaggagggccctcaacacgatct

SEQ ID NO: 427417 - DNA, 201 bp, Homo sapiens
tggaggtctctctgcagaggcccaggcctgggcacgaagggagagaggcctccattgtcccacaggggcctaaatgcagactgtgcatccccggtgccctsaggaacccttctctgatcatcaggattctcttggactctggggtccttgtcctgctcaggcatccctgcccccctcttcaggagggccctcaacacgatc

SEQ ID NO: 427418 - DNA, 201 bp, Homo sapiens
gacttctgacctctgggcatggaggtctctctgcagaggcccaggcctgggcacgaagggagagaggcctccattgtcccacaggggcctaaatgcagackgtgcatccccggtgccctcaggaacccttctctgatcatcaggattctcttggactctggggtccttgtcctgctcaggcatccctgcccccctcttcag

SEQ ID NO: 427419 - DNA, 201 bp, Homo sapiens
agatctcttcatttcacaggtgaagacttggctcagagagggcagagcccctgggtcacacagcccgtctccagtagggctggggaaaagaacccagggckctcttgttggcagtgttttaatgactggggggagggagagaatggctaatgaggctctagggatcagcacagccagctgctggaggtcccagaggacggg

SEQ ID NO: 427420 - DNA, 201 bp, Homo sapiens
ttgttggcagtgttttaatgactggggggagggagagaatggctaatgaggctctagggatcagcacagccagctgctggaggtcccagaggacgggtgastcagcaggaatgggggagtctgaggggttgacagagtgcccaattctcacctcctcctgcaccttccagagagacgggctgcagggagtgattgagtgga

SEQ ID NO: 427421 - DNA, 201 bp, Homo sapiens
cccccaacacatgcacacatgcactgacctgcaggggccagatcccggtggacccggggacacagcttccaggggctgtcttgccatgtcccttcccagayctgcctggattcatgccaggccaccctccacaatttgctgagggaggccccagagtccagggcacccagagtgctaactagcccctgggggtacagggag

SEQ ID NO: 427422 - DNA, 201 bp, Homo sapiens
cggagtcctcacgctctgctcacgttgcagaaggccccctggtaaggccagccagccggaggaccaccccgcagaccacacgcccagggcctggcaccgakggggaggccccgatcagcaggtgaaagcgacaccctgatgacactggctagttcaccttcactctggtcatcgtttactgtaccccggggcagctcccgc

SEQ ID NO: 427423 - DNA, 201 bp, Homo sapiens
cggggacacagcttccaggggctgtcttgccatgtcccttcccagatctgcctggattcatgccaggccaccctccacaatttgctgagggaggccccagrgtccagggcacccagagtgctaactagcccctgggggtacagggagaacagcatgctgtgtgggggatactactctctgcccatacctagggccctgtgg

SEQ ID NO: 427424 - DNA, 201 bp, Homo sapiens
gtgcagtagtgagggctccacagagggtggaagggctgcaggggaaggcagaccagcagggatgccatgagggcctcagatgccaggctgcagaggtggasgggctggccagctcctctccccagcctcctactgtaaaatgggagaggatcccagccctgctgattcatccactcactccatggcaagacagccactgac

SEQ ID NO: 427425 - DNA, 201 bp, Homo sapiens
cattggttgccatatgttttccctagacagaaaaataaaatctctcatagaagccgaaagttacgagtggtggcctgcaccagggctgagcagtgaaggcwtgacaatgaggacccgtgtgtgcaagccccctgaggcttggtagggcctaggagtgttctgggtgggctgaggaggccactgccctgacaaggctcaccc

SEQ ID NO: 427426 - DNA, 201 bp, Homo sapiens
gcaggatccctggctttgattacggcccagacgggtttggcacgggcctcacgccgctgcatctttctgacgacggagagggtgggactttccatttccasgaccctccacctccctacacggcatacaagtacccggacatcggccagcccgacgaccctccgccgccctacgaggcctccatccacccggacagtgtgt

SEQ ID NO: 427427 - DNA, 201 bp, Homo sapiens
ggcaaggagtaggttttatttctcttgaccacatggcctggcatggagcaggcatcaactttgcacttgagtattggcttgaagttacattggttgccatwtgttttccctagacagaaaaataaaatctctcatagaagccgaaagttacgagtggtggcctgcaccagggctgagcagtgaaggcatgacaatgaggac

SEQ ID NO: 427428 - DNA, 201 bp, Homo sapiens
tctgtacacaatgtatgctcattgcaggtcaaacatgtgttgacatcaaggacaacgtggtggatgaagggttctacttcacccctaagggggacgacccrtgcctgagctgcacctgccatggaggggagcctgagatgtgtgtggctgctctctgtgagaggccccagggctgccaacagtaccgcaaggaccccaaag

SEQ ID NO: 427429 - DNA, 201 bp, Homo sapiens
atctacatgttgtccatcttttctgtgttgtataatatgttccagattggggtgtgagtgataccatggtacatagacgcttactatgcccatgtgtcggyaccctgcacacacatttgaagttgggagctcgtttccgcagggttcctgtgcgccttggtggagcgctctccaggcgctcccccaggcccacaccagcct

SEQ ID NO: 427430 - DNA, 201 bp, Homo sapiens
atttgataattctattaaaaggttaaaacctttgagcaggtgcttcagattcttgtgttcaaaaaattctcaagtgttttttttgagacagggtttcgctstgatgcccaggctggagtacaatggcgcagtctcggctcactgcaaaggaccatccacctccgaggttcaagtggttctcccacttcagcctcccgagta

SEQ ID NO: 427431 - DNA, 201 bp, Homo sapiens
gggcctcacattaagatgttgaaaaatgtttctttcatctacatgttgtccatcttttctgtgttgtataatatgttccagattggggtgtgagtgatacyatggtacatagacgcttactatgcccatgtgtcggtaccctgcacacacatttgaagttgggagctcgtttccgcagggttcctgtgcgccttggtggag

SEQ ID NO: 427432 - DNA, 201 bp, Homo sapiens
actctagtgggcatgtctcacatgccccctccagctgcctccttcccattctaaggtaacaggtagcattcacaggcccacacggggaggctacctttttyggcagtgtggcccacacggggaggctaccttttttggcattgtatacatctgtacacaatgtatgctcattgcaggtcaaacatgtgttgacatcaagga

SEQ ID NO: 427433 - DNA, 201 bp, Homo sapiens
gacagtactgagtataaaacaagctagcaagagcacgtctagcccagcccagcccaccccagcctttctcctgcctggggacatggtgcaaagcagagggstcattggggtctgaggtgttggcccccccaaaaatacccaaaaaaccatgggaaatggatgtaagtcatttgttactcattctgaacccttccctaagaa

SEQ ID NO: 427434 - DNA, 201 bp, Homo sapiens
ttttttcggctgtgggaggcaggggcgggtcacacagtgtcatggctctcccagctgttatcctttgagctgctgttttagtggagggttggccagccccyactgcaaatgctcatgtaagtagaaaagggagagaggggagtgagctagctggcagcggaggccaggagagctgggcattggaagcagggcccaaagtga

SEQ ID NO: 427435 - DNA, 201 bp, Homo sapiens
tgtttttctttctagctttaattgtgaaacaaaattatatcatgagccacagctctatccaggttgaacccaccatacatagctgagaaaaaattgccttytgaatgctggtgcaccctggtcccttcctgctggttgttggtcctgtacagggcctgtgctcagctaggccccttggtaaggtagaggactagaaggtcg

SEQ ID NO: 427436 - DNA, 201 bp, Homo sapiens
gctctcccagctgttatcctttgagctgctgttttagtggagggttggccagcccctactgcaaatgctcatgtaagtagaaaagggagagaggggagtgrgctagctggcagcggaggccaggagagctgggcattggaagcagggcccaaagtgaactgcatgggagttgtgctgtgttgttaacccagagaatgaaat

SEQ ID NO: 427437 - DNA, 201 bp, Homo sapiens
aaaaattgccttctgaatgctggtgcaccctggtcccttcctgctggttgttggtcctgtacagggcctgtgctcagctaggccccttggtaaggtagagractagaaggtcgtcttccttctattgttggtacagctagctgggagaggcaagtgacttgtctaaggtcacacagctggtgagcagcagagcgtgggttc

SEQ ID NO: 427438 - DNA, 201 bp, Homo sapiens
cataaatggaattatattttttatttaatttttgtatttaacttattttgagatctttgtagatcagtgcatatataacttcattcttttttttttttttyctttggtaacaaaagatggagaggaaaggtgggaatgggtcggggcaagattgtcttaactcgttctttttttttttttttttttttttcctcaaatgga

SEQ ID NO: 427439 - DNA, 201 bp, Homo sapiens
gcaccctggtcccttcctgctggttgttggtcctgtacagggcctgtgctcagctaggccccttggtaaggtagaggactagaaggtcgtcttccttctaktgttggtacagctagctgggagaggcaagtgacttgtctaaggtcacacagctggtgagcagcagagcgtgggttcagacccaggtggagctggctgcta

SEQ ID NO: 427440 - DNA, 201 bp, Homo sapiens
cggagtctcgctctgttgccaggctggagtgcagtggggtgatctcggctcactgcaacctccgcctcccgggttcaagcgattcttctgcctcagcctcycaagtagctggaactacaggcatgcgccaccacacctggctaatttttgtatttttagtaaagatggggtttcaccatgttggccaggatggtctcgatc

SEQ ID NO: 427441 - DNA, 201 bp, Homo sapiens
tggggtgatctcggctcactgcaacctccgcctcccgggttcaagcgattcttctgcctcagcctcccaagtagctggaactacaggcatgcgccaccacrcctggctaatttttgtatttttagtaaagatggggtttcaccatgttggccaggatggtctcgatctcttgacctcatgatctgcctacctccacctccc

SEQ ID NO: 427442 - DNA, 201 bp, Homo sapiens
ccatgtttattaaataatattgagagtggtatttactgtaacctcagtatttataacaagcccctctttcattacactaattggtaaggaagcatctcaawtttgaacggttttattattttcctaggttttttttttttttttttaaaagatggagtcttgctgtgtcacctaggctggagtgcagtggtgcgacctcgg

SEQ ID NO: 427443 - DNA, 201 bp, Homo sapiens
ttcatttctgacagtcctgagccttcgttgatgtacttttgtcaaaactcttggtaaatcactttttaagtttcagtttcttcctggagacaaaaaaaaawaaataaataaaaaataaaaacaaaaaagagtttagatgttcaagggctatttgggcccaagtgctgacattgtgagcttgttggtttaacagggtctcat

SEQ ID NO: 427444 - DNA, 201 bp, Homo sapiens
ggtgagcagcagagcgtgggttcagacccaggtggagctggctgctagctcagggttctttctcttttgctttcagtaggcagctgtgctgagctgatcamatctcagggagctgagaagtgaacacagcaccttggctctggagtccagagttgttttttttttttttttttttttttgtttgcgatggagtttctgtct

SEQ ID NO: 427445 - DNA, 201 bp, Homo sapiens
aaatgttggagaagatatggatagtgtggaaattttatgtgcttctttacacccactctggaatagagacattatcttgcaaagctgaacattcttatttyctgtgatccaggatttctatttagggaaactctggaaaaatccttgcagaattgtttgtacagtttttccagagtgggtgtaaaggagcagataaaattc

SEQ ID NO: 427446 - DNA, 201 bp, Homo sapiens
tggagtttctgtctgtcacccaggctggagtgcagttgcgggatctcagctcactgtaacctccacctcctgggttcaagtaattctcctgtgtcagcctscagagtaactttgattacggcgcacgccaccatgctgggataattttgtatttttagtagagacggggtttcaccatgttggccatgtaggctggtctca

SEQ ID NO: 427447 - DNA, 201 bp, Homo sapiens
aaaaaagaaataattagccagatgtggtggtacacacttgtagtcccagcttctcagtaggctaaggtgggaagaatcacctgagtccctgaggtcaaggstgcagtgagccgagattacaccactggacatcagagtgagaccctgtttcaaaaaaaaaaaaacaaaaaaaaccccaaaaaacaccagtaaagactgtga

SEQ ID NO: 427448 - DNA, 201 bp, Homo sapiens
cctctcttggttgttggcataaggacgacccgattggcatttagtagtttcttgactctaagtggaatgcatcagtgacaacatttaaggaccccgtagawagctcttgactgattagatgtcttttccttggtatgctattagattttctcttatgtgctgttatgtttgggtgctgaggttttgatgaccgtcctcttt

SEQ ID NO: 427449 - DNA, 201 bp, Homo sapiens
tacctaagtatttcttattttttgatactattgttaatggtaatttttaaatacctgaacttacagtagagtttgtatagaattgacatcaattcttcctyaaatatttggaggaattttccattgaagctatttgtgcctggagtttcctttgaagatttttaactaaaaattcaattccttttagggctgttcagattg

SEQ ID NO: 427450 - DNA, 201 bp, Homo sapiens
tctctatgaaaaaaaaaaaaaaaaaaaaaaagaaataattagccagatgtggtggtacacacttgtagtcccagcttctcagtaggctaaggtgggaagawtcacctgagtccctgaggtcaaggctgcagtgagccgagattacaccactggacatcagagtgagaccctgtttcaaaaaaaaaaaaacaaaaaaaaccc

SEQ ID NO: 427451 - DNA, 201 bp, Homo sapiens
tgatcacactaaagtttggacccactctgttagacaagggaggaactgggcagaactgcctgcccatggctgggctgtaggctcagtctccttttagatgygtcagatttctagtcttgctttcttgcaggagttacttcattcagttgtaatattatccttaggactttaaatccctccgtattttatatgtgcttttca

SEQ ID NO: 427452 - DNA, 201 bp, Homo sapiens
gagcttgggagactaagtgacttagccaaagtcacacagcttttaaagtcatggagtgggtatttgaaacatgggcagcatagagttcatgctgtgatatygcacagcttcaagagaagtctctggctctttttccatctactccttgtctttctccttctgccttttctttttttttttaatttaattttattttacttt

SEQ ID NO: 427453 - DNA, 201 bp, Homo sapiens
tgagagtggtatttactgtaacctcagtatttataacaagcccctctttcattacactaattggtaaggaagcatctcaattttgaacggttttattattktcctaggttttttttttttttttttaaaagatggagtcttgctgtgtcacctaggctggagtgcagtggtgcgacctcggctcactgtaacctctgcctc

SEQ ID NO: 427454 - DNA, 201 bp, Homo sapiens
caacgtaacaaaaattcatcatatttatataatctatctgtaacagttgaaaattgaaaattttgagaaaagtgccattaataatagcaccaaaaaaaatraaatacccaattataaataatataaaatatgtgcacattctgtttgctgcaaactgtaaaaccatgatgacaaaaaggcttaaataaaaggaaagatacc

SEQ ID NO: 427455 - DNA, 201 bp, Homo sapiens
ttcatcatatttatataatctatctgtaacagttgaaaattgaaaattttgagaaaagtgccattaataatagcaccaaaaaaaatgaaatacccaattawaaataatataaaatatgtgcacattctgtttgctgcaaactgtaaaaccatgatgacaaaaaggcttaaataaaaggaaagataccatgttcatggatca

SEQ ID NO: 427456 - DNA, 201 bp, Homo sapiens
tcacatgattgcatagaaaatcctagggaatctacaggaaagttattagaactaataagtgtgtttaagcaaggtctccagatataaggtcaacgtaacaraaattcatcatatttatataatctatctgtaacagttgaaaattgaaaattttgagaaaagtgccattaataatagcaccaaaaaaaatgaaatacccaa

SEQ ID NO: 427457 - DNA, 201 bp, Homo sapiens
ggaccagcttcctgcaagggatggtggtgggtggcagcagatcccagacacctgtgtgggccaggctgcagagcagggtgggggctgtgaggggctggccrggagggaggtgcatcaccggggccttgtgctgttagctttcagagacagcctatggtaatgacaagcaggcagcccaggcgcagtggctcacacctgtaa

SEQ ID NO: 427458 - DNA, 201 bp, Homo sapiens
tgagccactgtgcctggcctaactcattcttttttagaaatctttttactttggaaatatttcaaacctacataacagtaggttgacttggcaagtggaamccccttcacctggccttttcaggatgggagcgtgtcgccttctgacatgtttccatcaacttgaaattcctttttaccaggcacatcttgtaccttacct

SEQ ID NO: 427459 - DNA, 201 bp, Homo sapiens
gtgctggcagctgcagctggcatagagctccctatttgtgtggctcaacgtgcaaggggccccacagcatcccggagctccacggaggtgaccatgtgccrctgcctgcttgtgcccagttaaatggattcgggaactctgttagcggatttaaatagtggtcacaaaacaaatagtaacaataacaataattcttctgct

SEQ ID NO: 427460 - DNA, 201 bp, Homo sapiens
tcgggaggctgaggcaggagaattgcttgaaccaggaagtcaagttgcagtgagccgagatcgcaccactgcactccatcctggtgacagagcgagactcygtctcaaaaaacaaaaaacacacagtcattgatggttgcatccctcctgccgctgagatctctgtctctgtctctgtgccctgcaggttgtgggttggct

SEQ ID NO: 427461 - DNA, 201 bp, Homo sapiens
tatctctaagaaggataaatgaggagtgatgggcctggggacagggttgaaaagggtcaaggcctgggtggccggcttccctggagaaaagagggccccayagaggcggggccatgcctggctgctgggacagggcaggagcagaggtgggggctgcagagcccagcagactggggccacacctgctgtcccgatcctgct

SEQ ID NO: 427462 - DNA, 201 bp, Homo sapiens
taatcccacctactcgggaggctgaggcaggagaattgcttgaaccaggaagtcaagttgcagtgagccgagatcgcaccactgcactccatcctggtgayagagcgagactctgtctcaaaaaacaaaaaacacacagtcattgatggttgcatccctcctgccgctgagatctctgtctctgtctctgtgccctgcagg

SEQ ID NO: 427463 - DNA, 201 bp, Homo sapiens
tccagctgccgccagggtcacactcccttgccctgccccttccctgtctgttgggctgtactttgtgcctgtggcttgagctaggatttgggttcttttcrtaaacacatcccagtcctgctgttgatgtcttaagtatctctaagaaggataaatgaggagtgatgggcctggggacagggttgaaaagggtcaaggcct

SEQ ID NO: 427464 - DNA, 201 bp, Homo sapiens
cctgcaggttgtgggttggctatcagtatgttatcactggccggaaccgctccttggaaggtcgctgggaggtggcattcaaaggtgagcccttctggtgkgtgggagtgtttgaagctgggcagagtcaccctgattcggggcctcccctcctccctcttacccagtgctgcctggcccgtaggggtgctgtgcagggag

SEQ ID NO: 427465 - DNA, 201 bp, Homo sapiens
catgggcagcatagagttcatgctgtgatattgcacagcttcaagagaagtctctggctctttttccatctactccttgtctttctccttctgccttttctttttttttttaatttaattttattttactttaagttccaggatgcatgtgcagaacatgcaggtttgttacataggcatacatgtgccatggtggtttgc

SEQ ID NO: 427466 - DNA, 201 bp, Homo sapiens
cgtttctaatgagaaatctgctgtcatctagatctttgtttttctgtgcatgtcttctttttctgcctgcttttaggattttatcgctgattttaagcaawtcaattccaatgtgacttggaattgtattgtttgtatttctggtgcttgtggttcattgagctacctggatttgtgggtttatagttttcatcaaattgg

SEQ ID NO: 427467 - DNA, 201 bp, Homo sapiens
gtttccctttgggcccctctgttctagtgactgctggtcagtgtgtctcccctacctcacaccgatggtgggacaggcccgtgtctgcctttgtgagatgkgccctgcaccttgcatataccaggttcccagccacagggggcagtaggtacaacaggtgtcatgtggggcaggctcctccttcaaaatctgaggcccggg

SEQ ID NO: 427468 - DNA, 201 bp, Homo sapiens
cataactcactgcagccctgacctcctgggctcaagtgatcctcctatctcagcctccggagtagctaggaccataggtgcatgccaccgtgtctggcaamtttttctattttttgtggagatgaggtctcactatgttgtctggggtggtctcaaactcctggcttcaagcgatcttcctgtctcagcctcccaaagttc

SEQ ID NO: 427469 - DNA, 201 bp, Homo sapiens
aagtaataaagatcgggcaaaacaaagcgagtcgactgcctaccacacagcctgccttggatcagagcttcctgcaaacacctgtgtggttttccaggccrctcactgcagccctgttgcccacactccggttgccacattccagctgcagccctgaatgttcttccacccacctgggcccagtgcctccctgatgacaaa

SEQ ID NO: 427470 - DNA, 201 bp, Homo sapiens
tttctattttttgtggagatgaggtctcactatgttgtctggggtggtctcaaactcctggcttcaagcgatcttcctgtctcagcctcccaaagttctgsgattacaggcattagccaccatgcccagccccattttaacctttttttttttgagacggagtctcgctctgtcacccaggctggagtacagtggtgcagt

SEQ ID NO: 427471 - DNA, 201 bp, Homo sapiens
cttttggcctgaaaaacttcctttagtgtttcttataaggtggatctgcaaacaacttctctcacttgttgtttgtctgggaaagtttattttactttcawttttcagaagatatctttgctggatatggatcttggttgatggttttctgtgagcagttatcccactgccccagcctctgttgtttctgctgagaagtca

SEQ ID NO: 427472 - DNA, 201 bp, Homo sapiens
gctgggtgcgtcaggggatgcgcattttctctgccatggcttgttaaggattggagtgacaggcttcacgcccaaccacagcagaggcacatttgtgaaaygatacctgagttgaccgtgcggctgcccacaggggctcactgttcccctacacagtccatcagggagttgtggcaatccgagtcccaagtgtaccttata

SEQ ID NO: 427473 - DNA, 201 bp, Homo sapiens
gactgtggtgagcacaaggctacatttgcagccaagcccaccagaggacccagagctagagggtgatgcttggaccccattctgcagggcagtttctcctygtatagggtgcatgtctgtttagggccatgagaagcactggttgagtgcttatcaagttccctgtgcccggccacataactttaaacccccagcttagtg

SEQ ID NO: 427474 - DNA, 201 bp, Homo sapiens
gtgtatgccagggctgggtgcgtcaggggatgcgcattttctctgccatggcttgttaaggattggagtgacaggcttcacgcccaaccacagcagaggcrcatttgtgaaatgatacctgagttgaccgtgcggctgcccacaggggctcactgttcccctacacagtccatcagggagttgtggcaatccgagtcccaa

SEQ ID NO: 427475 - DNA, 201 bp, Homo sapiens
atgaggtctcactatgttgtctggggtggtctcaaactcctggcttcaagcgatcttcctgtctcagcctcccaaagttctgcgattacaggcattagccrccatgcccagccccattttaacctttttttttttgagacggagtctcgctctgtcacccaggctggagtacagtggtgcagtcttggctcactgcaagct

SEQ ID NO: 427476 - DNA, 201 bp, Homo sapiens
aaatcatatactatttgcctcttttgtgtctgtcttctttcacttagcataatgttgtccaggttcattcatgttgtagcatgtgtcagaattttcttccyttttatggctgatggctgatcacattcacttttgttttttattttttgtctcactctttcacccaggctggagtatagtgatgcgatctcggctcactgc

SEQ ID NO: 427477 - DNA, 201 bp, Homo sapiens
tataacccacataaataaaagctctttggggtcttcaataattttaagtgtattaaggtgtcttagaatgaagaagtctaggaactgctgatgtggcaggtttttttttttttttaaacggagtctcgctctgtcgcccaggctggagtgcagtggcacgatcttggctcactgcaacctccgtctcccggattcaagcga

SEQ ID NO: 427478 - DNA, 201 bp, Homo sapiens
tctgctgtgggtctgatagatgcagatgaggcaggcgagatgctgggcctgtatgtccctgggaagggggcacagctgttgctgtggctgcctgctggccyggcacaggtcttgcaggtctcagagcttcctgagagctgtcctcctgcccatggcagggcaccatgtgtccacaggcccacagcataggcctgcctccag

SEQ ID NO: 427479 - DNA, 201 bp, Homo sapiens
gtccggctaatttttttgtgtttttagtagagacggggtttcaccatgttagccaggatggggctgtccttatgttggtactgtggctggtatgttgtggrcatggattgtttcataaagtgtcaacaatccattggctaagaggagctggcctgcctctgccatgctacagcaaggtgacagtcatcaccagaaggcctg

SEQ ID NO: 427480 - DNA, 201 bp, Homo sapiens
gatcaagccttctcatcctggcccatggcaggcagttgggtatggtggcttaagagcatgggctctagagccacactgcctaggctcaatctgttctactsctcactcttcagtttcctcatttggaacatggacatcgtaacagagctttatagagatgttgtgaggattaaaatgggtaagtataaaattctaaaaagt

SEQ ID NO: 427481 - DNA, 201 bp, Homo sapiens
aggctggtctcaaactcctagcctcaagtgatcctcctaccttggcctcccaaagtgctgggattataggcatgagccaccatactgggtcaagggtgacttttttttttttaaagacagaatcttgctctgtcgtccaggctggagtgcagtggtacaatctcggctcactgcaacctctgcctcctgggtttaagaaat

SEQ ID NO: 427482 - DNA, 201 bp, Homo sapiens
tcaagaaccgagacactatcaccaaaactggagactctgggaataggatgtcatgtgttaagcatcagaatgtcccctccaacaagctaagagtgtctackcttgccaccctgtcatcattgtgcttgaggtcaaagccagtgccagaaggcaagaagaaatgaaaaaccatccaggccagaggggaagaaatgaaaccat

SEQ ID NO: 427483 - DNA, 201 bp, Homo sapiens
gtctgacagaagtgtcagcccagagggacaggttggtgtggtgagggtgagacatgccacggagcacaccaggggtctcatggggatgccgaatgtggccsaggggtaggcagcggggcacaggtgtgtgcactcagggacggcaggcccagcctgggggtggggggctcaggagccaggcagcctgcccccagtgacttg

SEQ ID NO: 427484 - DNA, 201 bp, Homo sapiens
agatagagttcaggaaccctgaactgaaatgtgaaatgtgaggtggtttgtgcacagggcttattggtcgggagagagctccctcaggaggtggcagagtrcagtggctctgaggagtgtctgccacacagagagtgctctttgctgttctgatgggatcagagggactgcgtatgacttgctgagagcccccgaaacagc

SEQ ID NO: 427485 - DNA, 201 bp, Homo sapiens
cccacctcagcctcctgagtagctgggactacaggcatgcacaccaccacatctggcttatgttttgtatttttagtagagctgggatttcaccatgttgsccaggctggtctcgaactcctgggcttaagtaatctacctgccttggcctcccaaagtgttggggtaacaggcgtgagtcaccacgcgtagtcagtggaa

SEQ ID NO: 427486 - DNA, 201 bp, Homo sapiens
acaaaaattcatcatatttatataatctatctgtaacagttgaaaattgaaaattttgagaaaagtgccattaataatagcaccaaaaaaaatgaaatacscaattataaataatataaaatatgtgcacattctgtttgctgcaaactgtaaaaccatgatgacaaaaaggcttaaataaaaggaaagataccatgttca

SEQ ID NO: 427487 - DNA, 201 bp, Homo sapiens
gtgcacagggcttattggtcgggagagagctccctcaggaggtggcagagtacagtggctctgaggagtgtctgccacacagagagtgctctttgctgttmtgatgggatcagagggactgcgtatgacttgctgagagcccccgaaacagccatggtgctttggacagggctgggattgttcatacacgttttgctcttt

SEQ ID NO: 427488 - DNA, 201 bp, Homo sapiens
catcttcagttgcttccagaatagacccggcttgacagatggatcaagaagggagaaaaaccttccctattggagaacttctgacacttcattgtctgctrgcagaatatgggaagattttgagctgtgcagttcattaggcatttagtgcatgcctccatgtgtggggtgttggtgacatggagtatggggcagcaataa

SEQ ID NO: 427489 - DNA, 201 bp, Homo sapiens
aggttcagatgccctcgtgtatcagtctggggagcagggtgtcctccggtggctggtgacggcccagcccaaggctcccgtcagagtcctgcgcacacctsatgtgtggacatatgggaggggcacctggaaacttgccgccaccctgtcgaggtgaggactggatctgctggggtggcagggggtgaggagtagtgtctt

SEQ ID NO: 427490 - DNA, 201 bp, Homo sapiens
ggaacacactgttaaggaaatgaaaaaataagcccctgactgaatcaaaacaagtatttgcaaaacacagatcaaaggtctgtattcagaatacataaaarctcaataataagaaaacaaaacaatgctattgaaaaatggctttagaagaagatgtaaattattaaactttatcaaagaagatataggatgacagtcagg

SEQ ID NO: 427491 - DNA, 201 bp, Homo sapiens
taactgtacactctttttttttttttgagacagagtcttgctctgtggcccaggctggagtgcagtggcacgatctcggctcactgcaagctctgcctccygggttcacgccattgtcctgcctcagcctcccaagtagctgggactacaggcgtccaccaccacgcccggctaattttcaccatgcccgactaatttttt

SEQ ID NO: 427492 - DNA, 201 bp, Homo sapiens
tgcattttttagatttttatataaatgttgtcatacagtaggtattcttttgagtacatactggcttcttcactcaatataattattttgagattcatccrtgctgcggaatgtgttaatagcttattcctttttattgctgagtagtattccattgtatggctgtacacaacttaccaatttgcttcttgatagacactg

SEQ ID NO: 427493 - DNA, 201 bp, Homo sapiens
gcacagtgcagggcttgtttctggtcaagagctggctgggtgcatgggctgcatgggctgcacatgcttgcctcttggccttctcctcctcctctgcctgsggtagctgttgcttcagtcactctgagctggtcattgttcttagtgcccttgtcccctacaggtccctccctgtaggctgacttctggctgacctctggc

SEQ ID NO: 427494 - DNA, 201 bp, Homo sapiens
ccaaagtgctgggattataggcgtgagcctctgcacacggccaaatttgagttttcatatatgtataaatctgtgaaaccgtcaccacagtcaagataacraacacagcgtatcgtcaccccaaacattttctcgtgctcctttgtaatccctcccacccccatccctttctgtcttgatagctgcaagtgcattttttag

SEQ ID NO: 427495 - DNA, 201 bp, Homo sapiens
tgtgaagtttgtctttctgtgcctggcttatttcacttaacataatgtcctccagttccattcatgttccatttttatggcaaaataataagaagttagaratttttaataaaactgaagacctagaatacactgaggaggaatggagggttccaggttcttggtctaatggttaattgtggctgaggaagacagacatta

SEQ ID NO: 427496 - DNA, 201 bp, Homo sapiens
aagcaaggtctccagatataaggtcaacgtaacaaaaattcatcatatttatataatctatctgtaacagttgaaaattgaaaattttgagaaaagtgccmttaataatagcaccaaaaaaaatgaaatacccaattataaataatataaaatatgtgcacattctgtttgctgcaaactgtaaaaccatgatgacaaaaa

SEQ ID NO: 427497 - DNA, 201 bp, Homo sapiens
acaaacctgtagtatatttggtaggcagtgccaccccaaagtggctggctccttgcatgcctgcccatctcggcagaatgggcattgtgaggctggggctkctgtgcctaaaggtctcagtcctgttcgtttgtttagtcagctgccacagctcttgcatgatctgggggtgcagaaaagacttgcatttgacccctgccc

SEQ ID NO: 427498 - DNA, 201 bp, Homo sapiens
cctctttctctctctcctctccatttgttactcctgtttcacatatgttggtgtacttaatggtgtttcacatttctctgggagctctgttcatttctgtycattcttttttctctattttagccagggaataattgtatgtgagtatcttgccctgggagttcctgaccacatgggtgacctagatttgatcccaatctt

SEQ ID NO: 427499 - DNA, 201 bp, Homo sapiens
atggaggtggcagtggctgctcgcacatgtgggagaggatgtggtggcagaggtaatcaggttcagatgccctcgtgtatcagtctggggagcagggtgtyctccggtggctggtgacggcccagcccaaggctcccgtcagagtcctgcgcacacctcatgtgtggacatatgggaggggcacctggaaacttgccgcca

SEQ ID NO: 427500 - DNA, 201 bp, Homo sapiens
tgctaccactcatgtcatctctgcctccccatgggcagctcatatcgagcccctgtccccagtgtgcactgcaccagggcagggtgtgtccctcttggcgstgttgacatttggaccagatactgtgtgttgggggctgtcctggaggatgttgaacagcaccccggcctccacctgctgaatactagtagcatcccagcc

SEQ ID NO: 427501 - DNA, 201 bp, Homo sapiens
cccccaccgggatctaacacccaatcatccgtcacccgattgtgctcgtggcctctgtctggtctcctggccccagccccaccgctcctcacacagctgcygggggtccttttcacctctgctcccttgttcacagctctcgtttctcatagaaatcacagttccatcaaggccagcagccccttccttcactaccctcat

SEQ ID NO: 427502 - DNA, 201 bp, Homo sapiens
gcagctctgctcacagggcctttctctaggatgagggtccttcaggaagagcgggatgtttgaggtaagggggtgtccaggaggaagtgggaggccctggwggaaaatctgcaggagtcatccccagtgcagtatcgggaagcctccaggctcctctcacacctttggaatatgtccaggatctcatcacctggcaccagt

SEQ ID NO: 427503 - DNA, 201 bp, Homo sapiens
tcatggggccagtgcagcctgcagatcaggccctgcattgggcggtggctgtctctggaaccctctgttgcatctcactttggccagctttctagattgtyccccgcctccttttgaagttaaagaccttggagtataaaaatgagcatgcagagtgtgcccctggcaggctggaggggaggacaagcttgccaggacaaa

SEQ ID NO: 427504 - DNA, 201 bp, Homo sapiens
ttctccagctgccgccagggtcacactcccttgccctgccccttccctgtctgttgggctgtactttgtgcctgtggcttgagctaggatttgggttcttytcgtaaacacatcccagtcctgctgttgatgtcttaagtatctctaagaaggataaatgaggagtgatgggcctggggacagggttgaaaagggtcaagg

SEQ ID NO: 427505 - DNA, 201 bp, Homo sapiens
ttaggcaacatttttagcatgatccttaaaaaaaacagacaaatttggcttcatcaaaattgaaaacttctgttctttggaacacactgttaaggaaatgraaaaataagcccctgactgaatcaaaacaagtatttgcaaaacacagatcaaaggtctgtattcagaatacataaaaactcaataataagaaaacaaaac

SEQ ID NO: 427506 - DNA, 201 bp, Homo sapiens
gggtgggtcatgaggtcaggagatcgagaccatcctggccaatatggtgaaaccccgtctctactaaaaaaaaaaaaaaaaatacaaaaattagctgggcktggtggcctgtgcctgtaatcccacctactcgggaggctgaggcaggagaattgcttgaaccaggaagtcaagttgcagtgagccgagatcgcaccactg

SEQ ID NO: 427507 - DNA, 201 bp, Homo sapiens
aaaaggacagaaaatccgtgtgggggctattttagccagagctgtctggttgtaaggagtagctgtaggaggaacttttccctgagcccagggaggaagcwcagccatccttggggtcatgggactgtgaagggtgttgctcccctttctcagcccttctggtcttagcccttacctctttctgcctcagggtgcacagaa

SEQ ID NO: 427508 - DNA, 201 bp, Homo sapiens
tgaacgtggcgcagcccgttcgcttcagcagtaagttgcagacctgccctgactgggacactggggagtgcaagcctgacatgacccctgcctttccagcrctactgtgctgcgtgaggggtttctcaaagcagcccttggaggccagtgaggggaatgaatgaggctgcatgatgacccacccgcagtcacccagcgctg

SEQ ID NO: 427509 - DNA, 201 bp, Homo sapiens
gctgtttcacttacatatctatatatgtatatatatatataggtttactatatactgatatataggaagccaggagtgacaagtactacttagaagcagcyaaggcaaggcaaggtggatgtggtgcatgggggaaggggccttgtttgccagagaagacttggctgacgtttgcttttggaggatataggggtatggaga

SEQ ID NO: 427510 - DNA, 201 bp, Homo sapiens
ggggcagcctgggctctggagagaactctttcatgggccatccccatggggctggaactgctgagggattttaatttatgcaggaccctttgctgtgctakcaatgacctgttagaaaatgcaatgaagagggcctccatttcacaatagtaacttaaaaaacaaaaactgccacggcataattttaataagaagcacacg

SEQ ID NO: 427511 - DNA, 201 bp, Homo sapiens
ccaagttcatagcagcattactcatagtagccaaaaggtggaagcaacccaagtgtccatcacagatgaatggatcaacaacaaggtagtctatccatccrgtggaatatggtttaccttaaaaaggaaggaattctgacacatgctacagcatggatggactttgaggatatgctcagtgaaataagcctgtcacaaaat

SEQ ID NO: 427512 - DNA, 201 bp, Homo sapiens
gctgtttcctttacattccctgggctcggacttggcttgcccttcctgtcccattgccctggcactggcgagctcctcctggacatactccagcagtgccytctccagctgccgccagggtcacactcccttgccctgccccttccctgtctgttgggctgtactttgtgcctgtggcttgagctaggatttgggttcttt

SEQ ID NO: 427513 - DNA, 201 bp, Homo sapiens
catctgccagaaagcccctctgttctttctcagcttccagtctcaggcccagaagctcaggtggctcttcccttctccaccaagtgctgatgccccatccyagtggctgcatccctgcatcagagctaccagcgagtctgtgggtcgagtctcctacccagagtgtcgggtgctgcaggtagcatggcttaggacatggga

SEQ ID NO: 427514 - DNA, 201 bp, Homo sapiens
ttttcagcccccatggtagtggatatttgcagggacttatgtctttattgagatgcagttcacatgccatgaaaatctcccctgtggagtgccctgtcctrtggttttagcatagtcaccgagttgtattcatggggtttcatgtctaccaagaataagattgttcttgcttaaattgtgaaagctttaccggtttagctc

SEQ ID NO: 427515 - DNA, 201 bp, Homo sapiens
gtagtttgcagctgttagttcttcgactaatttttttttgcctctttctctctctcctctccatttgttactcctgtttcacatatgttggtgtacttaakggtgtttcacatttctctgggagctctgttcatttctgttcattcttttttctctattttagccagggaataattgtatgtgagtatcttgccctgggag

SEQ ID NO: 427516 - DNA, 201 bp, Homo sapiens
ccccactgggaagcagctgccagctctttccaagacagaatgtgcagtaaggctttactgccaggtgtgagcaggcctgccagggatgctggaaccttctsttctgggcactccagcagggcatgggtgtcccctaccccgggtgtgggagtctgtgtctgatgggtctcagactgctctggtggagacctatcttagtgg

SEQ ID NO: 427517 - DNA, 201 bp, Homo sapiens
ccatctctaaaaaataaaaaagaatgttctgttgctaaatctctattcagtgaatgaactctttctcagtatagtttgggaaattagaaggcttttttttycttttttctgcattagtctttaaaaaaattttttgttaactttatggacacagtagttacatgtgtggggtatatatgatattttgatacaagcatagaa

SEQ ID NO: 427518 - DNA, 201 bp, Homo sapiens
cacatcactgtcttctaggctgtatcgtttctaatgagaaatctgctgtcatctagatctttgtttttctgtgcatgtcttctttttctgcctgcttttargattttatcgctgattttaagcaattcaattccaatgtgacttggaattgtattgtttgtatttctggtgcttgtggttcattgagctacctggatttgt

SEQ ID NO: 427519 - DNA, 201 bp, Homo sapiens
tgtgctatcaagatactcaaatgcatagatacaggaagtagaattgtggttgccaggggctgggaggagagaaaaattgggaggtaatgtttaatggatayggagtttgtttggtaagatgaaaagttctggagatggatggtggtgatggttgttatggaactaatgtgaaggtacttaataatgccacttaactgtaca

SEQ ID NO: 427520 - DNA, 201 bp, Homo sapiens
caatgaatttgagtagtttgcagctgttagttcttcgactaatttttttttgcctctttctctctctcctctccatttgttactcctgtttcacatatgtkggtgtacttaatggtgtttcacatttctctgggagctctgttcatttctgttcattcttttttctctattttagccagggaataattgtatgtgagtatc

SEQ ID NO: 427521 - DNA, 201 bp, Homo sapiens
tcccgaagtccctctggggccccggagtacagtgtgccttccagagcgtgcatcgctcccttccccactgggcagcacctgttcagaatgggtgcttgccrgaggcctgcccatggcccctggtggctcagatgctggccatctctgaggccccattcaaggcccttattattcactcttgcctcaggacagaggtgaccc

SEQ ID NO: 427522 - DNA, 201 bp, Homo sapiens
taaaaaataaaaaagaatgttctgttgctaaatctctattcagtgaatgaactctttctcagtatagtttgggaaattagaaggctttttttttctttttyctgcattagtctttaaaaaaattttttgttaactttatggacacagtagttacatgtgtggggtatatatgatattttgatacaagcatagaatgtgtaa

SEQ ID NO: 427523 - DNA, 201 bp, Homo sapiens
gccaccacgcccagcccttgctggttttctatctgcttgttctatcaagagggttattaaaagctctgactttaattgtggattcgtctattagcagttayagtagtttctgtttcatgaattttgaagtttcttttgtaaattttaatagatacataaacatttaggattatgtcctcttgaatcaatccctttatcatt

SEQ ID NO: 427524 - DNA, 201 bp, Homo sapiens
actttgaggatatgctcagtgaaataagcctgtcacaaaataacaaatactgtatgtttccatttagatgtgctatcaagatactcaaatgcatagatacrggaagtagaattgtggttgccaggggctgggaggagagaaaaattgggaggtaatgtttaatggatacggagtttgtttggtaagatgaaaagttctgga

SEQ ID NO: 427525 - DNA, 201 bp, Homo sapiens
atgtataggttattgtttttcaatgaatttgagtagtttgcagctgttagttcttcgactaatttttttttgcctctttctctctctcctctccatttgtwactcctgtttcacatatgttggtgtacttaatggtgtttcacatttctctgggagctctgttcatttctgttcattcttttttctctattttagccaggg

SEQ ID NO: 427526 - DNA, 201 bp, Homo sapiens
tgttgctaaatctctattcagtgaatgaactctttctcagtatagtttgggaaattagaaggctttttttttcttttttctgcattagtctttaaaaaaawtttttgttaactttatggacacagtagttacatgtgtggggtatatatgatattttgatacaagcatagaatgtgtaatgatcaaatcatggtaattggg

SEQ ID NO: 427527 - DNA, 201 bp, Homo sapiens
gccactgcactccagtctgggtgacaggacaagactccttcccccccaaaaaataaagtgaactttaaaaaataaataaaataaaaatacaaaaattagcygggcgtcatggcgcacgcctgttaatttcagctactggggagactgaggcaggagagttgcttgagcctgggagacggaggttgcagtgagctgagatca

SEQ ID NO: 427528 - DNA, 201 bp, Homo sapiens
taaatctctattcagtgaatgaactctttctcagtatagtttgggaaattagaaggctttttttttcttttttctgcattagtctttaaaaaaattttttkttaactttatggacacagtagttacatgtgtggggtatatatgatattttgatacaagcatagaatgtgtaatgatcaaatcatggtaattggggtatct

SEQ ID NO: 427529 - DNA, 201 bp, Homo sapiens
gtcctcttgcctcagcctcctgagtagctgggactacaggcatgtgtcaccaagcccagctaatttttttgttttttttttgtaatgtagagatgaggtcytgttatgttgcacaggctggttttgaactcctgggctcaagtgttgctcccaccttggcctcctaaagtgttgggattacaggtataagccattgcactt

SEQ ID NO: 427530 - DNA, 201 bp, Homo sapiens
agatgtaaattattaaactttatcaaagaagatataggatgacagtcaggcagctgaaacgatgctcagtattggccattagggaaacaaactaaatccaygtggggtaccacccctgctcgaaaggctaaagtaatgaaactgatagcatcaagtgctggccaaggtgcagagcagctgaaactcatgccgccctctgcc

SEQ ID NO: 427531 - DNA, 201 bp, Homo sapiens
cagcctcccgagtagctgggattacaggcatgcaccaccatgcctggctaattttgtatttttagtagagacagggtttcaccttgttggtcaggctggtycggagctcccgacctcaggtgatctacccgcctcaggctccgaaagtgctgggattacaggcatgagccactgggcctggctattctgaattttttatgc

SEQ ID NO: 427532 - DNA, 201 bp, Homo sapiens
tgccgagattgttgcagaggtgggagtggccattcctagcttagcagggtccctgctggtgtggggtcctcctgcttccaggagctgatgggtcactcctygttttgaagcctccctggccttcactcttggtctgtggaggaagctacttctgggaccacttcctggttccattattctgtgacttctgtgagttgccag

SEQ ID NO: 427533 - DNA, 201 bp, Homo sapiens
tgctgggattacaggcgtgcatcaccacacccaactaatttttgtattttagtattcaccatgttggccaggctggtctcgaactcctgtccattcaccaygttggccaggctggtctcgaactcctgacctcaagtgatctgcctgcctcagcctcccagaatgctgggattacaggcatgagccaccacgcccagccct

SEQ ID NO: 427534 - DNA, 201 bp, Homo sapiens
ttggaccagatactgtgtgttgggggctgtcctggaggatgttgaacagcaccccggcctccacctgctgaatactagtagcatcccagccaagtggtggycacgaaaagcgtgaaatggttgaagaagagcagaggaaggcgcagcagcttagactcagtgctccttggcgtctagcctggctgggactcagcttcaagc

SEQ ID NO: 427535 - DNA, 201 bp, Homo sapiens
ctcctgacctcaagtgatctgcctgcctcagcctcccagaatgctgggattacaggcatgagccaccacgcccagcccttgctggttttctatctgcttgktctatcaagagggttattaaaagctctgactttaattgtggattcgtctattagcagttacagtagtttctgtttcatgaattttgaagtttcttttgta

SEQ ID NO: 427536 - DNA, 201 bp, Homo sapiens
ccccatccccatttctgagcatcaggcaccctcatcagcacttggcatgtaatagctccattaaccttaactgtaaccccgttttttggatagagtttttsgtgtgttaaatcttgtgttcaacttaggttttgaaataagagcaggaaatgaagctttcagactgcaaatgtttcctttgaatgttctttaaagacccca

SEQ ID NO: 427537 - DNA, 201 bp, Homo sapiens
tattaacctcattttacagatagagaaacagagcttgggagactaagtgacttagccaaagtcacacagcttttaaagtcatggagtgggtatttgaaacmtgggcagcatagagttcatgctgtgatattgcacagcttcaagagaagtctctggctctttttccatctactccttgtctttctccttctgccttttctt

SEQ ID NO: 427538 - DNA, 201 bp, Homo sapiens
ccaggatttctgtaacatttgtgcagaaaggttgaaaaagtacagatccttgtgtagggagaatcatccacaccgccccacgtgctgctcccagggccttyccgtcagcaccagcagtgtagcttctgtctggtgagtcatacttgatatttaccttaaaatataaaagtgaaaacagcgtgtgtttcatgtgtccacatg

SEQ ID NO: 427539 - DNA, 201 bp, Homo sapiens
gctgctgctgccagaagacatgaggccaggatttctgtaacatttgtgcagaaaggttgaaaaagtacagatccttgtgtagggagaatcatccacaccgycccacgtgctgctcccagggccttcccgtcagcaccagcagtgtagcttctgtctggtgagtcatacttgatatttaccttaaaatataaaagtgaaaac

SEQ ID NO: 427540 - DNA, 201 bp, Homo sapiens
ggggagctgtctgaagcaggggctgaggttggcctgggagtttgggtatagttctacacaccctttacctgacaagactcattgtggaggggtgatcagtsaggcaggtggtaggtctgttttggagattaggatgctaagacccagagaggttaattagcttgcttggtggcatcacttagcttttaagtagaagcaaga

SEQ ID NO: 427541 - DNA, 201 bp, Homo sapiens
gtgccttctccagctgccgccagggtcacactcccttgccctgccccttccctgtctgttgggctgtactttgtgcctgtggcttgagctaggatttgggktcttttcgtaaacacatcccagtcctgctgttgatgtcttaagtatctctaagaaggataaatgaggagtgatgggcctggggacagggttgaaaagggt

SEQ ID NO: 427542 - DNA, 201 bp, Homo sapiens
ttgatgccactactctagtgggcgtgtctgacacgacccctccagctgcctccttcccattctggggtgacaggcagcattcacaaatgaacttgaactcragtgtggctgtttgttcacaagtcaccactgacagcttcaaacttgtcttcaaacttacgcctccagggtttaagccgttctcctgcctcagcctcacca

SEQ ID NO: 427543 - DNA, 201 bp, Homo sapiens
tcccactgccccagcctctgttgtttctgctgagaagtcagttgtttgtcttattggggttcccttagaagtaacaagtcacgtcccatttgctgcttttygtattttcgccttgtctttcactttcagcattttcactctgatgtgtcagtttgtggctcctttgcatttatcctaggaatgtggaatttgttgagcttc

SEQ ID NO: 427544 - DNA, 201 bp, Homo sapiens
atgaagctatctggtcccgaagtccctctggggccccggagtacagtgtgccttccagagcgtgcatcgctcccttccccactgggcagcacctgttcagratgggtgcttgccagaggcctgcccatggcccctggtggctcagatgctggccatctctgaggccccattcaaggcccttattattcactcttgcctcag

SEQ ID NO: 427545 - DNA, 201 bp, Homo sapiens
ggcaggagaatcacttgaacccaggaggcgaaagttgcagtgagctgagatcatgccactgcactccagtctgggtgacaggacaagactccttccccccmaaaaaataaagtgaactttaaaaaataaataaaataaaaatacaaaaattagctgggcgtcatggcgcacgcctgttaatttcagctactggggagactg

SEQ ID NO: 427546 - DNA, 201 bp, Homo sapiens
cgccagccgcgtccctttctggagttatagcacatcccatgaagctatctggtcccgaagtccctctggggccccggagtacagtgtgccttccagagcgygcatcgctcccttccccactgggcagcacctgttcagaatgggtgcttgccagaggcctgcccatggcccctggtggctcagatgctggccatctctgag

SEQ ID NO: 427547 - DNA, 201 bp, Homo sapiens
ctacttgggaggctgaggcaggagaatcacttgaacccaggaggcgaaagttgcagtgagctgagatcatgccactgcactccagtctgggtgacaggacragactccttcccccccaaaaaataaagtgaactttaaaaaataaataaaataaaaatacaaaaattagctgggcgtcatggcgcacgcctgttaatttca

SEQ ID NO: 427548 - DNA, 201 bp, Homo sapiens
aggcttggggctggaaagctgggccaagggacatggactaggcaggagcttatggcggtcagccagatgccagtgcaaggtcctttcagtgctaggcctgyatgctcaggagcaggctgcaggcctgaggtgggctggctctgagtgggaagccgtgcaagtgttttcagcccccatggtagtggatatttgcagggactt

SEQ ID NO: 427549 - DNA, 201 bp, Homo sapiens
ccacactcaggcctggcctcaggtttatcccggatatgtctgcctttgccctttgccaaagctgctccatctgccagaaagcccctctgttctttctcagyttccagtctcaggcccagaagctcaggtggctcttcccttctccaccaagtgctgatgccccatcctagtggctgcatccctgcatcagagctaccagcg

SEQ ID NO: 427550 - DNA, 201 bp, Homo sapiens
gctcacacctgtaacccaacactttgggaggctgaggtgggtggatcgctttaggccaggagtttgagatcagcttggccaacatagtgaaaccccgtttytaataaaaatacaaaaattggccaggtgtggtgctgcacacctataatcccagctactcaggaggctgaggcacaagaattgcttgaacctgggaggagg

SEQ ID NO: 427551 - DNA, 201 bp, Homo sapiens
gtctcaaactcctgacctcaggtgatccacctacctcggcctcacaaagtgctgggattacaggtgcgagccactgaaaccagcttccttttatggattawtcttttggtgtcaagtccaagtactctttgcctagccttacatttcttctgtgtttttttcctaaaattttaatcattttccgttttacatttaagtcta

SEQ ID NO: 427552 - DNA, 201 bp, Homo sapiens
gtggagccacaggtcttgcccatttgagcagagggagatgttgaatttaagttcagtgacattctccagccacactcaggcctggcctcaggtttatcccrgatatgtctgcctttgccctttgccaaagctgctccatctgccagaaagcccctctgttctttctcagcttccagtctcaggcccagaagctcaggtggc

SEQ ID NO: 427553 - DNA, 201 bp, Homo sapiens
ctgcacagcttgtcctctgatgtgatgttgtccagccccaccttttgtctccccaacaggctcttcagaggtgttcctgcccccagaccccatctttgccycggccatgtctgagaacgacaacgtgttctgtgcccagcttcagtgcttccatttccccaccctgcggcaccacgacctccacagctggcacgccgagag

SEQ ID NO: 427554 - DNA, 201 bp, Homo sapiens
gcatttttaattttacaactggctttgctaaaaattgtcactcttctccagtgtactaatatgaggtacccaacatttgaaggttaaagattctataaaasaggtcactggtgttacctaaggtgagctgtaaattaccaggcattcccgtgtgtgggtgtaggagtcggaagtgatgggtggaggaagtgagaggacgct

SEQ ID NO: 427555 - DNA, 201 bp, Homo sapiens
tggcactccagcctgggtgacagaatgagactctgtctcaaaaacaaacaaacaaacaaatgggaagagattgatccagcccatgggctatggtttgctgrcctactgccacttcctcaatggcctctcaccctttggtcccacagagctgcggtgcaaccctgggcagtttgcgtgtcgcagcggcaccatccagtgcat

SEQ ID NO: 427556 - DNA, 201 bp, Homo sapiens
ggcttggggaagaggccaggatacaaagtggagccacaggtcttgcccatttgagcagagggagatgttgaatttaagttcagtgacattctccagccacrctcaggcctggcctcaggtttatcccggatatgtctgcctttgccctttgccaaagctgctccatctgccagaaagcccctctgttctttctcagcttcc

SEQ ID NO: 427557 - DNA, 201 bp, Homo sapiens
aatctatgtgcctttatgaagaagtcacacacacacatgcttacataataaatacatggggatacgtgtctagaagttttactagtgccacaagacatagmtgcactttaaaaatggcatttttaattttacaactggctttgctaaaaattgtcactcttctccagtgtactaatatgaggtacccaacatttgaaggtt

SEQ ID NO: 427558 - DNA, 201 bp, Homo sapiens
ttttttcattctgtgttttagttcagagtgtttctattattatatcttcaagtcactaatcttttctactacaaaatctaacctgttaatgttctgcagcrtacttttcatcttaagtgttacagtttttatctctaggtaataggttcgtaaagggccaggcattaaatgttttcagctttgcaggccatatagtctttt

SEQ ID NO: 427559 - DNA, 201 bp, Homo sapiens
ctttcagttggagtgtttagatcgttctgcgtatttattgattaggcaagtttaattaaaatctaccatattaccctttgttttcatttgtaccatctgtytgtcttttttttttccttcttttggattattttttattctcttctatgttggcttacttgccacaactcttgtgttattttagtcgggttcatcattaac

SEQ ID NO: 427560 - DNA, 201 bp, Homo sapiens
gcagaagagtgacaaaattcattcagaccgcacatgttagaggcagggaatgaagaaggtactgtgggccatggccacacctgatgcgtttttggtgggcytacttggtgcagtgtgctgtccagagagacctgctgacccagtctgggacaggcacagtgggagctgccacagtgccccttgctggccgccctcaggagg

SEQ ID NO: 427561 - DNA, 201 bp, Homo sapiens
ctttccagcactactgtgctgcgtgaggggtttctcaaagcagcccttggaggccagtgaggggaatgaatgaggctgcatgatgacccacccgcagtcayccagcgctggagtggtggtatgtgactcaaggccctaggaagtcaaccggctctgaggccaggctgcttgttctcacaaagtgactgcttttcagggcca

SEQ ID NO: 427562 - DNA, 201 bp, Homo sapiens
agaagagtgacaaaattcattcagaccgcacatgttagaggcagggaatgaagaaggtactgtgggccatggccacacctgatgcgtttttggtgggcttwcttggtgcagtgtgctgtccagagagacctgctgacccagtctgggacaggcacagtgggagctgccacagtgccccttgctggccgccctcaggagggg

SEQ ID NO: 427563 - DNA, 201 bp, Homo sapiens
cccatttgtgccataaagggttgcttcattgcaggaggggtggctgaaaccaccatcctgggctgcatctatctccttaaagtccactccttacatcaccrccactactgcagctcagtgcccagcggccgcatgcacacctcccggcccctcctcagcagcgcaggggctgggggcccttcctggcacccttttgcctga

SEQ ID NO: 427564 - DNA, 201 bp, Homo sapiens
tgaacacctggccacagtgaccaccagtacttggcggtccaggccctgtggttgatgatcctgtctgacgccatggtccccttgaggactgcacagcttgkcctctgatgtgatgttgtccagccccaccttttgtctccccaacaggctcttcagaggtgttcctgcccccagaccccatctttgcctcggccatgtctg

SEQ ID NO: 427565 - DNA, 201 bp, Homo sapiens
gagagatggcattttgccatgttgctcaggctggtcctgaactcctgggctcaagtgatccttctgcatcagcctcccaaaatgctgggattatggagatkacaggaatgagccatgtacctgcccttccagctatcctttgattagtgttaacatggtatatctttttttattcttttattttctcttatttatgcctat

SEQ ID NO: 427566 - DNA, 201 bp, Homo sapiens
tcaatactgtggtgtagacggcctggcctgtaccccaacggtctgggagcacctgtctgttgtagaaaacaccggtccctggggagacttgaaaggccccygtcccagcctggacgccacgcactgccgcacgtcactggcgggctcgcgtgtgtacatagagaccacagcccgccttctgccaaaagaagtgatggcctg

SEQ ID NO: 427567 - DNA, 201 bp, Homo sapiens
ttggagattaggatgctaagacccagagaggttaattagcttgcttggtggcatcacttagcttttaagtagaagcaagaacaggaaactcaggactgctrtcctgagccacatgctttgcctcctgcaccatgattccaaaagctgatgaaagagctgtatggcagagggagctaagtggagcgccaccacctggggcct

SEQ ID NO: 427568 - DNA, 201 bp, Homo sapiens
atataaagtgagtttgttttaggtaatatgtagttgtatcttgattttttccctacatgacaaattctgcctttcagttggagtgtttagatcgttctgcrtatttattgattaggcaagtttaattaaaatctaccatattaccctttgttttcatttgtaccatctgtttgtcttttttttttccttcttttggattat

SEQ ID NO: 427569 - DNA, 201 bp, Homo sapiens
accactttacctgtagtttgagagccttaaaacagtgtgcttctgtttctctcttcccacctttggtgctactattgtcaaaattttacttctgtgtatgytataaactgcacaatacagtatctgtgtgtttgctttaaataattgtaggtcaacagctttttctttcagaactttaacatgtcacatcactgtcttcta

SEQ ID NO: 427570 - DNA, 201 bp, Homo sapiens
aggaggagattgcagtgagtcaagattgtgccactgcactttatcctgggctgcagaacaagactctgtctcaaaggcaaaaaaaaaaaaaaaaaagccaggtgcagtggctcatgccttataatcccaacacttttggaggccgaggcaggcaggatcacttaaggtcaggagtttcagaccagtctggctgacatcgtg

SEQ ID NO: 427571 - DNA, 201 bp, Homo sapiens
gggtgagcagattgatttcttttttttttatttgagatggagtctcgctttgttgcccaggctggagtgcagtggcgccatctgggctcactgcaagctcygcctcccgggttcatgccattctcctgcctcagcctcctgagtagctgggattacaggcgcctgctaccacacccggctaattttttttgtatttttagt

SEQ ID NO: 427572 - DNA, 201 bp, Homo sapiens
gtcctgcaaaaatgccttgggaggatgggatccgggggtaggggacatggctgtggagccagctggcctgggccccaccctggtaggagcttgcttctgtratgggagctgagctgagaggtgagagcaagtgtggcttctcattaatgtggatcctcactgaagctcaccagctgcccagcctggggtggagggttgagg

SEQ ID NO: 427573 - DNA, 201 bp, Homo sapiens
cctgctaccacacccggctaattttttttgtatttttagtagagacagggtttcaccgtgctagtcaggatcgtctcgatctcctgaccttgtgatccgcyctcctcggcctcccaaagtgctgggattacaggcgtgagtcactgtgcccggccaagcaggttgatttctaattgttcttaaagttgagattctgagcaa

SEQ ID NO: 427574 - DNA, 201 bp, Homo sapiens
gccttgccagttgttttgaaagcacctattttctgtattaaacccttcgtgttagaaatcccttagcatggtttctgttttcccagtggaaccatctttgtttttttttttttttccaaggcagaagaatttttcttagtacagaacaaaatgaaaagtctcccatgtctacttctttctgcacagacacagcaaccatcc

SEQ ID NO: 427575 - DNA, 201 bp, Homo sapiens
tcccatagcttcagcaggctccaggtgccgcagccctgactcctcagggcccacccctgctgtgtccacacaaatgcccccaggaagctgacacttccccrcagcctgttcctgcagtccctgccttggttcttagctgatgctgtcttatcactgccaccccatccccatttctgagcatcaggcaccctcatcagcact

SEQ ID NO: 427576 - DNA, 201 bp, Homo sapiens
gacggggtggctgccgggcggaggggctcctcacttctcagacggggcggctgccgggcggaggggctcctcacttctcagacggggcggctcccgggcaraggggcccctcacttctcagacggggcggctgccgggcggaggggctcctcacttctcagacggggtggcccggcggagacgctcctcacctcccagacg

SEQ ID NO: 427577 - DNA, 201 bp, Homo sapiens
atgctgtcttatcactgccaccccatccccatttctgagcatcaggcaccctcatcagcacttggcatgtaatagctccattaaccttaactgtaaccccrttttttggatagagtttttcgtgtgttaaatcttgtgttcaacttaggttttgaaataagagcaggaaatgaagctttcagactgcaaatgtttcctttg

SEQ ID NO: 427578 - DNA, 201 bp, Homo sapiens
actgctaccgcagtttttttttaataacgtaaaatatgccatcataaccactcaattcagtgttcagttcattcagtgttcagtagtgccagagtatgtaycttgttatgcaacagatctctagaatgttttcatcttgcaaaactgaaactcagtacctattgagtaactacccctcccttttatctctctctccagcct

SEQ ID NO: 427579 - DNA, 201 bp, Homo sapiens
ggcgaaagttgcagtgagctgagatcatgccactgcactccagtctgggtgacaggacaagactccttcccccccaaaaaataaagtgaactttaaaaaawaaataaaataaaaatacaaaaattagctgggcgtcatggcgcacgcctgttaatttcagctactggggagactgaggcaggagagttgcttgagcctggg

SEQ ID NO: 427580 - DNA, 201 bp, Homo sapiens
ttaatctagaagtattcccagccctcttttgcagggggctttgggcgtctttcatgacattgccatatttgaagagtccaggtcagttctgtagaatggcrttcaatttggacttgtctctttcttcaggattagcttcaggtgagactttttttttttaggtagcaatactatgtaagtcataaattatcaaatcacgag

SEQ ID NO: 427581 - DNA, 201 bp, Homo sapiens
attaaaggtatttgcttaaaccaagggtgcgaagattttcttcttgtgttttcttctcttgagttttatagttttaggcttcacctgtaggcctatgatckattttgatttttttttttttttttcgaggtggagtttcactcttgttgcccaggctggagtgcaatggcactatctcggctcaccacaacctccgcctcc

SEQ ID NO: 427582 - DNA, 201 bp, Homo sapiens
actggagtgcagtggtgcaatcttggctcactgcaacctctgtctcctgggttcaagcaattctgcctcagcctcctgaatagctgggattacaggcgccygccaccgcacccatctaatttttgcgtttttggtagagatggggtttcatcatgttggccaggctggtctcaaactcttaacctcaggtgatccacccac

SEQ ID NO: 427583 - DNA, 201 bp, Homo sapiens
ctgctgccaacttgatgtgggacactgagtaggcgggtcagcccctctgagaagctagctggctggactagttgggggtttcaatacatagaacagcttcrggccttccttcacattttgctaatgaaacttccaatctcatcattttccatgagccacacatgtcttgttcccgtttgaactctgggccctcatgggtga

SEQ ID NO: 427584 - DNA, 201 bp, Homo sapiens
tgctgactgctgtctcggtgaaggaaatggctcagaactggaaagtttggacctggtcctctagggagtcagaatgcagagccccacccaggggctctgcwggcttcagggatggggatttgggtcaaagagcccacagcctgacctctgatgcccattctgctgctgccaacttgatgtgggacactgagtaggcgggtc

SEQ ID NO: 427585 - DNA, 201 bp, Homo sapiens
ccagcacctggggtgactcccaggaggttggggagtcccgagtgaacacctggccacagtgaccaccagtacttggcggtccaggccctgtggttgatgawcctgtctgacgccatggtccccttgaggactgcacagcttgtcctctgatgtgatgttgtccagccccaccttttgtctccccaacaggctcttcagagg

SEQ ID NO: 427586 - DNA, 201 bp, Homo sapiens
tgccatgaaaatctcccctgtggagtgccctgtcctatggttttagcatagtcaccgagttgtattcatggggtttcatgtctaccaagaataagattgtycttgcttaaattgtgaaagctttaccggtttagctcatagaaacagtcttggcaagagttccctgagataaaacttttcctgccctgtgaactttcttgt

SEQ ID NO: 427587 - DNA, 201 bp, Homo sapiens
ctcaggctggcacttactgctacccagggtttgtggcctgtgtgcttgcaggctccaaggagtggctcccgctaggcccagcacctggggtgactcccagkaggttggggagtcccgagtgaacacctggccacagtgaccaccagtacttggcggtccaggccctgtggttgatgatcctgtctgacgccatggtcccct

SEQ ID NO: 427588 - DNA, 201 bp, Homo sapiens
gatccatgggtaggagtgtgcatcgagataggtggagggtcctgggagcaggggcaggctggactctgctgctactttgtgggactgtggggcagcccctktcattggtacccctctccttgtacaagtgcagttgctgagcgcaggcagggggctgggggtgctggcttgtgtggggagaactgcttggtgtggggcttc

SEQ ID NO: 427589 - DNA, 201 bp, Homo sapiens
tgaatggtgctaggaaaactggacatacaaatcaaaagaataaagttagacccttagctaatgatatacaaaacttaacccaaaatggatcaggcttaaayttaagaccttaaactataaaattcttagaaaaacataataaagtcttcgtgacactggatttggcaatgatttcttacataagacacttaaatcacaggc

SEQ ID NO: 427590 - DNA, 201 bp, Homo sapiens
ggggctggagtcagagtctgatgactactgagcacatggcctctgaccactcagtaaactcctggagcacagctggcagacagcaggttgggaagaccagyctcgcccactggaagcccaggagatccatgggtaggagtgtgcatcgagataggtggagggtcctgggagcaggggcaggctggactctgctgctacttt

SEQ ID NO: 427591 - DNA, 201 bp, Homo sapiens
tcattgcaggaggggtggctgaaaccaccatcctgggctgcatctatctccttaaagtccactccttacatcaccgccactactgcagctcagtgcccagyggccgcatgcacacctcccggcccctcctcagcagcgcaggggctgggggcccttcctggcacccttttgcctgacggaccctgttgcctgctcctgggc

SEQ ID NO: 427592 - DNA, 201 bp, Homo sapiens
cctaaacccagagaagcctgctcaacagagtggtgtcctttatcaccatttggctttctggttatgtttctgaaatatttcacctggtctcccaccccagrgggcagatgacttcactcagtcaacatgtaacaacctggtctttggtgcccatgtgacctggcagcactgtccctctgttatctcttctttctcttccct

SEQ ID NO: 427593 - DNA, 201 bp, Homo sapiens
caaagctgcagtaatccaaacattgtagtattggtataaagacagacatatagaccaatggaatagaatacagagccttagcaataagtccttgcatacartggtcaaattattttccacaaggatgccattaccattcagtgagggaaaaagtgtcttttcagaatgaatggtgctaggaaaactggacatacaaatcaa

SEQ ID NO: 427594 - DNA, 201 bp, Homo sapiens
accatcctgggctgcatctatctccttaaagtccactccttacatcaccgccactactgcagctcagtgcccagcggccgcatgcacacctcccggcccckcctcagcagcgcaggggctgggggcccttcctggcacccttttgcctgacggaccctgttgcctgctcctgggcagtggttttgttgcctgacacagggc

SEQ ID NO: 427595 - DNA, 201 bp, Homo sapiens; identical to SEQ ID NO: 123515

SEQ ID NO: 427596 - DNA, 201 bp, Homo sapiens
acccctgcctttccagcactactgtgctgcgtgaggggtttctcaaagcagcccttggaggccagtgaggggaatgaatgaggctgcatgatgacccaccygcagtcacccagcgctggagtggtggtatgtgactcaaggccctaggaagtcaaccggctctgaggccaggctgcttgttctcacaaagtgactgctttt

SEQ ID NO: 427597 - DNA, 201 bp, Homo sapiens
ttgtctctttgttgtagctgggtgactgtgcctcttgtgaggggtggaggtgtgtgctgtcttaacacattggaaagttagtttgagccgaccccttcctytctctctgtctttctgtctttttaaaaaataagtgcccaacctaggcagatcccagaacttgcaagatggcagggctgtggggaggcccgtgagatgccc

SEQ ID NO: 427598 - DNA, 201 bp, Homo sapiens
ttttttaattttaaagaagtctgatttatcattttttcttgttatggtcatgctttctgtttttgtctaataaatccttgcctaccccaaggttacgaagwtcttctccttccctagtaaaatctgagcttcgtgggggcagacaccttatggttctcctcctgctcttctcacttgtgtcctgtacaacacctggcccct

SEQ ID NO: 427599 - DNA, 201 bp, Homo sapiens
cgaagccaactgtccaggtgagtgtgttgagtaggcggggtacacaccaccttgtctctttgttgtagctgggtgactgtgcctcttgtgaggggtggagktgtgtgctgtcttaacacattggaaagttagtttgagccgaccccttcctctctctctgtctttctgtctttttaaaaaataagtgcccaacctaggcag

SEQ ID NO: 427600 - DNA, 201 bp, Homo sapiens
tttactaagcttttgatcaaagacttttttaattttaaagaagtctgatttatcattttttcttgttatggtcatgctttctgtttttgtctaataaatcyttgcctaccccaaggttacgaagttcttctccttccctagtaaaatctgagcttcgtgggggcagacaccttatggttctcctcctgctcttctcacttg

SEQ ID NO: 427601 - DNA, 201 bp, Homo sapiens
aaaaaaaaaaaaaaaaaaaaaaagaaataattagccagatgtggtggtacacacttgtagtcccagcttctcagtaggctaaggtgggaagaatcacctgrgtccctgaggtcaaggctgcagtgagccgagattacaccactggacatcagagtgagaccctgtttcaaaaaaaaaaaaacaaaaaaaaccccaaaaaac

SEQ ID NO: 427602 - DNA, 201 bp, Homo sapiens
ccatagcttcagcaggctccaggtgccgcagccctgactcctcagggcccacccctgctgtgtccacacaaatgcccccaggaagctgacacttccccgcwgcctgttcctgcagtccctgccttggttcttagctgatgctgtcttatcactgccaccccatccccatttctgagcatcaggcaccctcatcagcacttg

SEQ ID NO: 427603 - DNA, 201 bp, Homo sapiens
ggattatggagatgacaggaatgagccatgtacctgcccttccagctatcctttgattagtgttaacatggtatatctttttttattcttttattttctcytatttatgcctatataaagtgagtttgttttaggtaatatgtagttgtatcttgattttttccctacatgacaaattctgcctttcagttggagtgttta

SEQ ID NO: 427604 - DNA, 201 bp, Homo sapiens
gaaattccagcactttgggaggctgaggtgggtggattgcttgagcccagaagttctaaaccagcctgggcaatatggcatctctgcaaaaactacaaaawttagctgggcatgatggcacacgcctgtagtcccagctacttggaggggactgaggtgggaggatcgtttgagcccagtgagcagaggttatggtgagct

SEQ ID NO: 427605 - DNA, 201 bp, Homo sapiens
aagttgcagtgagctgagatcatgccactgcactccagtctgggtgacaggacaagactccttcccccccaaaaaataaagtgaactttaaaaaataaataaaataaaaatacaaaaattagctgggcgtcatggcgcacgcctgttaatttcagctactggggagactgaggcaggagagttgcttgagcctgggagacg

SEQ ID NO: 427606 - DNA, 201 bp, Homo sapiens
aataaaaaataaaaaattagctgagtatggtggtatgtgcctgtagtcccagctacttgggagtctggggcaagaggatcactggagcccagggtgtctaygctgcagtaatctgtggtcatgccgctgcattccagcctgggtgacagagcgagaccctgtctcaaaaaacaaaacatttacatgtatgtaaaatgtccc

SEQ ID NO: 427607 - DNA, 201 bp, Homo sapiens
gtttgtttggtaagatgaaaagttctggagatggatggtggtgatggttgttatggaactaatgtgaaggtacttaataatgccacttaactgtacactctttttttttttttgagacagagtcttgctctgtggcccaggctggagtgcagtggcacgatctcggctcactgcaagctctgcctcccgggttcacgccat

SEQ ID NO: 427608 - DNA, 201 bp, Homo sapiens
tttagtagagacagggtttcaccatgttggccaggctagtctcgaactcttgaccttaagcgatcgcctgcctcggtctcccaaagttctgggattacagrcgtgagccaccgtgccgagccatgtttaattttttaagaaattgccaagccgttttccaatttggtgtgaatcctgtagattcatatatatcttttcttt

SEQ ID NO: 427609 - DNA, 201 bp, Homo sapiens
gagcttggcctgctggagcatgatgctggaggctgtgtgcgggcaggcttgtgctccccttggagaagggctgctacttaacaaggaagtcctggccacargagtcccctactggctgcagaggacgaagcaggaagcatgccgtggatcccacatgcactggggcagggcagccaggttccagagcagcaggcatgtgca

SEQ ID NO: 427610 - DNA, 201 bp, Homo sapiens
ggcactgccagggggtggccgccacagccgcagctccctcaatactgtggtgtagacggcctggcctgtaccccaacggtctgggagcacctgtctgttgyagaaaacaccggtccctggggagacttgaaaggcccctgtcccagcctggacgccacgcactgccgcacgtcactggcgggctcgcgtgtgtacatagag

SEQ ID NO: 427611 - DNA, 201 bp, Homo sapiens
gaaattttaaaggggcatgagatcatcaaggaaggttgaggggaggaaaagccaccactgaaatggccctgagcagaccctctcaggcgcgaggtacccamgtacgctgagcagcggctgtggaccaggcaggactgatactggatgggcctgctgccctgccttgggcctgtctgcttgtgttactcctcagcccccaga

SEQ ID NO: 427612 - DNA, 201 bp, Homo sapiens; identical to SEQ ID NO: 123523

SEQ ID NO: 427613 - DNA, 201 bp, Homo sapiens
tgggctgtttccagtctttggctattacaatgaaaactgccgtgaacatccgcatacaggtttttgtgcaaacgtgttttctttttttcttttttcttttktgtgtgtgtgtgtgtgtgtgtgtgagacagagtctttctctgttgcccaggctggagtgcagtggcacagtcttggctcactgcagcttccgcctcttgg

SEQ ID NO: 427614 - DNA, 201 bp, Homo sapiens
cttagcagagcagggcccttagtgcatctgggtgggcccagagcagctgcagccctctctcctgcacggccagagcgacttagctgggccctgctctgccygccctgtggccatgcttccatgggctcctgactctcctagggccttcttctggaaagtgctcaagaaccgagacactatcaccaaaactggagactctgg

SEQ ID NO: 427615 - DNA, 201 bp, Homo sapiens
cagtgtggtatcgatgaaggggcagacacatagatcagtggaacacaacagtccagaaatagtcccacactacgtataatcaggtgatctctctgtttttktttgtttaagacgagtcaagtgcagtcgtgagaacgggaaaagagtacaacaaggagtttgatctgttactgactgtgaacaatcaatcgagatgactca

SEQ ID NO: 427616 - DNA, 201 bp, Homo sapiens
catccacatcctctccaactcttggttttgtcagacatcttaatttttgccattgatacatgtcttggaaacaacccaaatgtctgtgctcacatgatggwatgttatacaccagcaacagtaagtgaatgttaggtttatgcagcaacatggatgaatcttgaaaacagaacgtcagctaaaagcaagttgctaaaaacg

SEQ ID NO: 427617 - DNA, 201 bp, Homo sapiens
cttccagaacttttttgtcaatccaaacagaaactatacccattagacaatactccctattctcctcacccctagtccttggcaaccaccattctactttscatccttattaaattgactactgtaggtacttcttatgagtgaaatcatatactatttgcctcttttgtgtctgtcttctttcacttagcataatgttgt

SEQ ID NO: 427618 - DNA, 201 bp, Homo sapiens
ctcgaacccctgatctcaggcgatctgcctgcctcggcttcccaaagtgctgggattacaggtgcatgagccaccatacctagcctctggccacctttttyttaatcacataaaatattcactctaaaataaaaatgactgaatttgctagattaaaattaagatctctcgtttattgaaagacaccaataggccaggtgc

SEQ ID NO: 427619 - DNA, 201 bp, Homo sapiens
ggccaagcaggttgatttctaattgttcttaaagttgagattctgagcaaattaagtcataaaaatgtacaaagaatgtgtaatacgtattttcttacttycttgaattaatgactgctaaatcttgtgattttttttctagtttattttaaaagaaatttttaaaaaatcatagatatagagtcaagtcctcattgacac

SEQ ID NO: 427620 - DNA, 201 bp, Homo sapiens
gaaggcacggccagctgctaccgggtctacctgagcggggagaactactgggatgccgcgcagacctgccagcgcctgaatggctctctcgccaccttctycactgaccaggagctgcgctttgtcctggcccaggaatgggaccagcccgagcggagctttggttggaaggaccagcgcaagtgagtcctggattgggga

SEQ ID NO: 427621 - DNA, 201 bp, Homo sapiens
ctcccaaagtgctggtattacagccgtgagccactgtgcctggcccatactgtttctttagttctaatccagcgttccaggttcttgcttgctttctctgytgcatgtttgtttctctctttttctacagtgagaaccctggctcccaacagcatcagtaggtttactcatttgcttagtcttacactgcacccagaatag

SEQ ID NO: 427622 - DNA, 201 bp, Homo sapiens
ttgttttttgtttgttttttttcagacagggtctcactctgtcacccaggctggagtgcagtggcgcacttttggctcactgcaggcagtctctgcctttktgagctcaagtgatcctccaacctcagcctcccaggtagctgggactacaggtgtgccccaccacacctggctaattctttgtattttcggtagataggg

SEQ ID NO: 427623 - DNA, 201 bp, Homo sapiens
ctcaaactcccaacctcaggtgatccgtctgccttggcctcccaaagtgctgagattacaggcatgagccactgtgcctggcctaactcattcttttttaraaatctttttactttggaaatatttcaaacctacataacagtaggttgacttggcaagtggaaaccccttcacctggccttttcaggatgggagcgtgtc

SEQ ID NO: 427624 - DNA, 201 bp, Homo sapiens
gtagattagtttacctacagaactctgtctatggtcttagaataagaggacctggaagagttagaggcttgttgggggccatggcaggcctttgctgcagytcttggaggtttcttggccactcctgacagtgggagcagctcttcggatttccccatctaccctatttgcgaaggatgcctgctagaccagcatggtaag

SEQ ID NO: 427625 - DNA, 201 bp, Homo sapiens
gcatcactgcatgtcagggttattgttttagttggcggttctgggtttaggaatgaagactgctgttgtggaagatttgtgctgtgttaggctgcgccttygctgctccacttcccaagctagcttgtgggcactttccccaccccttccttcccacttcccagagtactgagtgattatatcctcttagcagcggtggcc

SEQ ID NO: 427626 - DNA, 201 bp, Homo sapiens
tgtgccaagccctgtgtcacgtgggaaggtctcatgggtgcaggaagccctgtagttaaagcccaggttggcccaggtggaggcaagctggcatcactgcmtgtcagggttattgttttagttggcggttctgggtttaggaatgaagactgctgttgtggaagatttgtgctgtgttaggctgcgccttcgctgctccac

SEQ ID NO: 427627 - DNA, 201 bp, Homo sapiens
ctgcaggtgcctgactccccagggagagggaacaccttgtcaagtaacctggcacgtggggctgagcccagcactcttgcccagctgcagaggcctagggrcctcacttctttccggctttgtctttggtttttcctttaaggcttctcctggggctgcccgtgcagaaggggtcctgatctccctgcctggccgcccttg

SEQ ID NO: 427628 - DNA, 201 bp, Homo sapiens
aggctgctcccacttaaccccaccccatcgttctcactaacacctgctatgtgccaagccctgtgtcacgtgggaaggtctcatgggtgcaggaagccctstagttaaagcccaggttggcccaggtggaggcaagctggcatcactgcatgtcagggttattgttttagttggcggttctgggtttaggaatgaagactg

SEQ ID NO: 427629 - DNA, 201 bp, Homo sapiens
tgaggtcttgttatgttgcacaggctggttttgaactcctgggctcaagtgttgctcccaccttggcctcctaaagtgttgggattacaggtataagccaytgcacttggcccatgcccatttaaaaaattgggttgttttcttattgaaatttgagcatgctttatatattctggttacaagcaagccctttatcagata

SEQ ID NO: 427630 - DNA, 201 bp, Homo sapiens; identical to SEQ ID NO: 123546

SEQ ID NO: 427631 - DNA, 201 bp, Homo sapiens
cagattatgcgtgtctctggtagaggtgtttgcctttccaaatgagggtttggatggtgttggcccggtcaggagcctctgggacagtcctttgtctgggrgcctctctggtgggtctttggggtcaaagcccagagaaagtggattcccagtgggcttcccagtgcttgggctgctgaagttccctggttggtcagcctg

SEQ ID NO: 427632 - DNA, 201 bp, Homo sapiens
gaccctgcaggtgcctgactccccagggagagggaacaccttgtcaagtaacctggcacgtggggctgagcccagcactcttgcccagctgcagaggcctrgggacctcacttctttccggctttgtctttggtttttcctttaaggcttctcctggggctgcccgtgcagaaggggtcctgatctccctgcctggccgcc

SEQ ID NO: 427633 - DNA, 201 bp, Homo sapiens
aatacactgaggaggaatggagggttccaggttcttggtctaatggttaattgtggctgaggaagacagacattaggccagaagagcatgtcccaattgcwgatttactcatcaaatagtgcttcagtaccagtcatggggcaagccctggatttataattatgaaaaggacctagctcctgtatggatggcgggggtgag

SEQ ID NO: 427634 - DNA, 201 bp, Homo sapiens
tgagttcccagggggcagagacctttctccttccttagtgggacttggcctaggacatgaaaggtgtgctgtaattcctataggcttagtactgaaggaamaccaattcattccaaccagggtattaggtaggggattaggtgacatttgaacttgtggtagttctttgagggggggttccaaaataagaagcagagatgg

SEQ ID NO: 427635 - DNA, 201 bp, Homo sapiens
cctgggtgacagaatgagactctgtctcaaaaacaaacaaacaaacaaatgggaagagattgatccagcccatgggctatggtttgctgacctactgccayttcctcaatggcctctcaccctttggtcccacagagctgcggtgcaaccctgggcagtttgcgtgtcgcagcggcaccatccagtgcatccccctcccct

SEQ ID NO: 427636 - DNA, 201 bp, Homo sapiens
aaaaaaataaataaataaaaaataaaaacaaaaaagagtttagatgttcaagggctatttgggcccaagtgctgacattgtgagcttgttggtttaacagsgtctcattccaccagccatcaccctttgtgtttcctctccatccgatagcttgggttcgtgctctgatagtctttgggtatgcagtggtatgggggagct

SEQ ID NO: 427637 - DNA, 201 bp, Homo sapiens
cacatgtggtaaactaaaagaaaaaaataagcgcagtgatacacaaaattctagttcctggtggagagacagagggatataagactgggagaagcaaaatratgcttgagttcctaaatggggtgtggggaggtcgctcacaactatattattaggcttatgaatcttacatgtgtgctacatacattctttgaaatgttt

SEQ ID NO: 427638 - DNA, 201 bp, Homo sapiens
taaactaaaagaaaaaaataagcgcagtgatacacaaaattctagttcctggtggagagacagagggatataagactgggagaagcaaaatgatgcttgakttcctaaatggggtgtggggaggtcgctcacaactatattattaggcttatgaatcttacatgtgtgctacatacattctttgaaatgtttcacatatta

SEQ ID NO: 427639 - DNA, 201 bp, Homo sapiens
gtgtggggaggtcgctcacaactatattattaggcttatgaatcttacatgtgtgctacatacattctttgaaatgtttcacatattatacagcttttttyctttccaaagaaaagccaatgggagagttaaactgacctggtgtagcagagcagctgcaaccatgggcctgcttgagtgagaacaacaagaaataagcag

SEQ ID NO: 427640 - DNA, 201 bp, Homo sapiens
caggctggtctcgaactcctgacctgaggtgatccacccacctcagcctcccaaagtgctaggattacaggcatgagccactgtgtccagccattttaagraaaatttttaaggtgattagttatttaataaattacctatgacattgaaattttaaaggggcatgagatcatcaaggaaggttgaggggaggaaaagcca

SEQ ID NO: 427641 - DNA, 201 bp, Homo sapiens
agtagtttttacaaagaacaaagttggaggatccatgccacctaatgtatgagttactgtacagccatagtaatcacaacagtgtggtatcgatgaagggrcagacacatagatcagtggaacacaacagtccagaaatagtcccacactacgtataatcaggtgatctctctgtttttgtttgtttaagacgagtcaagt

SEQ ID NO: 427642 - DNA, 201 bp, Homo sapiens
ctcccaggttgaagcgattctcctgcctcagcttcctgagtagctgggactacaggtgcctgccaccacgcccggctaattttttgtgtttttagtagagrcgggtttcacagtgttaggatggtgtcgatctcctgacctcgtgatccgcccacctcgccctcccaaagtggtgggattacaggtgtgagccaccgtgtc

SEQ ID NO: 427643 - DNA, 201 bp, Homo sapiens
tcaggccagctggtgaccaccctctgtgatctcaccacacagtgattgcaatcaaatctacctgtgtgtttccagaagcttgggaggcttattagagtgtyaccttcttttgtatggacggactttgtgggttttcaaccgtgtggatgtattacttcttaacaaacattcatgaaagtaaaagatgaggaaaaggtattt

SEQ ID NO: 427644 - DNA, 201 bp, Homo sapiens
tcatttgcttagtcttacactgcacccagaatagtttcagaagtactgcattcgcaccactagtaacagcagacctattaagtagaatttaatttaatttwattttttttagctctttgtgttttcagattgatggtgtatactcaaggttcttgggttcaaaagctacttggattaattctcttctctcttccatgtgat

SEQ ID NO: 427645 - DNA, 201 bp, Homo sapiens
cttggcatctctggagcatctaaggctgtttgtcacctccccaccccccatttctgccatccttctctctgcttctctgcttctctgtttaccttgccagkctatggtgtgtgtgtttttttttttttattaaagccagctaactctattgcttttgggggacaggggtctcaggagctcttggtggggcaggtccccttc

SEQ ID NO: 427646 - DNA, 201 bp, Homo sapiens; identical to SEQ ID NO: 123519

SEQ ID NO: 427647 - DNA, 201 bp, Homo sapiens
agtaaatgggaatgaggacccaaggacttggcatctctggagcatctaaggctgtttgtcacctccccaccccccatttctgccatccttctctctgcttstctgcttctctgtttaccttgccagtctatggtgtgtgtgtttttttttttttattaaagccagctaactctattgcttttgggggacaggggtctcagg

SEQ ID NO: 427648 - DNA, 201 bp, Homo sapiens; identical to SEQ ID NO: 123520

SEQ ID NO: 427649 - DNA, 201 bp, Homo sapiens
ggttgtgtgcatgtcctctcagcagtgatgacaggtgatctagtagtgcatgcatcctctcaacactgatggcaggtgatctagttattgactctctcctrctggacctgagcctttgacaggcagggagttcctctgcctctcttggttgttggcataaggacgacccgattggcatttagtagtttcttgactctaagt

SEQ ID NO: 427650 - DNA, 201 bp, Homo sapiens
ctttatgtttcctagggaagtgcccgacagggtggcaccactacgaaggcacggccagctgctaccgggtctacctgagcggggagaactactgggatgcygcgcagacctgccagcgcctgaatggctctctcgccaccttctccactgaccaggagctgcgctttgtcctggcccaggaatgggaccagcccgagcgga

SEQ ID NO: 427651 - DNA, 201 bp, Homo sapiens
ttacgcacagatcctcttagcagtaatgggaggtgagtgatctgtgtgtgtcctcttagcagtaagggcaggtgatctagctgtgcacgtgtcctcttagmcatggtgggaggtgatctggttgtgcaggtgtcctcttagcagtgatgggaggtgatgggaggtgatctcattatgcatgtttcctcttagcagtagtgg

SEQ ID NO: 427652 - DNA, 201 bp, Homo sapiens
attgtagagaccctgccctctgggtgagctgaccattggtctaggatggggtcagctggggtcaggccacagttcttggaggggagacagaccctgagtgrggcagctgccaccgtggtggggcattcgggagcatctggacagcccctggtgggcccgagtggaggctcattctgtggctgtggaggtggcgagacagga

SEQ ID NO: 427653 - DNA, 201 bp, Homo sapiens
gggacaactccccttctgtcctttatgtttcctagggaagtgcccgacagggtggcaccactacgaaggcacggccagctgctaccgggtctacctgagcrgggagaactactgggatgccgcgcagacctgccagcgcctgaatggctctctcgccaccttctccactgaccaggagctgcgctttgtcctggcccagga

SEQ ID NO: 427654 - DNA, 201 bp, Homo sapiens
actgaggtcggagtagggcatgggtggggtggatctggtagagggagcaaacttattctttcgattccatgactctccagatgagaacattgcagctaccyctggaggcgtcttgagttgccctgcagaacccgggagctgcagctggcttcctggctttggctgggcagggagggcaggcctctgggcctgatgtgttcc

SEQ ID NO: 427655 - DNA, 201 bp, Homo sapiens
aaaatcttgtgcccagtcctttatggtctccgtcttcttctttctctggtgctgtacctgagggattgtatggtgttgcccgctgaggccagcagtcaggkctgtggtcctgggccagcctgtgggacctagcgtttagaagcctcagtcagcagtgagggaggggccaggctggcctagcagccactggaaggtgcattg

SEQ ID NO: 427656 - DNA, 201 bp, Homo sapiens
ccctggctttatgagtgcattgtttagattgctattgactaatcaatggcttctgggtttccaggccccagagtcaaagtttgcctcatagagcataattmtcctggtagcttgtcctcctgacactggtggttgaagagaagacatgattctgagtgggatgacagcacattcagagttggggactgggggcctcatgct

SEQ ID NO: 427657 - DNA, 201 bp, Homo sapiens
cactcagtaaactcctggagcacagctggcagacagcaggttgggaagaccagcctcgcccactggaagcccaggagatccatgggtaggagtgtgcatcragataggtggagggtcctgggagcaggggcaggctggactctgctgctactttgtgggactgtggggcagcccctttcattggtacccctctccttgtac

SEQ ID NO: 427658 - DNA, 201 bp, Homo sapiens
ctccttgtgcagctgcagcacgttggtaatgcagaggacatcaacccctgtagcgggaaacctgggtcacaataaaaggatcaggaatcagagcagtagaygcctcagcggcagctccgatgtaaaaaaaaggtggggcggggcatcccagatctgtagaggaactgattttgattgtctacttcaaatttttagttttat

SEQ ID NO: 427659 - DNA, 201 bp, Homo sapiens
aattatcatacaacttagcagttcgactccaaagaattggaagcagagacttgaagagagatttgtacacccaagttcatagcagcattactcatagtagycaaaaggtggaagcaacccaagtgtccatcacagatgaatggatcaacaacaaggtagtctatccatccagtggaatatggtttaccttaaaaaggaagg

SEQ ID NO: 427660 - DNA, 201 bp, Homo sapiens
cctgggtgtgggagcacggggtgtgtggccctctcctgtgccctagccaggctcccagcccagatacaccgcacctcttggctctgcgcttgtgtcatctrtgtggaatgtctgcctcctccctagtgcctgcctggtggccaaggccctgaccggtgctcaacctggacagattcagtgatgcttctctggtctccccat

SEQ ID NO: 427661 - DNA, 201 bp, Homo sapiens
aggtcaccgggctcaggtgaggccatattatgcctggcttctttggggtgcctctggttccaggcccagcatctcctgcctgggtgatagaggtgactgamgtccccgactcctttttccttgccagccttttcacatagcctgccaactggccagcagcaactgagaaagtgcctgtgggtgcttgccccctgcccatcc

SEQ ID NO: 427662 - DNA, 201 bp, Homo sapiens
ttgagttgccctgcagaacccgggagctgcagctggcttcctggctttggctgggcagggagggcaggcctctgggcctgatgtgttccttgtatgcccgygtgtgcctcttcacacattcaccatgtgtccttcctgagagtgctgcagggatctgcctggctggtgcttgcaagaggctggggcttctctggtcttagt

SEQ ID NO: 427663 - DNA, 201 bp, Homo sapiens
cacctctaccaaaaaacacaagccttgaagatgcttctccctttgaggtcttcactttctgttgaaagtgtctcggacacaggtagcatattttatatttwagtgattcccagtcgaatagcaacccatccccatcacatgcctgacaggagctatggaactatgcttattgagtactgagtgagtatccagagtctcaga

SEQ ID NO: 427664 - DNA, 201 bp, Homo sapiens
ccaaagacacctctaccaaaaaacacaagccttgaagatgcttctccctttgaggtcttcactttctgttgaaagtgtctcggacacaggtagcatatttwatattttagtgattcccagtcgaatagcaacccatccccatcacatgcctgacaggagctatggaactatgcttattgagtactgagtgagtatccagag

SEQ ID NO: 427665 - DNA, 201 bp, Homo sapiens
tggctggtgcttgcaagaggctggggcttctctggtcttagtctgcgttctttctgtggggattccggccttaaaagcatacttgagtatgaggaaggtaycagtcagagcccacttctcaggagggtgttttctgactcctgcctggtggggtccctgaagatgatgccaagccacctgggcttcctctctggtacaggg

SEQ ID NO: 427666 - DNA, 201 bp, Homo sapiens
gacctgctgacccagtctgggacaggcacagtgggagctgccacagtgccccttgctggccgccctcaggagggggcctctggaccgtcagtgtggcgtargcagtgggtctgcttcagggaggcagcctcttgactttgtcacaacggttgcactgaagatggcccccacaagcccagttgtgaatatcaaggtgaccct

SEQ ID NO: 427667 - DNA, 201 bp, Homo sapiens
ctgtctctaggggccctgtggaggagaggctgcagctagaggctgggccacaacagtgaaagctgcccctgagtggaatgttgtcagtgtccctccacacyggggggctgctgggtgggaggacaaagctgtcctccagaggctgtgcctgaggctgggtgaaagtgggcactgtggcatgtaccatcagacatgtgcagt

SEQ ID NO: 427668 - DNA, 201 bp, Homo sapiens
gccctggctagatgtactttgttctaacagtgttgtagtgactgctcttggacagccactccctgtgccatgggccagagatccatggcattccagccctrggaagactctcagcacaatctggccaagtcttcagttgccttgttcgttccccaggcccaggtggggaaggtcagctcatgtcaagtggtgcagcagtga

SEQ ID NO: 427669 - DNA, 201 bp, Homo sapiens
ccatggccattcctcttactctcatcctaggtcagctctgtgcagagtgtgcctcaggtccagtggactgccttcccaagcagaactggcagcttccttasacacattctgattttgaaatggttaatactcatagcagctgcatcttagaattgagaaaatctcataagtaatctacttcagcaacttccaggcaaacac

SEQ ID NO: 427670 - DNA, 201 bp, Homo sapiens
tcctggatgtataggttattgtttttcaatgaatttgagtagtttgcagctgttagttcttcgactaatttttttttgcctctttctctctctcctctccrtttgttactcctgtttcacatatgttggtgtacttaatggtgtttcacatttctctgggagctctgttcatttctgttcattcttttttctctattttag

SEQ ID NO: 427671 - DNA, 201 bp, Homo sapiens
atgctccattgaaactaggtctgctgatgcagaggtctctccggtgccactggctgcttcttagggcctccaggtagattagtttacctacagaactctgyctatggtcttagaataagaggacctggaagagttagaggcttgttgggggccatggcaggcctttgctgcagttcttggaggtttcttggccactcctga

SEQ ID NO: 427672 - DNA, 201 bp, Homo sapiens
ctggagcacagctggcagacagcaggttgggaagaccagcctcgcccactggaagcccaggagatccatgggtaggagtgtgcatcgagataggtggaggstcctgggagcaggggcaggctggactctgctgctactttgtgggactgtggggcagcccctttcattggtacccctctccttgtacaagtgcagttgctg

SEQ ID NO: 427673 - DNA, 201 bp, Homo sapiens
taaactcctggagcacagctggcagacagcaggttgggaagaccagcctcgcccactggaagcccaggagatccatgggtaggagtgtgcatcgagatagstggagggtcctgggagcaggggcaggctggactctgctgctactttgtgggactgtggggcagcccctttcattggtacccctctccttgtacaagtgca

SEQ ID NO: 427674 - DNA, 201 bp, Homo sapiens
tcttgatttgtttactgcttgagttgtgggaggaatctgggtgtgtccacctgccttgtccctgcgcccaccttttaatatgaataatttcagatctataraaaactcataatcatagtgcaataaacactcctgcagcctttacccgggttcaccagctgatagtgtcctgccgcacctttacccgggttcacctgccgc

SEQ ID NO: 427675 - DNA, 201 bp, Homo sapiens
gattggggacctgaggggctggagtcagagtctgatgactactgagcacatggcctctgaccactcagtaaactcctggagcacagctggcagacagcagsttgggaagaccagcctcgcccactggaagcccaggagatccatgggtaggagtgtgcatcgagataggtggagggtcctgggagcaggggcaggctggac

SEQ ID NO: 427676 - DNA, 201 bp, Homo sapiens
tttcttccgtgtttcgcagtaccattctgttgaaaggcctgttctttcttcagggagctgcctttgcacctaggtctttaaaaaatgttttttctcagcartgttgaaaatttttcagtgtacaggacttcacatcttttgttagatttatacctaagtatttcttattttttgatactattgttaatggtaatttttaaa

SEQ ID NO: 427677 - DNA, 201 bp, Homo sapiens
ctgagaccccttgtgaaaatgagtttgctgaaggcagtgccttgcttccaggcagcgaggctggcgtttctgtgcagcagggggctgcaagtcttcctctyggtggctgcagagttgtgagtgactctcgcttagcaaagactagagatggcctgtccgtgccaaaacacagtgccgggtccggagcagaagaatccaaca

SEQ ID NO: 427678 - DNA, 201 bp, Homo sapiens
tctccactaaggacctcccacctgcgtcttcatcttgtccttcaatgagcagacgagagttcagaaaaatgcatttcagagccaaagatgatgatgatgaygacgacgatgatgcagaaatgtaggggccatacaaaataatgtccttgagtatttagtaccattaacaatttgacaatttagcacattacaagatttata

SEQ ID NO: 427679 - DNA, 201 bp, Homo sapiens
ctagcaccctcccacccgtgtgtgtgtctagacccgggctctgatcctagcacctgcccacccgtgtgtgtgtctaaaccaggctctgaggccacttgtgytcatcgctctgctcttagcgtgctatggagtcatgctggcccattgccgtgcagcctcaccgccagaggcttgaagagaaaggcagagtgggtggggaaa

SEQ ID NO: 427680 - DNA, 201 bp, Homo sapiens
ctagagccgctgggtggggcacattgcaaatgcgggtgcagatatgtattgctcatgactgaagtcatgttttcttctccactaaggacctcccacctgcrtcttcatcttgtccttcaatgagcagacgagagttcagaaaaatgcatttcagagccaaagatgatgatgatgacgacgacgatgatgcagaaatgtagg

SEQ ID NO: 427681 - DNA, 201 bp, Homo sapiens
cacgaagttgttcggcagccaggttggcctctgcccaggaagttgctggttccacgtctgccaagacagcatgtctggtgagccctgttaccgtggagaaygccaagatcctgactcgagggtccatttttatacaaaattgccactccaagatgtgttgctttagaaaaatatcgactgttacttatctgccagaggggg

SEQ ID NO: 427682 - DNA, 201 bp, Homo sapiens
aaattctcgtctacatgttcatgctgccttcctgagagcactctctgagtggctctcaatctctctagctcacaggtgcagtgcggtcttcagcgcgcttraaagcacgaagttgttcggcagccaggttggcctctgcccaggaagttgctggttccacgtctgccaagacagcatgtctggtgagccctgttaccgtgg

SEQ ID NO: 427683 - DNA, 201 bp, Homo sapiens
catttttatacaaaattgccactccaagatgtgttgctttagaaaaatatcgactgttacttatctgccagagggggactattgcagatgaaaaggtgacwgcactgtaattgccttcagagaaagacacactctgcaggccagggctggctctcctagcacccgcccacccgtgtgtgtgtctagacccgggctctgatc

SEQ ID NO: 427684 - DNA, 201 bp, Homo sapiens
gaacgccaagatcctgactcgagggtccatttttatacaaaattgccactccaagatgtgttgctttagaaaaatatcgactgttacttatctgccagagrgggactattgcagatgaaaaggtgacagcactgtaattgccttcagagaaagacacactctgcaggccagggctggctctcctagcacccgcccacccgt

SEQ ID NO: 427685 - DNA, 201 bp, Homo sapiens
cttcagatggacaacagcgtctttctagatgacgacagcaatcagccaatgcccgtgagccggttctttggaaacgttgagctcatgcaggtaagagcggygccttcctcctcccgtgggtactcaggcagcagctgcacattcaggtcacacactccccactcagtgcaggtaaataatgcctcgacacaacattaaaca

SEQ ID NO: 427686 - DNA, 201 bp, Homo sapiens
gaagtcagaattacagaagcttgtccctaagaatgacagcgcttctttgccaaaagtgacacctgagaccccttgtgaaaatgagtttgctgaaggcagtkccttgcttccaggcagcgaggctggcgtttctgtgcagcagggggctgcaagtcttcctctcggtggctgcagagttgtgagtgactctcgcttagcaaa

SEQ ID NO: 427687 - DNA, 201 bp, Homo sapiens
cccccggcagtagttggggggctccaggccacgctcccgggagaaggagggctgccaggtcacgcccctgtgaaaagggggctccgggccacgccctcggragaagtggagctcacaggtcacgtccccgggagaagggggctcccaggttacccacccccgcagaatggggcctctgggccacacccccgagagaagggg

SEQ ID NO: 427688 - DNA, 201 bp, Homo sapiens
ggcgcgcggtgcttggctgcggtgctcacactcatgaggagccggaaggtgagggctgggtcccggcagcagctgcgccgggcagggcggggactctgggycacctgctgtctggagaaccggggcggggtcacggggtgcctgtggcctaggagcggcctccgcttgggcctcgcccccggcagtagttggggggctcca

SEQ ID NO: 427689 - DNA, 201 bp, Homo sapiens
gtgtttccatgaaatcaggtttgtggtttttttgaacatccaccccgcgcttgctgttaatttcttttgttttgaacccagcacctttccttctctttacycgatcagcccagtagggaggaagttctcatctagaggcgagtgctgggactcaggcattttcacacgtctaaaagggaagagcgctctgcgagccctaga

SEQ ID NO: 427690 - DNA, 201 bp, Homo sapiens
tagcacccgcccacccgtgtgtgtgtctagacccgggccctgatcctagcacccgcccacccgtgtgtgtgtctagacccgggccctgatcctagcaccckcccacccgtgtgtgtgtctagacccgggctctgatcctagcacccgcccacccgtgtgtgtgtctagacccgggccctgatcctagcaccctcccacccg

SEQ ID NO: 427691 - DNA, 201 bp, Homo sapiens
tactattttattattattattttttcagagacactgtctcactctgtcacccaggtggagtgcagtggtgcagtcatagctcactacagcctcagactccygggatcaagtgatcctctcacctcagcctcccacatagctgggactacaggtgcacaccaccacacctggctaatttttaaaaaaattttttaaagatgg

SEQ ID NO: 427692 - DNA, 201 bp, Homo sapiens
caagatttatataaaatgtatctccaagagaatgtcttaatcaaacttcagaactgacccatctaagtcaatagtgcaaagcacccaatacctgtggaggrtgtactcatgggaactaaaactcaaaccatctttgaggttgcaaagctgctgtactgtgccaatgtcctttctttttttttttttttttttttccttgga

SEQ ID NO: 427693 - DNA, 201 bp, Homo sapiens
gtgcaaagcacccaatacctgtggaggatgtactcatgggaactaaaactcaaaccatctttgaggttgcaaagctgctgtactgtgccaatgtcctttcyttttttttttttttttttttccttggagacagagtttctctcttgtcgcccaggctggagtgcaatggcgcaatctcggctcactgcaacctccacctcc

SEQ ID NO: 427694 - DNA, 201 bp, Homo sapiens
tgattctcctgcctcagcctcctgagtagctgggattacaggcatacaccaccacacccagctagtttttgtattattagtagacacgggggtttctccaygttggccaggctggtctcaaactcctgacctcgtgatacgcccgcctcagcctcccaaagtgctgggattacaggcgcgagccaccatgcccggccagtg

SEQ ID NO: 427695 - DNA, 201 bp, Homo sapiens
acgccactagggaaaactgaaagtgtaggagtggtgtggggtgtgtctagattcagtctcgcttgtattttgtcccttggtggcaaaacagtgaaatgacratctgtgaaagttgtggtcacagcatctttatcatttccgatgtgagaagaaatactagcctctggattgaggcctgttttatttgctagatatgtctgg

SEQ ID NO: 427696 - DNA, 201 bp, Homo sapiens
ggaagagcgctctgcgagccctagagccgctgggtggggcacattgcaaatgcgggtgcagatatgtattgctcatgactgaagtcatgttttcttctccwctaaggacctcccacctgcgtcttcatcttgtccttcaatgagcagacgagagttcagaaaaatgcatttcagagccaaagatgatgatgatgacgacga

SEQ ID NO: 427697 - DNA, 201 bp, Homo sapiens
ggtggggaaaggaatctcatgccgtctgccgttcaccctagcccagccatcgattccgaggagcgagttcctgaacttaccggtgaagtagagccgcttcrcggagcctacagttgaggggttaggacttggccatatgccagcgtgtagcacagagctttgctcatgatgaggtgcttggtaaaattttgtcgaagtcaa

SEQ ID NO: 427698 - DNA, 201 bp, Homo sapiens
caggctggtctcaaactcctgacctcgtgatacgcccgcctcagcctcccaaagtgctgggattacaggcgcgagccaccatgcccggccagtgtcctttyttatacacgtacatacatgatgatggcttgagtcagctgcagggcagtgggcttaatgagagggatctttgtaaagacagctcttcacttcagctcagta

SEQ ID NO: 427699 - DNA, 201 bp, Homo sapiens
ggcttgaagagaaaggcagagtgggtggggaaaggaatctcatgccgtctgccgttcaccctagcccagccatcgattccgaggagcgagttcctgaactyaccggtgaagtagagccgcttcacggagcctacagttgaggggttaggacttggccatatgccagcgtgtagcacagagctttgctcatgatgaggtgct

SEQ ID NO: 427700 - DNA, 201 bp, Homo sapiens; identical to SEQ ID NO: 133979

SEQ ID NO: 427701 - DNA, 201 bp, Homo sapiens; identical to SEQ ID NO: 133980

SEQ ID NO: 427702 - DNA, 201 bp, Homo sapiens; identical to SEQ ID NO: 133981

SEQ ID NO: 427703 - DNA, 201 bp, Homo sapiens; identical to SEQ ID NO: 133987

SEQ ID NO: 427704 - DNA, 201 bp, Homo sapiens; identical to SEQ ID NO: 134003

SEQ ID NO: 427705 - DNA, 201 bp, Homo sapiens; identical to SEQ ID NO: 133972

SEQ ID NO: 427706 - DNA, 201 bp, Homo sapiens; identical to SEQ ID NO: 133992

SEQ ID NO: 427707 - DNA, 201 bp, Homo sapiens; identical to SEQ ID NO: 133993

SEQ ID NO: 427708 - DNA, 201 bp, Homo sapiens; identical to SEQ ID NO: 134007

SEQ ID NO: 427709 - DNA, 201 bp, Homo sapiens; identical to SEQ ID NO: 133978

SEQ ID NO: 427710 - DNA, 201 bp, Homo sapiens
tttttttctgctggaaacagactcgattcatattgaatataatatatttgtgtatttaacagggaggggaagagggggcgatcgcggcggagctggccccsccgcctggtactcaagcccgcggggacattgggaaggggacccccgccccctgccctcccctctctgcaccgtactgtggaaaagaaacacgcacttagt

SEQ ID NO: 427711 - DNA, 201 bp, Homo sapiens
ggggaagagggggcgatcgcggcggagctggccccgccgcctggtactcaagcccgcggggacattgggaaggggacccccgccccctgccctcccctctytgcaccgtactgtggaaaagaaacacgcacttagtctctaaagagtttattttaagacgtgtttgtgtttgtgtgtgtttgttctttttattgaatctat

SEQ ID NO: 427712 - DNA, 201 bp, Homo sapiens
aagagggggcgatcgcggcggagctggccccgccgcctggtactcaagcccgcggggacattgggaaggggacccccgccccctgccctcccctctctgcmccgtactgtggaaaagaaacacgcacttagtctctaaagagtttattttaagacgtgtttgtgtttgtgtgtgtttgttctttttattgaatctatttaa

SEQ ID NO: 427713 - DNA, 201 bp, Homo sapiens
ggggcggcgtcaccgaggagcaggagggcttcgccgacggctttgtcaaagccctggacgatctgcacaagatgaaccacgtgacaccccccaacgtgtcmctgggcgctaccggggggcccccggctgggcccgggggcgtctacgccggcccggagccacctcccgtttacaccaacctcagcagctactccccagcct

SEQ ID NO: 427714 - DNA, 201 bp, Homo sapiens
tgcccttggtactgaggcgccgggtacatcgcggggtacccggacagtagcccgtagggggcgcccgacgccgcaggcactgaaagcccggtccgcgggargtagccacccgaggagccggcgccgggccccgggtacaccggttgcagcgccagcgccttgggctcgggggccggggctggagccagggctgggcccacg

SEQ ID NO: 427715 - DNA, 201 bp, Homo sapiens
caacccgagtgatcctccgaacccaaaagcccagccaccagccccgggccgccagcatatgcgcccagagtctcgggcggcggcggatattgcgccccggrggcctcgctgggcgccagagcgcaggtctggggcgcgccaccgggctccgggcccgagaagttggtgaggaggagatccaggtcccaggtggcgtccgcg

SEQ ID NO: 427716 - DNA, 201 bp, Homo sapiens
aggctaccttcgttttctattaccgaaatagatcacacttagaacctcaaacccctagaccaccctcctcaccccctgccagactaagctgagatctcctstcctggactgagcgtacctcagtcctggttaagtctcttgatttcaggtcaagatgcaggtctggaccccaagatctgtgactgtggccctggattccag

SEQ ID NO: 427717 - DNA, 201 bp, Homo sapiens
tctacgccggctggctcaaggtaggtgggtgatccaggctggaatttcgtgggtggggcgggcatggggttcccaagtttccacctaactgctccctctcytctcaggtagctgagcagctcatcaaccccttcggagaggacgatgatgactttgagaccaactttctgatcgatagaaacttccaggtgagactcagtt

SEQ ID NO: 427718 - DNA, 201 bp, Homo sapiens
tgcctctttttatattcggtgtcagtggccctgatgcctggtttccaaggggaaaccaagaactagctaagacccccatcataatgatgcctaatcctagmcttggaccccaatgacccccctgagccctgccccgccctgcccaggtggtgaccatcgcactgtacagctacttcctggcttgcctcattggtcgccagt

SEQ ID NO: 427719 - DNA, 201 bp, Homo sapiens
ccggcgcacactcatgcgctacgcagggctctcggccgtgctcatcctgcgctccgtcagcaccgcggtgttcaagcgcttccccaccatagaccacgtgrtggaggctggtgagtactcggccagaggcagggcagagaccgggcaaggaccaggtggaggggggcaaggggcgagctatccctgacccctttcctccag

SEQ ID NO: 427720 - DNA, 201 bp, Homo sapiens
aggctggagtgcagtggcataatcttctcttacttccacctctgcctcccgggttcaagcgattctcctgcctcagcctcccgagtagctgggattatggrtgccagccaccatgcctggctaatttttttgtatttttagtagagatggggtttcaccgtgttgaccaggctggtctcaaacttctgacctcaagtgatc

SEQ ID NO: 427721 - DNA, 201 bp, Homo sapiens
ttgaaaacctgaactcatcctacaacaagtactgggtgccctgcgtctggttctccaacctggcggcacaggcccgacgcgagggccgcatccgcgacaayagcgcccttaagctgctgctcgaggtgggcccaaccaggaggtcattcatatagaataccagggaaattgtacccctggagctgtgtcaacggcggccct

SEQ ID NO: 427722 - DNA, 201 bp, Homo sapiens
ccgacgcgctcatgtgcgtggtggcgggcaccgtgcacggacgcgacgaccgcggccgcctctaccggcgcacactcatgcgctacgcagggctctcggcygtgctcatcctgcgctccgtcagcaccgcggtgttcaagcgcttccccaccatagaccacgtggtggaggctggtgagtactcggccagaggcagggcag

SEQ ID NO: 427723 - DNA, 201 bp, Homo sapiens; identical to SEQ ID NO: 133783

SEQ ID NO: 427724 - DNA, 201 bp, Homo sapiens
catactgggatcccaatgtcacatctgaggtgactcccaagtagccagtgacccaaagggctgctctgccttttttttttttttttttttttttttttttkgagatggagtctcgctctgttgcccaagctggagtgcaatggtgcgatctcagctcactgcaacctccgcctcccgggttcaagtgattcttctgcctca

SEQ ID NO: 427725 - DNA, 201 bp, Homo sapiens
ctgtcggtcccgcaggctggccaaagaagacatgcagttccagcggctggacggcttggatggaccgatgggagaggcgcccggcgacttcctgcagcgcytcctgccggcgggcgcgggcatggtcgcgggaggcccgctgggccggcgcctgtcctttctactccgcaagaacagctgcgtgtcggaggcgtctactgg

SEQ ID NO: 427726 - DNA, 201 bp, Homo sapiens; identical to SEQ ID NO: 133779

SEQ ID NO: 427727 - DNA, 201 bp, Homo sapiens
ggtacaatgccagcaacagggggaaggcttaggtccgacagcgcaaagaagacaaaccaagcacacagctccggcactaagtcaagttctttacttcccaraagtgatggctaaggggagggaggagggtgagaagaggaagacagaaagagccagagagaatgaggaggtgagaagggggggacagtaaaccactgttct

SEQ ID NO: 427728 - DNA, 201 bp, Homo sapiens
ggatacgggttaggacgggggtgccaggaaccagggtcaggactgccctgagacaggtgacccattcccagtgtcacccagaagactctgggtttgagctraagattataaagtcaagttatctggggacccattgacagccctcctaccctgccaggcacactcataaaaggcctggataccagacagggagggagaagg

SEQ ID NO: 427729 - DNA, 201 bp, Homo sapiens; identical to SEQ ID NO: 133866

SEQ ID NO: 427730 - DNA, 201 bp, Homo sapiens; identical to SEQ ID NO: 23430

SEQ ID NO: 427731 - DNA, 201 bp, Homo sapiens; identical to SEQ ID NO: 133867

SEQ ID NO: 427732 - DNA, 201 bp, Homo sapiens
ttttttttttgagacggagtctcacctgtcaccaggctggagtgcagtggtgcaatctcggctcactgcaacctccgcctcccaggttcaagcaattctgyctcatcctcccgagtagctgggactacaggcgcgcaccaccatgcccagctaatttttgtatttttcatagagacggggtttcaccatgttggccaggat

SEQ ID NO: 427733 - DNA, 201 bp, Homo sapiens; identical to SEQ ID NO: 133841

SEQ ID NO: 427734 - DNA, 201 bp, Homo sapiens; identical to SEQ ID NO: 133821

SEQ ID NO: 427735 - DNA, 201 bp, Homo sapiens; identical to SEQ ID NO: 133802

SEQ ID NO: 427736 - DNA, 201 bp, Homo sapiens; identical to SEQ ID NO: 133804

SEQ ID NO: 427737 - DNA, 201 bp, Homo sapiens; identical to SEQ ID NO: 133806

SEQ ID NO: 427738 - DNA, 201 bp, Homo sapiens
cctatagtctcaagctactcgagaggctgaggtgagaagattgcttgagcccaggagttcaagattgcagtgacctatgattccaccactgcactgcagtytgggcaacagcaaggcttgtctcaaaaaaaaagaaaaaggaaaataaagtcaatctgtcatcaagacacctagaaccagcaagctgtcccactcatgtga

SEQ ID NO: 427739 - DNA, 201 bp, Homo sapiens; identical to SEQ ID NO: 133858

SEQ ID NO: 427740 - DNA, 201 bp, Homo sapiens; identical to SEQ ID NO: 133870

SEQ ID NO: 427741 - DNA, 201 bp, Homo sapiens; identical to SEQ ID NO: 23474

SEQ ID NO: 427742 - DNA, 201 bp, Homo sapiens
cactttgggaggccgaggcgggcagatcacgaggtcaggagtttgagaccagcctggccaatatggtgaaaccccatctctactaaaaatacaaaaattakcctggcatggtggcgctcgcctgcagtcccagctacttaggaagctgaggcagaagaatcccttgaacccgggaggtggatgttgcagtgagccaagatt

SEQ ID NO: 427743 - DNA, 201 bp, Homo sapiens
agtgaaagacggagggactagaggggtgggcaggactagaagaggttgtttttggccgggcgaggtggttcacacctgtaatcccagcactttgggaggcygaggtgggtggatcacctgaggtcaggagtttgagaccagcctgaccaacatggtgaaaccccatctctactaaaaatacaaaaattagctgggagtggt

SEQ ID NO: 427744 - DNA, 201 bp, Homo sapiens
agctctccccggagccccagacaccctccctagccccagcgaagtgcagtgcacccagcagtgcagtgaccccagtcccacccgcatccctcttgggctcrggcaccaagcctcaagtggggctgacctcccggtgccctgctgaagctgtgcccccagcaggcctgaccaaaaaaggagtgtccagtcccgcacccccgg

SEQ ID NO: 427745 - DNA, 201 bp, Homo sapiens
gctgtgagatagtaaacacagagtcacagtgtttactgtctctctctctctctctcttttttttttcttttcttgagacagagtctcgctctgttgcccargctggagtgcaatggcgggatctcggctcactgcaatttccgccttctgggttcaagcgattctcctgcctcagcttcccaagtagctgggattacaggc

SEQ ID NO: 427746 - DNA, 201 bp, Homo sapiens
aggtggtggaggagcgcaccacgctgagcggtcctcgctccaagcccgcctccccaaagctctccccggagccccagacaccctccctagccccagcgaartgcagtgcacccagcagtgcagtgaccccagtcccacccgcatccctcttgggctcaggcaccaagcctcaagtggggctgacctcccggtgccctgctg

SEQ ID NO: 427747 - DNA, 201 bp, Homo sapiens
caaggggttgcaggaacccgcacccctggcgccttccgtgcccgaggccccccggggccgggagcgctgggtgttggaggtggtggaggagcgcaccacgmtgagcggtcctcgctccaagcccgcctccccaaagctctccccggagccccagacaccctccctagccccagcgaagtgcagtgcacccagcagtgcagt

SEQ ID NO: 427748 - DNA, 201 bp, Homo sapiens
ctcaggtgggcaggcatccctcctccttcgtaccaagctagtggtcttaggacttgtgcttagagagacccctgtccccgcgaataaaagggttacatctyggggcgggggctctctgcgggcttggaggcagaggactcgacaaaatgggcttctctccccgcagccccgggcgctccccctcctcctacgacaacgaga

SEQ ID NO: 427749 - DNA, 201 bp, Homo sapiens
gccaagcagcactgagctaaaggaagttctttatcttgataggtgggttgtagctggagagggaagggccagaaggggtgggtggttaccgttgtgaggcsgtgaaatgggaggagccctgagctctggcgtccaggtcaaggacgcttggccccctccctgtcccgcagcaagaagcgcagctccctcttccggaagatc

SEQ ID NO: 427750 - DNA, 201 bp, Homo sapiens
cctggactgggagtggccaaaaggttgggcaggacctgaagtgggaggagggaggagccaagcagcactgagttaagggaagttctgtcttgataggtggsttgtagtgaaagacggagggactagaggggtgggcaggactagaagaggttgtttttggccgggcgaggtggttcacacctgtaatcccagcactttggg

SEQ ID NO: 427751 - DNA, 201 bp, Homo sapiens
ccagctgtgacaacagagctagactctttcaaaaaaaaaaaaaaaaaaaaaaaagaggggctgtaaaagtggaaggagccaagaatggaagctgtgccaartttctaggatcagagaaaagcattgtaggagggtcttgcacatataggcaggcccaggagatgtgaactggaaagggagatgtccagagacggagggggt

SEQ ID NO: 427752 - DNA, 201 bp, Homo sapiens
tagaatctctctggaaaggcttcactgggtgggggcttttccagttctcggtgtccactctgaatgataagagaggggaccgtggggaggagagtggagayggatcctccctccaattcccggtgcctgcctggaagagtccctctttatccccttgattctgagggccttgaggaatcttagagtgcagatatattcccc

SEQ ID NO: 427753 - DNA, 201 bp, Homo sapiens
tcagagcctcagtttcccttatctataaaacgggtacaacataacatgagaagttggtgctatggtgcatgtccagagagaggaatgcctccctttttatrcgggcccatttcctggcctgcaggcggcgactgtgccaccctgctgaagaatattggagcgctgcccgtagagatggcccgcatgtactttgctgagacg

SEQ ID NO: 427754 - DNA, 201 bp, Homo sapiens
gtctgggcaacatagggagacccttgtccctacaaaaaattaaaaattatctgggcgtggtggtgcacacctgtggtccccactatttgggaggctgagaygggaggatcgctggagtctgggaggtataggctacagttgagctgagatcgcactgcagcattccagtctggatgacagagtgagaccctgtctcaaaag

SEQ ID NO: 427755 - DNA, 201 bp, Homo sapiens
gccaggctaactttagtattcttttttcagagatggggtttcaccatgttgaccaggctggtctcgaactcctgacctcaagtgatccacccgccttggcytcccaaagtgctgggatttcaggcgtgagctaccatgcccagccttgaacaattttttaaaaatcagctgggcatggtggctcacatctgtagtcccagc

SEQ ID NO: 427756 - DNA, 201 bp, Homo sapiens
gccaagaaaccgccgggggagaatgacttcgataccatcaagctcataagcaacggtgcctacgggtgagccacccggggctctggcggggggagggtggyggaggccgggtgtctcggaggtgacggccggtcctcgctctctccccctgcagcgctgtctacctggtgcggcaccgcgacacgcggcagcgctttgcca

SEQ ID NO: 427757 - DNA, 201 bp, Homo sapiens
gagcatcacagacgaggatggtggccgtcgctccccagccgtgcggccccgctcacggagcctcaggtgggcaggcatccctcctccttcgtaccaagctrgtggtcttaggacttgtgcttagagagacccctgtccccgcgaataaaagggttacatcttggggcgggggctctctgcgggcttggaggcagaggactc

SEQ ID NO: 427758 - DNA, 201 bp, Homo sapiens
cagtttcccttatctataaaacgggtacaacataacatgagaagttggtgctatggtgcatgtccagagagaggaatgcctccctttttatgcgggcccayttcctggcctgcaggcggcgactgtgccaccctgctgaagaatattggagcgctgcccgtagagatggcccgcatgtactttgctgagacggtgctagcc

SEQ ID NO: 427759 - DNA, 201 bp, Homo sapiens
acccgtgacccctttccaggtgccggctggtgggcgcagggggactgggggtgagcaggcccagaacccagctcgtgctcactctcagtccctccctagaygtggtgcatctggaggaacaggacagtggtggttccaacacccctgagcaagacgatctctctgaggtaaggctgggtggctaagcggtcagtaccctgg

SEQ ID NO: 427760 - DNA, 201 bp, Homo sapiens
gtgtgcccttcttcggagacacaccagaggagctatttggacaggtcatcagtggtacgtggcttggcagtgtacaggggcagagtgtggtgtgcacggaragatggacaggctcagggttccagggatttcaaaagcgaccccccagaggatcgcttgcactcaggaggtcaaggctgcagtgagccatgatcgtgccac

SEQ ID NO: 427761 - DNA, 201 bp, Homo sapiens
gctcagggttccagggatttcaaaagcgaccccccagaggatcgcttgcactcaggaggtcaaggctgcagtgagccatgatcgtgccactgcactccagytgggtgacacagtgagatcctgtgtccaaacaacaacaacaacaaaaaccgcccctaagttccgttttgttttgcagatgacatcctgtggcccgagggg

SEQ ID NO: 427762 - DNA, 201 bp, Homo sapiens
ttgtcgtagagcctgcgcggcccggggctaaggctgtggtgcctcagcctctgggcgcggactccaaggggttgcaggaacccgcacccctggcgccttcygtgcccgaggccccccggggccgggagcgctgggtgttggaggtggtggaggagcgcaccacgctgagcggtcctcgctccaagcccgcctccccaaagc

SEQ ID NO: 427763 - DNA, 201 bp, Homo sapiens
gcatgagccaccgcgcccggcctttttaaccattttaaaatgaacaattcggggccgggtgcagtggcttaggcctgtaatcccagcactttgggaggccraggcaggaggattgtttgtgctaaggcatttgagaccagcctgggcagcataaaaaatcagctgggcgtggtggtgcacccctgtagtcccagctactcg

SEQ ID NO: 427764 - DNA, 201 bp, Homo sapiens
ctgaagcaggaggattgcttgagctgggaggttgaggatgcagtgagctgtgatcttgccaccgcactctagactgggcaatggagtaagaccctgtctcaaaaaaaaaaaaaaaaaatctagtgaagaccaagaatctgcatctaaggcttccagctccaaggttcagacaccaggagatagagggctgtgcttccagat

SEQ ID NO: 427765 - DNA, 201 bp, Homo sapiens
cacatggaaggaaatctagcctttgtaggataaaaaggaaatagatattgagaaactgaaataccaatgccaattacagtaaatctggcagaggggcagakgcagtggccaacactttgggaagctgaggcaggaggatcctttgaacccaagagttggagaccagcttgggcaacacaatgaaactcgtttctacaaaaa

SEQ ID NO: 427766 - DNA, 201 bp, Homo sapiens
ttctactaaaattacaaaaattagccaggagtggcggtgcacgcctatcatcccagctactcgggaggctgaggaacaagaatctcttgaacccgggggcrgtgagtgggcagaggttgcagtgagccgagatggagccactgcactctagcctgggtgacagagccagactctgactcaaaaaaaaaaaaaaaaaaaaaa

SEQ ID NO: 427767 - DNA, 201 bp, Homo sapiens
tgtagtggctcatgcctgtagtcccagcactttgggaagccaaggtggcaggattgcttgagcccaggagtttgaaaccagtctggacaacatagcaagaycctgtctctacttaaaaaaaaatagaagaagaagaagttctaataatactgtggtggaaccagctgagtgggggtggtcctgtgatattgggtacctgcc

SEQ ID NO: 427768 - DNA, 201 bp, Homo sapiens
tgtaatcccagcactttgggaggccgaggggggcggatcacgaggtcaagagatcgagaccatcctggctaacacggtgacaccccgtctctactaaaaamacacacacacacaaaattagccgggcgtggtggcggacgcctgtagtcccagctactcgggaggctgaggcaggagaatggcgtaaacccgggaggcgga

SEQ ID NO: 427769 - DNA, 201 bp, Homo sapiens
gggcttggtggcacgtgcctgtaatcccagctactcaggaggctgaagcaggagaatcgcttgaatccgggaggcagtggttgcagtgagccgaggttgcrccactgcactccagcctgggcaacagagtgagattctgtctcaaaaaaaataaaaataaaaataaaaataattagctaggtgtagtggcacacacctgct

SEQ ID NO: 427770 - DNA, 201 bp, Homo sapiens
cacatctggcttaaattttgatattttggcttatgatagatttttggcattaattttaggcttttcaagtattgcaataagatattagttttttcttttctttttttttttttttgagacagtctcactctgctacccaggctggagtgtagtgatgtgatctcggctcactgcaacctccacctccctggttcaagcgat

SEQ ID NO: 427771 - DNA, 201 bp, Homo sapiens
aacccctgacctcaagtaattcaccctcctctgcctcccaaaatgctgggattacaggcgtgagccactgtgcccggcctctttttcttttctttttttctttttttttttttgagacagggtctctctctctgtcacccaggcaggagtgcagtggtataatcagctcactgcagccttagccccctgggctcaagtaat

SEQ ID NO: 427772 - DNA, 201 bp, Homo sapiens
ctgtgtggcttgggcttcagtctcctcacctgtaagatgggacagtagcagcagtatgtactctgaggggctgagagaggggccgggctgaggcagagtgmctatgagccctgtccctctgtgtcccctgccacaggcctatgaacgctctgagagcttggaggtggccttcgttactcagctggtgaagaagttgcttat

SEQ ID NO: 427773 - DNA, 201 bp, Homo sapiens
cctcagcctcccaaagtgctgggattacaggcatgagccaccgtgcccagcctcattatttttactgtgtggcttgggcttcagtctcctcacctgtaagrtgggacagtagcagcagtatgtactctgaggggctgagagaggggccgggctgaggcagagtgcctatgagccctgtccctctgtgtcccctgccacagg

SEQ ID NO: 427774 - DNA, 201 bp, Homo sapiens
ccctgagcaagacgatctctctgaggtaaggctgggtggctaagcggtcagtaccctggttcctgggagggcagggtggggctcatctccggcttctttgycctcaggctttgtggatctcttggtcctacactctgagcctcagttttcccatccataaaatgggattaataatagctcttccagagcctggcatgctgg

SEQ ID NO: 427775 - DNA, 201 bp, Homo sapiens
cctgtaatcccagcactttgggaggccaaggtgggcagatcacctgaggtcgggagttcgagaccagcctaaccaacatggagaaaccccgtttctacttaaaaaaaaaaaaaatgcaaaaattagccaagcctggtggcacatgcctctaatcccagctacttgtgaggctgaggcagaagaatcacttgaatccaggag

SEQ ID NO: 427776 - DNA, 201 bp, Homo sapiens
ggagaattgcttgaacccgggaggtggaggttggtgtgagccaagatcccaccactgcactccagcctgggcaacagagcgagactctgtctcaaaataayaataataataataataataataataatgattaatagtaataaataaacaattctgcagcatttagtaattcaccatgctgtacagccattagatctatgt

SEQ ID NO: 427777 - DNA, 201 bp, Homo sapiens
cgcaggctcctggcggccgcagccttcgggcacagccccgcgcccctcctccgtccctcccgcaggccactgcgcagatggaggagaagctgcgcgacttyacccgcgcctacgaacccgacagcgttctgcctctggccgatggcgtgctcagcttcatccaccaccagatcatcgagctggcccgggactgcctgacca

SEQ ID NO: 427778 - DNA, 201 bp, Homo sapiens
ttccatctccctattcatttatcttgcctgattaatctaatagtttctgagagaaatgtgaaaccttattttaagcaaattctccttgtaattctgtcaattttttttttttttttgccattttggtttttatttgattataggtaagagttccatacaatagtgtgcgaagtattgcaaacaataaaggaaaaatacagc

SEQ ID NO: 427779 - DNA, 201 bp, Homo sapiens
tgggctgtactcactcgcttcacctcctgtctcccgcaggcgcctcatcccagagcagctccccagcctcgagcacgcccaactcgcctgcgtcgtcggcrtcgcaccacattcggcccagcacgctgcacggactgtcgccaaagctccatcgccagtaccgctctgcgcgatgcaagtcggccggcaacatccctctat

SEQ ID NO: 427780 - DNA, 201 bp, Homo sapiens
gtgcagggaaggaggcaccctgggcggagggtgggggaggcctgagcagcccctagcagagcattttcccgcattcttcccccagagtggcaacaaggtakcagtgaccacaacgcccttcgaaaatacctctatccgcattggtcccgcaaggcgcagcagctacaaggctaaaatggctcggaggaacaagcgaccctc

SEQ ID NO: 427781 - DNA, 201 bp, Homo sapiens
agagtcttgctctgtcaccaggctcgaatgcagtggcgctatctcggctcactgtaacctccaccttccaggttcaagtgattctcctgcctgagcctccsgagtagctgggattacaggtgtgtgccaccacacctggctaattttttgtatttttagtagaaatagggttttcaccatgttggccaggctggtctcgaa

SEQ ID NO: 427782 - DNA, 201 bp, Homo sapiens
ctctttctttctttctttctttctttctttctttctttctttcttttttgagatagagtctcgttctgttgcccaggctggagtgcagtggcgcatcctckgctcactgcaacctccgcctcccgggttcaagcgattctcctgcctcaacctcctgagtagctgggattacaggtgcccgccaccacgcccacctaattt

SEQ ID NO: 427783 - DNA, 201 bp, Homo sapiens
ccgcgtccgaggccagtttcctggagggagaggccagtccccctttgggcgcccgccgccgtttctcggcgctgctggagcccagccgcttcagcgccccycaagaggacgaggatgaggcccggctgcgcaggcctccccggcccagctccgaccccgcgggatccctggatgcacgggcccccaaagaggagactcaag

SEQ ID NO: 427784 - DNA, 201 bp, Homo sapiens
gtggccaacactttgggaagctgaggcaggaggatcctttgaacccaagagttggagaccagcttgggcaacacaatgaaactcgtttctacaaaaaactttttttttttttttttttgagacggagtcttgctctgtcacccaggctggactgcagtggtgcgatcttggatctctgcaacctctgcctcccaggttcaa

SEQ ID NO: 427785 - DNA, 201 bp, Homo sapiens
ctcctgtggggatgtgatatgaggaggaaccccgtaccctcagtcacagcccatacccgctccccagcccgctcagacaggtatcaccacgtgaactcctrtgacgaggatgacacgacggaggaggagcccgtggaaatccgccagttctcttcctgctctccgcgcttcagcaaggtgggccaagtctgggtgtgggac

SEQ ID NO: 427786 - DNA, 201 bp, Homo sapiens
acaccattgcactccagtctgagcaacaagagtgaaactctgtctcaaaaataaataaataaatgaaataaaataaaatattaaactctactcacatttawcacccactttctcctcagtttctccttgacactcagcaccatccatcatactgtgtatttttgcttattttatttcatgtctatccttctccaatgtcag

SEQ ID NO: 427787 - DNA, 201 bp, Homo sapiens
ggaggctgaggcaagtggatcacctgaggtcaggagttcgagaccagcctggccaacatggcgaaaccccgtctctactaaaaatacaaaaattagctggscgtggtggtgggcgcctgtaatcccaactacttgggaggcagaggcgggagaatcgcttgaacctgggagtcggaggttgcggtgagccgagatcacacc

SEQ ID NO: 427788 - DNA, 201 bp, Homo sapiens
gctgggattacaggtgcccgccaccatgcccgactaattttttttgtatttttagtagagacggggtttcaccgtgttggccaggatggtctcgatctctygacctcatgatccgcccacctcggcctcccaaagtgctgtgattacaggcgtgaaccaccacacccggcttatacacctatttttcctttttctttcttt

SEQ ID NO: 427789 - DNA, 201 bp, Homo sapiens
tctctctctttttaactttaaataattttaataaatagagacacagtttcactatgttgcccaggctggtctcaaactcctgggctcaaatgatcctcccrccttcgcctcccaaagtgctgagattacaggtgtgagtcaccatattcagtggagacccttctctaaaataataatgataataaagcaagaggaaacaag

SEQ ID NO: 427790 - DNA, 201 bp, Homo sapiens
ttacaggtgcccgccaccatgcccgactaattttttttgtatttttagtagagacggggtttcaccgtgttggccaggatggtctcgatctcttgacctcrtgatccgcccacctcggcctcccaaagtgctgtgattacaggcgtgaaccaccacacccggcttatacacctatttttcctttttctttctttctttttt

SEQ ID NO: 427791 - DNA, 201 bp, Homo sapiens
gttcacttgggggaaatttctagaatctctctggaaaggcttcactgggtgggggcttttccagttctcggtgtccactctgaatgataagagaggggacygtggggaggagagtggagacggatcctccctccaattcccggtgcctgcctggaagagtccctctttatccccttgattctgagggccttgaggaatctt

SEQ ID NO: 427792 - DNA, 201 bp, Homo sapiens
cgatgtgtgtccctgtgtgtgtgcatctgcgtgcgagtgtgaatgagtgtgtcgctgtgtgcaagtttcaatgtgtggtagtgagcgtgggtgtctggaaygtgcatctgtgtgaatgtggaagtgtggagtatgtttgggtgagtctgtgtgtccgagtgtgagtactgagtggaagcacatgtgtctataggtgagtgc

SEQ ID NO: 427793 - DNA, 201 bp, Homo sapiens
ggagggtattccagagactggaatggcattggatttcattctgaatgcaacagaaggtcactggagcattgttgtttttttctttttctttttctctctttctttctttctttctttctttctttctttctttctttcttttttgagatagagtctcgttctgttgcccaggctggagtgcagtggcgcatcctcggctca

SEQ ID NO: 427794 - DNA, 201 bp, Homo sapiens
ttactgtctctctctctctctctcttttttttttcttttcttgagacagagtctcgctctgttgcccaggctggagtgcaatggcgggatctcggctcackgcaatttccgccttctgggttcaagcgattctcctgcctcagcttcccaagtagctgggattacaggcgcctgccaccacgcccggctaatttttgtatt

SEQ ID NO: 427795 - DNA, 201 bp, Homo sapiens
gagggtattccagagactggaatggcattggatttcattctgaatgcaacagaaggtcactggagcattgttgtttttttctttttctttttctctctttctttctttctttctttctttctttctttctttctttcttttttgagatagagtctcgttctgttgcccaggctggagtgcagtggcgcatcctcggctcac

SEQ ID NO: 427796 - DNA, 201 bp, Homo sapiens
agggtattccagagactggaatggcattggatttcattctgaatgcaacagaaggtcactggagcattgttgtttttttctttttctttttctctctttctttctttctttctttctttctttctttctttctttcttttttgagatagagtctcgttctgttgcccaggctggagtgcagtggcgcatcctcggctcact

SEQ ID NO: 427797 - DNA, 201 bp, Homo sapiens
ttccactcacccacccacccactcaaccccaggcttgctctgggtccggcgatccctgtcggagtcctgtccccaccgcttcccttctggcgggattaacyacttcgctgcctggatacacccacatacgttggtgcatcctcttaggaactgtcgcatcactgctgagcgcccgagggtcccctgtgtgcagctaggctc

SEQ ID NO: 427798 - DNA, 201 bp, Homo sapiens
gggtattccagagactggaatggcattggatttcattctgaatgcaacagaaggtcactggagcattgttgtttttttctttttctttttctctctttctttctttctttctttctttctttctttctttctttcttttttgagatagagtctcgttctgttgcccaggctggagtgcagtggcgcatcctcggctcactg

SEQ ID NO: 427799 - DNA, 201 bp, Homo sapiens
cgccgtcgggtttctgagaaaagggaggaaagaggcggggcctgcacggtgtgtccccgccctccaggccggcgtcaactctcattggctcagcgccacgmgggactttaaactcccgctcgagacaccgcccccaacgcggaatgcttccactcacccacccacccactcaaccccaggcttgctctgggtccggcgatc

SEQ ID NO: 427800 - DNA, 201 bp, Homo sapiens
ttcagagatggggtttcaccatgttgaccaggctggtctcgaactcctgacctcaagtgatccacccgccttggcttcccaaagtgctgggatttcaggcstgagctaccatgcccagccttgaacaattttttaaaaatcagctgggcatggtggctcacatctgtagtcccagctactcaggaggctgaagcaggagga

SEQ ID NO: 427801 - DNA, 201 bp, Homo sapiens
caggaaaaatggtgatcagactgcaggaaggaccttccaggcgtctgggtaacgccggagccagacatgagttggaaaactaatttgctttcagagcccakatggcccgatctccggagcctaggcctctctgaagtgctcccacattctctccgcctctcgggggtgggttaggagagtgggttccgagagaagggaggc

SEQ ID NO: 427802 - DNA, 201 bp, Homo sapiens
tcaagtggttctcgcacctcagcctcccgagtagctgggattacaggcgcgcgccactacccccggctaatttttgtatttttagtagagacagggtttcwtcatgttggcaaggctggtctcgaactcctgacctcaagtgatctgccttccttggcctaccaaagtgctggggttacagtcgtgagccaccacacccag

SEQ ID NO: 427803 - DNA, 201 bp, Homo sapiens
agtggccaacactttgggaagctgaggcaggaggatcctttgaacccaagagttggagaccagcttgggcaacacaatgaaactcgtttctacaaaaaactttttttttttttttttttgagacggagtcttgctctgtcacccaggctggactgcagtggtgcgatcttggatctctgcaacctctgcctcccaggttca

SEQ ID NO: 427804 - DNA, 201 bp, Homo sapiens
tacaggcgtgagccacggtgcctggccgagactgtttcttcatctgcaaaatggggagaataggccaggcgcagtggctcaggcctgtaatcccagcactytgggaggctgaggtgggcagatcactggaggtcaggagtttgagactagcctggccaatatggtgaaaccctgtctctattaaaaatacaaaaattgggc

SEQ ID NO: 427805 - DNA, 201 bp, Homo sapiens
cttcgtccatttctagactcccctaatccatcattcccgaggttgaaggccaaggggagctgattggtcagtgcagcaggaaaaatggtgatcagactgcmggaaggaccttccaggcgtctgggtaacgccggagccagacatgagttggaaaactaatttgctttcagagcccagatggcccgatctccggagcctagg

SEQ ID NO: 427806 - DNA, 201 bp, Homo sapiens
gctactcaggaggctgagacaggataatcgcgtgaacccgggaggcggagcttgcagtgagccgacatcgcgccactgcactccagcctgggtgacagagmgagagactccgtctcaaaaaaaaaaaaaaaaaaaattagccggaggtagtggcgcatgcctataatcccagctacttgggaggctgagggaggagaatcg

SEQ ID NO: 427807 - DNA, 201 bp, Homo sapiens
ccaatcttccccaatgtcctactggtcatatagtgagcatcccacgagcctggtgctgtttatgaaagatctcaggtcctattcacattgcaatttgggatttttttttttttttttttttttgagacagagtctcactccatcacccaggatggagtgcagtggcgtgatctcggctcactgcaacctccacctcccaag

SEQ ID NO: 427808 - DNA, 201 bp, Homo sapiens
atggggatcatcctctacgagttcctggtgggctgtgtgcccttcttcggagacacaccagaggagctatttggacaggtcatcagtggtacgtggcttgrcagtgtacaggggcagagtgtggtgtgcacggagagatggacaggctcagggttccagggatttcaaaagcgaccccccagaggatcgcttgcactcagg

SEQ ID NO: 427809 - DNA, 201 bp, Homo sapiens
gcttgcactcaggaggtcaaggctgcagtgagccatgatcgtgccactgcactccagctgggtgacacagtgagatcctgtgtccaaacaacaacaacaamaaaaaccgcccctaagttccgttttgttttgcagatgacatcctgtggcccgagggggatgaggccctacctacggaggcccaactcctcatatccagcc

SEQ ID NO: 427810 - DNA, 201 bp, Homo sapiens
actccctctgtccctcgggaggccaggaggcagaatggacgggcctcatccctgagatccccacctgtgcctacagcctccttatcacctccatgggtcayatcaagctcacagatttcggcctctccaagatggggctcatgagcctcaccaccaacttatatgaaggccacatcgagaaggacgcccgagagttcctgg

SEQ ID NO: 427811 - DNA, 201 bp, Homo sapiens
ccagaagctcacctgtaagttacatccttgcatttgcatatactttatagtttggctatgtatttattactgtatttcatttttttcccatagcatcaaayggtttactatgcttttagtctatattgcataatgctccgaaatgtttagtaatcacataatccacaattcatacttggggcatgaattttattgagcaga

SEQ ID NO: 427812 - DNA, 201 bp, Homo sapiens
taggtagtttttttgtggaaatagttgagttgatgaagaggtggaggacgaatggtgagagtatagcaagaacctaggaagggcaggagcaaaatgttaaygaactggaagtttttctaacagctttttgaaaccacatttttataggttgttaaaaacaacttgaatcctgtttggaggcctttcaagatctctcttaac

SEQ ID NO: 427813 - DNA, 201 bp, Homo sapiens
tgcctttcagacagttccagaatgtgagtaccactcctccctactcaaacactaaagtgactgaacacagacctttgcccatctacaaccaggcagttgaktaggtgtgcagggttagaggatgtgtgaacactttcctttgtccatttgagagctccgatttggtttagcagtgttgcttcaggatgttcattatgtgct

SEQ ID NO: 427814 - DNA, 201 bp, Homo sapiens
taaatatttataactgtaatggattacttctcatagatacttaagttattccaattttggcctgagggaattcctttaagcttgtttgtgagaccatttarcacaactccaggagtctttggataatttcttgctctgtgggatgacaagagcttcaaagaacttctttttgaagttctttttgtctttaataagccatgt

SEQ ID NO: 427815 - DNA, 201 bp, Homo sapiens
acgcaacagcagacagcttctgtaagtgctctatggccagggaatgggaagaatgtggattggtagcagctcctggtgccatttttctatgtttttggttygtcataatacaaagtcagggcaagatacaataacacagtcattcttggtttgggagtaacttttgttgttgttatactagtgatcgttaaaaataagaca

SEQ ID NO: 427816 - DNA, 201 bp, Homo sapiens
ctatcattgcttttgtttcttagcaagaatctttctatagagagaaacttccccacattaagtatttatttactttgtggtatagtttatataggaaaagyaagttaaaatgtttgacttttcccccatatttaccatttttcaaaattataagttggttccctagcatccactaaatgtgaccagtgaagtttttatgtt

SEQ ID NO: 427817 - DNA, 201 bp, Homo sapiens
gtatgatctgctggcatttttaattgttggcaagacagtttcatcaatggtggcatgtaattccatcaggaggctcacactgacttgtgtgttttcgggawgtttgtgatcattgatgataactacctggttttattattaagagtctgtaggcccggtgtggtggctcatgcctgtaatcccagcactttgggaggccga

SEQ ID NO: 427818 - DNA, 201 bp, Homo sapiens
aaccgggcggtggcgggcacctgaaatcccagctacttgggaggctgaggcagagaattgcttgaacctgggaggcggaggctacagtgagctgagatcgygccactgcagtacagcctggacgacagagcaagactccgtctcaaaaaaaaaaaaattgggtgtgtgcattaccccaaatttgatcttgttcctgtaatg

SEQ ID NO: 427819 - DNA, 201 bp, Homo sapiens
agtgatagtattttaactttagctccctctgagaatgtaaggctagttccctgagagagctatgtttcaaggttatcatgattatcaaatacatttctctragcagctgttttgctatagtttaaatctccaaaggcataagaatgttcagggtgttgatttttgtgggaaagagaacattatcagtagttagcttccttg

SEQ ID NO: 427820 - DNA, 201 bp, Homo sapiens
catgttggccaggctggtcttaaactcctgacctcaggtaatctgcccgcctcagcctcccaaagtgctgggattacaggcatgagccactgcacctggcyctaaatatgtagatgatctaaatctttaagaaaccaactgaatgtttctatttctaatgactttaagtgaaccttatactcagtcttttttgctgaaact

SEQ ID NO: 427821 - DNA, 201 bp, Homo sapiens
gcccggccagctttgtttttaaacgggttttctagctacttctaagactatgcaacctacttcatttttcttagtctctatttatttaggaatcttagtawtgatttttgacatatgttgaggactgctactgtttttagagagttcaatagaattatcaaaatttttaaataagatgttagttgttttttgacattacaa

SEQ ID NO: 427822 - DNA, 201 bp, Homo sapiens
gaaaaattatgttcattatggtgttttataatggcggaacattggctatcagacatctgggggaggatatccattttgtgggatactcagtggctattcaygtgatgttatatattcggtccactgtccctctccctaatgtatgaatgtttgtattaagtggcataaataaaagctaccaataacctctgatcatctgag

SEQ ID NO: 427823 - DNA, 201 bp, Homo sapiens
gacaattacaaatgtatagctttctaacagaagaaaatgttttttccttttcttcctaaacaatattcataaggtggaagagcatgaacaatttttgtggsggccgtttgcaatatggttttgttcttttccccagaacactttttccatactaattcagtgttctttgaggcactttcagtgactggttgtgacctcttt

SEQ ID NO: 427824 - DNA, 201 bp, Homo sapiens
aatttttgtggcggccgtttgcaatatggttttgttcttttccccagaacactttttccatactaattcagtgttctttgaggcactttcagtgactggtygtgacctcttttattccctagccatttgaaactgggaatgttattctttttaagaaatatgcttcatttttataatgaaagtggataatctttagaattt

SEQ ID NO: 427825 - DNA, 201 bp, Homo sapiens
tttagaatttgttgtaattagctttcatttattgtaaatgaatatggatgacatatcatatgataattcattttagaagttcagtcactctgtgagtaatstaagcccatccttgggctgttcaccaagtggtttacactctggaaaaagcatcagtttggttttaaacaaaggagatactatacagcaaaaagctcagag

SEQ ID NO: 427826 - DNA, 201 bp, Homo sapiens
aggtggtgggctacttcaatacatacaaactccttcctcccaagaacccagccacgaaacaacagaagcagtgaccacttcaacagaattcttttgtgttmtgtggagcaatgccatctctcaccccaaatcgtgtatctgtcattctacgtactttttacccccagcatttatgatgtaaatctctttctctatggatta

SEQ ID NO: 427827 - DNA, 201 bp, Homo sapiens
aaataacaggtaatcactgtcaattggatttggtcttcattattttatattctgattttatcagaattattctattttaaaattgttttaaaatttaaaaacatttaattcatgatcatgttcatcagtagatgctattattcataagaactgtgattccagcaaactagggtaattggtgcctttttacagttttgaata

SEQ ID NO: 427828 - DNA, 201 bp, Homo sapiens
tgactgtatatgcttctcctttttgttgatctgtgttctcttagacattttaaaagcaagagacctgttttgatttacattaagtttttttttttttttttgtggcaagtatctgtgatgatctcagcaagtattgttggaaattctttagaatttctgttatcctgtctgcatcctaaatgctgtgatattaagggcaga

SEQ ID NO: 427829 - DNA, 201 bp, Homo sapiens
aatttcatctctaggtttcattttcttacatatttaactttctgttgtataaggtagaagaattgcaccaggttggtggttagggtggtaatggtaattayggggcaaatcagtattatgatgatgaaggtggtaagctaaatcctcctaccttaagaactttaataggacaaaaacattctcaatctttggagtagatca

SEQ ID NO: 427830 - DNA, 201 bp, Homo sapiens
tgaacacacactcccacatacttgtgctctctgtctttctctatctctgtccctctctgtctctctctctctctctctctcacacacacacacacacacamttatgcacacatgtattttccttttgcaaaatcatcctaatggagctacagatataataactcttatctttaaatgctacagcagaccaagtgtggtggc

SEQ ID NO: 427831 - DNA, 201 bp, Homo sapiens
agcaagactcaatgtcacttccattggtggtactcagtgacctgcaggagtcctaactagagcattcctttactgtacccaccattaccttcagcctacamtctagcttccttcccaccaatattttcccttcttgttcttgcttgtgagtgggaatcatattggggttttttttggagagactatttattcttttaatat

SEQ ID NO: 427832 - DNA, 201 bp, Homo sapiens
attctcaatgtacagtaaaacagacagaagtgagcttatctgtttgatgctgtggcagggtcccagtcactgggcatatcctccttctccttaaccagctyctcagcagcccctgagtcacctgcacaaggtgcttgggaactgctggttatgagcattcctggttttcttcagccaaataacaggtaatcactgtcaatt

SEQ ID NO: 427833 - DNA, 201 bp, Homo sapiens
ttgcattttacaatttaataatgtgatatttcctatgtctacagcataccttattaggtataaaacctactgcaacttagaaaaaggaaagaaaaaagaaracttttccaactgctgcattaagatagggtggattttatgtgctttttttttttaagagttgaatttcttttcctgacttttaccttttacagcgtatta

SEQ ID NO: 427834 - DNA, 201 bp, Homo sapiens
ctgaaaaaacctgaagcctggagaagttacagcagttgcccaaatgcctgccattgtggtgtgactaacacagaaccaggcatttctttttttttttttttgagacggagtcttgctttgtcacccaggctggagtgcagtggcgcaatcttggctcactgcaacctctacctctgggttcaagtgattctcctgcctcag

SEQ ID NO: 427835 - DNA, 201 bp, Homo sapiens
ctgtgtttaagtgtttgtcaataggaagaatggaaaactgttgggatgatgtggtttgcaggttgctgtgcctgattcacagtgtatgttgtataagccartgtccatacctgattatgagagcttcttaaattatatgatatcaaatttgttcctgtaactctgtatacagtgcttttctgcaaggtaaaaataacctgt

SEQ ID NO: 427836 - DNA, 201 bp, Homo sapiens
cagggtatcagcaacagctgtatgaatgaagtatcatttgaagtgtttgttttgttttgttttgagatagagtctcactctgtcgcccaggctggagtgcmgtggtaccatctcggctcactgcaaccttcacctccttggttcaagtgattctcctgcctcagcctcccgagtagctgggattacaggcacctgccacca

SEQ ID NO: 427837 - DNA, 201 bp, Homo sapiens
cagcttctgtaagtgctctatggccagggaatgggaagaatgtggattggtagcagctcctggtgccatttttctatgtttttggtttgtcataatacaamgtcagggcaagatacaataacacagtcattcttggtttgggagtaacttttgttgttgttatactagtgatcgttaaaaataagacaacagcaaaacaac

SEQ ID NO: 427838 - DNA, 201 bp, Homo sapiens
gtagaggcgtatcggtcttgtcttcctcagataaaactctatggaccaactaatttttctccaatcataaatcacgtggccaggtttgctgctgcagccaygcaacagcagacagcttctgtaagtgctctatggccagggaatgggaagaatgtggattggtagcagctcctggtgccatttttctatgtttttggtttg

SEQ ID NO: 427839 - DNA, 201 bp, Homo sapiens
ctctaggatgttaattcctactgtcccaagtagggactgcatagtacacattttcatttactttaattaaaagggcacttcatgataggttatatttattrcagccaatactttttaataaaactatattgatttttatatatttttattatatttaatttcaggtggagtgttatgattatgacaatgatgggtcacatg

SEQ ID NO: 427840 - DNA, 201 bp, Homo sapiens
cttttggttttggcgctcagatacctcctcagtggcaggtaagaggaaatctctattttaaagctttgcctcctagaaaagcagcccagccctcatcagtyctttgtccatctttgacaggtatcacatgaatttccaatgaacttcaacccatccaatccctactgcaatggtaagttaaaaaataaacatgaagacttc

SEQ ID NO: 427841 - DNA, 201 bp, Homo sapiens
atagcttagaggaactactgcttatagaacttttgactatttaaagcactatatgttgatacatataatcaaattagccagtattgtgaataaacacattrtgcttgagaatttttagtactgttttttatttgtttgtttgttctaggaatccaaggcattgtagaggcgtatcggtcttgtcttcctcagataaaactc

SEQ ID NO: 427842 - DNA, 201 bp, Homo sapiens
tgtctgcatcctaaatgctgtgatattaagggcagattcaacaggtgcttgtgtgggatacaagtttcatcagcagtgctttgaccagcaatgtcagtcarctttcactgggttgtgctgttgtaataaacaatctctaaatctcagtggctttaatgacaacagtttatttcttgctcattttacatgcagctaggctgg

SEQ ID NO: 427843 - DNA, 201 bp, Homo sapiens
tctgaggttcaagtgattctcctgcctcagcctcctgagtagctgggattacaggcatgtaccaccatgcctggctaatttttgtgtttttagtagagacrgggtttcaccaggttggccaggctggtctcaaactcctgacctgggataatccacctgcctcggcctcccgaaatgctgggattacaggtgtgagccact

SEQ ID NO: 427844 - DNA, 201 bp, Homo sapiens
agaagcagtgaccacttcaacagaattcttttgtgttatgtggagcaatgccatctctcaccccaaatcgtgtatctgtcattctacgtactttttacccycagcatttatgatgtaaatctctttctctatggattatatctgtttaaagcattctttctaggttattttggggggacagtgccaagtccatctttgccc

SEQ ID NO: 427845 - DNA, 201 bp, Homo sapiens
atgcatctgatttttgctacagtttagacactgtggtttacaaaacagcatgcactcaacttgggactttatgaaaagtactgaatgagcaggaaaaggcrcatactcagttttttaaatgtacaatcaacaagtaaaaataacctcatgtaagtaagccatttttatttgcctttctagatattttattttattgtggaa

SEQ ID NO: 427846 - DNA, 201 bp, Homo sapiens
caaattagccagtattgtgaataaacacattgtgcttgagaatttttagtactgttttttatttgtttgtttgttctaggaatccaaggcattgtagaggygtatcggtcttgtcttcctcagataaaactctatggaccaactaatttttctccaatcataaatcacgtggccaggtttgctgctgcagccacgcaacag

SEQ ID NO: 427847 - DNA, 201 bp, Homo sapiens
ggttgtcctgaattctacattattagattactttaattgagatttgttaaaacggttaggactgttttgtccaggaaagataagaggaccaaacatataargtgaaattcagaattccgtttccttctaactaatgaaaaactgcttactaaaaaaaaattttatactttccttgctaaggtcccatatattgatttgtac

SEQ ID NO: 427848 - DNA, 201 bp, Homo sapiens
aaattcagaattccgtttccttctaactaatgaaaaactgcttactaaaaaaaaattttatactttccttgctaaggtcccatatattgatttgtacagawccacttagtcattttctcctttttttaagaaccattttcatctgatttttaaactcacgataccagttatctgttaatcaaaattgcattttacaattta

SEQ ID NO: 427849 - DNA, 201 bp, Homo sapiens
cattaaaatagtccttttccctgttgtgccaccattcatttaagtgctgtttgttcttaaaatgcatttaaagaaaaattacccatattgactttcacacytcatataatcagatctattacaaatatatatcggagtgacggtgcccaggatagatgtaatatttcttacagatgctggcacagaggaaataatatacca

SEQ ID NO: 427850 - DNA, 201 bp, Homo sapiens
gcagtggcatgatctcggctcactgcaacctccacctcccaggctcaagcaatcccacctcagcctccagaatgactgggaccacaggcacaccccaccayacctggctaatttttgtatttttggtagagatggggtttagccatgttgtccaggctgctgttgagctccagccatctgcctgcctcagcctcccaaagt

SEQ ID NO: 427851 - DNA, 201 bp, Homo sapiens
ctgtctgcatcctaaatgctgtgatattaagggcagattcaacaggtgcttgtgtgggatacaagtttcatcagcagtgctttgaccagcaatgtcagtcrgctttcactgggttgtgctgttgtaataaacaatctctaaatctcagtggctttaatgacaacagtttatttcttgctcattttacatgcagctaggctg

SEQ ID NO: 427852 - DNA, 201 bp, Homo sapiens
tctctctcctttcagagagagaaagcatttaatcagagccagatctaagactagaactcaccctgtctcacatggaaatagagtaaatatgacccggtgtrgatacttcctcagtggactaagtactcttagcctggaattgttcctttcattgtaagagttgtgatcttcacaatgatgcaaatctggcttcatcatatc

SEQ ID NO: 427853 - DNA, 201 bp, Homo sapiens
ctagccatttgaaactgggaatgttattctttttaagaaatatgcttcatttttataatgaaagtggataatctttagaatttgttgtaattagctttcayttattgtaaatgaatatggatgacatatcatatgataattcattttagaagttcagtcactctgtgagtaatgtaagcccatccttgggctgttcaccaa

SEQ ID NO: 427854 - DNA, 201 bp, Homo sapiens
catagatttcagctgaagaaataaaagataatagagtggtcttgtttgaaatggaagccagaaaactggataataaggtgggtagactatgcagatttcaraaaggttgtcatgttttgcctcttttttaagaaaataaaaatgcagttaatatcatgaactccatcattgagcatcacatagggtactagttactttcaa

SEQ ID NO: 427855 - DNA, 201 bp, Homo sapiens
gctatgttggccaggctggtcttgaactcttgacctcaagctatcttcctgccttctgccttggcctcccaaagtactgggattagaggcgtgagccaccrtgcccagccacgttttacttttttccttatacctcaagtatccaagtgctgcttcttttttttaccacattgagcaatcagccagaaatgccagctcttc

SEQ ID NO: 427856 - DNA, 201 bp, Homo sapiens
tgttctattattaaaggagagaatggatattgccggagagcagcaattcctgcttcatatcctacttcaaaacactttccagatgagttagaagtttaatrtcaaaagcaaactttaaagttttagaagaaagtgtatgtgaattgtttataatcttgtagtgaggaaaacctttaagcaagagagcaaaggcaaaaatca

SEQ ID NO: 427857 - DNA, 201 bp, Homo sapiens
acaaaatagaggtttatttcacttcacattgctaggggtaaatataatagttaagaactgataggggagttctgctgttctcaattcacagcttccctccsgggttccatagctctggttctcatcttctccagccagggggaagagaagaaagggaccagggagtgaatgtgcattcccttttaggggcatgattcagaa

SEQ ID NO: 427858 - DNA, 201 bp, Homo sapiens
atattttctttcactgcaaaactgactttgtaatgaaattttcacaatctgtttagcatagtcctcttagagtcctcaggcaggttgtctgggctcatcaygaagctctcagttttgttgatgagatctcttcctcctgagagaaagcagatgtatacaaacctacaaactagtggttatcctgaactaatttaaggacta

SEQ ID NO: 427859 - DNA, 201 bp, Homo sapiens
aaaacttaaaatgagtgtatttcatctttcgccattagtattctaatcttaacattgctacaattatcttgaagcagaattttacagattcatggcacataggggaaggggtatcttaaacctgaatgcaggggtaatttccatgtttatatcatgtcctgttcaatttacagacttttaaaaatatatgccaaagagttt

SEQ ID NO: 427860 - DNA, 201 bp, Homo sapiens
tggaagttacagaggagaacaacttgagccaagccctaaagatggatagggggataggaaggggaaggaagatcattcttttgggggaaggaaatataaamaagaggaggtgttagatcaatttttaacatgtattcccagtggaaagagaagatctttgatgcatattttaccatagagttgggcttcatatatttgttt

SEQ ID NO: 427861 - DNA, 201 bp, Homo sapiens
tatgtaactaaatttcatatagttgtagaaatttaaagaggtagatagagatcagagaagactagagtagcagtggaagttacagaggagaacaacttgakccaagccctaaagatggatagggggataggaaggggaaggaagatcattcttttgggggaaggaaatataaacaagaggaggtgttagatcaatttttaa

SEQ ID NO: 427862 - DNA, 201 bp, Homo sapiens
gtttcaccaggttggccaggctggtctcaaactcctgacctgggataatccacctgcctcggcctcccgaaatgctgggattacaggtgtgagccactgcrcccagcctaaaattttttgtttttgtagagatgaggtctctgttgctcaggctggtcttgaactcctgggctcaagcaatcctactgcctcagcctccca

SEQ ID NO: 427863 - DNA, 201 bp, Homo sapiens
tgttttgttttgttttgagatagagtctcactctgtcgcccaggctggagtgcagtggtaccatctcggctcactgcaaccttcacctccttggttcaagygattctcctgcctcagcctcccgagtagctgggattacaggcacctgccaccacacctggctaatttctgtatatttagtagagacagggtttcaccatg

SEQ ID NO: 427864 - DNA, 201 bp, Homo sapiens
agccattgcatagtaataaggcaaagaagtggatgagaaagaagatataactccattttgccctttatcagcacttatagaaggcatgatagaggagctgraaactgcttaatgtggaattgaaacagtatttgtgtttttcatctgcctgtgatctatcttagatccccattccaaggatagctggggtttgaaagtgtt

SEQ ID NO: 427865 - DNA, 201 bp, Homo sapiens
gtataagttggaggtgattataatgtcactgtgaagaaaaaattaaatgagacacttgaaaataacacagagtatgtaactaaatttcatatagttgtagraatttaaagaggtagatagagatcagagaagactagagtagcagtggaagttacagaggagaacaacttgagccaagccctaaagatggatagggggata

SEQ ID NO: 427866 - DNA, 201 bp, Homo sapiens
atttacaactgttcattatagtggtgccttaggcaatctttccaaagtaaattcagggccccattgctacttatgccatatttggacatactttttttttyttcaattttgtaaacttcctggaaagctgtcttcactaagtatcccctagtctctatatatgtggttagtagtcatggaaatgacacataaagtacgcca

SEQ ID NO: 427867 - DNA, 201 bp, Homo sapiens
gtagaatactaaaatagaaatgtcttctggtaagtgacacagtttgaggagtaggcatgtttgactaatctgttgacctaatgcttagtcaaacagtgtcrtttctattttattctgtattttaaaaaataaaatgtccagtttaatatttttttccttttaataagattcctctgctctgctaataggaacctcgaacta

SEQ ID NO: 427868 - DNA, 201 bp, Homo sapiens
atacttgacaatacatgtgtaagttactaatatatgaattgatgctaaatatatcttacatttgaattccttttggataaagttatttcttgatgtgacasagtagtgtgttttcatttttattctttacatgtgaccaaaacaatagaaaagttaaaaataaaatatagtgttttaggtggcctttgacttcatatttta

SEQ ID NO: 427869 - DNA, 201 bp, Homo sapiens
tttttttgtggaaatagttgagttgatgaagaggtggaggacgaatggtgagagtatagcaagaacctaggaagggcaggagcaaaatgttaatgaactgraagtttttctaacagctttttgaaaccacatttttataggttgttaaaaacaacttgaatcctgtttggaggcctttcaagatctctcttaactcactgt

SEQ ID NO: 427870 - DNA, 201 bp, Homo sapiens
atgaattgatgctaaatatatcttacatttgaattccttttggataaagttatttcttgatgtgacagagtagtgtgttttcatttttattctttacatgkgaccaaaacaatagaaaagttaaaaataaaatatagtgttttaggtggcctttgacttcatattttactgaattaaacaatttgggggatattattttat

SEQ ID NO: 427871 - DNA, 201 bp, Homo sapiens
ctgcttaatgtggaattgaaacagtatttgtgtttttcatctgcctgtgatctatcttagatccccattccaaggatagctggggtttgaaagtgtttcartattgcttctctaggatgttaattcctactgtcccaagtagggactgcatagtacacattttcatttactttaattaaaagggcacttcatgataggtta

SEQ ID NO: 427872 - DNA, 201 bp, Homo sapiens
tctgtgaactgtatcagtgtcagctgcctggttttggttttgatactgtactatagttatgcaagatgttacctttggaggaatctgggtgaagggtgcayggtacctttctttactgtttttgcaacttcctatgaatctataaatgttgtaaaaaaaagtaaaaaaaaattaataccaagtaagtgaaagaaccacatt

SEQ ID NO: 427873 - DNA, 201 bp, Homo sapiens
gttacctttggaggaatctgggtgaagggtgcacggtacctttctttactgtttttgcaacttcctatgaatctataaatgttgtaaaaaaaagtaaaaamaaattaataccaagtaagtgaaagaaccacatttaaaagttataaaacaacaacaacaaaatcatcaaatgttagaatgctggcaccgaaaaaggacttg

SEQ ID NO: 427874 - DNA, 201 bp, Homo sapiens
catatattaaaagtatttttacatataaatttatttaaaaacaaaccttcaataaaatgagtaatttgatatacagatcttttgaagcttttttcagagtrgtagtcactctctacgaagagaaaagtatccagcatctaatacttgttgctcacacagtattctataagtagctgggatgggcaaaaggaacaaagaatt

SEQ ID NO: 427875 - DNA, 201 bp, Homo sapiens
tctcaatgtacagtaaaacagacagaagtgagcttatctgtttgatgctgtggcagggtcccagtcactgggcatatcctccttctccttaaccagctccwcagcagcccctgagtcacctgcacaaggtgcttgggaactgctggttatgagcattcctggttttcttcagccaaataacaggtaatcactgtcaattgg

SEQ ID NO: 427876 - DNA, 201 bp, Homo sapiens
tagaggcgtatcggtcttgtcttcctcagataaaactctatggaccaactaatttttctccaatcataaatcacgtggccaggtttgctgctgcagccacrcaacagcagacagcttctgtaagtgctctatggccagggaatgggaagaatgtggattggtagcagctcctggtgccatttttctatgtttttggtttgt

SEQ ID NO: 427877 - DNA, 201 bp, Homo sapiens
aagttggaggtgattataatgtcactgtgaagaaaaaattaaatgagacacttgaaaataacacagagtatgtaactaaatttcatatagttgtagaaatktaaagaggtagatagagatcagagaagactagagtagcagtggaagttacagaggagaacaacttgagccaagccctaaagatggatagggggataggaa

SEQ ID NO: 427878 - DNA, 201 bp, Homo sapiens
acatggctgcccagtgtgtcacaaaggtggcgctgaatgtttcctgtgccaatcttttggataaagatatagggtcaaagtcagaccctttatgtgtgttrtttttgaatacaagtggtcaacagtggtatgaggtaatgtcaaatactttacctaaaaagtaatctgaattacccttttaacaatgtgaagagttttttt

SEQ ID NO: 427879 - DNA, 201 bp, Homo sapiens
ctagccctttttcaatgagaattcggtttgtggaatttctttagctctaatatataataattttttattgtttttcctttctttaatttctaatactcaayaattaatacttatgattgtgactgagactccagcaagatcctgaaccatcaaagaatttgtttaacataattttgtttcacatcattgtattataccacg

SEQ ID NO: 427880 - DNA, 201 bp, Homo sapiens
acttatagaaggcatgatagaggagctggaaactgcttaatgtggaattgaaacagtatttgtgtttttcatctgcctgtgatctatcttagatccccatyccaaggatagctggggtttgaaagtgtttcaatattgcttctctaggatgttaattcctactgtcccaagtagggactgcatagtacacattttcattta

SEQ ID NO: 427881 - DNA, 201 bp, Homo sapiens
atattgttatgcttaccattgtttaaaaagccaataatactggtctttgaattcttgaaaagagagaaattaaatgacacgaattgtcttacctcataccrtatctgaacatatgccagcattataaatatcatgtctgccttcaaggggacaagagggagctttttctatatatttattatagtgagtaatcaaaatttt

SEQ ID NO: 427882 - DNA, 201 bp, Homo sapiens
agaatgaaaaatatatacatacatatacataaaagaaacttttgtactagaattattaactttacatgattacagatagaggtcttttttatgttcagacwtcagtcgatcaaagggattttttggtttgtttttctctttttctgataatgaatatggtaaaagcaggcaggataatgaggagtaagtataagatttgga

SEQ ID NO: 427883 - DNA, 201 bp, Homo sapiens
ctcattgctactggatatcattgttttatgccttttaagtggacacagctaagaaatatgtatatttgtgtttatctgtttattatgtatgtatatatggkattaaaattttaaattataaatgtggacttatttctccaattcaattccaacatagtttcttattctatatttaccttttcttatttcatatttgaatct

SEQ ID NO: 427884 - DNA, 201 bp, Homo sapiens
atatattcctgtgggattaacaaatgtcctttcattttcaaaaataacaagtcataaatgttaacgagtatgcacatttcaaaatgaagatacatgaaaaygagaaaaaatcatccatagtcttaccacctgagtttaacctctgtgagtgattcgtacatttttcctgaattttatctctctgtatgtgtgtggttatgt

SEQ ID NO: 427885 - DNA, 201 bp, Homo sapiens
attgcttgaacccaggagggggaggttacagtgagccgggatcgtaccactacactccagcctgggtgacgtctccaaaacaacagagataattaaaaaawatatagaattacaggcacttattttatattcatacctcatttctcttggtttttaaatatattaacacaattgcttatctgttttgtctcacacaacgtt

SEQ ID NO: 427886 - DNA, 201 bp, Homo sapiens
ctcatagatacttaagttattccaattttggcctgagggaattcctttaagcttgtttgtgagaccatttaacacaactccaggagtctttggataatttcttgctctgtgggatgacaagagcttcaaagaacttctttttgaagttctttttgtctttaataagccatgtcccaagcttattttatctagtttctgcct

SEQ ID NO: 427887 - DNA, 201 bp, Homo sapiens
tgaggactccaactacatggaggacagcaaagatgatcacagtgtcagtcattaggaatagaagtccaatccttttgcctattgtatcatcgtattgaagkcaaggcaaacacaatgcaggcaagcactagagggaaccacactttacttacagagagaagaggcagagcaatatcagctttaaaagtaggcattggtttc

SEQ ID NO: 427888 - DNA, 201 bp, Homo sapiens
tatccccattttataaattaggaaattgaagttcagatagacaatttggcagaggtgacacatccaaattagtgatgggaaagaaatttgaatgacacacrctgactccagcattattgctctttctgctacaaataacctgtgccagatgtcatgcttcaggaagaagaggaagtggtaaaatatgttcgctgcccacag

SEQ ID NO: 427889 - DNA, 201 bp, Homo sapiens
aacaagccatctatgctgagacaatcaattaaaatccctgactcagtaataaaataattgctacaattcatagagtgtctattatatgctgagcatgctayagacctacagttgtcagggtttttattaagtttatttttctctcttagccttatttacattgaaggactagtgtcagggttttttaatatccccatttta

SEQ ID NO: 427890 - DNA, 201 bp, Homo sapiens
actgcagcctccgcctcccgggttcaaggaattctcctgcctcagccttccaagtagctgggattacaggcatccaccaccacgcccagctaattttgtatttttttagtagagctggggtttcactgtgttagccaggctggtctcaaactcctgacctcaagtgatccacccgccttggcctcccaaagtgctgggatt

SEQ ID NO: 427891 - DNA, 201 bp, Homo sapiens; identical to SEQ ID NO: 138786

SEQ ID NO: 427892 - DNA, 201 bp, Homo sapiens
cctggagaggcccccacacgtgctgctcctggggaacttcgttctgcacggggcccactcagctctgcaccaggtgggtccactggctatcccctctcccrtatggccccaggctgcttcccaggtgttgcctcctggtcacattcctcattttcctctaaattttctgccctttctctgccccccatgtgctctcttctc

SEQ ID NO: 427893 - DNA, 201 bp, Homo sapiens
tttgagaggtcacagcgctgtgtctgtgtgagtacacctgtgtctgcacccctctactcttacaggtcatagagctgcccaacatccagaaggtcgaagtrtacccagtagaactgctgcttgtccggcacaatgatttgggcaaatctcacactgttcagttcagccataccgattctattggtgagtctaagggtcacg

SEQ ID NO: 427894 - DNA, 201 bp, Homo sapiens; identical to SEQ ID NO: 138791

SEQ ID NO: 427895 - DNA, 201 bp, Homo sapiens
tctagctctacttcccttgggcccagggccatcttaggccctgctgtgagtccagatggttcctgggtcaggtctttccccctccttgctggcccagagcycaagaggaagcagaagacggctggcctaagccttttggtggccccattcccttcagcaatccatctaggtcatcttcctgtcgatgccagcatccctggg

SEQ ID NO: 427896 - DNA, 201 bp, Homo sapiens
caggcggatcacttgagctcaggagttcaagaccagcctggataacatagccaggccctgtctctacaaaaataaataaataaataaaattaggctgggcrcagtgattcgcgcctgtaatcccagcattctgggaggccgaggcagatggatcactggagctcaggagtttgaaaccagcctgggcaacaaggtgaaacc

SEQ ID NO: 427897 - DNA, 201 bp, Homo sapiens
ccgtcccctctttccgggctccacggtggaggaacagctacacttcatcttccgtatcttaggtgaggaggcatgggccctaggcgctgtggagacacacrgggaggacctgtgaaatgtttgggataactcctcttccctactaggaaccccaactgaggagacgtggccaggcatcctgtccaacgaggagttcaagac

SEQ ID NO: 427898 - DNA, 201 bp, Homo sapiens
tttggggtgatgaaaaatgtacattcttgagtagaggagaaatgtgacttggcttgtaaaagtctagattggaccctaggggtcctaacctgatcaaacckttctggcagccctgagaagagctggtgtacactgagacccccccgccctccacacaatcccacccagtggttgggtctgggcaggacaccctgacacacg

SEQ ID NO: 427899 - DNA, 201 bp, Homo sapiens; identical to SEQ ID NO: 138783

SEQ ID NO: 427900 - DNA, 201 bp, Homo sapiens; identical to SEQ ID NO: 138787

SEQ ID NO: 427901 - DNA, 201 bp, Homo sapiens
ggtaggctgcccccgcatttgcagtccaattaacatcaccaaggcctctgcctcggggattttctggcctccctggggtatctaacacgccaccattttcygttaagtttctctacctgacctcaactccagccttactcttaaccttagttgcaataccatatctgcccccacagtcaacccagagtaaaccccagcgca

SEQ ID NO: 427902 - DNA, 201 bp, Homo sapiens; identical to SEQ ID NO: 138794

SEQ ID NO: 427903 - DNA, 201 bp, Homo sapiens
tggtggaggaactggaaaagggggttggacctggggaggtggagctcatgatcctgtttctctcttgccttacctgctaggacatcaacaagcgcctatcrctaccagctgacatccggctgcctgagggctacctggagaagctgaccctcaatagccccatctttgacaagcccctcagccgccgcctccgtcgtgtca

SEQ ID NO: 427904 - DNA, 201 bp, Homo sapiens; identical to SEQ ID NO: 138802

SEQ ID NO: 427905 - DNA, 201 bp, Homo sapiens
gcaataccatatctgcccccacagtcaacccagagtaaaccccagcgcagtctcctgccctaaatgacccccagtcttgaccgtgaacatagtctctgtgyatccctagctggagctctgcctctggactttagcagtggccttccgcttcaccccatttgaatgcaccccaagccatggtttcctcttaccctgggcaag

SEQ ID NO: 427906 - DNA, 201 bp, Homo sapiens; identical to SEQ ID NO: 138811

SEQ ID NO: 427907 - DNA, 201 bp, Homo sapiens; identical to SEQ ID NO: 138784

SEQ ID NO: 427908 - DNA, 201 bp, Homo sapiens
aagctggacaaactgggcgaggtgagaggcaaataggaggcccatggtggggatgaaggtcagtgggaactcctggaatctcatagcacctctcctgtcayacttcctcacattccagggtacctatgccaccgtctacaaaggcaaaagcaagctcacagacaaccttgtggcactcaaggagatcagactggaacatga

SEQ ID NO: 427909 - DNA, 201 bp, Homo sapiens
agacttaacaggtggtaattgcaataccataattcacttgacaaagttaataatgatttctttgtgtcatgtaatagtctatatttcatcttccctggttktagctggtttgtgtatggaattgtttgacagataaaggtcaagcctctcagagaaggggcagctttttctaattcttcccatggggtcatatggggctgg

SEQ ID NO: 427910 - DNA, 201 bp, Homo sapiens; identical to SEQ ID NO: 138790

SEQ ID NO: 427911 - DNA, 201 bp, Homo sapiens
ttcagctgtgttaatgagagagtaacactcagaacagtgcctggcccacatttaacacagtcgaattgttaactgtaatcatgaaagaaaagcacagagcrttctgagagcccatagcaggtagctcaagcctgaaggccactctgaccaggccaagtcaaacctgaaactggaggctgtggttttgtagtcacctctgtc

SEQ ID NO: 427912 - DNA, 201 bp, Homo sapiens; identical to SEQ ID NO: 138792

SEQ ID NO: 427913 - DNA, 201 bp, Homo sapiens; identical to SEQ ID NO: 138793

SEQ ID NO: 427914 - DNA, 201 bp, Homo sapiens; identical to SEQ ID NO: 138795

SEQ ID NO: 427915 - DNA, 201 bp, Homo sapiens; identical to SEQ ID NO: 138796

SEQ ID NO: 427916 - DNA, 201 bp, Homo sapiens; identical to SEQ ID NO: 138798

SEQ ID NO: 427917 - DNA, 201 bp, Homo sapiens
cagagagggtgagactgcagaaggaggctggatgggattccagggcaaggaggcagaagggcctgggaggccgtgcagactaacagtcccctctccatatyccattcctagatgatggtggctgatgtcttcagtcaccgcttctataagctctatcagctagaggagcctctgagcagcatcttggaccgtgatgatatc

SEQ ID NO: 427918 - DNA, 201 bp, Homo sapiens; identical to SEQ ID NO: 138803

SEQ ID NO: 427919 - DNA, 201 bp, Homo sapiens; identical to SEQ ID NO: 138804

SEQ ID NO: 427920 - DNA, 201 bp, Homo sapiens; identical to SEQ ID NO: 138805

SEQ ID NO: 427921 - DNA, 201 bp, Homo sapiens; identical to SEQ ID NO: 138807

SEQ ID NO: 427922 - DNA, 201 bp, Homo sapiens; identical to SEQ ID NO: 138808

SEQ ID NO: 427923 - DNA, 201 bp, Homo sapiens; identical to SEQ ID NO: 138809

SEQ ID NO: 427924 - DNA, 201 bp, Homo sapiens
cccttgtcttcctccctgccccacccacctacctgcttacccaccaacagccatctgctctgctttcccccacaggcaggccagctttccgcgtggtggamaccgagttctaagccacagaccgaggccccagcaggcagcggctggagggatgccacacccctcacagggcagcccccaactacatcttccctgcttact

SEQ ID NO: 427925 - DNA, 201 bp, Homo sapiens
ttgatagcgacggggccgacctcctcaccaagctgttgcaggtgagaccaccttgggtcagccttgggggtatgggattccaagtgtggggaaacagggacccccccccctcaaaccaggggcagggtctgaggtgggcagagagacctacttgttgaagatatcaatactatccccctccccgcacccccactcagtttg

SEQ ID NO: 427926 - DNA, 201 bp, Homo sapiens
tcacttgaacccgagaggttcaagtgagccaagatcacgccactgcactccagtctgggcgacagggcaaaactccatctcaaaaataaataaagccgggygcggtggctcacgcctgtaatcccagcactttgggaggctgaagcaggcagatcacgaggtcaggagatggagaccatcctggctaacacggtgaaaccc

SEQ ID NO: 427927 - DNA, 201 bp, Homo sapiens
cctcacagggcagcccccaactacatcttccctgcttactctctgcctacctgcctgagccatgttcacctgcccacttgtcccctgctgcctgcccaaamaccccaccattggcctgtcaacccacccattggcctgtctgctgggtgctaacaaagctctcatcactccttcacttggtctgtctgtctctgtcttggt

SEQ ID NO: 427928 - DNA, 201 bp, Homo sapiens
tatctcctggggagggtgaggcagggcagggacagtctccagggtcagtccctggatgggtggttacctccccttcctccaccctaagccctggggccctkaaatggggtgggagggcaggggtgggagccctcctagtgggtttggggggttgggttcctgaatgcaccataatcgctgtatgaaatattaaaaagtcta

SEQ ID NO: 427929 - DNA, 201 bp, Homo sapiens; identical to SEQ ID NO: 138785

SEQ ID NO: 427930 - DNA, 201 bp, Homo sapiens
gtctcctctgctctgttgcagacgctacgtgaccaaacccaactcagatgatgaggacgatggggatgagaaaggtgagggggctaacagtcagtgggcgkgggctctgggttaggtctgacccacgtagggttcgtctaggtgtgcattgcagcttagcacttgaggctcacaccttcccatctctgacatcctcctgtc

SEQ ID NO: 427931 - DNA, 201 bp, Homo sapiens
ttgtggagaagcactggtataagcagtgggaggcatacgtgcagggaggggaccaggactccagcaccttccctggctgcatcaacaatgccacactcttycaaggtacaaggcctttgcctccttctcaccctagccctggagttcttgtcccttccgtccctacagatgatcataagcccattctgtgtgctaggtcac

SEQ ID NO: 427932 - DNA, 201 bp, Homo sapiens
gccagtcatttggagactgattgaggacacaggtattggccaagcatgtgaggtccgtagggatgagtcaggtatgcccagatggattgatcattttgggyctcacaaagatcttgaatgtactccatcaccccgcacaggcctagtattgcgcacagctcgggagcggtttctggtggagccccaggaagacactcggct

SEQ ID NO: 427933 - DNA, 201 bp, Homo sapiens
ttaccttagcaacctgatgaattctaaaaatggtgctgtgctggggggaacatggaaatatagaatgtggcattgtgtcatgcatataaagttatacacarataaacattcctatgcatttttaaatgataaaatggaaatgcacaacaaatgtgacagcgtgggtgtatgtcaggggaagaggagtgtcttcatccattt

SEQ ID NO: 427934 - DNA, 201 bp, Homo sapiens; identical to SEQ ID NO: 138789

SEQ ID NO: 427935 - DNA, 201 bp, Homo sapiens; identical to SEQ ID NO: 138788

SEQ ID NO: 427936 - DNA, 201 bp, Homo sapiens
cagcctgggcaacaagagtgaaacttgtctcaaaagaaaaaaaaaaaaaaagaggctgggcgcggtggctcacacctgtaatcccagcactttgggaggcygaggcaggcggatcacctgaagtcagaagttcgagactggcctggccaacatggtgaaactccatctctactaaaaatacaaaaattagccaggcatggt

SEQ ID NO: 427937 - DNA, 201 bp, Homo sapiens
atactccaatgaggtggtgacactgtggtaccggccccctgacatcctgcttgggtccacggactactccactcagattgacatgtggtaaggacaggtgsaagtgtggcaggggccatgtggtaaagggggtggcttggtcacaacagccacccagccagctgcctttctattcactgtgccctccctgcccaggggtgt

SEQ ID NO: 427938 - DNA, 201 bp, Homo sapiens
gtaaaataaaatttattttgaaacagtctatccaatgtagttttaattctcatctttctctctctcttttttttttttcttgagatggagtctcgctctgwcactcaggctggagcgcagtggtacaatcatagctcactgtaacctagaactcctaggctcaagcagtcctttcgcctcagcctcctgagtagctgggac

SEQ ID NO: 427939 - DNA, 201 bp, Homo sapiens
cactttccacggcctcttcaagtccacgctggtgtgccccgattgtggcaatgtatctgtgaccttcgaccccttctgctacctcagtgttccactgcctrtcagccacaagagggtcttggaggtcttctttatccccatggatccgcgccgcaagccagagcaggtgtggggcagtgggggcctggggagatgatgatg

SEQ ID NO: 427940 - DNA, 201 bp, Homo sapiens
ccaagaggaagcagaagacggctggcctaagccttttggtggccccattcccttcagcaatccatctaggtcatcttcctgtcgatgccagcatccctggrctaccttgtttagggttgttcaatgaatagcagggactcatcacctcagcagaggttggtcctaggccctcagccccctgattcacttatttctgccata

SEQ ID NO: 427941 - DNA, 201 bp, Homo sapiens; identical to SEQ ID NO: 138797

SEQ ID NO: 427942 - DNA, 201 bp, Homo sapiens
tatccggtcaggggccagggagaggatggctgggggaaggcagggaaaggagggggtgtaccagtattaaccctctccccacccacagggacctggacttytctgagtttgtcatccagccacagaatgagtcgaatccggagctgtacaaatatgacctcatcgcggtttccaaccattatgggggcatgcgtgatggac

SEQ ID NO: 427943 - DNA, 201 bp, Homo sapiens; identical to SEQ ID NO: 138799

SEQ ID NO: 427944 - DNA, 201 bp, Homo sapiens
ttttaacaggaacagagcaaactagaatactagatgggctaatagtaagagcagtgtttctgtgagccagacatggcacgtgagaggcagtacaaagggcrcacagtaggtgctcagaaaaagtctgttttggctgggcattgtggctcatgcctgtcatccgagtaccttgggaggccgacacgggtggatcacctgagg

SEQ ID NO: 427945 - DNA, 201 bp, Homo sapiens
tgatccgagatcgcgccactgtactccagcctgggcaacagagcgattctctgtctcaaaaaaaaaaaaaagaaaaagtccgtttgctgactcgggctctstctgtaggtactgcccttcctgcaagcagcaccagctggcaaccaagaagctggacctgtggatgctgccggagattctcatcatccacctgaaacgctt

SEQ ID NO: 427946 - DNA, 201 bp, Homo sapiens; identical to SEQ ID NO: 138800

SEQ ID NO: 427947 - DNA, 201 bp, Homo sapiens; identical to SEQ ID NO: 138801

SEQ ID NO: 427948 - DNA, 201 bp, Homo sapiens
cctagaagatgacgaggaggataaagatgacgtccctgggccctcaactgggggcagcctccgagaccctgagccagagcaggctgggcccagctctggartcacgaacaggtgcccgttcctcctggacaattgccttggcacatctcagtggcccccaaggcgacgacgcaagcagctgttcaccctgcagacggtgaa

SEQ ID NO: 427949 - DNA, 201 bp, Homo sapiens
gaggtagcggtggagggggcagttgggcggggataggccgtcctagctaaggtggtaaaggccaataactcttcaggctgcctctcctcgaaaagtcatcwtctcgcgaacctttaaaatgccttcctccccaagcacctcaagggactagaactgagtgcttcatttgtcttttttcctccttgcaaaagtcccgtttgc

SEQ ID NO: 427950 - DNA, 201 bp, Homo sapiens
agccgtagcccagaggccagatgaagccttctgcagtggttcggactagggatagtggctggcccgtgtttgaggatgcagggcagtgggtcagcagatasagttagtagccccagggtcatgagggttctgggaacctcacctccaccctcacccccagattgccaaggacatggaacgctgggcccgcagtctcaacaa

SEQ ID NO: 427951 - DNA, 201 bp, Homo sapiens; identical to SEQ ID NO: 138806

SEQ ID NO: 427952 - DNA, 201 bp, Homo sapiens; identical to SEQ ID NO: 138810

SEQ ID NO: 427953 - DNA, 201 bp, Homo sapiens
ctctttggataggttgtatgacacacacatcacggttctcgatgcggcccttgagactgggcaggtaagggtggggagggcttttctgttcaggtggactrgcagatagactcacctggcagtactcgggggaaatgaaggctaggtacccataatgtcctccattaatacctttccttctttctctttctccaacccagt

SEQ ID NO: 427954 - DNA, 201 bp, Homo sapiens; identical to SEQ ID NO: 138812

SEQ ID NO: 427955 - DNA, 201 bp, Homo sapiens; identical to SEQ ID NO: 138813

SEQ ID NO: 427956 - DNA, 201 bp, Homo sapiens
ctgattccacctccccacccccacaatccacactgactcctgtcctctccccacagtccaaggcagcctatgtcctcttctaccaacgccaggacgtggcrcgacgcctgctgtccccggccggctcatctggcgccccagcctcccctgcctgcagctccccacccagctctgagttcatggatgttaattgagagccct

SEQ ID NO: 427957 - DNA, 201 bp, Homo sapiens
cgggaccgcttcacctgggagggcctgtataacgtcctgatgtaccggctctcgtaagtgtcctcttccccgggggtggggggcggaggggtctgaactcygacttgggtgtttagctgcttatttgacacctcccctgtaacaaacaaaagacagtccaaacttaacatggccatagaagaacttgtagggttttttctt

SEQ ID NO: 427958 - DNA, 201 bp, Homo sapiens
ctcgactcagacaagatggtgacaatgccttgagtctgaggcatcctctgcctgctttcctgcctgccccacctgcctcatattgtgtgggcctttttttktttgtttcattcattgtttttttttttttaattattttaaatgagatttttgttttttttaaatgcaatatctctgtatacagactggctgggccccacc

SEQ ID NO: 427959 - DNA, 201 bp, Homo sapiens
tgacaggacccaccagcaataccagaagttggccagccctactcatccaaattcctttctgccagctggacatcacaaggatttcagacttccatcctgcrgcaactccattttggggtccgggggtttaagggttactctattagtcctttctcactctgctaataaagacatacctgagactgtgtaatttataaagaa

SEQ ID NO: 427960 - DNA, 201 bp, Homo sapiens
cctctggagttttcacttataccattctctcatgcccaggaagctgctcttcaccaaaccacaagccttcctctaactcagtcacaactaagcttctatcyggacactgatgatgctgtaactgttttgttgtgcttctgattagttgccctctcaaccataagcagcctataaacagggcctggctccatccttgttact

SEQ ID NO: 427961 - DNA, 201 bp, Homo sapiens
ccttctataatgcaatgtatagaatcctgaaatatgcatcctgaaatattcctctcattgtgaaaaattgtagctagagcagaagacacactgtgtgcccrtggtcagagccagttaacacctttggctcaacatctttatctgtaaaataaatatcacatccaagtgtaatgggaattcaattagataatatatataaag

SEQ ID NO: 427962 - DNA, 201 bp, Homo sapiens
aggacaaggctgagagaattccagggcttccttgagaaaacagaattgaggaaatgcaaagtgaagaattctagcatcaggaacaagagaagaatgatggraaacctgctactgaggtatggaggtattcctctggagttttcacttataccattctctcatgcccaggaagctgctcttcaccaaaccacaagccttcct

SEQ ID NO: 427963 - DNA, 201 bp, Homo sapiens
gtgtgtgtgtgtgtctcctaggtttattaatgtggattgcagcttaaaaaacaaaaggtttgaaagtcattgacagccattgatccggagccctagactgrgatccagggacctgtattccagacctgtgctgcttctaactggctgcagcatctccttggcaggttgcttggttttcttttggtttcagtgttgtcattt

SEQ ID NO: 427964 - DNA, 201 bp, Homo sapiens
tgacatcttttaaaaataaaatggaatagagcagaatagaaaatatcaaaaggtttaaatattggggggtgtgtgtgtgtgtgtgtgtgtgtgtgtgtgtrtgtgtgtgtgtgtgtctcctaggtttattaatgtggattgcagcttaaaaaacaaaaggtttgaaagtcattgacagccattgatccggagccctagact

SEQ ID NO: 427965 - DNA, 201 bp, Homo sapiens
gtaaatatctttgcttagtcaatacatgtggagtctgtgacctctagaaatttctgataagacaaggtgggctgtttccacttaaagcagagttctcaatyatttttctttctgccattttcttgctgagatgctaccatttccagcagctctgctcgagttgtttggcctgcagtctagggaagaggtggtggttgtgca

SEQ ID NO: 427966 - DNA, 201 bp, Homo sapiens
gcagtggtctccttaccctttctttctccttctataatgcaatgtatagaatcctgaaatatgcatcctgaaatattcctctcattgtgaaaaattgtagstagagcagaagacacactgtgtgcccgtggtcagagccagttaacacctttggctcaacatctttatctgtaaaataaatatcacatccaagtgtaatgg

SEQ ID NO: 427967 - DNA, 201 bp, Homo sapiens
cctgccttattgcctccaaaatatttttaactgcagaggtatgaaagatgttctacaaaatttgtcttatgatgattgagtttgctagttctgaaacatcrctggtaggacgttaagatgattatttgattcatggtgcttagtaaaactgtaattagagaagcagtttttagaaagtctgtttttgatactttcttgttt

SEQ ID NO: 427968 - DNA, 201 bp, Homo sapiens
gagttgggaatttttcttttttactattatccaaaaaaattataaaagacataattgttgctttcttacagatttagtaaaaacctcatcgtgtccttttrtggagagatggtgagagatatttttactgtaaatgtaatttgcgtatttttcacctgtgaggcagaggttgcaatgagccaagattgtgccactgcactc

SEQ ID NO: 427969 - DNA, 201 bp, Homo sapiens
acatctttatctgtaaaataaatatcacatccaagtgtaatgggaattcaattagataatatatataaagtttctttgtgaactataaatcactaaataartgttatatgtgataattatcaggcctctttttcacataggaaatgccccaccatatttttcaacaacttctttcttatttctttggctcgagctctgaag

SEQ ID NO: 427970 - DNA, 201 bp, Homo sapiens
agccctatgcacttctgctagcaggttttatattgggtgtgtggtttgacctacaagccagtagatggcgccatgggtaagagctggctgttgccagtgcygctggctgtgtacttgatccttgtttattgggaggagctctctgctgccccaggaatgggctgatttcctgagtacacattaatctgagctccctcagcc

SEQ ID NO: 427971 - DNA, 201 bp, Homo sapiens
tgacggaaatttttacaagtttttttttttttggatgcatacaaacaataagctttttcttctaacatgagcaaagtccctcaaaaagtgagacctggatrtaacttcacttgatgctgctcctcgaaagtggttcttgctaaaggatacagtctttttcctttaaaacactatgttcattttggagaagtgataagctag

SEQ ID NO: 427972 - DNA, 201 bp, Homo sapiens
ttatcaggcctctttttcacataggaaatgccccaccatatttttcaacaacttctttcttatttctttggctcgagctctgaagatataatagccctaaygtaatacctgagcttttttccatcagtagcttgaccagcagacttcattccaaataaactgggtcatcccttttggctcttggaacacaactctaattta

SEQ ID NO: 427973 - DNA, 201 bp, Homo sapiens
ctcggctcaccacaacctctgcctcctgggtgcaagcgattctcctgcctcagcctcccaagtagctgggattacaggcatgcactaccacgcctggctarttttgtatttttagtggagatggggtttctccgtgttggtcaggcttgtgggcaaaagaaagagagatcagactgttactgtttctacatagaaagaagt

SEQ ID NO: 427974 - DNA, 201 bp, Homo sapiens
aaaccttctaccatatttggaaactcatttctcagtctagaagttctccactataagtagcatttgttttgtgatggtgaaaaattgggatttttttttgstatcaaccatactcttcaatacaaaaggacaaaatattttttaaatgatttaggtcagaattgaagaagtggctatgattatatgtggcatgaattgata

SEQ ID NO: 427975 - DNA, 201 bp, Homo sapiens
acaatctcggctcaccacaacctctgcctcctgggtgcaagcgattctcctgcctcagcctcccaagtagctgggattacaggcatgcactaccacgcctrgctaattttgtatttttagtggagatggggtttctccgtgttggtcaggcttgtgggcaaaagaaagagagatcagactgttactgtttctacatagaaa

SEQ ID NO: 427976 - DNA, 201 bp, Homo sapiens
aaaaccttctaccatatttggaaactcatttctcagtctagaagttctccactataagtagcatttgttttgtgatggtgaaaaattgggatttttttttkgtatcaaccatactcttcaatacaaaaggacaaaatattttttaaatgatttaggtcagaattgaagaagtggctatgattatatgtggcatgaattgat

SEQ ID NO: 427977 - DNA, 201 bp, Homo sapiens
ataacttatttctttctttccttcctttcttcctttactttttttttttttttcttgagccagggtcttattctgtcacccaggctgtagcgcagtggcakgatcatggctcactgtagcctcaacctcttgagctcaagcaatcccccaatttttttttatgttttgaagaggctgggacttgctatgttgcccaggctg

SEQ ID NO: 427978 - DNA, 201 bp, Homo sapiens
aaaaaccttctaccatatttggaaactcatttctcagtctagaagttctccactataagtagcatttgttttgtgatggtgaaaaattgggatttttttttggtatcaaccatactcttcaatacaaaaggacaaaatattttttaaatgatttaggtcagaattgaagaagtggctatgattatatgtggcatgaattga

SEQ ID NO: 427979 - DNA, 201 bp, Homo sapiens
ccagattcaaatagcagcatttaaattaaatacctatcatggaaaaaatactattccttgaaaattttgatagaaacagtaagagaatgcaatagcattttcttaaagcttcctcctttgtgtcttgagtgtattgttatagattgcagagtgctacatatttaatggttataattgtttgataaatataaaaaggaataa

SEQ ID NO: 427980 - DNA, 201 bp, Homo sapiens
ttggctcttggaacacaactctaatttagttatttggttataactaaccaaataacttatttctttctttccttcctttcttcctttactttttttttttytttcttgagccagggtcttattctgtcacccaggctgtagcgcagtggcatgatcatggctcactgtagcctcaacctcttgagctcaagcaatccccca

SEQ ID NO: 427981 - DNA, 201 bp, Homo sapiens
tccagagagaagagggcagcacacttcgcaggggcaactggaagagggagccatccaggagacctgtgcttgactgatgggtgggagcaatagcgagagasagggagggacctgagagtggaagcctttattgggatgtaaggtgcgacctgagtaggtttcctgcagggaggtctaatttggtttaacgcaagcagccat

SEQ ID NO: 427982 - DNA, 201 bp, Homo sapiens
cctttgctcagcgtagatttctgcagtggtctccttaccctttctttctccttctataatgcaatgtatagaatcctgaaatatgcatcctgaaatattcmtctcattgtgaaaaattgtagctagagcagaagacacactgtgtgcccgtggtcagagccagttaacacctttggctcaacatctttatctgtaaaataa

SEQ ID NO: 427983 - DNA, 201 bp, Homo sapiens
aatttttctaaatttacatgtattctcaaatacaaaaaatacaaaataaacacaaaaaaagtaaaagccaagatgctaaaaaaaaaaaaacccaaaggtaygttttactgcatagcaatgattacattttgttttgcatcttttttaaaaaattaagaagttgagacagggtctcactctgtcacccaggctggagtgcag

SEQ ID NO: 427984 - DNA, 201 bp, Homo sapiens
aaaagggacctggtagtcaatgttttgctacaatgaagaaatgcctaaaactatataccttttctgaaacagtaagaaagcatccttcatggtctaataaycataaacttttagaattcctacccaggcctttgtctcaaattctcctattactaaccctattccctgccaccccctccccactctgcccccggctttttt

SEQ ID NO: 427985 - DNA, 201 bp, Homo sapiens
gaactggggaggaacctctttatccaaagcaaaagggacctggtagtcaatgttttgctacaatgaagaaatgcctaaaactatataccttttctgaaacrgtaagaaagcatccttcatggtctaataaccataaacttttagaattcctacccaggcctttgtctcaaattctcctattactaaccctattccctgcca

SEQ ID NO: 427986 - DNA, 201 bp, Homo sapiens
aattccaaatagtaatggagaaaaaggttgtcttttccagtacttcattaggaaattgttcagtaagagaaaacatgtgaactgaaaaactctgatgttckttttaaggttgaatgtcaaaccagcaatgttcacctccctaaactatcactcacctaaagagattccataacgctttctggttaccatccaacttggtgt

SEQ ID NO: 427987 - DNA, 201 bp, Homo sapiens
agcctcccaaagtgctaggcgtgagccaccatgcccggcctaccttccctaaatattttttctggaaagataaagtgatgggattctaagtctttgaagcsgaactatatatatatattttttctcttctctagtcttataaaatctgctttaagagacagaactaggcttgaagccttgtctttcaaagacaaaatccat

SEQ ID NO: 427988 - DNA, 201 bp, Homo sapiens
tcctgagtagctaggattacaagcatgtgccaccacgtctggctgatttttgtatttttagtagagatgtggtttcaccatcttggccaggctggtttagrattcctgacctcaagtaatcctccacccacctcagcctcccaaagtgctaggcgtgagccaccatgcccggcctaccttccctaaatattttttctggaa

SEQ ID NO: 427989 - DNA, 201 bp, Homo sapiens
attacaggcgggagccaccatgatggccaacttttgaattctgaaccagttgattgagtaccagagctcttcaataccttgaagaaagattcaggggagarccgttgtgaacagcttgccccagggaaaggacaaggctgagagaattccagggcttccttgagaaaacagaattgaggaaatgcaaagtgaagaattcta

SEQ ID NO: 427990 - DNA, 201 bp, Homo sapiens
tggcctatttttgtacttttagtagagacaaggtttcaccctgttggcaaggctggtctcaaactcctgacgccaggtgatctgcccacctcggcctcccraagtgctgggattacaggcgggagccaccatgatggccaacttttgaattctgaaccagttgattgagtaccagagctcttcaataccttgaagaaagat

SEQ ID NO: 427991 - DNA, 201 bp, Homo sapiens
tcctgcctcagcctcccaagtggctgggattataggtgcccatcaccacgcatggcctatttttgtacttttagtagagacaaggtttcaccctgttggcraggctggtctcaaactcctgacgccaggtgatctgcccacctcggcctcccgaagtgctgggattacaggcgggagccaccatgatggccaacttttgaa

SEQ ID NO: 427992 - DNA, 201 bp, Homo sapiens
ctgcaacctcgacctcttgggttcaagtgattctcctgcctcagcctcccaagtggctgggattataggtgcccatcaccacgcatggcctatttttgtayttttagtagagacaaggtttcaccctgttggcaaggctggtctcaaactcctgacgccaggtgatctgcccacctcggcctcccgaagtgctgggattac

SEQ ID NO: 427993 - DNA, 201 bp, Homo sapiens
agaagaactcagccttatccactgatacttttctcccacacccaagcccaaaacaaaacaaaacaaaacaaagatattcatagaccctaagctaaaagtgrtaagtgaatttactgaagtgcagccctaatcatgccatttccatgctcaaaatccatactatgtccccactgccaatggcaataaactaaacgtttcaac

SEQ ID NO: 427994 - DNA, 201 bp, Homo sapiens
ttacatatatcatttaatacccataacacctatatgaaatatacactgttactctgttttttcttttagaaacattttgttatagagaattttaatcatayacaaaagtccagagaatcatacaatatatccacatatagtcgtcacattgctgcaacagtcatttcagccggcagccagccacatttcatccgttctttc

SEQ ID NO: 427995 - DNA, 201 bp, Homo sapiens
tttcaaaaccccttctgtatcccagacagtattgcacttttacatatatcatttaatacccataacacctatatgaaatatacactgttactctgtttttycttttagaaacattttgttatagagaattttaatcatatacaaaagtccagagaatcatacaatatatccacatatagtcgtcacattgctgcaacagtc

SEQ ID NO: 427996 - DNA, 201 bp, Homo sapiens
tgtgttgtgggggaggtgtattttaaaagagaaaataaaaggagaaataaacttttcaaaaccccttctgtatcccagacagtattgcacttttacatatmtcatttaatacccataacacctatatgaaatatacactgttactctgttttttcttttagaaacattttgttatagagaattttaatcatatacaaaagt

SEQ ID NO: 427997 - DNA, 201 bp, Homo sapiens
tcttttggtttcagtgttgtcatttgtaatatggaaagaagggttggaccagatgctttctaaggtctttccagctctaaaattttatgaatgtatgaatycttgaatgagagaagtcctaattttgttattttcggtagcttctgcccaaagatcactcggccgggcacgggtggctcacgcctgtaatcccagcacttt

SEQ ID NO: 427998 - DNA, 201 bp, Homo sapiens
taaattttctaaatttttctaaatttacatgtattctcaaatacaaaaaatacaaaataaacacaaaaaaagtaaaagccaagatgctaaaaaaaaaaaaacccaaaggtacgttttactgcatagcaatgattacattttgttttgcatcttttttaaaaaattaagaagttgagacagggtctcactctgtcacccagg

SEQ ID NO: 427999 - DNA, 201 bp, Homo sapiens
tttttgttcatttgtttttttctaaattgtaaattttctaaatttttctaaatttacatgtattctcaaatacaaaaaatacaaaataaacacaaaaaaartaaaagccaagatgctaaaaaaaaaaaaacccaaaggtacgttttactgcatagcaatgattacattttgttttgcatcttttttaaaaaattaagaagt

SEQ ID NO: 428000 - DNA, 201 bp, Homo sapiens
tggagtgcattggcacaatctcggctcaccacaacctctgcctcctgggtgcaagcgattctcctgcctcagcctcccaagtagctgggattacaggcatrcactaccacgcctggctaattttgtatttttagtggagatggggtttctccgtgttggtcaggcttgtgggcaaaagaaagagagatcagactgttactg

SEQ ID NO: 428001 - DNA, 201 bp, Homo sapiens
aatgattttatttaagatttgctttactacaattccaaacaagggagggggagggggaagaaaacaataaattagatctataacaaattttttgaaagaamatatgtaatttgaataatttttgttcatttgtttttttctaaattgtaaattttctaaatttttctaaatttacatgtattctcaaatacaaaaaataca

SEQ ID NO: 428002 - DNA, 201 bp, Homo sapiens
ctggtctaatgattttatttaagatttgctttactacaattccaaacaagggagggggagggggaagaaaacaataaattagatctataacaaattttttkaaagaaaatatgtaatttgaataatttttgttcatttgtttttttctaaattgtaaattttctaaatttttctaaatttacatgtattctcaaatacaaa

SEQ ID NO: 428003 - DNA, 201 bp, Homo sapiens
tatactgaacaccacgggaatttttggataaaactatcctatatttttatagagattgcatcaggaactggccttaaagtagggccaaagtagttaaactmcagtatttattattaagaatcattatgattagaagtctgaagaaagcaacatattagcaagaaaggttgcaagtcaccttcccagaattgtctttttctt

SEQ ID NO: 428004 - DNA, 201 bp, Homo sapiens
ttgtgttttccacagggcctagcatagacctttcttactgtgggtgcctttatttatatgagagtgagtcaaagaaatagtatcttgagctatctttggtyactccatccagcagcctgcattggtcaagttcaaagatcccattgacaaacacaagagttctgataaaacatgatgagcagggggaccccaccctccctc

SEQ ID NO: 428005 - DNA, 201 bp, Homo sapiens
attaaaattaatgtagagttgagaggaaagcaataaaacaattaattggctgagaaaccaagtctttgaggaaatgctgagggaagtgggtcatttgaatygaaaaaaaggaacaaaagagcctttgtctataaatatatactgaacaccacgggaatttttggataaaactatcctatatttttatagagattgcatcag

SEQ ID NO: 428006 - DNA, 201 bp, Homo sapiens
attggtcaagttcaaagatcccattgacaaacacaagagttctgataaaacatgatgagcagggggaccccaccctccctctcccttgggaggggcatgcrggcccaacccccaagtgttacagacccccgttgttatttttaaatttagaaaataaaaaaccatgatgagttacgcattgctttttgaatgtcaatgcta

SEQ ID NO: 428007 - DNA, 201 bp, Homo sapiens
gagtctgcacctccttttgtgttttccacagggcctagcatagacctttcttactgtgggtgcctttatttatatgagagtgagtcaaagaaatagtatcktgagctatctttggtcactccatccagcagcctgcattggtcaagttcaaagatcccattgacaaacacaagagttctgataaaacatgatgagcagggg

SEQ ID NO: 428008 - DNA, 201 bp, Homo sapiens
tcgaactcctgacctcaggtgatctacccacctcagcctcctaaagtgctgggattacaggaatgagccaccgcgcccagcctgtttttttttttttgtttgtttgtttgttttttgagatggagtcttgctctgtcacccacgctggaatgcagtggtgcaatctcggtcactgcaacctccgcctcctgggttcaagca

SEQ ID NO: 428009 - DNA, 201 bp, Homo sapiens
aaactaaatgaaaagaaaacaaacagcatatgagatgagcaatcaaagataattaatacactagtttattaaaatatttgttttaattttctacctttagytttgtacatatttgaattaaaattaatgtagagttgagaggaaagcaataaaacaattaattggctgagaaaccaagtctttgaggaaatgctgagggaa

SEQ ID NO: 428010 - DNA, 201 bp, Homo sapiens
gtcctccctttgctgagcgctggtcccctgggcccacttttctttctctatactttgtctctatgtctctttcttttctcagtctctcatcccacccaagragaaacacccacaggtgtggaggggcaggccaccccttcaaggctggtctcaaactcccgacctcaggtgatctgcccacctcagcctcacaaagtgcta

SEQ ID NO: 428011 - DNA, 201 bp, Homo sapiens
ctcgaactcctgacctcaggtgatctacccacctcagcctcctaaagtgctgggattacaggaatgagccaccgcgcccagcctgtttttttttttttgtttgtttgtttgttttttgagatggagtcttgctctgtcacccacgctggaatgcagtggtgcaatctcggtcactgcaacctccgcctcctgggttcaagc

SEQ ID NO: 428012 - DNA, 201 bp, Homo sapiens
tggtgttagtgaaaacaaaactaaatgaaaagaaaacaaacagcatatgagatgagcaatcaaagataattaatacactagtttattaaaatatttgtttwaattttctacctttagctttgtacatatttgaattaaaattaatgtagagttgagaggaaagcaataaaacaattaattggctgagaaaccaagtctttg

SEQ ID NO: 428013 - DNA, 201 bp, Homo sapiens
agataagaggaaggcatctgtctcctgctcctccctgggcaatggaatgtctcagtgtaaaacccgatcgtatattccatctactgagataggagaaaacygccttagggctggaggtgagacatgctggtggcaatactgctctttaatgcaccaagatgtttgtgtatgtgcacatcaaagcacaacacctttttctta

SEQ ID NO: 428014 - DNA, 201 bp, Homo sapiens
acagacagcctagtatttttagccttctgagtttagttctacatttcactgatttctggtagacatcaatagaaagaagttctgcacctggaatgggaaaragggaactgaggcaagaaactgtgatttctaatgacaaatgaatatcatggtgttagtgaaaacaaaactaaatgaaaagaaaacaaacagcatatgaga

SEQ ID NO: 428015 - DNA, 201 bp, Homo sapiens
ttagtgaaagaggaaggcctctttgcagttgagataagaggaaggcatctgtctcctgctcctccctgggcaatggaatgtctcagtgtaaaacccgatcrtatattccatctactgagataggagaaaactgccttagggctggaggtgagacatgctggtggcaatactgctctttaatgcaccaagatgtttgtgtat

SEQ ID NO: 428016 - DNA, 201 bp, Homo sapiens
gcttacactcaggggaggcgggaaagcaggatgtgtctgtgtggaaggaatggggcctcaccactcccactgccagagaggtagcagggaggtgatgcttyggaacccctaaagcaaacctcttctagcagccagcttgtggacctgagatggtgccagtgctgggtgctataggtgccatggggccaggatgctggtgtc

SEQ ID NO: 428017 - DNA, 201 bp, Homo sapiens
aaggctgcaggaacctctgcctaggaaagccaggtattgtccaaggtttctccccaggtgatagtctgaaatatggcttcctgggaagggaaagatctgaycgtcctgcagcccgacacccataaatggtctgtgctgaggaggattagtgaaagaggaaggcctctttgcagttgagataagaggaaggcatctgtctcc

SEQ ID NO: 428018 - DNA, 201 bp, Homo sapiens; identical to SEQ ID NO: 255169

SEQ ID NO: 428019 - DNA, 201 bp, Homo sapiens
gcagcatccctaaaaatgtccagttatataatggcatccagtaaatgttttcttaattacttacctccattaacaagctttatgcaaaaaaaaaaaaaaaaggaatgctgactttagacttcatctccacttaaaggaagatttctgttgcttttcacaatagatatgttggatattttgcacaagtgaaacatctgtaca

SEQ ID NO: 428020 - DNA, 201 bp, Homo sapiens
gcagtgctcagtacagccagctgctgttacaaacgcgggggaaatgtggacatactcccacacctcgggcgtccctcgtcctcagaaccctcttgctggtrtcaagcactaacccagcatgagggtcccgacgccccaggggtgtgaacacgtatgcatgagtgtgccggcatgcatgggacggcccctctagcaggtcag

SEQ ID NO: 428021 - DNA, 201 bp, Homo sapiens
cctaccagatctgtggtgccacatcacacctgaaggcattctggaggtgcaaggtacaccacacagccagccttcctttggccttggtgacagcaaaggcygagaggcagaggaggaggaggaggacatgggaggcaggaaaggctcctccactggctcttgggggagtggaagaggggacccttcctacccaggccatgg

SEQ ID NO: 428022 - DNA, 201 bp, Homo sapiens
atggagcggcacaaagtcacagaagggagatgggccatggtcccctgcatctccctacccagctcctctagccccagcccaggtcccaggcaggacaatcytcccgctcagcaccaccccaactcccaacagcacccctcagtcagaggcgcttcagccccttcccgccagcccaggagggtccagggctcaccaggtccc

SEQ ID NO: 428023 - DNA, 201 bp, Homo sapiens
aaggaagggtaggagagtgggtggatgggtagaaagatgaatggataaatggatgatggatggatagacaaatggatggatagatgaatggatggacaaadggatggatggatggatgatgaatggacaaatggatggacaaatggaaatgggtggactgatggatggatggatggatggacaaatggatggatggatagg

SEQ ID NO: 428024 - DNA, 201 bp, Homo sapiens
tagatggacaaaaggatggatagatgaatgaacaaatggatggatgggtggacaaatggatgatggatggacaaatggatgatggatggacagagtggtaggatggatggatgaaccaatgaatggataatggatggacaaatgaatggataacggatggacaatggatggatggatgatggatggatggacaaatggatg

SEQ ID NO: 428025 - DNA, 201 bp, Homo sapiens
tctatttattgttttgggggatgtctcagcattcacttttgtatgggtttggaattggggttcataggctcattttgggcaggagggccccgtctctgtcrcttgccctgtgtgcacatttctggaagctgtgtggttcccattacttggtatctcaaggcctctgatcagacttgcgtctcgtgttggtaccgaggtact

SEQ ID NO: 428026 - DNA, 201 bp, Homo sapiens
agatggacaaaaggatggatagatgaatgaacaaatggatggatgggtggacaaatggatgatggatggacaaatggatgatggatggacagagtggtagdatggatggatgaaccaatgaatggataatggatggacaaatgaatggataacggatggacaatggatggatggatgatggatggatggacaaatggatga

SEQ ID NO: 428027 - DNA, 201 bp, Homo sapiens
aaaaggatggatggatggatggatggatggatggatggatggatggacaagtggatggatggatgataggatggatggatggatggatggatggatggatggacggacggacggacggacggatggacaaaaggatggatgaatggatggatggatggatggtggatggatagctgacggatggatggacaaatggattga

SEQ ID NO: 428028 - DNA, 201 bp, Homo sapiens
gcaggaccctgacggcgaagaccagaccaagttctgtccaagctccgcctctacctggcatgagacccggggcagtcccccagccctcctccataccccargggcagcaggaagcaggggcagaaagagatgcgggaacagacaggccccacctcgatgttgccaccaactcgggcgagaagcgggggcaggggcttgtcc

SEQ ID NO: 428029 - DNA, 201 bp, Homo sapiens
aaaggatggatggatggatggatggatggatggatggatggatggacaagtggatggatggatgataggatggatggatggatggatggatggatggatggacggacggacggacggacggatggacaaaaggatggatgaatggatggatggatggatggtggatggatagctgacggatggatggacaaatggattgat

SEQ ID NO: 428030 - DNA, 201 bp, Homo sapiens
aaggatggatggatggatggatggatggatggatggatggatggacaagtggatggatggatgataggatggatggatggatggatggatggatggatggacggacggacggacggacggatggacaaaaggatggatgaatggatggatggatggatggtggatggatagctgacggatggatggacaaatggattgatg

SEQ ID NO: 428031 - DNA, 201 bp, Homo sapiens
aggatggatggatggatggatggatggatggatggatggatggacaagtggatggatggatgataggatggatggatggatggatggatggatggatggayggacggacggacggacggatggacaaaaggatggatgaatggatggatggatggatggtggatggatagctgacggatggatggacaaatggattgatga

SEQ ID NO: 428032 - DNA, 201 bp, Homo sapiens
gatggatggatggatggatggatggacggacggacggacggacggatggacaaaaggatggatgaatggatggatggatggatggtggatggatagctgayggatggatggacaaatggattgatgatggatgatggatgaatggctggatggatgaaggatggatggataaaaagaagggactgagggaaggagggagaa

SEQ ID NO: 428033 - DNA, 201 bp, Homo sapiens
cctgcacttggggtttaatgccctgaggttgctgatgtgaaattattaatcattttgttgtttattgttgaatttgtgttttgtaacaaatatcccagggsacaatggagtgtgtgctgggggcgtggagcctccctgggacaggttctcattccctgctcccctgcccctgcctggtgaccactgtccccctactccccc

SEQ ID NO: 428034 - DNA, 201 bp, Homo sapiens
ccttgatttagtttcctgtctgtacaggcagaaaatggcccatttatatggagataagggcgtttacaaccagagcaccccaccagagaggtgctgcccctcggagaaagtggtttacttgtggcctttagagacgcaagtcaactggcgaagccctccacagccccttcccagggaggggccgggcagcactgccatgat

SEQ ID NO: 428035 - DNA, 201 bp, Homo sapiens
ggctcattttgggcaggagggccccgtctctgtcgcttgccctgtgtgcacatttctggaagctgtgtggttcccattacttggtatctcaaggcctctgrtcagacttgcgtctcgtgttggtaccgaggtactggggggatgtgggtccatctccactccagcccactccttggctcagcccctggtctcaaacttgcc

SEQ ID NO: 428036 - DNA, 201 bp, Homo sapiens
tggcccatttatatggagataagggcgtttacaaccagagcaccccaccagagaggtgctgcccctcggagaaagtggtttacttgtggcctttagagacrcaagtcaactggcgaagccctccacagccccttcccagggaggggccgggcagcactgccatgatccccggggcatgcggggcttgccatgcgcaggact

SEQ ID NO: 428037 - DNA, 201 bp, Homo sapiens
aagtggtttacttgtggcctttagagacgcaagtcaactggcgaagccctccacagccccttcccagggaggggccgggcagcactgccatgatccccggkgcatgcggggcttgccatgcgcaggactgctgttaactgttttcggggtgagcaaggagaggcatgggatgagattaagacagaaccggagagataaaaa

SEQ ID NO: 428038 - DNA, 201 bp, Homo sapiens
gtggagatgagacagtgatgtccacgtcccgttgagggtgtcagagtttggccagcttcaagagaccgcccttcaggagatctgagagacacgctctcccygagccctcaccccagcaaaggtaaggacaagagaggccgccatgaacttcagcaccacggacagaggctggggctggccggaggaaggggccctgggtgg

SEQ ID NO: 428039 - DNA, 201 bp, Homo sapiens
tcagcaccacggacagaggctggggctggccggaggaaggggccctgggtggccttcagctgctagagagcaaaccccacaaacctaccgaggatgaagtygagggacccacggttaatcctacgtggcctgccagtgagtcccgggctccccagggaggctctgccccttgcaagcctgagacttggccaagtcactgta

SEQ ID NO: 428040 - DNA, 201 bp, Homo sapiens
catgacccacagaaatgtggcccttttgggaggatcccctataccgtctccaaccactgaaaggaggcactagccatcccccacagccagcagggccactraaggcacagccgcccacctgtggtccatgcctgagcccccaaaggatgtcttggagccaaaaggccttttcccacctgccagccaggcaatgctggtccc

SEQ ID NO: 428041 - DNA, 201 bp, Homo sapiens
cacctcctcctggggacgcagcaccacgggttccatgggtggagccatctctgccctcccggaagcctcaggctgcctccacctgacctgccctttgcccyctcagggctcaaggattaatgggatggcctgcctactccaggaagccttctctgatcaccccggccctagctagcttttctctccctgcccctatccagt

SEQ ID NO: 428042 - DNA, 201 bp, Homo sapiens
cagcaagtgaggcaaaaaccagatgacggctctgactggaggctgccctgaccgccttgctgccccttgtccatgacccacagaaatgtggcccttttggraggatcccctataccgtctccaaccactgaaaggaggcactagccatcccccacagccagcagggccactgaaggcacagccgcccacctgtggtccatg

SEQ ID NO: 428043 - DNA, 201 bp, Homo sapiens
cccttggaaggattcaatctaaactcctcatcacacaaatggagaaactgaggcccagcacacctgcatgtaggatggaaggagaatagtggaggggtgcracctgccccagctagtttgtaatgaactgaaggccctcgcctggcccttgcgtgctcatgtgcagacacacatgcatgcaaatgcacacacacgcgcaca

SEQ ID NO: 428044 - DNA, 201 bp, Homo sapiens
ccaagtacccgaacaagccggggaagtggaaatggggcacagacccgaggcccagaggcgaaggcagggaccctcgccccccaccaccaccatctctcccwccccagggccgccaggggagcctgccaggatgtcatgtcatagcagtccctcctctgctcgaagccttccagtgatctcaccttgttcacgggacaagag

SEQ ID NO: 428045 - DNA, 201 bp, Homo sapiens
gtgcggggtagaccgtgggtcccacggccctggctccaggccccccgttcccaggcagggctcacagccgcaccagccctaccacagcagcgggttccacrgtaagttccccagcacctaccagagtggccacaggcaaccttccatgatggccagggaaacctaccatgacagccacagaaatcgccacaatggccagga

SEQ ID NO: 428046 - DNA, 201 bp, Homo sapiens
tcaaccatcgcccacctcctagtcaggcctgggccaggcccgggaaaggacagagagggcctccctggcgaggggacctcctaggacagccctgggtgacsgggatcttcctcgctgccataacaccagctggtttgggcaggggcggatggtcagtgtttgcaaatcagccctgcccggcaccaggactctagccaccca

SEQ ID NO: 428047 - DNA, 201 bp, Homo sapiens
aggtggaagggaaagagggagggcagtggtggcaactcagccctaagggcctcagggcagccaggggggctgaaagtgtcacaggcttggggtagctgctrcctccgcccaaggctggccaagccaggcccctcctgaccacaagctcccctgcccaccctcccaccctctgtgtgtcctccaactgtatgtaacccacca

SEQ ID NO: 428048 - DNA, 201 bp, Homo sapiens
ggaccgtcagctccagggcgggccacaccttctctccatgctcccctccagacctaacactggctcctgccatggtgcagggaaagagcttccaactccaccccaccgcagggctggggtgaggtgagggaggcagctacctgtgggggtgaggagggcgaatgcccctcacactcacagagaaaggggggccccaaggct

SEQ ID NO: 428049 - DNA, 201 bp, Homo sapiens
tggggtgaggtgagggaggcagctacctgtgggggtgaggagggcgaatgcccctcacactcacagagaaaggggggccccaaggctgagtaagacctggrcttagtgtctgagcctgggcccagagctggccctgaggacaggaggaggtaactggggctccagccagcctgatcctacccacataccacttctctaggg

SEQ ID NO: 428050 - DNA, 201 bp, Homo sapiens
tctaggggaagacagggtggtacacacacagtcacatgcacacacgtgtgtgcacggaggaccagaagggcctggattggctgcaaagcaggtgggggtcgggggcaggggcttggagtggcagcagtgggggtgctgcacaggctctggaccagggggccgtggggcacagtcagagcacactcaggaagctctcccagg

SEQ ID NO: 428051 - DNA, 201 bp, Homo sapiens
cgacaagctggaggggacacaccaagctcacccccacatttttgctgtcgggattgggctccagccaactgcacagaggctgccagcagctggggcgagaygcggtacagagggagcaggacctggacaagaaggggctgctgtggcaacatctacggggagccaacccagcatctgatggcaagcagtcccctcggcgac

SEQ ID NO: 428052 - DNA, 201 bp, Homo sapiens
tctattcttatccccatctgcagattgggaaactgaggctcaaaggacctcattatttacctacatctcagtcctacagctggcagtggtgaagctgccastgtttgaacacaggcagtgggcgcccacccccttgcgaagtctctcccccagcaccctcccactgaaacagcccacgctgtgtaaaccggctcggtggat

SEQ ID NO: 428053 - DNA, 201 bp, Homo sapiens
ggactacaggtgtccgccaccacacccggctaattttttgtatttttagtagagccagggtttcaccatgttagccaggatggtctcgatctcctgacctmgtgatccacccgcctcggcctcccaaagtgctgggattacaggcatgagccaccgcgcccggccgagaggggctatttctgttccccacctggactcccc

SEQ ID NO: 428054 - DNA, 201 bp, Homo sapiens
tgagggacccacggttaatcctacgtggcctgccagtgagtcccgggctccccagggaggctctgccccttgcaagcctgagacttggccaagtcactgtrgcgagctaaacctcagcttcatcgtctgtgaactgggaatgccagaaaggatagaaccagggagactgtaagaaaatgccttgaggctgggcgcggtgac

SEQ ID NO: 428055 - DNA, 201 bp, Homo sapiens
gcaccattgtactccagcctgggtaataagagccaaactccatctcaaaaaaaaaaagaaaagaaaagaaagaaaagaaaatgccttgaacatctgtgacmcgggagaaacctaagcacagagaagcagggctctgagccagggtggaggggagggatgggacgtgcacccaggtctccagggctgggccgccttgctgtg

SEQ ID NO: 428056 - DNA, 201 bp, Homo sapiens
gctgccttgaatgttatgcccagcctatgtgtgccaggaggcaggggcaggcaggaggggtctctgctctgagcccccaccctgctgagggcacagcatgyggtcgcagccctggggatcccaatggacagtcccgccacccttcctccttcccagctccgcagatgtttcttggcagaggcctcccacctccatctccct

SEQ ID NO: 428057 - DNA, 201 bp, Homo sapiens
cacaggctctggaccagggggccgtggggcacagtcagagcacactcaggaagctctcccaggagagcccagggctgcagaagccccacaaggcaggggcygggagagaagggccggtaggaggtgggtgagaggtgctgactgccgcccccagcaaagagcaccggggcggtacacacctggggcaactctggccagagg

SEQ ID NO: 428058 - DNA, 201 bp, Homo sapiens
gagcccagggctgcagaagccccacaaggcaggggctgggagagaagggccggtaggaggtgggtgagaggtgctgactgccgcccccagcaaagagcacmggggcggtacacacctggggcaactctggccagagggttggggctaacacctcccagccccatcctttccccagcagtccctgaactccgtggggaccaa

SEQ ID NO: 428059 - DNA, 201 bp, Homo sapiens
aaccctgggcccttccttgtgcccctgctgtgcccacatgtggttctgcacggcagccccaaagcaagggccctggcaccctgcgctgcacccattttacwgggcaaagaagctgacgtggcccggccccagcgatgggcagggtggccgcctgcaggcacacacctatggttcaggattcggtgaatcatcatccactct

SEQ ID NO: 428060 - DNA, 201 bp, Homo sapiens
ccggcatgcatgggacggcccctctagcaggtcaggcagatctccagcactgggaaccctgggcccttccttgtgcccctgctgtgcccacatgtggttcygcacggcagccccaaagcaagggccctggcaccctgcgctgcacccattttacagggcaaagaagctgacgtggcccggccccagcgatgggcagggtgg

SEQ ID NO: 428061 - DNA, 201 bp, Homo sapiens
gccaggcacagtggctcacgcctgtaatcccaacactttgggaggctgaggcgagcagataaccagaggccaggagtctgagaccagcctggccaacacgrtgaaaccccgtctctactaaaaatacaaaaattagctgggcgtggtggtgggcgcctgtaattccaactattcgggaggctgaggctggagaatcgctca

SEQ ID NO: 428062 - DNA, 201 bp, Homo sapiens
gggcccacgagagagccggcccttcatgccagcctgcggccccagcgccccagccagcttgtcctactcgctctccaccatcccctgtgcactcaggagcrctcaggggaagctgaggggcaaagagaggcccctcagcctcagaccctctgccatggacaccccaggcctgaccttctgtgacagtggagacacaacagg

SEQ ID NO: 428063 - DNA, 201 bp, Homo sapiens
tcgacctcctgggctcgagcgaccctcccacctcagcctcctgagcagctgggacaacacgcacaaccaccacacctggctcagggttctattcttatccycatctgcagattgggaaactgaggctcaaaggacctcattatttacctacatctcagtcctacagctggcagtggtgaagctgccactgtttgaacacag

SEQ ID NO: 428064 - DNA, 201 bp, Homo sapiens
gatcccagggcttcacccagaaggcttcgctggcccaggcagtgtggggtgggacaaagcacggaagaggctctggagacacagtgctctctgtgattcayctcagcccccaacacagctgaaaacctcacattacagcctgcctgtccagcctgatgtcccaccgcctacccagagccctgctctccagcctcagacact

SEQ ID NO: 428065 - DNA, 201 bp, Homo sapiens
ctctaggggaagacagggtggtacacacacagtcacatgcacacacgtgtgtgcacggaggaccagaagggcctggattggctgcaaagcaggtgggggtsgggggcaggggcttggagtggcagcagtgggggtgctgcacaggctctggaccagggggccgtggggcacagtcagagcacactcaggaagctctcccag

SEQ ID NO: 428066 - DNA, 201 bp, Homo sapiens
gtccgccgtggccaggttgatgcccagaccacctgcccgggttgagaggaggaagcagaactgctgggccccgggggctgaaaaagagaggccagcagatrggagtgtttgggggggtacaccttgggtgggcagaaaggatgggggagagaacagagagaaggaactgcagcaacagatccctggcagagaaggacaaag

SEQ ID NO: 428067 - DNA, 201 bp, Homo sapiens
tgggccagaggttctcagggccaccctagacgctggccaaggagttctcaggctgccgttagtcctcgaacctccccccatgagacagggcttatgctggyaaaggggggcagtacaccgcccaagagaggattcataatttatttatgacatttaacaaaacccagacatcacctcattggtgtcacatcaaaagaaagc

SEQ ID NO: 428068 - DNA, 201 bp, Homo sapiens
ctattcttatccccatctgcagattgggaaactgaggctcaaaggacctcattatttacctacatctcagtcctacagctggcagtggtgaagctgccactgtttgaacacaggcagtgggcgcccacccccttgcgaagtctctcccccagcaccctcccactgaaacagcccacgctgtgtaaaccggctcggtggatg

SEQ ID NO: 428069 - DNA, 201 bp, Homo sapiens
ctcattatttacctacatctcagtcctacagctggcagtggtgaagctgccactgtttgaacacaggcagtgggcgcccacccccttgcgaagtctctccsccagcaccctcccactgaaacagcccacgctgtgtaaaccggctcggtggatgccctggggacactgaggtgactcaggctggtctgtggtctggcaggt

SEQ ID NO: 428070 - DNA, 201 bp, Homo sapiens
aatccttttaacattggaaactcggactggcctgctgtctttagctgtttgtgaggctgctcaacacaacaccagctgggtgacctggctaagaaccaggyctgggagaagaggccaaaaaggagtctcaatcagaacccttgggcaggatgggggtaccattgaatctgtcgattgcctcctgccggaggcccccggtga

SEQ ID NO: 428071 - DNA, 201 bp, Homo sapiens
tccctcaagggggtcaaggctggttcaccacactagtccccctgcacacagccccacagctctgccagacccaggctccagcccctcactcctctggggargggcagcagcagagcaaggacgcagccgccagggcacttggcaaacacaaggtgatcaaaacaaggggaaggcgcgtgactgtggagcgaaagttaggtc

SEQ ID NO: 428072 - DNA, 201 bp, Homo sapiens
ggggaggggcagcagcagagcaaggacgcagccgccagggcacttggcaaacacaaggtgatcaaaacaaggggaaggcgcgtgactgtggagcgaaagtkaggtcatctgattctgggtggttgaaggatttgcaggggccaagccaggagctgggacgagaacaccatcaccaggttgcaaaggccggcaaacctgcca

SEQ ID NO: 428073 - DNA, 201 bp, Homo sapiens
tgcagcctcaatttcctgggctcaagggattctcctacctcagcctccctagtagctgggaccacaggcacaccaccgtgcctggctaattttttgtagargtgggatctcactacgttgcctcaaacttctgggttcaagcggtcctcccaccccggcctcccacagtgctgggattacaggcatgagccaccatgcccg

SEQ ID NO: 428074 - DNA, 201 bp, Homo sapiens
tgagtcgagatcgccccactgcactccagcctgggcgatacagtgtctcaaaaaaataaataaataaataaataaaataagtagctaagatgagatcataytggattagggtaggccctacatccagtatgaatgatgtgtttataggatgagaaacagacacaaacgggaaaaccccatgtgctaacagaggcagaaact

SEQ ID NO: 428075 - DNA, 201 bp, Homo sapiens
ggaacagacaagtgctgagcaatggggtgatggcctgtctgcccactgaacatgagacccacacccgagccaggccaggccccacagtgcggggtagaccktgggtcccacggccctggctccaggccccccgttcccaggcagggctcacagccgcaccagccctaccacagcagcgggttccacggtaagttccccagc

SEQ ID NO: 428076 - DNA, 201 bp, Homo sapiens
cagcagcttctcccagtagtcggggtccacgttctcctcctgcttgatgatttcccgctccacctcctcctggggacgcagcaccacgggttccatgggtrgagccatctctgccctcccggaagcctcaggctgcctccacctgacctgccctttgccccctcagggctcaaggattaatgggatggcctgcctactcca

SEQ ID NO: 428077 - DNA, 201 bp, Homo sapiens
agcctcaggctgcctccacctgacctgccctttgccccctcagggctcaaggattaatgggatggcctgcctactccaggaagccttctctgatcaccccrgccctagctagcttttctctccctgcccctatccagtcaatcatttacttattcatccatccattcacaaagcaagtatttcctcgcctcctgtcaagca

SEQ ID NO: 428078 - DNA, 201 bp, Homo sapiens
cctcagagcctgccggcctcggtagccctcccaggctgagggaccccaaaggagtgcacggcacccgtggtccctgaactagaccgggggccttcctaccrtccttccaaggatagcgagccctcaccttcatacggaataccttcttcccactccgaatggcgttgtcctcaaaggaaaactcgttctcccgaatcaccg

SEQ ID NO: 428079 - DNA, 201 bp, Homo sapiens
tgggcggggtccccgctccaccaggcccgactccctccctcccctacagcatctccccgcattctgcccccaaatgagggcacaggggtgggggagccagkcgtggccccgcccccagcccggggctctgccaaggcttacacagtgggggcagctccacttgccctcgggagccttctccagctctgggtccaggcatac

SEQ ID NO: 428080 - DNA, 201 bp, Homo sapiens
tgcagcataggctttgcctgcacgtggcacctgggtttgcacacaatcttttagccgagcatcggtctcctcgcctatctaggtgaagaatgctatgagawctcaaagagctaagtctgtttctcaaaaaatcagaaatagaattaccatatgatccggcagttccacttctgggtgtatacccaaaagacaggaaagcag

SEQ ID NO: 428081 - DNA, 201 bp, Homo sapiens
aagtgactgggggacactgccagcactcaagcgacccaaactctggtcactaaaacctgagaagaggccccacgaagaaagtgtatgcaaagcattagccragacctcagtgaggctgaagagccctccgcccacctgggaatcgacccaggagaccagcccaggggaaagggcgagcacaggctgctccggggtcagccc

SEQ ID NO: 428082 - DNA, 201 bp, Homo sapiens
tcctgcgagccctgcattttcattttgcaccggtctcccccagtgatgtaggcctgtcctgtgctgcaccaagcctgcctctcccagcagcccacatgccygtgagagagcagagagggccgaggatgccgtgcagcataggctttgcctgcacgtggcacctgggtttgcacacaatcttttagccgagcatcggtctcc

SEQ ID NO: 428083 - DNA, 201 bp, Homo sapiens
aagcaaatttaaaacaccttggcatgttgacagagaccacagaagaaaggaaaaagctgttttcctgcgagccctgcattttcattttgcaccggtctccyccagtgatgtaggcctgtcctgtgctgcaccaagcctgcctctcccagcagcccacatgcctgtgagagagcagagagggccgaggatgccgtgcagcat

SEQ ID NO: 428084 - DNA, 201 bp, Homo sapiens
agaggttgcagtgagccgagatcacaccattgcactccagcctgggtgacagagtgagtctctgtctccaaaaaaaaaaaagcaagcaaatttaaaacacyttggcatgttgacagagaccacagaagaaaggaaaaagctgttttcctgcgagccctgcattttcattttgcaccggtctcccccagtgatgtaggcctg

SEQ ID NO: 428085 - DNA, 201 bp, Homo sapiens
tgctgggggcgtggagcctccctgggacaggttctcattccctgctcccctgcccctgcctggtgaccactgtccccctactccccctggtgggggcctgracctgggtgctggttggggagggggagccaggcacccggtctatgcaccaagttccaggacagggcctggtgcctgtgagggtctgcactctcccggtga

SEQ ID NO: 428086 - DNA, 201 bp, Homo sapiens
tgccttaccacacccagctaatttttgtatttttgtagagacagggtttcaccatgttgctgaagctggtctcaaacttctgaactcaagtgaaccgcccrcctcgacctcccatagtgttgggattacaggcgtgagccaccacgaccagccctggctctgggcttattactttgtttccactctcacctcatcctaaca

SEQ ID NO: 428087 - DNA, 201 bp, Homo sapiens
cacagccctcttttcctcagccacactggacacctttccatcctcaaaaccgtcctggacaggagctctctattacccagataacagatgaggaaactgastctgatgagtgcccgagttgatacagtccagctgtgccaaaaccggccctcaaatctacatctcctggtggctcatgcctgtaatcccaacactttggga

SEQ ID NO: 428088 - DNA, 201 bp, Homo sapiens
ggagccaggcacccggtctatgcaccaagttccaggacagggcctggtgcctgtgagggtctgcactctcccggtgaggatccccacacctgaaggaacaygactttaaaaagcaaatttaggccaggcacagtggctcccgcctataatccctgcactttgggaggctaaggtggaaggatcacttgaggctaggagttg

SEQ ID NO: 428089 - DNA, 201 bp, Homo sapiens
ccagctcctctagccccagcccaggtcccaggcaggacaatcctcccgctcagcaccaccccaactcccaacagcacccctcagtcagaggcgcttcagcmccttcccgccagcccaggagggtccagggctcaccaggtcccgggccttagcacagccaccctcccgggcactcacctgtagctccttcacccaggagca

SEQ ID NO: 428090 - DNA, 201 bp, Homo sapiens
gcaggtctttccacttgatcaggtagtgcacatcccccttcttgtcaaagctgcaacacggtgaacagatgtgggtcgctcagagcagtggccacagcacrggtttgatgaagggcacctcccaggatgcagagccattcacacccagggtcccctcggatgctgggcccagccaggaggaggagacgagggcagaagctc

SEQ ID NO: 428091 - DNA, 201 bp, Homo sapiens
gagatgggcagtgggggtctgtgagaccacgtggccctttcactcaatggtgaacttatcggcacccagaatatctgagccagcgtaggtgagactgccaygtgcataggacagagggggaaactgaggcccactcggcaagggacagcagagcagggagcagaacatgagattctggacttcccctaccttaggtcttcc

SEQ ID NO: 428092 - DNA, 201 bp, Homo sapiens
tagcaggtcccagctttgctactacctgtcctcggaaactcatccaagcctccagagcctgctttcccatctgtaaaatggcccaccccttcctccacctrccagatctgtggtgccacatcacacctgaaggcattctggaggtgcaaggtacaccacacagccagccttcctttggccttggtgacagcaaaggccgag

SEQ ID NO: 428093 - DNA, 201 bp, Homo sapiens
tggagatgagacagtgatgtccacgtcccgttgagggtgtcagagtttggccagcttcaagagaccgcccttcaggagatctgagagacacgctctccctragccctcaccccagcaaaggtaaggacaagagaggccgccatgaacttcagcaccacggacagaggctggggctggccggaggaaggggccctgggtggc

SEQ ID NO: 428094 - DNA, 201 bp, Homo sapiens
agtgggggtgctgcacaggctctggaccagggggccgtggggcacagtcagagcacactcaggaagctctcccaggagagcccagggctgcagaagccccrcaaggcaggggctgggagagaagggccggtaggaggtgggtgagaggtgctgactgccgcccccagcaaagagcaccggggcggtacacacctggggcaa

SEQ ID NO: 428095 - DNA, 201 bp, Homo sapiens
aggcagggaccctcgccccccaccaccaccatctctcccaccccagggccgccaggggagcctgccaggatgtcatgtcatagcagtccctcctctgctcraagccttccagtgatctcaccttgttcacgggacaagaggcccatggtgcaccacccgcaacaggccctcccgaaaccctcacagcacggagtgtctcca

SEQ ID NO: 428096 - DNA, 201 bp, Homo sapiens
gcccaggatggcctggtcaatggtgatgagctcataggaggtgagcagcacgtggaatttgatctgcacttctttctggagaaaagaggggcattggggawgagacggctgggagcagagcggatcacagtcccaggagacaaagagccaagaaggaggtgtgcacaggaacccacaaaggctccacggagccctgggccg

SEQ ID NO: 428097 - DNA, 201 bp, Homo sapiens
gaggaccggggcaggggaggcagggtgcagagcgcctagcccatgtaggccggctagctggtgaaccagggagccctggcattgccctggatatcgtctcmatttctgtctaagcctgtgtcacctccacacatcacagccctcttttcctcagccacactggacacctttccatcctcaaaaccgtcctggacaggagct

SEQ ID NO: 428098 - DNA, 201 bp, Homo sapiens
ggtcatgcagcttcttgatctggtcttccttggagatgtcagcaaactcctccaggaagccctccaggttgctgcaacaaaaagctgggataacagccagragcagaggaccggggcaggggaggcagggtgcagagcgcctagcccatgtaggccggctagctggtgaaccagggagccctggcattgccctggatatcg

SEQ ID NO: 428099 - DNA, 201 bp, Homo sapiens
agcagggcacgaggaaaggcaggctgggtcagacccgcctccatgagggctctctctgctctgcagtggggctggaagctggtggccaagcacccatttayagagagacccaagggacccccaagaggtgaagccaccggcctggagtccccctgcaagtgactgggggacactgccagcactcaagcgacccaaactctg

SEQ ID NO: 428100 - DNA, 201 bp, Homo sapiens
ggggaggaggggctgtcctaccagcctggacatgcagaccagaagggcaggtgtggggagatgttgctctttatggcaaatgtgttctgagctcctcagcygcattatgccagggcacgggggagtgacccctgacacacagtcacatgacccacatgggaacggcactgggccctgaggggtgccagcaagtttgcgccc

SEQ ID NO: 428101 - DNA, 201 bp, Homo sapiens
aagccaaaaagccaggtgccagtggcccctcagggcctattggagagaggggctcctcccaaccacaccccagggccctaccttaatgagaagccaggctkcgggggagagggccagggcaggggaggaggggctgtcctaccagcctggacatgcagaccagaagggcaggtgtggggagatgttgctctttatggcaaa

SEQ ID NO: 428102 - DNA, 201 bp, Homo sapiens
ccagcccactccttggctcagcccctggtctcaaacttgccctgctttccagtattcttcgggctgaagcagcccagcagggtgacctggggctgcaggcrgcggacgctgctttcagttgatgtttgtgcacaaggagccatagcccagactctgggtttgagcaaggggcctggctcagtgggcccacgagaggagcat

SEQ ID NO: 428103 - DNA, 201 bp, Homo sapiens
ggccccgtctctgtcgcttgccctgtgtgcacatttctggaagctgtgtggttcccattacttggtatctcaaggcctctgatcagacttgcgtctcgtgytggtaccgaggtactggggggatgtgggtccatctccactccagcccactccttggctcagcccctggtctcaaacttgccctgctttccagtattcttc

SEQ ID NO: 428104 - DNA, 201 bp, Homo sapiens
aagacaggggcctcctgcagacacagcaggaggtggggcattggtgggctcccctctcctctctgactctgcaccaaaggggccgcagggaacagacaagygctgagcaatggggtgatggcctgtctgcccactgaacatgagacccacacccgagccaggccaggccccacagtgcggggtagaccgtgggtcccacgg

SEQ ID NO: 428105 - DNA, 201 bp, Homo sapiens
tcacctctgtgatgtcttccctgatttcactcctccccataagaaaagaaaggcagtcccttctgagctcccatgaccccgtataattccctttattctcragagagagtttagctggatataaaactatcagcacacattttccctcagtgcaccggagattttgccatggtctctgccacctgttgttgttaagaagtc

SEQ ID NO: 428106 - DNA, 201 bp, Homo sapiens
atgatcaccacacctgtctgcctttccctaacactcatgcctcccgtctctaggggagtcagacgcggagaagggcgcgaggaagctattgtggacggggyctcgagcagcgcgggcgaagctttgcgggatcggctaccgaggcggggcaggagccggcaggggcggggccttttgaggagggcaggccttcccctgggg

SEQ ID NO: 428107 - DNA, 201 bp, Homo sapiens
acctggggagcaggcaaatgcagtgtgaggacaaagactgccctggtccagccccggggtcccaggaacagactcccaacaatggcccttcccatccccarcaggggctgcagctgagaggcatggtgaccagacagaggaaactgcgctgtaacagccccactcgccgcccacctggcagtcccaggacgcccaagtgag

SEQ ID NO: 428108 - DNA, 201 bp, Homo sapiens
aaaagaagggactgagggaaggagggagaaggagggatgggaaggaaggtgaggtaaagatgggtgttaagtgggtggggggtgactgaagggaggatggygatgagatgaagcacttccctctccagtcaccacactgctaatgcaaatgccctggggtagctcccaccataggttccttgttctttccttactgggaca

SEQ ID NO: 428109 - DNA, 201 bp, Homo sapiens
acaggatgcccctccccagacagtagaaaccagggccgtgtgggaaacacaggggccccacctggctgagacatgaggatgccctccccctgcttcccacrgggaggttccatgccccgcacatccacccggcaggccgagaaccgtccagatggggagtcctactcgtgccccactacatccacccagcaggccaagaac

SEQ ID NO: 428110 - DNA, 201 bp, Homo sapiens
gcagcatgagcttccctgaagacttgaccagggagcttccatcgtaggagccattgggcaagacaggggcctcctgcagacacagcaggaggtggggcatkggtgggctcccctctcctctctgactctgcaccaaaggggccgcagggaacagacaagtgctgagcaatggggtgatggcctgtctgcccactgaacatg

SEQ ID NO: 428111 - DNA, 201 bp, Homo sapiens
tcgatggagcccaggatggcctggtcaatggtgatgagctcataggaggtgagcagcacgtggaatttgatctgcacttctttctggagaaaagaggggcrttggggatgagacggctgggagcagagcggatcacagtcccaggagacaaagagccaagaaggaggtgtgcacaggaacccacaaaggctccacggagcc

SEQ ID NO: 428112 - DNA, 201 bp, Homo sapiens
ggcggccagcgccacctaccttggactggttgttcttgaggcggtgggcctcatctaccaccaggcaggcccactcgatggagcccaggatggcctggtcratggtgatgagctcataggaggtgagcagcacgtggaatttgatctgcacttctttctggagaaaagaggggcattggggatgagacggctgggagcaga

SEQ ID NO: 428113 - DNA, 201 bp, Homo sapiens
agccggagaccccatcagagacgggtggccacagctgcactcaggggagccagaggaggcctgcccaagcccacttagcccccagcgagctctgagccctrgtgcagtgggagggcactggaacgaggaggtcaattttcaaaccccagatgagcaaaaaacaaagtgcaagccgccagcaagtacaagcagagccctaga

SEQ ID NO: 428114 - DNA, 201 bp, Homo sapiens
tcttggggccgagactccacgggggagggaggcccacagcaccaggataggtgagggggtgatggcaagaagggcatgaaggacagaacctgcctgaggcycgggatgagaggccccctgggagggtggtgggcggcagcagcacagacctggatgtcattgtgcgggttccagtccgagtcgtagatgatgacagtgtcc

SEQ ID NO: 428115 - DNA, 201 bp, Homo sapiens
atctctgccctcccggaagcctcaggctgcctccacctgacctgccctttgccccctcagggctcaaggattaatgggatggcctgcctactccaggaagycttctctgatcaccccggccctagctagcttttctctccctgcccctatccagtcaatcatttacttattcatccatccattcacaaagcaagtatttcc

SEQ ID NO: 428116 - DNA, 201 bp, Homo sapiens
ggaccagaggggcagatgctgaccaccaagcagaggggcatccactgaggctcagaacacagccctgagagagggtggtgtggaggaggagaagaaacggyctcggcttgtaacagctccagtgagacagtgtcttactcccaccccccagcgtggagtacagtggcacgatcaccactcacttgcagcctccacctccca

SEQ ID NO: 428117 - DNA, 201 bp, Homo sapiens
cttctagccattggaagcaggcaggactgcaggtgtgcaagagtgtgtgagggatgatacggccagtgtgctgggtgtaactgaagccacacagagcttcrtgggggccacggggaggtaggaggctgcatttccctgtgagcgaaccactaatgggaccacaagaccatgtgctggagacacgcagccaccttctgaggg

SEQ ID NO: 428118 - DNA, 201 bp, Homo sapiens
accacagagggctgcagggttggcgggcagtgcccagagacaccaccctgggctgtcctagccaggagatacaggtggggggtgcagaagagaggctgtgwgttggagcgggcagggacccaagcaagccctggatgggtgtctcagccgggccaccccagtcccctgccacgctccctcggaacagaggcccaccctcca

SEQ ID NO: 428119 - DNA, 201 bp, Homo sapiens
aggcgttggttgcagtgagctgatactgcgccactgcactccagccggggcgacagagcgagactccatttcaagaaaaaaaaaaaaagaaaattgtgggscgtcctggaacgttggcggtccaggtgcagggccgagatgcaggccctgaggaaggggcgggagggtgcagctgggtagggactgaaaccagaccccggg

SEQ ID NO: 428120 - DNA, 201 bp, Homo sapiens
aactttgggaggccgaagcaggtagatcacctgaggtcaggagttcaaaaccagcctggccaacatggcaaagtcccatctctactaaaaatacaaagatyagacaggcgtggtggtgcatgccagtaatcccagctacttgggagctgaggcacgagaatcacttaaacctgggaggcgttggttgcagtgagctgatac

SEQ ID NO: 428121 - DNA, 201 bp, Homo sapiens
gcccagcacacctgcatgtaggatggaaggagaatagtggaggggtgcgacctgccccagctagtttgtaatgaactgaaggccctcgcctggcccttgcrtgctcatgtgcagacacacatgcatgcaaatgcacacacacgcgcacacacgcacacactcaccgaggagcctttcttcctcttgttgctgatccccccg

SEQ ID NO: 428122 - DNA, 201 bp, Homo sapiens
aaggtcatgggctcaccaggtctgcacggagggtggggagcagaggaggaaacggaaaggcctccaggagagacccacaaggagctcttcggggacagctrgggtttgcccggtagagaagggagaaaagtgtggggtggaccaggcgtggtggctcattccttaaccccagaactttgggaggccgaagcaggtagatca

SEQ ID NO: 428123 - DNA, 201 bp, Homo sapiens
gcccctatccagtcaatcatttacttattcatccatccattcacaaagcaagtatttcctcgcctcctgtcaagcactgaggtactgagttgaataagctyccccttgcctgccctcaggaggctcctggtttcaaaggaaaaggtcatgggctcaccaggtctgcacggagggtggggagcagaggaggaaacggaaagg

SEQ ID NO: 428124 - DNA, 201 bp, Homo sapiens
gcaggaccccaggggaactcctggctgatcttcaaccatcgcccacctcctagtcaggcctgggccaggcccgggaaaggacagagagggcctccctggcraggggacctcctaggacagccctgggtgaccgggatcttcctcgctgccataacaccagctggtttgggcaggggcggatggtcagtgtttgcaaatcag

SEQ ID NO: 428125 - DNA, 201 bp, Homo sapiens
aggcgtggccccgcccccagcccggggctctgccaaggcttacacagtgggggcagctccacttgccctcgggagccttctccagctctgggtccaggcayacgagatggtaggccctcgggcaggtgtcgcacaggatgatctccccaccctgctggcacacctcacagtaatcctggtggtctgtctcatagccgtcac

SEQ ID NO: 428126 - DNA, 201 bp, Homo sapiens
acttcttcccctcgggcccctcagggatcaagtctggggtgctgtacttcccgttgacatgctcaaactcctgaacctggggtggtgggagggaaggtggragggaaagagggagggcagtggtggcaactcagccctaagggcctcagggcagccaggggggctgaaagtgtcacaggcttggggtagctgctacctccg

SEQ ID NO: 428127 - DNA, 201 bp, Homo sapiens
ccttcccgccagcccaggagggtccagggctcaccaggtcccgggccttagcacagccaccctcccgggcactcacctgtagctccttcacccaggagcartgccagtaggacagccctgcccacttgacaaagaactctctctcagggatgccctccaggggcttaggtggagggaggctgggctccacgtcaggccccg

SEQ ID NO: 428128 - DNA, 201 bp, Homo sapiens
gtgagccaccgtgcccggctgattttttttttttttttaaagagacagagtctcattatgttgcccaggcaagagtacaacagctattcacagacacaatsatggcgcactacagcctcgaactcctgggctcaggcaatcctcctgcctcagcctcccaagtagctaggactacaggtgcacaccactgtgcccagctga

SEQ ID NO: 428129 - DNA, 201 bp, Homo sapiens
gagtcatactcctcttcttcttgcgcctcctcttgctcttcttgcccagggctgcagagcattcggagcgcacggaggcactgtggatgctggcgctgtcraagtccgactcctccctctcatcttcttcactctgcaggggaagacagggtcctgtgatcccagggcttcacccagaaggcttcgctggcccaggcagtg

SEQ ID NO: 428130 - DNA, 201 bp, Homo sapiens
cccaaggctgagtaagacctggacttagtgtctgagcctgggcccagagctggccctgaggacaggaggaggtaactggggctccagccagcctgatcctrcccacataccacttctctagggtccagcccccacccaactactccccccgagagcagacctgggtgctgggcggccaggccccaccaggacagatccctc

SEQ ID NO: 428131 - DNA, 201 bp, Homo sapiens
tgatggccagggaaacctaccatgacagccacagaaatcgccacaatggccaggagaacctatcacagcggccacagggacctaccatggcggccacaggsacctaccatggcggtcatggagaagctgccatgatggccggggaaacctaccacggcagccacagggaagaggtaggggtggttgcagcactttttcagg

SEQ ID NO: 428132 - DNA, 201 bp, Homo sapiens
gccccaccctccgcctctgggtatgggacacccatccctcctggcacactcgcccagctctcccggcccgcacctcccgggggttctgcacagggatgccytgacagaatcctgccccaccctccgcctctgggtgaggggcaccagtccctccctcccggcacgcaccctggtcctcctgggaggcatcgttgtagttga

SEQ ID NO: 428133 - DNA, 201 bp, Homo sapiens
gaggtaaaccccttgcttaaaatcacacagcaagtgaggcaaaaaccagatgacggctctgactggaggctgccctgaccgccttgctgccccttgtccaygacccacagaaatgtggcccttttgggaggatcccctataccgtctccaaccactgaaaggaggcactagccatcccccacagccagcagggccactgaa

SEQ ID NO: 428134 - DNA, 201 bp, Homo sapiens
ttctatttattgttttgggggatgtctcagcattcacttttgtatgggtttggaattggggttcataggctcattttgggcaggagggccccgtctctgtygcttgccctgtgtgcacatttctggaagctgtgtggttcccattacttggtatctcaaggcctctgatcagacttgcgtctcgtgttggtaccgaggtac

SEQ ID NO: 428135 - DNA, 201 bp, Homo sapiens
gccagtcaaccccagcaagggccagcagggctgaggctgtttttatggagctggccacagggcaattagctacctggggagtaatgacccaagaaggaagkggggcctggaggcagggatgcacaccccacagaggcagcctctccccaggccgtcctctggccacaccacacacacggacatggagctaggagcccagct

SEQ ID NO: 428136 - DNA, 201 bp, Homo sapiens
tgtttttatggagctggccacagggcaattagctacctggggagtaatgacccaagaaggaaggggggcctggaggcagggatgcacaccccacagaggcrgcctctccccaggccgtcctctggccacaccacacacacggacatggagctaggagcccagctgcaccctccatggcgccgcggaaaatctatttcaatt

SEQ ID NO: 428137 - DNA, 201 bp, Homo sapiens
tgactgacagccctggggagatcaacatccccagcctccaaaaggccagaaacctgcacccagaaagctccctccccagggccttcaagtcacagggggcstctgctgcctgcatcctccccacccagacgccctgccactgaggcagaatttggatctcgatctccttccaggcctgtcccagaacagcctccctgggaa

SEQ ID NO: 428138 - DNA, 201 bp, Homo sapiens
agcgacccaaactctggtcactaaaacctgagaagaggccccacgaagaaagtgtatgcaaagcattagccgagacctcagtgaggctgaagagccctccrcccacctgggaatcgacccaggagaccagcccaggggaaagggcgagcacaggctgctccggggtcagcccatcactcacttctgcatctggctcagctc

SEQ ID NO: 428139 - DNA, 201 bp, Homo sapiens
cagaggggcagatgctgaccaccaagcagaggggcatccactgaggctcagaacacagccctgagagagggtggtgtggaggaggagaagaaacggcctcsgcttgtaacagctccagtgagacagtgtcttactcccaccccccagcgtggagtacagtggcacgatcaccactcacttgcagcctccacctcccaggct

SEQ ID NO: 428140 - DNA, 201 bp, Homo sapiens
agcctccctgggacaggttctcattccctgctcccctgcccctgcctggtgaccactgtccccctactccccctggtgggggcctggacctgggtgctggttggggagggggagccaggcacccggtctatgcaccaagttccaggacagggcctggtgcctgtgagggtctgcactctcccggtgaggatccccacacct

SEQ ID NO: 428141 - DNA, 201 bp, Homo sapiens
cgcccagcccacagacctggcaggcccagcggggctggcaggaggtgggcagggctggcgggcactggtgtgttggggtccgaggagatcacctcgcccgrcttcttcccctcgggcccctcagggatcaagtctggggtgctgtacttcccgttgacatgctcaaactcctgaacctggggtggtgggagggaaggtgga

SEQ ID NO: 428142 - DNA, 201 bp, Homo sapiens
gttggccaggctggtctcaaactcctgacttcaggtgacccacccgcctcggcctcccaaagtgctgggatcacaggggtgagccaccgtgcccggctgattttttttttttttttaaagagacagagtctcattatgttgcccaggcaagagtacaacagctattcacagacacaatcatggcgcactacagcctcgaac

SEQ ID NO: 428143 - DNA, 201 bp, Homo sapiens
atggtggctcaatgcctataatccccatgctttgggaggctgaggcaggaggatcacttgagcccagaagtacaagaccagcctgagcaacatacggagamtccatctctacaaaaaatttagaacttagctgagtgtggtggtgtgtacctgtagtcccagctcccgggaggtcaaggctgcagtgagctatgatcaatc

SEQ ID NO: 428144 - DNA, 201 bp, Homo sapiens
gccacaatggccaggagaacctatcacagcggccacagggacctaccatggcggccacaggcacctaccatggcggtcatggagaagctgccatgatggcyggggaaacctaccacggcagccacagggaagaggtaggggtggttgcagcactttttcaggtccatcatgatgttgagcagcgatacttggttcccgccc

SEQ ID NO: 428145 - DNA, 201 bp, Homo sapiens
cgggggccttcctaccgtccttccaaggatagcgagccctcaccttcatacggaataccttcttcccactccgaatggcgttgtcctcaaaggaaaactcrttctcccgaatcaccgagcggctctccttgtcccccgtgtaggtgaccacgtagaagtcgggcgcccacatctcaaactcgcgttcccagttgatgatgg

SEQ ID NO: 428146 - DNA, 201 bp, Homo sapiens
tgtacctgtagtcccagctcccgggaggtcaaggctgcagtgagctatgatcaatcactgcactctagcctgggtgacagagcgagaccctgtctcaaaataataataataataataataataataataataataggctgagcgtggtggctcacacctggaatcccaacactttgggaggccaaggcaggcagatcgcct

SEQ ID NO: 428147 - DNA, 201 bp, Homo sapiens
gtcaaggctgcagtgagctatgatcaatcactgcactctagcctgggtgacagagcgagaccctgtctcaaaataataataataataataataataataawaataataggctgagcgtggtggctcacacctggaatcccaacactttgggaggccaaggcaggcagatcgcctgaacttaggagttcgagaccagcctgg

SEQ ID NO: 428148 - DNA, 201 bp, Homo sapiens
agagaaggaaagcactggtgcaggaccacagagggctgcagggttggcgggcagtgcccagagacaccaccctgggctgtcctagccaggagatacaggtsgggggtgcagaagagaggctgtgtgttggagcgggcagggacccaagcaagccctggatgggtgtctcagccgggccaccccagtcccctgccacgctcc

SEQ ID NO: 428149 - DNA, 201 bp, Homo sapiens
tcaaggctgcagtgagctatgatcaatcactgcactctagcctgggtgacagagcgagaccctgtctcaaaataataataataataataataataataataataataggctgagcgtggtggctcacacctggaatcccaacactttgggaggccaaggcaggcagatcgcctgaacttaggagttcgagaccagcctggg

SEQ ID NO: 428150 - DNA, 201 bp, Homo sapiens
tatagctacgtcagcccttgtgaaggacaggccactgccagtttccagtgaaaggaaagtgcactctgctggggcaggggcatgggacaatgggccagctrggggcacagcccagagaggatccaactactgctgaggcctggggtggagggacatcctgggggcacagccctgagaggatccaactactgctgaggcctg

SEQ ID NO: 428151 - DNA, 201 bp, Homo sapiens
caaggctgcagtgagctatgatcaatcactgcactctagcctgggtgacagagcgagaccctgtctcaaaataataataataataataataataataataataataggctgagcgtggtggctcacacctggaatcccaacactttgggaggccaaggcaggcagatcgcctgaacttaggagttcgagaccagcctgggc

SEQ ID NO: 428152 - DNA, 201 bp, Homo sapiens
cttactcaccattttttggatgaacaacaaaacgaacatccatctggggcattcgcaacgcccccagtaacaggctcctccactggatccagacatttacttttttttttttgagacagagtctttgttgcccaggctggagtgcagtggcacaatcatggctcactgcagcctcaatttcctgggctcaagggattctcc

SEQ ID NO: 428153 - DNA, 201 bp, Homo sapiens
cagcctggcaacagagtgagactccatcacacacacacacacacacacacacacacagaacatacaggcaagaggctcagcccccttaaagggggatgtckctctgtccccccagccaggcctccacagttacctttaagcatccatcatcattatcatcctcatcctcatccttcttttttcgcttggcttttttctcct

SEQ ID NO: 428154 - DNA, 201 bp, Homo sapiens
cagcttgattctggccactgggagggtctttagggcctcccacccacccaggctaaggcaaccaggccagaggagtgctggagggccgggctggggcttgrctaccccacacagcagtgccgaggaggcacacagacccggtgagcagcggctgctgcgggcctgggaacattaagagaaaaaccgatcccgttaccacgg

SEQ ID NO: 428155 - DNA, 201 bp, Homo sapiens
cagcctctggcaagctcctgtcacccgtgcagcagcctgttccctaaaagggcctcaaagctcagcagatgggaaccgggattgaaatctgaacatctggytcaggcttttaacctctgctctacccaacagctgcctgaagccagaagcactgagtgtcagaggccaccgatcctaagcccctcaaaaacagaggccaca

SEQ ID NO: 428156 - DNA, 201 bp, Homo sapiens
gcgcacggaggcactgtggatgctggcgctgtcgaagtccgactcctccctctcatcttcttcactctgcaggggaagacagggtcctgtgatcccagggmttcacccagaaggcttcgctggcccaggcagtgtggggtgggacaaagcacggaagaggctctggagacacagtgctctctgtgattcatctcagccccc

SEQ ID NO: 428157 - DNA, 201 bp, Homo sapiens
gaggcactgtggatgctggcgctgtcgaagtccgactcctccctctcatcttcttcactctgcaggggaagacagggtcctgtgatcccagggcttcaccmagaaggcttcgctggcccaggcagtgtggggtgggacaaagcacggaagaggctctggagacacagtgctctctgtgattcatctcagcccccaacacag

SEQ ID NO: 428158 - DNA, 201 bp, Homo sapiens
ttgatgcccagaccacctgcccgggttgagaggaggaagcagaactgctgggccccgggggctgaaaaagagaggccagcagatgggagtgtttggggggktacaccttgggtgggcagaaaggatgggggagagaacagagagaaggaactgcagcaacagatccctggcagagaaggacaaagccggagaccccatcag

SEQ ID NO: 428159 - DNA, 201 bp, Homo sapiens
ccgggatgagaggccccctgggagggtggtgggcggcagcagcacagacctggatgtcattgtgcgggttccagtccgagtcgtagatgatgacagtgtcygccgtggccaggttgatgcccagaccacctgcccgggttgagaggaggaagcagaactgctgggccccgggggctgaaaaagagaggccagcagatggga

SEQ ID NO: 428160 - DNA, 201 bp, Homo sapiens
cccacctggcagtcccaggacgcccaagtgagggcaggtcagggaacccctcctctgcaggagcagccacctggtcggaggaggagctgaggctgggctgrgttggcccctacctggcggggtgctaccgtgcttcttctttgcactggcggccaagttcccccctttggaggactggacatcagggatgggtgtgaccgg

SEQ ID NO: 428161 - DNA, 201 bp, Homo sapiens
ggcggggtcacagcttggagggctggctgcggcgggagggcggggtcacagtggaaggcgtggacacagtggggggcggggctgcggatggagggcggggytgcggatggagggcgggccggggaccttaccacgccgtcctcctcgcgcaccacgtactgcgccaccttgaaggagctcaggtactcgttcatgttctgt

SEQ ID NO: 428162 - DNA, 201 bp, Homo sapiens
ttttttttttttttttttttttaacaaagtcctgcataacaacactgggccttcttaactaaaatgctcaccacttagcctgtttgggccacaaggtcggkggcccaaaaagagtgctgaatttttgctgcacgtgcttaaaaacacagagagtaatgctgaacttaagggtagattctctggtcattgagcatatccaag

SEQ ID NO: 428163 - DNA, 201 bp, Homo sapiens
tgaattattaaccttgtttttcagtactctagcataaatgaattgcttctctttcattctagaaatccttcctatttgacaaacggccactcagtcctgcrcttaatgctcttaagcaagaggaatattcccggagtctcctgaaacaaatggataacagacaggaaaacgaaataaagcaaagacaatacagagagttga

SEQ ID NO: 428164 - DNA, 201 bp, Homo sapiens
aacctgtggcccctgaacaagttcctgcctggctcccggttgcttgtgtaaaactcaaagtttggctcttcgtttcccggggaaagtttttatcttttacrtgtttgggggtgattgtgaaactgcgtatttttacctcagagaaaaaaatcattgtttaggtttggtgctttcattagattgcttgttaagcccttattg

SEQ ID NO: 428165 - DNA, 201 bp, Homo sapiens
ttttagtacccttttcacatctcactttctccatgaaaacttatcactgaattctgaagtggcttctctcctctgaacatatcagatccttaaagactacracatttggctgggcatggtggctcacgcctgtaatcccagcactttgggaggctgaggtgggtggatcacctgaggtcaggagttcgaagccagcctggc

SEQ ID NO: 428166 - DNA, 201 bp, Homo sapiens
tattcctttctctgttcctgacttccgatcatttgcaagtccagttgcctttacctccaaaatgtatccaatacctgtccaaatgtcttcatctttaatgytgccacactgaaagtgttgccaagccacattgttatgctcaacttctccaatacttcccttagattcactgcttgcattcttgctctcctataatttatt

SEQ ID NO: 428167 - DNA, 201 bp, Homo sapiens
actgtgctggtgtctaggaatacaaggttccctcttctgaagaggtctctagtgggagagacagacacttaaagagacaactgtgtggtataataaatgcratgataaatctctgaaaaaagggcactatatgagcaaaagaagagattcattaacctagaccagagatctggaaagactttctgacatacaagagttagg

SEQ ID NO: 428168 - DNA, 201 bp, Homo sapiens
actccagcctgggcgacagagtcagactccatctcaaaaaaaaaaaaaaaaaagaaaaagactgcaacatttatttgtgacttatacattttgcatcactstcctaagttgttatttattaaatgtatattataaagcacttagcactgttagcacataagatgacctccaaatgggagctctcacttttttgtttgtatc

SEQ ID NO: 428169 - DNA, 201 bp, Homo sapiens
acaggcggaaacaaaatagcacagagttgggatcatccaactttttctgtagatttgggcttcccaaatctacaaaactttcatgttttccgagtgcttgsatattatgatgtgacacaatgttatatttacatcaaattggaaagtagttttgccaaacatagccagcactccattagttctcaataaacattacttgaa

SEQ ID NO: 428170 - DNA, 201 bp, Homo sapiens
acatatatatgagattcattcttctttaatagcagcatattatctataatatagatgtataataatttaacttttgcattattgatgaacattcactttgkttccagatattttgtattaaacatttttaatatatatttttatactggttcttttgtttctatcagataaattcccaaaagtggggctgctgtgtccaat

SEQ ID NO: 428171 - DNA, 201 bp, Homo sapiens
tctaattttactatatgtgctactaaagtgagcacaatcttctgatttttcaaaagaagcagagatcctgactttaatgtaaaatctattggctgttaaawgttgacgacttttgttgatattgaaacaaaaaatgctaattaggccaaacaaaacataccaatgggtgaacattggcttgtgcatgtctgttttctacgt

SEQ ID NO: 428172 - DNA, 201 bp, Homo sapiens
atgaaaatttcccttggtaaaaactacacagttagtggtttgagagttgaaaggagactcgttttcattcattctttattctacagatatctcatcacccmaaagacttcgagatagacaagctttgttccctgccaaagtgacaaatgtcagcttgctggaaaagtttgaacgaagtgagagtggtgggaagattatgac

SEQ ID NO: 428173 - DNA, 201 bp, Homo sapiens
ttctaggcactgaagattcagagttacagatgtataaacctgcttttataaaacttacagtgttgcaggaagactgaaattaaaaaaaaaatgcatgcgaygaagacaacaaaagtacagaggctgcaaaaggacagagtaattgttggaagtggttggtaaaggtttcctatagaagttgactcaaaaatgtttgtttcc

SEQ ID NO: 428174 - DNA, 201 bp, Homo sapiens
aaaactacacagttagtggtttgagagttgaaaggagactcgttttcattcattctttattctacagatatctcatcacccaaaagacttcgagatagacmagctttgttccctgccaaagtgacaaatgtcagcttgctggaaaagtttgaacgaagtgagagtggtgggaagattatgacccctgaaaggtaatgcatt

SEQ ID NO: 428175 - DNA, 201 bp, Homo sapiens
tcccagcactttgggaggctgaggtgggtggatcacctgaggtcaggagttcgaagccagcctggccgacatggcgaaaccccatctctactactactacaaaaaaaaaaaagttagctgggagtagtggtgtgcacctgttattccagctacttgggaggctgaggtgggagaattgctagaacctgggaggcagaagtt

SEQ ID NO: 428176 - DNA, 201 bp, Homo sapiens
actataggtgtgcaccaccacacaccagctaattttttgatttttttttttttttttttttgtagagatggggtcttagtatgttgtgtaggctggtctaraactcctggcctcaagcaatcctcccacttcggtctctcaaagtgctgggattacaggcatgagccaccacacctggcctgcatttatttttatcttgtt

SEQ ID NO: 428177 - DNA, 201 bp, Homo sapiens
tgaggtgggagaattgctagaacctgggaggcagaagttgcaatgagctgagattgggttactgcactccagcctgggcgacagagtcagactccatctcaaaaaaaaaaaaaaaaaagaaaaagactgcaacatttatttgtgacttatacattttgcatcactgtcctaagttgttatttattaaatgtatattataaa

SEQ ID NO: 428178 - DNA, 201 bp, Homo sapiens
gtgtccttttttaactgggagctttactttttcttaaaaaaaagttgtatttttataaagagaacttcatatatcataagtatgaatagttttctgatgtrtatgttttaaacattttcccaattcttttttttctttttaattttgtttctgcaccatttagtgcacagaagtttaaaatatatcttttctgatttacca

SEQ ID NO: 428179 - DNA, 201 bp, Homo sapiens
ggtttgagagttgaaaggagactcgttttcattcattctttattctacagatatctcatcacccaaaagacttcgagatagacaagctttgttccctgccmaagtgacaaatgtcagcttgctggaaaagtttgaacgaagtgagagtggtgggaagattatgacccctgaaaggtaatgcattgacttttttttttctgt

SEQ ID NO: 428180 - DNA, 201 bp, Homo sapiens
atacaacaaatattgagcaccaccatgtgccaggtaatattctaggcactgaagattcagagttacagatgtataaacctgcttttataaaacttacagtsttgcaggaagactgaaattaaaaaaaaaatgcatgcgacgaagacaacaaaagtacagaggctgcaaaaggacagagtaattgttggaagtggttggtaa

SEQ ID NO: 428181 - DNA, 201 bp, Homo sapiens
ctctcttcagacaccaggtagtccaacacctcgattagtctttaatatggggcaatagaacatgattatataatgtaatttattattattttttattggcrcagggtctcactctgtcacccaggttggaatgcagtggcacaacctctgctcactgcagccttgacctacttgggctcagatgatccttcgacctcagcc

SEQ ID NO: 428182 - DNA, 201 bp, Homo sapiens
ctaaaataaaaaaaattacccgggtgtggtggtgagcgcctgtaatcccagctacatgggaggctgaggcaggagaatggcgtgaacccgggaggtggagsttgcagtgagccaagatagtgccactgctctctagcctgggtgacagagcaagactctgtctcaaaaaaaaaaaaaaaaaaagaagttaaccaaaaaatg

SEQ ID NO: 428183 - DNA, 201 bp, Homo sapiens
aaataattgcacatcatcttaatgaaaggttaaaccttttgtttaaccaatctcctattggatatttagatggcttccagtttttaagtactataaataatgttgtgaaaatataattaaacataattccttgcatacaactggatattccataggataaaaactttaaagttaaatttcagagataagaggtgagtccat

SEQ ID NO: 428184 - DNA, 201 bp, Homo sapiens
aaactaagaaggataggactttcattgtttaacagttgagtataactcgtttggggaaaggtaataagggtatgaaacaaagatcagatggaaagctttasctttgttggggattagttaagggaggttaagaaggagatgtcaaagatgaccccagattttggcttaggtaactgggagaagatggcaccattattcaaa

SEQ ID NO: 428185 - DNA, 201 bp, Homo sapiens
gaacaaaattacatgaaacaccagctggaggcagctgctaaccacaagaggaaagccatcctgcatcaactagtggaccagaggcgggatttgcaaatgcktcagaggacacaaagagagtaaggagacccctgatctttctccctccacttctcctcacttattccgcttcctttatctctctttttccaccctgtccct

SEQ ID NO: 428186 - DNA, 201 bp, Homo sapiens
aataattgcacatcatcttaatgaaaggttaaaccttttgtttaaccaatctcctattggatatttagatggcttccagtttttaagtactataaataatgttgtgaaaatataattaaacataattccttgcatacaactggatattccataggataaaaactttaaagttaaatttcagagataagaggtgagtccatt

SEQ ID NO: 428187 - DNA, 201 bp, Homo sapiens
aactaagaaggataggactttcattgtttaacagttgagtataactcgtttggggaaaggtaataagggtatgaaacaaagatcagatggaaagctttagstttgttggggattagttaagggaggttaagaaggagatgtcaaagatgaccccagattttggcttaggtaactgggagaagatggcaccattattcaaaa

SEQ ID NO: 428188 - DNA, 201 bp, Homo sapiens
ataattgcacatcatcttaatgaaaggttaaaccttttgtttaaccaatctcctattggatatttagatggcttccagtttttaagtactataaataatgttgtgaaaatataattaaacataattccttgcatacaactggatattccataggataaaaactttaaagttaaatttcagagataagaggtgagtccattt

SEQ ID NO: 428189 - DNA, 201 bp, Homo sapiens
atgttctgcatgactattcttaggagtcatgattttctggaaaattcttatctgttattttctagaatattgttctttgccatttcctttattctaaaaawtcagcacttctattaaatgcatgtttgagcttctgaatctgttctctatttctctacttttaaatattttcattcttggcctggcgcggtggctcatgcc

SEQ ID NO: 428190 - DNA, 201 bp, Homo sapiens
agaatcagaaaaatgctgcctataatcttggagttgctgaagctataagaaaccacaagaatgagaaaccggaattttatgtaagtcttttaaaaatttcygttgctaacacctggcccatctgtgagcctttggatccactccctgtgttgcaggttgtgccttattttttatttttattttttgagatggagtcttgct

SEQ ID NO: 428191 - DNA, 201 bp, Homo sapiens
tgcctctaaaattattattgcccttgaggtcagattgtattaaacattaattaatgttgcattgtttttatagcttatcatatccaagttgtctgaaacamgacagtgagatgaagccccaaacatctccagcttgccaggatcataacaaggcaggacaggtacagtgtttccaaacaaataagtcccatcagaatctta

SEQ ID NO: 428192 - DNA, 201 bp, Homo sapiens
tccctgctatataaacccctacttttagttggtcaaggagatggatttgagactgatctctcatctccttggctacagcacccaattaaatccttcttccytggcaataatcattgtctcagtgattggctttctgtgctgtgagcacctagaccaaacccctggtgttttggtaacacagctcagctcagcttcatcctt

SEQ ID NO: 428193 - DNA, 201 bp, Homo sapiens
cctcaaaggaaattaatggttttacaggttgaagttgttaactggaaaaaggtttcaatcctattaaatcaaaccaggattgaagataaaagacctttgayccataaattatttgagagctaggaatttcagtatgcttttacagtgttcatgctttttagtatatttcagagtagtgaacaaaaccagaaggtttttttt

SEQ ID NO: 428194 - DNA, 201 bp, Homo sapiens
ttttacctcagagaaaaaaatcattgtttaggtttggtgctttcattagattgcttgttaagcccttattgaattcactcctgctttcctcccacccccarttatttcctatactagtttctgatggcagtgaaggtgtctgaatggtcctgagggctagaacctgctgcacaggggctgggaatgggatccagcttcatt

SEQ ID NO: 428195 - DNA, 201 bp, Homo sapiens
ttctgaattattaaccttgtttttcagtactctagcataaatgaattgcttctctttcattctagaaatccttcctatttgacaaacggccactcagtccygcgcttaatgctcttaagcaagaggaatattcccggagtctcctgaaacaaatggataacagacaggaaaacgaaataaagcaaagacaatacagagagt

SEQ ID NO: 428196 - DNA, 201 bp, Homo sapiens
gaacacactcatatgattctatgtgttacctcaacaccagctggtccgtgtgttgagggctgggcaaatattataaattaagaaatactttctgatttatyttagtcttctgaattattaaccttgtttttcagtactctagcataaatgaattgcttctctttcattctagaaatccttcctatttgacaaacggccact

SEQ ID NO: 428197 - DNA, 201 bp, Homo sapiens
gcacctccaacgtgggcgagagcaacctgtggcccctgaacaagttcctgcctggctcccggttgcttgtgtaaaactcaaagtttggctcttcgtttccyggggaaagtttttatcttttacatgtttgggggtgattgtgaaactgcgtatttttacctcagagaaaaaaatcattgtttaggtttggtgctttcatta

SEQ ID NO: 428198 - DNA, 201 bp, Homo sapiens
actttgcaagattacacagctggtctgatgtcagtcatcttgcaagcaagaaagctgggattcaaacccacctttatctgacacaaattcagattctgtgrtacatattcttaacctctatacatatagctgttttgaagtaaaccactgaaatatttttcttcatcttatacttgcctctaaaattattattgcccttga

SEQ ID NO: 428199 - DNA, 201 bp, Homo sapiens
tggtggaaaagcaaaagcgagaacaaaattacatgaaacaccagctggaggcagctgctaaccacaagaggaaagccatcctgcatcaactagtggaccasaggcgggatttgcaaatgcttcagaggacacaaagagagtaaggagacccctgatctttctccctccacttctcctcacttattccgcttcctttatctc

SEQ ID NO: 428200 - DNA, 201 bp, Homo sapiens
tgcctgccctttcctgcatttgtgatgaattcttccattccttagatccctctagtggtggtacctaaaggccaagaaaaggaaataaaatacctttcccmatctacttttataaatctatagagatatcagaaagtaccactgcctccaaaaggcaggtttctaccatggctggattattttaatgtaatagaattaaaa

SEQ ID NO: 428201 - DNA, 201 bp, Homo sapiens
ccgcctcatcttgcacacgaaatggccatgcaactaataagcagccaagcttatagaaataaaaccatggctcctggtccagtgttctttccattgcaccrtattgccttactcactaaaaataaatcagtggattgaaaagaattttattttgatggtttcggaaggcaaacatggctgttccctttgacatattttggc

SEQ ID NO: 428202 - DNA, 201 bp, Homo sapiens
cttagatccctctagtggtggtacctaaaggccaagaaaaggaaataaaatacctttcccaatctacttttataaatctatagagatatcagaaagtaccmctgcctccaaaaggcaggtttctaccatggctggattattttaatgtaatagaattaaaatttttgggggctccacttcaatatgtaatttaaaatttaa

SEQ ID NO: 428203 - DNA, 201 bp, Homo sapiens
ctgggactacaggtgcatgccaccactcctggctaatgtatgatacatttgaaatattaccagaaactgacagttacatttctaagaaggcatagcaactygcttctcagcaatgttgtgagaatgctagttgtcccctgcacaatctctgcctcattttcttactttctgggcatttaaaattattttaacctatcctta

SEQ ID NO: 428204 - DNA, 201 bp, Homo sapiens
cctgcatttatgttattgcctctttttgtcctctaaatgcttagcacagtgctttctttgcgaatatacagcaaaaacatttttttataccacaatagaayaaggggtgattatttaaagataagagagtgtatcttatatgaaaatttcccttggtaaaaactacacagttagtggtttgagagttgaaaggagactcgt

SEQ ID NO: 428205 - DNA, 201 bp, Homo sapiens
aattgaaacaaaaaccaataacctaaataaaggactttaaggcaatttctctatatgcaagctgctttgagactatggtatagagggaaaggccttggtcrgcttccagaaagccttggagaaaattaatctatgatatgtacttagcacatcagagcactcaccccttgaagaaagtgggcttatttcagaatcagccag

SEQ ID NO: 428206 - DNA, 201 bp, Homo sapiens
tgctcttaagcaagaggaatattcccggagtctcctgaaacaaatggataacagacaggaaaacgaaataaagcaaagacaatacagagagttgatggacmgcctggaacaagtgcaactcacagaggagtgagtccagctacacacgctctgacaaatggatttggaattttcatgtgaagttacttttcatgtaggatt

SEQ ID NO: 428207 - DNA, 201 bp, Homo sapiens
ctctagtggtggtacctaaaggccaagaaaaggaaataaaatacctttcccaatctacttttataaatctatagagatatcagaaagtaccactgcctccmaaaggcaggtttctaccatggctggattattttaatgtaatagaattaaaatttttgggggctccacttcaatatgtaatttaaaatttaaaaataaact

SEQ ID NO: 428208 - DNA, 201 bp, Homo sapiens
gttttaatgttttcaatcatcatgtgcctacctttatttctgcctgaatcttcctctttatatatcaccatctaggtagtcgacactccggacataaatcwaataaattataatttatttattcatcatcaaacatttattgaattcctccaggccagccactgtgctggtgtctaggaatacaaggttccctcttctgaa

SEQ ID NO: 428209 - DNA, 201 bp, Homo sapiens
tgtcttggctcactgcagcctcaacctcttgggctcaggtgatcctcccacctcagcctcctgagtagctaggaccacaggtgtgcgccaccatgcctggmtaatttttgtactttttgtagaaacagggttttgccatgtcgcctaggctggttttgaactcctgagctcaaacgatctgcccacctcggcctcccaaag

SEQ ID NO: 428210 - DNA, 201 bp, Homo sapiens
tcgctggagcccaggaagtcgaggctgcagtgagctgtgatcgcacactccaggctggtgacagagggagacctagtctcaaaaaaaaaaaaaaaaatccmcccatggagaaattttgatggggtagaggagcacatgagggactgttttgcgtaacgaagaaaaaccatcaaaggggaaagtcagttactactgcctctt

SEQ ID NO: 428211 - DNA, 201 bp, Homo sapiens
aattttttttgtaaaaaataatttaaaagtaggttacatattaaccttaattatttataaaaaaatttaaacaatttttcctttttaagcaatatgcacayatatttttccttctacttttgtaaatgaaatagtctatgagatcttatatattactctgcaaactaatctttctttaacctagcaatgtcatatacaact

SEQ ID NO: 428212 - DNA, 201 bp, Homo sapiens
ctcagtcctgcgcttaatgctcttaagcaagaggaatattcccggagtctcctgaaacaaatggataacagacaggaaaacgaaataaagcaaagacaatrcagagagttgatggaccgcctggaacaagtgcaactcacagaggagtgagtccagctacacacgctctgacaaatggatttggaattttcatgtgaagtt

SEQ ID NO: 428213 - DNA, 201 bp, Homo sapiens
ctacccagggtgattgctctgatgaatgagatcattcctcattggatttttaagctctggacttataagcgcttaacataaacaacaacaagaaaagtatygtggtagccttgcctatgagcctgcagtttttaatttgtctgagtcctggacctcagcctagatgtaaccttgctctgttgctgtcctctagaggcctgg

SEQ ID NO: 428214 - DNA, 201 bp, Homo sapiens
gaacatgattatataatgtaatttattattattttttattggcgcagggtctcactctgtcacccaggttggaatgcagtggcacaacctctgctcactgyagccttgacctacttgggctcagatgatccttcgacctcagcctccagattagctgggactacaggcacacgtcactacacctggctaatttatgtattt

SEQ ID NO: 428215 - DNA, 201 bp, Homo sapiens
caaacctgtatttagtcatgatcacaatattcctttctctgttcctgacttccgatcatttgcaagtccagttgcctttacctccaaaatgtatccaatayctgtccaaatgtcttcatctttaatgttgccacactgaaagtgttgccaagccacattgttatgctcaacttctccaatacttcccttagattcactgct

SEQ ID NO: 428216 - DNA, 201 bp, Homo sapiens
gaattgaaactcaccagatgattgcattcagacaatgagccaggcccctccattgaccatgattgcttccttatccctcccgaattctggttttcccatayatagtttcaattcttccctgctatataaacccctacttttagttggtcaaggagatggatttgagactgatctctcatctccttggctacagcacccaat

SEQ ID NO: 428217 - DNA, 201 bp, Homo sapiens
tttcttgccttcttcacaatgttaatgttttctctattttcttttcccttgcttagtcacttgtgtttattttctctttttgtagactttcatttgtatayctatctattttgccttgtaatatgtctgcagtgactggtaggctgagtactggcagctgagaggctggactaaaaggaaagaaacagagtataggaaatc

SEQ ID NO: 428218 - DNA, 201 bp, Homo sapiens
tttaatttgtctgagtcctggacctcagcctagatgtaaccttgctctgttgctgtcctctagaggcctggcactgtggactcggtgttgtctagcagagmggccttgaggaagtggcccagcagtgtgcttgcgtttccaaggtgagtgctttgcttcacgggttcctctaggcactagcactccttgctgatctgctga

SEQ ID NO: 428219 - DNA, 201 bp, Homo sapiens
cactgtctgctggctgtgtgaccttcggcaagttctctgtgggcttgggtggttgaggctggggaggggtagggtcagactgttgtgaaggcacaagtcgyggctttttatttagtagagaacgacaagccagcagaagtctggaagcaggggatgccaggatggggtgaactgcagcatacaggcagagaacgcaaggtg

SEQ ID NO: 428220 - DNA, 201 bp, Homo sapiens
ttgaggctggggaggggtagggtcagactgttgtgaaggcacaagtcgtggctttttatttagtagagaacgacaagccagcagaagtctggaagcagggratgccaggatggggtgaactgcagcatacaggcagagaacgcaaggtgtcacttttcttttgtgtacctcctgccataccagcttccaagttgggcctcc

SEQ ID NO: 428221 - DNA, 201 bp, Homo sapiens
ggtgattatttaaagataagagagtgtatcttatatgaaaatttcccttggtaaaaactacacagttagtggtttgagagttgaaaggagactcgttttcwttcattctttattctacagatatctcatcacccaaaagacttcgagatagacaagctttgttccctgccaaagtgacaaatgtcagcttgctggaaaagt

SEQ ID NO: 428222 - DNA, 201 bp, Homo sapiens
tttagtccccatgtattttgggattttccacttatctttctcttattcatttctactttaatcccattgtaatctgacagcaggcattgtatgatttctawccttttctatttgttaaggtgtgttttatggcccagaacatggtctgtcttggtgaatgttccatgtgagcttgagaagaatgtgcattctactgctgtt

SEQ ID NO: 428223 - DNA, 201 bp, Homo sapiens
acctatagcaatagtcttggtgagaacaaatggtagcttggtctaaaactggtaatagtagaaatgcagaggaatgcaatgaatgaggggcaacttggagrtaaaatctacagattatggtgatggactggatgttaggggtgagggataagagaagtctcaaggatgacttctgagttcctggctcatataactgaatag

SEQ ID NO: 428224 - DNA, 201 bp, Homo sapiens
gacttctgagttcctggctcatataactgaatagatagtggtgccattcactgagaccgaaatcctggataaaagacaagatttaagagaagaaagattgyggttttgggcaagttgaagggcctttttgtgatatataagcaggcagttggataaacgggtccagaatctcaaagagggggtggcaaggagtctgggtct

SEQ ID NO: 428225 - DNA, 201 bp, Homo sapiens
cccttgttttttgtacccatctttattttccactgagcattttacgattccattttctcctttttcagcatatcagttatacttttttttttttgagacayagtcttgctgtgtcacccaggctggagtgcagtggtgtgatcttggctcactgcaagctccgcctcctgggttcatgccattctcctgcctcagcctccc

SEQ ID NO: 428226 - DNA, 201 bp, Homo sapiens
gtgatcaatagtgtcagacatggctgagggctcagaattaaatacgtttattgaatgtattgacaaagagaccattggtgacttcagcaagagctgaagtsaaagtcaaactactatttattacctttcacaaattatctattgcaacaaggatgaagataaacttcaaactgagcaaaacacataaattaactttcatca

SEQ ID NO: 428227 - DNA, 201 bp, Homo sapiens
atacaattcaacatgagatttgggtggggacacagatccaaaccatatcagcaaatattgctgcagtatgtcctaaaagataagggggatgaaaactttargaaaccctctgaggaagagaatcagttgattattatatgtttcctagagaaaatcaaaagcttgtctacagtgttatttagaaagctaactgttcttatt

SEQ ID NO: 428228 - DNA, 201 bp, Homo sapiens
ttagacggggtgtgcagtccatagccatcacattccctggctggctactttcactctcttgctttcttttttggctcctgtaggcatttgagtttgtagtycttgatgaatgatatctccagggagacagaaacccagtatgagaggcaaaaacatttgcttctactcatcagccaggatcactacattgcagcatatgat

SEQ ID NO: 428229 - DNA, 201 bp, Homo sapiens
gaactttcactttcataagacaaaagcttgaggtgggaaacaacaaatttatcttaatccagaggcctgtgtttatcatggtggagaagctagtgcagatycatggactcaaacaaaacaaagtatatactcctggtaaataattctgatatgtaggattttcccagaaggttactgtcctggggataaaaaatgaaaggg

SEQ ID NO: 428230 - DNA, 201 bp, Homo sapiens
gataatggattcatttatctcttcttgcagttctactagtttttgcttaatgtaatttgacatactatttttaggtgcatacatattaaaaattcttaggwcttcttgaaagattgacccctctattattatgtaatgctctttatttctgacaactctccttgatttgaagtctgttctaaaattaatatagctacccct

SEQ ID NO: 428231 - DNA, 201 bp, Homo sapiens
tctgaggaacatcttttaacatttcttgaaaagcaggtttactggcaattaattcccttaatttttgtttgtctgaaaaataatttctcctttgcttttgraaaataattttacaggatgcagaattttaggttggtgttttctttttctcaacacttgaaatgtcttatggtactctctttttgcttggtttctgagaag

SEQ ID NO: 428232 - DNA, 201 bp, Homo sapiens
ttccttccttcttcaaatatttattgagagccaactatgtgtcagaccttgttccaggtgcttgagatatagtggtaaacaaaataggcataatccctgcmacagactgcttccatccagctttagtgtgtgggcttcgtaacacctcccttggttacttagcagcctttgggtgcatacttcctgattcctggctgtgtt

SEQ ID NO: 428233 - DNA, 201 bp, Homo sapiens
gctctgattttctgtactttgaaaatgatattcctaggtatctttttttgggtatttatccagcttggtgttatttgagcttcctggatctgtggtttcaygtctgacattagagggaaattctgagtaattgtttcaagcatttcctctaatatttctccctcttctcctggtattcccattatgggtacacaccttctg

SEQ ID NO: 428234 - DNA, 201 bp, Homo sapiens
tattcctgctgcttctgtatgttttagcaaagtttaatattatgtaattatagttcttagaaggccctgtcatcattttacagatgtgaactgggtaaaasttgagtccatggaagcaggaaggctgtgggtcttccacgtagcacactgctctttccattgcattatgctctgggaatatgtttctttgttcaaatcatc

SEQ ID NO: 428235 - DNA, 201 bp, Homo sapiens
tttagagaaaattgtactgattaatatgttagtaactacttaattgtctgcagtaataatattacattgggtacaactaaaagcttcatccagaagattcyattttagggcattgagaatcagataattatttgtgagtgtgtatgatatgtccttatggtaatcaccactttctttctcccaccccaactgtcttttctc

SEQ ID NO: 428236 - DNA, 201 bp, Homo sapiens
atttggaaaagattactctggttgccatgtggggaatgaataggagggtcaagaatacctatagcaatagtcttggtgagaacaaatggtagcttggtctraaactggtaatagtagaaatgcagaggaatgcaatgaatgaggggcaacttggaggtaaaatctacagattatggtgatggactggatgttaggggtgag

SEQ ID NO: 428237 - DNA, 201 bp, Homo sapiens
tttaacaattttgacttaataactttgaaagttctccatgtacatctggatactgagattttgcatttgtgaattaatgaaatttttggtcatgatgaaarttttaattcagtatacagttaggactggttcttagttcttagcagcctgtagtagaatctatgggctgtgggggtggggaggagtggggaacaaggtagg

SEQ ID NO: 428238 - DNA, 201 bp, Homo sapiens
aggattgggcttttgtcaccagctgcatctatgtccctaaatggcaagtttgttaatgtcactgttcttgattttttattttgagaattaaaacgtaacaktcttgatttgcagagagttcttaactggaaagtatctttgataaacacatggttaggtctggaagggcgatgttaacacagatataattttctagacttt

SEQ ID NO: 428239 - DNA, 201 bp, Homo sapiens
gttgggtagcagggggtggccctggggattgaatcttcatctgcttgcaggggaggcggggggacccacttcccaattccctggctcaggcctggcctgcmgtggctaagttgccttgacaaccagctggtaatcacatcctgcccacgttggacgcccagagacccttttctggttttgattaaaccaggggatgcgtag

SEQ ID NO: 428240 - DNA, 201 bp, Homo sapiens
aggggatgcgtagacagcacaaagtaagtgctcaataaacggactagcacaaagtaagtgctcaataaaggttaggtaaaaacagccactcccacaccacycgctgggatggatcacaacccttttgcctacctagagaaaagagatgcagggaccctaaatggctccttttgagagttcatgcaaagacggttgattttg

SEQ ID NO: 428241 - DNA, 201 bp, Homo sapiens
aattctgaaaccctgctatatgctgagcactagttaacttacggtgaacaaacatcttggaatttactgtttagtggggaagatgcacattaatcaaatartcacacaaatcaatgcaaatttacaatttaggtaaatgataccagggaggaggtaaatggtacagtaagaactttttttaaagatgattttttagggtag

SEQ ID NO: 428242 - DNA, 201 bp, Homo sapiens
attgttttctactttttgcccttgttttttgtacccatctttattttccactgagcattttacgattccattttctcctttttcagcatatcagttatacttttttttttttgagacatagtcttgctgtgtcacccaggctggagtgcagtggtgtgatcttggctcactgcaagctccgcctcctgggttcatgccatt

SEQ ID NO: 428243 - DNA, 201 bp, Homo sapiens
tgataaataatggggagcaccttttaatatgcttgtcattttttgatgagatatatataaagggctttggctcatttttaaattgagtttttcttttcttwgtgtttttaagagttatttgtatattttgcatgacagtgtcttttgcaaatattttttcccagtctgtggcttgtcttctcattctcttgacattgtttt

SEQ ID NO: 428244 - DNA, 201 bp, Homo sapiens
gccattctcctgcctcagcctccccagtagctaggaccacaggcacccgccaccatgcctggctaattttttgtatttttagtagaggtggggtttcaccrtgttagccaggatggtcttgatctcctgaccttgtgatccgcctaccccagcctcccaaagtgctgggattacaggtgtgagccaccgtgccaggcccag

SEQ ID NO: 428245 - DNA, 201 bp, Homo sapiens
accgttgcactccaggctgggcaacaaaatgagaccctgtctcaaagaaaaaaaaagtttttattttaccttcacttattccttcttcgatggtcttcccttttttttttttttaaatgcagatccaagtttctgacctacatcattttccttttttctgaggaacatcttttaacatttcttgaaaagcaggtttactgg

SEQ ID NO: 428246 - DNA, 201 bp, Homo sapiens
gcttcaaagtcgtgcatttatctagataaatattaaatcatttgttgggcaccatgattcttagaccaagggtttagaccagcacccctagagtctgtctrcttacgaaaatgacctgcttcagtcatgacagaataagcttttaactgacaaaggggagttaatacccagtctttgggacatccccagaacagaaatggt

SEQ ID NO: 428247 - DNA, 201 bp, Homo sapiens
gatcctccctcctcagcctgccaaagtgttgggattacaggcgtgagccacagtgcctggcccaaagtgtttttttaaactataatctccttttttttttyctagaaaatagtttttcttcagtcctgagaagtcagctccttacgtgggctttggtggagctcatgggtcagcactcgaaggtctaaatctgggtgggga

SEQ ID NO: 428248 - DNA, 201 bp, Homo sapiens
ggttgctgtttctatgggtaagctgcttaccaatttatgtatttgtctattaaatattgttggtatactgcttttgttctttccctgtcaggaaaacctcytgatgagaattcacttccacattgctgatgaaaccaaagaggatatatgtactgcccaacactgcatttcccatcagaaatttgcaatgacattgtttga

SEQ ID NO: 428249 - DNA, 201 bp, Homo sapiens
cccttcattctgactcttgattttatttttaattactaactgcaagcatgtcaacccatgggaagcacatttggtttcatagctatcatcatggagatgcyagcatgacagactaggatgtatagaagtttaataacagcattgtactttttctcttgtctaacctcttccctatagggaatctttaaccagtttcagtgt

SEQ ID NO: 428250 - DNA, 201 bp, Homo sapiens
cttagtcttggtaatggaaatgtggtgacttctcccttgcttatattacaggtgaggagatatcttctaaaagtgaactggatgaattgcaggaagaggtrgccaggagggcgcaggaacaggaacttcgaagaaaacgggagaaggagttagaggcagcgaaagggtttaaccctcatcctagccgcttcatggacttgg

SEQ ID NO: 428251 - DNA, 201 bp, Homo sapiens
tgagtcgcgttagctgtttttgccctttgatttctaagtgtacctggcactggcactgtggcctatggatatttaccagaataacctcagcaaggaatccrtagatgatttctccagtcatgcctaccttcttatttcaggataaagttagacctcagatgtgaaattagtctgctcttttgctagtcactggctagtggg

SEQ ID NO: 428252 - DNA, 201 bp, Homo sapiens
gagcattaggttgtgggtgatggggacagacagaaagggtagaaaaaaacatctaagcttgtaagttccctgtcttctctttagcaaaataattttttaartcttaattcacccattccagtgagaacaagttagagtaggatgtgacaagactattgactggagataggcactgatttggggcacatctattaaaagcct

SEQ ID NO: 428253 - DNA, 201 bp, Homo sapiens
tatgtgatcccatttatataacattcttgaaataaaatgatggagatgagagaagacattagtgattaccacaggttagggttaggtttggacgggtaagkctctaaatggttagcatgagggagccttgtgatggaactggtctatatcttgataaaatggcatagagctatacatacacacacacaaatgaatgcatgt

SEQ ID NO: 428254 - DNA, 201 bp, Homo sapiens
cccacagcacagctcccccagtagatctgccttgaagcttctgacttcggttgaagtagacaacattgaaccctctgcattccacaggcaaggtttacctraagcaccagggtggactgagaagaattctcatcatagttgggagccattggatgccccagagggtaagctgcaaggctctaggtgtgacaacagcagttg

SEQ ID NO: 428255 - DNA, 201 bp, Homo sapiens; identical to SEQ ID NO: 196894

SEQ ID NO: 428256 - DNA, 201 bp, Homo sapiens
tcagggaagtggatctgccaaacaggagcaagaacaaagccagtttacttttgataccatgacaattgattctgtaacctcaaacaatttgcatggacttyacttccacaactgccccatgttagactttttttcttcctagaatttttttaggatgtcactttgtaccaaaagagactagccttcaaaatagttcagcca

SEQ ID NO: 428257 - DNA, 201 bp, Homo sapiens
tgcgtcttagtattgcttaggagcagtgagcactagacaaacaggtatgtcctagatgacaagtattataatgttttggacagataaacttatttgtgtayagatacccgtgcttgcaggtatgtgctcatatacctccttttataggtggcaaagagtttttaagaagaaatgggatgacttgaccttgaaagacaggat

SEQ ID NO: 428258 - DNA, 201 bp, Homo sapiens
gatatggggctatcagaagaaaataaggtctatgattgggcttcttttgaattagaggagattgttacatggccactatcttaccaatacatctaattcargtgtctattactactgagtcttcccctactctttcccataccctgaggatactgtctgtgggaaaaccataagtctggtattatgtgtctgcctgtatgt

SEQ ID NO: 428259 - DNA, 201 bp, Homo sapiens
atgatcctggtctctcaaagacttcaacagcagaaatggagcatggtctccatgaagccagaacagtgcgtacttctcaggtagcagcctcaggtgctaargtgctgggcctggggtggtgtgttggggaaggaattatggagagatgtgacagggatgatgataaggcagaggcatggtgatatggggctatcagaagaa

SEQ ID NO: 428260 - DNA, 201 bp, Homo sapiens
agaaatggagcatggtctccatgaagccagaacagtgcgtacttctcaggtagcagcctcaggtgctaaggtgctgggcctggggtggtgtgttggggaargaattatggagagatgtgacagggatgatgataaggcagaggcatggtgatatggggctatcagaagaaaataaggtctatgattgggcttcttttgaat

SEQ ID NO: 428261 - DNA, 201 bp, Homo sapiens
gtttgtaggtaatcatacctttggagaatttcacttccttgcccaagttgagtgttcatcacagtagaggtcagggtacaaagtaccagtgcattgaaggwtgtccactaggtcagttcaggaaaaatgtaaaaacagattttaaatacatggtacaaaaataaaaaggtataaaagcatatatggtgaaaaccaagtctg

SEQ ID NO: 428262 - DNA, 201 bp, Homo sapiens
ggctggtcttgaattcctaggctcaagtgatcctactgcctcagtctcccaaagtgctaggattacaggcatgagctaccacggccagccatagctgtaawtttttttttttttttttttttttttgcgacggagtctctgttgcccaggttggagttcagtggcgtgatgttgactcactgcagcctctgcctcccgggt

SEQ ID NO: 428263 - DNA, 201 bp, Homo sapiens
ggtgctaaggtgctgggcctggggtggtgtgttggggaaggaattatggagagatgtgacagggatgatgataaggcagaggcatggtgatatggggctaycagaagaaaataaggtctatgattgggcttcttttgaattagaggagattgttacatggccactatcttaccaatacatctaattcaggtgtctattact

SEQ ID NO: 428264 - DNA, 201 bp, Homo sapiens
caattcctgcatagatctcctaagaaaaagaaactgtgaggccaggcgcagtggctcacacctgtaatcccagcactttgggaggccgaggcgggcggccraggtgggtggatcatgaggtaaggagatggagaccatcctggctaacacacggtgaaactccgtctctactaaaaatacaaaaaaaaaattagttgggca

SEQ ID NO: 428265 - DNA, 201 bp, Homo sapiens; identical to SEQ ID NO: 196882

SEQ ID NO: 428266 - DNA, 201 bp, Homo sapiens
ctgcttgcctgaatcaattcctgcatagatctcctaagaaaaagaaactgtgaggccaggcgcagtggctcacacctgtaatcccagcactttgggaggcygaggcgggcggccaaggtgggtggatcatgaggtaaggagatggagaccatcctggctaacacacggtgaaactccgtctctactaaaaatacaaaaaaa

SEQ ID NO: 428267 - DNA, 201 bp, Homo sapiens
ccccaagctgagttccagtcatacagcaggacatgctacgacagtgaagattcaggtgagcagccaggctctttacctctcctctctcctcaccccatgcratcaaacagttgggactcatagttaattatgtgcttagctcgtaacctagcttggagaaagaggatccattagaggtaagaaagaagtgccaatttgtgc

SEQ ID NO: 428268 - DNA, 201 bp, Homo sapiens; identical to SEQ ID NO: 196885

SEQ ID NO: 428269 - DNA, 201 bp, Homo sapiens
agtgaagattcaggtgagcagccaggctctttacctctcctctctcctcaccccatgcgatcaaacagttgggactcatagttaattatgtgcttagctcrtaacctagcttggagaaagaggatccattagaggtaagaaagaagtgccaatttgtgctgaagcctaacttgggccagcctttatttccttcagttgtca

SEQ ID NO: 428270 - DNA, 201 bp, Homo sapiens
ctgagagctcaaatgtctacaggtattgtttggcctttgaacagcaacattgtctcttgcagcaatgtgagccacctacttggggctttcaggcatggctkagacaagtggagggatggcctttgctattatctctatgtgctctttcaacttcctataacaacagcaccctctgctggaagaacagaggcacttgagaaa

SEQ ID NO: 428271 - DNA, 201 bp, Homo sapiens
ctcacaaagtgctgaagttaaattctgatgattaatctaaactaacaaaaatcttaaactgaagggaagagaagcaagtcagtaccttacttaagaaatgytggtggagtctgctgagagatgatgtggaatggttgaatatgtgactgtgctttcttttctcttctttcccctcagctgtttttcagagtgacggatgac

SEQ ID NO: 428272 - DNA, 201 bp, Homo sapiens
ttcagagtgacggatgaccgggccaagcaatctgaactgtacttagttggaatgatctgttactatggcaaacattattctacattcttttttcaaacaargattcgcaaatggatgtattttgatgatgctcatgtcaaggaggtaggagtagtcaagtcctttttgaagtgtttggtgactacaaaaaaaaagaataat

SEQ ID NO: 428273 - DNA, 201 bp, Homo sapiens
gtaatcccagcactttgggaggccgaggcgggcggccaaggtgggtggatcatgaggtaaggagatggagaccatcctggctaacacacggtgaaactccrtctctactaaaaatacaaaaaaaaaattagttgggcatggtggcaggcacctgtagtcctacctactcgggaggctgaggcaggagaatggcatgaaccc

SEQ ID NO: 428274 - DNA, 201 bp, Homo sapiens
tagaattggtatcagcttcttgtatgtgacccacaagaagctgtggtctataaagacagatgcaggtttggatcttatttctgctgttggccattgggaaragaggggtgagagtagagtgtggagaccagagtcagacaggtcagatgcaaaggacaagagtggcaatctctaagatggaggcactggtttatcttcttg

SEQ ID NO: 428275 - DNA, 201 bp, Homo sapiens
aacatccatgagactgtttcatttgcccaggttggaggtatgagatttgattttgatgtatattaagaattttaagaaatggaatcaaaagcacagcttgrttcattctttcccttgtatgtatgctcttggaggagtagggaattgggctacacagctaggcatggctctctgggaaggagaatggttttctgaagatgc

SEQ ID NO: 428276 - DNA, 201 bp, Homo sapiens
ggggaggatgagcagtacagtgcagagaatttacgtcgcatctcacgcagtctcagtggcaccgttgtctcagagagggaggaagctccggtttcttcccmcagttttgtaagtagaatcagggtccatctattcagagcaccctcctccttgctaagcaaaaatacagtgcaggtgaagaagcagggagaaagtgaaggt

SEQ ID NO: 428277 - DNA, 201 bp, Homo sapiens; identical to SEQ ID NO: 196898

SEQ ID NO: 428278 - DNA, 201 bp, Homo sapiens
tgactacaaaaaaaaagaataatcatttgtctttagtgtttcattttcataattttgaatgggacctccccacatttctataaaacatatatatatatatwttttttttttttttaattttttttttttttgagatggagtctcactctgtcacccaggttggagtgcagtggcttggtcttggctcactgcaatctctgc

SEQ ID NO: 428279 - DNA, 201 bp, Homo sapiens
ttcctgggaagagtccactgaacattcttctcttgccttaaactctgggctgcctaatggtgaaacttctagcggaggacagcccaggttggcagagccaracatataccaagagaagctgtcccaagtgagagatgttaggtctaaggatctgggcagcagtactgacttggggacttccttgcctttggattcctgggt

SEQ ID NO: 428280 - DNA, 201 bp, Homo sapiens
ggaggaggttgcactcagcccatgatcctggtctctcaaagacttcaacagcagaaatggagcatggtctccatgaagccagaacagtgcgtacttctcargtagcagcctcaggtgctaaggtgctgggcctggggtggtgtgttggggaaggaattatggagagatgtgacagggatgatgataaggcagaggcatggt

SEQ ID NO: 428281 - DNA, 201 bp, Homo sapiens; identical to SEQ ID NO: 196903

SEQ ID NO: 428282 - DNA, 201 bp, Homo sapiens
tgtctcaaaaacaaaacaaaacaaacaaaaaaacccagccgaatttatagtaagtttcattcaatttatcgttcataaattcctaagcaattctgatcagsctgccattcttttttggaaaaggtggactctcctgcctagcatttgttctcatgtactttcaattcatttaatggcaaattgttcttttcctaggagagt

SEQ ID NO: 428283 - DNA, 201 bp, Homo sapiens
aggccctaggggaagagatggcctcaacttgtatttgtgttttcctcttcaggctctgcagatggcatggggaggaggttgcactcagcccatgatcctgrtctctcaaagacttcaacagcagaaatggagcatggtctccatgaagccagaacagtgcgtacttctcaggtagcagcctcaggtgctaaggtgctgggc

SEQ ID NO: 428284 - DNA, 201 bp, Homo sapiens
ctcaaaaagaaaaatatttttactggagaataaaaatgttctgcttgaggccagccttggtctctagtagcaataaaagcctgtgatatataatgatgctyatatttcttccattttcaatagcactgtggtagggaaagtaaatgtaccaacccatatctagtggaaggagacaaaattctgctcagtttccttttatgc

SEQ ID NO: 428285 - DNA, 201 bp, Homo sapiens
tcagaaatatatcagactagtactttacatatgtatatatggatcattatgtttatataaatattccccaacctcactgtaatagtgtttatctgtatctctttcttttaaaatgtgtgaactcagctatgtaatacttatgccaatatgtatagttttaaatattctagcatctctggcagatactattttctacttgaa

SEQ ID NO: 428286 - DNA, 201 bp, Homo sapiens
tctcgctatgttgtcaaggctgatcttgaactcttgggctcagggcatcttcctacctcagcctcctgagtagttgggactacaggctactgtgcacagcyaattctgttgacttatgagcctttgtgtgggatattgggagctaggagttagcataatggtataaaatgtgtgagagaaagatagaaactgacttttaaa

SEQ ID NO: 428287 - DNA, 201 bp, Homo sapiens
agaaatatatcagactagtactttacatatgtatatatggatcattatgtttatataaatattccccaacctcactgtaatagtgtttatctgtatctctttcttttaaaatgtgtgaactcagctatgtaatacttatgccaatatgtatagttttaaatattctagcatctctggcagatactattttctacttgaatg

SEQ ID NO: 428288 - DNA, 201 bp, Homo sapiens
aataaattttcttgacctctcactaaatgattgttttagcattacttagattactttcactcacttagttttatgtggtcaaaaaataaggggggaaaagyccttgaaatacacttagccttgcaaatacatactagacttttatctgcccacaaaattttttacaagcctctcatgaccccaggaagtacatgggtaata

SEQ ID NO: 428289 - DNA, 201 bp, Homo sapiens
agcagcctctttggctgaactgtggttgaaacttctgcccgagcctgtttcttctcaggctggttctattaagcagagtggtctaaagaccaagagcaggktgtattgggagtctgactgggatgtaagtgcagttctacaacttaccagctactggttataaccttggtcaggtcactcaacccctctaagcctcagttt

SEQ ID NO: 428290 - DNA, 201 bp, Homo sapiens
gatagtagtgtgtgacaaacatcagcttgactgttttcttaaggactttgtgtacagttttcatgtaagctcctggttcatgcatttctttcttttattctttttttttttttggagacaagagtttagctctgtggcccaggctggatggagtgcattggcgcgatcttggctcactgcaagctccgcctcccgagttca

SEQ ID NO: 428291 - DNA, 201 bp, Homo sapiens
ttagcttcaattatgttgtaaaaaaccaaaccaaagcaaaacagaacaaaataaagtcgccaacaaagtagcctaatttcctgtaatcaggaaattttatkccctgactcatatttccagctttcttaattaaaacaattaaaaaggagttggcaacagtggtcttatatccatgaaaccaagtagcaggagcaaaagagt

SEQ ID NO: 428292 - DNA, 201 bp, Homo sapiens
taaatgctgaaactttaaaagaaactctggttagagtttgatgcttgaaaacaacatatggtttgaaagtcaagctcttaatttcaaatcaattttaattmtttcaaagagatttagagagagtaattgttttcatctaacccaatgtcatcgacaatagcaaactttgttttattagaagtacaactaggagaagtgtaa

SEQ ID NO: 428293 - DNA, 201 bp, Homo sapiens
taaggaaactttaaagaaggacttcatcttctgccttgaaagagagagaattgagagacaggatggtgggggatgggatggtagggatggggtagggatawcaaccttgaagctgcccgttcagttcagcatgtcaaaaaaccatttgggatattggtttctgagccctaacatttagaatatttcacattttactgtagc

SEQ ID NO: 428294 - DNA, 201 bp, Homo sapiens
atttagtgctatatctcatcttttctacatgaaaataattttgtatttttggacatggagccataccatttggacttcccagacctatttttatttcttaktgcagtacttgctatggaactgctgactggctatatatatttttatattttatctatggaaaagcagaattccaaatacttccagataattcatattata

SEQ ID NO: 428295 - DNA, 201 bp, Homo sapiens
ggtttaatagtcattttgtcatactcagtcaaaatgttcttccttttacatttttcgttaagtcttgtgaagccacacagaagtgatctactctctttacyaagtgttaactttgcatatattttatggggatgattctatccctacttaagattttctcttctcaggttaaatattccatttcctttgttcaggagtttc

SEQ ID NO: 428296 - DNA, 201 bp, Homo sapiens
tcctagggagaattccaatgagctaagttactgtgtctctcccaggttcctgtttttcatcaactaaatgccccaaagaaagaaaatggtattgactaagkgtctcccctgaaatgatccttcccaaagcctggaagagttgacaaacatctgcctgatgattgatcactaggcacactgttttgtcttagcttcttcact

SEQ ID NO: 428297 - DNA, 201 bp, Homo sapiens
agaaaaagaaaagaagaaaaggaatgaagaatctatgtattaaaagataatactttttaaaaggggctggggatagatgatcaaacaagagttttcattgraaacactgaaaaatgttcatgaactcagtgggtttcaacatcattatttctgaccatacccggcttctttggggtgaggcccaaaacgtgtattgccatt

SEQ ID NO: 428298 - DNA, 201 bp, Homo sapiens
caccgcacccggcccaggcatgcactttctttaacaacagaaatttctggttagaacaatccaagttgtcttaagtctacagggtgactgggttttaactscactgttattctaaggacagcctttaaaagatggtattgtgtttgagtgtgtcccctgtacatttgcctgtttgaaataaaatttctttagaaaaaaatc

SEQ ID NO: 428299 - DNA, 201 bp, Homo sapiens
gaatgcaaatggacatagctgcctttcagatgtggagtaccagaactcagagactaagtccagctttgcatccaaagtagaaaatggcattaaaaacgatrtatcacagagaacccagcttccttctacggagaacattgttgttctgtctttatctttgttaatcataccctttgttcctgccacgaacctgtttttcta

SEQ ID NO: 428300 - DNA, 201 bp, Homo sapiens
agtgctgctgagtgtatttgccagttttctcttaatttggcatcttgatccccagacctccatcattctgtcaacgtctctcagccctttttctccattcytcagccttgtctaccaatttggctcctgcttccatgactgaagccgctaaatgatgcctatggcaatgaattgctcctcattctctatgaccactgagtt

SEQ ID NO: 428301 - DNA, 201 bp, Homo sapiens
cattcttcagccttgtctaccaatttggctcctgcttccatgactgaagccgctaaatgatgcctatggcaatgaattgctcctcattctctatgaccacwgagttcagtgaagggggccattccttttctgcaccaaaattaaatcaacaaatgcaactttagaaagattgttacaggccaagctcagtggctcacatct

SEQ ID NO: 428302 - DNA, 201 bp, Homo sapiens
attccttaagcccaagagactcaggctgcagtgagccatgcttataccactgcactccagcctggacaacagagggaaaccctaccttaatttaaacaaamaaaaaaaaaagattgttatgaatagtgtttttcttctaattctgaagtattcaggataaaccttcaagtgaattgttgctaagttgaaaaatctattcca

SEQ ID NO: 428303 - DNA, 201 bp, Homo sapiens
aatatttaacatttttaaaggacttaatacttttcgtcgtgctttcatttacatgtcccatttcatctttttctcaggataagaaagcaaaatcaattgayccagtcttttttctttttttttttttcaaaattagaatatatcttcagttctaaatgtagggacagatttactttgaaaatagtaagttctaagaaacat

SEQ ID NO: 428304 - DNA, 201 bp, Homo sapiens
agtttagctctgtggcccaggctggatggagtgcattggcgcgatcttggctcactgcaagctccgcctcccgagttcacgccattcttttgcgcatttattttttttaattaattaattaattatttatttatttatttagagatggagtcttgctctgtcccccaggctggagtgcaatggtgctatctcggctcactg

SEQ ID NO: 428305 - DNA, 201 bp, Homo sapiens
acctgggagacagaggttgcagtgagccgagatcgtgccactgctctccagcctgggtgacagagcgtgactgtctcaaaaaaaaaaaaaaaaaaaaaaawatatatatatatatatatatatattgaactagtcacacattgcaacataccacaaataccacaaatcctcaagaccttattgtaggggaaacatagtatt

SEQ ID NO: 428306 - DNA, 201 bp, Homo sapiens
caggagaatcgcttgaacccaggaggcggaggttgcagtgagctgagatcatgtgactgcactccagcctgggcaacagaacgagactctgtctttttttwaaaaaaaacgaaaaacaggaaagattgtctaggtaaacttcttgacttgagatgagaaggagcttcctcatcatccatggaagctctatgaaggcaaatc

SEQ ID NO: 428307 - DNA, 201 bp, Homo sapiens
taaagagtcaagacccatcactgtgctgtattcaggaaacccatgtcacgtgcagagacacacataggctcagaataaagggatggaggaagatctaccargcaaatggaaaacaaaaaatgacaggggttgcaatcctagtctctgataaaacaggctttaaaccaacaaagatcaaaagagacaaagaaggccattaca

SEQ ID NO: 428308 - DNA, 201 bp, Homo sapiens
gaaataaagatgttctttgaaaccaatgagaacaaagacacagcataccagaatctctgggacacatttaaagcagtgtgtagagggaaatttatagcackaaatgccctcaagagaaagcaggaaagatctaaaattgacaccctaacatcacaattaaaagaactagagaagcaagagccaacacattcaaaagctagc

SEQ ID NO: 428309 - DNA, 201 bp, Homo sapiens
atagtgtctctctcacagaggattgcttgcagaataaatgagatattactcttaaaaccttaactgtagtgcctggcctagagtgtgagcatatgaaatgrcagccaacaagaaggcaaacaaaaaggtcctgctgcctcttgcagatattgggaaacaggcctattccaggcctgagggaaacatctggctcgttacctt

SEQ ID NO: 428310 - DNA, 201 bp, Homo sapiens
tccaaaacacatgtatactacatatatatttaaaaatatacacaaataatacttgaatagtatattttgaatattgtaagtctaaaataaatggaaacccraataatgtgacagaaatagaagttccagatatttttcccataccccagttaattattttgtgcaactctttccttttttggcatgtggaagccactttga

SEQ ID NO: 428311 - DNA, 201 bp, Homo sapiens
aatagatacattatccctctcccccatagactgtcaactatgtttttatatttattggaagctccattttttttttttttttttttctgaaggctttctcgttgcttataagactctcaggctgggtgcggtggtgactcacgcctgtaatcccagcactttgggaggccaaggagggcagatcacctgaggtcaggagtt

SEQ ID NO: 428312 - DNA, 201 bp, Homo sapiens
tactttggaggcagctcagtgaaatacttcagagcatgtctttggctttaaacagacttggcttcaaatcattcatttattggtcctgtgtctgaccttakgcaaattatttaatccttattcttcatctgcaacattgggttgagttgcattatataatataagagacgttaatataatgtctagaaatttgatataatt

SEQ ID NO: 428313 - DNA, 201 bp, Homo sapiens
aaaaccttaggaaaaaatgtgagtatctaaaatttatgttttatctctgagaaaaaaaaaaaacccttagtttcatagtccttatgtgtgttaaaggacartcaaacgaaatgaaattcagaaacatcttttagtttaaaatgaacatacttcttaaataactgggtattaaaaatattttgtgaatcattgcctataaac

SEQ ID NO: 428314 - DNA, 201 bp, Homo sapiens
ttatttggtaagctccttgtcaatgtttagtgtattgttaagagtgctgcacattgcactttaatgaaatcaaagcaagaaagaaactgtttatccttcartatttccctggttttgaaggtatgtgattccatgttaagcagaatcctgtttcccttgcgtgttgcagggacatcagctgtgttactgaaatatgtactc

SEQ ID NO: 428315 - DNA, 201 bp, Homo sapiens
gattataggcgcccgccaccacacccttgctaatttttgtatttttaggagagatggggtttcaccatgttggccacgctggtctcaaactcctgacctcrgttgatccacctacctcagcctgccaaagtgctgggattacaggcatgagccacagcgcccggctagaatttttctttattctgtgaaagtctattggtt

SEQ ID NO: 428316 - DNA, 201 bp, Homo sapiens
cgtctgcctactggcagtctccagtcctatttggactccagacctttccttatccattcctgggctgggtaatgttggtcctctgtcctccagtacagtarttttctacaccatttgttttcttatttgtctccctcagtagattttgcatccataggcaagtgcaactctgtcttgttcacatttgcagcatccattctt

SEQ ID NO: 428317 - DNA, 201 bp, Homo sapiens
tttattaaggtttgactggcccatggcatgaagttgcatgtgttttctgcacttctgaatgttgctggagttcactgttgcactgaatgtgcctagcaggrcaccatacaaggggacaaagacagccagtgcatttgaacgagggcatgtttaagtagggagtaagaagccagagattccagtcagttaaccggtcccttc

SEQ ID NO: 428318 - DNA, 201 bp, Homo sapiens
tctctttttttttttttttgaaaaaaaaagggaggcactattatcatctaaaggttattcttccccaacctggcaggcaatgttgttgcagctgatcccaraatctctatataataaaccttttcagggaaacgttgagtctggctttgttgttgttgttgttgttcagtggtttattttctcacctcctggagcgacaac

SEQ ID NO: 428319 - DNA, 201 bp, Homo sapiens
tttgagtgtattcaaagaacttttaactatcaccatcaatcttaattttatattttggaatggaattaaggatagggattttggccctgtttcaaagatgttgtgtgtgtgtgtgtgtgtgtgtgtgtgtgtgtgtgtaattttccaagtttaacaggatctgtagtgaaaagttttgacttcgaaccatgtgggtcagta

SEQ ID NO: 428320 - DNA, 201 bp, Homo sapiens
ggcctcctagccaattctatttaaattagcaacccatctgcctctctcagacttctgttcccctatactttattctttaaaacattgcatgtattaccttytagtgaactatataatttactacctataatgacaaataatgatattaaaattaatgtaaacctagtttactttgtatattgctaaaatgtaagcttcacc

SEQ ID NO: 428321 - DNA, 201 bp, Homo sapiens
actacctataatgacaaataatgatattaaaattaatgtaaacctagtttactttgtatattgctaaaatgtaagcttcaccaaagcattgtttttgtatrtattcttagtgtctgcaatagtgcttagcatatgtgttcaataaatattagttgcatgcacattgatttaggtacatatgttttccttaaattcctcatg

SEQ ID NO: 428322 - DNA, 201 bp, Homo sapiens
tgagtgtattcaaagaacttttaactatcaccatcaatcttaattttatattttggaatggaattaaggatagggattttggccctgtttcaaagatgttgtgtgtgtgtgtgtgtgtgtgtgtgtgtgtgtgtgtaattttccaagtttaacaggatctgtagtgaaaagttttgacttcgaaccatgtgggtcagtaaa

SEQ ID NO: 428323 - DNA, 201 bp, Homo sapiens
aatttttatctattttaagaatgctttccttctctccaaattggctaatttaaaaatatgtcataaagatcatatgtttggctgtacctgtggttactaattttttttttaaatatcaaagttcattagagaaattgtaatgaaagtgaatactgtaatactgttgtgtaacattgcaaagatatattagtccatttttgc

SEQ ID NO: 428324 - DNA, 201 bp, Homo sapiens
gcagacagaattcccattagaagaatgctttttggacctaatccaatgaaaataatctattaaaacaagttgtctaatcttatgagttaacatgaaaagaraagtggatgcagggtgaattgcaaaatgtttgcacgtgtaagttcagtttatttaattttaaataattagggcatggcaatgattagtgctaattggagc

SEQ ID NO: 428325 - DNA, 201 bp, Homo sapiens
gtaataagatacataggtctgaaaaatgacactttgtgaaaactcagattatatttttcaccttttcccacgttacccatccccagactcaatttttgttkttaagatttttttttttttttttttttttgagacggagtctctctctgtcgcccaggctggagtgcagtggcgggatctcggctcactgcaagctccgcc

SEQ ID NO: 428326 - DNA, 201 bp, Homo sapiens
tcagattatatttttcaccttttcccacgttacccatccccagactcaatttttgttgttaagatttttttttttttttttttttttgagacggagtctckctctgtcgcccaggctggagtgcagtggcgggatctcggctcactgcaagctccgcctcccgggttcacgccattctcctgcctcagcctcccaagtagc

SEQ ID NO: 428327 - DNA, 201 bp, Homo sapiens
ggagtgcagtggcgggatctcggctcactgcaagctccgcctcccgggttcacgccattctcctgcctcagcctcccaagtagctgggactacaggcgccsgccactacgcccagctaattttttgtatttttagtagagacggggtttcaccgttttagccgggatggtctcgatctcctgacctcgtgatccgcccgcc

SEQ ID NO: 428328 - DNA, 201 bp, Homo sapiens
gggatctcggctcactgcaagctccgcctcccgggttcacgccattctcctgcctcagcctcccaagtagctgggactacaggcgcccgccactacgcccrgctaattttttgtatttttagtagagacggggtttcaccgttttagccgggatggtctcgatctcctgacctcgtgatccgcccgcctcggcctcccaaa

SEQ ID NO: 428329 - DNA, 201 bp, Homo sapiens
gtgatggacatgaagtcatgttttggagacatcatgctgtgtttttaacggtccatttaaaaatgtattttatctctaagtgttaagtgttcccatgctgyactgataataatcttaatttttcccttctctcttttggtttcagaggaagaacttgtcgcttttcctaagcattagtttgttaattttctggggttcctc

SEQ ID NO: 428330 - DNA, 201 bp, Homo sapiens
ccagctaattttttgtatttttagtagagacggggtttcaccgttttagccgggatggtctcgatctcctgacctcgtgatccgcccgcctcggcctcccmaagtgctgggattacaggcgtgagccaccgcgcccggccaagatgtttttaaataactagccttcgggtactgttgatatcagtactttaccccttctca

SEQ ID NO: 428331 - DNA, 201 bp, Homo sapiens
atagccaaatacaattccattgtatgaatattaaacattttatattaaatattaaatattaaatattttcatcagctgatggccatttgagttgtttccayctgttggtgattgtggatgaatagtactgccttgaacaatattttacaagtttttccttgaaaacctgtttttaattcttttgggtatatatgtagcagt

SEQ ID NO: 428332 - DNA, 201 bp, Homo sapiens
tgattacaaaggcacattttgaaacagaacttctgagatcagcgtttggatagtcattgaaccacactatctccaagaagaggataatgaaaataaatctstgtcctatggacattgatattttctaccttttctagactaagtacaatgtggatggctatttgtggcgttatgattcaaggcttgtgtgatgcacagtgc

SEQ ID NO: 428333 - DNA, 201 bp, Homo sapiens
cttctgagatcagcgtttggatagtcattgaaccacactatctccaagaagaggataatgaaaataaatctctgtcctatggacattgatattttctaccytttctagactaagtacaatgtggatggctatttgtggcgttatgattcaaggcttgtgtgatgcacagtgcctttgagttacttctaagtagcctcttta

SEQ ID NO: 428334 - DNA, 201 bp, Homo sapiens
ttcttggcaatctttagcatttcttggcttgcagctgcataattccaatctctgacttcattgtcacatgatgttgtcctgtgtatttctatcttcacatsgccatcttcttaaaaggacatcagtcatatgggattggggcctacccataataatgaattacatctgtaatgatcctgtttccaaataaggtcacattct

SEQ ID NO: 428335 - DNA, 201 bp, Homo sapiens
gtctcaagaagttatggaaaaaattgagatattcaagtcatataattattgtaaaaggatttgatgtagaggaagtgtgagccgtattttaatttttatgyatgtgggcattaaattagaaatcttactgaaatgggaaaatttcccctgtccccctcacagcgcgtgtgaagagggtgtggctcacttcttctgatcaaa

SEQ ID NO: 428336 - DNA, 201 bp, Homo sapiens
tttttagtttttttttctaattttcttaagtttttgtttgtttttgagacagagacactctgtcacccatgcttgagtgcagtggctaatcagagctcacygtagtcttgatttcctgggctcaagcaatcctcctacctcagcctcctgagtagctgggaatacaggtgtatgccaccatgtctggctaatttttttttt

SEQ ID NO: 428337 - DNA, 201 bp, Homo sapiens
gagagtgttttgatattgtatatcccactgctgtgcattttgcttttatattattttccattgaacttaagagatgttctcataaaattaaggtaacaatmgcaagataagtatattagaacatggaaaatatttttaattttgagacacttaattataaaataatagcttcaataaataacaaatatagaaaagtgtagg

SEQ ID NO: 428338 - DNA, 201 bp, Homo sapiens
agaaaagtgtaggaactggccatgcacggtggctcacacgtgtaatcccagaactttgggaggctgaggcgggcagatcataagttcaggagttcaagacragcctgaccaacatggtgaaacccggtctctactaaaaatacaaaaattagccaggcgtggtggcacacatctgtaatcccagctactcgagaggctgag

SEQ ID NO: 428339 - DNA, 201 bp, Homo sapiens
aaattagccaggcgtggtggcacacatctgtaatcccagctactcgagaggctgaggcaggagaatcacttgaatgtgggaggcagaggctgcagtgagcygagatcgtaccattgcactccagcctgggagacagagtctccaaaaaaaaaaaaaaaagtgtaggaaatgacacatcagttatctacttgcctataacca

SEQ ID NO: 428340 - DNA, 201 bp, Homo sapiens
gaatccgaagttgagaaaattggcctggcgtggtggctcatgcctgtaatcccagcactttgggaggctgaggcaggtggatcacttgaggtcaggagttygagaccagcgtggccaacatggtgaaaccccatatctactaaaaatacaaaaattagctgggcttggtggcacgtgtctgtaatcccagctactcaggag

SEQ ID NO: 428341 - DNA, 201 bp, Homo sapiens
tattaccatattgaaatttatatctatttctgttttttcttttataaacaatgctaagtatccttgtatttagatcttagaggttttgttagaatgtaggtaactaactagagatttccaagtcatacatgatacaaactattaattttattgtgtactttcattttcacaactgtacaatttatatttccccaacaatgt

SEQ ID NO: 428342 - DNA, 201 bp, Homo sapiens
agcagtgatgctaatagaaatcctttggaaaaataaataaaaggaggccgggattctaagagaggtaagccaacatagaagagttcatctgtgaatcgctkgaatccgaagttgagaaaattggcctggcgtggtggctcatgcctgtaatcccagcactttgggaggctgaggcaggtggatcacttgaggtcaggagtt

SEQ ID NO: 428343 - DNA, 201 bp, Homo sapiens
attaccatattgaaatttatatctatttctgttttttcttttataaacaatgctaagtatccttgtatttagatcttagaggttttgttagaatgtaggtaactaactagagatttccaagtcatacatgatacaaactattaattttattgtgtactttcattttcacaactgtacaatttatatttccccaacaatgta

SEQ ID NO: 428344 - DNA, 201 bp, Homo sapiens
atggctccagggtgcttcagtcactcacttgtgactgttcacttatttgcccaggctctgttgatgcgtgagaagagggcacatgtgacttggtcccgggrcagcctgctggcctcagctggcatgtgggacagggcgcaggcccgcaatttgttcagctagtgttgactcctggggcgccctcctctctcactcctcccc

SEQ ID NO: 428345 - DNA, 201 bp, Homo sapiens
ttatttgtcttttctctgaatttcctggctatattattaattcatttttttttctgttgggttttttgcctttggtggctcatatttaagacattttttcycctaatattctgggaacaaatcttatcttctgcatgttgcagcaatacttgaatattttaaccttgggttctaacctcctttgtagtctggcctttgtga

SEQ ID NO: 428346 - DNA, 201 bp, Homo sapiens
aacccactgggagaaaggaacaactccagatgcgctgcttaaagagctgtaacactcatcgggaaggtctgcagcttcactcctgagccagcgagaccacraacccaccagaaggaggaagctccgaacatatctgaacatcagaaggaacaaactccggacacgctgcctttaagaactgtaacactcactgcgagggtc

SEQ ID NO: 428347 - DNA, 201 bp, Homo sapiens
gcagcttcactcctgaagccagcaagaccacgaacccactgggagaaaggaacaactccagatgcgctgcttaaagagctgtaacactcatcgggaaggtytgcagcttcactcctgagccagcgagaccacgaacccaccagaaggaggaagctccgaacatatctgaacatcagaaggaacaaactccggacacgctgc

SEQ ID NO: 428348 - DNA, 201 bp, Homo sapiens
ggcgaaggtctgcagcttcactcctgaagccagcaagaccacgaacccactgggagaaaggaacaactccagatgcgctgcttaaagagctgtaacactcrtcgggaaggtctgcagcttcactcctgagccagcgagaccacgaacccaccagaaggaggaagctccgaacatatctgaacatcagaaggaacaaactcc

SEQ ID NO: 428349 - DNA, 201 bp, Homo sapiens
agactcttgcatgtgagtttttcagactttttttgtttattttctgattgagacagggtctagctctgttacccacacaggagtgtagttgcacaatcacrgctcacagcagcctcaacctcccagactcacgcaatcctccttcctcagcctctcttgtagctgggactacaagcacaagccaccacacctggctgattt

SEQ ID NO: 428350 - DNA, 201 bp, Homo sapiens
cttagagtattaagggcttaatgaagttcttttgtgatttcaattaaatgctgaaactttaaaagaaactctggttagagtttgatgcttgaaaacaacakatggtttgaaagtcaagctcttaatttcaaatcaattttaattctttcaaagagatttagagagagtaattgttttcatctaacccaatgtcatcgacaa

SEQ ID NO: 428351 - DNA, 201 bp, Homo sapiens
atattttaaaagccaatttatatggaaatttatttaatacacagtcaatacatggagacttgtaaaaatcaaaatcaaaatggaaaatcaatctactgttytgtaataggtcttcttttaataaaggattttgctcatgactgggttcaactgttactagttaacactcaaaatatcagtttagaaaaggtagcaacttat

SEQ ID NO: 428352 - DNA, 201 bp, Homo sapiens
attgtcccttttgtttctagactaggttgtggttttgcctaagttgtgacccccccccaatatcaattgcattgaatgaaatatgatatatttaccgtttrtgattttccatactcaacacctgtgccactctcctccaagtagtattcccacttttatgaccccctttcctttcatttgccttacacttgactttgcgag

SEQ ID NO: 428353 - DNA, 201 bp, Homo sapiens
ttaccatattgaaatttatatctatttctgttttttcttttataaacaatgctaagtatccttgtatttagatcttagaggttttgttagaatgtaggtaactaactagagatttccaagtcatacatgatacaaactattaattttattgtgtactttcattttcacaactgtacaatttatatttccccaacaatgtat

SEQ ID NO: 428354 - DNA, 201 bp, Homo sapiens
taccatattgaaatttatatctatttctgttttttcttttataaacaatgctaagtatccttgtatttagatcttagaggttttgttagaatgtaggtaactaactagagatttccaagtcatacatgatacaaactattaattttattgtgtactttcattttcacaactgtacaatttatatttccccaacaatgtatg

SEQ ID NO: 428355 - DNA, 201 bp, Homo sapiens
tgaactggcatttttctactctttccaacacaattctatatcaggattaaaagaaggtgtaaaactgttccagaatatgaaaatggcctgctaataggtgtatatatatatatataaagacctagatactccaaaagctactttggcatgcttgtctgatgagcacaaattaagtcaagaattcagtgagcaactacacat

SEQ ID NO: 428356 - DNA, 201 bp, Homo sapiens
taagtttttaaggtgaataatgctcataaaatttttacagctgtgtcttatgaaattctgtttcctttttttggttgcttatatgtattctataaagacaytgaaaggatgcaaactattctcttgctttttttgtttttatgttaatctgttaggtcatagatctgtgttaagatcattgttataaagcatattgttatt

SEQ ID NO: 428357 - DNA, 201 bp, Homo sapiens
gaactggcatttttctactctttccaacacaattctatatcaggattaaaagaaggtgtaaaactgttccagaatatgaaaatggcctgctaataggtgtatatatatatatataaagacctagatactccaaaagctactttggcatgcttgtctgatgagcacaaattaagtcaagaattcagtgagcaactacacatt

SEQ ID NO: 428358 - DNA, 201 bp, Homo sapiens
gaattgcttgaacctggtgagcagagaatgcagtaggccaagatcacgccactgcactccagcctggtgacagcctgtctcaaaaaaaaaaaaaaaaaaarggaaaaaaaaacaatgcaggttttgcattactgttattcccacgtacagcagatgctgcagattcactgaccacacttagggtaataaggctgtagttca

SEQ ID NO: 428359 - DNA, 201 bp, Homo sapiens
cctgaaacaccccaccccactcatggcccagtcaactgccttacttgcaggctttaccatctcagttgatggaatctccatttccccagcagctctggccragaattctgaagtcatccctgcctcctcttttcccttcacagttgacctcctcttttcccttcatagctgacatccattccatcagcagatcctctctgc

SEQ ID NO: 428360 - DNA, 201 bp, Homo sapiens
gcatgctgcctaggagactatactagcagtaagtgactagatggcatggaccccatgctactataatcgttacaggttttgtcccaactaatcctatctgwgtgtgctggcgagcagcgattttcatgcaactgtaagtctttgtgtgctggtcccatcagcccctgtcacgtggtcctggcagtcctgtttggcctgcag

SEQ ID NO: 428361 - DNA, 201 bp, Homo sapiens
tggaatatatatataggaatatatatacctggaatatatatataggaatatatatatatctggaatatatatatagagagagtaatatatatatatatatwtttttttttcttttttttttttgagacagattctcgctctgttgcccaggctggcatgcagtggtgcgatcttggctcaccacgacctccgacttctggg

SEQ ID NO: 428362 - DNA, 201 bp, Homo sapiens
tgagaggtgacagcgtgctggcagccctcacagccctcgcttgctctgggcacctcctcggccttggcgcccactctggtcacgcttgaggagcccttcarcatgccgctgcactatgggagcccctttctgggctggccaaggccggagccagcttcctcagcttgcggggaggtgtggaggcagaggcgtgggcaggaa

SEQ ID NO: 428363 - DNA, 201 bp, Homo sapiens; identical to SEQ ID NO: 251021

SEQ ID NO: 428364 - DNA, 201 bp, Homo sapiens
tgaacccaggaggcagaggttgcagtgagccgagatcgcgtcattgcaccccagcctgggcaacaagagcgaaactctgtctcaaaaaaaaaaaaaaagaraaaggaaaaagagagagtcaaaattgtttcaattttgcagcgtctgacaatttttttccttcatagattcctgcaaaattggtggttctatttcaattta

SEQ ID NO: 428365 - DNA, 201 bp, Homo sapiens
gatgctggtaggaaggttatgttatttgcatgttttacaaatagggaaattgaagcttggagatgatagggattttccttttggtcacatagctagaaagyggcaaagccaagtctggtgtggtggctcacgcctataatctcagcactttgggaggccaaggtgggcagatcacaaggtcaagagatagagaccatcctg

SEQ ID NO: 428366 - DNA, 201 bp, Homo sapiens
tgcttggttgttgacagactcgtcttcatgcttttttgttctttgggctacccaggagtcacctttgataaaatgtcagtaacatactgctgtgataggattttttttttttttcttattggcaagaaaaagccatgtttttgccgtgatctggattgctatcttctgtactttttgagactccccatttgtcaaatggtt

SEQ ID NO: 428367 - DNA, 201 bp, Homo sapiens
ttgggtgcagtggttctcgcctataattctagcactttaggaggcagagatgggtggatcacttgagcccaggagtttgagacctgcctgggcaacatggdgaaaccctgtctccacaaaaaattcaaaaaatagctgagtgtggtggtgcatacctgtagttgcagctacttggggggctgaggtgggaggatcacctga

SEQ ID NO: 428368 - DNA, 201 bp, Homo sapiens
ggaatttgggcaaactaaaaacaatcagtttagttctcaacacagattaagattaaaaacacagggtacatcatagatgacttaatagtatgcatgaagcrtacctaccagatgataatgagatggtaatgacacttgtggttctttttcctagcaaaaagacattctttgtgtttttcttatgtgccaggtgttgggcta

SEQ ID NO: 428369 - DNA, 201 bp, Homo sapiens
ttgaacccgagaggtggaggttgcagtgagccaagacgagatcacgccactgcactccagcctgggcgacagaacgagactccatttcaaaaaaaaaaaamaaaaaagaaaaggcatacaaatcttttaacatgcataaggggaaaatcagagtgatgacaccaccatgcagtgagatatggatgtttatatccccttttt

SEQ ID NO: 428370 - DNA, 201 bp, Homo sapiens
ataattgatattttattttagagatctcagttatttacaaataattgtcctcattagcacatgtaaatatttttctactcacataaatattttatttgcattttttactcatcatttcttttttttaaaaaaattctcttttctctagtatttacttttgccctgttcaacactagctactggattgatcacagtgaatgc

SEQ ID NO: 428371 - DNA, 201 bp, Homo sapiens
gaagcagtacttttcccttttaacatatatattcagaaaactgggtgctagtatatagagcttaatacaattctacagctttagatgattttatatatatatatatatatatatatattttttttttttttttttttttttttgagacggagtctcgttctgtcacccaggctagagtgcagaggcacgatctcagctcac

SEQ ID NO: 428372 - DNA, 201 bp, Homo sapiens
tacaaaaaaaaaaaaaaaaaaattagccgggcatggtggtgggcgcctgtagtcccagctacttgggaggatgaggcaggagaatggcgtgaacccgggargcagagcttgcagtgagcagagatcctgccactgcactccagcctgggccacagagtgagactccatctcaaaaaaaaaaaaaaaaaaaaaaaaaattag

SEQ ID NO: 428373 - DNA, 201 bp, Homo sapiens
tcagataggaatttgggcaaactaaaaacaatcagtttagttctcaacacagattaagattaaaaacacagggtacatcatagatgacttaatagtatgcrtgaagcatacctaccagatgataatgagatggtaatgacacttgtggttctttttcctagcaaaaagacattctttgtgtttttcttatgtgccaggtgt

SEQ ID NO: 428374 - DNA, 201 bp, Homo sapiens
gtaaaactgtagttttttcatggaaaaatgtctattcatagcttcatagtacctagcacagagcctgacacatagtaggcactcattagttacatttatgmcacatcaataaattaggattcagttgatcatcatttgacttaaaggagaaacataatcacacaagtaaagagacgattttaactatagtaattattggcc

SEQ ID NO: 428375 - DNA, 201 bp, Homo sapiens
tttaactgatctctacacttgcatattttctgtttttttgtctgtttcttgggaggaggaacaggtttattgatacataattcacatatatacagttcacmcatttaaactcaaactcaatggtttttagtatattcacaggtgtctgtgactgtctctacaatgattagaatattataatcacttctaaaagaaaccctg

SEQ ID NO: 428376 - DNA, 201 bp, Homo sapiens
ccacattcatgcccattctataatctgtagagtttaatcctattgattataaaaatgaagcagtacttttcccttttaacatatatattcagaaaactggrtgctagtatatagagcttaatacaattctacagctttagatgattttatatatatatatatatatatatatattttttttttttttttttttttttttga

SEQ ID NO: 428377 - DNA, 201 bp, Homo sapiens
ctctactaaaaatacaaaaaattaaccaggcatggtggcgggtgcctgtaatcccagctattcaggaggctgaggcagagaattgcttgaacccgagaggyggaggttgcagtgagccaagacgagatcacgccactgcactccagcctgggcgacagaacgagactccatttcaaaaaaaaaaaacaaaaaagaaaaggc

SEQ ID NO: 428378 - DNA, 201 bp, Homo sapiens
ggagttcgagaccaggctggccaagatggtgaaaccctgtctctactaaaaatacaaaaaattaaccaggcatggtggcgggtgcctgtaatcccagctaytcaggaggctgaggcagagaattgcttgaacccgagaggtggaggttgcagtgagccaagacgagatcacgccactgcactccagcctgggcgacagaac

SEQ ID NO: 428379 - DNA, 201 bp, Homo sapiens
tgggtagcttatataagtccaaaaatatgattgttagccttgccttttgattaataaaatgggggaaatatgttgttaaaaaaaaaaacgaaaaagggcargaaactatttgaaaaccaggcattgggttgaattggaagtgaatacacttcaaaaggtctgaggagaaaatattagaaaccactgatttggataatgtct

SEQ ID NO: 428380 - DNA, 201 bp, Homo sapiens
gcacaattcaggaaaggtggagcctcttgcttgtctgaaccaaagagctctaatgaggccatgaggactctgtttctttcttcatctcttggtccggctayggtgatcttcatgaccattggcaacctagagttttctccctaattctctctgaagtgctctgtggaggactttaggtatcctgacttggggaatggtagg

SEQ ID NO: 428381 - DNA, 201 bp, Homo sapiens
tctgagagaggtcctagaaccaagctccccactgataccaaggggtgactgtacgtgctaatggtgttattttgattgtgttacttaaactcctttatcckctgttctctcttatatagaataagaatagcaatacctacttaatagagttgttgggagaatttaatgagataagttatgtaaagtacttggaaccatact

SEQ ID NO: 428382 - DNA, 201 bp, Homo sapiens
cttgcagtgagtaccttctctgcagaggagtcaagagtgacatttcgaaaatgaaagtcaaatcacaaaatccctcactgaatatttccccccaaatatcrcacataaaataacccccagacttcttatcgtggcacatgaaaccctatgtgattggacccttgcctatctctgtgacttcatcttgactttccctctcat

SEQ ID NO: 428383 - DNA, 201 bp, Homo sapiens
tattttcaaaggacaggctgactgttatttttatgggctaatacaactggtaaccttcagtagaagccattggtcaattaacattcaaaaaatcctagggyccttaagaataatgctaaatctactctgtttatgctctgtaagtggaactggatttccgagatgacaacacatctgtttacagcatggcttactgaatat

SEQ ID NO: 428384 - DNA, 201 bp, Homo sapiens
tggaggacctttgataagctttacctccacagccactgcttatgctatatcttcattgctctcctaccccaactgttaccgttctaagcttcttatcattytcagaacatgacatgacgtatacttccctgccccatgctttgctaagctgttctgatttaatcaagagtgttttttcttacccacctgcttgggaaattc

SEQ ID NO: 428385 - DNA, 201 bp, Homo sapiens
accttcagtagaagccattggtcaattaacattcaaaaaatcctagggcccttaagaataatgctaaatctactctgtttatgctctgtaagtggaactgkatttccgagatgacaacacatctgtttacagcatggcttactgaatatattaagcttaatgttgagtcctactgctcagaaagaaattgttttcaaaaga

SEQ ID NO: 428386 - DNA, 201 bp, Homo sapiens
taccaggcatggaggacctttgataagctttacctccacagccactgcttatgctatatcttcattgctctcctaccccaactgttaccgttctaagcttsttatcattctcagaacatgacatgacgtatacttccctgccccatgctttgctaagctgttctgatttaatcaagagtgttttttcttacccacctgctt

SEQ ID NO: 428387 - DNA, 201 bp, Homo sapiens
tctgtttacagcatggcttactgaatatattaagcttaatgttgagtcctactgctcagaaagaaattgttttcaaaagattatcattgccagtgcacctygtcaccgaagaactctgacagaaatgcacaaggagattaatgctgttttcatgcatagtaacacagtatttgttctgtagcccatggatcgatcaaggaa

SEQ ID NO: 428388 - DNA, 201 bp, Homo sapiens
aagcctgtactccttaccaggcatggaggacctttgataagctttacctccacagccactgcttatgctatatcttcattgctctcctaccccaactgttrccgttctaagcttcttatcattctcagaacatgacatgacgtatacttccctgccccatgctttgctaagctgttctgatttaatcaagagtgttttttc

SEQ ID NO: 428389 - DNA, 201 bp, Homo sapiens
caaaatgggataccattataatgaggatttcctggtgcttaaattaacatttgaatgcatttctcagagagattccaatgtaaatatattctcatttagtmatcacacaatcagagcagaactttgggaggaataggggtttaaaaattgcgtaattattagaaatttccatagagggatatcttattaatttgtggtaga

SEQ ID NO: 428390 - DNA, 201 bp, Homo sapiens
tgaatgcatttctcagagagattccaatgtaaatatattctcatttagtaatcacacaatcagagcagaactttgggaggaataggggtttaaaaattgcrtaattattagaaatttccatagagggatatcttattaatttgtggtagatatagaatacctatgatatcacgcctattatgtttgaagataattataatt

SEQ ID NO: 428391 - DNA, 201 bp, Homo sapiens
ctgggattacaggccttatctgtaatattagtaaaagactctcacctcacctcccagcttgtatttcttgccttttagcatgtcttgtacttttttctttygactcagacatgatgtattgggtaataagaaatgaggtgaacaggctttattgtgagattttatgtaaatctggttaggagttggactgtattttgctat

SEQ ID NO: 428392 - DNA, 201 bp, Homo sapiens
ctttggcttactgagacaaatctatagataaaattggttttggatttcagaaaattcaatacataaaaatatgatttacttgacagatgatagatacatgrggcgagtggcaggggtgaccatttactttaagaaaacttgaggattcgtcatgagttttctttgagtacaccaaacttggatgatcatcagctgctcatg

SEQ ID NO: 428393 - DNA, 201 bp, Homo sapiens
agggtttcaccgtgttagccaggatggtcttgatctcctgacctcgtgatccacccgccttggcctcccaagtgctgggattacaggcgtgagccactgckcccggccagcttttatttttttgagacagggtctcactctgtcacccaggctagagtgcagtggtgccatcacaaatcactgtagccttaacctcccagg

SEQ ID NO: 428394 - DNA, 201 bp, Homo sapiens
attggtaatggtaatggtagtagtggtggcggtggtggtggtggtggtggtggtggtggtggtggtggtgatgatgatgatggtgattagtattcataatkgtggtggtggtggtggtggtggtattagtaatggtggtggtggtggtggtggtggtagtggtggtagtgttgttgatcgggtggtagtgtgtttctcaca

SEQ ID NO: 428395 - DNA, 201 bp, Homo sapiens
aaaaataaataaaaaataaaaataaaaaaaataagaaaagaatttgaggcccacaaaaattaggcccacgattagttgagaggagagacaacggtatattmtagcctctcccaaccaggttgaatgcttttgtcactgtaaacatatttctcttttaatgcttaaaaaattagtttatggacattttcagttggccatttg

SEQ ID NO: 428396 - DNA, 201 bp, Homo sapiens
cgtgagccactgcgcccggccagcttttatttttttgagacagggtctcactctgtcacccaggctagagtgcagtggtgccatcacaaatcactgtagcmttaacctcccaggctgaaggcattctcccacctcagccttgacctcctaggctctagcgattccctcaccccagcctacagcatgcatcaccatgtctgg

SEQ ID NO: 428397 - DNA, 201 bp, Homo sapiens
ttgaccagagttgttgttggtggtgttggtattggtaatggtaatggtagtagtggtggcggtggtggtggtggtggtggtggtggtggtggtggtggtgrtgatgatgatggtgattagtattcataatggtggtggtggtggtggtggtggtattagtaatggtggtggtggtggtggtggtggtagtggtggtagtgt

SEQ ID NO: 428398 - DNA, 201 bp, Homo sapiens
ttttgagacagggtctcactctgtcacccaggctagagtgcagtggtgccatcacaaatcactgtagccttaacctcccaggctgaaggcattctcccacmtcagccttgacctcctaggctctagcgattccctcaccccagcctacagcatgcatcaccatgtctggctaagttttgtatttattggggttttaccctg

SEQ ID NO: 428399 - DNA, 201 bp, Homo sapiens
acccaaagaggagtgattacttatgcagacctgaatgttaaataggtaaaaattaaatattaagaaattcatttatctttttattttatcttttttcttttcttctctctctctctctctctctttctctccctctctctctctctctctccctctctttgagacagagtcttgctctgttgctcaggctggagtgcagtg

SEQ ID NO: 428400 - DNA, 201 bp, Homo sapiens
cccaaagaggagtgattacttatgcagacctgaatgttaaataggtaaaaattaaatattaagaaattcatttatctttttattttatcttttttcttttcttctctctctctctctctctctttctctccctctctctctctctctctccctctctttgagacagagtcttgctctgttgctcaggctggagtgcagtgg

SEQ ID NO: 428401 - DNA, 201 bp, Homo sapiens
attccaagcttcctcgtgaaattgagctgttggtagttgttttttgttcccttcctcccaggttcctccttccctcccacctcaaatagcttcagataggktctccttatttgcattttgtcatcctagtgctccagcttgatttcagctcacattcaaatggaatgtttgcttctgcaaataacacaagcttaacgcaaa

SEQ ID NO: 428402 - DNA, 201 bp, Homo sapiens
ccaaagaggagtgattacttatgcagacctgaatgttaaataggtaaaaattaaatattaagaaattcatttatctttttattttatcttttttcttttcttctctctctctctctctctctttctctccctctctctctctctctctccctctctttgagacagagtcttgctctgttgctcaggctggagtgcagtggt

SEQ ID NO: 428403 - DNA, 201 bp, Homo sapiens
agaggagtgattacttatgcagacctgaatgttaaataggtaaaaattaaatattaagaaattcatttatctttttattttatcttttttcttttcttctctctctctctctctctctttctctccctctctctctctctctctccctctctttgagacagagtcttgctctgttgctcaggctggagtgcagtggtgcga

SEQ ID NO: 428404 - DNA, 201 bp, Homo sapiens
tttaaatttcttagaggcacacaggcaaatctgagattgaaagattctgtgctctttttttgcattaaaattgataactcaaaaccctttcatttttcagrtacagtcagtagtcacccaactaaatatatctcaacacacatgacccttcttctcatcctcatcatttgctgggggactctgctttcaggactcaatacc

SEQ ID NO: 428405 - DNA, 201 bp, Homo sapiens
atccgcccagcttggcctcccaaagtactagattataggtatgagccactgcgcctggccaaaattggcttttaatctgaataaaaacaattcttagtagmtatattaagcactactatattaagtgcaaataagttattttcttttgcagacggtttgtgatagatgactggcaagattgcaatttttacctcctcatgg

SEQ ID NO: 428406 - DNA, 201 bp, Homo sapiens
cagcctcctgagtaggtgggattacaggcatgcaccaccacgcccggctaattttgtatttttagtatagatggtgtttctccatgttggtcaggctggtytcgaactcctgacctcaggtggtctgcccacctcagcctcccaaagtgctgggattacaggcatgagccactgtgctcggccttacaattcttttacaga

SEQ ID NO: 428407 - DNA, 201 bp, Homo sapiens
cttgtccataggtctaataaagtatgtcctttgagttaggtatatatttcatttttatcttgagtgccagggctcaattaatagtagtatttggcactgtscatgtttttgtctactgggaagtatttcatttaattgaacacatatttatgggatgcatcatatttcagcactcgtgtgtataatggggtacaaagaaga

SEQ ID NO: 428408 - DNA, 201 bp, Homo sapiens
tatagtatagtatgttttcctccatacatacatacctgtgataaagtttaatttataatataaagtaggcacagtaagagattaataataataactaatamcaaaatagaacagttataatatacaagcaccactactcttgtgcttggagtccatattaaataaaataaaagtcacttgaacacaaacactgtgatacct

SEQ ID NO: 428409 - DNA, 201 bp, Homo sapiens
ctcacgcctgtgatcccagcactttgggaggctgaggcgggtggatcacgcggtcaggagattgagaccatcctggctaacagggtgaaaccctgtctttmctaaaaatacaaaaaaattagccaggtgtggtggcacgcacctgtagtcccagctactcaggaggctgaagcaggagaattgcttgtacccaggaggtgg

SEQ ID NO: 428410 - DNA, 201 bp, Homo sapiens
ttctcccaaagcaatggaaaagatctcattttgacaaagcaagctgtttatgacaaattttccaactagaaatttgcagaagaaaagttctcaaatgatgmagaagcttaatcaggcaaaaagacatttttatttgcagaaataggccctttagagggaggcaattatttatagctgataggaaaaactggtatacctgaa

SEQ ID NO: 428411 - DNA, 201 bp, Homo sapiens
tgctatttgcttatgatgattcgataaagcttttgtttcttaatttctttgccggggcattttgtgatgttgcagtgagacatggtatgaagtgtggcacrgcatgtagttatagtcaagatgactggctaaattacatgatttctgaaatgaaacacacattagtgcccttggaatagcagctgtgtgctaggtattatc

SEQ ID NO: 428412 - DNA, 201 bp, Homo sapiens
ctagcatattcgtggaaaaagcccttgtttccaaagatgggtgacttttcactaaaaccagcttgggtcagtgtgggcagttactggctctgttgggggcrgtttgaatagtaagcatttaaaccaagaatatagagtttatttaaaaaaagaaacttactataataatgcaacttgatgggtgacttttcactaaaacca

SEQ ID NO: 428413 - DNA, 201 bp, Homo sapiens
atggtctctcccgccgccctagcctccttcaccaatccattgggcagcactttataaaagcctcggctttctcatttctgtttgggagttgtacattagaygttagtggttcttttgtactaattggagaagaagacgcccctagagactgaagttgtcttctgcacttaggttagtttgggtggctaatgagacctgaac

SEQ ID NO: 428414 - DNA, 201 bp, Homo sapiens
ttctgggctgtagtttgctgactcctgatctttctaagaacttacttgctaaactcatatgtatgagtaattcaggctctccaaagagattatgtttaggrcaatatatttgtagtaatatgaatcattccatttcatacaagttgcatgcattttacaagggacttttatgttcatttttacttttatctgacactttaa

SEQ ID NO: 428415 - DNA, 201 bp, Homo sapiens
cttttatgttcatttttacttttatctgacactttaactcttctgtcatgaggatattaatcttactttaaaaattattaaattaaatcatatatgtgtgyatatatatatatgttttacagctgaggaagcaaatccttagagcagtatgatttgtccaggctgagcctgagcgtgcaagacctttactcatttttccta

SEQ ID NO: 428416 - DNA, 201 bp, Homo sapiens
tgacaggaggcagaactcaggtggtaatgcctgctcaccgctcacctcctgctgtgtggctcagttcctaacaggccatggagcaggaccggttcgtggcycaggatttggagaccgcaggtttacagcatagaaccctggatttataatcaaaggacatagcttttgagtcctaattcttctacccattgggtggtgaga

SEQ ID NO: 428417 - DNA, 201 bp, Homo sapiens
cctttctgaattctacctgcttttttgtaaaacacgaattcacaaagtttacaaacatcatgatgttttagaaagggctacttgagataatacatgtaagrcactctgtaaaatgtttaataaacattcataattagcgttgccactaataaaccattttctccacatcacatcccaaactgagatataataatagaacag

SEQ ID NO: 428418 - DNA, 201 bp, Homo sapiens
tggtgtgtttcatttaggagttattacagaaacctattcaagagtggaatttcctgatattacttaaaaggtaatgtttgagttagaagctaaataaagcstctagtacctcctgtaatttttattactatctggtaatcaacatttatagcacaatgttaagactttttatcctttacttttattaaggtttgactggcc

SEQ ID NO: 428419 - DNA, 201 bp, Homo sapiens
agagttgttgttggtggtgttggtattggtaatggtaatggtagtagtggtggcggtggtggtggtggtggtggtggtggtggtggtggtggtgatgatgrtgatggtgattagtattcataatggtggtggtggtggtggtggtggtattagtaatggtggtggtggtggtggtggtggtagtggtggtagtgttgttga

SEQ ID NO: 428420 - DNA, 201 bp, Homo sapiens
gcccctgccaccaggcccggctaatttttttgtatttttagtagagacagggtttcaccgtgttagccaggatggtcttgatctcctgacctcgtgatccrcccgccttggcctcccaagtgctgggattacaggcgtgagccactgcgcccggccagcttttatttttttgagacagggtctcactctgtcacccaggct

SEQ ID NO: 428421 - DNA, 201 bp, Homo sapiens
ccaaagtgctgggattacaggcattagccactgcgcccggccacgggaaagttttattggcccggataaaacatcaaaccagccataacattccattaggscaaaacctaacccagaacaagttccttaactctcttcaattctatgaaggctgagagaagtgaggaagctgtggaagaaaagtttgaagctaacagagat

SEQ ID NO: 428422 - DNA, 201 bp, Homo sapiens
atctcggctcactgtaacctccgcctcctgggttcaagtgattctcctgcctcagcctcccaagtagctgggattataggcgcccgccaccacacccttgytaatttttgtatttttaggagagatggggtttcaccatgttggccacgctggtctcaaactcctgacctcagttgatccacctacctcagcctgccaaag

SEQ ID NO: 428423 - DNA, 201 bp, Homo sapiens
aagcagagagggagggaggaaaggagggaggggagcaatggttgaaaaattaactaagtggtactatgctcagtacctgggtgatgggatcagttgtaccrgaaaccacagcatcatgcaatatatacatgtaagaaacctgtacatgaaccccttgaatctaaaaaaaattttaacaaatatataggtatcaggtttttt

SEQ ID NO: 428424 - DNA, 201 bp, Homo sapiens
acaaagtctgctatcctaagataacctaaaagtcacagaagtgcttcatgagaccagaaactatagctttgtctctggtatctcccgcggagctcagattsaataacttatatctcactgaacttttttttctgagatgaaaatcctacctgtttctattctacttaaaaatttctgagttcacctctttctagtatttgg

SEQ ID NO: 428425 - DNA, 201 bp, Homo sapiens
tcatttaggagttattacagaaacctattcaagagtggaatttcctgatattacttaaaaggtaatgtttgagttagaagctaaataaagcgtctagtacmtcctgtaatttttattactatctggtaatcaacatttatagcacaatgttaagactttttatcctttacttttattaaggtttgactggcccatggcatg

SEQ ID NO: 428426 - DNA, 201 bp, Homo sapiens
tgtaatttttattactatctggtaatcaacatttatagcacaatgttaagactttttatcctttacttttattaaggtttgactggcccatggcatgaagytgcatgtgttttctgcacttctgaatgttgctggagttcactgttgcactgaatgtgcctagcagggcaccatacaaggggacaaagacagccagtgcat

SEQ ID NO: 428427 - DNA, 201 bp, Homo sapiens
atgcattatgtcatgcagagactgtagttatccacagagactgtatttattcctagagacaagtacaaaatcctgtaaaacaccaactccttttaaaggakttcatgaataaagagacattttctttttcattctgtgtaggagggtctcaagaagagactggtctcccaggagcccaggaaatacagagtttcaggaagg

SEQ ID NO: 428428 - DNA, 201 bp, Homo sapiens
tcactgttgcactgaatgtgcctagcagggcaccatacaaggggacaaagacagccagtgcatttgaacgagggcatgtttaagtagggagtaagaagccrgagattccagtcagttaaccggtcccttccacttcttattcccctttgcttaatccgaatttactgagtgccagacatgcacctggcaaaaactttttgc

SEQ ID NO: 428429 - DNA, 201 bp, Homo sapiens
tattatgttgatatttatgcatatatataaacatttatctctctttgtattgtatgtagtttatttcttttatttgccatatggattcagacatatggctrtaccatgatttttttattaccatattgaaatttatatctatttctgttttttcttttataaacaatgctaagtatccttgtatttagatcttagaggttt

SEQ ID NO: 428430 - DNA, 201 bp, Homo sapiens
aaaatatttttaattttgagacacttaattataaaataatagcttcaataaataacaaatatagaaaagtgtaggaactggccatgcacggtggctcacaygtgtaatcccagaactttgggaggctgaggcgggcagatcataagttcaggagttcaagacgagcctgaccaacatggtgaaacccggtctctactaaaa

SEQ ID NO: 428431 - DNA, 201 bp, Homo sapiens
ctatttttaaggtggctgcaactgcaaacatcaaattctcaaagcaggtcacccaaaatgggaaggggaaagaatgagagcccttttttctgttattggtkggaaagtattttgcaaaagagtacattatgtctcattgatcagagcttcagagcatgggccaactctaattataacatacggcctggcagatcataagta

SEQ ID NO: 428432 - DNA, 201 bp, Homo sapiens
agactcacgcaatcctccttcctcagcctctcttgtagctgggactacaagcacaagccaccacacctggctgatttttgtacttttttttttttttgtaragatgggctcttactttgttgcccagggtggtctcgaactcctgaactcaagtaatcctcccaccttggcatcccaaagtgctgggattgcaggtgtgag

SEQ ID NO: 428433 - DNA, 201 bp, Homo sapiens
ttgtgtttcaggaatgtttctccattttgtggctctggtttcttctgggtttgctccattttctgtggtactctataacaatgggaaagatgattcctgtrtctttataaacatagatagcatccttactcttctcaatttcagaaggaaagagaactgttttgtctcagtgtctgtattaatcccggaaaaagttgttgg

SEQ ID NO: 428434 - DNA, 201 bp, Homo sapiens
gtcaaaagttagtagtaattactacatttaatgttgaagcatagtggtcatttccattaatattcagcttcttggggtagtgacattttcttattcattaytgtatcccccatccctagagaatttccaattgcactgatttttttaaataagttatgaaatccatatcagagtagaaaatatcctatttttcaataagtg

SEQ ID NO: 428435 - DNA, 201 bp, Homo sapiens
ttatatcagttaccaccttgaagtcagggtgagagtactttgatgaacagaggtctgttgaagaactggacttggtgggtatgaagtgggtattgtagggkttagtgtggtttatagccgtggtccccaacctttttggccggtttcatggaagacaatttttccatggactgggtggtgatagttgccagatgaaactgt

SEQ ID NO: 428436 - DNA, 201 bp, Homo sapiens
cagaaatatatcagactagtactttacatatgtatatatggatcattatgtttatataaatattccccaacctcactgtaatagtgtttatctgtatctctttcttttaaaatgtgtgaactcagctatgtaatacttatgccaatatgtatagttttaaatattctagcatctctggcagatactattttctacttgaat

SEQ ID NO: 428437 - DNA, 201 bp, Homo sapiens
gtaatgaaagtgaatactgtaatactgttgtgtaacattgcaaagatatattagtccatttttgcattgatcaaagttaaattttgttatttactacaacrgtaaactaggaagtggctggattcttgagagatatttaaaaattagattaaaaataactttctctctgaaaccgcattcttaagtcacagatttctatgc

SEQ ID NO: 428438 - DNA, 201 bp, Homo sapiens
ctccaaattggctaatttaaaaatatgtcataaagatcatatgtttggctgtacctgtggttactaattttttttttaaatatcaaagttcattagagaarttgtaatgaaagtgaatactgtaatactgttgtgtaacattgcaaagatatattagtccatttttgcattgatcaaagttaaattttgttatttactaca

SEQ ID NO: 428439 - DNA, 201 bp, Homo sapiens
aaaattacatcttaggactgtctgtctgtggatgcatatataagtcatgacagcataggaattgaccttcccaattcctagcgaaaaatctgtactggaaragtggttattgacaagatcagtttttccccgtaattgttggaaataggttatgtcgtaagtgcccaatatagttccacgatattttttactaatatgatg

SEQ ID NO: 428440 - DNA, 201 bp, Homo sapiens
tcccctttgcttaatccgaatttactgagtgccagacatgcacctggcaaaaactttttgcttgtctccctgcagggttccaagggccctgagccagtcaraaaatgatcgacagttcagttagggagagttcactaaactacaactgttaaagcagacagaattcccattagaagaatgctttttggacctaatccaatg

SEQ ID NO: 428441 - DNA, 201 bp, Homo sapiens
acacttggacatatctgtatcagtgtactttcacgtgtgttttgagcactttctccctttctggcactacaagttgctttaagctcattttgtatattttstgttccagtcctaaaatcaatccatttatccaaggagccctgatacactttattggaaaatggtaacaaccattgaaggaataaatacaaaaaaatttaa

SEQ ID NO: 428442 - DNA, 201 bp, Homo sapiens
aatgatagctacaaaggctaggcatgctttaaaagattaatggggagtgttttaatggccatcaaaataggtattcagtaaatgtaaaattctgttttaamtgatttgaagtaagatcaaacttttgggttgtattgaagtcttattcaaatggagaatgaatactgcaatgattatatgggtttcatagtttgagtactt

SEQ ID NO: 428443 - DNA, 201 bp, Homo sapiens
tattaatttgtgctttcagcaaagttattccatttatttataacaagtattgtttctaagcttactattttacttttcaagaagatattaaccatcagagyaataagatacataggtctgaaaaatgacactttgtgaaaactcagattatatttttcaccttttcccacgttacccatccccagactcaatttttgttgt

SEQ ID NO: 428444 - DNA, 201 bp, Homo sapiens
aaactgacccactcatgtattaacattaatgcatccatgagggcttcacccttgtgacccagtcacttcttattaggacctacctcccaatgcagttacaytgggaattaagtttacagcatgctgagttttcagggcacatgcaaaccatacattttgtaccaggcacccaaaatttatgtccttcttataatgcaaaaa

SEQ ID NO: 428445 - DNA, 201 bp, Homo sapiens
ccagtctaggtataaaagatatcttgttgttataattttcatttcaggggggttactaagaaatttgagtattagtttaaatgcttggtatttattttggktttcctttttgtagaatcctattcatgtcctttgcctatttttcctctattggatttcttatttttttattgttgctttgcaggagttccttctagtttc

SEQ ID NO: 428446 - DNA, 201 bp, Homo sapiens
tgcaggagttccttctagtttccaagcacagacacttctttgtttagatgtttgaaatatcttctcccagtatattatacatttaacttgttcataatgtkcttcactaaatagaagtcctttttgaagtacccaaatccattaattttttttttacatttcaaatgatatttggggctctttttaagaagttcttttcca

SEQ ID NO: 428447 - DNA, 201 bp, Homo sapiens
aagtttgaggtgactattgaacatccagtgggcaactggaatgtgtttccatagttcatgagagcattttgagctaaagggtatagattttggtgtcatarttatgtaaattaaaactgaaaataaataatgtgtatgtgaataatatgcataagaataaatggaagaaccatgggtggaatcctagggaataccgatatt

SEQ ID NO: 428448 - DNA, 201 bp, Homo sapiens
ggcattctgagaaaaaagacagtgtatgtgagttatgcccagataaatggccgcatttttacctgtgagaaacagtaaataataatttgtccatttgacaytgaatttactatttaaattctgtagaagacatagcgtaattatagagttggagtatatttccatataacaacattaagcattgaaattatatgcttatta

SEQ ID NO: 428449 - DNA, 201 bp, Homo sapiens
ttgaaagtaaaaagtaattatttgaaactagggcaaattgacaatgtttaatgatttcatcaaccagctatacatttgtgaatgtaaattcttgaatataytttaacattaaattatccattcttgagttttggccaagacatactatattcaagatatttagctaagtcgttcttgtcaagatgccagacatggattaag

SEQ ID NO: 428450 - DNA, 201 bp, Homo sapiens
tgcctggtgggaagggttaaacctctcattctaagctaaacaagattactctgaaggctggcattcaggggcttgtttttagtgtaatgggttaggggctrtggcacaccccttgcagttccactaattgaactctttgggtacttcagtttctaatagttagctctagaaggggcttgccatgggtacgcaagaaattgc

SEQ ID NO: 428451 - DNA, 201 bp, Homo sapiens
tgaggaaaagtaatacttcaggacagggtttcctaccaagctccatagtagggatatgtgttggggatagagggacgtgtttagttgatgccaggtaagcygattggtctcctaaaatagataatttcagagagattatcaagcaggagtgcccagaagtgttgggcatgtctgacagagcgaatgagactgagagatttt

SEQ ID NO: 428452 - DNA, 201 bp, Homo sapiens
atggtggctcacacctgtaatcccagcactttgggaggccaaggtgggcggaccacgaggtcaggagatcgagaacatcctggctaacacggtgaaacccyatctctactaaaaatacaaaaaattagctgggtgtggtggcgggcaccagtagtcccagcgactcccaggcaggagaaaggcgtgaacccgggaggtggc

SEQ ID NO: 428453 - DNA, 201 bp, Homo sapiens
ccatttatttataacaagtattgtttctaagcttactattttacttttcaagaagatattaaccatcagagtaataagatacataggtctgaaaaatgacwctttgtgaaaactcagattatatttttcaccttttcccacgttacccatccccagactcaatttttgttgttaagatttttttttttttttttttttttg

SEQ ID NO: 428454 - DNA, 201 bp, Homo sapiens
agtcaatcccactttctaattcttaacaaatatggaataaaatagggaattatgccatttttacattacctgtataatcattttatgcatataattagaamttgactctgattcattgttccatgcaagaaaaataatgctttttaaatactgaaattaatttgacaaataatttgaaattaatttttttaattatagaga

SEQ ID NO: 428455 - DNA, 201 bp, Homo sapiens
ctttgctgtggaaggctgttctgtgccttgtaagatgtttaaaagcattcctggactctacccactaaatgccagttacattccccaagttgtgacaagcrtaaatgtgtccagacattgccaaatatcccctggggtgggaggaagtcagtcctgattgaggatcactgtgctaaataaatgttcctcttctttctctgt

SEQ ID NO: 428456 - DNA, 201 bp, Homo sapiens
tggaaggctgttctgtgccttgtaagatgtttaaaagcattcctggactctacccactaaatgccagttacattccccaagttgtgacaagcataaatgtstccagacattgccaaatatcccctggggtgggaggaagtcagtcctgattgaggatcactgtgctaaataaatgttcctcttctttctctgtcaatgttt

SEQ ID NO: 428457 - DNA, 201 bp, Homo sapiens
aagatgtttaaaagcattcctggactctacccactaaatgccagttacattccccaagttgtgacaagcataaatgtgtccagacattgccaaatatcccytggggtgggaggaagtcagtcctgattgaggatcactgtgctaaataaatgttcctcttctttctctgtcaatgtttaggatcacctagggacccatatg

SEQ ID NO: 428458 - DNA, 201 bp, Homo sapiens
cagatttttaaaataagatgcaatctttaggattttcattattttttaaatcttaaaattgacctttagagtattcaatattgcctttagttatgtttttsttgccctggatttggttggcaatgcgattctcagtagcatgagcatagataatgaatagggcagatttactataaaagtgtatatcgaattggttatgct

SEQ ID NO: 428459 - DNA, 201 bp, Homo sapiens
accagttgcactctgtatctagttcaaggtttgtaaatacaccagtcagcaccctgtgtctagctcagggtttgtgaatgcaccaatcgacactctgtatstagctaatctagtggggatgtggagaacttttgtgtggacactgtgtatctagctagtctcgtggggaagtggagaacttttgtgtctagcgcagggatt

SEQ ID NO: 428460 - DNA, 201 bp, Homo sapiens
attatatctgttatggtaatctgtgatgtctgatgttaacattgtgactatgcccatataaaatggtaaacttaacagatgttgcgcatgttctgtttcaytgatcagcccttccccaatttctctccctttccatgggcaaccctattccttgagacaaaaaaaatattgaaattaggctaattttccaatggccttgaa

SEQ ID NO: 428461 - DNA, 201 bp, Homo sapiens; identical to SEQ ID NO: 251020

SEQ ID NO: 428462 - DNA, 201 bp, Homo sapiens
ggtttgttacataggtgaacgtgtgttttggccgatactttaaaagccatagcaaatcacaacactttagaaactcttctactttaaacattttaaaatcrgctttacctgttggtttagtttccctttaagagtgtcactcaccagcctgggtaacatggcaaaacaccatcttcaaaaaaatacacacgcacacacctg

SEQ ID NO: 428463 - DNA, 201 bp, Homo sapiens
agaaatgattaaacttagtgaggaacacatttcaaatacacgaatgataagaaagtggaacagacttattgctgatatggagaaaattgtttttttttttkgtttttttttgacagagtctcactctgtcgccaggctagagtgcagtggtgcgatctcggctcactgcaaccactgcctcccgggttcaagcgattcccc

SEQ ID NO: 428464 - DNA, 201 bp, Homo sapiens
ataataactaataacaaaatagaacagttataatatacaagcaccactactcttgtgcttggagtccatattaaataaaataaaagtcacttgaacacaarcactgtgatacctcgtcaattgatctgattaaccgagagctattaagtgatgaatgagcgggtagtgtagactgttggattcgctggaccaaaggatgat

SEQ ID NO: 428465 - DNA, 201 bp, Homo sapiens
aagagtgtcactcaccagcctgggtaacatggcaaaacaccatcttcaaaaaaatacacacgcacacacctgtggtctcagctattccagaggctgaggtrggaggattgcttgaacccaagaggttgaggctgcagtaagccatgattgtaccactgcactccagcctgggtgagagagcaagaccctgtcttaaaaata

SEQ ID NO: 428466 - DNA, 201 bp, Homo sapiens
gaaatgattaaacttagtgaggaacacatttcaaatacacgaatgataagaaagtggaacagacttattgctgatatggagaaaattgttttttttttttktttttttttgacagagtctcactctgtcgccaggctagagtgcagtggtgcgatctcggctcactgcaaccactgcctcccgggttcaagcgattcccct

SEQ ID NO: 428467 - DNA, 201 bp, Homo sapiens
atgtgaaagcatttcacttcagaaccgtagtatcttttgatcttagtgactgttagttgttcaaatgagggattatatatgaagatactttaaatgtgaartaatacataaattaatgtttgttagcattttattacttatgttttcttgtttttatgtcattttcattttctcagtacttagacatataatatttaacat

SEQ ID NO: 428468 - DNA, 201 bp, Homo sapiens
tcaatttcagaaggaaagagaactgttttgtctcagtgtctgtattaatcccggaaaaagttgttggactgaccctcctgcagttctgtgccgtctcttgkttgaaacactgagtgatgtgggaggggcaacgagtcacttccattgacagcacctccagagttggaatggaatggaggcaaaacagttctctataggaag

SEQ ID NO: 428469 - DNA, 201 bp, Homo sapiens
acagtcttaacgctgtcgcccagggtggagtgcagtggcgtgatctcagctcactgcaacctccacatcccaggttcaagcgattttcctgcctcagcctyctgagtagctgggatacagatacccaccaccacacccggctaatttttgtatttttagtagagacggggtttcgccatgttggccaggctggtctcgaac

SEQ ID NO: 428470 - DNA, 201 bp, Homo sapiens
tctgtctttagaaataaaatagaattacatcattgttaaggctaactacttctggagtttaatgactagcaaagaaatctgaccatgtttcctccttcgtrtggctctcctgtcccttggcttctcttcttgcctgattacagctgtttttgtaatgctttctctcttcctctctacatccccgatcacttccaccacaag

SEQ ID NO: 428471 - DNA, 201 bp, Homo sapiens
aagatttattaaaattttgtatttggttctcaaaggtctcacatatttgaggttaatttattcttagttttttataaattatttttaataatgagaattasattttttatcttttattctattttaaattggtcattcctggttatttacattttttcctagatatgcgtaatttcaattttttgctgttgtttctgtatc

SEQ ID NO: 428472 - DNA, 201 bp, Homo sapiens
ctattcttttgcttctcttattttatactcagaattacccccttttagattaaaaaaaaaactttcatacttttgaaatgtaaaaatggacatatcaccawaaagtgagaagggaaccctaaatgaattacaaactttttgttttgttagagatagaaaaacttctaagatcttaaaagtaagatctgagtttaaaattag

SEQ ID NO: 428473 - DNA, 201 bp, Homo sapiens
gatggagtcacactctgttgcccaggctggagtgcagtgtcacgatcttggctcactgcaacctctgcctcccaggttcaagcgattctcctgagtagccrggattacagatgtgcgacaccatgcccgactagttttgtatttttagtaaagatgggttttcaccatgttggccaggctggccttgaactcctgacttca

SEQ ID NO: 428474 - DNA, 201 bp, Homo sapiens
ctgcgtgcctttactccattagagacaagcacaagagtcctgccataccacatattttttgacatgactactttttgtttttcttcaaaatctaaactacrataaaatgaaagacaacagttattaggtgcctttatcttatgcagagtgctaagtactgtacattgtggtccccttgtgacccaacatgaattctgaaag

SEQ ID NO: 428475 - DNA, 201 bp, Homo sapiens
acatataaaattatattcccaaagaaatgtaaaacatttgatatactacttggcattaatttttctctggtctgaaaaatatattatgaaatatggatacyagatagttttattttgttactactgagggtttttttttccccctagcagttctgagaggataactcatttggataattttgttttcatatttatgctata

SEQ ID NO: 428476 - DNA, 201 bp, Homo sapiens
tggagtgcagtgtcacgatcttggctcactgcaacctctgcctcccaggttcaagcgattctcctgagtagccgggattacagatgtgcgacaccatgccygactagttttgtatttttagtaaagatgggttttcaccatgttggccaggctggccttgaactcctgacttcaagtgatccgcctgcctcaatctagtgc

SEQ ID NO: 428477 - DNA, 201 bp, Homo sapiens
aacatacatgtaaaataacattttcatcacatcataacaagggtacatactgtcaacacaacttaccactataaagttgaccttcatcacctgccagtgayagtgtttttcaggtttctccaccgtaaagttactttctccccacatcttcccacccaaccagttcatactgtgccttttggaaggaagtcactatgcaca

SEQ ID NO: 428478 - DNA, 201 bp, Homo sapiens
accccatctctactaaaaatacaaaaaattagctgggtgtggtggcgggcaccagtagtcccagcgactcccaggcaggagaaaggcgtgaacccgggagrtggcgcttgcagtgagccgagattgcaccactgcactccagcctgggtgacagtctcaaaaaaaaaaaaaaaaaggaaaagaaaaagaaaaagtagaaac

SEQ ID NO: 428479 - DNA, 201 bp, Homo sapiens
ctagaaaccacatgtcatcatcagactcagagagtaggcatgcacttttcttttcttttttttttttttgagacagagtcttgctctgtcgcccagggtgragtgcagtggcgccatctcggctcactgcaagctccacctcccgggttcacgccattctcctgcctcagcctcccaagtagctgggactacaggcgcccg

SEQ ID NO: 428480 - DNA, 201 bp, Homo sapiens
acacatatatatatatatatatatatatatatatatatatatatatatatatgtgaaagtgatcttattgtgtttgggaattctttattcagatgactttktagcaactatgagaaataatgaagtttttaatatatgcttttgacacaagtgagcattctttaattttaaatattttaccaagatgctcattaaataatg

SEQ ID NO: 428481 - DNA, 201 bp, Homo sapiens
tctatcaagggagatgcacctctttatctgaattttttttttctttatctgaattttaaagcaaagccatgaagacatttaaggttgtagaaaagtttcasaagttagctaatatgtatgagtttaattaatgggaaagcattatgtcaataaaattattgtcataaagagtattattcctttttaaaaattttttcatcc

SEQ ID NO: 428482 - DNA, 201 bp, Homo sapiens
cctcaaatagcttcagatagggtctccttatttgcattttgtcatcctagtgctccagcttgatttcagctcacattcaaatggaatgtttgcttctgcarataacacaagcttaacgcaaagagactaaaatcacagtgtatttttctttctaatttggttatttcctttactaacatggtgttactgtttgaaatagtt

SEQ ID NO: 428483 - DNA, 201 bp, Homo sapiens
gactcatttattctgggatagcataagtagaccagtgatctaatactcctacaataggtgatggagccatcctaatagatagatttgagatttagactggraagtaatagtctgaacaaaagagagtttatgaatttaattaaggtagaactttaaaaaaattagatggatgattagaagacacagaatcatccaatttat

SEQ ID NO: 428484 - DNA, 201 bp, Homo sapiens
ccctttgtctcaacagtgatctgggcctggcatctttgaagagagtgtctccagctccttagagcttttaacaagagattttccttagtctttgttggggyactgtgaagtcggaaccactccatgtactagggatcttacaataaaagtttttgtttttgttagaacatttttactcctcagctatgctgtagttgattt

SEQ ID NO: 428485 - DNA, 201 bp, Homo sapiens
atgccagttttcctccattggtaatatcttgccatcatcatcatctcatactttcagagcctgctttcttttcccctttgggctcaggagggtgctgttasttatatatctgaaaatggaggggagacaggtttttctgtttttctccccaaaccaccctgtttcccatatattttcttttagcaaggtttattgtaggga

SEQ ID NO: 428486 - DNA, 201 bp, Homo sapiens
cagaccattcttaaagaaaatctggctttgaagggaagaacgatcataagcaatagttagaggtggatacaagaatgaatacaggttatacgggtgttttyttctcctatgtctaagaggtacacgaacatttttgtgttcttaagaaaagaaaaccgtatgataaaagcagctgaagatattggacaaagaggggttgat

SEQ ID NO: 428487 - DNA, 201 bp, Homo sapiens
acttcctgttgagtactgtttttaaactaggaaaatatattcacacctattattttgacatgtggaagaaaatgtagtcttagttatatattcaaaaggtmggtacaaagtaaattatgcatatatgaatatacaatgtagttctccgaatcctagatccaacaataacaactagctgcatagacttaagttgcttaacca

SEQ ID NO: 428488 - DNA, 201 bp, Homo sapiens
cacttggaagtggcaactaaatattggatattcatggccataagatggcaataaaagacactggggattactaaagcagagagggagggaggaaaggaggraggggagcaatggttgaaaaattaactaagtggtactatgctcagtacctgggtgatgggatcagttgtaccggaaaccacagcatcatgcaatatatac

SEQ ID NO: 428489 - DNA, 201 bp, Homo sapiens
cctccgcttcccaggttcaagtgattcttgtgcctcagcctctcaagtagctggaattgcaggcgtccaccaccaggcccagctaatttttgtatttttartagagacggggtttcaccatgttggccagcctggtctcaaactgctgacttcaagtgatccaccctcctcggcctcccaaagtgctgggattataggcct

SEQ ID NO: 428490 - DNA, 201 bp, Homo sapiens
gagtcttgctctgtcccccaggctggagtgcaatggtgctatctcggctcactgcaagctctgcctcccgagttgacgccattgtcctgcctcagcctccygagtagctgggactacaggcgcccgccaccacgcccagctaattttttttgtatttttagtagagacggggtttcaccgtgttagccaggatggtctgga

SEQ ID NO: 428491 - DNA, 201 bp, Homo sapiens
ctgttattcctgagttagttatattggttgtcaccagtgactacagcttctatgtctttttggcagtttgagagtcttgtttcaaattgtatatagtcaawagcttgacagtgatttattactactcaacctaatgttcttttgattgtattgcagtttgtgataaaatgtgtttgtgataaataattaatattactcaga

SEQ ID NO: 428492 - DNA, 201 bp, Homo sapiens
attcttttactgtcttctgtgaatatctcaaaaccacatgcaaatgcattgcaaaatgcacagtcagattttacatcttgcaaaggatgcaggattccatraagtcagggaaagtggctcagtaagatctgcattaacatataaacccctaggcaaattggtatggcaggattggatcaggcaattatcaccatagataat

SEQ ID NO: 428493 - DNA, 201 bp, Homo sapiens
aatgcttcggttgagcatgcatacacctccagtaaacacactgtgcatgctcacctcccaaatgttagcaggccaccaggcatgcaggcagcccaccccarggaaaggatcacggtaaaagggacgcaagacaccggaagtaataccaacatataaaaccccaaatcaaaaggtcagacactgcacttgacctccagagtt

SEQ ID NO: 428494 - DNA, 201 bp, Homo sapiens
aagcagacagaattcccattagaagaatgctttttggacctaatccaatgaaaataatctattaaaacaagttgtctaatcttatgagttaacatgaaaaragaagtggatgcagggtgaattgcaaaatgtttgcacgtgtaagttcagtttatttaattttaaataattagggcatggcaatgattagtgctaattgga

SEQ ID NO: 428495 - DNA, 201 bp, Homo sapiens
acctcccgggttcacgccattctcctgcctcagcctcccaagtagctgggactacaggcgcccgccaccaccccgggctaattttgtgtattttttagtaragacggggtttcgcagtgttagccaagatggtctcgatctcctgacctcgtaatctgccctcctcggcctcccaaagtgctgggattacagacgtgagcc

SEQ ID NO: 428496 - DNA, 201 bp, Homo sapiens
aaattataaccatatctgtgatggaatcttgccgtgaagcttttttttctttttgtaatttttttgagtgtgttgatttctgtagaattctcaaaagctatttttttttttccttttttcttccctctgcctgaacaaacttgtttaagttaggttttctggctgtggacttccatagtgtatcatactataccaaagcat

SEQ ID NO: 428497 - DNA, 201 bp, Homo sapiens
ctggctgttgctatgtccagataccctcagttttgattggtcaatggatgctgtgcctctgctcaaaacagtttgtgactggagaaacctacacactgtgrccttctatactggactccttctccttgcctactatggtttgaagagcccgagcgtagacagagaatgcaatgggaaaactgtaacaaatggcaagcagaa

SEQ ID NO: 428498 - DNA, 201 bp, Homo sapiens
cctataaaacaaccacacaatagaaactacaaagcaacaaactagtaacttcatgataggatcaaaacctcacatattaatattaatcattaatgtaagtrgtctaaatgcttcacttaggcacagagtaccaagtggaatgaaaaatatatatatatatatgtctgctgtcttcaagagaaacatctcacacataatatg

SEQ ID NO: 428499 - DNA, 201 bp, Homo sapiens
agtgcagaaatatatcatagtaaatagtactaaagagtcttgttcttcataagccatttttattcttttttgagaccgggtcttgctctgtcgcccaggcyggagtgcaatggcatgatctcgacttactgcaacctccacctcctgggttcaagcgattctcctcctccagactccagaggcactgagattacaggcgcc

SEQ ID NO: 428500 - DNA, 201 bp, Homo sapiens
ccacacaatagaaactacaaagcaacaaactagtaacttcatgataggatcaaaacctcacatattaatattaatcattaatgtaagtggtctaaatgctycacttaggcacagagtaccaagtggaatgaaaaatatatatatatatatgtctgctgtcttcaagagaaacatctcacacataatatgacacccacaggc

SEQ ID NO: 428501 - DNA, 201 bp, Homo sapiens
cttttagcatgtcttgtacttttttctttcgactcagacatgatgtattgggtaataagaaatgaggtgaacaggctttattgtgagattttatgtaaatytggttaggagttggactgtattttgctatagccgtgggtgccagagatgccacattcctctggtggccttgtttttggtcttcccagttgtctgtgggct

SEQ ID NO: 428502 - DNA, 201 bp, Homo sapiens
tcagtacctgggtgatgggatcagttgtaccggaaaccacagcatcatgcaatatatacatgtaagaaacctgtacatgaaccccttgaatctaaaaaaawttttaacaaatatataggtatcaggtttttttaatttaaaaaaatgtataatgtgttcctgtttttcatatagaaaccagaagatttggacatgatctgc

SEQ ID NO: 428503 - DNA, 201 bp, Homo sapiens
accttcttacctgttgtttgaccttaggtatgttacttaacttttcttgcccaaggttcgttatgtgcaaaatgaagaaagtaataatatcctacctcttmagattattgttgaataataaagtaatatatgtaaaatgctccatatattctaagtgctgaataagtttctctgccactattattattattattattatta

SEQ ID NO: 428504 - DNA, 201 bp, Homo sapiens
ttaattaatgggaaagcattatgtcaataaaattattgtcataaagagtattattcctttttaaaaattttttcatcctctttatcaattttacccatgtktgaataaaactgaccatttccacaaatgcttaactactgcaggaagctttattctctcttgttcctagcagcagacaagaacacttcacagcacagcata

SEQ ID NO: 428505 - DNA, 201 bp, Homo sapiens
cttaaaagaagctaaaaatatgtgtaaaaacactatcaaattacaggtatttgaaccctctaaagcagggtaaaatatgttccttcctttctgtaatataratacaattgctgatattgttaaagagcagattttcgagaggacaaacacctgtcttagttttagccttatcacgcactggtgcctatttctggtgatcat

SEQ ID NO: 428506 - DNA, 201 bp, Homo sapiens
ccatgaagacatttaaggttgtagaaaagtttcagaagttagctaatatgtatgagtttaattaatgggaaagcattatgtcaataaaattattgtcatawagagtattattcctttttaaaaattttttcatcctctttatcaattttacccatgtttgaataaaactgaccatttccacaaatgcttaactactgcagg

SEQ ID NO: 428507 - DNA, 201 bp, Homo sapiens
ttaacctcccaggctgaaggcattctcccacctcagccttgacctcctaggctctagcgattccctcaccccagcctacagcatgcatcaccatgtctggmtaagttttgtatttattggggttttaccctgttgcccaggctggtcttgaactcctggactcaagcaatccgcccagcttggcctcccaaagtactagat

SEQ ID NO: 428508 - DNA, 201 bp, Homo sapiens
ctgaattttaaagcaaagccatgaagacatttaaggttgtagaaaagtttcagaagttagctaatatgtatgagtttaattaatgggaaagcattatgtcwataaaattattgtcataaagagtattattcctttttaaaaattttttcatcctctttatcaattttacccatgtttgaataaaactgaccatttccacaa

SEQ ID NO: 428509 - DNA, 201 bp, Homo sapiens
ttttttctttatctgaattttaaagcaaagccatgaagacatttaaggttgtagaaaagtttcagaagttagctaatatgtatgagtttaattaatgggaragcattatgtcaataaaattattgtcataaagagtattattcctttttaaaaattttttcatcctctttatcaattttacccatgtttgaataaaactga

SEQ ID NO: 428510 - DNA, 201 bp, Homo sapiens
ttctatttgtatatataatataaaatcttctttttcttgctggtgtcttttgtgttttcatagaaaaactcccacactcattaaatagctgtctattatgrtatctttgagagaaggcggctgtatcttagcctccccactgagtgaagtctcattataatttgtctctttatgtttccaaaatgctgggctcacatgctt

SEQ ID NO: 428511 - DNA, 201 bp, Homo sapiens
gaagataaaaatttgttattgattattattagtgacattcaggcaccaagtgatgctcttcagtgaaggtatctaagtaaggttagaaatgcttcggcctrtatgactttttaacctggtacacttaaaccttagctttaaggcaccttggggggtttctgaataggtgaatgcactatatctgaagttttaaagtcctag

SEQ ID NO: 428512 - DNA, 201 bp, Homo sapiens
aataagcaaatttgattaggaaatttggattaatgcaaagttcaaatatgactgcaaccaatgttggttcatttcagtttgcaaatttcaaatgcataaawaaccttaggaaaaaatgtgagtatctaaaatttatgttttatctctgagaaaaaaaaaaaacccttagtttcatagtccttatgtgtgttaaaggacaat

SEQ ID NO: 428513 - DNA, 201 bp, Homo sapiens
atttaattttaattaaatattttaattccaagttttattcttggcagttgtctaatctggttatcactcaaaaccagacaactcatactttgtatttattygaatgtaattaaatgaagtttttattaaaatttctctatgagcgctatatttgatgttacatattttataactttatatatacatacacacacagacaca

SEQ ID NO: 428514 - DNA, 201 bp, Homo sapiens
ttccaatttgttccacaatgaaagcatgtctgctcagttttcttttctgttagttgtgtctcttggattaaatgtgagtaaataaactctggagtaaggcygctccagagggaactcaaggacttactggttgtcagtgcatgtagaagtgacatccctgcaaattgtgtcctctgcggggggtgctttaggtggtggcta

SEQ ID NO: 428515 - DNA, 201 bp, Homo sapiens
aaacatcttgtttttgttaatttccaatttgttccacaatgaaagcatgtctgctcagttttcttttctgttagttgtgtctcttggattaaatgtgagtmaataaactctggagtaaggctgctccagagggaactcaaggacttactggttgtcagtgcatgtagaagtgacatccctgcaaattgtgtcctctgcggg

SEQ ID NO: 428516 - DNA, 201 bp, Homo sapiens
cttgaggtcatcaagaggaaggctgtgaatgcgagctgtgaaggttgtttattatggtaagaaatagggcagaatgagggacctttgtggagaggagtgcwggtattagagttacattgcaggaagtttttctatccatagcatgcataatggatcaaagtgggaatgaaggcaggcagggatagctatttagttcagttt

SEQ ID NO: 428517 - DNA, 201 bp, Homo sapiens
tctgtaattttacacctatttaaattctacgttgggtgctttttttcgctaatgatctgtggaaattattttggtgttgacacaaatgggaaagtagtgtyggagtggggggagacagctctctttcctaggtataaatgaaaaaaggataattattaattactttagaaaattgtctttctacttccttattttcaaagg

SEQ ID NO: 428518 - DNA, 201 bp, Homo sapiens
aataaatttaattcttttttttcccctggaaccaaaagctaagccaaataatgctactttcccaagaaaattctgtaattttacacctatttaaattctaygttgggtgctttttttcgctaatgatctgtggaaattattttggtgttgacacaaatgggaaagtagtgtcggagtggggggagacagctctctttccta

SEQ ID NO: 428519 - DNA, 201 bp, Homo sapiens
agcagaagatggagctgcccagaatccagcacaagagtttgtgtctgccgtcactccctctgcagttgcatctgtagtgccagacctaatgtggagtgccygtgtttttgctttgatcgtaacacctggtttgtgcaatagctgtgtctaatgcacgttcttatacttcagcatttgacagaaagaaaaggccctagaaca

SEQ ID NO: 428520 - DNA, 201 bp, Homo sapiens
ccagaatccagcacaagagtttgtgtctgccgtcactccctctgcagttgcatctgtagtgccagacctaatgtggagtgcccgtgtttttgctttgatcrtaacacctggtttgtgcaatagctgtgtctaatgcacgttcttatacttcagcatttgacagaaagaaaaggccctagaacacttctgattttctgcttg

SEQ ID NO: 428521 - DNA, 201 bp, Homo sapiens
agaacactttttagagtgaaagggggcagattttataaccatagtagaatagtgggcatgaacttggactcttttgggaatatagacatttatagttcttstacttattgcaatcaatatagaactggttggttattaagataggttaaatatgcttttctctttaaaacatttctattggtatagcaagggagtagaaca

SEQ ID NO: 428522 - DNA, 201 bp, Homo sapiens
aaccccaaaatgcacctaatttcccaggttatgggtcaggaagactttaataagggacttttcatagattgtatcctagtctttatataataataacagcrcagctaacagggcagagagatcatttgcactagggtgtccagaacactcatgtatatgtaaagcactgttctctgcttctctatatagaagacaaatgaa

SEQ ID NO: 428523 - DNA, 201 bp, Homo sapiens
caggagaatcacttgaatgtgggaggcagaggctgcagtgagccgagatcgtaccattgcactccagcctgggagacagagtctccaaaaaaaaaaaaaamagtgtaggaaatgacacatcagttatctacttgcctataaccaaaatttagatttgttaatatattaattgcatattttttaaatctagtcagtgtaagt

SEQ ID NO: 428524 - DNA, 201 bp, Homo sapiens
tatcctgagcacactgatataggggttgggctctcaagacactgagaactgccacgcccatggctttgctgggctcagcccacatttccgctctctcagamtggcatcgtacactggtagctctacagttctgtggtcttctgagccctcccatggcaatataggctttttctagcctgattctccaaatttccaacctcc

SEQ ID NO: 428525 - DNA, 201 bp, Homo sapiens
agagtattattcctttttaaaaattttttcatcctctttatcaattttacccatgtttgaataaaactgaccatttccacaaatgcttaactactgcaggragctttattctctcttgttcctagcagcagacaagaacacttcacagcacagcatattaatttcatgatcagatatacagatatacagatatacacatat

SEQ ID NO: 428526 - DNA, 201 bp, Homo sapiens
cttattcaactaaatccaaatatcaagaaaagggtgatgttgatagccttcagtcttttttgttgttgttcttttttggcgtctgattaaactgtgactcyctttttgctattgagccagactaccttttgcctttcaggcagccaagcaccaatatttcccaagcaacacagctagtgagagaggcatctcatgtttcca

SEQ ID NO: 428527 - DNA, 201 bp, Homo sapiens
tatattcccaaagaaatgtaaaacatttgatatactacttggcattaatttttctctggtctgaaaaatatattatgaaatatggatactagatagttttrttttgttactactgagggtttttttttccccctagcagttctgagaggataactcatttggataattttgttttcatatttatgctatagtccctaaatt

SEQ ID NO: 428528 - DNA, 201 bp, Homo sapiens
ctggaggaaatgggctttgaagaaggggaactatccattcaaaagaaactctcaccaggaagaggcataaaagaatgagatggaaaagaacaaagctccawgggagaatactattcgtgtagtttggctacatggggacagacacataaggcatgttgaggaatacaagataggaaaaagattagagacagattgtggcag

SEQ ID NO: 428529 - DNA, 201 bp, Homo sapiens
ttgctagacagaggtccattttgacttagtcacttacatttgttcatttgactgagtactgtcagatggcataacagaatgtctgccccgggccacactgycaccagctgtgcacaggattcttccccaacatccctaccagtagttgaccttatccatttttctattttcttgccagtctaggtataaaagatatcttgt

SEQ ID NO: 428530 - DNA, 201 bp, Homo sapiens
ggatcattatgtttatataaatattccccaacctcactgtaatagtgtttatctgtatctctttcttttaaaatgtgtgaactcagctatgtaatacttaygccaatatgtatagttttaaatattctagcatctctggcagatactattttctacttgaatgcttatgtttatttggaactcactactctgtaacagcag

SEQ ID NO: 428531 - DNA, 201 bp, Homo sapiens
ttataattttcatttcaggggggttactaagaaatttgagtattagtttaaatgcttggtatttattttggttttcctttttgtagaatcctattcatgtsctttgcctatttttcctctattggatttcttatttttttattgttgctttgcaggagttccttctagtttccaagcacagacacttctttgtttagatgt

SEQ ID NO: 428532 - DNA, 201 bp, Homo sapiens
gtggtgtcaccctgtccttatggtccaagatggctcattatcacattagcacttcagctgacaggaagagagggagaaagggcaaatggtgggtgtacccratcttagagcatattgcagaaattgcacacaccatgcttgttcacagaccactgggcacacctacctaaaaggaaggctgggaaatgttatcttcattct

SEQ ID NO: 428533 - DNA, 201 bp, Homo sapiens
tggtttgcagtgaaagatgaaatgtggtatgaaaatgttaggcagaggggagaaaaagtttggaaacagccagtgtcggattagagtttttgctgtaacayttcagtattaactttacaaattctttagtgcctctgtctcctcatctggggaatgggcacttatgtgtggaactgtgttgagagcttggtgagatgatat

SEQ ID NO: 428534 - DNA, 201 bp, Homo sapiens
agccagtgtcggattagagtttttgctgtaacacttcagtattaactttacaaattctttagtgcctctgtctcctcatctggggaatgggcacttatgtrtggaactgtgttgagagcttggtgagatgatatatgtcaagtgtgtggcatggtacatggcactattagctgttgcataattgtgagttcaatgcctttc

SEQ ID NO: 428535 - DNA, 201 bp, Homo sapiens
aaatgttagagtataaaggaaatacattttccttcttaaaaatgttttatgatggttttctctccctgtggtacttcctgatggcctgatattatgtcatrtataattggattgatgctcagtctgaaaatttctttttcttcttggcagcatggggtaaccttggaaatgttctgaagagtcagagcaaaatttctgaag

SEQ ID NO: 428536 - DNA, 201 bp, Homo sapiens
gtctttgaaacctgcagtgagagggactattgatttaactgctggaaatggagatgatgatagctattgtcctgaaatagtctttttgttaatcatgcctytgagactattaggtggatggtgtttgtgatttctttgtttcgggccacatcatcaatattcatgtgtacttatatgttatgcctgaattttttggaagta

SEQ ID NO: 428537 - DNA, 201 bp, Homo sapiens
ctgagctcaagcaatccttctgcctcagcctcccaaatagctaagactgcaggtgcctgtcaccatgcctggctaatttttaaatttttttgtagagatgkggactcactatattgcccagactggtgcctaactcctggcctgaagcaattctcttgcctcacactgcaaagtgctgggattataggtgtgaaccactgt

SEQ ID NO: 428538 - DNA, 201 bp, Homo sapiens
tgcccccagcctgttctcttggttcattgttcttttgttcattcattcagtcatttgctcaatcattcatgtacccattcacccatatgacatgatgtgtytcttctgtgccaggtgctggtctagttgctatggatagtaagtcagtgaacaaaacatagataaatccttgccctttcagagctggtattcttgtgggag

SEQ ID NO: 428539 - DNA, 201 bp, Homo sapiens
cgggggacgcggagcccaaacgccgctcaccgcttgcgggcgccgggcatggggagtgtggtgtgagcccgcacccggggaggacgcaggagctgcggagmcgggcgcgaggaggaggagaggagtcgtggattggaaggacccgagggagggagggtggggaagcgagggaaaagtgaagctgggaggagaaggcggcgg

SEQ ID NO: 428540 - DNA, 201 bp, Homo sapiens
agttgctggggatggctttgatggaatctgttatcatttatggcattgtcccttttgtttctagactaggttgtggttttgcctaagttgtgacccccccscaatatcaattgcattgaatgaaatatgatatatttaccgtttgtgattttccatactcaacacctgtgccactctcctccaagtagtattcccactttt

SEQ ID NO: 428541 - DNA, 201 bp, Homo sapiens
gatgttgatagccttcagtcttttttgttgttgttcttttttggcgtctgattaaactgtgactctctttttgctattgagccagactaccttttgccttkcaggcagccaagcaccaatatttcccaagcaacacagctagtgagagaggcatctcatgtttccacatatacatatctcactgccttaggcaagcttcat

SEQ ID NO: 428542 - DNA, 201 bp, Homo sapiens
cttatgacatctttctatcctacccccaccttttttgcataatacctatacatcctttttttttctcagcttaagcaacactttctggggaggtttctggwtacctctcccactttcagatgtgaaagcctcctaggtctcacaaagccactaatacttggctctttttaatctggattatgttaacatttgtgatagtat

SEQ ID NO: 428543 - DNA, 201 bp, Homo sapiens
ggaaatggagatgatgatagctattgtcctgaaatagtctttttgttaatcatgcctctgagactattaggtggatggtgtttgtgatttctttgtttcgkgccacatcatcaatattcatgtgtacttatatgttatgcctgaattttttggaagtagtatgccatgtaacataaatattggtttaaatattttttagtt

SEQ ID NO: 428544 - DNA, 201 bp, Homo sapiens
tatgccagttttcctccattggtaatatcttgccatcatcatcatctcatactttcagagcctgctttcttttcccctttgggctcaggagggtgctgttrgttatatatctgaaaatggaggggagacaggtttttctgtttttctccccaaaccaccctgtttcccatatattttcttttagcaaggtttattgtaggg

SEQ ID NO: 428545 - DNA, 201 bp, Homo sapiens
cagcagctgctggctcaggtcctaggctcctcactgctgggggcggcagggcccgccggcagctctgagtgcaggccgctgagcccacgcccacccgtgcrcagcccttgttcctgccagtgcctctccctccacacctccccgcaagctgagggagccggctccggctttggccagcccggaaaggggctcccacagtgc

SEQ ID NO: 428546 - DNA, 201 bp, Homo sapiens
gtgtaaagtgaatgacccacattgtactcccatgatggacatattgttcctacccactatcagccaacactaagacacttgaatttaaacattctcttacrtgctttctaaggtgagaatttatgtgggagtgggattgctagacagaggtccattttgacttagtcacttacatttgttcatttgactgagtactgtcag

SEQ ID NO: 428547 - DNA, 201 bp, Homo sapiens
tgtctttataaacatagatagcatccttactcttctcaatttcagaaggaaagagaactgttttgtctcagtgtctgtattaatcccggaaaaagttgttrgactgaccctcctgcagttctgtgccgtctcttggttgaaacactgagtgatgtgggaggggcaacgagtcacttccattgacagcacctccagagttgg

SEQ ID NO: 428548 - DNA, 201 bp, Homo sapiens
aaaaatacaccaagatagatcctttgcaatatataatattataaatatgtttggtatcatatttataggaacattttttctacttatttgcataggtagamaaaagaaaagttttctcatagaaagttcagagactgttaaatagtaaattttagttttgagatgtacctaatttgctctggtgtacagaagttagtcctt

SEQ ID NO: 428549 - DNA, 201 bp, Homo sapiens
ttttctacttatttgcataggtagaaaaaagaaaagttttctcatagaaagttcagagactgttaaatagtaaattttagttttgagatgtacctaatttkctctggtgtacagaagttagtccttgttctatcttaactcctaaaagagaaggaaattgctttgctcagtctttctaggacacataacgtgataataccc

SEQ ID NO: 428550 - DNA, 201 bp, Homo sapiens
cagaagttcctaagttatagtcactgaaccagcagcatcaacattgttggtaaatgtttagtaatgtaaattctcagacaccaccctagacaaagtgaatcagaaatctgtactttaggaaacctgccagtgattttgagacactttttgagaactactgctgtaggtagcaagacaaagcctgtactccttaccaggcat

SEQ ID NO: 428551 - DNA, 201 bp, Homo sapiens
aatcaaattatatccaagaggtatatacaaagagttatattccatgtttgtaaaatgatgggataattttaattttttttctttagtagcagtagcttcarttacctctgtgtgctaaatgttcttcttagttctttacatatgttatcatagcttttcttcaaaggaaatctataacacaaggaagctgagactcagagg

SEQ ID NO: 428552 - DNA, 201 bp, Homo sapiens
ctttagtagcagtagcttcaattacctctgtgtgctaaatgttcttcttagttctttacatatgttatcatagcttttcttcaaaggaaatctataacacraggaagctgagactcagaggtaatgtgtctaaggtcacacagaaaataaatagaggagccaatatatgaacctaagacattctgattgtgtatctgtgca

SEQ ID NO: 428553 - DNA, 201 bp, Homo sapiens
tagttgatgccaggtaagctgattggtctcctaaaatagataatttcagagagattatcaagcaggagtgcccagaagtgttgggcatgtctgacagagcraatgagactgagagattttgttataatgctgttggcttgaggtcaccagtgctcttggtgtacaactcagccggccctttactaattcctggaatgaagt

SEQ ID NO: 428554 - DNA, 201 bp, Homo sapiens
gtatttctacatttctttcaattttcaagatttattaaaattttgtatttggttctcaaaggtctcacatatttgaggttaatttattcttagttttttakaaattatttttaataatgagaattagattttttatcttttattctattttaaattggtcattcctggttatttacattttttcctagatatgcgtaattt

SEQ ID NO: 428555 - DNA, 201 bp, Homo sapiens
aaatagtgaagtatatacttgtattctgatttattattaataggataagatgtttcctggttcttaaaatatcagtctgtcctttaaagggctacttgggktataagtggctatgtaactgacttttgttcatagaaacatgttgtttaaatttgtcttttagtttttcaattataatttgtagagttactatcatatttt

SEQ ID NO: 428556 - DNA, 201 bp, Homo sapiens
ctattcttagtgtgctaaagatgttaacttatttagcttatgtaacaaatgctcgttgagataagtaatatgacttacaaaataatatggttgaatgctgwcaaactataattttgtcagtagttaattttgtcagaaaacattaagtataaaatcttcagaagtatgaataaaaatcagtgttttagagtagtcttagtt

SEQ ID NO: 428557 - DNA, 201 bp, Homo sapiens
tcctccttaactcactcatcccctacccctccaatgctcgtgcagttctactgtagagccatttatgtgtcttttcccaatgcatcctgtcgtttaccgtrtacataatgccagccttgccaccaaacaattctcttcctgagaggaatgccgtggccgcttaacctctttttccacctccctgttattcaagttatttcc

SEQ ID NO: 428558 - DNA, 201 bp, Homo sapiens
ctggtcttgagctcctgaccttgtgatccgacagccttggcttcccagagtgctgggattacaggcgtaagccaccacacccagcctcttttttaacaaamcaaaacaacacaaagacatgtatttggctcacagttttagagactgggaagtccaagagtattgtgctggcatctggcaagggttgaactgtaacagaag

SEQ ID NO: 428559 - DNA, 201 bp, Homo sapiens
ttttgtttgttttaaataaaaattctcccagaggatgaaggaaatacttgaaagagatttgactgtgattccagaagatatatatggacttaccagagtcrtatttgttttcatgggaagggtaatggggaaaggggaaaagttgcttttttaaaattttttaaattaaattatctggcaaccttgtactttggaggcagc

SEQ ID NO: 428560 - DNA, 201 bp, Homo sapiens
ctaagggacattatttatgaaatgtcattggacttattttctgagctgaattccattttacatgtgggatagcttgtttgttgttttaactatttctgagytggaaaggggatatttaaggaattgtttgtaatgaggtttagactttattcttaaaggatttgaaaaaaatacagaacctagttatatgtaaatgaatgt

SEQ ID NO: 428561 - DNA, 201 bp, Homo sapiens
ttggtttcagtaagttgctgcaagtggtcttaggaaagaagctgatctgttcaggtgcctggtgcttggttgcctggggtgattagtcctggagagagctrcttatataaacaaagcatgctgaaggctaagaaagtccctctgtgtcagtgtttttaagagatttcgttcattatattgtcataggtactagaatgactc

SEQ ID NO: 428562 - DNA, 201 bp, Homo sapiens
ggttgcctggggtgattagtcctggagagagctacttatataaacaaagcatgctgaaggctaagaaagtccctctgtgtcagtgtttttaagagatttcrttcattatattgtcataggtactagaatgactcaatctgagcaagtctatatgggaatcacaagtttgtttgacaagcttgtctctcaatgtgttgaaaa

SEQ ID NO: 428563 - DNA, 201 bp, Homo sapiens
tgttctctgattcactgtgattgattttacagtttagctctcaaggtgaaatttatcttcctgccactcaaaatcctcaattcttatagcacctatttcaracatcactagttttcacataattctgagaaagaatgagcaattctaaagttcagtcaagactgattatgtcttttgagtatatttataaatatgaattta

SEQ ID NO: 428564 - DNA, 201 bp, Homo sapiens
tgccaaaggaaattaatacatgttgtccaggcgttcctctgagatttcttaaagtgtgctatatttttatgtttactttgtaagggcaccttttgatagawtgaatacacacatatgcacgtaaccactgcagggtttaattacacgatgatagtatggctaattattcagaattgtttccacagtatcctcactacctag

SEQ ID NO: 428565 - DNA, 201 bp, Homo sapiens
ttcttatagcacctatttcaaacatcactagttttcacataattctgagaaagaatgagcaattctaaagttcagtcaagactgattatgtcttttgagtwtatttataaatatgaatttacattttggaaataaggatccattaatttattcaacaaatactgagtaccttcagagtgatagacatcatattaaaagatg

SEQ ID NO: 428566 - DNA, 201 bp, Homo sapiens
aattctgagaaagaatgagcaattctaaagttcagtcaagactgattatgtcttttgagtatatttataaatatgaatttacattttggaaataaggatcyattaatttattcaacaaatactgagtaccttcagagtgatagacatcatattaaaagatgggaataagctgacaaagtgtagtttctactctcaagtaac

SEQ ID NO: 428567 - DNA, 201 bp, Homo sapiens
agacacactggcacgtgcctggagtcccagctattcaggaggctgaggcaggagaatcgcttgaacccaggaggcagaggttgcagtaagccaagattgcrctactgcactccagcctgggcaacagagcaaaactctgtctctcaaaaaaaaaaaaaaaaaaaaaaaagcagaccctacctcatccactccctatcttat

SEQ ID NO: 428568 - DNA, 201 bp, Homo sapiens
aggcaggagaatcgcttgaacccaggaggcagaggttgcagtaagccaagattgcactactgcactccagcctgggcaacagagcaaaactctgtctctcaaaaaaaaaaaaaaaaaaaaaaaagcagaccctacctcatccactccctatcttatataaaaaacaaccactttaatctcttgggcttttcttctgctatt

SEQ ID NO: 428569 - DNA, 201 bp, Homo sapiens
ggcaggagaatcgcttgaacccaggaggcagaggttgcagtaagccaagattgcactactgcactccagcctgggcaacagagcaaaactctgtctctcaaaaaaaaaaaaaaaaaaaaaaaagcagaccctacctcatccactccctatcttatataaaaaacaaccactttaatctcttgggcttttcttctgctattg

SEQ ID NO: 428570 - DNA, 201 bp, Homo sapiens
gcaggagaatcgcttgaacccaggaggcagaggttgcagtaagccaagattgcactactgcactccagcctgggcaacagagcaaaactctgtctctcaaaaaaaaaaaaaaaaaaaaaaaagcagaccctacctcatccactccctatcttatataaaaaacaaccactttaatctcttgggcttttcttctgctattgg

SEQ ID NO: 428571 - DNA, 201 bp, Homo sapiens
caggagaatcgcttgaacccaggaggcagaggttgcagtaagccaagattgcactactgcactccagcctgggcaacagagcaaaactctgtctctcaaaaaaaaaaaaaaaaaaaaaaaagcagaccctacctcatccactccctatcttatataaaaaacaaccactttaatctcttgggcttttcttctgctattgga

SEQ ID NO: 428572 - DNA, 201 bp, Homo sapiens
atttacacagtcagattttataagtatagagttcactttcaacctcttcgctacaccactcactgcaatgtgaaatgtaattgatttttagactaagaaakagtcaatgtccttttgttgttgttatggatttgtttcggtctgttccaaatgatatttaaaaaggtaattcaatagagcattaaatattgtattaggaat

SEQ ID NO: 428573 - DNA, 201 bp, Homo sapiens
gtggacctacgcataagaattcccaaggaatatttttgcctattttctgtttgtccaaataggccaaacagtcacccatcttttcattctctaagtttttkaaatttttttgttgctagttaagtgatgaagtctgtttcctttcaggcagatcacagtttatgtggcttctgcagtgtgacctcctgcatgaagttcatt

SEQ ID NO: 428574 - DNA, 201 bp, Homo sapiens
cttcattatctttctgtaaatgacatgcctttgacgatatcctttgtagaagacagaattagtttctagtggaaagtttcagagattatggttttgtttgttatcccagcagcaaaggaaaaactggaaaacaggacaattggagtgaagagaagtaaggtacgtggtgacactggagatactttatctaatatctttgtg

SEQ ID NO: 428575 - DNA, 201 bp, Homo sapiens
tatgttctgctaatttatttatataacaaaactttttaaattaaatatttggattgtagtagaggtacttgcctttaaaaagtacttcaggccgggtgtgktggctcattcctgtaatcccagcactttggtaggccgaggcgggtggatcacttgaggtcaggagttcgagaccagcctgcccaacatggtgaaaccctg

SEQ ID NO: 428576 - DNA, 201 bp, Homo sapiens
gtaaatagttcaggaaatataaatgaataagtaatcagaagtcaaagagtaaaataacacaaagcttttccagctacaggtttgattgtttatacaggaatttgaggttgacttaaatctgtaatgctcaaccttaccagtagtaagtcacaaacaccccattgagctttgttacatgcttttaaaaaggagaatatttta

SEQ ID NO: 428577 - DNA, 201 bp, Homo sapiens
tacttatttgtagttttttttctcattcctttaattgtatttcattcaaattttgaagttcctcttttgttttataccactgaactctaaaagtttaatctttttttttttaatacaaagaatgattgattttaaatactttctacaatgctggccatatcaagcagctttctatagaaactagcatgcttgtttaagatg

SEQ ID NO: 428578 - DNA, 201 bp, Homo sapiens
tgtcattgagtggattctctagggagtcttagtaggtcacgtttttccaggcattggggcattctgggatccaacagttaaatctgtgaagggacaaataragatgtcaccagaatcaggagattgagatttatgcccaaaagtccagatgctttcttgggagataccccaaagaaatgatatctactaacatttctgcct

SEQ ID NO: 428579 - DNA, 201 bp, Homo sapiens
atgatatctactaacatttctgcctttagtttatcagaaagaagttgagagaagatcaggaataaggcatttcttataataagagtaattgtatttttttraaggtactcctttcttagtggcttctagaaatactgtcattgatttttcatatcaatagtttaattcactgagttaagaaaactgttattttttaaaaaa

SEQ ID NO: 428580 - DNA, 201 bp, Homo sapiens
tcagtagagatggggtttcaccatgttggccaggctggtcttgagctcctgaccttgtgatccgacagccttggcttcccagagtgctgggattacaggcrtaagccaccacacccagcctcttttttaacaaaccaaaacaacacaaagacatgtatttggctcacagttttagagactgggaagtccaagagtattgtg

SEQ ID NO: 428581 - DNA, 201 bp, Homo sapiens
gtcacacccttgaatttgctatgttagttgtagtatgttatagctaggatgactttatcatttattgtccaagccagaacactttttagagtgaaaggggrcagattttataaccatagtagaatagtgggcatgaacttggactcttttgggaatatagacatttatagttcttctacttattgcaatcaatatagaact

SEQ ID NO: 428582 - DNA, 201 bp, Homo sapiens
tgttggttttattctctggtgcaatattcatttagttataggaaaattattagcataattctttacatcaatatgggaaagcagaaaacatgggtaactayacagatatacatatacacacacatacacacttttttttgagatggagtctcattgtgtcactcaggctggagtgcagtggcacaatctcgggtcactgca

SEQ ID NO: 428583 - DNA, 201 bp, Homo sapiens
acaaaaacaatagaaagttgtcaatgaagtaccttttaaagagaaccaagctaatatggttacatagataaattcgcagaaacccaagggacaaatactcytgtcatggaaaatgtttcagagaacgtaatagcttctcaaatcattttatgatgctagcataatcctgaaaaatacagcttaaaaaaagaaaaccacagc

SEQ ID NO: 428584 - DNA, 201 bp, Homo sapiens
ttccaaaatatagtttaaatatcttttcatccagtgaaataaattggtaaaggagcacatatttctttgtggtttgagctttgacaacagtatgtatatcyggtactcatcctggtgtatctttccttcttatggtgagtttagattaaaagggcagttaccatatagaggggtatgtgggagcatactgatgtgtggtgt

SEQ ID NO: 428585 - DNA, 201 bp, Homo sapiens
gaaataaattggtaaaggagcacatatttctttgtggtttgagctttgacaacagtatgtatatccggtactcatcctggtgtatctttccttcttatggygagtttagattaaaagggcagttaccatatagaggggtatgtgggagcatactgatgtgtggtgttcctaggttagaacccacgaataccatgttgatat

SEQ ID NO: 428586 - DNA, 201 bp, Homo sapiens
atctttccttcttatggtgagtttagattaaaagggcagttaccatatagaggggtatgtgggagcatactgatgtgtggtgttcctaggttagaacccaygaataccatgttgatattccaataatggcttcactatatgtgtagtcttttgatttttaactttatgctactttttcatcttttatactccatgcctctg

SEQ ID NO: 428587 - DNA, 201 bp, Homo sapiens
tggttttttgatggaaaatggatcccaagtgaaaatgttatatgttgctttgctgcttctaaactttctcccaccactcttcttctcactgttattcctgrgttagttatattggttgtcaccagtgactacagcttctatgtctttttggcagtttgagagtcttgtttcaaattgtatatagtcaaaagcttgacagtg

SEQ ID NO: 428588 - DNA, 201 bp, Homo sapiens
aggaggtctttgatggctggagatgtaaattaatatgtatttgtttctatcacatagtgaggtcttcagtacctccttagttcttaaatgctttcaaatcraattgaatcaaacaactgatttcacactcattcctcttatagcaatggaaattggtgtctagaattgcctgctgaactaactattaagccttgcactccc

SEQ ID NO: 428589 - DNA, 201 bp, Homo sapiens
ctttttgctattgagccagactaccttttgcctttcaggcagccaagcaccaatatttcccaagcaacacagctagtgagagaggcatctcatgtttccayatatacatatctcactgccttaggcaagcttcatttccgaagtgatgggaaaatgtgcatgctccaagaagaaaaccaggtggttagtaattctagtggg

SEQ ID NO: 428590 - DNA, 201 bp, Homo sapiens
tcattcaagagtgtagagtgagttaaactattttccatgttggaaaatggtgaaagacatttttctgcaatctcattaaaaggcctttaattttattgtcrttttcatccaggacactgtaggtaaatttgagggcatatattagaaaacccataaaagaggtttataaagaagttcataatcacatcctgttttaatgcc

SEQ ID NO: 428591 - DNA, 201 bp, Homo sapiens
ttctaagtcaagataaatattgcttcatttgtatagttgttttcttttgcaatttgctcatgagtgaaatctctttaaaacgttaacatttgattaaatayacttgaatgcttacaaagagtttttcatataatttatcttgtttatctttatagcaacattaagggactggtagatatttatgttcctcttggtgagttc

SEQ ID NO: 428592 - DNA, 201 bp, Homo sapiens
gagtgtagagtgagttaaactattttccatgttggaaaatggtgaaagacatttttctgcaatctcattaaaaggcctttaattttattgtcgttttcatmcaggacactgtaggtaaatttgagggcatatattagaaaacccataaaagaggtttataaagaagttcataatcacatcctgttttaatgccttttgttt

SEQ ID NO: 428593 - DNA, 201 bp, Homo sapiens
gcgaaacttcatctgtatttacagccactcaccattgctggtattgccccctgagctccacttcctgtgagatcagtggtggcattagattctcatagggygcaaaccctgctgtgaactgcgcatgtgagggatctaggtttcatacttgttatgaaaatctaatgcctgatcatctgtcattgtctcccctcaccccca

SEQ ID NO: 428594 - DNA, 201 bp, Homo sapiens
tttaaaggggaaagggtgagatatttaaaagtacacaattttcatgtaagaggggttagggaaaaatactcattcatgcctttggctcagtgaatctgcattttttttttttttaacataagatgacatagacaaatagggcagaggaaaaatgcagggaatctgcattttacataagacaacacagacaaaacagggcag

SEQ ID NO: 428595 - DNA, 201 bp, Homo sapiens
tcatgcctttggctcagtgaatctgcattttttttttttttaacataagatgacatagacaaatagggcagaggaaaaatgcagggaatctgcattttacrtaagacaacacagacaaaacagggcaggggaacaatcagatactcatttgtgtctggtgggcgggggggtgactgcacctgtaaaggtaagctatcaatt

SEQ ID NO: 428596 - DNA, 201 bp, Homo sapiens
ggcagaggttgaggtgaaccaagattgcaccattgcactctagctttggcaacaagagtgaaactccatctcgaaaaaacaaaacaaaacaaaacaaaacaaacaaacaaacaaaaaaaaacaaagaaaaaacaggtaccttgctatcatattcatcattctctcacccagtcatatcactggggctcaaaaagtatttgt

SEQ ID NO: 428597 - DNA, 201 bp, Homo sapiens
tctttatggttatttgtcttttctctgaatttcctggctatattattaattcatttttttttctgttgggttttttgcctttggtggctcatatttaagamattttttctcctaatattctgggaacaaatcttatcttctgcatgttgcagcaatacttgaatattttaaccttgggttctaacctcctttgtagtctgg

SEQ ID NO: 428598 - DNA, 201 bp, Homo sapiens
ctgtctctcttcctggtccatgttccaccccctgaaataaatttaattcttttttttcccctggaaccaaaagctaagccaaataatgctactttcccaakaaaattctgtaattttacacctatttaaattctacgttgggtgctttttttcgctaatgatctgtggaaattattttggtgttgacacaaatgggaaagt

SEQ ID NO: 428599 - DNA, 201 bp, Homo sapiens
agactgttggagttgcctaggtagtggtttgtgtcctgaggactaaagaaaatttgtctagaatgtaattcatccacagcaaaatgagaagtgatatttcttttttttttttttttgagatgtagtctcgctctgtcacccaggctggagtgcaatggtgcgatctcggctcactgcagcctctgcctcccgggttcaagt

SEQ ID NO: 428600 - DNA, 201 bp, Homo sapiens
ttgtagtatgttatagctaggatgactttatcatttattgtccaagccagaacactttttagagtgaaagggggcagattttataaccatagtagaatagygggcatgaacttggactcttttgggaatatagacatttatagttcttctacttattgcaatcaatatagaactggttggttattaagataggttaaatat

SEQ ID NO: 428601 - DNA, 201 bp, Homo sapiens
cctgtggtctcagctacttaggaggctgaggaggtaggatgaattgagctcacaggttccttgcaccatacactctagcttgggtgagaccttgtctcttaaaaaaaaaaaaaaaaaagatgggtaaactgtccatggccatgttgtcatggacagtcttgtgctttcagatgctgagcccagggctttgaaccaaggatt

SEQ ID NO: 428602 - DNA, 201 bp, Homo sapiens
gactattttgtgtggctttctctatagagaagagcatgcgaatagagatgcatagcctgcaggtgtttgcatattgaatccacatgtgctttttccgttasttgctggggatggctttgatggaatctgttatcatttatggcattgtcccttttgtttctagactaggttgtggttttgcctaagttgtgaccccccccc

SEQ ID NO: 428603 - DNA, 201 bp, Homo sapiens
aatgtactttttcttataaaaacaaattaatgaataggaaaatacatgtttatgttttttaaaaatttaaggtagatattagtggaacaaaaaaaagatgsattcctctcaaataacttaaaaaaggaaaaatccatcaaaagcataaaactatgtgagagaatatatatgggtagtgtattagtccattttcatactgct

SEQ ID NO: 428604 - DNA, 201 bp, Homo sapiens
ctactaaaattatgcttatttggcttgcactgtgcccagggtttttttttttttttttttttttctcgaaagctgtcagtggcagatttgtagttagaagstaagcatttctccagagaaagagacattttagcttgagaatgcagtaaagcaggggtccctaacccccaggtcatggaccagtatgggtccatggcctgt

SEQ ID NO: 428605 - DNA, 201 bp, Homo sapiens
agagtcaagttttgacaagaacagattacccaggtgtcaaagcatggcgttttcttcttaagatgcctggaatagcagaggaaacttacagtcgtttaatrtttggggctctgtgtaggaacttggaagtcatatcataaagaaatgtgattttttttctgctcttcttacctctccttgcttaggataagagagtaaata

SEQ ID NO: 428606 - DNA, 201 bp, Homo sapiens
cattttaagtgtagaaagaaggaactgggttagaaatgtaatatatcagctcagagtcaagttttgacaagaacagattacccaggtgtcaaagcatggcrttttcttcttaagatgcctggaatagcagaggaaacttacagtcgtttaatatttggggctctgtgtaggaacttggaagtcatatcataaagaaatgtg

SEQ ID NO: 428607 - DNA, 201 bp, Homo sapiens
tatgcttatttggcttgcactgtgcccagggtttttttttttttttttttttttctcgaaagctgtcagtggcagatttgtagttagaaggtaagcatttytccagagaaagagacattttagcttgagaatgcagtaaagcaggggtccctaacccccaggtcatggaccagtatgggtccatggcctgttagaaactgg

SEQ ID NO: 428608 - DNA, 201 bp, Homo sapiens
tttaggagaatattaaattgtctactaaaattatgcttatttggcttgcactgtgcccagggtttttttttttttttttttttttctcgaaagctgtcagkggcagatttgtagttagaaggtaagcatttctccagagaaagagacattttagcttgagaatgcagtaaagcaggggtccctaacccccaggtcatggac

SEQ ID NO: 428609 - DNA, 201 bp, Homo sapiens
aaaaaaggataattattaattactttagaaaattgtctttctacttccttattttcaaaggtttgaaaggtattttttgtttgtgtttaaatatagtttgstattgtcatgaatatgtagtttacagtttttcttcataaaatttatatgccatgttggttttttgatggaaaatggatcccaagtgaaaatgttatatgt

SEQ ID NO: 428610 - DNA, 201 bp, Homo sapiens
gggaaagtagtgtcggagtggggggagacagctctctttcctaggtataaatgaaaaaaggataattattaattactttagaaaattgtctttctacttcyttattttcaaaggtttgaaaggtattttttgtttgtgtttaaatatagtttggtattgtcatgaatatgtagtttacagtttttcttcataaaatttata

SEQ ID NO: 428611 - DNA, 201 bp, Homo sapiens
atttactacctataatgacaaataatgatattaaaattaatgtaaacctagtttactttgtatattgctaaaatgtaagcttcaccaaagcattgtttttrtatatattcttagtgtctgcaatagtgcttagcatatgtgttcaataaatattagttgcatgcacattgatttaggtacatatgttttccttaaattcct

SEQ ID NO: 428612 - DNA, 201 bp, Homo sapiens
ttactttgtatattgctaaaatgtaagcttcaccaaagcattgtttttgtatatattcttagtgtctgcaatagtgcttagcatatgtgttcaataaatawtagttgcatgcacattgatttaggtacatatgttttccttaaattcctcatgtgtgaagggtgtacatagattactttagaatctttccttctctctttc

SEQ ID NO: 428613 - DNA, 201 bp, Homo sapiens
gaaaggccactttacttaaggatttggatgttttgatagttctatctagagggcagtcttactacaaagagacactgacaatttggtcagatgtattgtcmgaagtaggaaagggtgtgcttttctgtttaatttttagaaaatttaatttttcttttacctttgtgaaaatagaaatggtaggttagactttttaatgaa

SEQ ID NO: 428614 - DNA, 201 bp, Homo sapiens
cagatgataagctgagggtgtttcatggcacagggtttgggtaaaagtgatgccatcttgctattctgataataaggaggacagtgtgaggaaatgtccamcagccatctagcaatagagagacagatggagccttgttctagaaaccacatgtcatcatcagactcagagagtaggcatgcacttttcttttcttttttt

SEQ ID NO: 428615 - DNA, 201 bp, Homo sapiens
agaaaatttaatttttcttttacctttgtgaaaatagaaatggtaggttagactttttaatgaaaaataatgtaatccttttaatttgcttttctgtagtrtatcttcttgtatagttggtgtgtgtgattagaagagacacagggctttattttctgaagaaatgtattgtagttagttgatatgaaattctaatcaggg

SEQ ID NO: 428616 - DNA, 201 bp, Homo sapiens
ttgaatgcctcaaatgatcctcccaccttagcctctcaaagtgctgggattataggcctgagacactgcacctggcctctcgatgttactttacattttattttcacatgatacagattctggagatgaatattctcatattcatcttttattttttgaagatatatagtacttgccacctagtatgtgtacagttctagc

SEQ ID NO: 428617 - DNA, 201 bp, Homo sapiens
cacttgacatgtaattttaaaattacatcttaggactgtctgtctgtggatgcatatataagtcatgacagcataggaattgaccttcccaattcctagcraaaaatctgtactggaaaagtggttattgacaagatcagtttttccccgtaattgttggaaataggttatgtcgtaagtgcccaatatagttccacgata

SEQ ID NO: 428618 - DNA, 201 bp, Homo sapiens
taaaggacttaatacttttcgtcgtgctttcatttacatgtcccatttcatctttttctcaggataagaaagcaaaatcaattgacccagtcttttttctttttttttttttcaaaattagaatatatcttcagttctaaatgtagggacagatttactttgaaaatagtaagttctaagaaacattatttaattaatgtt

SEQ ID NO: 428619 - DNA, 201 bp, Homo sapiens
cccatatagcctaggtgttactgttgtgaagcagtgtgttgctaattacaattttaataaaacgtgtgggaggctgtcttcacattaattgttttattcaycaagacaattgttacacttctgtagcataatgaattggacaatcactgttatgtacttcagagaaatagacttccttgttgctaaagtgaataggctggt

SEQ ID NO: 428620 - DNA, 201 bp, Homo sapiens
atattattttccattgaacttaagagatgttctcataaaattaaggtaacaatcgcaagataagtatattagaacatggaaaatatttttaattttgagamacttaattataaaataatagcttcaataaataacaaatatagaaaagtgtaggaactggccatgcacggtggctcacacgtgtaatcccagaactttggg

SEQ ID NO: 428621 - DNA, 201 bp, Homo sapiens
ggaagaggaacaagctatgacctaatgcttgcttggaccagtataagcatgccaggacaaatatttaggctaaattgtgggagctaagaacataaagtacwttgatttctttattacagctagcagatatttaagaatgttagcacaggtctttgaataaattttgcttctaagagaagttattatgtattcctaattaga

SEQ ID NO: 428622 - DNA, 201 bp, Homo sapiens
ttcagaaatatatcagactagtactttacatatgtatatatggatcattatgtttatataaatattccccaacctcactgtaatagtgtttatctgtatctctttcttttaaaatgtgtgaactcagctatgtaatacttatgccaatatgtatagttttaaatattctagcatctctggcagatactattttctacttga

SEQ ID NO: 428623 - DNA, 201 bp, Homo sapiens
tgaactcttgggctcagggcatcttcctacctcagcctcctgagtagttgggactacaggctactgtgcacagctaattctgttgacttatgagcctttgygtgggatattgggagctaggagttagcataatggtataaaatgtgtgagagaaagatagaaactgacttttaaaagtttgagggtcagacttagtttaag

SEQ ID NO: 428624 - DNA, 201 bp, Homo sapiens
gggtactaacacgcgggaggctcacccagtcaaagtcacacgggttaccgtcttcgcgttgggtgggcagaccgtggcagagcggcggcagtttcctcacragtaggaaggcagcagagagcagggccgacagaaggtagtaaggttgggcgagccatcgtgaaagtcgcggcaccgaatacacgagagcaattagaggtg

SEQ ID NO: 428625 - DNA, 201 bp, Homo sapiens
cctgaacgttctcataaggcgacggaagtagttgttgaaaaaaggtaggcggtgcctgaggcatccaatgacaagcggctccttgagaaagggggggggggtactccttgaaagcattgtccaatgaaaattaccaacggcagacacggagacagcgccggggcggagggtacgatggagaatttcacggcactgtttggg

SEQ ID NO: 428626 - DNA, 201 bp, Homo sapiens
aagtccgctacaggctcggaacctcaggtgtcctcagagaggtaaaccccagggttcccagatacacctgcaagggcagggacagtcaaggtcgcggggtmctaacacgcgggaggctcacccagtcaaagtcacacgggttaccgtcttcgcgttgggtgggcagaccgtggcagagcggcggcagtttcctcacgagta

SEQ ID NO: 428627 - DNA, 201 bp, Homo sapiens
tctgcgagaaacacccaagaatgatcaataaaagaaaaaaaaaaaaaaaaaaagaaaacaaattctaagaggatataaaaggtttatggaaattttatctkgtctagtcaaagctgatcaagattagacagatttgtttgtaaagtttattaaaatcagctttagtattaaaagcacattaatacatatatattatatata

SEQ ID NO: 428628 - DNA, 201 bp, Homo sapiens
agcacttcctgaacgttctcataaggcgacggaagtagttgttgaaaaaaggtaggcggtgcctgaggcatccaatgacaagcggctccttgagaaagggsgggggggtactccttgaaagcattgtccaatgaaaattaccaacggcagacacggagacagcgccggggcggagggtacgatggagaatttcacggcact

SEQ ID NO: 428629 - DNA, 201 bp, Homo sapiens
ctcctgcatcgaagaaagtattccctatagctttatctttaatggcccaaatcacttcacagccttcaatttcatacactaactcaagtgcgataccaccrttccctaagatcattattcttttagctttagtaagctgtttctgaaattcctgagcactgtctgtatcacggattcctaatacataaggatttccttcac

SEQ ID NO: 428630 - DNA, 201 bp, Homo sapiens
agctgataagcttaaaaaaaaattgcaagaaaaatctcaagttttaagaaagtttacaaatttgtgttgggctgcattcaaagctgtcctgggctgcattygacccgtgggctagagttggacaagcttgtagatgatttcaggttataaaaccagaagtacaattcaacaaaaaaggagtaagtcatcaatataaatatt

SEQ ID NO: 428631 - DNA, 201 bp, Homo sapiens
ttagttgtaactgacgtatggtctcttggaaaagtgaaggactttttcttcaaaattctaaactcatcctgaaggtagattttctttacttcacacatagyttcaaggtgaatcttatgagaaaactcttttgttcctttaagattcaagccttcatgccaatctggtcccaacgcactgcctacattatctgatttagat

SEQ ID NO: 428632 - DNA, 201 bp, Homo sapiens
gctgctcctgcatcgaagaaagtattccctatagctttatctttaatggcccaaatcacttcacagccttcaatttcatacactaactcaagtgcgatacmaccgttccctaagatcattattcttttagctttagtaagctgtttctgaaattcctgagcactgtctgtatcacggattcctaatacataaggatttcct

SEQ ID NO: 428633 - DNA, 201 bp, Homo sapiens
ttctgatacataaagattgaaggccctccctacagaggggctgagggctggtaccttaagtaaggcttgctttcactggctaaaggccttttgagctttargtttccaggttaggagatgaattttatccacttgagtttcttttatgaagtgatatagaggatgatctatctcaccatacccaggtatccatagcctgca

SEQ ID NO: 428634 - DNA, 201 bp, Homo sapiens
ttcaagatttagagctccttttagtagttattgtagtgcttgctggtactggcaaattctgtcagcatttgtctcgaaaagactatcttttcttcatttaygaagcttagttttgctggatacaaaattcttgactgataatttttttgtttaaggaggctaaaatagaaccccaatcccttctagcttgtagggtttctg

SEQ ID NO: 428635 - DNA, 201 bp, Homo sapiens
gttgactgtataaattgtgaaggttttctcccactctgtgagttgtctgttaactctgctgattatatctttagctatgcagaagtttttagtttaattaagtcccatccatttatgtttgtttttgttgcatttgcttttgggtccttggtcataaagtttttgcctaagccagtgtctagaagggtttttctaatgtta

SEQ ID NO: 428636 - DNA, 201 bp, Homo sapiens
tgttgactgtataaattgtgaaggttttctcccactctgtgagttgtctgttaactctgctgattatatctttagctatgcagaagtttttagtttaattaagtcccatccatttatgtttgtttttgttgcatttgcttttgggtccttggtcataaagtttttgcctaagccagtgtctagaagggtttttctaatgtt

SEQ ID NO: 428637 - DNA, 201 bp, Homo sapiens
ttgttgactgtataaattgtgaaggttttctcccactctgtgagttgtctgttaactctgctgattatatctttagctatgcagaagtttttagtttaattaagtcccatccatttatgtttgtttttgttgcatttgcttttgggtccttggtcataaagtttttgcctaagccagtgtctagaagggtttttctaatgt

SEQ ID NO: 428638 - DNA, 201 bp, Homo sapiens
tttgttgactgtataaattgtgaaggttttctcccactctgtgagttgtctgttaactctgctgattatatctttagctatgcagaagtttttagtttaattaagtcccatccatttatgtttgtttttgttgcatttgcttttgggtccttggtcataaagtttttgcctaagccagtgtctagaagggtttttctaatg

SEQ ID NO: 428639 - DNA, 201 bp, Homo sapiens
tgtgtatatatataactttatatatatatgtatatatataactttatatatatatatgtatatatatataactttatatatatatatgtatatatatatawaactttatatatatatatgtatatatatatatataaacatcttctttatccactcattgattaatgggcatttgggctggttccttatttttgcaattgc

SEQ ID NO: 428640 - DNA, 201 bp, Homo sapiens
acatatatatttatgacattatatatatataactttatatatatgtgtatatatataactttatatatatatgtatatatataactttatatatatatatrtatatatatataactttatatatatatatgtatatatatatataactttatatatatatatgtatatatatatatataaacatcttctttatccactcat

SEQ ID NO: 428641 - DNA, 201 bp, Homo sapiens
cacatatatatttatgacattatatatatataactttatatatatgtgtatatatataactttatatatatatgtatatatataactttatatatatatatgtatatatatataactttatatatatatatgtatatatatatataactttatatatatatatgtatatatatatatataaacatcttctttatccactca

SEQ ID NO: 428642 - DNA, 201 bp, Homo sapiens
catccgcttgctgtgctcagacacgtaatctggatagatggagcacaagaatttaatgtagtcatcactgtggtacttggtcatctcctcagcattggctytgtgagggtgatgggtttccatttttcagtagaaaccatagttgagcagcaaattatgagtcacgcagattcagtgaggattccttgggtgggcttgtcc

SEQ ID NO: 428643 - DNA, 201 bp, Homo sapiens
ttcatttaccagttctgggagctttttggataagtctttagggttttctaggtatactatcatatcatgagccacagcaacagtttgacttcctctttacyaattcggatgtcctttatttcttccttttgtctgattgctttagctaggacttccagtactatgttgaagataggtggtgagaatgggcattcttgtctt

SEQ ID NO: 428644 - DNA, 201 bp, Homo sapiens
acacatatatatttatgacattatatatatataactttatatatatgtgtatatatataactttatatatatatgtatatatataactttatatatatatatgtatatatatataactttatatatatatatgtatatatatatataactttatatatatatatgtatatatatatatataaacatcttctttatccactc

SEQ ID NO: 428645 - DNA, 201 bp, Homo sapiens
cagaattcacacttcagtatgtacccagtaggctccaaaaactattgatggaaccaaagataatgtaagatattaaattgtccagcttctagaaccagcawaatgattaagggtatgattctagaaccagacaacctgggttcaaaacctgacttctctacctcctatctgggtgactttgaacaagttacataaccattc

SEQ ID NO: 428646 - DNA, 201 bp, Homo sapiens
cgaacattaatgaacattatttaggaaattcacatcagagaaaaatttttattaaaaaaacagctgttccattaagagaatacttcagtaatactttttccaccattaccaccaccttaccccctcttaggatacttagaggatagagggctcttaatacatactgacgggtaatttgatgttttggaagatcctatctca

SEQ ID NO: 428647 - DNA, 201 bp, Homo sapiens
aatcagattaatatattattaaactatatttgttaaataacacaaaagtctgaaattcattcacttaagtaaaaaaatttattgactgtctactagcaggmcagatgctgtgtttggctctgaattcccaactagcaagagcagagaatctacattatggctgatccataagccaccaattcagctaaatgagatgtttct

SEQ ID NO: 428648 - DNA, 201 bp, Homo sapiens
cttttccatttcaaaggggagaagggaatatgggaaattcctctttttttcatattcttcaatcacaacacaccaaaatttttcacaaggcattgttatcyttcctttaaaaaaacaatacagctatctaactggaaggaaagcagtgtagaaaaaggtttattacatccctatctctgcagaattcacacttcagtatgt

SEQ ID NO: 428649 - DNA, 201 bp, Homo sapiens
gtttatttctgggagttatttatctgaggctaaaaagtaatcatgagccaaaaaaatttcaaatgtttcccatgtttgtttgcttttctgttttgttgtawgtttttgtgcttgtttttgtattgtctcttgtaggatcctaatcatgaaaataagtatgataaattataagtcactattggcactgttgtttatattagc

SEQ ID NO: 428650 - DNA, 201 bp, Homo sapiens
tttattaaaaaaacagctgttccattaagagaatacttcagtaatactttttccaccattaccaccaccttaccccctcttaggatacttagaggatagarggctcttaatacatactgacgggtaatttgatgttttggaagatcctatctcattgattctttggcagaagaaacagttgcaatgaaagagaaatgcaag

SEQ ID NO: 428651 - DNA, 201 bp, Homo sapiens
catatggcacaaataatgtacacccacctcaacatgtagtcggaaatcagattaatatattattaaactatatttgttaaataacacaaaagtctgaaatycattcacttaagtaaaaaaatttattgactgtctactagcaggccagatgctgtgtttggctctgaattcccaactagcaagagcagagaatctacatta

SEQ ID NO: 428652 - DNA, 201 bp, Homo sapiens
tgagccaaaaaaatttcaaatgtttcccatgtttgtttgcttttctgttttgttgtatgtttttgtgcttgtttttgtattgtctcttgtaggatcctaaycatgaaaataagtatgataaattataagtcactattggcactgttgtttatattagcctcctggatcatttttacagttttccagaactccacaaaggta

SEQ ID NO: 428653 - DNA, 201 bp, Homo sapiens
tgtcatttaagacacagtgtgacaaacttaggggtaaagtgagctaaaatgataggataattgagcttccattcctatgcaagaattgatgactttagttycatagaaaagctggaaaatacttaaattttcctccagaaagccattttttttctgggaagaaacatatactcttataacgaacattaatgaacattattt

SEQ ID NO: 428654 - DNA, 201 bp, Homo sapiens
gttatcagcactgaagtcagtggatctgcatgaatctggaaaattgcaacaccagcttgctgtggatttggataggaacatcaacatccagtggcaaaaayattgttatcccttgataggatcaatgacctattcagtcaaagagatggagtacctcacccgggccattgacagaactggaggagaaaaaaatactgtcat

SEQ ID NO: 428655 - DNA, 201 bp, Homo sapiens
ctcctgtgtttggtgggtggtgcctagttctagacccatttaaagggtttcttctttctactggatttgttcactgtttcagtcctatcagcactctgttyatctggcttatctaaggttggccaagacaccagttacctaggtgagtgaataattcaatcactggaatatcataagcctattttagtaactgtaactctc

SEQ ID NO: 428656 - DNA, 201 bp, Homo sapiens
cttttgactgttcaaataattttcaaaaacatcccctcatctaaacctataataaattagacatgattagcttatttaattataccaatcaaatctcttcyatctttatatctactcaatcttggtaactatatcctccttttattttgggattgcctatttgttatcagcactgaagtcagtggatctgcatgaatctgg

SEQ ID NO: 428657 - DNA, 201 bp, Homo sapiens
ttggcatgccctttgatgatcagattaaagcaatctaagtgacccctagacaaggcatctgagccatgctgtaagatcaccacactagacaggaacatctytattactttggacatgaccagtttgaaaatggcctcataggactcatcatcaatcccatctaggagcagatagttaatagcataatatctgcctttgcca

SEQ ID NO: 428658 - DNA, 201 bp, Homo sapiens
tcttaagattttttccttcatcttgactttagataatctgattactatgtgcctaggcaatgatctttctgtgatgaatttcccaggtgttctttgagctkcttgtatttggatgtctagatctctagcaaggccagggaaattttcttcgattagtccctcaaatatgttttccagacttttaaatttctcttcttcctt

SEQ ID NO: 428659 - DNA, 201 bp, Homo sapiens
ttccctgcccattttatacaacaacctttaaacgttaactctttcccaattctatacccagttctttacctcaccacaacacctctcttcataccactccyatcacctcttcccatatcaccactagcccatcaccatctagaggtttccaacctgccatctgagtgtcagtttattataacccctccctcttgatctttg

SEQ ID NO: 428660 - DNA, 201 bp, Homo sapiens
gaggctggaattagtccagaaaccttcaggtaacaccagggtgtctccctggcaaggaaccttcagtgcctctcaacctcttccagccccacatgacagcraggctctctgtaaaaggaaaccaattagaaacaaagccaacattcccagcaccctgaggacatggggggattagctaagttctccctggcaagcctgtcc

SEQ ID NO: 428661 - DNA, 201 bp, Homo sapiens
ctatgcagaagtttttagtttaattaagtcccatccatttatgtttgtttttgttgcatttgcttttgggtccttggtcataaagtttttgcctaagccartgtctagaagggtttttctaatgttatcttctagaatcttcatggcttcaggtcttaaatttaagtctttgatccatctggagttgatttttgtataagg

SEQ ID NO: 428662 - DNA, 201 bp, Homo sapiens
acagtgcccattctctagtaatccacaaactttttgaacatttaattcttatcaatgggaaaaaaatatatacagaataaaaactagaagaaaatgagaartgcacatgtgtgtatgtgtgtgtgctctaatacattatttctgcaactcaacaaattctcttgcataccttctgggtaactgtatcccatagcctaatag

SEQ ID NO: 428663 - DNA, 201 bp, Homo sapiens
agccatacccctcttcaccaatgggaagtcaagacacctatgggtaaaagttctctctgatgcatgaaaactcagagtgataaagtaattttaaaataaawatttggagaaagcagtcctgtttgtttatttctatcactaaagacaagctctagatgaatttccaagtcagaagagaagtcttgtgaggcaattctccca

SEQ ID NO: 428664 - DNA, 201 bp, Homo sapiens
acagagtctcacaaaaataaaaatagtatctcaaaactcccccaattctgcaggtggaggatggcaggagactagactaccatcctccacctgcagaactkggggaagacagatggcaggcagtgtgagttttttggctcacttgaggccagtgagaaggtatgagaatggaaccaatctaaaaatggctgatgttactta

SEQ ID NO: 428665 - DNA, 201 bp, Homo sapiens
agtttaagagcagaggtttaacaggcaaaagaaagagaaaagctctcttctgtagagacaggggatttaagtgggtcttttggtccacagtgaagtgcagragattttatagatgagcttgaggaggtagtgtctgatttacacagggcaaaaaagattggtcaccccaggtgtaacatttgcatagcacacaaagaactg

SEQ ID NO: 428666 - DNA, 201 bp, Homo sapiens
ttaagggaatagaacagggaacctgataggtgacaaatagtctggagacttcatctagacacgagcaagcttgcatccttcaggcccttaagctgctcgakttcttaaagatcacagtgggctccatgaattatctgttctgtagaatgtacaagcagatagctaaaagagagcacctgggagataccaagtacagcttgc

SEQ ID NO: 428667 - DNA, 201 bp, Homo sapiens
tctccctggcaaggaaccttcagtgcctctcaacctcttccagccccacatgacagcgaggctctctgtaaaaggaaaccaattagaaacaaagccaacaytcccagcaccctgaggacatggggggattagctaagttctccctggcaagcctgtcccctgagtcttgtaaggctggtagccacgctaactttttaaatg

SEQ ID NO: 428668 - DNA, 201 bp, Homo sapiens
gcctgtacctaagagacctctgaccatttgctgtcccatctacagaaaatatctaattgttggatagtattaaaattaaggctcccctctgcaggccaggwtggttcaagatggtaagaaggccacacccttatgcaaaagaaaatgagccactttttcttcagtctcagggtcaaaggaatcccagtgcttcagaaagca

SEQ ID NO: 428669 - DNA, 201 bp, Homo sapiens
caagaggtttcctcagttggggcacagagcagtatatcatccacatattgcaagaccctgacctgaggatgggaaaactcagagaggtcctttgacaatgyctgtccaaacaaatgagggattatctcaaaatccctgaggcagcaccatccattttaactgggcagtttggccagaagcattcttcaaaggcaaacaggt

SEQ ID NO: 428670 - DNA, 201 bp, Homo sapiens
ttaccctcactgtctacctaaataatttctttctagttcctgtttcatttcctttatatatttaggtgttctaaatgttgaatgtatatacatatatatayacacacacacacacgtacatatatttgtcattttctcttgatgaattgatctctttattattacataatgaccttctttttctctttttacagtttttga

SEQ ID NO: 428671 - DNA, 201 bp, Homo sapiens
tttggtttccatttgcatggaatatctttttccattacttcactttcagtctatgtgtgtccttaaagctgaagtgaatctcttgcagaaggatagagttrggtcttgtttttttaaaatctactcaaccattctgtctttggggtagggagtaatgaaatataccattttattacagagtctcacaaaaataaaaatagt

SEQ ID NO: 428672 - DNA, 201 bp, Homo sapiens
tttaaaatcctttttgtctttgatggattgagttaattctaaagccttgtcttctagctctgaggttcttttttctgcttgttcaattctattgctgagamtttccagtgcattttgcatttctctaagtgtatccttgatttccagaaattgtgattgttttttatttatactatctatttcactgaagaattttccttt

SEQ ID NO: 428673 - DNA, 201 bp, Homo sapiens
actgtaactctcatcatcagtctatttgtcagtcagtgaattccctgcccattttatacaacaacctttaaacgttaactctttcccaattctatacccasttctttacctcaccacaacacctctcttcataccactcccatcacctcttcccatatcaccactagcccatcaccatctagaggtttccaacctgccatc

SEQ ID NO: 428674 - DNA, 201 bp, Homo sapiens
tccctttgggccctcctgatatgactgctgaaagagctgagctgattgtgcaatgcttgcaaagttctgggttgtctcacagggcaaagaaagcctgtacytaagagacctctgaccatttgctgtcccatctacagaaaatatctaattgttggatagtattaaaattaaggctcccctctgcaggccaggatggttcaa

SEQ ID NO: 428675 - DNA, 201 bp, Homo sapiens
ttgacagaactggaggagaaaaaaatactgtcattgttatttccctgggccagcatttcagaccctttcccattgatgtttttatccgaagggtcctcaaygtccacaaagccattcagcatcttcttctgagaagcccagacactatggttatcatcaaaacagaaaacatcagggagatgtacaatgatgcagaaagat

SEQ ID NO: 428676 - DNA, 201 bp, Homo sapiens
gcagatagctaaaagagagcacctgggagataccaagtacagcttgcgggggtgaaggtttatttctgggagttatttatctgaggctaaaaagtaatcakgagccaaaaaaatttcaaatgtttcccatgtttgtttgcttttctgttttgttgtatgtttttgtgcttgtttttgtattgtctcttgtaggatcctaat

SEQ ID NO: 428677 - DNA, 201 bp, Homo sapiens
cgggccattgacagaactggaggagaaaaaaatactgtcattgttatttccctgggccagcatttcagaccctttcccattgatgtttttatccgaagggycctcaatgtccacaaagccattcagcatcttcttctgagaagcccagacactatggttatcatcaaaacagaaaacatcagggagatgtacaatgatgca

SEQ ID NO: 428678 - DNA, 201 bp, Homo sapiens
gaacagggaacctgataggtgacaaatagtctggagacttcatctagacacgagcaagcttgcatccttcaggcccttaagctgctcgatttcttaaagaycacagtgggctccatgaattatctgttctgtagaatgtacaagcagatagctaaaagagagcacctgggagataccaagtacagcttgcgggggtgaagg

SEQ ID NO: 428679 - DNA, 201 bp, Homo sapiens
tgattagcttaataatcaaccttctaaattatttttcctgcaattcagagatttcttcttggtttagatccattggtggtgaactggtatggtcttttgcrggagttaaagaatcttgttttgtcatattaccagaattggttttggggtttcttctcattttggtagacatgtcagagggaagatctgggattcaagggc

SEQ ID NO: 428680 - DNA, 201 bp, Homo sapiens
ctctggtgcctccttgattagcttaataatcaaccttctaaattatttttcctgcaattcagagatttcttcttggtttagatccattggtggtgaactgktatggtcttttgcaggagttaaagaatcttgttttgtcatattaccagaattggttttggggtttcttctcattttggtagacatgtcagagggaagatc

SEQ ID NO: 428681 - DNA, 201 bp, Homo sapiens
tcttataacgaacattaatgaacattatttaggaaattcacatcagagaaaaatttttattaaaaaaacagctgttccattaagagaatacttcagtaatmctttttccaccattaccaccaccttaccccctcttaggatacttagaggatagagggctcttaatacatactgacgggtaatttgatgttttggaagatc

SEQ ID NO: 428682 - DNA, 201 bp, Homo sapiens
tctgtagaatgtacaagcagatagctaaaagagagcacctgggagataccaagtacagcttgcgggggtgaaggtttatttctgggagttatttatctgargctaaaaagtaatcatgagccaaaaaaatttcaaatgtttcccatgtttgtttgcttttctgttttgttgtatgtttttgtgcttgtttttgtattgtct

SEQ ID NO: 428683 - DNA, 201 bp, Homo sapiens; identical to SEQ ID NO: 274906

SEQ ID NO: 428684 - DNA, 201 bp, Homo sapiens; identical to SEQ ID NO: 274917

SEQ ID NO: 428685 - DNA, 201 bp, Homo sapiens; identical to SEQ ID NO: 274904

SEQ ID NO: 428686 - DNA, 201 bp, Homo sapiens
ttaatggagatggtactggagtcgccagtatttaccaggagacattcgcagacgaaaattttaaacttagacactcagctccaggcctgctttccacggcraacagcggtcccagtacaaatggctgtcagttctttatcacctgctctaagtgtgattggctggatgggaagcatgtaatgtttggaaaaatcactgatg

SEQ ID NO: 428687 - DNA, 201 bp, Homo sapiens
tggacgaagtgcaactcctgttaactgtgaacagcctgatatcttggtttcttctacaccaataaatgaaggacagactgtgttagacaaggtggctgagsagtgtgaacctgctgaaagtcagccagaagcactttctgagaaggaagatgtttgcaaggtaactctagtaagtggaagggatttttagatgtgcttttt

SEQ ID NO: 428688 - DNA, 201 bp, Homo sapiens
caaattattttctcttggaaaaataattttccaggaacctctcaaagttcaggtttgctagtgtttttaatgtttttattgctgtcattggtaatgacttmagaatttcatgattcagagactccaggaagcagagaatcgaaaccaggaactgagtcaaagtgtttcatcaacaacaagaccattgcttcgacaaataga

SEQ ID NO: 428689 - DNA, 201 bp, Homo sapiens
ttcatcaacaacaagaccattgcttcgacaaatagaaaatttgcaagcaaccctgggatcccagacatcgtcgtgggagaaattagagaagaatctttctsataggcttggtaactgctttagtttttatgctcgatgcagaagctcttccatcttgtttatagaattagaataatggtatgaaattgaaattcatttgat

SEQ ID NO: 428690 - DNA, 201 bp, Homo sapiens
aagcggtcttcccatcttggcctcccacagtgctgggattataagcatgaacccgtgtccagccctacttttattttattttatttatttattttttgagrcggagtcttgccctgttgcccaggctagtctgcctcccaggttcaagtgattcttctgcctcagcctcccaagtagctgggactacagacgtatgctacc

SEQ ID NO: 428691 - DNA, 201 bp, Homo sapiens
ttttttctgtcctgtaatcaggtgaatcccagaccttgctggcagcagcagttgagagagaacgtgcagctacagaagaactccttgctaacaaaattcasatgtcttccatggagtcacagaattctcttttaagacaggaaaacagtagatttcaagcccagctagaatcagagaaaaataggctgtgtaaactggagg

SEQ ID NO: 428692 - DNA, 201 bp, Homo sapiens
cctgggatcccagacatcgtcgtgggagaaattagagaagaatctttctgataggcttggtaactgctttagtttttatgctcgatgcagaagctcttccrtcttgtttatagaattagaataatggtatgaaattgaaattcatttgatctgatagttacattttgtgtctaatatgtagatttttacattttctctttt

SEQ ID NO: 428693 - DNA, 201 bp, Homo sapiens
cagcagcagttgagagagaacgtgcagctacagaagaactccttgctaacaaaattcagatgtcttccatggagtcacagaattctcttttaagacaggaraacagtagatttcaagcccagctagaatcagagaaaaataggctgtgtaaactggaggatgagaacaataggtgagcatggtttctgagtgatatttttg

SEQ ID NO: 428694 - DNA, 201 bp, Homo sapiens
tatacatgtcgcctagtgcatttatgcaagaattttctcctctaaggtatacctaaaagtgaaattttctatatcaaagagtatgtagatccccaactagrtattgcctaattgttttctcaaggggtttctcaacttacactcccactagctatttggttgtatttacttttactctcctctcagctgcctaagagttct

SEQ ID NO: 428695 - DNA, 201 bp, Homo sapiens
ggcgaaacctactctctcctaaaaataaaattagccaggtgtgatggtgtgcgcctgtaatcccagcagctcggaggctgaggcatgagaatcgcttacayccgggaggcggaagttgcagtgagccaagatcccaccactgcactccagcctgggtgacagagtgagactcggtctcaaaaaaaaaaaataaattaaata

SEQ ID NO: 428696 - DNA, 201 bp, Homo sapiens
ttttcactcagtgtaattcccaggaagaggttcacacagttgtttttgtatcggtagtttagtctttttattgctgagtgttattccatagtatgtaccaygtatatttaaccattcactgcacaagggacgtccaggctgattccaagctctggctattacagataaagctactgtgaatattcatgtacaggttttagt

SEQ ID NO: 428697 - DNA, 201 bp, Homo sapiens
ttatctcttagtaaggaaaaagcacttctagaagaagcttttgataacctgaaagagtaagtattctgcaaatgtgaataatgttacacattttctggaarcctgtatactttgtacatatttaagaatgtttttgaaattaaaatgttttgtaattttatcattattgaaagttgtatagctttcaattataaccctaaa

SEQ ID NO: 428698 - DNA, 201 bp, Homo sapiens
caagatgtcatataaccttgctggagtaactctgttttttcatatgtgccccagttaattagaattactaaactttagataagatagaatataggttttayatataaggatatttgttttcggaaaatgcccatagtcttcagaatggtataatttagatggataccaaataaccctgggattatataaagtattctccaa

SEQ ID NO: 428699 - DNA, 201 bp, Homo sapiens
acttgtggaggagtgctaattttagtgagaggaaacacgtgaatgattttctgcctttgagaagacatttaaagcaaaaattgacagaaccatttttgttygaacctggtaatggaagacaagctatgataactgagtaactgtgtgaactttcttaattaacataggatgagtctcatgatcactcatttggaccaatgc

SEQ ID NO: 428700 - DNA, 201 bp, Homo sapiens
atgaaacattagttatacccactgaggaagcagaaatggaagaaagtggacgaagtgcaactcctgttaactgtgaacagcctgatatcttggtttcttcyacaccaataaatgaaggacagactgtgttagacaaggtggctgagcagtgtgaacctgctgaaagtcagccagaagcactttctgagaaggaagatgttt

SEQ ID NO: 428701 - DNA, 201 bp, Homo sapiens
taaacaaatacatttttcaggatttggatcaaaggtacaacactattctgcagatgtatggagaaaaagcagaagaggcagaagaacttcgattagatctygaagatgtaaaaaatatgtacaaaactcaaatagatgaacttttaagacaaagtctcagttaacttgtgaaaattgaattcccatcaaactgaatgtaag

SEQ ID NO: 428702 - DNA, 201 bp, Homo sapiens
ctggctcccggaggctgctgttctcttgatgcaggcaggttaagtggtgtagagaggggtccttccttgctgagagagttttcaggaagtaatttctcccyggcccgttccctaatgctgcttcagcctccaagtcggtctttgctgttttcctgagggaaaacccagatccaggttcccccttgtctttctttggtcctg

SEQ ID NO: 428703 - DNA, 201 bp, Homo sapiens
cttctcctcctgttagtaccttttcatcaggtacttctaccaccagtgatattgaagttttagatcatgaaagtgtaataagtgagagctcagcgagctcsagacaagagactacagattcaaaatcaagtcttcacttgatgcagacatcttttcagcttctctctgcatctgcttgtcctgaatataatcgtttagatg

SEQ ID NO: 428704 - DNA, 201 bp, Homo sapiens
aagagagagaggagcggggttcctggctcccggaggctgctgttctcttgatgcaggcaggttaagtggtgtagagaggggtccttccttgctgagagagytttcaggaagtaatttctccccggcccgttccctaatgctgcttcagcctccaagtcggtctttgctgttttcctgagggaaaacccagatccaggttcc

SEQ ID NO: 428705 - DNA, 201 bp, Homo sapiens
tcaggaagtaatttctccccggcccgttccctaatgctgcttcagcctccaagtcggtctttgctgttttcctgagggaaaacccagatccaggttccccyttgtctttctttggtcctgggtgcgaggcttgtggacttggatgacaggggacttggttggttggtcttgccctcaagctctccctcgacgcagcttcca

SEQ ID NO: 428706 - DNA, 201 bp, Homo sapiens
aagccataagtgagaatatgttttcttttgatctttcctgtggtgtgggctaaatgccgggtaatacttataccaccatggaacaaagagactaaattttrtatcaagtgtgcttacattaatgggagagaagtcatatatggggagaattgtagatttagtggagagatagggtaaaattgatagccatctagcttggtt

SEQ ID NO: 428707 - DNA, 201 bp, Homo sapiens
tcagaatcttacccattgctctttttttcaattgaaaatttttattgatataatgtagattcatgtgcagttataagaaataatatagaaaggtcctttgyacacattgcctaatatctccaagtattaaaatcttacaaaattaatgtataatatcacaaccatggtattgacattgatacaatctactgattttattca

SEQ ID NO: 428708 - DNA, 201 bp, Homo sapiens
gatgctcaaccagtaagtacataatgcaattattccataatctgaaaaaaaaaaaaaaaaaaaagaaatttgaaacattcctggtctcaagcattttgaaycaggatacctcttttcagtgttaaacacaatacactcagaagtaggtaaaaattcaactcccattatatacttttagttatatgaaaatattaaagaact

SEQ ID NO: 428709 - DNA, 201 bp, Homo sapiens
caaatttagttggatctggtatctttaatagacttctgagatgtaggatgtcttgaagaaatgtcctgtaagtgccatgtattgaattacttaattttttwaaaaagtgccagattctgttaatcaggttaaatattcacaaacaaaatgctgtgcaataatatttcaattagtaatagctatatactgtaagatatataa

SEQ ID NO: 428710 - DNA, 201 bp, Homo sapiens
ataatcatatgtaaaagttcattggagagtatgaaatagtatacatgaacaatgttgacacaacacaaaatatgtagttagtgggaagttatagataataytgtaccattgtttgtgaatgtattgtttctcctcctacaggtgggggaccttaggcttgcattgcagcgtacagaacaagcggctgccagaaaggaggat

SEQ ID NO: 428711 - DNA, 201 bp, Homo sapiens
gtgtaatattcaagggcagaatgacaggacagataagcaataagaaatgtatagaattagaaaatatagtagttccctcttacccatgggacatacgttcyaagacccccagtgaacgtctgaaaccatggatagtatagacacctctatacactgttttttcctatacatatatacctatgataaagttctatttataaa

SEQ ID NO: 428712 - DNA, 201 bp, Homo sapiens
ttaataaatattctttcagtgtgagccagattcataaaattaattttcttcattttagtagtaaaaagtagtctaatagctttttgtcagcttgatttttktgtgtgtgtaatattcaagggcagaatgacaggacagataagcaataagaaatgtatagaattagaaaatatagtagttccctcttacccatgggacata

SEQ ID NO: 428713 - DNA, 201 bp, Homo sapiens
tgtttgttttcgagacaggttctcgatctgtcacccaggctgaagtgcagtggtttgatcatggctcactgcagcttccacctcctgggctcagatgatcytcccacctcagcctcctgagtagctgggaccacatatgtgggccaccaggcccagctaattaaaaaaatttttttgtagggacaggggtctcactatgtt

SEQ ID NO: 428714 - DNA, 201 bp, Homo sapiens
cctttattatgtctctttcaaaccattttttcccattacacaatggtatcagatactggctaaagtacttccatgtcattctttcattcagttcttttttwtttttttttttgagatggagtctcactctttcactgaggctggagtgcagtggcgcgatctcggctcactgcaagctccgcctcccaggttcacacaatt

SEQ ID NO: 428715 - DNA, 201 bp, Homo sapiens
aaaagctcaattgagcattttggatttccagatttgggatgctcaaccagtaagtacataatgcaattattccataatctgaaaaaaaaaaaaaaaaaaargaaatttgaaacattcctggtctcaagcattttgaaccaggatacctcttttcagtgttaaacacaatacactcagaagtaggtaaaaattcaactccca

SEQ ID NO: 428716 - DNA, 201 bp, Homo sapiens
tatcacaaccatggtattgacattgatacaatctactgattttattcagatttccaaagttttattggtactcatttgtgtatgtgtgtgtgtgtgtgtgkattaagttctaaacaactataccacatatccattaccatagtcaagatattgaacagttccaacactattgagtccttcctgttagctttttttcttttt

SEQ ID NO: 428717 - DNA, 201 bp, Homo sapiens
tgtctttaccctttgccattgaagagagtcattttgcaaaactggaaaactctttcctttcgtttttagtcttttagtattagagatttaaaacgtatttraagaaaactgtgttaatcaataacacagttgtgctataaggagctgattgggaaaatgtgatacaagaagattcagaattgaaacattgtatttactctt

SEQ ID NO: 428718 - DNA, 201 bp, Homo sapiens
tggaaaaaagggaggctcagttattatctcttagtaaggaaaaagcacttctagaagaagcttttgataacctgaaagagtaagtattctgcaaatgtgaataatgttacacattttctggaagcctgtatactttgtacatatttaagaatgtttttgaaattaaaatgttttgtaattttatcattattgaaagttgta

SEQ ID NO: 428719 - DNA, 201 bp, Homo sapiens
agaaaccagcactaattactatcagatatttttgaatttcagtgtatttaagaaggtaagtgatttctaagttcatctaaaccaaactcaggtaagactttatttttttgagtccaaaaaggaacccttcctactccttttatactcaagtttatcaccatttgagtaggacctaaggaattagacattccaagcattact

SEQ ID NO: 428720 - DNA, 201 bp, Homo sapiens
tagaaaccagcactaattactatcagatatttttgaatttcagtgtatttaagaaggtaagtgatttctaagttcatctaaaccaaactcaggtaagactttatttttttgagtccaaaaaggaacccttcctactccttttatactcaagtttatcaccatttgagtaggacctaaggaattagacattccaagcattac

SEQ ID NO: 428721 - DNA, 201 bp, Homo sapiens
ctattatctgatcactggcaacatttataaactcaatctaattttttaagagaacttactgatcttcacaaagccaatgctgcaaaggatagtgaggcacrggaagctgctctgagccgtgaaatgaaagctaaagaagaactttctgcagcattagagaaggcccaagaagaagcccgtcagcagcaagaaacattagcc

SEQ ID NO: 428722 - DNA, 201 bp, Homo sapiens
tttttaatagtctatactagcatctttttcattttctgtttttttaaattctgccttgtttaataggtaccaggttgaattggaaaacctaaaagatgaayatgtaagaacacttgaagagacgaggaaagaaaaggtatttctcttcgtgaccactcagctcttagggcatacattagagaatggttggggatggcagca

SEQ ID NO: 428723 - DNA, 201 bp, Homo sapiens
tatggaagaatgaggaataagatatattgagacagagatacgtgtttctagcttttgttttttggaagtaaaaagaaaagtaagtccctgtaaaatagacrgaaatttgtgctgccctaagaaaactttaaacaggtcttaagagcctgtcatttaaaccaagacattcaaagtgtataactctgggatttatgtaatatc

SEQ ID NO: 428724 - DNA, 201 bp, Homo sapiens
taataaaggaaatatgcaaatggcaatattgtctgtcatcatgaccttgccattctatgggtaattcatctgaatacttgtggaggagtgctaattttagkgagaggaaacacgtgaatgattttctgcctttgagaagacatttaaagcaaaaattgacagaaccatttttgttcgaacctggtaatggaagacaagcta

SEQ ID NO: 428725 - DNA, 201 bp, Homo sapiens
gggtaaagatttgctggtgttgggggatgtgaacctttgtgtgaaaaaggataagagatgtacttgactactcctttctggtttctgttcttaattttacrtcattgaaaagtcaggacctaaatttgaggtacctcagtttaagatattttggtccatgtgtgtatgtgatgatcctctttactttttacaagatgtcat

SEQ ID NO: 428726 - DNA, 201 bp, Homo sapiens
atattgtatggtaatggctatgccttatacatatttgtttgcgtttctttgccttaacagaatgcttttctaagtaaacattgaatatacatacagttttrgaattgcttgatgaatgagagatgtgataatcatatgtaaaagttcattggagagtatgaaatagtatacatgaacaatgttgacacaacacaaaatatg

SEQ ID NO: 428727 - DNA, 201 bp, Homo sapiens
tttgagttttagacccatttgagagtattataaaagctaggaaccctcttagaagagaagagcaaaaatgcacatacatattgcatataattttgagagamtccatttaactcctgagctcattcataacatctgtgggagtccaaggacctcagatgaagtaggaaaaacaaaatttgtgaggctttgtcttatcaaatc

SEQ ID NO: 428728 - DNA, 201 bp, Homo sapiens
ggtttccaaaacacaaatccaagaagtatgtgtttttctagaaataaaagaattcctcagtgggatagtgttcatggaattgagaggattactgtcacacstagcatttgctgaatttttgtggcttgtgtgaataaatcagagtgggcaccttaaaaattatacaaggaaattccttattttgttttatagaaaataatg

SEQ ID NO: 428729 - DNA, 201 bp, Homo sapiens
gtgttcctaatactgttcttgattgtttttatgagataaagctgttttctttgttacagtgatacacctgcatgtaaaaatggtcttttttaaagctaagygttctgacttttatgtattcgccttatccagacagttgaatttctgaatgaaaagctggaaaaaagggaggctcagttattatctcttagtaaggaaaaa

SEQ ID NO: 428730 - DNA, 201 bp, Homo sapiens
ggaccttaggcttgcattgcagcgtacagaacaagcggctgccagaaaggaggattatttacgccatgagatcggtgaacttcagcaggtactgtcacagktttccaaaacacaaatccaagaagtatgtgtttttctagaaataaaagaattcctcagtgggatagtgttcatggaattgagaggattactgtcacacct

SEQ ID NO: 428731 - DNA, 201 bp, Homo sapiens
tctcctctcagctgcctaagagttcttcttgttctggatcttctgtgttcctaatactgttcttgattgtttttatgagataaagctgttttctttgttayagtgatacacctgcatgtaaaaatggtcttttttaaagctaagcgttctgacttttatgtattcgccttatccagacagttgaatttctgaatgaaaagc

SEQ ID NO: 428732 - DNA, 201 bp, Homo sapiens
ttttctcttttgattgtctttaccctttgccattgaagagagtcattttgcaaaactggaaaactctttcctttcgtttttagtcttttagtattagagayttaaaacgtatttgaagaaaactgtgttaatcaataacacagttgtgctataaggagctgattgggaaaatgtgatacaagaagattcagaattgaaaca

SEQ ID NO: 428733 - DNA, 201 bp, Homo sapiens
gcaacatttataaactcaatctaattttttaagagaacttactgatcttcacaaagccaatgctgcaaaggatagtgaggcacaggaagctgctctgagcygtgaaatgaaagctaaagaagaactttctgcagcattagagaaggcccaagaagaagcccgtcagcagcaagaaacattagccattcaagtaagcaatgg

SEQ ID NO: 428734 - DNA, 201 bp, Homo sapiens
atctatgttgtgacttaagatattctaaatgtggataacttctgacctaggaaacatgaagtttgtagtgaagtaagtgaaaagaatgttcaggaaatttwttttctccatctcttcagttggcatttattgagagttttatttgaatgcttattaaaagtatatgatttataatatttagaaaatagaagaaaaaagaaa

SEQ ID NO: 428735 - DNA, 201 bp, Homo sapiens
gcacctatcactttctgtgtgatgtggcaaatatttatagacgcactgtcttttctccaatattgtatggtaatggctatgccttatacatatttgtttgygtttctttgccttaacagaatgcttttctaagtaaacattgaatatacatacagttttggaattgcttgatgaatgagagatgtgataatcatatgtaaa

SEQ ID NO: 428736 - DNA, 201 bp, Homo sapiens
acaccaataaatgaaggacagactgtgttagacaaggtggctgagcagtgtgaacctgctgaaagtcagccagaagcactttctgagaaggaagatgtttrcaaggtaactctagtaagtggaagggatttttagatgtgctttttggagattaaatcatttgttttaaaaaatactttcattgatgcataataatttata

SEQ ID NO: 428737 - DNA, 201 bp, Homo sapiens
agaaaatatagtagttccctcttacccatgggacatacgttccaagacccccagtgaacgtctgaaaccatggatagtatagacacctctatacactgttktttcctatacatatatacctatgataaagttctatttataaatcagggacagcaagagataaacaataactgcaaatagaacaattataacagtgcactg

SEQ ID NO: 428738 - DNA, 201 bp, Homo sapiens
actttgccacctgtttgatgtgcagtggaaactggttaagccagttgttcatacttcctttacaaatataaagatagctgtttaggatattttgttacatwtttgtaaatttttgaaatgctagtaatgtgttttcaccagcaagtatttgttgcaaacttaatgtcattttccttaagatggttacagctatgtaacctg

SEQ ID NO: 428739 - DNA, 201 bp, Homo sapiens
aaccgcaaagccgaccgagacggagccgctgtcaactctccaactcagctcagctgatcggttgccgccgccgccgccgccagattctggaggcgaagaasgcaaagctgagaacatggacgttaatatcgccccactccgcgcctgggacgatttcttcccgggttccgatcgctttgcccggccggacttcagggacat

SEQ ID NO: 428740 - DNA, 201 bp, Homo sapiens
ttcctgttgaatacagcattttcctttaatgcagaaaaaaaactatgtatgacttgatggagagctttacataaagtccaaggagccatttgaaagcttgyatcaattcgagaagcagactggactgtggctaactaaggcagtttactaatagtgtgaagagagggagtgtaatattgatatggcaaaagagaattgttg

SEQ ID NO: 428741 - DNA, 201 bp, Homo sapiens
agcagttacagccaaagccaaattttggccttggcttgtggagtgtgtgacctggattccaggccccacttaccccctcagccaggcaccaactccacacstatatacagtggccctggctgcagaggcaggcaggggccagaccctgcgaagccttgtagaatgtttaaagaattctgtttttagtttaagaacaatgag

SEQ ID NO: 428742 - DNA, 201 bp, Homo sapiens
aaactcctgacttcaaaagatccacccaccttggcccccacaaagtgctgggattacaggcttgagccactgtactcagcctagaaacttctacttctgakctatctaacttatatgataaatctacctaacagacaatgcattatgtattacaattgcttttacccactcaatatataatgtcttcccatattattaaat

SEQ ID NO: 428743 - DNA, 201 bp, Homo sapiens
ttgtgtgggcagcccacaataaagacgtccttcgccggatgaagaagcgctaccccacgacgttcgttatggtggtcatgttggcgagctatttccttatmtccatgtttggaggagtcatggtctttgtgtttggcattacttttcctttgctgtgtaagtgaacttgagttttttcttccatcatcaaaaaaatgtaga

SEQ ID NO: 428744 - DNA, 201 bp, Homo sapiens
ctttatctaggctggacatgatggctcacgcctgtgatcccagccctttgggaggccgaggcgggtagatcacctaagctcaggagtttaagaccagcccrggcaacatggcgaaaccccatctctaccaaaaatagaaaaaattagcctggcgtggtggcatgcatctgtggtcccagctacttgggaggctgaggtggg

SEQ ID NO: 428745 - DNA, 201 bp, Homo sapiens
agctggatgccatggcaggatcttggctcactacaacctctgcctcccaggttcaagcgattctcctgccttagcctccaagtagctgggattacaggcaygcacaactatgcctggctaatttttgtatttttaagtgattacaggcacacacaattatgcctggctaatttttgtatttttaagtagagacggggtttc

SEQ ID NO: 428746 - DNA, 201 bp, Homo sapiens
tatgtcctagaataagaagcaatgatgtgctgcttctgatttttcttgcattttaaattctcagccaacctacagccatgatctttagcacagtgatatcmccatgacttcacagacatggtctagaatctgtacccttacccacatatgaagaataaaattgattaaaggtttttttggtgagactttatttaatgcaca

SEQ ID NO: 428747 - DNA, 201 bp, Homo sapiens
ttttttttttttttgagacggagtctggctctgtcacccacgctggagtggcacaatctcagctcacttcaacctccacctcccaggttcaagtgattctygtgtctcagcctcctgaacagctgggattacaggcatgcgccaccacgcccagctaatttttatgtttttagtagagatggggtttcgccatgttggcca

SEQ ID NO: 428748 - DNA, 201 bp, Homo sapiens
tcgctctgtcacccaggctggagtgcagtggcacaatctcggctcactgcagcctccgcctcccgggttcaagcaattctcctgcctcagcctcccaagtrgttgggattacaggcacatgccaccaagccaggcttagttttgtacttttagtagagacggggtttcaccatgttgaccaggatggtcttgatctcctga

SEQ ID NO: 428749 - DNA, 201 bp, Homo sapiens
tgttgctttggtgttaaccaggtgtcccttctctgcagtgatgtttatccatgcatcgttgagacttcggaacctcaagaacaaactggagaataaaatgraaggaataggtttgaagaggacaccgatgggcattgtcctggatgccctagaacagcaggaagaaggcatcaacagactcactgactatatcagcaaagt

SEQ ID NO: 428750 - DNA, 201 bp, Homo sapiens
tagttttgctcttgttgcccaggctggagtgcaatggcaccatctcggctcactacaacctccgcctcccaggttcaagcaattctcctgcctcagcctcmgagtagctgagattacaggctcccgccaccgagcccaactaattttttgtatttttagtagagacagggttttaccatgtaggccaggctggtcttgaac

SEQ ID NO: 428751 - DNA, 201 bp, Homo sapiens
ggccttatagttcattaattccacaaatatttgttggggcatctgctatgtgtcatacattcttttgttgttgttgagatggggtctactctgtcacccaygctgtggtgttatctcggcttactgcaacctctgcctcctgaatagctgggaccacaggtgcacacccagctaattttttgtgttttgggtagagaccgg

SEQ ID NO: 428752 - DNA, 201 bp, Homo sapiens
agagtctattctcaatttttaagtgccattcctattgtcctgacacaggaatgaatgtatttattatttggaagtagactatttattctccacttgctcargagatcataactagtgttaaaagtttggtaagtctataggaataattggctcagaatataggtactaaatactcagattctggtgaagagatctagatat

SEQ ID NO: 428753 - DNA, 201 bp, Homo sapiens
gtatttgttgcaaacttaatgtcattttccttaagatggttacagctatgtaacctgtattattctggacggacttattaaaatacaaacagacaaaaaawaaaacaaaacttgagttctatttaccttgcacattttttgttgttacagtgaaaaaaatggtccaagaaaatgtttgccatttttgcattgtttcgtttt

SEQ ID NO: 428754 - DNA, 201 bp, Homo sapiens
ttagtttttattattctcttaaaaatcaaagatgatctctatcactttgccacctgtttgatgtgcagtggaaactggttaagccagttgttcatacttcstttacaaatataaagatagctgtttaggatattttgttacatttttgtaaatttttgaaatgctagtaatgtgttttcaccagcaagtatttgttgcaaa

SEQ ID NO: 428755 - DNA, 201 bp, Homo sapiens
ttacaaccatatgcctttatagctagacattagaattatgatagcatgagtttatacattctattatttttcctccctttctcatgtttttataaataggyaataaaaaatgttttgcctgccaattgaatgatttcgtagctgaagtagaaacatttaggtttctgtagcattaaattgtgaagacaactggagtggtac

SEQ ID NO: 428756 - DNA, 201 bp, Homo sapiens
gtgggggaatcttggctcactggagactcaacctcccaggttcaagtgatcctcccacctcagcctcctgagtagctgggaacacaggtgtgtgccaccayacctggctaattttcatatttttgtagagatgggttttgccatgttgcctgggttggtcttgaacccctgggctcaagtgatcctcccaccttggcctct

SEQ ID NO: 428757 - DNA, 201 bp, Homo sapiens
aatatttattgagtgctctgtgtgtcaggtaccttgcaaagtattttacctgcattatgtcatagaacccaattttaaaaaactgttactttttttttatyattaaacctgaggctcagagaggttaaatgatttactcaaagtcacaaacttaggcttgtgctcttaactactgttctgtcttactatgagtcacaagga

SEQ ID NO: 428758 - DNA, 201 bp, Homo sapiens
agctgtgctctggtcagagagactgaggaaaggctggctgagctgagacttgaaggagggtggagtgaggcctgtgtgcaaagtatcctctctgcctgatkcacctcaccctgagatggcaaaaggcaaggtgagttctggggtagatagaaaccctgagtggatgggggtgcaatcaggagatggtgtgacaaacctggc

SEQ ID NO: 428759 - DNA, 201 bp, Homo sapiens
ttaagggaattaaaaaaaataaaagaattacggcttttacagcaacaatacgattatcttataggaaaaaaaaaatcattgtaaagtatcaagacaatacragtaaatgaaaaggctgttaaagtagatgacatcatgtgttagcctgttcctaatcccctagaattgtaatgtgtgggatataaattagtttttattatt

SEQ ID NO: 428760 - DNA, 201 bp, Homo sapiens
gtgaagacaactggagtggtacttactgaagaaactctctgtatgtcctagaataagaagcaatgatgtgctgcttctgatttttcttgcattttaaattytcagccaacctacagccatgatctttagcacagtgatatcaccatgacttcacagacatggtctagaatctgtacccttacccacatatgaagaataaaa

SEQ ID NO: 428761 - DNA, 201 bp, Homo sapiens
cgcatgctttaatcccagctactggagaggctgaggcaggagaattgtttgaaccagggagtcagaggttgcagcgagccaagattgtgtcactgcacttyagcctgccgacagagcgagattctgtctcaaaaaaaaaaaacaaaagaaaagaaaagaaaaaaattaaaaattagccaggcaagctggcactcacctgta

SEQ ID NO: 428762 - DNA, 201 bp, Homo sapiens
gctgttcatctggatcctccacagacttctctctagtttctcagaatatcttggtagagtatatgtgaaaatgtgacctggataaaagagtgttcaacaayggttccatcccctgctggtgaggagagcctcaagggcattgtaggagtgctctagcctcagctctccaatgttggaaactggcttagatgaggatagaga

SEQ ID NO: 428763 - DNA, 201 bp, Homo sapiens
agctactggagaggctgaggcaggagaattgtttgaaccagggagtcagaggttgcagcgagccaagattgtgtcactgcactttagcctgccgacagagsgagattctgtctcaaaaaaaaaaaacaaaagaaaagaaaagaaaaaaattaaaaattagccaggcaagctggcactcacctgtagtctgtagtttcagct

SEQ ID NO: 428764 - DNA, 201 bp, Homo sapiens
ttaataccatcctctgtctcttgaaatgagcgtggcttcctgtttctgagaatgccttcaagccctgtaattttaggcaaaaccttcaggctaacaacttsaggtttgcaagcattcatcattgatatatgataggatttcctggccttccttctcgttatgcaatttgctaaaggagacacctggaaggcagaaagccct

SEQ ID NO: 428765 - DNA, 201 bp, Homo sapiens
aattgtttgaaccagggagtcagaggttgcagcgagccaagattgtgtcactgcactttagcctgccgacagagcgagattctgtctcaaaaaaaaaaaacaaaagaaaagaaaagaaaaaaattaaaaattagccaggcaagctggcactcacctgtagtctgtagtttcagctactcagaaggctgaggaaggtcactt

SEQ ID NO: 428766 - DNA, 201 bp, Homo sapiens
gtatatacagtggccctggctgcagaggcaggcaggggccagaccctgcgaagccttgtagaatgtttaaagaattctgtttttagtttaagaacaatgaraagaaaatggttgggtgggttcatatttgcagtgatccctctggctgattaaggaccacagagaaacatcgccaatttagagaagtccaccgtgagtata

SEQ ID NO: 428767 - DNA, 201 bp, Homo sapiens
gccaacccactcctacttgcagggtatgcaaaggaatttccttgaatttcaatcctccatttgagttctttgtgttgatttgatctttgttttgctttgcttttttttttttttttttttttttgagacggaatctcgctctgtcacccaggctggagtgcagtggcacaatctcggctcactgcagcctccgcctcccgg

SEQ ID NO: 428768 - DNA, 201 bp, Homo sapiens
actcactgactatatcagcaaagtgaaggaataaacataacttacctgagctagggttgcagcagaaattgagttgcagcttgcccttgtccagacctatkttctgcttgcgtttttgaaacaggaggtgcacgtaccacccaattatctatggcagcatgcatgtataggccgaactattatcagctctgatgtttcaga

SEQ ID NO: 428769 - DNA, 201 bp, Homo sapiens
tccacacgtatatacagtggccctggctgcagaggcaggcaggggccagaccctgcgaagccttgtagaatgtttaaagaattctgtttttagtttaagarcaatgagaagaaaatggttgggtgggttcatatttgcagtgatccctctggctgattaaggaccacagagaaacatcgccaatttagagaagtccaccgt

SEQ ID NO: 428770 - DNA, 201 bp, Homo sapiens
atctcggctcactgcaccctctgcctcccgggttcaagtgattctcctgcctcagcctaccaagtaactgggactacaggtgcctgccaccatacctggctttttttttttttttttttttgagacatagttttgctcttgttgcccaggctggagtgcaatggcaccatctcggctcactacaacctccgcctcccaggt

SEQ ID NO: 428771 - DNA, 201 bp, Homo sapiens
tgcccttgtccagacctatgttctgcttgcgtttttgaaacaggaggtgcacgtaccacccaattatctatggcagcatgcatgtataggccgaactattwtcagctctgatgtttcagagagaagacctcagaaaccgaaagaaaaccaccaccctcctattgtgtctgaagtttcacgtgtgtttatgaaatctaatgg

SEQ ID NO: 428772 - DNA, 201 bp, Homo sapiens
gacatcatgtgttagcctgttcctaatcccctagaattgtaatgtgtgggatataaattagtttttattattctcttaaaaatcaaagatgatctctatcrctttgccacctgtttgatgtgcagtggaaactggttaagccagttgttcatacttcctttacaaatataaagatagctgtttaggatattttgttacatt

SEQ ID NO: 428773 - DNA, 201 bp, Homo sapiens
gacacttggtttctccagggctggaaggcttctagaaggtcaagatcttacgtcttcactgcccctgctcactgtgggactttgagtgacccactctcccyctctgggtttcagttcatcagttcaagtggcgtccagccgccctgccttgcacgttgtaaaacgagtgctgtatataataggggtctgggtcgacggtgc

SEQ ID NO: 428774 - DNA, 201 bp, Homo sapiens
gagggctgggagtatgtgaaggcgcgcaccaagtagcgagtcagcaggggccgcctgccccggccagaacgggcagggctgccactgacctgaagactccrgactgggaccccactccgagggcagctcccggccttgccggcccaataaaggacttcagaagtgttccctgacccgtgtgctggccccagggagcacagg

SEQ ID NO: 428775 - DNA, 201 bp, Homo sapiens
ccccctccaaggcccgcgagtactccaaggagggctgggagtatgtgaaggcgcgcaccaagtagcgagtcagcaggggccgcctgccccggccagaacgrgcagggctgccactgacctgaagactccggactgggaccccactccgagggcagctcccggccttgccggcccaataaaggacttcagaagtgttccctg

SEQ ID NO: 428776 - DNA, 201 bp, Homo sapiens
gcaggtaaggcacccagtttctttgcttggagggagacaccccagtctagcccctctccccacttcctggccattcctttctgtccatcctccttcctgcscgacacgtgtctcttagggatctaaaagggaaaggaggccgagcacagtggctcacgcctgtaatcccagcactttgggaggctgaggtgggcggatcat

SEQ ID NO: 428777 - DNA, 201 bp, Homo sapiens
catgggttcattcctcaggatgctcctgcagccaccccaagctgaggacaaggcccagatccacagtggcctgggaagtgctcccagcagagtgagcagasctgggcttcggtgctgtctgccctctgtcctgctgcaaggctaatcaccttctggttctgggccttgaatcccttttacagcatgggggctggatgctct

SEQ ID NO: 428778 - DNA, 201 bp, Homo sapiens
gtcattgactgctgcctgaacagatatgtgcaagtttgtcttctcactgctgttaacattattgtatgagtaattttacaagtttaccatttttcttgtamgtataataaatatcccaccttattgacccacagttccccctcccacaacttgcaaagtattttggctgacttgacttgtttactatgataaatagtgttg

SEQ ID NO: 428779 - DNA, 201 bp, Homo sapiens
aggctccacacatggctgaaaagtgcaagcagagggaagaaagcaggacttctgcatgcgcctgcccccaccctatgctgcctgggaggctggggctgtgyggtgggggctccctccacctctgagaccccttcccttgccagcaagtgctctgagcttcccacagacagataggagagagaaatcaacttccatggtatt

SEQ ID NO: 428780 - DNA, 201 bp, Homo sapiens
ttgtacgtataataaatatcccaccttattgacccacagttccccctcccacaacttgcaaagtattttggctgacttgacttgtttactatgataaatartgttgctataaacagctgtgcacatatagctatttttccctttgcaattatgtttttgggaggaattccaaacagtggggttagcgggtcaaagggcatg

SEQ ID NO: 428781 - DNA, 201 bp, Homo sapiens
gacaggtaatgaggaagggaagaagcctgggcccctgctctcctcctgctctcctcctgctctccttcctgtggccgcatttccatctcaggacagagctsactggctggctgggtctcctggatagaaagtgaagggggcagtggcctgactgaggcagggcttgggatgacagtagttgggctctggggagactttggt

SEQ ID NO: 428782 - DNA, 201 bp, Homo sapiens
tctttgggtttgaaaaccccagtctgagatgtgctgtttcccttgtgccccaccagggcccagtgtgtagcgttctggggacaccgggtgttgctgagaaygaatcagggagccatagtcagggggctcagtgcagggcaggggtgaaaggagcaccggaagcaagcaggcctgggagtggggcatttatttactatttgt

SEQ ID NO: 428783 - DNA, 201 bp, Homo sapiens
cccagtctgagatgtgctgtttcccttgtgccccaccagggcccagtgtgtagcgttctggggacaccgggtgttgctgagaacgaatcagggagccatartcagggggctcagtgcagggcaggggtgaaaggagcaccggaagcaagcaggcctgggagtggggcatttatttactatttgttggggccatcctgaagg

SEQ ID NO: 428784 - DNA, 201 bp, Homo sapiens
cttgtgccccaccagggcccagtgtgtagcgttctggggacaccgggtgttgctgagaacgaatcagggagccatagtcagggggctcagtgcagggcagrggtgaaaggagcaccggaagcaagcaggcctgggagtggggcatttatttactatttgttggggccatcctgaagggggtgcccagcaggctggggtggc

SEQ ID NO: 428785 - DNA, 201 bp, Homo sapiens
ggatgggcaattggctctatgagtcgggctctgcttccatctacaggcctagatgtgagggcagaggagcactcagcctgccgaaggtctgcacagctggscggcagcgggcaagattggaattcactcaccatgcagctactgggtgcctggctactgctgggaagcaagctgagggcaaagactgccccacaggggcaa

SEQ ID NO: 428786 - DNA, 201 bp, Homo sapiens
ggctctatgagtcgggctctgcttccatctacaggcctagatgtgagggcagaggagcactcagcctgccgaaggtctgcacagctggccggcagcgggcragattggaattcactcaccatgcagctactgggtgcctggctactgctgggaagcaagctgagggcaaagactgccccacaggggcaagatcggggccca

SEQ ID NO: 428787 - DNA, 201 bp, Homo sapiens
ggcctagatgtgagggcagaggagcactcagcctgccgaaggtctgcacagctggccggcagcgggcaagattggaattcactcaccatgcagctactggstgcctggctactgctgggaagcaagctgagggcaaagactgccccacaggggcaagatcggggcccaccacaggaggtcaccccccaggcatgcagggca

SEQ ID NO: 428788 - DNA, 201 bp, Homo sapiens
aaagactgccccacaggggcaagatcggggcccaccacaggaggtcaccccccaggcatgcagggcacagagctggggggaatgagctccctccccatgcrcccctccccagctgtccctgagtcactagcgcccttccctttcactaccagggaggctctggagctgcttcctatcccccactgtcctgtgagtcaccgc

SEQ ID NO: 428789 - DNA, 201 bp, Homo sapiens
ctctggagctgcttcctatcccccactgtcctgtgagtcaccgccccaccctccaagtccctcccacatggtgtgatcagcatccctgcctctgcccacgraagtgatttcaaaaggcagaagtgacaggtggtgggtggttaggcgggcagtgcctctcacctccccatccatctctcttctgtcaagtggggcagcagc

SEQ ID NO: 428790 - DNA, 201 bp, Homo sapiens
gaacacccacaaaagtgtctgtctgcctgaggctaccccggcctctgtctggctcctgcggtcgtggagcagacctcacggtgcaggagctggaggtggcygtgggagtttgaggaggggcaggaggaggcagctgtgggagttgtggagatggcttcacggagccaggagccctgttccgggagggcagtaggaccccct

SEQ ID NO: 428791 - DNA, 201 bp, Homo sapiens
ctgcctgaggctaccccggcctctgtctggctcctgcggtcgtggagcagacctcacggtgcaggagctggaggtggctgtgggagtttgaggaggggcargaggaggcagctgtgggagttgtggagatggcttcacggagccaggagccctgttccgggagggcagtaggaccccctcttctcccagagccctggcctt

SEQ ID NO: 428792 - DNA, 201 bp, Homo sapiens
tctgccctctgtcctgctgcaaggctaatcaccttctggttctgggccttgaatcccttttacagcatgggggctggatgctctttgagcttcctcctggyttcgatcctggaaactgacacctacttgtttgcagttgtgtgacttggtcaaatcgtgtaacctcttgagcctcaatttcattctgtgtgaatgaaacag

SEQ ID NO: 428793 - DNA, 201 bp, Homo sapiens
gaagaattgtaacagcagtgaccccatagccctttaccatttgcaaggtgcttcagacaaaatatctcactggtccctcccaacaattctgccacaaaagstggtattactttcatgcccagcttacagtttgaggaacgaaggcccagctatgggggcaggtgcagaggtgggcctcgcttccaggtctcagtctctgga

SEQ ID NO: 428794 - DNA, 201 bp, Homo sapiens
agtgaccccatagccctttaccatttgcaaggtgcttcagacaaaatatctcactggtccctcccaacaattctgccacaaaaggtggtattactttcatscccagcttacagtttgaggaacgaaggcccagctatgggggcaggtgcagaggtgggcctcgcttccaggtctcagtctctggatgaagggcaagatccc

SEQ ID NO: 428795 - DNA, 201 bp, Homo sapiens
tatgggggcaggtgcagaggtgggcctcgcttccaggtctcagtctctggatgaagggcaagatccctgcagctaaggacgagggagtggtggcacagaaygtccggcctgctggtctttctttcccagcctggggcatctctgtgaaggccgatgagcggaggcccctccccaggtgctggtgccaggcggcggggagct

SEQ ID NO: 428796 - DNA, 201 bp, Homo sapiens
atgggggcaggtgcagaggtgggcctcgcttccaggtctcagtctctggatgaagggcaagatccctgcagctaaggacgagggagtggtggcacagaatrtccggcctgctggtctttctttcccagcctggggcatctctgtgaaggccgatgagcggaggcccctccccaggtgctggtgccaggcggcggggagctg

SEQ ID NO: 428797 - DNA, 201 bp, Homo sapiens
tgaagggcaagatccctgcagctaaggacgagggagtggtggcacagaatgtccggcctgctggtctttctttcccagcctggggcatctctgtgaaggcmgatgagcggaggcccctccccaggtgctggtgccaggcggcggggagctgcttctgacagctgtgcagagaatcatcacttctccatcgctgctaatagc

SEQ ID NO: 428798 - DNA, 201 bp, Homo sapiens
gaagggcaagatccctgcagctaaggacgagggagtggtggcacagaatgtccggcctgctggtctttctttcccagcctggggcatctctgtgaaggccratgagcggaggcccctccccaggtgctggtgccaggcggcggggagctgcttctgacagctgtgcagagaatcatcacttctccatcgctgctaatagca

SEQ ID NO: 428799 - DNA, 201 bp, Homo sapiens
caagatccctgcagctaaggacgagggagtggtggcacagaatgtccggcctgctggtctttctttcccagcctggggcatctctgtgaaggccgatgagyggaggcccctccccaggtgctggtgccaggcggcggggagctgcttctgacagctgtgcagagaatcatcacttctccatcgctgctaatagcatgttta

SEQ ID NO: 428800 - DNA, 201 bp, Homo sapiens
gatccctgcagctaaggacgagggagtggtggcacagaatgtccggcctgctggtctttctttcccagcctggggcatctctgtgaaggccgatgagcggmggcccctccccaggtgctggtgccaggcggcggggagctgcttctgacagctgtgcagagaatcatcacttctccatcgctgctaatagcatgtttagct

SEQ ID NO: 428801 - DNA, 201 bp, Homo sapiens
tgctggtctttctttcccagcctggggcatctctgtgaaggccgatgagcggaggcccctccccaggtgctggtgccaggcggcggggagctgcttctgayagctgtgcagagaatcatcacttctccatcgctgctaatagcatgtttagcttgctgactcctctgtttgcctggtgcctcccacggacccagagcttgg

SEQ ID NO: 428802 - DNA, 201 bp, Homo sapiens
cgtccatcctcacagagagaagcgcggtctgcgtcatcagccacccccgctgcccacagtgacctccaatctccaaaccccagggcctctcagcagccccrtggagatgctgccctttctgcttccaggaacccctcttcactgggcatccctgcctgtttctttggcctcctgaccacatctccatctctctcaccttct

SEQ ID NO: 428803 - DNA, 201 bp, Homo sapiens
gtcctgtgagtcaccgccccaccctccaagtccctcccacatggtgtgatcagcatccctgcctctgcccacgaaagtgatttcaaaaggcagaagtgacrggtggtgggtggttaggcgggcagtgcctctcacctccccatccatctctcttctgtcaagtggggcagcagcagggccaagaagactgaattcaaagca

SEQ ID NO: 428804 - DNA, 201 bp, Homo sapiens
aggccacccctgttttccctgaggtctagctctgggtgaacacccacaaaagtgtctgtctgcctgaggctaccccggcctctgtctggctcctgcggtcrtggagcagacctcacggtgcaggagctggaggtggctgtgggagtttgaggaggggcaggaggaggcagctgtgggagttgtggagatggcttcacggag

SEQ ID NO: 428805 - DNA, 201 bp, Homo sapiens
tccctgaggtctagctctgggtgaacacccacaaaagtgtctgtctgcctgaggctaccccggcctctgtctggctcctgcggtcgtggagcagacctcayggtgcaggagctggaggtggctgtgggagtttgaggaggggcaggaggaggcagctgtgggagttgtggagatggcttcacggagccaggagccctgttc

SEQ ID NO: 428806 - DNA, 201 bp, Homo sapiens
ggagctgcttctgacagctgtgcagagaatcatcacttctccatcgctgctaatagcatgtttagcttgctgactcctctgtttgcctggtgcctcccacrgacccagagcttggagtttcttcattgcctggggtggggcagggtggcagaggggcatctctgctccctggccctggctgcagccagcagctccacccag

SEQ ID NO: 428807 - DNA, 201 bp, Homo sapiens
acgacatctcctgcttgcagatctggccatgctggaggcaggatggatccccagcccctcagttgtgacccttcctagcttgttaggttagtagaaaactsagctcatagtctcggggactgctcctcccctggttcatgcacaaactccaaaggttcatgggattcctaaaagcagcctgacaaatttccctcctgtggg

SEQ ID NO: 428808 - DNA, 201 bp, Homo sapiens
tccccagcccctcagttgtgacccttcctagcttgttaggttagtagaaaactcagctcatagtctcggggactgctcctcccctggttcatgcacaaacyccaaaggttcatgggattcctaaaagcagcctgacaaatttccctcctgtggggagaagaccctgtggtctggcaggacccactgcccttggccaggtgc

SEQ ID NO: 428809 - DNA, 201 bp, Homo sapiens
ttccctcctgtggggagaagaccctgtggtctggcaggacccactgcccttggccaggtgcccctcgctttgatcctgggtctggctcctgccttaggagmctgcagacctctgtggggccactccctggtgacccaccagcccaggaaggatggaccccgcagtggacaacactcggttctgtccatctccctgccttgg

SEQ ID NO: 428810 - DNA, 201 bp, Homo sapiens
ggaatgttccctccacgagggcgtggacttggtcctgttcatggggatctctctggcacctggagcagctgtgtagcccagacggggtgctcagtcattgwctgctgcctgaacagatatgtgcaagtttgtcttctcactgctgttaacattattgtatgagtaattttacaagtttaccatttttcttgtacgtataat

SEQ ID NO: 428811 - DNA, 201 bp, Homo sapiens
gttgctataaacagctgtgcacatatagctatttttccctttgcaattatgtttttgggaggaattccaaacagtggggttagcgggtcaaagggcatggygtatttatggtcctggatgtgctgggactgccgaattctcagcccccaggccacccctgttttccctgaggtctagctctgggtgaacacccacaaaagt

SEQ ID NO: 428812 - DNA, 201 bp, Homo sapiens
aggtctagctctgggtgaacacccacaaaagtgtctgtctgcctgaggctaccccggcctctgtctggctcctgcggtcgtggagcagacctcacggtgcrggagctggaggtggctgtgggagtttgaggaggggcaggaggaggcagctgtgggagttgtggagatggcttcacggagccaggagccctgttccgggag

SEQ ID NO: 428813 - DNA, 201 bp, Homo sapiens
ggtcgtggagcagacctcacggtgcaggagctggaggtggctgtgggagtttgaggaggggcaggaggaggcagctgtgggagttgtggagatggcttcayggagccaggagccctgttccgggagggcagtaggaccccctcttctcccagagccctggccttctcttggatggctctcctctcctggagccatcccgcc

SEQ ID NO: 428814 - DNA, 201 bp, Homo sapiens
cacggagccaggagccctgttccgggagggcagtaggaccccctcttctcccagagccctggccttctcttggatggctctcctctcctggagccatcccrccccctgcagctaagcttccacccccagtctctgagagggggcagtgccccctgtaggcaggtgtgtttgggagaagggaggggacccagtgcctcagcc

SEQ ID NO: 428815 - DNA, 201 bp, Homo sapiens
agtgccgtggaagctagctgctgagcaaaaggtctttatcactgcagaaaatgtgcctgagatttgcccgccttctgcctccatccactggctctgcccckcctcagctgctggagccccctttccccaccattagccccagacctgcaggcctggatggttgaaggggaggggtccacactggcccctcatgggatcttc

SEQ ID NO: 428816 - DNA, 201 bp, Homo sapiens
ccacagtgaagacatttgaaggcagcaagacagggctttgagttctgcctaggggagctcagaagcctttgcagaggtggggaaatttgagttgggctttraaggatgactaggagttcaccaatttgaggacactagaggggcctggcagttagcagccaaagcaaagagaaagcaacacacggttcacccagagaggca

SEQ ID NO: 428817 - DNA, 201 bp, Homo sapiens
ctggagaatgatgtgagaaattccacagtgaagacatttgaaggcagcaagacagggctttgagttctgcctaggggagctcagaagcctttgcagaggtrgggaaatttgagttgggctttgaaggatgactaggagttcaccaatttgaggacactagaggggcctggcagttagcagccaaagcaaagagaaagcaac

SEQ ID NO: 428818 - DNA, 201 bp, Homo sapiens
ggaagcagtattttcagtaatgcaatatgcagcattgaccagcacctgcagcataccaggtgcaatgctaggggataacagatcatggagaaagagctgcrgcacccaagagctcacagtgcagcagactggccagcagacaagtggctggagaatgatgtgagaaattccacagtgaagacatttgaaggcagcaagaca

SEQ ID NO: 428819 - DNA, 201 bp, Homo sapiens
cctggaggaagcagtattttcagtaatgcaatatgcagcattgaccagcacctgcagcataccaggtgcaatgctaggggataacagatcatggagaaagrgctgcagcacccaagagctcacagtgcagcagactggccagcagacaagtggctggagaatgatgtgagaaattccacagtgaagacatttgaaggcagc

SEQ ID NO: 428820 - DNA, 201 bp, Homo sapiens
tacaggaggcctggaggaagcagtattttcagtaatgcaatatgcagcattgaccagcacctgcagcataccaggtgcaatgctaggggataacagatcayggagaaagagctgcagcacccaagagctcacagtgcagcagactggccagcagacaagtggctggagaatgatgtgagaaattccacagtgaagacattt

SEQ ID NO: 428821 - DNA, 201 bp, Homo sapiens
cgttgaacctaatataaaaggtggaaagaaaaataaaataaaagagattatcagagtagattaaaaaaaccagacccagctatatgtagtctacaagaaayccattctaaatataaagatgcatctagattaaaattaaagtgatggagaaagatacaccatacaaatatttaactaaaacaccccccagaatatctgtat

SEQ ID NO: 428822 - DNA, 201 bp, Homo sapiens
ttggggcaggagccccgaggcatgtgaaaggccagggcttcatcctcccagagcctgggatccaccgacaagcaggccctctgcagaggctgcgccccccmcaccagctcttggctgccccagctcttggctccctctccctaccctccgagctccctagggctgggatgcgtccctcccgtggaccaggcagtcctgggg

SEQ ID NO: 428823 - DNA, 201 bp, Homo sapiens
atggcatgaacctgggaggcggagcttgcagtgagctgatattgcgccactgcacctccagcctgggcggcagagtgagactccatctcaaaaaaaaaaaraaagaaagaagaaaaagggccaggtgtggtggctcatgcctgaaatctcagcgctttgggaggccgaggcaggaggatcacttgagcccaggagttggaa

SEQ ID NO: 428824 - DNA, 201 bp, Homo sapiens
gcatgaggctttgagaggggcccctgccttgtgcctgggcaggctccttccctgctctgcacactgtgtcttgagcaggctctggaacccacctttccacyattagaatgatagacgggctggatgtcaggaaggtggagtgtgttcctccaggtcacagccctgggcctctatgacagcccctttgagatgaagagacct

SEQ ID NO: 428825 - DNA, 201 bp, Homo sapiens
cgtggaagctagctgctgagcaaaaggtctttatcactgcagaaaatgtgcctgagatttgcccgccttctgcctccatccactggctctgcccctcctcwgctgctggagccccctttccccaccattagccccagacctgcaggcctggatggttgaaggggaggggtccacactggcccctcatgggatcttccggaa

SEQ ID NO: 428826 - DNA, 201 bp, Homo sapiens
actgcactccagcctgggtgacagagcgaagactctgactcaaaaaaaaaaaaaattcctcagctctgcctcaccgactacagttccatcacattagtaatctctctctctctctctctctctctcacacacacacacacacacacacacacacacacacacacacacacacatcccttcctgctcaacagccccactcct

SEQ ID NO: 428827 - DNA, 201 bp, Homo sapiens
gctttgagaggggcccctgccttgtgcctgggcaggctccttccctgctctgcacactgtgtcttgagcaggctctggaacccacctttccactattagartgatagacgggctggatgtcaggaaggtggagtgtgttcctccaggtcacagccctgggcctctatgacagcccctttgagatgaagagacctgggtgag

SEQ ID NO: 428828 - DNA, 201 bp, Homo sapiens
gagccccctttccccaccattagccccagacctgcaggcctggatggttgaaggggaggggtccacactggcccctcatgggatcttccggaacctggctsctactggagggcagggtatccagggtggcccctccctaagtaaatcttcccatcctgggaataggacagacctattctctgtctggcgatgcctgcattt

SEQ ID NO: 428829 - DNA, 201 bp, Homo sapiens
ctgcactccagcctgggtgacagagcgaagactctgactcaaaaaaaaaaaaaattcctcagctctgcctcaccgactacagttccatcacattagtaatctctctctctctctctctctctctcacacacacacacacacacacacacacacacacacacacacacacacatcccttcctgctcaacagccccactcctc

SEQ ID NO: 428830 - DNA, 201 bp, Homo sapiens
cctgccatggggtagtgtcttggaggcggggcctgctgtctgtaagggctggtgagccccggcccaagcagggctaggcagtgccctgtggctcaggcctsagtggcatgggcgtagcccgtgctgggagggaggaatgagactccctgtgtcccgaggctctcccttggagcaggctctctctgctctctctgtacctcc

SEQ ID NO: 428831 - DNA, 201 bp, Homo sapiens
tgcactccagcctgggtgacagagcgaagactctgactcaaaaaaaaaaaaaattcctcagctctgcctcaccgactacagttccatcacattagtaatctctctctctctctctctctctctcacacacacacacacacacacacacacacacacacacacacacacacatcccttcctgctcaacagccccactcctca

SEQ ID NO: 428832 - DNA, 201 bp, Homo sapiens
gcactccagcctgggtgacagagcgaagactctgactcaaaaaaaaaaaaaattcctcagctctgcctcaccgactacagttccatcacattagtaatctctctctctctctctctctctctcacacacacacacacacacacacacacacacacacacacacacacacatcccttcctgctcaacagccccactcctcag

SEQ ID NO: 428833 - DNA, 201 bp, Homo sapiens
tggcagcattcacctgcacagtgggaagtcctgcagcgatgggccaggtgaaatggagtgggcaggggctcttggtgaggtgtcattatggtagtcatccrggctgttcacagatgttcaagtctcctttatgccaggcccatggtaggagttgacttctccatccacttcaattcaagcatggccatgtgagttgctctt

SEQ ID NO: 428834 - DNA, 201 bp, Homo sapiens
ctgggcttggggcaggagccccgaggcatgtgaaaggccagggcttcatcctcccagagcctgggatccaccgacaagcaggccctctgcagaggctgcgccccccccaccagctcttggctgccccagctcttggctccctctccctaccctccgagctccctagggctgggatgcgtccctcccgtggaccaggcagtc

SEQ ID NO: 428835 - DNA, 201 bp, Homo sapiens
tgcagcgatgggccaggtgaaatggagtgggcaggggctcttggtgaggtgtcattatggtagtcatccaggctgttcacagatgttcaagtctcctttaygccaggcccatggtaggagttgacttctccatccacttcaattcaagcatggccatgtgagttgctcttaccaacaaaatgtgggtggaagtgggtggaa

SEQ ID NO: 428836 - DNA, 201 bp, Homo sapiens
aatacttgttattttcctttctttctgttttttttttttttttttttttttttaacaattgccatcctatcctaatgggttttaatttgcattttcctggkggctagttatgttgagcatattttcatgtgcttattggctatttggatatcctctttgatgaagtgtctgttcaagcctttaacctattaaaaaattgtt

SEQ ID NO: 428837 - DNA, 201 bp, Homo sapiens
gccaggtgaaatggagtgggcaggggctcttggtgaggtgtcattatggtagtcatccaggctgttcacagatgttcaagtctcctttatgccaggcccayggtaggagttgacttctccatccacttcaattcaagcatggccatgtgagttgctcttaccaacaaaatgtgggtggaagtgggtggaatgtcactttca

SEQ ID NO: 428838 - DNA, 201 bp, Homo sapiens
gtgtcattatggtagtcatccaggctgttcacagatgttcaagtctcctttatgccaggcccatggtaggagttgacttctccatccacttcaattcaagyatggccatgtgagttgctcttaccaacaaaatgtgggtggaagtgggtggaatgtcactttcagacagaagccttaggagcccttgtgtgggccagcatg

SEQ ID NO: 428839 - DNA, 201 bp, Homo sapiens
gtgggtggaagtgggtggaatgtcactttcagacagaagccttaggagcccttgtgtgggccagcatgttctctattcctgtctctgagatcctggacacwcctgttgagatgaaactctgtcagactgggtcacccagtgactgtgatgcccagagccctcctgctgactcagtggtcatactgcatatgtcagaaataa

SEQ ID NO: 428840 - DNA, 201 bp, Homo sapiens
caactctctagagggctgggcccataaggtgtaaacctggctgctgtgttttgagatgccctgaacaggctaagtgtgagcaacaggctgtttatccactsagatgcaagtgggctgagtccgaaaagaaagtcagtggagggttgtgggagtggagttagttttataggcttggagtaggtagtggaaagttacagttag

SEQ ID NO: 428841 - DNA, 201 bp, Homo sapiens
tgaggctttgagaggggcccctgccttgtgcctgggcaggctccttccctgctctgcacactgtgtcttgagcaggctctggaacccacctttccactatyagaatgatagacgggctggatgtcaggaaggtggagtgtgttcctccaggtcacagccctgggcctctatgacagcccctttgagatgaagagacctggg

SEQ ID NO: 428842 - DNA, 201 bp, Homo sapiens
ttatccactcagatgcaagtgggctgagtccgaaaagaaagtcagtggagggttgtgggagtggagttagttttataggcttggagtaggtagtggaaagytacagttaggggcagttttttcgggcaggggaagaatttcacaaggtgcatagtcacgaggtgggggaggtcacaaggcacaatatcacaaggtggatgg

SEQ ID NO: 428843 - DNA, 201 bp, Homo sapiens
tcctgtgagtcaccgccccaccctccaagtccctcccacatggtgtgatcagcatccctgcctctgcccacgaaagtgatttcaaaaggcagaagtgacasgtggtgggtggttaggcgggcagtgcctctcacctccccatccatctctcttctgtcaagtggggcagcagcagggccaagaagactgaattcaaagcat

SEQ ID NO: 428844 - DNA, 201 bp, Homo sapiens
caagtggctggagaatgatgtgagaaattccacagtgaagacatttgaaggcagcaagacagggctttgagttctgcctaggggagctcagaagcctttgyagaggtggggaaatttgagttgggctttgaaggatgactaggagttcaccaatttgaggacactagaggggcctggcagttagcagccaaagcaaagaga

SEQ ID NO: 428845 - DNA, 201 bp, Homo sapiens
acaggaggcctggaggaagcagtattttcagtaatgcaatatgcagcattgaccagcacctgcagcataccaggtgcaatgctaggggataacagatcatrgagaaagagctgcagcacccaagagctcacagtgcagcagactggccagcagacaagtggctggagaatgatgtgagaaattccacagtgaagacatttg

SEQ ID NO: 428846 - DNA, 201 bp, Homo sapiens
catgttctagcctatgtcagaattttcttcctttttaaggccgaatcatcttccattgtatgtacaaaccacatttggttcatctgttcatctgtacatgsacacttgagttgcttctaccttttggctcttgtgaatcctgcttctgtgaacatgggtgtacaaatatctcttcaagatcttgctttcagctgggtgcgg

SEQ ID NO: 428847 - DNA, 201 bp, Homo sapiens
ctcactgagagcttgtttctcctgggacatgagagatgcaccaccttcctgcccagctgggcaagaacatcaggagagccaagggttacaggaggcctggrggaagcagtattttcagtaatgcaatatgcagcattgaccagcacctgcagcataccaggtgcaatgctaggggataacagatcatggagaaagagctgc

SEQ ID NO: 428848 - DNA, 201 bp, Homo sapiens
ccaggcatgcagggcacagagctggggggaatgagctccctccccatgcacccctccccagctgtccctgagtcactagcgcccttccctttcactaccarggaggctctggagctgcttcctatcccccactgtcctgtgagtcaccgccccaccctccaagtccctcccacatggtgtgatcagcatccctgcctctgc

SEQ ID NO: 428849 - DNA, 201 bp, Homo sapiens
aaagaagccgatttccttcttgaagggggtgagaagaagggagactgtgacttgaccaagccaatcggcaaactaccttccctcccaacagaagttgattygttcaggagggggcatgtgacaaaagctgggccactcagagcccatctaaggacttcactgaaatgctgacataaagcagccacttgtgccacaggggga

SEQ ID NO: 428850 - DNA, 201 bp, Homo sapiens
gatcagcgggtacccgagtgggtgggccttggtggggagcagggaggagggtctgtgggagggtggcaccctaccgagggcttgaggccagcttcacaggyaggagaaggggaacagggggcatgctatccagattgtggcttgggtgtgggcttgctcatgttctgaggtgacttctggccccaggctgccccctcaggg

SEQ ID NO: 428851 - DNA, 201 bp, Homo sapiens
gaagtcaggagttcgagaccagcctggccaacacagtgagtccccatctctactaaaaatacaaaaaaattagctggacatggtggcgggcacctataatyccagctactagggaggctgaggtatgagaatcgcttgaaccccggaggcagaggttgcagtgagccgagattgcgccattgcactccagcctgggcaaca

SEQ ID NO: 428852 - DNA, 201 bp, Homo sapiens
gcctttccattcattcatggtcagcagcactgttggccccttgcctctgtcgtggtgaagattgggcaagttgtcctcctgcatttgagtggaagctcccrgagggcagggcccccactctgtatccccacctctagcccacaccctgtagctcatacagaatgggcccttgccatggacagcctctgttcctgaccctgg

SEQ ID NO: 428853 - DNA, 201 bp, Homo sapiens
ggccacaagctaaagatggtagcactagagaataaatagagcctgggtccctgaatcaccacttggattcaccctagactgtgacatgagcaagaaatcarcctgtgctcagctgcagagatctgggattctttgttctagcagttcgcttactctgactcacaaaaaccttaggagtaacggtgtgcaagtggtgtaaca

SEQ ID NO: 428854 - DNA, 201 bp, Homo sapiens
taacatctttttatgtgcttactggccatttgtatatcttctttggagaaatgtcttttcagatactttgcccatttttaaattggaccatttgtcttttyattattgagttggaagagttctttatctattctagtcccttatcagatctgtcccttatctgataagtcccagatcttacatatctgtcccttatcagat

SEQ ID NO: 428855 - DNA, 201 bp, Homo sapiens
gtgaatgagtcagtgaataaatgaatgaacagactgaccacaggatctgagctcgcactgggttctgcgcatcctggggcagcggctctggagctcaggcytgtggagccctgcagcctgtcccaggcctgatatcgaaccttcccccaggtgacttctgcctgtgccccccacctacttgcagggacataaagcctgatg

SEQ ID NO: 428856 - DNA, 201 bp, Homo sapiens
gaggattgcttgagcacaggatgtcaaggctgcagtgagaggtgattgtgctacaccagcttgggtaacagagtgagatcctgtctcaaaaaaacaaaaamaaaaacaaacaaaaaaaaacaatccgaacaggtctatctgtgttaaagaaaccaagccaataattaataacctttcaaaacataaagtaccaggcccaga

SEQ ID NO: 428857 - DNA, 201 bp, Homo sapiens
gcactgaggctcagagtggccaggcgccttgttcaagatcatagggcctttgaggactaatgctcgcctgctccctttctagtgaaataatccaaacagtraagatccattgtgagtcctccctctccctctcctctcccactctccagaagtagccactcttagtaagagtttggtggggtttgtatcagaccttttaaa

SEQ ID NO: 428858 - DNA, 201 bp, Homo sapiens
tgcttgagcacaggatgtcaaggctgcagtgagaggtgattgtgctacaccagcttgggtaacagagtgagatcctgtctcaaaaaaacaaaaaaaaaaamaaacaaaaaaaaacaatccgaacaggtctatctgtgttaaagaaaccaagccaataattaataacctttcaaaacataaagtaccaggcccagatagatt

SEQ ID NO: 428859 - DNA, 201 bp, Homo sapiens
cctccgggcagggctgagacttagagtcagggtggacccttccaggaagtggtgcagcccctctgggtggccggcccctctggctagctctgacctggagragttcagcctttggtttcagtaaaatctgctaccctgtggaatcctcccactggcctgttatctcccccttaatttctggggcaaattgcattaaatgct

SEQ ID NO: 428860 - DNA, 201 bp, Homo sapiens
aaatgcctattattcaatgaaagaagccaatctgaaaaggctacatactgtatgacttcaactgtgcaatcttctggaaaagaaaaaactgtggagacagyaaagagttcacaggttgacagaggttaggagggagggagagatgaacagatggagcatcctggatttttagggcagtgaaattactctgtgtgatactat

SEQ ID NO: 428861 - DNA, 201 bp, Homo sapiens
agagggctggtgaggcacagtgtccctgaatgtcctcagagtccaggtctggcccagccacattcttgaggatgggaagctagagaggtagaaatatctcsgctgaacgcccagctggtcacataagagctggggaactggacacttcacctaatgcctccgagcctcaccttaacatgggagctcagctcctcctctgca

SEQ ID NO: 428862 - DNA, 201 bp, Homo sapiens
tgctagaagcaggtaattaacggattagcaaggctgttagcaaggctgcttgctgccagtgaggaacctggcaggtgctgccttggagaaggaggaccagrctccagattccacaggaaggaaaggactcttcggaggcaggatcctgagggcagctgagagtcatgggactcagcagggacacagtgagcaggctggaag

SEQ ID NO: 428863 - DNA, 201 bp, Homo sapiens
gtggcaacaattatgcagtcataagaggaggcttaatgggcgttcattaagagttgcactcagggaatgacagctctgacagctgccagtactgactgtcrtagagtcatggcgctgttccctgagggagcatcaccccctcccctgagctgcagctgctcctccgggaatggggctcacaggaaaaaagacccaagagca

SEQ ID NO: 428864 - DNA, 201 bp, Homo sapiens
ctgttagcaaggctgcttgctgccagtgaggaacctggcaggtgctgccttggagaaggaggaccaggctccagattccacaggaaggaaaggactcttcrgaggcaggatcctgagggcagctgagagtcatgggactcagcagggacacagtgagcaggctggaagggcgggaggcaggccagaggggatggggcagta

SEQ ID NO: 428865 - DNA, 201 bp, Homo sapiens
actgccaggtggagctccaggctcatgattcaggaaggccagagcgccatacgcccctttattcctgtcccagctgtgtctctcctggttgatctgtgccycgaaagcataaggattcatccgttttagtcccatggatggaagccggcccctctgcatagagtggcacggggcaggagtttgaacacccctaggagtatg

SEQ ID NO: 428866 - DNA, 201 bp, Homo sapiens
ctgggggctgctaccccaagtcttgctggctggagccgtgagcattgcttgtggtggtgctgggctctgggagggcttcccttggttcttgaaggccccakgccataagtgactcttgtgaccccattagcagcacaactttccctctgccccctctgtcccatagcagcccccagctttgcctcctgtcctgccacacct

SEQ ID NO: 428867 - DNA, 201 bp, Homo sapiens
ctggaccccaccatctttccgtcataagcctccagcctgtcccctgagctggccccacttccctccatttgggagaagccgtggaagctgctgactgttcycccctcgtttttcagcctgttccccactgttcatgtttggtctacaacatcaaacccatttctttttcagctgatctcatttctcctgagtttctgatgc

SEQ ID NO: 428868 - DNA, 201 bp, Homo sapiens
ccaccatctttccgtcataagcctccagcctgtcccctgagctggccccacttccctccatttgggagaagccgtggaagctgctgactgttcccccctcrtttttcagcctgttccccactgttcatgtttggtctacaacatcaaacccatttctttttcagctgatctcatttctcctgagtttctgatgctctgagt

SEQ ID NO: 428869 - DNA, 201 bp, Homo sapiens
gctgatctcatttctcctgagtttctgatgctctgagtccaaagcctaaacaaccgtattcttttcactctccaaatacaaagccctctcaccctggctcrgcggttggctccctgctctgagccagctcacctgatcctttagaggaagaatgttcgaagcacaggctttaaaaatgtccttcctagcttgtgcatattc

SEQ ID NO: 428870 - DNA, 201 bp, Homo sapiens
tacaaagccctctcaccctggctcggcggttggctccctgctctgagccagctcacctgatcctttagaggaagaatgttcgaagcacaggctttaaaaaygtccttcctagcttgtgcatattctatttgcacttccccactcactcaagaagatgccatttcccccacaaagctgggagccttaatgcccttctccagc

SEQ ID NO: 428871 - DNA, 201 bp, Homo sapiens
gcatattctatttgcacttccccactcactcaagaagatgccatttcccccacaaagctgggagccttaatgcccttctccagcacccatcctgcccaccrtggctgaggtcacagctctgggctttgaaatgcacaaacacaatcagaggtcaactcctgtcatttgaggatccctgattagaaaagagcttgatataca

SEQ ID NO: 428872 - DNA, 201 bp, Homo sapiens
ttgcagagaaaatattgcaagtaaatgttgaacctctggatcgaaccatgcctgagtccctcctggctctgacttttcagttaggtgggtccacacattcyctttttcagccaagccatttgaatgggattttctgctctttgcaaaataaagatttgcgatgacttagagaggggttaaagccatatttgatctggacac

SEQ ID NO: 428873 - DNA, 201 bp, Homo sapiens
agtggcacggggcaggagtttgaacacccctaggagtatggcacaggtcacctgtggggtgaagacataagtgtgtttgcaagtgggtgggtggctgggamctggaggatttggctgagccaaagatgggctgggtttgcccatcttagggttgttggcctggagctcaaattgctctgtgatggaggagggtgactctgg

SEQ ID NO: 428874 - DNA, 201 bp, Homo sapiens
acggggcaggagtttgaacacccctaggagtatggcacaggtcacctgtggggtgaagacataagtgtgtttgcaagtgggtgggtggctgggaactggargatttggctgagccaaagatgggctgggtttgcccatcttagggttgttggcctggagctcaaattgctctgtgatggaggagggtgactctggagctct

SEQ ID NO: 428875 - DNA, 201 bp, Homo sapiens
acaggacctgccaacacccacaggattccctgggcatcctcattgagcaggtaagaggaccgaggctgggcagtgttcaggtggcctgcccggagccagawgccatggggtggttcagccatggggctctctgccctcattcagcctgtctccttaaatgcttgagtggcagcatttgtaaactgcttatttctgagttct

SEQ ID NO: 428876 - DNA, 201 bp, Homo sapiens
ggggtgaagacataagtgtgtttgcaagtgggtgggtggctgggaactggaggatttggctgagccaaagatgggctgggtttgcccatcttagggttgtwggcctggagctcaaattgctctgtgatggaggagggtgactctggagctctcccaggcaagggcaggggcagagggacagagagaagaaagggacgtgag

SEQ ID NO: 428877 - DNA, 201 bp, Homo sapiens
ggtggctgggaactggaggatttggctgagccaaagatgggctgggtttgcccatcttagggttgttggcctggagctcaaattgctctgtgatggaggarggtgactctggagctctcccaggcaagggcaggggcagagggacagagagaagaaagggacgtgagaaagacaacacacaaccccttccatgaggctcgc

SEQ ID NO: 428878 - DNA, 201 bp, Homo sapiens
tcaggagaaggccctaaggaaaggctttggatactacctgtggccacactctcctacaggccaaggagagacagacagagaggggctctgggcagccagtrgcactgaactctcagggtcgaggtctggggcaatatccgggctccactttcattccgtaatggcaacataatagagtgcagagtgctggctaaagagtgg

SEQ ID NO: 428879 - DNA, 201 bp, Homo sapiens
gggaacacttgcttcattttctccctgttcttgattatagtccagagatctgctgggggatggtgtgagcccaaagaagccgatttccttcttgaaggggstgagaagaagggagactgtgacttgaccaagccaatcggcaaactaccttccctcccaacagaagttgatttgttcaggagggggcatgtgacaaaagct

SEQ ID NO: 428880 - DNA, 201 bp, Homo sapiens
gcttccagttgctaggcagctcccctgacttcgtggatacccccctctcccccactcaccacctctgctgcaacatcctgtcactcaggaactccaacaayccaaccccatctctactaaaaacaaaaaattagctgggtgtggtggcagacgcctgtaatcccagctgcttgggaggctgagtcagcagaattgcctgaa

SEQ ID NO: 428881 - DNA, 201 bp, Homo sapiens
ttcgaatggactagatccagtccaaccccccagctgcagtggaggaagcagaggccaagtccctgcggaagctgcccaggacccgctgagtggcgacctcrggggcagtcaccctacatgcacccaggactgagggtatgcgcgcttctcctgtgctgcctgggaaataacaggaaagaccacgggcgtccacccccaggg

SEQ ID NO: 428882 - DNA, 201 bp, Homo sapiens
tgggggatggtgtgagcccaaagaagccgatttccttcttgaagggggtgagaagaagggagactgtgacttgaccaagccaatcggcaaactaccttccytcccaacagaagttgatttgttcaggagggggcatgtgacaaaagctgggccactcagagcccatctaaggacttcactgaaatgctgacataaagcagc

SEQ ID NO: 428883 - DNA, 201 bp, Homo sapiens
gactagatccagtccaaccccccagctgcagtggaggaagcagaggccaagtccctgcggaagctgcccaggacccgctgagtggcgacctcgggggcagwcaccctacatgcacccaggactgagggtatgcgcgcttctcctgtgctgcctgggaaataacaggaaagaccacgggcgtccacccccagggaaaagggt

SEQ ID NO: 428884 - DNA, 201 bp, Homo sapiens
tgtgagcccaaagaagccgatttccttcttgaagggggtgagaagaagggagactgtgacttgaccaagccaatcggcaaactaccttccctcccaacagragttgatttgttcaggagggggcatgtgacaaaagctgggccactcagagcccatctaaggacttcactgaaatgctgacataaagcagccacttgtgcc

SEQ ID NO: 428885 - DNA, 201 bp, Homo sapiens
ggaggaagcagaggccaagtccctgcggaagctgcccaggacccgctgagtggcgacctcgggggcagtcaccctacatgcacccaggactgagggtatgygcgcttctcctgtgctgcctgggaaataacaggaaagaccacgggcgtccacccccagggaaaagggtgaagaaagtgcggggccctggctgggtctctc

SEQ ID NO: 428886 - DNA, 201 bp, Homo sapiens
aaaatattgcaagtaaatgttgaacctctggatcgaaccatgcctgagtccctcctggctctgacttttcagttaggtgggtccacacattccctttttcrgccaagccatttgaatgggattttctgctctttgcaaaataaagatttgcgatgacttagagaggggttaaagccatatttgatctggacacatgagagt

SEQ ID NO: 428887 - DNA, 201 bp, Homo sapiens
aggaagcagaggccaagtccctgcggaagctgcccaggacccgctgagtggcgacctcgggggcagtcaccctacatgcacccaggactgagggtatgcgygcttctcctgtgctgcctgggaaataacaggaaagaccacgggcgtccacccccagggaaaagggtgaagaaagtgcggggccctggctgggtctctctg

SEQ ID NO: 428888 - DNA, 201 bp, Homo sapiens
ttgaacctctggatcgaaccatgcctgagtccctcctggctctgacttttcagttaggtgggtccacacattccctttttcagccaagccatttgaatggsattttctgctctttgcaaaataaagatttgcgatgacttagagaggggttaaagccatatttgatctggacacatgagagtacctgaagcctgtcctcac

SEQ ID NO: 428889 - DNA, 201 bp, Homo sapiens
gtgggtccacacattccctttttcagccaagccatttgaatgggattttctgctctttgcaaaataaagatttgcgatgacttagagaggggttaaagccrtatttgatctggacacatgagagtacctgaagcctgtcctcacccagctgtctcttcccactggtctttgaggcacaagtcctaaaggaatgccctgtct

SEQ ID NO: 428890 - DNA, 201 bp, Homo sapiens
gaagctgtgaggctgagaaacccctttccatccagagggaaagaaggtatagtgggtgaggggagaacagcagaggcaggcaaccctggggccggggagcmagaaggagtggctgcctctgtctccaagggcttgctagcttgaggtcaggtccttcctgaggtctgactgctcctcttgcccattgggtctgaaataaat

SEQ ID NO: 428891 - DNA, 201 bp, Homo sapiens
caatgctaggggataacagatcatggagaaagagctgcagcacccaagagctcacagtgcagcagactggccagcagacaagtggctggagaatgatgtgrgaaattccacagtgaagacatttgaaggcagcaagacagggctttgagttctgcctaggggagctcagaagcctttgcagaggtggggaaatttgagttg

SEQ ID NO: 428892 - DNA, 201 bp, Homo sapiens
gctgtgaggctgagaaacccctttccatccagagggaaagaaggtatagtgggtgaggggagaacagcagaggcaggcaaccctggggccggggagccagraggagtggctgcctctgtctccaagggcttgctagcttgaggtcaggtccttcctgaggtctgactgctcctcttgcccattgggtctgaaataaattaa

SEQ ID NO: 428893 - DNA, 201 bp, Homo sapiens
gcagcattgaccagcacctgcagcataccaggtgcaatgctaggggataacagatcatggagaaagagctgcagcacccaagagctcacagtgcagcagastggccagcagacaagtggctggagaatgatgtgagaaattccacagtgaagacatttgaaggcagcaagacagggctttgagttctgcctaggggagctc

SEQ ID NO: 428894 - DNA, 201 bp, Homo sapiens
agtgggtgaggggagaacagcagaggcaggcaaccctggggccggggagccagaaggagtggctgcctctgtctccaagggcttgctagcttgaggtcagktccttcctgaggtctgactgctcctcttgcccattgggtctgaaataaattaattatcacccgccctttttccctatagatgagttgaatcaatttctat

SEQ ID NO: 428895 - DNA, 201 bp, Homo sapiens
cagtattttcagtaatgcaatatgcagcattgaccagcacctgcagcataccaggtgcaatgctaggggataacagatcatggagaaagagctgcagcacmcaagagctcacagtgcagcagactggccagcagacaagtggctggagaatgatgtgagaaattccacagtgaagacatttgaaggcagcaagacagggct

SEQ ID NO: 428896 - DNA, 201 bp, Homo sapiens
ctctcctccatccaccaacagcctccaagttgagtaagtggcagcgaaggtcacgcctgagctggcagccatggaacctcacctcctgcttttccagcttygttcccaaagacgtccctccacgagcttgtgctcatgccatgcctatgctggaagcccttgctgtctgcaggtggcgatgtgacccgggcctggccctgg

SEQ ID NO: 428897 - DNA, 201 bp, Homo sapiens
gcaggtaagaggaccgaggctgggcagtgttcaggtggcctgcccggagccagatgccatggggtggttcagccatggggctctctgccctcattcagccygtctccttaaatgcttgagtggcagcatttgtaaactgcttatttctgagttctctgcagacatgctgaagcagaatctctagtgacaggcccaagaaca

SEQ ID NO: 428898 - DNA, 201 bp, Homo sapiens
ctctgggtgaacacccacaaaagtgtctgtctgcctgaggctaccccggcctctgtctggctcctgcggtcgtggagcagacctcacggtgcaggagctgraggtggctgtgggagtttgaggaggggcaggaggaggcagctgtgggagttgtggagatggcttcacggagccaggagccctgttccgggagggcagtag

SEQ ID NO: 428899 - DNA, 201 bp, Homo sapiens
ctcctgcttgcagatctggccatgctggaggcaggatggatccccagcccctcagttgtgacccttcctagcttgttaggttagtagaaaactcagctcayagtctcggggactgctcctcccctggttcatgcacaaactccaaaggttcatgggattcctaaaagcagcctgacaaatttccctcctgtggggagaaga

SEQ ID NO: 428900 - DNA, 201 bp, Homo sapiens
tcaaccacgtgagcctgcctctcttctgcctctgtctaggtgggagactctctttgggtttgaaaaccccagtctgagatgtgctgtttcccttgtgcccyaccagggcccagtgtgtagcgttctggggacaccgggtgttgctgagaacgaatcagggagccatagtcagggggctcagtgcagggcaggggtgaaagg

SEQ ID NO: 428901 - DNA, 201 bp, Homo sapiens
ctgctgttaacattattgtatgagtaattttacaagtttaccatttttcttgtacgtataataaatatcccaccttattgacccacagttccccctcccamaacttgcaaagtattttggctgacttgacttgtttactatgataaatagtgttgctataaacagctgtgcacatatagctatttttccctttgcaattat

SEQ ID NO: 428902 - DNA, 201 bp, Homo sapiens
agccgaggcgtcacaggaacccaggaggtggggaggatgcagagcaggacctattattcctatcattaagtatcgattcttatttatgagaaaacaacaaytatctggtgcctgaatatgattatgaattttaaaagatccagaggagtacccgagaaattgttcatgattattagggaaagggaaacattttatcttaga

SEQ ID NO: 428903 - DNA, 201 bp, Homo sapiens
caggaggtggggaggatgcagagcaggacctattattcctatcattaagtatcgattcttatttatgagaaaacaacaattatctggtgcctgaatatgawtatgaattttaaaagatccagaggagtacccgagaaattgttcatgattattagggaaagggaaacattttatcttagacattaggtatggcttgaagtg

SEQ ID NO: 428904 - DNA, 201 bp, Homo sapiens
tggtgcctgaatatgattatgaattttaaaagatccagaggagtacccgagaaattgttcatgattattagggaaagggaaacattttatcttagacattwggtatggcttgaagtgtatttttttggagggtgacatgtattatttttattaaatggtagtagctgaagtggttacctctagaaacagaaatttgttttg

SEQ ID NO: 428905 - DNA, 201 bp, Homo sapiens
tgttcatgattattagggaaagggaaacattttatcttagacattaggtatggcttgaagtgtatttttttggagggtgacatgtattatttttattaaayggtagtagctgaagtggttacctctagaaacagaaatttgttttgtgggagggttaggtggttaagagacatattaacactgcctgtaatacttcagggt

SEQ ID NO: 428906 - DNA, 201 bp, Homo sapiens
cttagacattaggtatggcttgaagtgtatttttttggagggtgacatgtattatttttattaaatggtagtagctgaagtggttacctctagaaacagawatttgttttgtgggagggttaggtggttaagagacatattaacactgcctgtaatacttcagggttttttttctaacaaaaagagatgttcttgtacaat

SEQ ID NO: 428907 - DNA, 201 bp, Homo sapiens
agcagtgccctcatcaacttccccacttccccacccaacatgaagacttcttttttttttctttttgaggcagggtctcacttgttgccctggctacttasaggtgcgatcatagctcactgcagccccaaactcctgggctcatgggatcctctcacctcagcctcctgagtagctgggatgacaggcatctgccactgt

SEQ ID NO: 428908 - DNA, 201 bp, Homo sapiens
attcccggtgccaagctcccctccgtctccccccattcccccatcccctctgctcctcagtggctggcaggtggcattgttcagcacctgacagctccccmcactcccacagctcctgcctcctgcactgttttgtcaatttggacagctgtcatgccagctctgaaacacacccagtgtttcctacccaattctggaggc

SEQ ID NO: 428909 - DNA, 201 bp, Homo sapiens
gtgtcacttgcaacagatctatttgattgtaacatcatgaaatcccctccactttttctgccttatggtttctgctttgaaattttgtctaagaaatcttytactccttttggtaagttcccctgtgtgttttgttttctaacatgttataatctggctattcatggtggtcatcgtgaaaagcaatcccatataaggtgg

SEQ ID NO: 428910 - DNA, 201 bp, Homo sapiens
tcctcagtggctggcaggtggcattgttcagcacctgacagctccccccactcccacagctcctgcctcctgcactgttttgtcaatttggacagctgtcrtgccagctctgaaacacacccagtgtttcctacccaattctggaggccccactctgctccaagcagcctggtgaccttggatgtcctttttcctgtctgg

SEQ ID NO: 428911 - DNA, 201 bp, Homo sapiens
ctgggcctctcctggccctcaaggaagaggaccagctcctggtcaggagactgagctgtcatgtcctgagtggtgagggtgaaccagatctgggcctttgmgggtgggtcactgaaccgtcccctctcggggtcagccagtcaccagggttctccattccaagtgtctgcacctgaggtgctctgtgataccttggggaca

SEQ ID NO: 428912 - DNA, 201 bp, Homo sapiens
ctgtctgggccagggatcccacctgggttgaagagagcagggacagtgtggtgcagcaggagcctattcccatactgtgtcctcactgagagcttgtttcycctgggacatgagagatgcaccaccttcctgcccagctgggcaagaacatcaggagagccaagggttacaggaggcctggaggaagcagtattttcagta

SEQ ID NO: 428913 - DNA, 201 bp, Homo sapiens
tgaaccagatctgggcctttgcgggtgggtcactgaaccgtcccctctcggggtcagccagtcaccagggttctccattccaagtgtctgcacctgaggtsctctgtgataccttggggacatctgaagaagaatggaacccttctcctacaggaggagcaggcagccagggccatcataagggagcagctaagtgcatgc

SEQ ID NO: 428914 - DNA, 201 bp, Homo sapiens
gcttgtttctcctgggacatgagagatgcaccaccttcctgcccagctgggcaagaacatcaggagagccaagggttacaggaggcctggaggaagcagtrttttcagtaatgcaatatgcagcattgaccagcacctgcagcataccaggtgcaatgctaggggataacagatcatggagaaagagctgcagcacccaag

SEQ ID NO: 428915 - DNA, 201 bp, Homo sapiens
cacccagccctgccttctgagcggagtctccttagctttgggtggagatggtgttaactgaatggaatgatacgtgtaaggggcttagcacagcgcctccrcagagggcccttatagggagatccatctgtatcttcttcagtgcccctctagtagaggctgtgggttgatgtgtgggccctacgatgagatccaggggaa

SEQ ID NO: 428916 - DNA, 201 bp, Homo sapiens
agaatgatgtgagaaattccacagtgaagacatttgaaggcagcaagacagggctttgagttctgcctaggggagctcagaagcctttgcagaggtggggraatttgagttgggctttgaaggatgactaggagttcaccaatttgaggacactagaggggcctggcagttagcagccaaagcaaagagaaagcaacacac

SEQ ID NO: 428917 - DNA, 201 bp, Homo sapiens
ggagatactgttgcgtggctttgatgtaggcttctctgggcagctgcggagcctgctgcagcactcactgagcctgctgcgggcgcacgtggccctgctgygcatccgtcagggtgacttgctggtggtgccgcagcctggcccaggcctcacacacctggcacaactgagtgctgagctgctgcccgtcttcctgagcga

SEQ ID NO: 428918 - DNA, 201 bp, Homo sapiens
ctctgaggttctctgcacacctcctgctccccacatttcttggccacagggctactgcccttgagggtgggaattcacttcctctcactctgcaagttggsccagcaggtgctggggcatggctctggccatcctcttgggtctctaggtctgcttttactggtttcacctgcatgtacctggtctgggggtgtagggttg

SEQ ID NO: 428919 - DNA, 201 bp, Homo sapiens
gttcagccatggggctctctgccctcattcagcctgtctccttaaatgcttgagtggcagcatttgtaaactgcttatttctgagttctctgcagacatgytgaagcagaatctctagtgacaggcccaagaacatgcatttttctgcagtcctgagtgaggctgaagagcagagcttgcctgaggcagagaggagaagtg

SEQ ID NO: 428920 - DNA, 201 bp, Homo sapiens
ctgaggtctagctctgggtgaacacccacaaaagtgtctgtctgcctgaggctaccccggcctctgtctggctcctgcggtcgtggagcagacctcacggygcaggagctggaggtggctgtgggagtttgaggaggggcaggaggaggcagctgtgggagttgtggagatggcttcacggagccaggagccctgttccgg

SEQ ID NO: 428921 - DNA, 201 bp, Homo sapiens
gggctttgagttctgcctaggggagctcagaagcctttgcagaggtggggaaatttgagttgggctttgaaggatgactaggagttcaccaatttgaggasactagaggggcctggcagttagcagccaaagcaaagagaaagcaacacacggttcacccagagaggcatcaaagagcagtggtggaaaatgaggctggaa

SEQ ID NO: 428922 - DNA, 201 bp, Homo sapiens
gcctaggggagctcagaagcctttgcagaggtggggaaatttgagttgggctttgaaggatgactaggagttcaccaatttgaggacactagaggggcctkgcagttagcagccaaagcaaagagaaagcaacacacggttcacccagagaggcatcaaagagcagtggtggaaaatgaggctggaaagactccccagaca

SEQ ID NO: 428923 - DNA, 201 bp, Homo sapiens
aaatttgagttgggctttgaaggatgactaggagttcaccaatttgaggacactagaggggcctggcagttagcagccaaagcaaagagaaagcaacacayggttcacccagagaggcatcaaagagcagtggtggaaaatgaggctggaaagactccccagacagtgctgagcctttgtatttgtgagggtgcttttggc

SEQ ID NO: 428924 - DNA, 201 bp, Homo sapiens
aatttgagttgggctttgaaggatgactaggagttcaccaatttgaggacactagaggggcctggcagttagcagccaaagcaaagagaaagcaacacackgttcacccagagaggcatcaaagagcagtggtggaaaatgaggctggaaagactccccagacagtgctgagcctttgtatttgtgagggtgcttttggct

SEQ ID NO: 428925 - DNA, 201 bp, Homo sapiens
ttgggctttgaaggatgactaggagttcaccaatttgaggacactagaggggcctggcagttagcagccaaagcaaagagaaagcaacacacggttcaccyagagaggcatcaaagagcagtggtggaaaatgaggctggaaagactccccagacagtgctgagcctttgtatttgtgagggtgcttttggctgtcagtaa

SEQ ID NO: 428926 - DNA, 201 bp, Homo sapiens
gacactagaggggcctggcagttagcagccaaagcaaagagaaagcaacacacggttcacccagagaggcatcaaagagcagtggtggaaaatgaggctgraaagactccccagacagtgctgagcctttgtatttgtgagggtgcttttggctgtcagtaaacaaattgtccaataaagtgtataaacatgcatcatgtc

SEQ ID NO: 428927 - DNA, 201 bp, Homo sapiens
atgaggctggaaagactccccagacagtgctgagcctttgtatttgtgagggtgcttttggctgtcagtaaacaaattgtccaataaagtgtataaacatrcatcatgtcttaccgtgtgatatagtttggatggtccctccaaatctcatgttgagatgtaatcctcatgactgccagagccttgaatgtgaagacactt

SEQ ID NO: 428928 - DNA, 201 bp, Homo sapiens
tgtctgagctgcagcccttgaggttcaggctgaggatggatcagcgatgcaggcagcagggccagagcaacagcctcatggattctggcctttcctgagtmcccagggagaggcccctgcactggcagcactttgcagcagcctggaggagtagagctggccttgtgctctgtggagtgccaagcgcaggccctgagcagg

SEQ ID NO: 428929 - DNA, 201 bp, Homo sapiens
ttctggcctttcctgagtacccagggagaggcccctgcactggcagcactttgcagcagcctggaggagtagagctggccttgtgctctgtggagtgccamgcgcaggccctgagcaggtgtgctgcacagatgacctcatcgaatcctcaaagtgaccacctcctagagtggacactatcactacacccacttcaccgac

SEQ ID NO: 428930 - DNA, 201 bp, Homo sapiens
cacccacttcaccgacgaggcagctgaggccccgtgaggctccacacatggctgaaaagtgcaagcagagggaagaaagcaggacttctgcatgcgcctgyccccaccctatgctgcctgggaggctggggctgtgtggtgggggctccctccacctctgagaccccttcccttgccagcaagtgctctgagcttcccaca

SEQ ID NO: 428931 - DNA, 201 bp, Homo sapiens
ctgtggatttatgggatgtgggatgccggataaggtggggcctgactataccacactgaggagttgggactgaatccttttgagtagggagagcccacgargaagggaaacacttgtggtggtttgtgtgttgctgttcttatgctgacatcctcgaggctcaggagagccagaggggatttcagatttcatcagttctcc

SEQ ID NO: 428932 - DNA, 201 bp, Homo sapiens
gtaagacagcagaggagcctgggtgtgagttcagactagtctgattctcgggggctgtctctggggcttccctggggaaagagtggaaaacgttcctcccyggggctggggcttggcaggagatggtctagacgcccccacagcgtgacaccccctcagggatcctctggctcctctgggggctccattctgaagacagat

SEQ ID NO: 428933 - DNA, 201 bp, Homo sapiens
ctcctctccctgcaccccacactcccaggatggctaccaggtcaggcccgtggccaggcaggtcatttgtctcaccctcatcctcccactttccatccacrgaaaaggtgaaaaagaccaggcacacatctcttgcccacagggcactcaggctgcttgagtctcccctgcatccacgcactgagcattcatgtgatggaa

SEQ ID NO: 428934 - DNA, 201 bp, Homo sapiens
gaacccaggaggcagaggttgcagtgagccaacaccaggccactgcactccagcctgggtgacagagtgagactccgtctcaaaaaaaaaaaaaaaaaaamacacacacaaattagccaggcgtggtagcacgtgcctatagttacagcttcttgagaggctgagttgggaggatcacctgagcctgggaggtcaaggttg

SEQ ID NO: 428935 - DNA, 201 bp, Homo sapiens
ctggacaacatgacaaaaccccatctctacaaaaaatacaaaaattagcctggcatggtggcacatgcctgtggtcccagctactcgggaggctgaggtargaggatggcttaagcccaggaggcggaggttgcagtgagctgagattgcgccactgcactccagcctgggcaacagagccagatcctatctaaaaacagc

SEQ ID NO: 428936 - DNA, 201 bp, Homo sapiens
cgttttaccaaagtgtatggtggacagaggttttacaagcattctcctccaaacttcagagcgaacctccttcctccagaccattgttcctggccacaccrgccctgccactcatggcattactgcccgtgcctcagtttccccattggtaacaggtgcctggagaattcttgcaagaatcaaaggagacaatccctgcga

SEQ ID NO: 428937 - DNA, 201 bp, Homo sapiens
tcctggtctatggaccccagtctctaagctgggccggactgggtggcactggctcagaccctgtcatcagagccacctctgctgccaccctccgcctgccrgggcagaggaagtcttaggtcctggtccaggctcacctgcttctgagagtcttggggctgagtctgagtggccccgagggagcccctcgctccccagcat

SEQ ID NO: 428938 - DNA, 201 bp, Homo sapiens
cctctggtaggacatttgctggagagtcagcctccccatctaggcccaggagggctcagggatggctggggctaaggagactcaggagcgccccccatctktcacctgactccaagctctgtctgggtgcctcgttttgtacattttcccacctctcctgccagggagccatgatggtctccccatcttgcagacagaggg

SEQ ID NO: 428939 - DNA, 201 bp, Homo sapiens
aatggcacaatctcagctcagtgcaacctctgcctcccgggttcaagcgattctcctgcctcagccttccaagtagctgggactacaggcatgcgccaccrtgcccggctacttttttcttttcttttcttttcttttttttttttttttgagagtctcactgtgtctctcaggctggagtgcagtggtgcaatctcggct

SEQ ID NO: 428940 - DNA, 201 bp, Homo sapiens
gggagctggggcatgggaggtgcagttgggcggaggagctccctgggactgggatggaggagaagcccccaccaagcctggcccagcagctcctgtctgcsgctgcattggccttctctccatttcctctcctgggagatggagaaaccgagtccggagaccaccagggtttgcccagggtcactcagcaatggtggcaga

SEQ ID NO: 428941 - DNA, 201 bp, Homo sapiens
ccgccctctgactcaccccatgttgtacttttccttcaaactgcttaacgccacacacatccggccgcctgtgatggcaaatgcctaccatccagagtgtstctctccagctcttgcataagctggccgagtccaaggcctgtgtctggcccacagctagcgtgcagtccatagtaactgagtggaagccccagccaggca

SEQ ID NO: 428942 - DNA, 201 bp, Homo sapiens
cctatttgtcttaaatatttcacatggaaattaaaaccagaccaggcaaagcctgacagcccgccagccctgagggggacatccgcagcccttgccatctsccgcctctgtggcctcatcctggtccactcactcccaggctcacttcacagccacaacctggccttcctgcagcttctcaacaccagactcagacttttg

SEQ ID NO: 428943 - DNA, 201 bp, Homo sapiens
ctcttagcaagtccttcctatctctggatgtccttggtctccgatataaaatgagggtcctgaactcggtgaccctatgctcctcctgtcctgacagtccrcggtgcccctggagccatttcaggcagtgggacagaacagggggaatacatttagcaaagaaaggcctccctgaaaactctatttacagagcagaaggtg

SEQ ID NO: 428944 - DNA, 201 bp, Homo sapiens
gtcttctgtgtcttgatcatggtggtggtaacacgagttttatgagtatgtctgaaaaattaatcgagctgtacctttttttttctttttaagagacaggktctcgccttgttgctcaggctggaggaggagtgcagtgacaggaatgatagctcactgcagcctcgaactcctgggctcaagccattctcccggctcggc

SEQ ID NO: 428945 - DNA, 201 bp, Homo sapiens
cagctaacttaaattttttgtagagatggggttttaccatgttgcccagcatggtcttggattcacggcctcacgtgatccttctgcctctgcctcccaamgtgctgggactatgggtgtgagccaccatgtctggcctaagggctttattgtattagtccttattcctatttgtcttaaatatttcacatggaaattaaa

SEQ ID NO: 428946 - DNA, 201 bp, Homo sapiens
atttggctctagcccctgccagcactctggccacctgcatggtcattcacgatctgtccctgctgctgggtggattccagcaagtccctcacgtctctgarcctcaatttcccaacactcaaaaatgtgcctgctgcaggggaaagcaaagagggaaatttcctttagctcaaagggcaaggactgttttcttctcactta

SEQ ID NO: 428947 - DNA, 201 bp, Homo sapiens
tcaacctctgcctcccaggttcaagcaattctcctgcctcagcctcccaagtagctgggattacagccaccacacctggctttttttttttttttttttttgagacagagtatcgctctgtcgcccaggctggaatgcaatggcatgatctcggctcactgcaacctcccccctcccaggttcaagcaattctcctgcctc

SEQ ID NO: 428948 - DNA, 201 bp, Homo sapiens
caggcgtggtagcacgtgcctatagttacagcttcttgagaggctgagttgggaggatcacctgagcctgggaggtcaaggttgcagtgaactgagattgmgctactctacttgaaactgggcgtgggtgacagtgagaccctgtctcaaaaagaaatgaagtattgcaggtgcttagccattgctctttgcatccagttt

SEQ ID NO: 428949 - DNA, 201 bp, Homo sapiens
ctcgtgatctgcctgccttggcctcccaaagtgctgggattacaggcgtgagccaatacacctggctaggaatgttgtatttcttttttttttttttttttgagatggagtctcgctctgtcgcccaggctggagtgcagtggcgcaatctcggctcactgcaagctccgtctcctgggttcatgccattctcctgcctca

SEQ ID NO: 428950 - DNA, 201 bp, Homo sapiens
acccgcctcagcctcccaaagtgttggaattacaggcatgagccaatacacctggctaggaatgttgtatttcttttttttttttttgagacgaagtctcrctctgtcacccaggctggagtgcagtgtgcagtggcgcgatctcagctcactgcaagctccgtctcccaggttcacgccattctcctgcctcagcctccc

SEQ ID NO: 428951 - DNA, 201 bp, Homo sapiens
gaggtgggcggatcacctgaggtcaggagttcgagaccagcctgaccaatatggtgaaaccccgtctctactaaaaatacaaagattagccggattagtgkcgagcgcctgtaatccaagctacttgggaggctgaggcaggagaatcgcttgaacccaggaggcagaggttgcagtgagccaacaccaggccactgcact

SEQ ID NO: 428952 - DNA, 201 bp, Homo sapiens
acaacaggctagaggacagaggagaatggccagccagccacgggcggggccccacttagcagctacatcagcagcccggcagagcttactcctcacagtcragtgggctgcctgagaagtgggtgagcgccctgtcctgggagatgtgtaagcaactgctgaatggcatctgttatcagggcaggagggggctctattaaa

SEQ ID NO: 428953 - DNA, 201 bp, Homo sapiens
tttggtgggcaaggctggctgagtgccagccccgccatgaggcttcagatcctgagcccacctgaccttggaaagggcctctctctggctgggctccaagrctgcccccaacagacacccggcagtggctgggcagcagagagagagaactgggtggggcagagagaggaccacttgccagagctgtcccggctccctgag

SEQ ID NO: 428954 - DNA, 201 bp, Homo sapiens
cctggctaatttttgtatttttagtagagtcgaggtttcaccatgttagccaggctggcctcaaacacctgacctcaagtgatctgcccgcctcggcctcmcaaagtgctgggattacaggcgtgagccaccgcgcccggccctggctgaactttaagacactctctaggacaaaaacctctggcctctgtgactctagca

SEQ ID NO: 428955 - DNA, 201 bp, Homo sapiens
gcagcgtctccagagtgacgaggcgcgaacgaagacccggagcccggattcaggagtcacagagcgaggctggagagagaccgcggctggccaaacgaggaggggagaggctgggccacccttcgtccttgcgctggcattccgaggacttccggcaaacaccactccccagccctgacggtggccacaagccgctgcttg

SEQ ID NO: 428956 - DNA, 201 bp, Homo sapiens
tgaggcccaaagagggtctgccagagcagagaggggcaaaaacagacaactccagggtttcagatggtgacctctccctcactggtttattcctgaagatrtgagacttctagggcctggaagtcttctgtgtcttgatcatggtggtggtaacacgagttttatgagtatgtctgaaaaattaatcgagctgtacctttt

SEQ ID NO: 428957 - DNA, 201 bp, Homo sapiens
gaaagtctcgcaaagcggggcggcgtgccgcgagttgggagttctcggcgcgccgcgggcggcgggagctcgggctcccgggcgagccggggacgcggccraggcgggggccggggtccgagacagagggggccgcacggagagtgggagggggagagacagagaaggacaggggccgcgagggagacggacagagacgcg

SEQ ID NO: 428958 - DNA, 201 bp, Homo sapiens
tattattattattattttcagacggagtctcactctctcacccaggctggagtgcagtggtgcgatctcagtttactgcaacctccacctcccgggttcargcgattctcctgcctcagcctccggagtagctgggattacaggcgcctgccaccacgcccggctaatttttggatttttagtagagacagggtttcacca

SEQ ID NO: 428959 - DNA, 201 bp, Homo sapiens
ggaggccgaggggtcgcggggccggggccgagcgcagcggggccgggagtggagcgcagggccgggggcagagcgcgcgagcaggagcgggtgacagcgarggagctgggcgcagcgggggacggcggcggggagggcgcctgcagcgggggtggggggcgcgggcggcggggcgccccgggcccccggacccccgcgctg

SEQ ID NO: 428960 - DNA, 201 bp, Homo sapiens
ttattatttattattattattattttcagacggagtctcactctctcacccaggctggagtgcagtggtgcgatctcagtttactgcaacctccacctccygggttcaagcgattctcctgcctcagcctccggagtagctgggattacaggcgcctgccaccacgcccggctaatttttggatttttagtagagacaggg

SEQ ID NO: 428961 - DNA, 201 bp, Homo sapiens
tgggctcaaggactcaaagcaacactgggagagaagagtctaaaaaaggagctcagacccaggtggggctgcgggtcccagtagaactttttctttctttytttttttttttttttttgacatggggtcttgctctgtgacccaggttggagttcagtggcatgatcacagctcactgcagccttgaccccctgggctcaa

SEQ ID NO: 428962 - DNA, 201 bp, Homo sapiens
agagaagagagtccccagtagaaggtactaattgcacaaaggcgaggagataggacgtggcctgccccccgcccctcagtgccttttacttgtaccattcwttattatttattattattattattttcagacggagtctcactctctcacccaggctggagtgcagtggtgcgatctcagtttactgcaacctccacctcc

SEQ ID NO: 428963 - DNA, 201 bp, Homo sapiens
gcatgatcccatttgtcctcattacagtcctaggaagtctgctctattattagcttctcctaaagatggggcatgcagggactagagaggttaagttcctygcataaggtcacatgggcacaaagttgtttagaggctccagagctgaagctgctgcaccaggcggggggttcctgagactcatgaagaggagggagtcag

SEQ ID NO: 428964 - DNA, 201 bp, Homo sapiens
cctgggtctccatccacagacaagcagagacaagcaaatatgtgtatctataaatttcttctctctccttttttacacaaatggtagctactatactcacygctcatcactgttgccttcttttgcttaaaaatacatcttgaagacctacattgctcctcacagagctctctcctggctttttctgtctgtgtgctgtgc

SEQ ID NO: 428965 - DNA, 201 bp, Homo sapiens
cactttgttgcccaggctggagtgcagtggcacgatctcggctcactgcaacctctgcctcccaggttcaagcgatcctcctgcctcagccccccagtagytgggattacaggcacacgccaccatgcccggcctaatttttgtattttcagtagagacggggtttcttcatgttggtcaggctggtctcaaactcccaac

SEQ ID NO: 428966 - DNA, 201 bp, Homo sapiens
ggagactaggaggtgaggaagagtggagagtaagtcatgcccttcaagaagggctgcaggccgggcacggtggctcatgccaacactgtgagaggctgagrcaggaggatcacttgagcccaggagtttaagatcagcctgggtaacatagggaggccctgtctctacaaaaaattaaaaaataagccagggatggcagca

SEQ ID NO: 428967 - DNA, 201 bp, Homo sapiens
ctcccaagtagctgggattacaggcgcccgccaccacgccaggctaatttttgtattcttagtagagatggggtttcaccatgttggccaggctggtctcraactcctgacctcagatgatttgcctgcctcagcctcccaaagtgcggggattacaggcgtgaaccaccgcgcccagccaaggcagtcctttgagacccc

SEQ ID NO: 428968 - DNA, 201 bp, Homo sapiens
gcttagggagggctggaggatgatgcctaggtgtcaggcctgagcgacctcctgggaggagtcacagactgagatggggaaggcaggagaggggaggacgrgggcatggcttgggcttggcagtgccgggttcgcgatgcctcttcactgtccagcagacacagggagcaggagccaagtgggcttgtagctgcctgggag

SEQ ID NO: 428969 - DNA, 201 bp, Homo sapiens
ccacctgcgtggacacgcgctggcgctacatgctcatgatcttctccgcggccttccttgtctcctggctctttttcggcctcctcttctggtgtatcgcyttcttccacggtgacctggaggccagcccaggggtgcctgcggcggggggcccggcggcgggtggtggcggagcagccccggtggcccccaagccctgca

SEQ ID NO: 428970 - DNA, 201 bp, Homo sapiens
ctgccacagataaccagagaggcttttccatgacaaatgtatttaaacagagatggggtctcactgtgttgcccaggctagtctcgaactcttgtgctcargccatctgcctgcctcagccttccaaatgctgggattacaggcataagccactatggccagcctcttttctgtgataaaaatctgtcacttcagtggtca

SEQ ID NO: 428971 - DNA, 201 bp, Homo sapiens
gtagggaggcaaggttcctgcctgtaatgatgttgcagatgagactggtttgactgctaagggctgccaggaagatctgagagctggatgggagggagggyctcggggcctcttggaacaggcagcctttgaatcaagacctgaatggtaggaaggcacaagcggtggagtcttggagaagagaatttcaaccagaaagaa

SEQ ID NO: 428972 - DNA, 201 bp, Homo sapiens
cagttagaccctttccgggaattttgacgggctgggttatcttgtttgtcagtcgttagatatttatgaagcagctactctatgccaggctctgggagtcrgggtgaagtagggaggcaaggttcctgcctgtaatgatgttgcagatgagactggtttgactgctaagggctgccaggaagatctgagagctggatggga

SEQ ID NO: 428973 - DNA, 201 bp, Homo sapiens
aaacttgaaagctactgtcctgtgtagaaatccaggaggcgccctgatagaggttctgatgctcaggttccgatttccctggatgtttggttcctaaagayataggtgccacaacttccaggatgctgctgtcctgccctcagaagtagccgcctgtcccttgctcagtggaccacccaggtccaggcacccatgctcctc

SEQ ID NO: 428974 - DNA, 201 bp, Homo sapiens
gctttggagggtgtgtaggagcttgcctcggagacaaaaccttggggaagagaagagagtccccagtagaaggtactaattgcacaaaggcgaggagatargacgtggcctgccccccgcccctcagtgccttttacttgtaccattctttattatttattattattattattttcagacggagtctcactctctcaccca

SEQ ID NO: 428975 - DNA, 201 bp, Homo sapiens
ttcccagtattcccccataacatccaacaattccccacatggttgtgtgtcacaaagcccggagtccaagcaccgcccgtcacagcttcaagacacacgcyggatcccatttcaccgctcctaacccccactcaggccagtgctttaaaattgcacacaggtcctgccccgttagtgggttgggaaattgacttagtgagt

SEQ ID NO: 428976 - DNA, 201 bp, Homo sapiens
gggtggtcttcctgcctcctctggacccccaggaggcagagtctccagcccctccctaattcctcaggatggggcaggatggctggtgtcagtggtgaggsctgagcttccttccacagctgttgacttactgtgccacctcggacacggtgccatgccctgttcttggcctcggtttccccagctggctaatgaagtctg

SEQ ID NO: 428977 - DNA, 201 bp, Homo sapiens
cagcgtctccagagtgacgaggcgcgaacgaagacccggagcccggattcaggagtcacagagcgaggctggagagagaccgcggctggccaaacgaggaggggagaggctgggccacccttcgtccttgcgctggcattccgaggacttccggcaaacaccactccccagccctgacggtggccacaagccgctgcttga

SEQ ID NO: 428978 - DNA, 201 bp, Homo sapiens
agcgtctccagagtgacgaggcgcgaacgaagacccggagcccggattcaggagtcacagagcgaggctggagagagaccgcggctggccaaacgaggaggggagaggctgggccacccttcgtccttgcgctggcattccgaggacttccggcaaacaccactccccagccctgacggtggccacaagccgctgcttgaa

SEQ ID NO: 428979 - DNA, 201 bp, Homo sapiens
aagagctcggccccgatcagcctgagttccgccagcgcctacttctggtggctctaggtccccggatccaccacccttcccccactgactcttcaaggacrtgccctctttgctctcagaaccttggggaaggtggctggactgctgggcgggggacatctcggggtttcagggtgggcagggggttagtttggggagggg

SEQ ID NO: 428980 - DNA, 201 bp, Homo sapiens
ctccaggcccggccctcaccactgcccacaagagcctctgccgggggtgggatgccaggacaccccctcccacactcaggacagagccaaccctggctccrtggaccttctggaggaaggtgggggtttcaaagactgggggaccccttcctcctgactccagcacccaggcctgggaagagctcggccccgatcagcctg

SEQ ID NO: 428981 - DNA, 201 bp, Homo sapiens
ttgtagagatggggtctcactctgttgcccaggctggtctcaaactcctggcacaaacaatctttgcatctcggcctcctaaaatgctgagatcacaggcrtgagcccctgtgcccagccagaaatttctcagtgatagaactctcctgtgtcttctctgtccagtgtggtggccgttgaccacatgtggctcctgatcac

SEQ ID NO: 428982 - DNA, 201 bp, Homo sapiens
tgtcacattggattctcccctcaccactgctcctaacaagtgtgggcactgggcaggaatttgggctcaaggactcaaagcaacactgggagagaagagtytaaaaaaggagctcagacccaggtggggctgcgggtcccagtagaactttttctttctttctttttttttttttttttgacatggggtcttgctctgtga

SEQ ID NO: 428983 - DNA, 201 bp, Homo sapiens
ggagcttgcctcggagacaaaaccttggggaagagaagagagtccccagtagaaggtactaattgcacaaaggcgaggagataggacgtggcctgccccccgcccctcagtgccttttacttgtaccattctttattatttattattattattattttcagacggagtctcactctctcacccaggctggagtgcagtggt

SEQ ID NO: 428984 - DNA, 201 bp, Homo sapiens
tgctgggtggattccagcaagtccctcacgtctctgagcctcaatttcccaacactcaaaaatgtgcctgctgcaggggaaagcaaagagggaaatttccyttagctcaaagggcaaggactgttttcttctcacttaacaaagcaaattctacgttcaaagtcagatttatggaagagagaatgggggacttgctcaatt

SEQ ID NO: 428985 - DNA, 201 bp, Homo sapiens
tgaacccaggaggcagaggttgcagtgagccaacaccaggccactgcactccagcctgggtgacagagtgagactccgtctcaaaaaaaaaaaaaaaaaamcacacacacaaattagccaggcgtggtagcacgtgcctatagttacagcttcttgagaggctgagttgggaggatcacctgagcctgggaggtcaaggtt

SEQ ID NO: 428986 - DNA, 201 bp, Homo sapiens
ttgaacccaggaggcagaggttgcagtgagccaacaccaggccactgcactccagcctgggtgacagagtgagactccgtctcaaaaaaaaaaaaaaaaamacacacacacaaattagccaggcgtggtagcacgtgcctatagttacagcttcttgagaggctgagttgggaggatcacctgagcctgggaggtcaaggt

SEQ ID NO: 428987 - DNA, 201 bp, Homo sapiens
aacctgggcgacctggtgaaactctattgctacaaaaaaaaaaaaaaaaaaagacaaaaattatggccaggcacagtggctcacgcctgtaatctcagcaytttgggaggctgaggtgggcggatcacctgaggtcaggagttcgagaccagcctgaccaatatggtgaaaccccgtctctactaaaaatacaaagattag

SEQ ID NO: 428988 - DNA, 201 bp, Homo sapiens
gaagagctcggccccgatcagcctgagttccgccagcgcctacttctggtggctctaggtccccggatccaccacccttcccccactgactcttcaaggaygtgccctctttgctctcagaaccttggggaaggtggctggactgctgggcgggggacatctcggggtttcagggtgggcagggggttagtttggggaggg

SEQ ID NO: 428989 - DNA, 201 bp, Homo sapiens
ataaaaatctgtcacttcagtggtcaagacccttctatggctccctatgccccctactttccctacttttcctcccagggaaaggcagtccttttttttttgagacagagtctcgctctgtggcccaggctggggtgcagtggcacaatctctgctcactgcaatctctgcctccctggttcaggcgattctcatgcctca

SEQ ID NO: 428990 - DNA, 201 bp, Homo sapiens
cccttatgagccaggaggaagaggagatggaggaggaggcagctgcggcggccgcggtggccgcaggcctgggcctggaggcgggttccaaggaggaggcrggcatcatccggatgctggagttcggcagccacctggacctggagcgcatgcaggcttccctcccgctggacaacatctcctaccgcagggagtctgcca

SEQ ID NO: 428991 - DNA, 201 bp, Homo sapiens
ggcgtctgtgcaggaacaaacccacccgcctcccatcatctcgaggggtcctcctcctctgattttatacaactttacattgtttttggaagtggagctcygcaaagtttcaaggacccccacgccggagtccccaccctgagcagacacctggagcgccctgccctgcacgcaggggcatgaggctggccagagaggggg

SEQ ID NO: 428992 - DNA, 201 bp, Homo sapiens
cccaggcccgcagctcctacctggccagcgagatcctgtggggccaccgctttgagcctgtggtcttcgaggagaagagccactacaaggtggactactcrcgttttcacaagacctacgaggtggccggcacgccctgctgctcggcccgggagctgcaggagagtaagatcaccgtgctgcccgccccaccgccccctc

SEQ ID NO: 428993 - DNA, 201 bp, Homo sapiens
tgatcacttgaaatgtggctcatgcaaggaaggagctgcagttaatattttatttcgttttaattaaatgtaaagagccacacgtggccagtggctagtgyacaggaggatgtccagcccccgagaagcccaaaagtgcagagatggaatccagggagggaagcgggcttagcgcctccgtggctccctatgctcagggca

SEQ ID NO: 428994 - DNA, 201 bp, Homo sapiens
acattggattctcccctcaccactgctcctaacaagtgtgggcactgggcaggaatttgggctcaaggactcaaagcaacactgggagagaagagtctaaraaaggagctcagacccaggtggggctgcgggtcccagtagaactttttctttctttctttttttttttttttttgacatggggtcttgctctgtgaccca

SEQ ID NO: 428995 - DNA, 201 bp, Homo sapiens
atttatttatttatttatttatttatttattttgagatggagtctctctgtgtcacccagtctagagtgcggtcactcaatcttggctcactgcaacctcygcctcccaggttcaagcaatccttctgcctcagcctccctagtagctgggattacaggcgcccgccaccatgcccagctaatttttttgaatttttagta

SEQ ID NO: 428996 - DNA, 201 bp, Homo sapiens
gagaagtgggtgagcgccctgtcctgggagatgtgtaagcaactgctgaatggcatctgttatcagggcaggagggggctctattaaaagacccggggaaraaattggaaccagaccccaaagagtccctgttatttgggctgcagagtggcggtcctgtgagctggggggtctaacagacttttcccagtattcccccat

SEQ ID NO: 428997 - DNA, 201 bp, Homo sapiens
tttaatcatagggataaagcagacacctaaacaaccaggggtcttttttattttattttattttattttatttatttatttatttatttatttatttattttgagatggagtctctctgtgtcacccagtctagagtgcggtcactcaatcttggctcactgcaacctctgcctcccaggttcaagcaatccttctgcctc

SEQ ID NO: 428998 - DNA, 201 bp, Homo sapiens
tcctgaccttgtgatccgcctgcctcagcctcccaaagtgctgggattacaggggtgagccactgcacccggacgggagggttctttagctgggccacagsagagggtgcatgtgctgtggggagctgaccccattttactgatggggagattcaggcctaggggaggggtgtgcccatcttcaagttggtggcagagttg

SEQ ID NO: 428999 - DNA, 201 bp, Homo sapiens
gtttaatcatagggataaagcagacacctaaacaaccaggggtcttttttattttattttattttattttatttatttatttatttatttatttatttattttgagatggagtctctctgtgtcacccagtctagagtgcggtcactcaatcttggctcactgcaacctctgcctcccaggttcaagcaatccttctgcct

SEQ ID NO: 429000 - DNA, 201 bp, Homo sapiens
ggcccagcagctcctgtctgccgctgcattggccttctctccatttcctctcctgggagatggagaaaccgagtccggagaccaccagggtttgcccaggrtcactcagcaatggtggcagagcctctcaacccggagctgctcctgactcctctgtgtcctgatggctcccagggctgccggcccctcctctctcactga

SEQ ID NO: 429001 - DNA, 201 bp, Homo sapiens
agaagtcagcgttgtaatggtgacctgtcagctgggagctttggtctaggcctggggggcccccagcagggcagaggggagctggggcatgggaggtgcasttgggcggaggagctccctgggactgggatggaggagaagcccccaccaagcctggcccagcagctcctgtctgccgctgcattggccttctctccattt

SEQ ID NO: 429002 - DNA, 201 bp, Homo sapiens
gtgttcccgaccccagcaggagctgtggagggagaagtcagcgttgtaatggtgacctgtcagctgggagctttggtctaggcctggggggcccccagcakggcagaggggagctggggcatgggaggtgcagttgggcggaggagctccctgggactgggatggaggagaagcccccaccaagcctggcccagcagctcc

SEQ ID NO: 429003 - DNA, 201 bp, Homo sapiens
cttggccccccactcccaaaggtcttgaccaatcctggccccgtggcccaacacggggtccctgtcgtgaacctggaagactttggacatagatgattctyatttacagaaggggaaactgaggctcagcaaggggaagtggctggctggaaacaggctggatttgaatggatgggttttgcctgattctaagaccactgt

SEQ ID NO: 429004 - DNA, 201 bp, Homo sapiens
ctggccacttaagatcttggcgatcctcctgaaagaaggtgcccttaagttctgcggctctcctgggcccagaggagggagccctggatttcaaatcaccytctgtgaccttgagcaattggcttcaatgcctcatgcctccatctccccacctgtaaaatggggatgacagaatcctcaaaggcaacagctatgaaagca

SEQ ID NO: 429005 - DNA, 201 bp, Homo sapiens
ctcttctgagattggcaccgggacgaaagccgagtgcattacatcaccaccgccgccgctccccctgcacgaggagagcagtaggggagggccagagggcygggggcaagtggccagccctcaactttctttcctgtcttcctgctcactcttcccatctcagccctagatgctcgggggcttctgggggcagcggctaga

SEQ ID NO: 429006 - DNA, 201 bp, Homo sapiens
gcctgagggggaagtggacccatgagggtcacagtgatggtttgggggtggaggaagcagggccagggcctgaatccagggcttctggctcccagctctayctggaagcagacagacagatgtccctgtgtaacactgtggcaagcccagacaggacccaggagctttgagggcccagctctgaattcggccacctccttt

SEQ ID NO: 429007 - DNA, 201 bp, Homo sapiens
ggtttaatcatagggataaagcagacacctaaacaaccaggggtcttttttattttattttattttattttatttatttatttatttatttatttatttattttgagatggagtctctctgtgtcacccagtctagagtgcggtcactcaatcttggctcactgcaacctctgcctcccaggttcaagcaatccttctgcc

SEQ ID NO: 429008 - DNA, 201 bp, Homo sapiens
agggatcccctggaaccctgggcttgtgtttggccttgggcagggccccccaccttctctggagctcagtgacctcacccgttgaaggcctgggccgccayaccctgtcccctctgcctctatcctgcacacctgtggatggtggtccagtttggactggctggtttcttctcttcccttgccccaaaacccactccagcc

SEQ ID NO: 429009 - DNA, 201 bp, Homo sapiens
tggtttaatcatagggataaagcagacacctaaacaaccaggggtcttttttattttattttattttattttatttatttatttatttatttatttatttattttgagatggagtctctctgtgtcacccagtctagagtgcggtcactcaatcttggctcactgcaacctctgcctcccaggttcaagcaatccttctgc

SEQ ID NO: 429010 - DNA, 201 bp, Homo sapiens
cttggcctcccaaagtgctgggattacaggcgtgagccaccgcacccggccaataataaatttttaaaaattaaaagaaaagtctggtaactggtgtagcrttgtcacttcttcattttgccaagaaaagacattaacatttaaaaagcagtcagcatctcctatgtccatcactttctaaaaaaatgtttgccactgaaa

SEQ ID NO: 429011 - DNA, 201 bp, Homo sapiens
tagcttctcctaaagatggggcatgcagggactagagaggttaagttcctcgcataaggtcacatgggcacaaagttgtttagaggctccagagctgaagmtgctgcaccaggcggggggttcctgagactcatgaagaggagggagtcaggcctcccagggacaggggactgcagggcctgcagagggcagtggcaggtg

SEQ ID NO: 429012 - DNA, 201 bp, Homo sapiens
caccatgttggccaggctggtctcgaactcctgacatcaggtgatccacctgcctcggcctcccaaagtgctaagattacaggtgtgagccaccgtgcccrgcaaattctgtctatttcttccaggaaaatcctctacccttcagaacccatcctgggtgcgctgagctatgccctgggctgcgtcccctgacctccactg

SEQ ID NO: 429013 - DNA, 201 bp, Homo sapiens
cctcattacagtcctaggaagtctgctctattattagcttctcctaaagatggggcatgcagggactagagaggttaagttcctcgcataaggtcacatgrgcacaaagttgtttagaggctccagagctgaagctgctgcaccaggcggggggttcctgagactcatgaagaggagggagtcaggcctcccagggacagg

SEQ ID NO: 429014 - DNA, 201 bp, Homo sapiens
taggcgtgagcttcctgctcctgtctaaaggagcagagtttcaggcagggctggagctgctgcctggctctggcagggcctggcggaggtgcccctgcagwggccatggtgtctctggtcagtggcacggatctcggggaggagatttgccctcgaagccttccaggtagctgggacctgccgaggctgctgcaagctgat

SEQ ID NO: 429015 - DNA, 201 bp, Homo sapiens
cacaagggctgggaaatgggacagtggtgttaattctgtctatttctttttttttttttttcccgagacagagtctcgctctgttgcccagactggagtgyagtggcacgatcttggctcactgcagcccctgcctcctgggttcaagcgattctccttcctcggcctcccaggtagctaggattacaggcacttgccacc

SEQ ID NO: 429016 - DNA, 201 bp, Homo sapiens
agaagaaggtggggagggggacagctttcttgagcccccaccatgtggcatgcgcttttgggacaatccacatcaggccctgcaggtaggcactgcgatgytcctttcaccattggagataccgaggctcagagaatccagtgacctgctagagccaagtgggactcggcttggttccagcccagctctgtgtggaacagc

SEQ ID NO: 429017 - DNA, 201 bp, Homo sapiens
ggtctgtcagtgccttgctctgtgaccttgggcagccccttgcctcatgtggagtccacatctgtatagagaacggctggccacttaagatcttggcgatyctcctgaaagaaggtgcccttaagttctgcggctctcctgggcccagaggagggagccctggatttcaaatcaccctctgtgaccttgagcaattggctt

SEQ ID NO: 429018 - DNA, 201 bp, Homo sapiens
ttactctttgaggggtacagctcaaagagccgtgggcctggggtcttgagttctcttcctccctgcaaagttccacttgttggagtggaaagcccctccartcaaaccagacctgagggcctcagctggagtggggacagactctgtgctccacaagggctgggaaatgggacagtggtgttaattctgtctatttctttt

SEQ ID NO: 429019 - DNA, 201 bp, Homo sapiens
gaggaggaacagtgtaggcttacagggcgggctggttcttaatgtggatctgggggaggcgggggcgagtgctaaggggggtgtgaggaggagggggcccmtctgcggggaccactgagtcacgaggacatgtaagcgacatgacaaccggcaacatggtaaccaggaaactagcggcggtgggaaacagagctggagcag

SEQ ID NO: 429020 - DNA, 201 bp, Homo sapiens
ctgacagctaaggatgaggcaatgggatggggcagcagcaaacaccacctcacccccacccccagccccacccatgctggagtgcggggatgagggtcagrtgatgatcagacatgggctgttaccatgtcacctctgctgcaacttccctgacccccgcccagcagaactcctggctcttccccagcacctccctttctg

SEQ ID NO: 429021 - DNA, 201 bp, Homo sapiens
tggcaggtggggaccctgccacagtttcccctgtggctcagtctgtctttggctccccttactctttgaggggtacagctcaaagagccgtgggcctgggstcttgagttctcttcctccctgcaaagttccacttgttggagtggaaagcccctccaatcaaaccagacctgagggcctcagctggagtggggacagact

SEQ ID NO: 429022 - DNA, 201 bp, Homo sapiens
gtctcatatgtcctccattcagcctcccagaaattagctcaggtggctgggagagcagccccctgggctggtcactctcctcccaaccgtcatcttccacrtctgtggcatggggacgtcactccctgccccagtgacctccaaggcgggccctgggctcaatgagcagtgggctgttcacaggctggggaaagcactggg

SEQ ID NO: 429023 - DNA, 201 bp, Homo sapiens
agccccaactcctggagtcttgtttgctgacagctaaggatgaggcaatgggatggggcagcagcaaacaccacctcacccccacccccagccccacccaygctggagtgcggggatgagggtcagatgatgatcagacatgggctgttaccatgtcacctctgctgcaacttccctgacccccgcccagcagaactcctg

SEQ ID NO: 429024 - DNA, 201 bp, Homo sapiens
ggaagctctcgagggagggcagaggactggcgtcagcaattcagcaaagggcacacctgtgggttgaaacaggtggcctctgggtcctccagcccccagcrcctgtgatttggccctcaccaaaggcccctctggacattttggggagcttgcttgtcagcctgctcccccgccccacattcgctggccaagtggttggga

SEQ ID NO: 429025 - DNA, 201 bp, Homo sapiens
aactgacccatatcccaactggagttggaagggctgagcctagaacattccactccattctcactgggaggagggactctttctggggtgttccacactgrgcagtgggtctcatatgtcctccattcagcctcccagaaattagctcaggtggctgggagagcagccccctgggctggtcactctcctcccaaccgtcat

SEQ ID NO: 429026 - DNA, 201 bp, Homo sapiens
tcagcctgggagacaaatgggatggggtccgcaattaggggctccttggggccatacaggggaggtggtgggcacaggctggagaggccctggctgggggygaaatggagcaggcagaggggctttgggcatccttcaaacctcgtgcccatggatacccttctgcagttatcctgagaaatgggcctcaagtccctcctc

SEQ ID NO: 429027 - DNA, 201 bp, Homo sapiens
atgcaaggaaggagctgcagttaatattttatttcgttttaattaaatgtaaagagccacacgtggccagtggctagtgtacaggaggatgtccagccccygagaagcccaaaagtgcagagatggaatccagggagggaagcgggcttagcgcctccgtggctccctatgctcagggcaagcaggacagagggacaggga

SEQ ID NO: 429028 - DNA, 201 bp, Homo sapiens
ccgtgtgtgtgtgtgttctcccccacatccagtcccatgacctccatggcttcaggccttttgggggcagttagcaggactttaggggcccaagagcctcrctgtggccctggcttggcctgtgctgaggggagcaaaaggtggaccagggcagctggggtaagagatgggtgcagcatggtgggaacagagactgttggc

SEQ ID NO: 429029 - DNA, 201 bp, Homo sapiens
gcggagaccccaagacccacgcgcagaccgagcggcagccggggaggggagcgcgggccggccggccgagttcgcgggcagggggcgccgggactcccctytccgcgcccgggacgccgcccgccggatcgcgccttgggatgtagcgcccgctcgccgcctcccggactctcgtcggaccctccgcccagcggtaagccg

SEQ ID NO: 429030 - DNA, 201 bp, Homo sapiens
agcaacactgggagagaagagtctaaaaaaggagctcagacccaggtggggctgcgggtcccagtagaactttttctttctttctttttttttttttttttgacatggggtcttgctctgtgacccaggttggagttcagtggcatgatcacagctcactgcagccttgaccccctgggctcaatagatcctcctgcctta

SEQ ID NO: 429031 - DNA, 201 bp, Homo sapiens
ctggctttgtcatctctgggtgaccttggccgagtttctgaccctctctggtacccagtctcgccatctgtaaaatggggcagtggtgactgagtgatcgygagggtccctccaatagggccccctcagactcccagagtgaggtgcttcgggtccttgaccggcggtactttgggagagtacgaggaccgctaaggagag

SEQ ID NO: 429032 - DNA, 201 bp, Homo sapiens
cactgcactcagcctgggctaacgtgagactccatctcaaaaaaaaaaaaattacgtcttgtgtcacagagctgcagataaaccagagactactcataacmgtgtactttttttttcccccatttctgatcccgtctcaacggaaggatgtaattgaggaagggcttgattggccagtgagtcttgaagctgacaccactg

SEQ ID NO: 429033 - DNA, 201 bp, Homo sapiens
gtggccagctctggaagacagggccaaacacccggtgggctggcgggcggctggctggcggaggaagcaggaagttggaatgaatttgaccacaaacagtycataccacgcggcccctgcaggtggaggcgcccacggaaagggccccgggtggctgtggggtgggagggcacaggcccctgctccccacagctgtgatgg

SEQ ID NO: 429034 - DNA, 201 bp, Homo sapiens
agttttgttcttgtcacccaggctggagtgtaatggcataatctcggctcactacaacctctgcctcccaggttcaagtgattctcctgcctcagcctccygagtagctgggattacaggcgcccacccccacgcccggctaatttttgtatttttagtagagacagagtttcaccgtgttagccagaatggtttcgatct

SEQ ID NO: 429035 - DNA, 201 bp, Homo sapiens
gtgggggatgtgccttgacactctggggctatactgaaacccttggctgcttcccgcacctctcctgggagcccccagctcctggcactcgccccctgccwcctgtccctggcattcctgggcaacaaagcagagcccagggcccttttctctctcgccgtcctcattgagcccagatggtacatttccaccgtggtctta

SEQ ID NO: 429036 - DNA, 201 bp, Homo sapiens
cccacgcccggctaatttttgtatttttagtagagacagagtttcaccgtgttagccagaatggtttcgatctcctgacctcgtgatccgcccgcctcggmctcccaaagtgctgggattacaggcgtaagccaccgtgcccggcctggtgaaaccccgtctttactaaaaatacaaaattagccaggtgtggtggcgtgc

SEQ ID NO: 429037 - DNA, 201 bp, Homo sapiens
taatatttatttatactctgattttgtttcacaaagaagaaaaaggctgggcgtggtggctcatgtctgtcgtcccagcactttgggaggccgaggtgggrtggatcactttgaggtcaggagttcaagaccagcctggccaacatgatgaaacccccgtctttactaaaaatacaaaataattagccaggcatagctcat

SEQ ID NO: 429038 - DNA, 201 bp, Homo sapiens
tggaggccctgaacacagcacagggctgggccctgaggaagctctgtgggggatgtgccttgacactctggggctatactgaaacccttggctgcttcccrcacctctcctgggagcccccagctcctggcactcgccccctgcctcctgtccctggcattcctgggcaacaaagcagagcccagggcccttttctctctc

SEQ ID NO: 429039 - DNA, 201 bp, Homo sapiens
tcggcttactgaaagctctgcctccagggttcaagccattctcctgcctcagcctcccgagtagctgggactacaggcgcccgccaccacgcccagctaattttttttgtatttttagtagagacagggtttcactgtgttagccaggatgctctccatctcctgaccttgtgatctgcacgcctcaacctcccaaagtgc

SEQ ID NO: 429040 - DNA, 201 bp, Homo sapiens
tgttagccaggatgctctccatctcctgaccttgtgatctgcacgcctcaacctcccaaagtgctgggattacaggcgtgagccaccgcgcccggcccatwttttttttttttgagatggagtttttcgctcttgtcgcccaggttggagtgtaatggtgtgatctcggctcactgcaaactcctcctcccaggttcaagc

SEQ ID NO: 429041 - DNA, 201 bp, Homo sapiens
ggaagctctgtgggggatgtgccttgacactctggggctatactgaaacccttggctgcttcccgcacctctcctgggagcccccagctcctggcactcgmcccctgcctcctgtccctggcattcctgggcaacaaagcagagcccagggcccttttctctctcgccgtcctcattgagcccagatggtacatttccacc

SEQ ID NO: 429042 - DNA, 201 bp, Homo sapiens
gacttcgattctttggaatgcatggagggcaggtaggtccccatggcctgccctaccccctgcctgatagtgacttcaggggtgggctggatgagcagacmttctgtgagcgggggagcgcctgcagatgcctcccaggcagggcctccgagaggaagatttcccggatgtgggcatggaggcttctgccctgggagcggc

SEQ ID NO: 429043 - DNA, 201 bp, Homo sapiens
gcaacaaagcaagaccctatctctacagcaattctataaaaatgagccaagtgcagtggtacatacctgtcgagttaccctggaggctgaggtgggatgaytacctgagcccaggagtttgaggctgtagtgagcatgatcaggccactgcactccagcctgggcaaacgggtgagaccctgtctgtgaaaaaaataataa

SEQ ID NO: 429044 - DNA, 201 bp, Homo sapiens
tcgagtgcagagctgttcaccaaatgtaggctgctctgtccagaacctgccctccctcccactcggagccctgcaggtgccctcaaggccgtgggtgtggyactcttttctgcacatactagatttgcatcctaacctcttagggtaaaatagggcttctgactggcgcctggtgtttccactggtgagtgtgtaggaggc

SEQ ID NO: 429045 - DNA, 201 bp, Homo sapiens
agtctgagggtccctaccaggagttcgacctcatcctcaggtccagccccatccacctctgcccccaaccccgctctgacactcctgcagcctcggccctygaacacctgctgagggctgagcagaacacatctctacttgcttgtgcttctgggcaacctgggaggggcttgggaggtagatggcgtttccccatcttcc

SEQ ID NO: 429046 - DNA, 201 bp, Homo sapiens
tgaaacttgaggaaacaaggtacatactacggatttttttttttctttttcttttttttttttgagacagtctcactctgtcgcccagaccggagtgtggkggcatgatctcggcttactgaaagctctgcctccagggttcaagccattctcctgcctcagcctcccgagtagctgggactacaggcgcccgccaccacg

SEQ ID NO: 429047 - DNA, 201 bp, Homo sapiens
gtggcacgatcttggctcactgcaacctctgcctctcaggtttaagtgattctcctgccttagtctcccgagtagcttggactacaggtgcccgccaccaygcccggctaactttggtatttttagtagagacactgtttcaccatgttgaccggggggtcttgaactcctgaccttagttgatccatctgccttgacctc

SEQ ID NO: 429048 - DNA, 201 bp, Homo sapiens
cttttttttttcttgaaacttgaggaaacaaggtacatactacggatttttttttttctttttcttttttttttttgagacagtctcactctgtcgcccaraccggagtgtggtggcatgatctcggcttactgaaagctctgcctccagggttcaagccattctcctgcctcagcctcccgagtagctgggactacaggc

SEQ ID NO: 429049 - DNA, 201 bp, Homo sapiens
tcccaaagtgctaggattataggtgtgagccaccgcgtctggcctattttttatttttgattgagtcttgctctgttgcccaggttagagtgcggtggcaygatcttggctcactgcaacctctgcctctcaggtttaagtgattctcctgccttagtctcccgagtagcttggactacaggtgcccgccaccacgcccgg

SEQ ID NO: 429050 - DNA, 201 bp, Homo sapiens
tcactgcaacctccacctcctgggttcaagtgattctccttcctcagcctccctagtagctgggattacaggcgtgcgccaccacgcctggctagtttttrtatttttagtagagatgaggtttcgccatgttggccaggatggttgtgaactcctgacctcagttgatccacctgcctcaacctcccaaagtgctaggat

SEQ ID NO: 429051 - DNA, 201 bp, Homo sapiens
aacgagaccttgatgggctgagtgcccaatccaggtctgtttacccaaggtgctgggacaacacagatgaggagcatttaattctgtcctggggagggtgkggaggaagtgacttgtgcctgagccccaaggaagcagtgagtcccccgtgcctgcctgggggatgttggtaacagagggaggatgtaaaggaggagctgg

SEQ ID NO: 429052 - DNA, 201 bp, Homo sapiens
tgtcacccgtctggccccattgctggggcctgccccgagcctgactcctctgctttgctcccacaggtgtcctgcgaacaggtgctgctggcgctgctgcygctgctggcgctgctgctgccgctgctcagcgggggcctgcacctgctgctcaagtgaggccccggcggctcagggcggggctggccccacccccatgac

SEQ ID NO: 429053 - DNA, 201 bp, Homo sapiens
aggtgctgctggcgctgctgctgctgctggcgctgctgctgccgctgctcagcgggggcctgcacctgctgctcaagtgaggccccggcggctcagggcgkggctggccccacccccatgaccactgccctggaggtggcggcctgctgctgttatctttttaactgttttctcatgatgcctttttatatttaaaccccg

SEQ ID NO: 429054 - DNA, 201 bp, Homo sapiens
ctgaactccttccttctctggtcccctcgagctccttcccagtccccaccctcctgggcttccccttggcactccgctgtcacccgtctggccccattgcyggggcctgccccgagcctgactcctctgctttgctcccacaggtgtcctgcgaacaggtgctgctggcgctgctgctgctgctggcgctgctgctgccgc

SEQ ID NO: 429055 - DNA, 201 bp, Homo sapiens
gtgggcatggaggcttctgccctgggagcggcttcactttgctgccccaccctcccctgataccagctcacagacccctggacagccagcatgttcacagyctcaagatggacctggggcccctggctgtcaaaatggcacagtgtttgggcctcagggagctagacaggcccttagcgacctgctgaggacatcagggcc

SEQ ID NO: 429056 - DNA, 201 bp, Homo sapiens
agaacagagatgctaggcgacttgcccagaggcacacagccagcatgtagcaggattcatgcctgtgggagctggggttgggggatattgacggctttagyggatcaaaagagctggtgagtagggctatacaatctgggggtcatcctgtgagagagcccccagactgctcagttcttaggggtccagtcatatgctgtc

SEQ ID NO: 429057 - DNA, 201 bp, Homo sapiens
ccttggtcagcctcagccatccgggggctcagcacccccagacctgcctgttccccttgtccaccatttccaccaaagcccacaggtgggcctgccccagsattctttttgaaatagcttgcacctctggggccacccacggatgggacctcatgggtatctctgaatccaagtgggagccggaggagggatacagggagg

SEQ ID NO: 429058 - DNA, 201 bp, Homo sapiens
caagggggctcagccatccgggggactcagcaccaccagacctgtccattccccttggtcagcctcagccatccgggggctcagcacccccagacctgccygttccccttgtccaccatttccaccaaagcccacaggtgggcctgccccaggattctttttgaaatagcttgcacctctggggccacccacggatgggac

SEQ ID NO: 429059 - DNA, 201 bp, Homo sapiens
tttgtgtgggagtgaatgcgggtggggtgtaggatcaaggatgtggtttagtggggggcctactaggggcttcttagtccccccattcggagaggggtggygccagcagggctggtttcaggattgggaccaggacacaggtcttagagccccctcacctcccacaaaggaaggtaagctgcaacccctgtgggaaggggg

SEQ ID NO: 429060 - DNA, 201 bp, Homo sapiens
gagtgtcttagtctttgtgtgggagtgaatgcgggtggggtgtaggatcaaggatgtggtttagtggggggcctactaggggcttcttagtccccccattyggagaggggtggtgccagcagggctggtttcaggattgggaccaggacacaggtcttagagccccctcacctcccacaaaggaaggtaagctgcaacccc

SEQ ID NO: 429061 - DNA, 201 bp, Homo sapiens
gggcctgccccgagcctgactcctctgctttgctcccacaggtgtcctgcgaacaggtgctgctggcgctgctgctgctgctggcgctgctgctgccgctrctcagcgggggcctgcacctgctgctcaagtgaggccccggcggctcagggcggggctggccccacccccatgaccactgccctggaggtggcggcctgc

SEQ ID NO: 429062 - DNA, 201 bp, Homo sapiens
aagaaagaaagggcccttatgaatcatcttcaagttcctcccttccaagaacagagatgctaggcgacttgcccagaggcacacagccagcatgtagcagkattcatgcctgtgggagctggggttgggggatattgacggctttagcggatcaaaagagctggtgagtagggctatacaatctgggggtcatcctgtgag

SEQ ID NO: 429063 - DNA, 201 bp, Homo sapiens
ttcttggcttagtcatgaacctctctaagcctcagtgtcctgtgtgaacaaacagctcagtgagatggtgggagggcggagtgtcctgtcagcaggcatgrggaattaaaaattaagaacacccagggcattatggtaagaaaataatgagttgaagcataaaggtaatggttagtgccaacttcctcccagcgtgccagg

SEQ ID NO: 429064 - DNA, 201 bp, Homo sapiens
aagactcaccccgatttctacttaatttgggcacgcctttggaataagttctcaggaatggcacagtttgggtgttttttgtttctttttgtttttttttkaaacagagcttcgctcttgttgcccaggctggagtgcaatggcgccgtctcggctaactgcaacctcggcctcctgggttcaaacggttctcctgcctca

SEQ ID NO: 429065 - DNA, 201 bp, Homo sapiens
ctcagcctgggctaacgtgagactccatctcaaaaaaaaaaaaattacgtcttgtgtcacagagctgcagataaaccagagactactcataacagtgtactttttttttcccccatttctgatcccgtctcaacggaaggatgtaattgaggaagggcttgattggccagtgagtcttgaagctgacaccactgctggtgg

SEQ ID NO: 429066 - DNA, 201 bp, Homo sapiens
tcctgggctcaagtgatcctttcgccttgtgctcttaaagtgctgggagcctccaaaaggctaagctgtgacgttgggtaggttacatgtattaaatgcatttttttttttttgagacagttttgttcttgtcacccaggctggagtgtaatggcataatctcggctcactacaacctctgcctcccaggttcaagtgatt

SEQ ID NO: 429067 - DNA, 201 bp, Homo sapiens
cgattctttggaatgcatggagggcaggtaggtccccatggcctgccctaccccctgcctgatagtgacttcaggggtgggctggatgagcagaccttctrtgagcgggggagcgcctgcagatgcctcccaggcagggcctccgagaggaagatttcccggatgtgggcatggaggcttctgccctgggagcggcttcac

SEQ ID NO: 429068 - DNA, 201 bp, Homo sapiens
tggcatgactgactctgaagaggacctggaccctatggaggacttcgattctttggaatgcatggagggcaggtaggtccccatggcctgccctaccccckgcctgatagtgacttcaggggtgggctggatgagcagaccttctgtgagcgggggagcgcctgcagatgcctcccaggcagggcctccgagaggaagatt

SEQ ID NO: 429069 - DNA, 201 bp, Homo sapiens
gcttgaacccaggaggcagaggttgcagtgagccaagattgtgccactgccctccagcctccagcaagactcagtatccaaaaacaaagaaagaaagaaarggcccttatgaatcatcttcaagttcctcccttccaagaacagagatgctaggcgacttgcccagaggcacacagccagcatgtagcaggattcatgcct

SEQ ID NO: 429070 - DNA, 201 bp, Homo sapiens
agtggagatggcgtttcaccatgttagccaggctagtctcaaactcctaagctcaggtgatccacctgcctccacctctcaaagtgctgggattacaggcrtgagccgcactgcaccaggccaggtctagggagccgaacagagcagtgacagggtcagggttgaggctgctaccttgagattaggttggagagagctcca

SEQ ID NO: 429071 - DNA, 201 bp, Homo sapiens
gggtggcagggccacagggggagggcctgttagtggatgtggcacaaccccccacttgtttttgagacaagtcttgctctgtcacccaggttggagtgcartggcgcggtctcggctcactgcatattctgcctcctggattcaagtgattctcctgcctcagcctcccaagtagctgggattataggcgagcgccaccac

SEQ ID NO: 429072 - DNA, 201 bp, Homo sapiens
ttaggatgtgacaatacaaaacaccactgggcctcgccaggcactgcatggtaaacctgtttttctgggggtgggacagaacttggcacccagttagccaractgaaaagccatgcagcaaagagagaaaagctcacttgtttatttgagtgagggtccctgtcattttggatatttaagatcaagtattcttgaccgccc

SEQ ID NO: 429073 - DNA, 201 bp, Homo sapiens
gccggtctgaggttggctggtgagctctgcacatttgaagactttggaggcatggcaggaccaggcaccatccatggaaagcatacttgagtgtggttagmgcgggaaccaagattggggtggcagggccacagggggagggcctgttagtggatgtggcacaaccccccacttgtttttgagacaagtcttgctctgtca

SEQ ID NO: 429074 - DNA, 201 bp, Homo sapiens
agcatcctgtttttagtgaacctattaaatgtgtagacaattaatggctttttgcttcccctgctgcagacttagcggatcccatgagattttgactaccstctgtgctcagaacagtttgagccgtatggaggaagtctccgcaccagtcttactgttggtggtcaccaggaagccagcagtgtgtctgaactggacaca

SEQ ID NO: 429075 - DNA, 201 bp, Homo sapiens
ttacgtcttgtgtcacagagctgcagataaaccagagactactcataacagtgtactttttttttcccccatttctgatcccgtctcaacggaaggatgtrattgaggaagggcttgattggccagtgagtcttgaagctgacaccactgctggtggtattttcccctctccctggaaagcatcctgtttttagtgaacct

SEQ ID NO: 429076 - DNA, 201 bp, Homo sapiens
gcatgatcaggccactgcactccagcctgggcaaacgggtgagaccctgtctgtgaaaaaaataataataaaatttaatttttaaaaaaggaccaataggygtaggcatgggccggtctgaggttggctggtgagctctgcacatttgaagactttggaggcatggcaggaccaggcaccatccatggaaagcatacttga

SEQ ID NO: 429077 - DNA, 201 bp, Homo sapiens
cgagttaccctggaggctgaggtgggatgattacctgagcccaggagtttgaggctgtagtgagcatgatcaggccactgcactccagcctgggcaaacgrgtgagaccctgtctgtgaaaaaaataataataaaatttaatttttaaaaaaggaccaataggcgtaggcatgggccggtctgaggttggctggtgagctc

SEQ ID NO: 429078 - DNA, 201 bp, Homo sapiens
attacaggcgtgagccaccgcacccggcccatccatctcccttgaatgctgaaagcaagtcgtgagcacacacttgtgcctaggcctgtgggagggcggcsctgtgggtcctgcctgccgtcagttttctctctcctgggggtcagggagacttggagctctgtcccttcttggcttagtcatgaacctctctaagcctca

SEQ ID NO: 429079 - DNA, 201 bp, Homo sapiens
gtcgagttaccctggaggctgaggtgggatgattacctgagcccaggagtttgaggctgtagtgagcatgatcaggccactgcactccagcctgggcaaamgggtgagaccctgtctgtgaaaaaaataataataaaatttaatttttaaaaaaggaccaataggcgtaggcatgggccggtctgaggttggctggtgagc

SEQ ID NO: 429080 - DNA, 201 bp, Homo sapiens
cacagccacacccgactcctgtgtgtgctccctgcagtgacgcattggccctgcggctggcctgcatcggggacgagatggacgtgagcctcagggccccrcgcctggcccagctctccgaggtggccatgcacaggtagccggcctatgccctatgcctctacacctggggaggggccctgggcggtgggtggaggccct

SEQ ID NO: 429081 - DNA, 201 bp, Homo sapiens
agcatgtagcaggattcatgcctgtgggagctggggttgggggatattgacggctttagcggatcaaaagagctggtgagtagggctatacaatctggggktcatcctgtgagagagcccccagactgctcagttcttaggggtccagtcatatgctgtctttttgccccagaggagaaatgtctgaagtaagacccctct

SEQ ID NO: 429082 - DNA, 201 bp, Homo sapiens
gtgaatggtgatgaggacacatttgggttcatttttcttacacacagttggaggagacagctcagtgacaccctcaggcctggccgctctctgcctccccrctctgctcttcttggtcagccactgcagctccatctttgaaggagctgccctggctgtgtctactccctggcatccaacccctgcctccagcctctgagc

SEQ ID NO: 429083 - DNA, 201 bp, Homo sapiens
agaagaggaaactcagtgaatggtgatgaggacacatttgggttcatttttcttacacacagttggaggagacagctcagtgacaccctcaggcctggccrctctctgcctccccgctctgctcttcttggtcagccactgcagctccatctttgaaggagctgccctggctgtgtctactccctggcatccaacccctgc

SEQ ID NO: 429084 - DNA, 201 bp, Homo sapiens
gcctgtgggagctggggttgggggatattgacggctttagcggatcaaaagagctggtgagtagggctatacaatctgggggtcatcctgtgagagagccyccagactgctcagttcttaggggtccagtcatatgctgtctttttgccccagaggagaaatgtctgaagtaagacccctctccagagacatcttgatgga

SEQ ID NO: 429085 - DNA, 201 bp, Homo sapiens; identical to SEQ ID NO: 404022

SEQ ID NO: 429086 - DNA, 201 bp, Homo sapiens
tgcaggccaacaatcccagtcgggattcgaagccgcgcgcagtgcccggaatgacccctccacattgatgccactgtagagcccggaaggaaaagcaagcrgcctcggccccgcacagcccaggattaaatgtttgcgccagggcccctctggctacctggtggtggccccgagcggcctcggaggccgcggcgtagctcc

SEQ ID NO: 429087 - DNA, 201 bp, Homo sapiens; identical to SEQ ID NO: 404029

SEQ ID NO: 429088 - DNA, 201 bp, Homo sapiens
ccacttgcagaggaaaggctctctggcttcggtccgtggctctccgtaggtgccgtgtctggacccagcctaccttcatctctgttaggcttaggggtctktctccacactgtgtcttgtccaatcacaagacttcaacggagcgggcggtctggcctaggctcttatgcgtgggatgtctgcaggccaacaatcccagtc

SEQ ID NO: 429089 - DNA, 201 bp, Homo sapiens
aggagtccaggtaacttgttccatggcaggcagtagtcttttttttttttttttttttttttgagaaaggttctcgctatgctacccaggctggtctcatytcaggctcatgcgatcctcctgcctctgcagtggctgggataagacacaactgccaccaggccctgcccctaggcagtagtcttaatgcctgatggtggg

SEQ ID NO: 429090 - DNA, 201 bp, Homo sapiens; identical to SEQ ID NO: 404034

SEQ ID NO: 429091 - DNA, 201 bp, Homo sapiens
atcgcttgaacccaggaggcagaggttgcagtgagccgagatcacaccactgcactccagtctgggcaacagagcgagattccatctcaaaaaaaaaaaaatgttgttaaagctataatcgttctggaagtgaacatggccaggcatgacctgcccccatcctgatgtgctacaaagctgctgccttagattgggtatcag

SEQ ID NO: 429092 - DNA, 201 bp, Homo sapiens
ccaggaggcggaggttgcagtgagctgagatcacaccacagtactccagcctgggcaacacagcgagactcaatctcaaaaaaaaaaaaaaaaaaaaaaaagactgttaaagctgtagtaggctgggcgtggtggctcatgcccataatcccaacactttgggaagccgaggcaggtggatcacctgaggtcaggagttca

SEQ ID NO: 429093 - DNA, 201 bp, Homo sapiens
cgcgactacatcatgtcctttggtgagccgaatgggaggaggagaacgggaggagactcctgaccagatgttccccagcccctctgggaccacccccccccataataagtcccccacccaggacaggggccagcctgagcactgcccagacttgcagtgagcatttgggtaggttccccgccttggagatgggggtagggg

SEQ ID NO: 429094 - DNA, 201 bp, Homo sapiens
ggatccgggtgcccagagaccagcgccctgccctgcaccgaggcccacgtgggctctccagggcatgactcggtaccaaacatggggcccgcttaccctargctccctcccacatccgtggagacaggaccataatgcaaatagcagggccctcggtctcagaagccctggcttccctctctgaccccaactcaaaggcaa

SEQ ID NO: 429095 - DNA, 201 bp, Homo sapiens
ctgctgccctttgctgtgcccatcaccactgtgggtgagtgcccacctccggggggacggccaccagcagctgcgtgggcatcagggatccctcgcccacytgtctccctctccctgcagtgggccgccccatccccgtcccccagcgcctccaccccaccgaggaggaagtcaatcactatcacgccctctacatgacgg

SEQ ID NO: 429096 - DNA, 201 bp, Homo sapiens
cccccaaccacttccaaaaccttgcagaagcagcatctagaagcagtgggcgcctaccaatatgtgctcactttcctcttcatgggtgagagctggggagrcgtgggtgcctggggtctgccaggggagtagggcttggagggagagtggctgggctgctggcttgcatgcctgaggacagtgaccaggtgactggtctgg

SEQ ID NO: 429097 - DNA, 201 bp, Homo sapiens
acctctgcctcccaggttcaagcgattcttgtgcctcagcctctgtagtagctggaattacaggtacccacttccacacctggctaatttttatgtttttrcagagacgggggtttcaccatgttggccaggctggtctccaactcctgacctcaaatgatcctcccaccgtggcctcccaaaatgctgggattacaggtg

SEQ ID NO: 429098 - DNA, 201 bp, Homo sapiens
tgagacaaagtctcactctgtcacccagactgaagtgcagtggtgtgatcttagctcactgcaacctctgcctcccaggttcaagcgattcttgtgcctcrgcctctgtagtagctggaattacaggtacccacttccacacctggctaatttttatgtttttgcagagacgggggtttcaccatgttggccaggctggtc

SEQ ID NO: 429099 - DNA, 201 bp, Homo sapiens
ttggagatggagtcttgctctgtcacccaggctggagtgcagtggtgtgatctcggctcgctgcaacctccacctcccgagttcaagcctctgaagtaccygggactacaggtgcacgtcaccacgtctggctaatttttgtatttttagtagagatggggtttcaccatattggtcagggtggtctcgaactcctgacct

SEQ ID NO: 429100 - DNA, 201 bp, Homo sapiens
cctagctactcgggaggctgaggcaggagaatcgtttgaacccgggaggcggaggttgcagtgagccgagatcgtgccactgctctccagcctgggtgacygagacgtgtgaaaaaaaaagaaaaaaaagaaaagaaaagaaaaagaaaaaaattaaagtgggaaacagacctgcagcctgtgtgtgtttgtgcatggcgg

SEQ ID NO: 429101 - DNA, 201 bp, Homo sapiens
ccgtgctggctggcctcttctacctcccggtctatcgcgactacatcatgtcctttggtgagccgaatgggaggaggagaacgggaggagactcctgaccwgatgttccccagcccctctgggaccacccccccccataataagtcccccacccaggacaggggccagcctgagcactgcccagacttgcagtgagcattt

SEQ ID NO: 429102 - DNA, 201 bp, Homo sapiens
cctggcgctgaggcacgggtgagtgcgcgtgcaggccctacctgtcagttctctgctggtttatgccctctctcagtccccagacatctaggtccctgcakgggggatccgggtgcccagagaccagcgccctgccctgcaccgaggcccacgtgggctctccagggcatgactcggtaccaaacatggggcccgcttacc

SEQ ID NO: 429103 - DNA, 201 bp, Homo sapiens
acaaaaattagccgggcatggtggctcatgcctataatcccagctactccggaggctgaggcaggagaatcgcttgaacccaggaggcagaggttgcagtsagccgagatcacaccactgcactccagtctgggcaacagagcgagattccatctcaaaaaaaaaaaaatgttgttaaagctataatcgttctggaagtga

SEQ ID NO: 429104 - DNA, 201 bp, Homo sapiens
gcccgccttggcctcccaaagagctgggattacagacgtgagccaccacgcctggccaaaaatatactgaatcttttcatatgctttttctgcatcgattrtgatgatcgcatggttttttcccttcattttgttcatatggtgtgttacattgattcattttcctatgctgaaccatccttgcattctaggagtaaaccc

SEQ ID NO: 429105 - DNA, 201 bp, Homo sapiens
atgaaccaccggacccggccggaaatgtttttgacaaatgcctcccggtagcctcatcagtcccgggaaaattacaaattaaatacatgccctttgagccrgtccttcaaggagccaccagacaagtcaaactacaatttttaaaaataagtgtgttctgctccctccagtacttcgtatctatcatgggaatatagattg

SEQ ID NO: 429106 - DNA, 201 bp, Homo sapiens
caaacatggtccactgcctactggtgggccaccaagggtctcctaatgctgccaacacacacaaaaatatgggacttttcttgagttctccttggaacttsatatgcatgtccatgggcctttagttttgtatgtaacttaaaggctacttatttgtaaccttaataggtaccttggtttttaaaggttattacagtctaa

SEQ ID NO: 429107 - DNA, 201 bp, Homo sapiens
gagacagggatttttgtatttttgtaagtcggggtttcaccatgttgcccaggctggtctcgaactcctgaactcaaatgatcctcttgcctcagcctccygaagtgctggggttacaggtatgagccaccatgcccagcccactttggggttttaaggcttgtggaattaaagcaggacttctactcagccaagatttgc

SEQ ID NO: 429108 - DNA, 201 bp, Homo sapiens
tttatcacctaatagccactaagaagttattccccattgtcccctctctgatcccctggtatcctctaatctgctttctgtctttattgattcacctattstgaatatatcacataaaagaaatcatacaatatgtgaccttttgtgtttggcttatctcactcaagataacgtttttgaggttcctccaagttgtagcat

SEQ ID NO: 429109 - DNA, 201 bp, Homo sapiens
tggtccactcaaagcaaaagtgaacagacaggtcaagagcaaatgtcatggcaacagttttttgagatgctcaaggcattttctttattgactttctggarggtcaaagaatggtaacatctgctttgttttaagaaaattaggcaaagctttagcagaaaaacacccaagaaagctttactagagagttcttctccacca

SEQ ID NO: 429110 - DNA, 201 bp, Homo sapiens
tgcaggatatggagccccacctcccggatacggagccccacctgcaggatatggagcccaacccgtaggaaatgaaggcccgcctgtgggatacagagccycacctgtgcgatatggagccccacctcttggatacggagccccacctgcaggatatggagccccacctctaggatatggagccccacctcttggatatgg

SEQ ID NO: 429111 - DNA, 201 bp, Homo sapiens
aggcggaggttgcagtgagccgagatcgagccattgcactcaaacctgggggacaagagcaagacttctctcaaaaaaaaaaaaaaaaaattagccaggcrtggtggtgcttgcctatggtcccagctactcaggaggctgaatgggaggatcacctgagcccaggaggtggaggttggtgagcagagattatgccactgc

SEQ ID NO: 429112 - DNA, 201 bp, Homo sapiens
tgttgtcagctatgccagtttcttggtgagtgtgtgccatttcttcccccaggtggctgggaaggacaagctacttttaaattagtcttcagaaatggagrtgccattgaatttgcccagttgatggtgaaagctgcctctgctggtaagtgatgctgataaagatattaagcactttggggttttttgtttgtttgtttg

SEQ ID NO: 429113 - DNA, 201 bp, Homo sapiens
cttcatttcttttcctggctgaataatactccattgtacatatataccacaatttgtgtattcattcctccattgatggacatttgtcttgtttccacctyttggctattacgaatactagctgctatgagcatttgtatataattttctacgtagacatatgttttcatttctcctggatatgcatcttggagtggaatt

SEQ ID NO: 429114 - DNA, 201 bp, Homo sapiens
attgcgctcctttctgggctctgacttgccctcaatttccttttctcccaaccagcattgaaactcaagctggatgatgtgcttggggccagcacactcargtcagtttgaatgtagttgtcaggaagatcgaagtagacgttaccaaatgctgatatccaggtctttcttctatctttccttcctccagaaagttttctt

SEQ ID NO: 429115 - DNA, 201 bp, Homo sapiens
gcctgtgggatacagagcctcacctgtgcgatatggagccccacctcttggatacggagccccacctgcaggatatggagccccacctctaggatatggarccccacctcttggatatggaaccccacctctcggatatggagccccacctctcggatatggagccccacctgcaggaaatgaaggcccgcctgcgggata

SEQ ID NO: 429116 - DNA, 201 bp, Homo sapiens
aatttgttatttattaggagtgactgaaataaaaaacataattgagtcccatcatcatcatcatcatagaaatggctttaagagaaaactggtcagatgamtattattgcttcccatttccaaccagtgaatagttgccactgataaattgacagcgaggagtctgtcaagaatgctcaagatagccgggcgcggtggccc

SEQ ID NO: 429117 - DNA, 201 bp, Homo sapiens
cctcccgcctcagcctcccaaagtgctgagattacaggtatgaaccaccggacccggccggaaatgtttttgacaaatgcctcccggtagcctcatcagtcccgggaaaattacaaattaaatacatgccctttgagccagtccttcaaggagccaccagacaagtcaaactacaatttttaaaaataagtgtgttctgct

SEQ ID NO: 429118 - DNA, 201 bp, Homo sapiens
cagctgcatgcaagagcagaacttgcagtggaaaatttaaatatgtgggatcaagatcctgaagcatttcttcaaagaattgtaacaggaaatgaaacatrgctttaccagtatgatcctgaagataaagcacaatcaaaacggtggctacaaagatgtggaagtggtccactcaaagcaaaagtgaacagacaggtcaag

SEQ ID NO: 429119 - DNA, 201 bp, Homo sapiens
tccctttgcagtgtcatagttaccgaagtaggcagcaggcagctcggtagataataccctgcacagacacgttaaagccttggtacaggctcttaatcccrtcagatttgtagatcttaactaggcagtcaccgaaacctcgcaattccctttcagctccagctttgcccacatcagctgctacacgagtatgggcaaaat

SEQ ID NO: 429120 - DNA, 201 bp, Homo sapiens
cctgtactccagctgtccctctagaaagaaaaggactctttctctgttttcttctcaccaaagaagatcctattagtaccctagcttcctggatagaaachaaagaaccagagatagtggtgcacatctgtagtcccacctattcgagaggctaaggtgggaggatcacttgaggccaggagttcaagaccacgctgagca

SEQ ID NO: 429121 - DNA, 201 bp, Homo sapiens
tgcagtggctcacgcctgtaatcccagcactttgggaggtcgaggcgggcggatcacctgaggtcaggagttccagaccagcctggccaacatggtgaaamcccgtctctaccaaaaaatacaaaaattagcctggcatggtggcaggcgacttaatcccagctatttgggaggcagaggcaggagaatcgtttgaacccg

SEQ ID NO: 429122 - DNA, 201 bp, Homo sapiens
tctctggacttgcctttgcttttctcaggtttagtccccatcttacatgagaggggagtagaggtactgtcaagacttatagcactgatctaatggatgtrccacagaactctttcaaactgtgactacaaataatttttttatctcatatatgtgtgtgtgtgtgtatatatatatatatatatatatatatatatatat

SEQ ID NO: 429123 - DNA, 201 bp, Homo sapiens
aggcaggagaatcgcttgaacccaaggaggcagaggttacagtgaacagagatcacgccattgcactccagcctgggcaacaagagtgaaactccatctcaaaaaaaaaaaaaaaagtgccagcttatgaggtaattacattggttctctccagaggtaacctgccaagaagagatgctatagatgttactcttatactgt

SEQ ID NO: 429124 - DNA, 201 bp, Homo sapiens
tgagttgtaagcattctttatatagtctggatatgaaatccttgtcagatatattatttgtaaatatttttaggttttctttcacattcttgataatgacttttttttttttttttgagacaaagtctccctctgtcacccaggcttgagtgcagtggcgccatcttggctcactgcaatctctgcctcccgggtttaagt

SEQ ID NO: 429125 - DNA, 201 bp, Homo sapiens
ttcttcggtaccacacttcctcacattggtctttaatggatatatcttaccaacttggtagaatcctcacttagaagttttttctgaatatctgttatgawtaggtgctatgctaggcctggaataagcacaggcaaatgagatacaatctctgcccttaagacacgtgccattcaggacaagggtcatatttcttttctt

SEQ ID NO: 429126 - DNA, 201 bp, Homo sapiens
gacgcatgtctcctcagggcggggcggggagggggtgcgagacgcgtgtgtccttcgaagagaggccggagctgaccggcggttgtgagcagccgggggcsttcggtggcagcgtggctgcccttgggtgcctgcgactttgttggatgaggacaggtactgggtgtgtatctcctcctacttccacgaacaaggtgtcgc

SEQ ID NO: 429127 - DNA, 201 bp, Homo sapiens
acactcagctaattttttgtatttttagtagagactaaacccactgatggggtttcactgtgttagccaggatggtctcgatcgcctgacctcgtgatccrcccacctcagcctcccaaagtgctggcattacaggcgtgagccaccgctcccagccggctttgtttcctaatcttaaaaatcctgattgggcacccattt

SEQ ID NO: 429128 - DNA, 201 bp, Homo sapiens
tgagccacttcacccagcccatgtttcttttttatcttgtgtctcaagagcattgttggaaacacatgtaaggtggtgattaaatactctgttaattgttyagttgatatctgctatatatctgacttaattaaaagagttcctattttgccaaatttgtctttccagctgcccgaggatttccacttagaaccttaaatg

SEQ ID NO: 429129 - DNA, 201 bp, Homo sapiens
tccttgcggtgcctgctgctggcccctgagctctctactggagcagactcagccagaggggtgcccatctccaccttcaagcacacttgttcactaaggcytgactccactgcgctcacctctttaccccacacgccccctttcccgtttcctacactcaaactcagtctcccccgctgtgcagttctaaattgcgctcct

SEQ ID NO: 429130 - DNA, 201 bp, Homo sapiens
tcagaggattagacttttaaaaagagattaaaaatatttattgaaaatataaaaatcattgttcaaaatattaaagtatacatgactttacattaaaatayacttattgcagaattgccctacagaattatatcaatttacattcctctcagtactctgagtgcccacttcaccatacttttcccaacaattctgttccca

SEQ ID NO: 429131 - DNA, 201 bp, Homo sapiens
acagccgggagtggtggcggatgtctgtagtcccagctactcaggaggttgaggcaggagaattgcttgaacccaaaaggtgaatcacccaaaaggtgaaycaaaaggttgaggcaggagaattgctccaccaaaaggtggaggttgcagtgagccgagattgtgccactgcactccaccctgggcaatagagggagactc

SEQ ID NO: 429132 - DNA, 201 bp, Homo sapiens
aactgaatttttttccttccattataattcccagttattgtctatggagccccacctgcaggatatggagccccacctcccggatacggagccccacctgyaggatatggagcccaacccgtaggaaatgaaggcccgcctgtgggatacagagcctcacctgtgcgatatggagccccacctcttggatacggagcccca

SEQ ID NO: 429133 - DNA, 201 bp, Homo sapiens
atggagccccacctctcggatatggagccccacctgcaggaaatgaaggcccgcctgcgggatacagagcctcacctgctggatcaggagccaggcctcasgaatctacagcagcccaggctcctgaaaacgaggcttctcttccctctgcctcctcttctcaggtccattcttaaccttctaagatgtaaaccttgaaga

SEQ ID NO: 429134 - DNA, 201 bp, Homo sapiens
tggagccccacctcccggatacggagccccacctgcaggatatggagcccaacccgtaggaaatgaaggcccgcctgtgggatacagagcctcacctgtgsgatatggagccccacctcttggatacggagccccacctgcaggatatggagccccacctctaggatatggagccccacctcttggatatggaaccccacc

SEQ ID NO: 429135 - DNA, 201 bp, Homo sapiens
agatatattatttgtaaatatttttaggttttctttcacattcttgataatgacttttttttttttttttgagacaaagtctccctctgtcacccaggctkgagtgcagtggcgccatcttggctcactgcaatctctgcctcccgggtttaagtgattcttgtgcctcagcctcctgaatagctgggactgcgggtgtgt

SEQ ID NO: 429136 - DNA, 201 bp, Homo sapiens
ggcaggagaatcgcttgaacccaaggaggcagaggttacagtgaacagagatcacgccattgcactccagcctgggcaacaagagtgaaactccatctcaaaaaaaaaaaaaaaagtgccagcttatgaggtaattacattggttctctccagaggtaacctgccaagaagagatgctatagatgttactcttatactgta

SEQ ID NO: 429137 - DNA, 201 bp, Homo sapiens
ctgccaagaagagatgctatagatgttactcttatactgtaaaacattgtgaaatcagattgcttaaaaatgatgtattacaaagttatggaaaaaagcarttgtgactatggaagcccaaggcttatatcctagctctgtcttacactaaatgtgggtacagtgtttccagtttttgtaaaatgggagctaatatcctcc

SEQ ID NO: 429138 - DNA, 201 bp, Homo sapiens
cttgacttaaaggtaactgaatttttttccttccattataattcccagttattgtctatggagccccacctgcaggatatggagccccacctcccggatayggagccccacctgcaggatatggagcccaacccgtaggaaatgaaggcccgcctgtgggatacagagcctcacctgtgcgatatggagccccacctcttg

SEQ ID NO: 429139 - DNA, 201 bp, Homo sapiens
gatgtattacaaagttatggaaaaaagcaattgtgactatggaagcccaaggcttatatcctagctctgtcttacactaaatgtgggtacagtgtttccastttttgtaaaatgggagctaatatcctccaacctgtgtgcctgacatggtgattaaaaggattaatcgaaacaacagtttgtaatttattctgtcagagc

SEQ ID NO: 429140 - DNA, 201 bp, Homo sapiens
gtatacaaataaaagatgttattaaaaaaaagaaactaaaaaaacttgagcaggagaagattgattctatgaggagtcttcaaaaagatcatggaaaataygggttgcgaaaaaactatgcatggattccagattatttttccaccaaaattaactcatactaacttgttataacatgactgaacaggatttagtttgagg

SEQ ID NO: 429141 - DNA, 201 bp, Homo sapiens
actagttaattggtctgtttatattttatgtttgttcatgattcagtgtggtaggttgtgtttttctagggatttatccatttcttctaggttatccaacytgacatacaattgtccttggttttctctttaatccttgtaactccttggcatcagttttttttttggttgttgttgttgttgtttttcttgttgttgttg

SEQ ID NO: 429142 - DNA, 201 bp, Homo sapiens
agtcttttgtccatttaaacactgacctcagatatctactgagcgtctcttccttgggtcagggagcccttagttattctttctttggtgtggctttttaktttttcttctctctggacttgcctttgcttttctcaggtttagtccccatcttacatgagaggggagtagaggtactgtcaagacttatagcactgatct

SEQ ID NO: 429143 - DNA, 201 bp, Homo sapiens
actgcaagctctgcctcccgggttcacgccattctcctgcctcagcctcccaagtagctgggactgcaggcacccgccaccacactcagctaattttttgwatttttagtagagactaaacccactgatggggtttcactgtgttagccaggatggtctcgatcgcctgacctcgtgatccacccacctcagcctcccaaa

SEQ ID NO: 429144 - DNA, 201 bp, Homo sapiens
gtttcttgtatttcaaatctactagtaaagagctttcattttttgtttatttggtaatgtcttaatttctctttaatttttgaaggatagttttgccactyatagaattcttggttaagagttttttgtttttagggctgggcacggtggctctcgcctgtaatcacagcactttgggaggccgaggcaggtggatcacga

SEQ ID NO: 429145 - DNA, 201 bp, Homo sapiens
ctctagcctgggcaacaaaagtgaaactccatctcaaaaaaaaaaaaaagaaaaagaaaaagaaaaagaaatcagctgctagtctgaggattccttgtgcrtgatgagtcacttatcttgttaatttcaagattccttgtatttggctttcaataatttgattataatgcatgtcagtgtggaactgagtttattctactt

SEQ ID NO: 429146 - DNA, 201 bp, Homo sapiens
tcatttgttaaatagattgtcttttcctcactgagtcatcttagtacctttgttgaagattatttgatcaattctcacatatatgtgaagatttgtttctrttctagtccattggtttgtttatctttaatgccagtatcatgctgttttggttactgtagctttgtaatatactttgaaatcaggaagtgtgaatcctct

SEQ ID NO: 429147 - DNA, 201 bp, Homo sapiens
atgatgtcgctttctgtttgtgcaaaaagtgttgttgagatttggtagggattgtgttgaatctctgaatcacttgagtagcctggacgtcttagccttaytaagttttcaaatccatgaacatgggatatctttccatttatttatgtcttcaatatttttcactaatgttttatagttttcagtgtacaaacctttcac

SEQ ID NO: 429148 - DNA, 201 bp, Homo sapiens
gcccaccaccacacccggctaattttttgtatttttagtagagatggggtttcaccgtgttagccaggatgatctcgatctcctgacctcgtgatccgccygccttggcctcccaaagagctgggattacagacgtgagccaccacgcctggccaaaaatatactgaatcttttcatatgctttttctgcatcgattatga

SEQ ID NO: 429149 - DNA, 201 bp, Homo sapiens
ggagcggctcgctggctagtattggcacccgtcaggtccggggctctccggagcgggcctagcttgaggaaagatggcgatgtctccgccgcatggagcgkctcaggccggagcctggtaccgtcgaggtcagtcatcgttacccgcagcggcgccattttgcccaaaccggtgaaagtgagtgtcctcctggagacgggg

SEQ ID NO: 429150 - DNA, 201 bp, Homo sapiens
cacctccctcccgccgccccaggagccgccggcactgcgcgagtgggagggctgggcttctcgtgtactcctcaaactctcgcgaggcttcgggcggcttkcttcccgagggcggcacgagggctgggcggtggggtgcgggtgcccgggtgaggggcggagctgggggcatggcgtccggagcggctcgctggctagtat

SEQ ID NO: 429151 - DNA, 201 bp, Homo sapiens
tggaattctttcagtctgcggatggaagactacgctgttgcccagttcactgctgctttcctttcttacaggaattacagaaaggagaaagcactaactgragaaatggtgatgctctcagtttctctgccttccctatcagcagaaaggctcggggaaggccctcagcctcccagtctggtgaagcttcctgtatggtcc

SEQ ID NO: 429152 - DNA, 201 bp, Homo sapiens
gtggtttgatttgtattgggttgggttaattttttttggaaaggagtattttttttgtttttgtgcgtgtgttttatttgctgtttgctctcataaagtayattgtaatgaatacattctacatgtctttttttctgacaaattttttaagtaaattccaaggttcaaaagagttgacataaagttttccaagcagttata

SEQ ID NO: 429153 - DNA, 201 bp, Homo sapiens
catctctactaaaaatacaaaaattacccaggcatggtggtgggcgcctgtagtcccagctactcgggaggtggaggttgcagtgagctgagatcacgccmctgaactccagcctaggtgacagagtgagattccatgtcaaaaaaaaaaaaaaaaaaaacagtctttgggatttatctaacttaagtctaccttaacctt

SEQ ID NO: 429154 - DNA, 201 bp, Homo sapiens; identical to SEQ ID NO: 120570

SEQ ID NO: 429155 - DNA, 201 bp, Homo sapiens
tcattgccattaaatatcttaattaccaacatcctgccttcttcatgctgttaacaataccaaaaatggtccttctcctctatacctttccaagttctaaygatcttccaagacccagcttaagtataaatatctccacaacgtctttctggacaacaccgaagctcactaagctccttctagtctttatagctccttata

SEQ ID NO: 429156 - DNA, 201 bp, Homo sapiens; identical to SEQ ID NO: 120571

SEQ ID NO: 429157 - DNA, 201 bp, Homo sapiens
acatattgagggagaaactatttaggaaaatcataatttcaggtgtggaatttttctagatcttgtgcttgtcagattacacttttttttttttttttttkggcaactaggcaccttcagaatataactaaattacatcactcaaatttacgaccagggcttagagtttcgtaccacctcttggtcctaaacagatattat

SEQ ID NO: 429158 - DNA, 201 bp, Homo sapiens
aaagcagtgagcatttttagggaaatgaaactattctgtatactataatagtgatacatgtcattatacattggtcaaacccatagaatacataacatcargaatgaactctaatgtaaactatggacttttggtgaccatgatgtgtcagtgtaggttcattgattgtaacaaatgtaccactctggtgggagatgttga

SEQ ID NO: 429159 - DNA, 201 bp, Homo sapiens; identical to SEQ ID NO: 20515

SEQ ID NO: 429160 - DNA, 201 bp, Homo sapiens
atataagggaacctgcaccttctgcctaactttgctgtgaacctaaaacaaatctaaataataaagtgtatgtgtgtgtgtgtgtctatatatatatatayacagagagagaaagagagagggagagagagagactcctaaaatatcagaataatataggtacattatctctggcttcatagaacatatatttttttattc

SEQ ID NO: 429161 - DNA, 201 bp, Homo sapiens; identical to SEQ ID NO: 120574

SEQ ID NO: 429162 - DNA, 201 bp, Homo sapiens; identical to SEQ ID NO: 120576

SEQ ID NO: 429163 - DNA, 201 bp, Homo sapiens
gaaatttgaaaaacactggactatagtttgctctatgatagagaagggtttcttttaacaccttcactgtttttaacatatttattttgactgtattcacytggtatttgattgccttagctagatgaatcagggtaaatagcctttttcagatatttccctgctctttccactataaatttcctgaactcatatagcatg

SEQ ID NO: 429164 - DNA, 201 bp, Homo sapiens
aacagagccttgcatagagtattcagagagcctctcaattagtctttgccaccaacatcctcctgttcaaatcgtttcttcatgctgccactaaagtgatytatgggaaggggagagacataggtaagtcaagtcaagttggaggaatggccatgtaagtttatttcctctgcctcctattttcaacctaagtacagcaaa

SEQ ID NO: 429165 - DNA, 201 bp, Homo sapiens
gatgagaccatcaggaggggaaagggattcctacagaactgatttttagagagagcaatatgcatgcttaacatactgcctagcatatagtgagattttartaagtgtttttcaagtgaatgagttgtgttttcaatgtgttgagattgagctaaagacaggaaagtatctcaaaagggaactatcctgaggcaatcagaa

SEQ ID NO: 429166 - DNA, 201 bp, Homo sapiens; identical to SEQ ID NO: 120580

SEQ ID NO: 429167 - DNA, 201 bp, Homo sapiens
tgaaaatgaatggctatgattaaaagcaatatatatttagaccagttatgtaggctcataggaaaaagtcccttaatttttctggttaaaaagaagcagtkaaactaaatcactagttctcaaagggatgtatcatcagcatcacttgggaaatgagaaatgccaattatcagcccctcaagacctaatgaatctgaagtc

SEQ ID NO: 429168 - DNA, 201 bp, Homo sapiens
gagctatggtcatcctgcaaggaaaacattatgggatgcttgctttgccagcattgacattcactacataatcatgagcaaatcactttgcctctctcccmctttctattgcagaaagatgttttaaagatagtttaagatggcatcagtgaaatactttctaagttaaagtaatagaagggtcaatgttacttgcatcaa

SEQ ID NO: 429169 - DNA, 201 bp, Homo sapiens
ggtgattctgatacatgttctagtttgagaactactgaacaggataatctatgaggttccttctgctctaatttctgtgggtctatgaattggaaatgtgycccagagagcttaacatattccatagtatagatactgacagcaataaatacttgatttcagcaaaatatccctttagtacctattacttagcacagagaa

SEQ ID NO: 429170 - DNA, 201 bp, Homo sapiens
acatttgaagaatggatagaaacagttccatagttttaaatggtagtggaaagagtatctggtttgcccgagctatggtcatcctgcaaggaaaacattaygggatgcttgctttgccagcattgacattcactacataatcatgagcaaatcactttgcctctctccccctttctattgcagaaagatgttttaaagata

SEQ ID NO: 429171 - DNA, 201 bp, Homo sapiens
gcagcagtgtgaatgctttatctctgtatggaaaaaaaaaaaaaaaaaccagatttgcacatttgaagaatggatagaaacagttccatagttttaaatgrtagtggaaagagtatctggtttgcccgagctatggtcatcctgcaaggaaaacattatgggatgcttgctttgccagcattgacattcactacataatca

SEQ ID NO: 429172 - DNA, 201 bp, Homo sapiens
agagttacttgtttcagaaattcctttgctgggggtcttcagttgttctttgcaggatcctacaagaaagacatttatctttgaatttggtttttaaaacmagataatcactttgattgtaggtctggctgtggcatctttcacagaaggacagagtgaaaaagcccaggctctcgtcactccaaagtccattgcagagag

SEQ ID NO: 429173 - DNA, 201 bp, Homo sapiens
agtgataaatgattaaagcagagaagattctgttttgcttcttcacaataaaatatttgctctcccaaatatgacaaacactgtgtcaggttcagaactaygccaaaggtcatgttgaggtctggagggagtgggtggatgagcagaaagaacactttggggggccgtaggcaggtgaatgattttattcagcagcagctc

SEQ ID NO: 429174 - DNA, 201 bp, Homo sapiens
aattatattatttggcttgatagtgaataatagttgtgtagtaatatgatgtaaacattaactactaattttacttttttaaagtgtgatataagcacgtygagaaactgatgaaactgaatgaggcaggaagagaactaaattcttatctactatgcctgtaatcccagcactttgggaggctgaggcaggagggtcact

SEQ ID NO: 429175 - DNA, 201 bp, Homo sapiens
cataattatattatttggcttgatagtgaataatagttgtgtagtaatatgatgtaaacattaactactaattttacttttttaaagtgtgatataagcaygtcgagaaactgatgaaactgaatgaggcaggaagagaactaaattcttatctactatgcctgtaatcccagcactttgggaggctgaggcaggagggtc

SEQ ID NO: 429176 - DNA, 201 bp, Homo sapiens
tggaggaatggccatgtaagtttatttcctctgcctcctattttcaacctaagtacagcaaatgacttttttaaggggtgaagacacaagaacaaacactrtgggagtgaatatagcagtgggcaagagagcccaataattttctagacagtggataaaggattaataactgaccaagaagagcataagaaactacccctc

SEQ ID NO: 429177 - DNA, 201 bp, Homo sapiens
ccaatctgcagcccacagggcacatgcagcccaggagggctttgaatgcagcccaacacaaatttgtaaactttgtaaaaacactgagatttttttgtgattttttttttttttttttttttagctcatcagctatctttagtattagtgtattctatatgtggcccaaaacaatccttcttccaatgtggcccagggaag

SEQ ID NO: 429178 - DNA, 201 bp, Homo sapiens
agaagttaaaagtgtgtatctatgtgttatctacataatttttaaaagaaaatttccaaaaaaaatatttttttttttgagacagagtctcactctgtcasccaagctagagagcagtggcacggtctcagctcactgcaacttccgcctccctggttcaagcaattctcctgcctcagcctcccgagtagctgggactac

SEQ ID NO: 429179 - DNA, 201 bp, Homo sapiens
gtcattagatatggacaaggcataaagaattgctttatatacacagcatttggataacatttgtccccgtgatccactgatgagcaattacttggcttatgtgggatctgtttcatagtttaagttcccttaaaagaatcaacaacagagccttgcatagagtattcagagagcctctcaattagtctttgccaccaacat

SEQ ID NO: 429180 - DNA, 201 bp, Homo sapiens
ttaccagtggagaactgactaggcaaactaacaggacatctctaagagggactgctctgctgccatcagaaatgacatacattagggaaatgtaaactaarccacaccaaagcaccacttcacacccacgaggatggctagaatttttttaatggaaactaataagcattggtaaggatgcgaagaaactggaatctttgt

SEQ ID NO: 429181 - DNA, 201 bp, Homo sapiens
ccagatgtttattctctggataaataaaaatgacaattttttaattcaatagcgccaggcaccatggagatgtatgaaacaaaaaaatagattttgagttaaaaaaaaaaaaaaaaagacagagctcactctgtcgcccaggctggagtgcagtggcgtgatttcggctcactacaacctccgcctcccaggttcaagtga

SEQ ID NO: 429182 - DNA, 201 bp, Homo sapiens
ctgtctgaccccagagtccaggctctcaactgagaacatgagggtgtgtactgcattttacatgtttgtaagtacaaaaagatgtgagacagagactaagwgtttaccagtggagaactgactaggcaaactaacaggacatctctaagagggactgctctgctgccatcagaaatgacatacattagggaaatgtaaact

SEQ ID NO: 429183 - DNA, 201 bp, Homo sapiens
accatggagatgtatgaaacaaaaaaatagattttgagttaaaaaaaaaaaaaaaaagacagagctcactctgtcgcccaggctggagtgcagtggcgtgrtttcggctcactacaacctccgcctcccaggttcaagtgattctcctgcctcaatctcccaagtagctgggattacaggcgtgagccactatgttcagct

SEQ ID NO: 429184 - DNA, 201 bp, Homo sapiens
tgcctgaggatgtaggatgagtccctacatcttaaactgcaacctaacttgggatgtaaactaactgaaagcctaacttagctgagtctccgccaatcacwgaagctgagcttcagtcaatcacaggcggccaactaatcagaccacgtgcaaataaggcgaactgagctgtagccaatcaggccggctcctacgcacttc

SEQ ID NO: 429185 - DNA, 201 bp, Homo sapiens
tcccggtgttataactatagtggtgagcttctctatgttgtgtctacatggctatgatgacaagtggagttatacgcctgtgctctatactcactgagtcrcgaagaatgtaaacatcctacctcggcctatccttgaccaaagcacagccatgttccttacactctgggtccccacggttcagacagaagtctctctgac

SEQ ID NO: 429186 - DNA, 201 bp, Homo sapiens
aagctgtctcagtggcctctagagcagggaagaggtgccaagattaaagacctgacttcatttgctgcagcagcagtgtgaatgctttatctctgtatggaaaaaaaaaaaaaaaaaccagatttgcacatttgaagaatggatagaaacagttccatagttttaaatggtagtggaaagagtatctggtttgcccgagct

SEQ ID NO: 429187 - DNA, 201 bp, Homo sapiens
agctgtctcagtggcctctagagcagggaagaggtgccaagattaaagacctgacttcatttgctgcagcagcagtgtgaatgctttatctctgtatggaaaaaaaaaaaaaaaaaccagatttgcacatttgaagaatggatagaaacagttccatagttttaaatggtagtggaaagagtatctggtttgcccgagcta

SEQ ID NO: 429188 - DNA, 201 bp, Homo sapiens
gcaaaacggggctgtggcgtttggggcacctcacctagagtcaaggtctctttctcaggcggtgtcttcagcactgatccggaagcttctgggaggtaggwggttgactgctcttccccaaaggaatcagaggacagagccctagtttgactttgctgccaccttgtggtaatggggctactcgcaacaggaacctctgcg

SEQ ID NO: 429189 - DNA, 201 bp, Homo sapiens
ttattcaaagggagaaaaagagaaaagagttgactcaaagtgacactccttagttctacaagacaaagattctctcaggaatatatcttttattcacgttscaaaacggggctgtggcgtttggggcacctcacctagagtcaaggtctctttctcaggcggtgtcttcagcactgatccggaagcttctgggaggtaggt

SEQ ID NO: 429190 - DNA, 201 bp, Homo sapiens
cctagatattattttatatatttgtatatatttttgtatatagttatacgtaaaatgttatattttatagttacatattatataaacataaatatgttatrttttatatatttatatattatataaacataaatatgttgttttatatatttatatattatataaacataaatatgttgttttatatatttatatattata

SEQ ID NO: 429191 - DNA, 201 bp, Homo sapiens
ggagtggctctctggttgcccattggccaacggttctttgcacaattaactttgtaaaatttaatttgtctaaagttttgtttttgtttttgtttttaaayacatacagtacctttcctttgtttttgtgtcatttctccccaccttggaaatttcttattcaaagggagaaaaagagaaaagagttgactcaaagtgaca

SEQ ID NO: 429192 - DNA, 201 bp, Homo sapiens
gtgtattaggatcagctggggagtctataacactatggatgctgatttagttggtagagtagagcctggggatatatggcagttgttttaaagctccccakgtgaattcaatgtgcagccaagggttgagaattattaccacatttctagctccttctaaattgtgagaattccaaatctggaaatctacccacagttacc

SEQ ID NO: 429193 - DNA, 201 bp, Homo sapiens
ccagagataagcagagccaagagctaaaaagatgggcccaaatgacattactcaaagccttagatccagctgatatttaaaaccagctgtatgtacccagractccaaagttacatgaaaaaaatagatttacttttttgcttaagcttaagtttgactttggtttcagtcacctacaactaaaaaatctgaccagtggaa

SEQ ID NO: 429194 - DNA, 201 bp, Homo sapiens
aaactgaaacctagaggggctgggtgctagtagcaattccatacagaggccgtcccatcagctgcagcagaaaacacccgggtctggtctggactcaaagmcaggtgcagcactctgcccctgtggcctgggggaagaaggaaagacagttcatactcctccacgttacatgggctgctgctcaggactgtaggcaatgta

SEQ ID NO: 429195 - DNA, 201 bp, Homo sapiens; identical to SEQ ID NO: 120583

SEQ ID NO: 429196 - DNA, 201 bp, Homo sapiens; identical to SEQ ID NO: 120585

SEQ ID NO: 429197 - DNA, 201 bp, Homo sapiens; identical to SEQ ID NO: 120586

SEQ ID NO: 429198 - DNA, 201 bp, Homo sapiens; identical to SEQ ID NO: 120587

SEQ ID NO: 429199 - DNA, 201 bp, Homo sapiens
atccactgatgagcaattacttggcttatgtgggatctgtttcatagtttaagttcccttaaaagaatcaacaacagagccttgcatagagtattcagagrgcctctcaattagtctttgccaccaacatcctcctgttcaaatcgtttcttcatgctgccactaaagtgatctatgggaaggggagagacataggtaagt

SEQ ID NO: 429200 - DNA, 201 bp, Homo sapiens
agcttgggcaacagagcgagactctgtctcaaaaaaaaaaaaaaaaagaaagaaagcactgagagctccaaatgtagcatggaacaggaccttctagaaaytgccacaggcaattatctccccactgcatggctacagagcttccctgataacgctcacaacaccaccatccaaagtttcctaccagctttgggcaaagag

SEQ ID NO: 429201 - DNA, 201 bp, Homo sapiens
tgtgcttgtcagattacactttttttttttttttttttggcaactaggcaccttcagaatataactaaattacatcactcaaatttacgaccagggcttaragtttcgtaccacctcttggtcctaaacagatattatgaacggggccttcggccccgcattagagagttagggagaatgcagaaaagggtgttactcacc

SEQ ID NO: 429202 - DNA, 201 bp, Homo sapiens
tggcttctgataaaagcatgagagcttcacaatgctacaccaagaaaccaaattgttactcataaattcctgcttccgtgttagctatgaaaacctgtagytgagggcaaaactgcaagattactaaaaatacttaggcttgctgataaagtatcaacaaggttaaaaaaaaaatcaatacccaaagaatgaacaaaaaaa

SEQ ID NO: 429203 - DNA, 201 bp, Homo sapiens
actcactgtgcatgctccagcatgaccaccttgtgctaataacatttaccaaacacttaatccgtgccaagccctgggatatatgaatcagagggagtgtytattttagtttcatcacaaccctctgaaataggtactagtattatttcagaatacagagttggaagacaaatcttaatggggttaggtaattttagcaag

SEQ ID NO: 429204 - DNA, 201 bp, Homo sapiens
tacaatatttagttttttcagattgtctgcttttggttaattttacccatgactatctaaggtcagtattctatcttttgttcagttctcatcaaaagacyatactaagttcaaaccacaggccgctgtcttttcatctccaaccactcagcttgtgatcaaactgagaatgataaaatcaaaagaaaccaagaccaccca

SEQ ID NO: 429205 - DNA, 201 bp, Homo sapiens
agatcaattaaaatagaacagaagtaaaaaaagaaaagatgtccaaggaacaggccttgggtactccaacatttagaggtcagggaaatggaagagaaacmcaaatcagcaaaaaaggatgagaaagagtgaacaaaagacactcttggacaaaacccaaaagagtgggatatcaagaaggagggattgatcagctgtctc

SEQ ID NO: 429206 - DNA, 201 bp, Homo sapiens
tagtaactctacgtagactaagaaagttaaaattacattgtaatccctagaaaaatgacgacaaaacacaatacaaagagatatagccaaaaagctaagaycaattaaaatagaacagaagtaaaaaaagaaaagatgtccaaggaacaggccttgggtactccaacatttagaggtcagggaaatggaagagaaacacaa

SEQ ID NO: 429207 - DNA, 201 bp, Homo sapiens
gtctcaaaataaaaacaaaaaaagaaaaaagaaatctaagatatgagccaagatggagaaaacatccagcatttattgagtagttactatgtatgaaaccrtatgtacagggttttacacgtttgtatttaatcctaagaaacatctgtgaagcagatcttatttacgcccattttatcagtgaagaaactgaggcttaga

SEQ ID NO: 429208 - DNA, 201 bp, Homo sapiens
agaagtggtggttccagaacattggaaatacactaaagaccactgaattggtgacttaaaaggttatttttggccaggtgcagtggctcacacctgtaatcccaacactttgggagactgaggtgagttaatcacctgaggtcaggagttcaagaccagcctgaccaatatgatgaaaccccatctctactaaaaatacaa

SEQ ID NO: 429209 - DNA, 201 bp, Homo sapiens
cttgaacccaggaggcagaggttgcagtgagccgagatcgcaccattgcactccagcctgggcaacaagagtgaaaccccgtctcaaaaaaataaataaawaattaaaaaataaaggtttttttaaatatgtgcatttcacttcaataaaagaaatctttttaaaaatggtaacataggataatagtgaataaaacatgca

SEQ ID NO: 429210 - DNA, 201 bp, Homo sapiens
ccaggtagtggtcagataagagaaaagagaactatatgtgattgctcacaactcaacagtctcaagcacttcaaatcttaaagcagttcagaaaataaaaytgccttctatttatttataattatagttaattctaaaaaataggatttagtatcacacatttatattgataattgaaattactaataataatcactttaa

SEQ ID NO: 429211 - DNA, 201 bp, Homo sapiens
agaaggcagaggttgcagtgagccaagatcgtgctactgctctccaacctgggcgatatagccagaccttgtctcataaaaaaaaaaaaaaaaaaaaaaargaacaattttcaaattgtacagagtaaaataaacatttctgcagaaattagagaatgagataaatgaaacaacaaaagtgtatctgggcttttaaaacaa

SEQ ID NO: 429212 - DNA, 201 bp, Homo sapiens
cgggatatataatcagagttctacaagagattggatgccggtgccctgttcttgcatcgaccaccagttttgtcttcctgtttccctgggctgggtagagragatactctactcacccttgagccccctttaacattctagatgcacaaaagaggatttaaggcccagaggacagggcctgggtcttgctccccatcatgg

SEQ ID NO: 429213 - DNA, 201 bp, Homo sapiens
tcctcacgaatgaaaccccttgtattagtctgttctcatgctgctaataaagacatacctgaggctgggtaatttataaaggaaagagatttaatggactyacagttccacatggctagggagtcctcacaatcatggcagaaggtgaatgaggagcaaaggcatgtcttacatggcagcaggcaaaagcttgtgctgaag

SEQ ID NO: 429214 - DNA, 201 bp, Homo sapiens
gtcaaggctgcagtgagccgacatggctccactgaactccaggctgggcaacagagcgagaccccatctctacaaaaaaaatttttaaattagccaggtgyggtagcacacacctgtggttccagctactcaggaggctgaggtgagaggattgcttaagcccaggaggtagaggctgtagtgagccatgattgcaccaca

SEQ ID NO: 429215 - DNA, 201 bp, Homo sapiens
ttccagtctctgtccattgcatgaggtgccttgcaaaaatggagagcagagttacttgtttcagaaattcctttgctgggggtcttcagttgttctttgcrggatcctacaagaaagacatttatctttgaatttggtttttaaaacaagataatcactttgattgtaggtctggctgtggcatctttcacagaaggacag

SEQ ID NO: 429216 - DNA, 201 bp, Homo sapiens
catcatcaaatagttggaaatgatgacagcaagagatccttaggctaagaggaagcataccgtaataagtataatttcattatatttttaacctttacctstttgtaaagataaaatagttattctcattttcacttttttaattaatcccaactcaacattttctcatatatttgggggatatcttctttcttttacaaa

SEQ ID NO: 429217 - DNA, 201 bp, Homo sapiens; identical to SEQ ID NO: 120578

SEQ ID NO: 429218 - DNA, 201 bp, Homo sapiens
tcttcatgctgccactaaagtgatctatgggaaggggagagacataggtaagtcaagtcaagttggaggaatggccatgtaagtttatttcctctgcctcytattttcaacctaagtacagcaaatgacttttttaaggggtgaagacacaagaacaaacactatgggagtgaatatagcagtgggcaagagagcccaata

SEQ ID NO: 429219 - DNA, 201 bp, Homo sapiens
cttgctaaatttaccaaagttctccactccttctgtaaaacatacttactcctacccatagcatgctagtcttctgttctctagaatgctccacacttctrctcccactaattaagctgtgggtttatagagcccactgtgttttgccaaacctgtttatgacaggtgaacttgttattataactgtgatttcatcaaatt

SEQ ID NO: 429220 - DNA, 201 bp, Homo sapiens
atttaggaaaatcataatttcaggtgtggaatttttctagatcttgtgcttgtcagattacactttttttttttttttttttggcaactaggcaccttcaraatataactaaattacatcactcaaatttacgaccagggcttagagtttcgtaccacctcttggtcctaaacagatattatgaacggggccttcggcccc

SEQ ID NO: 429221 - DNA, 201 bp, Homo sapiens
actgtactccagcctgggcgacaaagcgagactccgtctcaaaaaaaaaaaagaaagaaactaataatgcagaaagaatcctaaagacttcactgaaaatytggggacacattgtaggtccattccacattgttattacattctaaaccttatagttaaaaacatgtaatttcataaatacttaaacactgtctactccga

SEQ ID NO: 429222 - DNA, 201 bp, Homo sapiens
agcaaaatagccaagcacagaaaaaggcatacactgaataagtaattttgcctaaattgagaatttatgacttttctagttcaaagctttcgaactgaaayatggattccttcaaagactcttcattggatttgataaattcaaaaacatgctgttgatatttaatgtgcccaaaagatttacgtcagactcctaagatct

SEQ ID NO: 429223 - DNA, 201 bp, Homo sapiens
tattttctgttgttttcacctattgtataaacagttttccacgttttaatagacttttcacaattataatttttaacaatcccataatattccatcgtgtygttatatcctgattaatttttgttctgctaatgctggacctgttttggttttttgttgtattgtggtttgatttgtattgggttgggttaattttttttg

SEQ ID NO: 429224 - DNA, 201 bp, Homo sapiens; identical to SEQ ID NO: 120581

SEQ ID NO: 429225 - DNA, 201 bp, Homo sapiens; identical to SEQ ID NO: 120584

SEQ ID NO: 429226 - DNA, 201 bp, Homo sapiens
gaagctttgagttaagaaaattaaacatttccttatttcaggatttcttcattttaggactactagaagcattacaaatgtttcggagatgaggcaacaayaggcagtacttctcagatttatctgaccacagagttcttttaatttgagcatctcaagggctagtgctccttggaaaatgctttgcaaaatctggcccaa

SEQ ID NO: 429227 - DNA, 201 bp, Homo sapiens
gatttaaaaatatcctttgatagatgtttctaatgactttaatctgatgtaagcagcgatggaaaaataagctgagaagattaccagattttcccaaagastagtttatatacaggacctaggaaatattaacacttttctgcaactttgaatatttcagattatctcaacaaaatggtttcagtatatatttacagtaaa

SEQ ID NO: 429228 - DNA, 201 bp, Homo sapiens
tcactgcagcctcaacctcctgggatcaagcgatcctcccacctttgccacctgtataactgggaccacagccatgcaccaccacaaccagctaattaaawttcttttttagagacaggggtatcgctttcttgcccaagttggtcttgaactcatgggctcaagtgatcctcccatctaggcctcccaaagtgctgggat

SEQ ID NO: 429229 - DNA, 201 bp, Homo sapiens
tgaaaatttatatatcatgccttcattatttgaagctcttaagccttaggaacattaaattaacaaactggctctgatttcatccttgacaggagatatayacgtaagttttcaaagttgtattcatataatatggaattttgtggtgaaaccaacctcaacatcaggcctgcataatgttttatttctggtgtaaaaact

SEQ ID NO: 429230 - DNA, 201 bp, Homo sapiens
caatctttacaaaagtaatcatctaaccaatgcaagtctcaaaaacatattaaaattaagctaaattttgcctgaggatgtaggatgagtccctacatctyaaactgcaacctaacttgggatgtaaactaactgaaagcctaacttagctgagtctccgccaatcacagaagctgagcttcagtcaatcacaggcggcca

SEQ ID NO: 429231 - DNA, 201 bp, Homo sapiens
aatcacagaagctgagcttcagtcaatcacaggcggccaactaatcagaccacgtgcaaataaggcgaactgagctgtagccaatcaggccggctcctacrcacttccaattcctatccataaatgctgcccgcccccacatggagtggctctctggttgcccattggccaacggttctttgcacaattaactttgtaaaa

SEQ ID NO: 429232 - DNA, 201 bp, Homo sapiens
aaccccgtctcaaaaaaataaataaaaaattaaaaaataaaggtttttttaaatatgtgcatttcacttcaataaaagaaatctttttaaaaatggtaacrtaggataatagtgaataaaacatgcaaatgcttacaatatattgctagctgtaaaacagggactataaaagagtattccaatacagtcctacttcctagc

SEQ ID NO: 429233 - DNA, 201 bp, Homo sapiens; identical to SEQ ID NO: 120573

SEQ ID NO: 429234 - DNA, 201 bp, Homo sapiens; identical to SEQ ID NO: 120575

SEQ ID NO: 429235 - DNA, 201 bp, Homo sapiens
gcaagatgtttatatattgtgtgatgtgtacaatagtaactctacgtagactaagaaagttaaaattacattgtaatccctagaaaaatgacgacaaaacmcaatacaaagagatatagccaaaaagctaagatcaattaaaatagaacagaagtaaaaaaagaaaagatgtccaaggaacaggccttgggtactccaaca

SEQ ID NO: 429236 - DNA, 201 bp, Homo sapiens; identical to SEQ ID NO: 120577

SEQ ID NO: 429237 - DNA, 201 bp, Homo sapiens
aaatttcttaaagaatgaagcctcagcgaattgtggaataatatccaaaaatctaacatatgtgtaagtagagccaggtcttagaagcaggataacaaggygaccatggggttctcaccagataccatggaggccacagtcaatggaacaacatcttttaaatgctgggggtagggggcagtggtggatctttcaacccag

SEQ ID NO: 429238 - DNA, 201 bp, Homo sapiens
ttattcaatctaaagaatgtggagaaaaaatttcttaaagaatgaagcctcagcgaattgtggaataatatccaaaaatctaacatatgtgtaagtagagycaggtcttagaagcaggataacaaggcgaccatggggttctcaccagataccatggaggccacagtcaatggaacaacatcttttaaatgctgggggtag

SEQ ID NO: 429239 - DNA, 201 bp, Homo sapiens
gccatattgtcagcagtccatcactgcagccgctggaaagcagcctgccatccggtgaccacttcagagcacacacagcttgcttgtggcgaagtgttccmacatgatgctgggctacccgaacatcgtgatgataaacacgccccagtcttgacccactgcgagtttacataacaaaaaaattaagccctgttgctacat

SEQ ID NO: 429240 - DNA, 201 bp, Homo sapiens
tagtgaaaaggactcccatttagtagttcactgcatcagatttttgacaacaaggcatttaaaaaggtaacttgtcttgcttggcttgggttttcaactawttttttgttttgtttttgtatgttgttttcagacagcgtattttacatatattttgcctacttcaagtcatgaatactgggaatttggaccgatcatcat

SEQ ID NO: 429241 - DNA, 201 bp, Homo sapiens
attatattaactttgaactcacaaatgaagaggtttttacaataaaaagaaactcttgagaactcaaattccttatggactcaatagagaaagagagcttrttgggggcataggctctgttgtaaactattttcacaagattccagaagatcaaaatgaagatgaagcccagaggagatattaacctgtgagtttgtgctt

SEQ ID NO: 429242 - DNA, 201 bp, Homo sapiens; identical to SEQ ID NO: 120579

SEQ ID NO: 429243 - DNA, 201 bp, Homo sapiens
aagcttaaaaattacaactcttgagtaggtgggaataatcataagttacctttcttctgtagtcaggtgggtgaggtctctttaactgaaattttcccccmaaaaaaaatcatgactatggttaacagggtacggcttagtaaaggtgtgaccagaatctagaatagttttgttccaaactttgtgaccacaatccacagc

SEQ ID NO: 429244 - DNA, 201 bp, Homo sapiens
cacacacaccacacacacacgcaccagtaaaggatgcctccaaggggacatgggattggccctgggtgtgttgggacataaaaaagtttacatttataacracaatgcaggccccttattttataggtgagggaaaagatttggggataccaaatgtattgcccaaggtcacacagctaatcaatgacagagccagaacta

SEQ ID NO: 429245 - DNA, 201 bp, Homo sapiens
catcttcactcagaaataaggaaactgaaacctagaggggctgggtgctagtagcaattccatacagaggccgtcccatcagctgcagcagaaaacacccrggtctggtctggactcaaagccaggtgcagcactctgcccctgtggcctgggggaagaaggaaagacagttcatactcctccacgttacatgggctgctg

SEQ ID NO: 429246 - DNA, 201 bp, Homo sapiens
acagagtgagattctgtctcaaaaaataataataataaataaaaaaataagtcatttatttagcactcagttatttactgccttgtaatccttccgtttcwtgtgtgttctcatatttccaaaattgcttttacagttgcatgaggctggctccttcccttgcaccttatttgtatcctttccagtgcttgagttggttga

SEQ ID NO: 429247 - DNA, 201 bp, Homo sapiens
taggaaatattaacacttttctgcaactttgaatatttcagattatctcaacaaaatggtttcagtatatatttacagtaaaatgttagacatagaaaaargaaataaatatctaacaggtagagtcctattaacctatagatccattcttagttttgctaaagaactaaacttctttgtaaaagaagtttaaaaccaatt

SEQ ID NO: 429248 - DNA, 201 bp, Homo sapiens; identical to SEQ ID NO: 120582

SEQ ID NO: 429249 - DNA, 201 bp, Homo sapiens
cctatagatccattcttagttttgctaaagaactaaacttctttgtaaaagaagtttaaaaccaattgaatgtcacagcaaactgcaatatgattcctaakcagtggataatgtctccattcatgctcagtgatgtgaatctaaacaactaaagatcacatcactttttcaaagataatgaacgctttctggattaattta

SEQ ID NO: 429250 - DNA, 201 bp, Homo sapiens
acactaataattatgtatttaatgtcattttataatttttcaggtttgatgtaaagttttccttagaaaaattaattttagaaaaataaattgtatttaawtactcatttgttagtatgagtattaaaatgttaagcaaataaacgatatacagatatggcaaaatcacagaggtggtactccttcaatgactgcagtgaa

SEQ ID NO: 429251 - DNA, 201 bp, Homo sapiens
cagattagaaaaggagcttgagtacataattgactgcaataactaagttgttttaagaccggccaaaaacacaagatattcaagtctcaagtttacatcarattacttaaatacattttaaaagtctttgggatggccaggcgcggtggctcacacctgtaatcccagcactttggcaggccgaggcaggtggatcacaag

SEQ ID NO: 429252 - DNA, 201 bp, Homo sapiens
agaagggagatggacaagtcaggattcgaaccctgagttcatttggaggaaagagaccacagtgacaggggtcaaggtaaacaccgtaatgggacaacacyccagcacatccaagggtggaaacctggggtgcttagtctaggagaaagaagattcaaaagggtctggcgcagtggcttacacctgtactctaagcatttt

SEQ ID NO: 429253 - DNA, 201 bp, Homo sapiens
tgtgcttccacactcactgtgcatgctccagcatgaccaccttgtgctaataacatttaccaaacacttaatccgtgccaagccctgggatatatgaatcrgagggagtgtttattttagtttcatcacaaccctctgaaataggtactagtattatttcagaatacagagttggaagacaaatcttaatggggttaggta

SEQ ID NO: 429254 - DNA, 201 bp, Homo sapiens
catgaccaagcaagtccactcataggtatatgtactcaaactcaaattcatgtgcacatatgttcatagtagcactaatcacaataagaaggtgcagacarcccaaacactcatcaacagatgaatgcataaacaaatcatgggacgtatctacatatgcaagtgatctacatatcactcccaagaggaatgagttgctga

SEQ ID NO: 429255 - DNA, 201 bp, Homo sapiens
gcgtggtggtgtgtacttgtagtcctagctacttgatggggctgaggcaggaggattgcttgctgcagtgagccgcattggcgctgctgcactccagcctrggcgacaaagtgagaccctgtctcaaaataaaaacaaaaaaagaaaaaagaaatctaagatatgagccaagatggagaaaacatccagcatttattgagt

SEQ ID NO: 429256 - DNA, 201 bp, Homo sapiens
atctctgccccaacataggcatcagactgtctctcactctcctttccttccctcttcttcttccctactactcttggaggttcttctttcttctttcttcytcctcctcctcctctgtctcctcctctcttctctctttctctttgtctctctccccccatccatcccctcatccctctctcttgcttccttcctcttact

SEQ ID NO: 429257 - DNA, 201 bp, Homo sapiens
tcttgtgctatttgtaaaagtgtacaggggagaaaaagccagctctcagaacttcaaatgagaaagaaaaagttgcagtcagaggctagtactgacaatcrtcacagttatatacaaagaggtcaggtccatcagcctaagaaagaagggacctctcaggttctgtccacagagcatgactgaaaatgaacctctctgtaa

SEQ ID NO: 429258 - DNA, 201 bp, Homo sapiens
gtataacaattgctaaggagtatcttgccaacaccatcatgagcccacagatggagccactaaccttgctgccaccagttaccagaaaggataagaggaargaaaaggaagtcttaaggggtagggcagcaaaaactccaatcagcagtagagggtggaaaacacaggagtgtcaataatctggcccatgtttgaggccac

SEQ ID NO: 429259 - DNA, 201 bp, Homo sapiens
tgcttaccagaacttattccagaggggaaatgtagcaggcaagtttccttggcatttatgaaatgaaccacgctagttctctcaagaggattctcacacakaattctggctcccaaacaattattttccagccatgacaataatctcatgaataacacaaaaacgtccatgatggcaacagaaagtaggaatgaaaacaca

SEQ ID NO: 429260 - DNA, 201 bp, Homo sapiens; identical to SEQ ID NO: 402475

SEQ ID NO: 429261 - DNA, 201 bp, Homo sapiens
cttggtcccaggcaacacggggccttgtagctgggggctgatgtctgaatcccggtcccagagtgtccctaccttcacaccaccaaccgtctgtgtgtgaygagctggtcccagcacctccctgagcctgtgcccagttgtgggtacaaaaaagaaagccagcagcacttgctatgaaaagcaaagggacccaggacacct

SEQ ID NO: 429262 - DNA, 201 bp, Homo sapiens
ttccctgggcggtcctgaaggtggtgtggccagtcctccgcctcgctccgtcagtttccccctgctgaactattgggtgcggggcgggtggtggcgcagcstgcgcatgtgcataggggtcgactgccgctgcggtgcatgagggcgcatgcgcagcggggccgtgggtgtacgcggcgcagcgcggcagtcctgatggcc

SEQ ID NO: 429263 - DNA, 201 bp, Homo sapiens
ggctgttgggaccatcatgtctgagagaggaggcagagggaagcacctcccttctgccatttggcccccaggacctcagagggtaggcggggtggtcggcrggtcccagcctggcctgacccgccggtggggctgcagggctctatgacctcctggggaacgtgtgggagtggacagcatcaccgtaccaggctgctgagc

SEQ ID NO: 429264 - DNA, 201 bp, Homo sapiens
gcctgggcgacagcgagactccgtctcaaaaaaaaaaaaaaaaaaaaaaggaaaaaggagaatataacgaggaacgacccccgcccccacgtactcggccrgcttaaatagctgccagtttgtggccagtcctgctcctgcggaatcgcacactccccctctcctggagccatttggaagtgggtccagacattatcccat

SEQ ID NO: 429265 - DNA, 201 bp, Homo sapiens
cctgggcgacagatcgatactttatctcaaaaaaaaaaaaaaaaaaaaaaaaaaaaggccggacgcggtggctcacgcctgtaatcccagcactttgggargccgaggcgggcggatcacgaggtcaggaaatcgagaccatcctggctaacacagtgaaaccccgtctctactaaaaattcaaaaaattagccgggcgtg

SEQ ID NO: 429266 - DNA, 201 bp, Homo sapiens
aatcctcctgccttagcctctgcaccctgtctctgagccattgctcctggttccatgttattttaattgatacagctgctacctaagagatagtgagataktatccctatttttcatacttattttttcttttattaataagctatggtcgtccatagatatccccatttttcagatgaagaaattgaatctcagctgggc

SEQ ID NO: 429267 - DNA, 201 bp, Homo sapiens
gccaggggagctgtaagcagccgggtggtgacaaggagaaaagccttctagggtcactgtcattccctggccatgttgcaaacagcgcaattccaagctcragagcttcagcctcaggaaagaacttccccttccctgtctcccatccctctgtggcaggcgcctctcaccagggcaggagaggactcagcctcctgtgtt

SEQ ID NO: 429268 - DNA, 201 bp, Homo sapiens
ttttggagaaggggcccaatgtgtgttgacgatggctgggggccaggtgtttctgttagaggccaagtattattgacacaggattgcaaacacacaaacarttggaacagagcactctgaaaggccattttttaagcattttaaaatctattctctccccctttctccctggatgattcaggaagctgacattgtttcctc

SEQ ID NO: 429269 - DNA, 201 bp, Homo sapiens
ctgtgcccatgaactggctgttgggaccatcatgtctgagagaggaggcagagggaagcacctcccttctgccatttggcccccaggacctcagagggtargcggggtggtcggcgggtcccagcctggcctgacccgccggtggggctgcagggctctatgacctcctggggaacgtgtgggagtggacagcatcaccgt

SEQ ID NO: 429270 - DNA, 201 bp, Homo sapiens
actctggtggcttccagtggaaaaggcattttggaggcaggtaagggctgattccgctacctcattttctacccctgcttgactcttattctccaggcccrgcctcctctctacccctcgtacatccaggaacactgagtttcaaagaaggataggggaatatcagggaaagcgctcagcaggcctgtttcacctgcccga

SEQ ID NO: 429271 - DNA, 201 bp, Homo sapiens
ctctcaccagggcaggagaggactcagcctcctgtgttttggagaaggggcccaatgtgtgttgacgatggctgggggccaggtgtttctgttagaggccragtattattgacacaggattgcaaacacacaaacaattggaacagagcactctgaaaggccattttttaagcattttaaaatctattctctccccctttc

SEQ ID NO: 429272 - DNA, 201 bp, Homo sapiens
cctctggataggcatgaggacctgctttgggacaggtggtaaatcctttacccttcctttctcccatcagggaaagttccccaagggagacaaagctgagratggcttccatggagtctccccagtgaatgctttccccgcccagaacaactacggtaagagctgtcttgggcttgcggctgtgcccatgaactggctgtt

SEQ ID NO: 429273 - DNA, 201 bp, Homo sapiens
tgggtacaggggaaacactcttcctaatccagcagtgggggtcaccctggggatgtaaggtgatgggtttgggagctctagataggaatcttaggtcaccrccccgtgcccttccccttccccagatgcaacagcaagacgaccttggttttcctctggataggcatgaggacctgctttgggacaggtggtaaatccttt

SEQ ID NO: 429274 - DNA, 201 bp, Homo sapiens
tattctaatttaaaagaaaatcactcaggcttcaggttaattccttggcaatcatgaacactctgtggtgtataacttacaggacagggatatctgaagtktcctggagcaggagaagatggggtgggcacagaacctcaccagctgaaccagctgaactatgtctttatagggattttgtcagggagaaaaagtatcgga

SEQ ID NO: 429275 - DNA, 201 bp, Homo sapiens
catgtggggttccaggcagagggcaggatgttgctgagagtggagaagtcaggtgtgggctgggcttgacctggagccctgtgggtacaggggaaacactmttcctaatccagcagtgggggtcaccctggggatgtaaggtgatgggtttgggagctctagataggaatcttaggtcaccgccccgtgcccttccccttc

SEQ ID NO: 429276 - DNA, 201 bp, Homo sapiens
gggcttgaagggtatccagatgataaggcgattttcctttattcttctccccatcctgcccagcatgaggggctttaaagggtggaaaggggctgggcgcrgtggcttatgcctgtaatcccaacactttgggaggctggggcaggaggatcgcttgaggccaggagtaaaagactagcctgggcaatatagggagaccct

SEQ ID NO: 429277 - DNA, 201 bp, Homo sapiens
cgcttgaacccaggaggtggaggttgcagtgagctgagattgcaccactgcactccagcctgggcaacagtctttttgagacagagcaagactctgtctcaaaaaaaaaaaaaaaaaatattggccaagtgttgtgcctcacacctgtaatcccaacactttgggaggccactttgggtggatcacctgaagttaggagtt

SEQ ID NO: 429278 - DNA, 201 bp, Homo sapiens
caggaggcggaggttgcagtgagccgagatcgtgccattgcattccagcctgggcgacagatcgatactttatctcaaaaaaaaaaaaaaaaaaaaaaaamaaaggccggacgcggtggctcacgcctgtaatcccagcactttgggaggccgaggcgggcggatcacgaggtcaggaaatcgagaccatcctggctaaca

SEQ ID NO: 429279 - DNA, 201 bp, Homo sapiens
tcctgtctcctgctaaccagctctttaagtcatatttcttttttggatcttggtttgctcctgtggaataaggaggttgaagcaaagatccttttttattwtttatttatttatttattttgagacagagtcttgctgtgtccctccaggctggagtgcagtggcgcgatcttggttcactgcaacctccgcccccccagg

SEQ ID NO: 429280 - DNA, 201 bp, Homo sapiens
gtcttgctgtgtccctccaggctggagtgcagtggcgcgatcttggttcactgcaacctccgcccccccaggttcaagtgattctcctgcctcagcttccsgagtagttgggattacaggtgtacaccatcatacctggcttatttttggttttgtttgtttctttgagacggagtctcgctcctgtcgcccaggccggag

SEQ ID NO: 429281 - DNA, 201 bp, Homo sapiens
tttgggaggccgaggcgggcggatcacgaggtcaggaaatcgagaccatcctggctaacacagtgaaaccccgtctctactaaaaattcaaaaaattagcygggcgtgatggcgggcgcttgtagtcccagctactagggaggctgaggcaggagaatggcgtgaaccccggggggtggagcctgcagtgagcggagatag

SEQ ID NO: 429282 - DNA, 201 bp, Homo sapiens
ccgggaccctcaacgtggttttccttaattccctgggcggtcctgaaggtggtgtggccagtcctccgcctcgctccgtcagtttccccctgctgaactaytgggtgcggggcgggtggtggcgcagcctgcgcatgtgcataggggtcgactgccgctgcggtgcatgagggcgcatgcgcagcggggccgtgggtgtac

SEQ ID NO: 429283 - DNA, 201 bp, Homo sapiens
cctcccgggtgcaagcgattctcctgcctcagcctcctgagagctgggattacaggcacctgacaccacgcctggctgatttttgtatttttagtagagayggggtttcgccatgttggccagactggtctccaactcctgacctcaggtaatctgcccgcctcggcctcccaaagtgctgggattccaggtgtgagccat

SEQ ID NO: 429284 - DNA, 201 bp, Homo sapiens
ctgaggcaagattatcgcttgaacccaggaggtagaggttgcagtgagctgagttcatgccactgcactcaagcctgggccatagagtgagactccgtctaaaaataaataaataaataaataaataaataaataattaaataaaaaataatttgggcacagtggctcatgcctgcaatcccagcactttgggaggccgag

SEQ ID NO: 429285 - DNA, 201 bp, Homo sapiens
tagtactccagaaagacaaatatcagaagcttcctattctttttttttttttttttttttttgagacagggtctttctctgttgcccaggctagagtgcastggtgatcacggctcactctagccttgaattcctgggcccaagcaattctcccacctcagcctcctgagtagctgggactacaagtgtgcaccaccatgc

SEQ ID NO: 429286 - DNA, 201 bp, Homo sapiens
tcttgctccatctagtggtaaaagctgaacgcgggcgccctaaacctagcctgcctccgacttaatgcgctcccggaagcctgtctcacttaatcctggcygtcagcctgcaggtcctggctctggcatccgagagagactggagcacccagtgttacacgtgagctggaatgacgcccgtgcctactgtgcttggcgggg

SEQ ID NO: 429287 - DNA, 201 bp, Homo sapiens
accgctgctgcccctgctgtcgctcctggtcggcgcgtggctcaagctaggtcagtgaaccggccgtccatcctgggggcgctgggaaggggatggggcgytccgccctgacgggagagagccttaggcccttctgccggcttccgggatgcggctgcagcggcaggctggggaggtagctctcggtgcgcgtggcgcctc

SEQ ID NO: 429288 - DNA, 201 bp, Homo sapiens
acattgcaattgtatgttatttcttaattccgattcaatctgagatttccctacttactccttttatttatttatttatttatttttggtggggcgggggrcaaggtctcgacgtgttgcccaggctggagtgaatggttccatcatagctgactgcagcctcaagcaatccctgcctcagtttcccaaagtgctgggatt

SEQ ID NO: 429289 - DNA, 201 bp, Homo sapiens
tgcacccggccgtgatattctcattgcttgtggacaggttttctctactgagctgttgtcaactgctaacatagaagttagtcactgtcttttctgctctycagtgctgtctcttggggccactgtccctccccctactcttgcaagactccttttgtcccaaagccccttcttgtcccctttctcccaggactggcacag

SEQ ID NO: 429290 - DNA, 201 bp, Homo sapiens
accgtggccacacttttttggttatttagtttgtcacagtcttggggacatgggatcatttgagcttaaaaaatactgggggccgggcacagtggctcacrcctgtaatcctaacactttgggaggctgaggtgggcggatcacttgatgccaggagttcgagaccagcctggccaacacggtgaaaacccgtctctacaa

SEQ ID NO: 429291 - DNA, 201 bp, Homo sapiens
ctgggtctggaaaggtgccctgaggacaagagtgaggagaagggaggttgggacactgaggagctcaactgaacgctcagctctgtagggaagttggctgmcctcctaggtgaccctcacgctggtgataggcacgggccaacccctgggacaccggggtggcatcagcaaagacctaaagagattagggtgcacagattc

SEQ ID NO: 429292 - DNA, 201 bp, Homo sapiens
attgcttgaacctgggaggcggaggttgcagtgagccaagatcacgccactgcactccagcctcggtgacagagcaagactgttttgaaaaaaaaaaaaaatgggaacattttaaatgattttcacctttattatgcatctattttcatggggtttcccgatatctcactgtccagtcccttcatttggggaatgtgttgg

SEQ ID NO: 429293 - DNA, 201 bp, Homo sapiens
ggttttgccatgttggccaggctggtcttgaactcctgaccccaggtgatcagtccaccttggcctcccaaagtgttgggattacaggtgtgagccaccgygcctggcctggtttctagactttctttagcatgggggaacccttagagtaccgccaggcctcggggttggtggcagagcagagagggacatggggtggga

SEQ ID NO: 429294 - DNA, 201 bp, Homo sapiens
caggagcaggttttgatgggaacgtacctccaggcagcccccttccacctggaccgtggccacacttttttggttatttagtttgtcacagtcttggggamatgggatcatttgagcttaaaaaatactgggggccgggcacagtggctcacacctgtaatcctaacactttgggaggctgaggtgggcggatcacttgat

SEQ ID NO: 429295 - DNA, 201 bp, Homo sapiens
cttctgggtatatatccaaaggaactaaaagcagggtctggaagagatatttgcacacccatgttcatattcacgacattattcatgacagcccaaagatrgaagcaaaccaagcatctatcaagatacctgggccgggttcagtggctcacgcctgtaatcccagcactttgggaggctgaggtgggcagatcacctgag

SEQ ID NO: 429296 - DNA, 201 bp, Homo sapiens; identical to SEQ ID NO: 351133

SEQ ID NO: 429297 - DNA, 201 bp, Homo sapiens
cggggagcagctcctgggcagcctgctgcggcagctgcagctcaaagaggtgcccaccctggacagggccgacatggaggagctggtcatccccacccacrtgagggcccagtacgtggccctgctgcagcgcagccacggggaccgctcccgcggaaagaggttcagccagagcttccgaggtgaggccctccctccctg

SEQ ID NO: 429298 - DNA, 201 bp, Homo sapiens
gggcagcctgctgcggcagctgcagctcaaagaggtgcccaccctggacagggccgacatggaggagctggtcatccccacccacgtgagggcccagtacrtggccctgctgcagcgcagccacggggaccgctcccgcggaaagaggttcagccagagcttccgaggtgaggccctccctccctgctgcccctggtccca

SEQ ID NO: 429299 - DNA, 201 bp, Homo sapiens
tagtgtagccatcgagggacttgacttgtgtgtgtttctgaagtgttcgagggtaccaggagagctggcgatgactgaactgctgatggacaaatgctctrtgctctctagtgagccctgaatttgcttcctctgacaagttacctcacctaatttttgcttctcaggaatgagaatctttggccactggagagcccttgc

SEQ ID NO: 429300 - DNA, 201 bp, Homo sapiens
gtcaaactggtaagccggaataaagagacaggcaattacatttattttgaaatggacaacttttcagagtgctgtgggaatgaatgagacaatgtatacarttcttcctctgactcttaggagatcctcagtaaatatcggttattaattttcaagttatttctagctgtccatcctatatcacaaacatccagctttttg

SEQ ID NO: 429301 - DNA, 201 bp, Homo sapiens; identical to SEQ ID NO: 351135

SEQ ID NO: 429302 - DNA, 201 bp, Homo sapiens
ctataaagctgcccaggcttggctctcagcacatccagctgcctgagaccctcctgcagccttctcaagggacagccccactctgcctcttgctcctccarggcagcaccatgcagcccctgtggctctgctgggcactctgggtgttgcccctggccagccccggggccgccctgaccggggagcagctcctgggcagcc

SEQ ID NO: 429303 - DNA, 201 bp, Homo sapiens
tccagccataggcgcctagtgtagccatcgagggacttgacttgtgtgtgtttctgaagtgttcgagggtaccaggagagctggcgatgactgaactgctratggacaaatgctctgtgctctctagtgagccctgaatttgcttcctctgacaagttacctcacctaatttttgcttctcaggaatgagaatctttggcc

SEQ ID NO: 429304 - DNA, 201 bp, Homo sapiens
gctgtgcctcggatggtgcgctcgtgccaaggaggctccagccataggcgcctagtgtagccatcgagggacttgacttgtgtgtgtttctgaagtgttckagggtaccaggagagctggcgatgactgaactgctgatggacaaatgctctgtgctctctagtgagccctgaatttgcttcctctgacaagttacctcac

SEQ ID NO: 429305 - DNA, 201 bp, Homo sapiens; identical to SEQ ID NO: 351055

SEQ ID NO: 429306 - DNA, 201 bp, Homo sapiens
accatgcagcccctgtggctctgctgggcactctgggtgttgcccctggccagccccggggccgccctgaccggggagcagctcctgggcagcctgctgcrgcagctgcagctcaaagaggtgcccaccctggacagggccgacatggaggagctggtcatccccacccacgtgagggcccagtacgtggccctgctgcag

SEQ ID NO: 429307 - DNA, 201 bp, Homo sapiens; identical to SEQ ID NO: 351042

SEQ ID NO: 429308 - DNA, 201 bp, Homo sapiens; identical to SEQ ID NO: 351024

SEQ ID NO: 429309 - DNA, 201 bp, Homo sapiens
tagaagcgtgtttgggtaactgaaaaatactgcacttgagtagacaacctgggttatacctggctgtcaggggtgcagcgggcctgaatcctcctgcagcsggcctgaatcctcctgcagcctctcgcctccctagctcctcagtgcccagagctagacccaatgccaggcacctgggtgaggattctgctcccagcatct

SEQ ID NO: 429310 - DNA, 201 bp, Homo sapiens
agcatgtaaatatttagcacatgttccagaaatctagaaagttatatataaactgaaggcagaggtgctgccaaactatgcaacagtaggataattagtgygtctgtggttctcccccttgaagttaataattctagttacacctggttgtccctcagatgtttgtactacgatggaagatgcaaccccaatattagaaag

SEQ ID NO: 429311 - DNA, 201 bp, Homo sapiens
ttgttacaggacaagagggagaaagttgtctgagaacttttgactgtggccctggactttgctgtgctcgtcatttttggacgaaaatttgtaagccagtycttttggagggacaggtctgctccagaagagggcataaagacactgctcaagctccagaaatcttccagcgttgcgactgtggccctggactactgtgtc

SEQ ID NO: 429312 - DNA, 201 bp, Homo sapiens
gcatattttatttcagaaatgcattttctcctcccagcctcttaaggatagggtgagactgattttattcttctccatcccagaaacacttaggaagcatrtgctgtttgttatctctttctgtaagaagctgtgggggtcacgtagagagtagcctaaggtagtctgcagccagtaacaacgatcaattctgatgggtag

SEQ ID NO: 429313 - DNA, 201 bp, Homo sapiens
ccagtagcaaacccccagcaggccactttccttatttatcactaaagcccacattaaccttgttacaggacaagagggagaaagttgtctgagaacttttkactgtggccctggactttgctgtgctcgtcatttttggacgaaaatttgtaagccagtccttttggagggacaggtctgctccagaagagggcataaaga

SEQ ID NO: 429314 - DNA, 201 bp, Homo sapiens
tgagacctgcgtgctgtgtctgtttttactttgtggctgtcagtcataggtcccattcccttatcccagtagcaaacccccagcaggccactttccttatktatcactaaagcccacattaaccttgttacaggacaagagggagaaagttgtctgagaacttttgactgtggccctggactttgctgtgctcgtcatttt

SEQ ID NO: 429315 - DNA, 201 bp, Homo sapiens
tggtcagactttgctcagccgatttcacgcaccttactcagactaaggtttacttctttcagaaaaagcagtgacaaacagacgacgtgctgagctgccarcttagtggaagctctgctctgggtggagagcagcctcgctttggtgacgcacagtgctgggaccctccaggagccccgggattgaaggatggtggcggcc

SEQ ID NO: 429316 - DNA, 201 bp, Homo sapiens
ggaaatccaggctctgaggagggcgagacttgcccaaggtcacccagcaacatggtcagtctcctttcccagggccctcacaatgcgtggcctgtttaaarcctgcctctattcactgctgagtgaaaaatccagctccaaaacagaatatggggaaggatactatcttgtgcagcttatgtttatagctgcagatacatg

SEQ ID NO: 429317 - DNA, 201 bp, Homo sapiens
ccagagccaggaggatgggcttcctggagaagcaggcactcctgtgggctggagagcatgagcaggggtccccttggggaggtggaagaggctgcggtcaktgaaggccataatgaggcagagcttgggcaaaaaaggcatgatgatcaggggatctgaaacccaacagagactggactgaggacactgtggccacctcct

SEQ ID NO: 429318 - DNA, 201 bp, Homo sapiens
gccacgtctccttcgagctgcttgcagacaagtttccaaagacagcagaaaactttcatgctctgagcactggagagaaaggatttggtaataagggttcytgctttcacagaattatcagagtttatgtgtcagggtggtgacttcacatgccataatggcactggtggcaagtccatctatggggagaaatttgatgat

SEQ ID NO: 429319 - DNA, 201 bp, Homo sapiens
ttatccaatttgtagctagacagattacctaaaatcacttaataaactaagtcatctaatctattttttggatctgatgatctgtcctgtttcatttatgrtaggtagaataatcccccccaaccccaccaagaaatctggatcctaatccctgaacctatgactgggtggggcagcatggcaaagggaaattaaggttgc

SEQ ID NO: 429320 - DNA, 201 bp, Homo sapiens
gctgtgggtccccactttttgcatggattatggggattctccaatactgatctcctcagtgctgggtccccaacatggctgggcaggatgtgggtcagctrccttctggaagccacccagggtaccttgtgatatcatcatgttctgtgtacacttggctgtgaggagggccaggaagcgctgcctggggccctgcgggat

SEQ ID NO: 429321 - DNA, 201 bp, Homo sapiens
ttttgtatttttaatagagacggggtttcaccatgttggccaggctggtctcgaactcctgaacttaggtgatccccgccggcgcgcccccccccccccccgccatcccagcctcccaaagtgctgggattacaggtgggaactaccgagcctggacgagatcagtttttttttgtttgtttgttttgttttttgagatgg

SEQ ID NO: 429322 - DNA, 201 bp, Homo sapiens
ggagggtgagagggacaaaagtttgccacaaagtttggaccaaccaaacacattggtttctttacaaaataaaaaaccagttgtatttttcttctctcccwttcaagagcagtggtatctcttgccttctccatccctttgagctccatttttttcttaatcctaaccttttttccccatcccaaattgcttatagagtta

SEQ ID NO: 429323 - DNA, 201 bp, Homo sapiens
cagtggcctggttggatgcttgccatgataacgggacactgggctttctgcgctaagggtctaaacatggctcttggcctctgtgagtttcccctgagtcrctggaagaggcaaacttgaggaagctgggccccttttgtttctcctgtgactgggtcttcagctcgcatctgccaggcaccttttggtctgaggatgtgc

SEQ ID NO: 429324 - DNA, 201 bp, Homo sapiens
tttttgtatttttaatagagacggggtttcaccatgttggccaggctggtctcgaactcctgaacttaggtgatccccgccggcgcgcccccccccccccccgccatcccagcctcccaaagtgctgggattacaggtgggaactaccgagcctggacgagatcagtttttttttgtttgtttgttttgttttttgagatg

SEQ ID NO: 429325 - DNA, 201 bp, Homo sapiens
atttttgtatttttaatagagacggggtttcaccatgttggccaggctggtctcgaactcctgaacttaggtgatccccgccggcgcgcccccccccccccccgccatcccagcctcccaaagtgctgggattacaggtgggaactaccgagcctggacgagatcagtttttttttgtttgtttgttttgttttttgagat

SEQ ID NO: 429326 - DNA, 201 bp, Homo sapiens
agatcatttgcacataaagctttttggaaagcataagtaaccaggttaataaatacagtaacaatgagagagaagacagcaggccctcagtcatggctccmccattttatagctctagagccttgggcgaggcatggaatgtcatggccgcagcgtccccttctttaggatgaggggtttggacctccgagtgctctctag

SEQ ID NO: 429327 - DNA, 201 bp, Homo sapiens
aatttttgtatttttaatagagacggggtttcaccatgttggccaggctggtctcgaactcctgaacttaggtgatccccgccggcgcgcccccccccccccccgccatcccagcctcccaaagtgctgggattacaggtgggaactaccgagcctggacgagatcagtttttttttgtttgtttgttttgttttttgaga

SEQ ID NO: 429328 - DNA, 201 bp, Homo sapiens
taatttttgtatttttaatagagacggggtttcaccatgttggccaggctggtctcgaactcctgaacttaggtgatccccgccggcgcgcccccccccccccccgccatcccagcctcccaaagtgctgggattacaggtgggaactaccgagcctggacgagatcagtttttttttgtttgtttgttttgttttttgag

SEQ ID NO: 429329 - DNA, 201 bp, Homo sapiens
aagacagagagtaaaatagaatgtaatacgtttgtaaataaagagtgtgttcagacagtaagtgtggctggaaacgttaaacacttcatggatgcttcctrcttgctggctgaagatgatgctcttgctgaacagtggggaaagctgtggaacttcttcattatcagttagaaaagagagggttggatccacaagattcat

SEQ ID NO: 429330 - DNA, 201 bp, Homo sapiens
tttgaaacaaaattgagcaaaaaagttgttgcagattgaggcaagtttaaatggattacattgttagttgctcaagttgcaggaatctgataaggaaaatratgtttgccttcctacctccacccctagcctctgggactagcgcttcttggaagtcgactttttgttttccatttgctttaagagcctcgcctctcgact

SEQ ID NO: 429331 - DNA, 201 bp, Homo sapiens
tgcccacctggggctggtgtgtgtgtgagtcagaggcgcttccgagaacaccagggaaggggtaagggcgtgctgcacactctgctgggattactccaatracaaggaaaactcatcacaggtctgggcgtggggaaggactgggcaagttccaaaacaaatgcttcctccctgggcatgttagggccacgttaggccttt

SEQ ID NO: 429332 - DNA, 201 bp, Homo sapiens
ctgagcatgccttgggagcgtgattgacacatcctcctgtaagaagagaggaacgggagaaaacaggatgacgaggtagagaggatctgaagaggagaggraggtgcaggtatgcgcaggtgatagcctgatgtgccatctacatccattgagcatttactgaatgctaactatatgcccagcaagacacacaggtgagaa

SEQ ID NO: 429333 - DNA, 201 bp, Homo sapiens
atcttgtttttctctttgacaacagtaaaatcacctatgagactcagatctccccacggccccaacctgaaagtgtcagctgtatccgtaagaatttgttwtgttttgtttttctaaataatccgttataatatgtgggacaaggcagggaagggagactggactaaggaagggggagccacgtaaaggaaattaatatcg

SEQ ID NO: 429334 - DNA, 201 bp, Homo sapiens
agggaaatggagcaggctgtggagctctgtgggcgggtaggagactcattttgggtttcggaacttaccaagggggtgagattttgtgctcccacttttcrctttctcatcaaacactgggtcgatctctgtcaaaaatcaggtgttcctcaccatgctttgagcttaactggaccagctgaaaagaggccaagagagtag

SEQ ID NO: 429335 - DNA, 201 bp, Homo sapiens
gtgaatgcaaaatgtgattcatcacttggctcctaatttcttttgattttgtcccctagagcaaggtccgtggtcctgtcagtggaagcccggatagcatraatgcctctcgacttagccagcctgggcagctgatgtctcagccctccacggcctccaacagcttacctgagccagccaagaagaggtaggtcctcctta

SEQ ID NO: 429336 - DNA, 201 bp, Homo sapiens
gggcagctgatgtctcagccctccacggcctccaacagcttacctgagccagccaagaagaggtaggtcctccttagcagtgccaagtgtgaccatcaagrgcacgtcaggagatcggggatggaggcgtttgtcactggtaaatgtctgtctgatggtattaccacctctctggatgtttgttgcatctgctgggtcctg

SEQ ID NO: 429337 - DNA, 201 bp, Homo sapiens
tgcttctgacttttattgagatctgtttgcttttttgcattttggacagtaacgctcatatgtggaaagtgcataacaagatgaatgaaagtattagtcartgggttggtgttttaagacactcaggatcaaaataattgttacttcatttaaaaagtattatcaaaactctctagcatattttaaaacagcagtgttagc

SEQ ID NO: 429338 - DNA, 201 bp, Homo sapiens
aagtattagtcaatgggttggtgttttaagacactcaggatcaaaataattgttacttcatttaaaaagtattatcaaaactctctagcatattttaaaayagcagtgttagctctgataactaataatgaccactttctaataatttgatcattttctttagtgaagaactggtggctgaagcacataacctctgcaccc

SEQ ID NO: 429339 - DNA, 201 bp, Homo sapiens
gccctggagcttcggtgtgtgtgtcaagggcaccctcagtggctgtgcgggaccattctctagagcatgcttccctgtggggtcacttccagcaaatcatyactgagcttcagtttccaaatctgttcagtgacaagaaaaacagtcttaagtcacgaagttgtaaggatgaattcagataatgcatttgagacgcaggcc

SEQ ID NO: 429340 - DNA, 201 bp, Homo sapiens
ttagtcaatgggttggtgttttaagacactcaggatcaaaataattgttacttcatttaaaaagtattatcaaaactctctagcatattttaaaacagcartgttagctctgataactaataatgaccactttctaataatttgatcattttctttagtgaagaactggtggctgaagcacataacctctgcaccctgcta

SEQ ID NO: 429341 - DNA, 201 bp, Homo sapiens
attgtaaagaaacacgtgacctcggcgatgctcagaagtaggttctgcccctgccacctcgggcagaaggcgggcaggcccgggcgcccctggtggagtcwgctggggatcccctcgctagggcaagggcgtgggcatcgcctccctcggtgactttcttccttgcctgatgccacagcaaccggatgggggagggtgaga

SEQ ID NO: 429342 - DNA, 201 bp, Homo sapiens
cctgtaatcctagcactttggaaggccaaggcgggcagatcacgaggtcaggagactgagaccatcctggctaacatggtgaaaccccgtctctactaaaratacaaaaaattagccgggcatgggtgggcgcctgtagtcccagctacagagaacaccagggaagggggaagggcatgctgcacactctgctgggattac

SEQ ID NO: 429343 - DNA, 201 bp, Homo sapiens
gcaagggcgtgggcatcgcctccctcggtgactttcttccttgcctgatgccacagcaaccggatgggggagggtgagagggacaaaagtttgccacaaartttggaccaaccaaacacattggtttctttacaaaataaaaaaccagttgtatttttcttctctcccattcaagagcagtggtatctcttgccttctcca

SEQ ID NO: 429344 - DNA, 201 bp, Homo sapiens
gccacaaagtttggaccaaccaaacacattggtttctttacaaaataaaaaaccagttgtatttttcttctctcccattcaagagcagtggtatctcttgycttctccatccctttgagctccatttttttcttaatcctaaccttttttccccatcccaaattgcttatagagttagcacgacatcagtatgagctggtc

SEQ ID NO: 429345 - DNA, 201 bp, Homo sapiens
tacaaaataaaaaaccagttgtatttttcttctctcccattcaagagcagtggtatctcttgccttctccatccctttgagctccatttttttcttaatcytaaccttttttccccatcccaaattgcttatagagttagcacgacatcagtatgagctggtcaccttccctgacaacgcagacatgtggggcctgggaaa

SEQ ID NO: 429346 - DNA, 201 bp, Homo sapiens
ccacacctggctaatttttgtatttttaatagagacggggtttcaccatgttggccaggctggtctcgaactcctgaacttaggtgatccccgccggcgcgcccccccccccccccgccatcccagcctcccaaagtgctgggattacaggtgggaactaccgagcctggacgagatcagtttttttttgtttgtttgttt

SEQ ID NO: 429347 - DNA, 201 bp, Homo sapiens
ttcaagagcagtggtatctcttgccttctccatccctttgagctccatttttttcttaatcctaaccttttttccccatcccaaattgcttatagagttarcacgacatcagtatgagctggtcaccttccctgacaacgcagacatgtggggcctgggaaatgaaagagcgccttgggacagggggatttggaaatgtca

SEQ ID NO: 429348 - DNA, 201 bp, Homo sapiens
ttgaggaagtcgcgccgcgctgcccgcgttaagattcccgcattttaatgttttcaggggggtgtcatagccccgggtttggccgccccagccccgccttycccgccccggggagcccgccccctgccccgcgtccctgccgacaggtgagtccccctcgtgggtgcggcccgggtgccacctgcaggccccgccgccccg

SEQ ID NO: 429349 - DNA, 201 bp, Homo sapiens
acctgcctctccatcattcctccccttggctgcctctgttttgagcgctgagccctcttgccggacaggcctccccctcctccacattcctccaggaccamctctaggccatctcctcctcatatgcgtctgggatggctttgttctgtggcaactggttctcccggtgagttcctctgggctggttcctgtgccgccctt

SEQ ID NO: 429350 - DNA, 201 bp, Homo sapiens
gcatccggacctggtctgcctcgcgccgggagcggcctctttaagagcggccgcggccaacgtgctccgtgacgtcagagcaggaagtgtttgaggaagtsgcgccgcgctgcccgcgttaagattcccgcattttaatgttttcaggggggtgtcatagccccgggtttggccgccccagccccgccttccccgccccgg

SEQ ID NO: 429351 - DNA, 201 bp, Homo sapiens
ttttgttttgttttgtttttccttctcaattttttttcagcatcagataaactgctgctggcctggagggaaatggagcaggctgtggagctctgtgggcrggtaggagactcattttgggtttcggaacttaccaagggggtgagattttgtgctcccacttttcactttctcatcaaacactgggtcgatctctgtcaa

SEQ ID NO: 429352 - DNA, 201 bp, Homo sapiens
tggtatctcttgccttctccatccctttgagctccatttttttcttaatcctaaccttttttccccatcccaaattgcttatagagttagcacgacatcaktatgagctggtcaccttccctgacaacgcagacatgtggggcctgggaaatgaaagagcgccttgggacagggggatttggaaatgtcatccgatggcac

SEQ ID NO: 429353 - DNA, 201 bp, Homo sapiens
cctctgcctcccaaagtgctgggactataggcatgagccaccatacccagccaataaaggggtttcaatatatttctttttattttttattttttgagatrgagtcttgctcttttgcccagggtggagtgcaatggcacgatctcagctcactgcaacccctacctcccaggttcaagtgattctcctgcctcagcctcc

SEQ ID NO: 429354 - DNA, 201 bp, Homo sapiens
gggaggccaaggcaggaggttcgcaggagttcgaggcaagtctcctgggcaacatggtgagactgtctctctctctctcttttttttttttttttttttttgagacagactcttgctctgttgcccaggctggagtgcagtggcgcgatcttggctcactgcaacctccacctctcaggttcaagtgattcttctgcctca

SEQ ID NO: 429355 - DNA, 201 bp, Homo sapiens
ggaagattgcaaccggctgcagcagggacagcgagccgccatgtagcgtgccaggctttttttttaaacttaatttatttaaaattccttggtggctttgsccacagggaggtggttgaggcagggacccagaagcaaccgttatgagcaacaaaaggaagacactggtttggatggacgggaagcggttgggtgggctgg

SEQ ID NO: 429356 - DNA, 201 bp, Homo sapiens
ggagctgtgattcatcaataagacccacaggattgtcagcgttcttcagttatgtgtttgtgccttcctcatgagccagggaaaggctggggttaccaccrgggcacggcttctgaggagggtgagagaaggaggctgttatcttcctatggcaagtctgccatgtggacccattctgtggaaatgtactgtgtcatttat

SEQ ID NO: 429357 - DNA, 201 bp, Homo sapiens
ccagatgcaagagctgcatgaatggacagagatggtccaggtttaaataagaagcaagggttaggttcccttggggaaaagccaagaccatttcctgttargaagggcattggattgatgatcaacactccctcttgtcgaaggtttttgactaattttgttgggatgctaaatccataggaaataaaaggtctaggcaga

SEQ ID NO: 429358 - DNA, 201 bp, Homo sapiens
catcagtctttctgcataagtaaagaaaggacagttgtgctaattgacattggctatgaggtcatagccacagacaggattatgaaagatgcaaatatgcraaacatggcacatgacctccctccctcaagctaggcccttgctttgtgtggttgggaaatgttgggagtagcagagagaggacctaggcaaatagatggg

SEQ ID NO: 429359 - DNA, 201 bp, Homo sapiens
tgaacccgggaggcaaaggttgcagtgagctgagatcgtgccactgtactgcagcctgggagacagagtgagactccatctcaaaaaaaaaaaaaaagaaraaagaaattcaagtctgaagtgacatctgataacttttaaacaggctatcaggatatcgtcctgtgactaagaaattaacatagtccttcttaatcttaa

SEQ ID NO: 429360 - DNA, 201 bp, Homo sapiens
aaggcaggggattaagggcttgggcttgagtttcagattgacctggcgccgcattccagcactgccctctcacagctgtgtgagctgacaggtatccgacygtgtaacctcagtttcctcctccaacacggggattccacccgtacttactcagtggtggtggttagtattaaatgaggtcacgcagggaaggctttgctg

SEQ ID NO: 429361 - DNA, 201 bp, Homo sapiens
catttcagtcccagaaactatgtgtaacaatacctgttggattctttaaatctggactttattaagttgacagaggtattgaagaatagatgaccaccccraaatgaggaataaagtttgttttgtacagttgtttaagcataaaaatagacagatattaatagtagtcagagtattcagttaccaacctcttgtccctcc

SEQ ID NO: 429362 - DNA, 201 bp, Homo sapiens
ccttgtgcctcttaaaaaaaaatttttttttccactttggaaagctgagacaggagaatagcttgaggccaggagtttgagaccagcctgggcaacatacmaaggccctgtctcctcaaaaaataaaaaatgaaaaattagccagatgtggtggtgtgcgcttgtggtccctactactttggaggctggggtgggaggatg

SEQ ID NO: 429363 - DNA, 201 bp, Homo sapiens
tggagatagggtctcaatctgtcatccaggctgagtgcagtggtgccatcatggctcactgtagccttgacctcctgggctcaaatgatccttctgcctcrgcctcctgagtagctgggactacaggtgtgcgttgccatgcccggctaatttttgattttttgtagataggaggtctgtctgttgcccaggctggtctcg

SEQ ID NO: 429364 - DNA, 201 bp, Homo sapiens
tgtcagtggtgctcagatttgagaactgagggcatttactgagaagaggctggcccggtccttcctgtttcaagtctgggtttagctgtcttgagggctgstgcctgttctgttcattcagcttccctctgatgatgcgtggcagagtgtgggaggacacgtgcctagcatttttacaatatgccttttcttttagccctg

SEQ ID NO: 429365 - DNA, 201 bp, Homo sapiens
tagagatgaggtctttctatgttgcccaggctggtctggaactcctgggctcaagcagtcctcctgccttggcctcccaaagtgctgggatttcaggcatragccactgtgcttggttgaaaaacacttctttggaggacaaaacacttataagtcttccttgttagacagagaaccccacattgagtgtttcccagggag

SEQ ID NO: 429366 - DNA, 201 bp, Homo sapiens
gagaatcaaactttactcacctcagaggccccttgctgtgaggatgtgagagccctggggtggtcaggactgcttcctctttctcctcctcctcctcctcyggccaatccctgctagttctgcagccctggcttcctcaaaagcaggtcccctaaagaccagggcccagggtcagcactctggtcacatgggctggtaaga

SEQ ID NO: 429367 - DNA, 201 bp, Homo sapiens
cctctgtgagtttcccctgagtcgctggaagaggcaaacttgaggaagctgggccccttttgtttctcctgtgactgggtcttcagctcgcatctgccagrcaccttttggtctgaggatgtgctccccctctgccttttttacaccttatgacacacatgcttatatataagttttatgtttacatgcatcaaaggcaag

SEQ ID NO: 429368 - DNA, 201 bp, Homo sapiens
aggctggcccggtccttcctgtttcaagtctgggtttagctgtcttgagggctggtgcctgttctgttcattcagcttccctctgatgatgcgtggcagastgtgggaggacacgtgcctagcatttttacaatatgccttttcttttagccctgaatctaccgtgtcgagggcattcttttgtgtatctggtggctctta

SEQ ID NO: 429369 - DNA, 201 bp, Homo sapiens
tagctgtcttgagggctggtgcctgttctgttcattcagcttccctctgatgatgcgtggcagagtgtgggaggacacgtgcctagcatttttacaatatrccttttcttttagccctgaatctaccgtgtcgagggcattcttttgtgtatctggtggctcttaggagtttgggatctaatagtacctgggaattcagaa

SEQ ID NO: 429370 - DNA, 201 bp, Homo sapiens
ttcagaaatacctctgctctaacaccaggcagtcagaatcctcgtagaaggacattgtgttcttataaccctcagctttctccttccttttgttttagttratacacaaaattattgacctaggatatgccaaggagctggatcagggcagtctttgcacatcattcgtggggaccctgcagtacctggtaagaagtgggc

SEQ ID NO: 429371 - DNA, 201 bp, Homo sapiens
tgacatcccagtcaacaattgactgcatagatgacagtggtctcatgagattataatactgtatttttactgtaccttttctgggtttagatatgtttagrtacaccaatacttaccattgtgttaccctggcctacagtattcagtaccggagcatgctgtacaggtttgtagcctaggagcaatagggtgtacgataca

SEQ ID NO: 429372 - DNA, 201 bp, Homo sapiens
gaacggacatcctgttgcctttctcactcagtgatgacttggattaccagccagttgacaaccaaccatctttgtacccttctaacctctatctcagcctyttggaccatttctctttccacctgttctctatggaatgtagctcaaacaaaaatgttctgaagggaacttagtcatccctctaaacttgtgatagataga

SEQ ID NO: 429373 - DNA, 201 bp, Homo sapiens
tctgcagccctggcttcctcaaaagcaggtcccctaaagaccagggcccagggtcagcactctggtcacatgggctggtaagagacatgtgtggatttccrgtggtttgtgaccaccagctctgatgctgcttttcactttcttgacagtacctgaaccagtttgagaactgctgtggtctgcgggaaggtgccatcctca

SEQ ID NO: 429374 - DNA, 201 bp, Homo sapiens
cactcctgtcagtggtgctcagatttgagaactgagggcatttactgagaagaggctggcccggtccttcctgtttcaagtctgggtttagctgtcttgarggctggtgcctgttctgttcattcagcttccctctgatgatgcgtggcagagtgtgggaggacacgtgcctagcatttttacaatatgccttttctttta

SEQ ID NO: 429375 - DNA, 201 bp, Homo sapiens
acagttttatgctttgtggtgtggcttttaatttttataaacatgtcttactgctattgccagggatttagatttttaataaacttccagatacaacagtrtttttcttcatctcaatgtctcatttttcatcaaatttaaacaaagttagattctctgggcttgaaacaattttgattcatttcactttagctctgaagt

SEQ ID NO: 429376 - DNA, 201 bp, Homo sapiens
ccctgaggtattgcgctacaagtcagagtatgtttcaggggcatgcggcatttatcttttgcaggataggagattctgtcatgaaaagcattttttaggcytaagaaaaactcacccccctcttcctcagcctctgcgcttagataccttcatgaaaacagaatcatccatcgggatctaaagccagaaaacatcgtcctg

SEQ ID NO: 429377 - DNA, 201 bp, Homo sapiens
tgattggaaatgtttatactgtttctgataaacccattttcattttcaatcaccgtctactggctgccgtctgtgtgtatactgggagacgcacactgtakcccaacattggctggaagtgtctcctcacacactatgctcctctccacagtgtcctggctgagcgactggagaagtggctgcaactgatgctgatgtggc

SEQ ID NO: 429378 - DNA, 201 bp, Homo sapiens
ttacagacggaagaagaagagcacagctgcctggagcaggcctcatgatgtggggggactcgaccccctgacatggggcagcccatagcaggccttgtgcrgtggggggactcgaccccctgacatggggctgcctggagcaggccgcgtgacgtggggctgcctggccgcggctctcacatggtggttcctgctgcactg

SEQ ID NO: 429379 - DNA, 201 bp, Homo sapiens
ttataggcatgagccactgtgcctggctgggttttagtatatttctcaattgtcctgatttcctcctgaagaggaaaaataacctgaaatgtgttggtggstgttgtttttttaacatgtctgttgactttcaggccctagactggagctggttacagacggaagaagaagagcacagctgcctggagcaggcctcatgat

SEQ ID NO: 429380 - DNA, 201 bp, Homo sapiens
ctgcactgatggcccaggggtctctggtatccagatggagctctcgcttcctcagcagctgtgactttcacccaggacccaggacgcagccctccgtgggyactgccggcgccttgtctgcacactggaggtcctccattacagaggcccagcgcacatcgctggccccacaaacgttcaggggtacagccatggcagctc

SEQ ID NO: 429381 - DNA, 201 bp, Homo sapiens
catggggcagcccatagcaggccttgtgcggtggggggactcgaccccctgacatggggctgcctggagcaggccgcgtgacgtggggctgcctggccgcrgctctcacatggtggttcctgctgcactgatggcccaggggtctctggtatccagatggagctctcgcttcctcagcagctgtgactttcacccaggacc

SEQ ID NO: 429382 - DNA, 201 bp, Homo sapiens
ctgcagtacctggtaagaagtgggccttgcctgtttgcctgtcagctcctccctgctgctgcatttgtggggctcctgtcctgccttgctcccagcacctsagtcccaccggctctctgaatgttttggagatgcatgaggtcacacccataacctggtcgagtcagcattttttgccaccagatgccctgtggagggatg

SEQ ID NO: 429383 - DNA, 201 bp, Homo sapiens
tacctggtacagttttatgctttgtggtgtggcttttaatttttataaacatgtcttactgctattgccagggatttagatttttaataaacttccagathcaacagtatttttcttcatctcaatgtctcatttttcatcaaatttaaacaaagttagattctctgggcttgaaacaattttgattcatttcactttagc

SEQ ID NO: 429384 - DNA, 201 bp, Homo sapiens
cggagggctctgctcatgcgccttgcaccatcccctagcctctctgtgcttcagtgtcttctctgaaaggaaagggttttaaacagatccatgctggtctygagcggtcctcccacctcagcctcctgagcagctaggactacaggcaggagccactgagcctggccgaggccacactttccatgaggtatttcaggggcc

SEQ ID NO: 429385 - DNA, 201 bp, Homo sapiens
gaggctcccacggctgccaggtgcacagcctgtctgggcaggtgggacaccaggaagagggatggggagacctttcacttctgtcatcatcaggaagcttrgggagccccagtgactccagcagggctgctttgcctctcagatcctctgttccctgcccacctggggctggtgtgtgtgtgagtcagaggcgcttccgag

SEQ ID NO: 429386 - DNA, 201 bp, Homo sapiens; identical to SEQ ID NO: 138785

SEQ ID NO: 429387 - DNA, 201 bp, Homo sapiens; identical to SEQ ID NO: 427892

SEQ ID NO: 429388 - DNA, 201 bp, Homo sapiens; identical to SEQ ID NO: 427908

SEQ ID NO: 429389 - DNA, 201 bp, Homo sapiens; identical to SEQ ID NO: 427937

SEQ ID NO: 429390 - DNA, 201 bp, Homo sapiens; identical to SEQ ID NO: 427909

SEQ ID NO: 429391 - DNA, 201 bp, Homo sapiens; identical to SEQ ID NO: 427940

SEQ ID NO: 429392 - DNA, 201 bp, Homo sapiens; identical to SEQ ID NO: 427895

SEQ ID NO: 429393 - DNA, 201 bp, Homo sapiens; identical to SEQ ID NO: 427903

SEQ ID NO: 429394 - DNA, 201 bp, Homo sapiens; identical to SEQ ID NO: 427949

SEQ ID NO: 429395 - DNA, 201 bp, Homo sapiens; identical to SEQ ID NO: 427924

SEQ ID NO: 429396 - DNA, 201 bp, Homo sapiens; identical to SEQ ID NO: 427925

SEQ ID NO: 429397 - DNA, 201 bp, Homo sapiens; identical to SEQ ID NO: 427927

SEQ ID NO: 429398 - DNA, 201 bp, Homo sapiens; identical to SEQ ID NO: 427897

SEQ ID NO: 429399 - DNA, 201 bp, Homo sapiens; identical to SEQ ID NO: 427898

SEQ ID NO: 429400 - DNA, 201 bp, Homo sapiens; identical to SEQ ID NO: 427928

SEQ ID NO: 429401 - DNA, 201 bp, Homo sapiens; identical to SEQ ID NO: 427958

SEQ ID NO: 429402 - DNA, 201 bp, Homo sapiens
agccgagatggcgccactgcactccagcctgggcaacaaaagcgagactccatctcaaaaaaacaaacaaatagacaaacaaacctaggaatacaactaascagggagatgaaagagctctacaatgagaattacaaaataccgctcaaataaatcaaagaagatataaacaagtggaaaaacatctcatgctcatgaata

SEQ ID NO: 429403 - DNA, 201 bp, Homo sapiens
cctgagaggtggaggctgcattgagccaagatcgtgccactgcctcaaaaaaaagaggtctataaaataacacacacttggcagcactgagtgcagaaaartacaatgcaatcatctcattaaatgcttaacagctttgacagctgaactgaacggtaaaaatgaggttttgtggatctgaagtctcacctcttagatccc

SEQ ID NO: 429404 - DNA, 201 bp, Homo sapiens
ccttggtggcctgggaggccagggagcccatagcatttcgaatggcttcattgttgggatccacacctgggaggttctctaggacactctgaaggaactckgggtcctgcatcacgtcgtaatcatcctcctcctgcaaacaggcagtgtgagctcaagggagggtatggagcggcaggaagtaagcaggtgttaaggaca

SEQ ID NO: 429405 - DNA, 201 bp, Homo sapiens
aagtaaggacttgggagaagcctcggttttcatcagaagtgaacaagaaagcatctgacactggtgcccctagagatcagacagcattatagggaagaggyggcaaaaggaggtcttggaaaatgagtgattggtagtgtctaggactatccagcctgatagaagctctgtgatgtgtgtgccagaagagaacaaagaggg

SEQ ID NO: 429406 - DNA, 201 bp, Homo sapiens
cttgtcttcctccttcttgtccttcttgccgtccttggtggcctgggaggccagggagcccatagcatttcgaatggcttcattgttgggatccacacctsggaggttctctaggacactctgaaggaactcggggtcctgcatcacgtcgtaatcatcctcctcctgcaaacaggcagtgtgagctcaagggagggtatg

SEQ ID NO: 429407 - DNA, 201 bp, Homo sapiens
ttacagataacacacatctaaccctatattccgtgcttcccatgcagtcccctaagcagactcagctaccctttccctccagtctcacttcttgtcttccyccttcttgtccttcttgccgtccttggtggcctgggaggccagggagcccatagcatttcgaatggcttcattgttgggatccacacctgggaggttctc

SEQ ID NO: 429408 - DNA, 201 bp, Homo sapiens
ctcacttcttgtcttcctccttcttgtccttcttgccgtccttggtggcctgggaggccagggagcccatagcatttcgaatggcttcattgttgggatcyacacctgggaggttctctaggacactctgaaggaactcggggtcctgcatcacgtcgtaatcatcctcctcctgcaaacaggcagtgtgagctcaaggga

SEQ ID NO: 429409 - DNA, 201 bp, Homo sapiens
aagtgaacaagaaagcatctgacactggtgcccctagagatcagacagcattatagggaagaggcggcaaaaggaggtcttggaaaatgagtgattggtastgtctaggactatccagcctgatagaagctctgtgatgtgtgtgccagaagagaacaaagagggacctttggactctacctggggtcaacatttgctcac

SEQ ID NO: 429410 - DNA, 201 bp, Homo sapiens
ttttaaattttttttgtagagacagggatctagctatgttgcccaagctggtcttgaacttctgagctcaagagatcctcctgcctccacctccccaagtkctgggataacaggtgtgagccacctggtgcccagccgaaaaaatttttaaatccttacaaaatgattctgatgagcaccaaaggtggtgatctactgatg

SEQ ID NO: 429411 - DNA, 201 bp, Homo sapiens
tcacgtcgtaatcatcctcctcctgcaaacaggcagtgtgagctcaagggagggtatggagcggcaggaagtaagcaggtgttaaggacaggagcatgccrctgccagaggccccctgccttctgactgtgtggggatctgggcacctctggtcgacgtaaggaaaggacaagtcagcaaaatcctttatacagcatgaat

SEQ ID NO: 429412 - DNA, 201 bp, Homo sapiens
agaataaccaatgaggaatttttttttttttttttttgagatagggtcttgctctgtcactcaggctggagtagagtggtgcactaatggctcactgcagyttccacctcctgggctcaagtgatcctctcacctcagcctcccaagtagctgggactataggtgcaagccaccacgcagctaccttttaaattttttttg

SEQ ID NO: 429413 - DNA, 201 bp, Homo sapiens
gaggaatttttttttttttttttttgagatagggtcttgctctgtcactcaggctggagtagagtggtgcactaatggctcactgcagcttccacctcctrggctcaagtgatcctctcacctcagcctcccaagtagctgggactataggtgcaagccaccacgcagctaccttttaaattttttttgtagagacaggga

SEQ ID NO: 429414 - DNA, 201 bp, Homo sapiens
aacccgggactatccgccactccagggccccgggatgactcagggagtccagcgggctccttacctccggggccagggccgcctctcgcccatgagccccyggcccccaccccaggccctccctgccttggcgctacacgcgcccggaacccagctctgcccctcctgccccgaagtagctcctcaccacaccatagtgct

SEQ ID NO: 429415 - DNA, 201 bp, Homo sapiens
ctcctcccctctctcacactcaaaaccatcaatatttgaagcaaaaaaggaaaaaaagttgccaagctttatttaggctgtaatggttacagataacacayatctaaccctatattccgtgcttcccatgcagtcccctaagcagactcagctaccctttccctccagtctcacttcttgtcttcctccttcttgtccttc

SEQ ID NO: 429416 - DNA, 201 bp, Homo sapiens
agttagccgggcgtggtggcaggcacctgtaatcccagctattcgggtggctgaggcaggagaatcacctgaacctgagaggtggaggctgcattgagccragatcgtgccactgcctcaaaaaaaagaggtctataaaataacacacacttggcagcactgagtgcagaaaagtacaatgcaatcatctcattaaatgct

SEQ ID NO: 429417 - DNA, 201 bp, Homo sapiens
tggagtagagtggtgcactaatggctcactgcagcttccacctcctgggctcaagtgatcctctcacctcagcctcccaagtagctgggactataggtgcragccaccacgcagctaccttttaaattttttttgtagagacagggatctagctatgttgcccaagctggtcttgaacttctgagctcaagagatcctcct

SEQ ID NO: 429418 - DNA, 201 bp, Homo sapiens
agctatggtagaaatactcccagccccagagggatgaggatctaaattcaaggactttaaacctgatgggggcagggttgggtctcaccttggctggctcrgatgtgtccatagctgagctggcatcaatgtctgctgattccgcctggccaaactctgaggaagagaggtcagtctgttcagttacacttcctcacccca

SEQ ID NO: 429419 - DNA, 201 bp, Homo sapiens
cttcaccagccaaaatcggagaactgatgagagcatcagccaaactgggcccaggaggcactgtcaccagatgagaaccggttccatctttgccattcaaygtgtttacaaaggctgtcagcttttctgtgttcacctcctggggaggaaagaacacatgatgcccttcttcaggccttgctccctgttctttcccatttc

SEQ ID NO: 429420 - DNA, 201 bp, Homo sapiens
cctctcaaagtgctgggattacaggtgtgagccacggcacctagccaagacatctcatttctattggcaagcaaaatgtgagcctggggcaatttttttttctttagtatgctttgtttggcaataaaccaaaaatggtaaagagaagtaattaagaaggtactggaaaacaagtattaacagaaaagggaatatataggt

SEQ ID NO: 429421 - DNA, 201 bp, Homo sapiens
aggactcaacacattaaaaatttttttttactttttttttttcaaagagacaggatgttgcccaggctggtcttgaactactcggctcaagcaatccaccyaccttaacctcccaaagtgctgagattacaggtgtcagcctgtaatctcatcacttttaaaacaaatattttcacccctccacttttaccatgatatact

SEQ ID NO: 429422 - DNA, 201 bp, Homo sapiens
tgaagtgcgagatcacttgaacccaggaggtcgaggctgcagtgagctgtaatcacaccactgcactccagcctgggcaacagagtgagaccccatctcamaaataaaattaaaaaacccaaaatagtccaggcacagtggctcacgactgtaatcccagcactttgggaggctgaggcgggcagatcacttgaggtcagg

SEQ ID NO: 429423 - DNA, 201 bp, Homo sapiens
tatacttcgacatttatctgaatatcccccaaataattgatagcataattatttaagattccatcagggatgatcccgcaacaacattcaagtgcttgccraattatgtcttgcacattgcatttctccatttcctttttctcagtgaaggtactgcctttgcttgagtttttgtttgtttgtttgttgtttttttttttg

SEQ ID NO: 429424 - DNA, 201 bp, Homo sapiens
accgatcaagggtcctcgccacccagatgcacacaatagctcttctgaaattcacttttccctagtactcagtctcagccttcctgtctctcatgcagagrgatcgtcagaaatgcagcccctcaactcctcccacctcggaggatccttatgtctttatgcagactttcttccctcttctgcctaagaaaggtcgagaat

SEQ ID NO: 429425 - DNA, 201 bp, Homo sapiens
gaaagccaagccaatccatacgctacgctctgcacagcgtacagaggaaactgaacctaaaacccttgcagaccagcagagctgtgccacgtgtaaggatrtggtcagggcagcggcacgcaggcccaacctggggctctgagtctccttgctctaagcctgccaggctcttccctgtcttcttgctcagccaattaatac

SEQ ID NO: 429426 - DNA, 201 bp, Homo sapiens
tctacaaatgttaagaaatgtacagagaaacattgcaattcatagtatttatctggaataccagctgacctatgtattcaggccaaatgctgagtttgaartgagaatcagtgcaggtcccagaggatttgttttccctctttgctgccccaaaggtacattgtcatggcctacagagcaagaacaagaagggaagactgt

SEQ ID NO: 429427 - DNA, 201 bp, Homo sapiens
gagaattcttactaaaattctcagtttgcatttttgtatgaatactctggacttacaaaaagtaaagcaaacttgagtcaaaatgagatcaaagttatccrtacatcgtataactgagacttgtttaagcaaggcacagtgctatttgatggagtggggaagaggacatgaagaatagaagtcacaacacagattcgccca

SEQ ID NO: 429428 - DNA, 201 bp, Homo sapiens
gccatgaagaagatggaagacaacaacacacttgtgttcattgtggatgttaaagtcaacaagcaccagattaaacaggctgtgaagaagctctatgacawtgatgtggccaagggcaacaccctgattcggcctgatggagagaagaaggtatatgttcgactggctcctgattatgatgctttggatgttgccaacaaa

SEQ ID NO: 429429 - DNA, 201 bp, Homo sapiens
gagtttgaagtgagaatcagtgcaggtcccagaggatttgttttccctctttgctgccccaaaggtacattgtcatggcctacagagcaagaacaagaagkgaagactgtgtcctaagagtccaactcaaacagtgtatcatgcttgagaaaaagataattttttatagatcaaaggcatatgggctgggcacagtggctc

SEQ ID NO: 429430 - DNA, 201 bp, Homo sapiens
aagctgcagtagtgggaggatctgtttggcccaggaggttgaggctgcagtgagccatgatcatgccactgcagtccaacctgagtgacagtgagaccctrcctcaaaaaaaagtcatatggagaaatttgcagtccaaccgagaatcacaccaagtaaattgtaatctcttatagtaaatgctcagaaaatacaggtgaa

SEQ ID NO: 429431 - DNA, 201 bp, Homo sapiens
aggctgcagtgagccatgatcatgccactgcagtccaacctgagtgacagtgagaccctgcctcaaaaaaaagtcatatggagaaatttgcagtccaaccsagaatcacaccaagtaaattgtaatctcttatagtaaatgctcagaaaatacaggtgaatcaatgtgttgcaatgaaaattcacctaaactttcacgtat

SEQ ID NO: 429432 - DNA, 201 bp, Homo sapiens
tgtctttatgcagactttcttccctcttctgcctaagaaaggtcgagaatacgacacaggggtccgtaactccctgcctgaaaatatatccttctgcctckgatgacttcatctcagactgccctgcctctctccttctgcatgttttatttccttatatcctggcttttctttcttccccacactccatccctgggaaat

SEQ ID NO: 429433 - DNA, 201 bp, Homo sapiens
tctcgcctactcaggaagctgaggcaggagaatcgcttgaacccaggaggcggaggttgcagtgatctgagatcgtgccactgtactccagcctgggtgasatagtgagactccgtctcaaaaaaaaaaaaaacactttgggtgataatgatgcattaatgtaggttcaattgtagcaaatgctctggtaggcaatgctga

SEQ ID NO: 429434 - DNA, 201 bp, Homo sapiens
aatagaagtcacaacacagattcgcccacagcgactcacgtccctattctctagcacgcgccccggttcagcccgggccctcactcccagcctcctgaggygggtcactgagcttgcaggcagaatgtgggtggggctgccccacctctctctcaacctcactgagctgactagtggaccttgaagtcctcccctcggctg

SEQ ID NO: 429435 - DNA, 201 bp, Homo sapiens
aacccaggagtttgagaccagcctaggcaacacagcaagacccccgtctctacaaaatgaaataaattagtccatgtggtagcacatgcctgtagtccagrtactcaggaagctgcagtagtgggaggatctgtttggcccaggaggttgaggctgcagtgagccatgatcatgccactgcagtccaacctgagtgacagt

SEQ ID NO: 429436 - DNA, 201 bp, Homo sapiens
cagcactttgggaggccaaggcaggcagatcacgaggtcaggagtttgagaccagcctgaccaacatagtgaaaccccgtctctactaaaaatataaaaaytagctgggcatggtggtgcgtgcctgtagtctcagctactcgggaggctcaggcaggagaatcgcttgaacccaggaggcagaggttgtggtgagccaag

SEQ ID NO: 429437 - DNA, 201 bp, Homo sapiens
ggcgcagtggctcacctataatcccagcattatgggaggccaaggtgggtagatcatctgaggtcaggagttcaagaccagcctggctaacatggtgaaamccccgtctctactaaagatacaaaaattagccaggcgtggtagttcatgcctgtagtctcgcctactcaggaagctgaggcaggagaatcgcttgaaccc

SEQ ID NO: 429438 - DNA, 201 bp, Homo sapiens
ctcaactaaaaatacaaaaattagctggctgtggtggtgggtgcctgtaatcccagctactcgggaggctgaggcagaagaattgcttgaacccaggaggyggaggttgcagtgagccgagatcgtgccattgctctccagcctgggtgacagagcagaactggttttgtttgtttttttttttaaaaaagtccgggcaca

SEQ ID NO: 429439 - DNA, 201 bp, Homo sapiens
agagaatcatttaagcccagaagcttgagaccagcctgggcaacatattgagacccccatgtctacaaaaaaatttaaaaaattagccaggtgctgtggtyctccttgtggtctaagctacttggaaggctgaggtgacaggactgcctgagccggagaggtcgaggttgcacagagctgtgatcattccactgtagtcga

SEQ ID NO: 429440 - DNA, 201 bp, Homo sapiens
gaggctgaagtgcgagatcacttgaacccaggaggtcgaggctgcagtgagctgtaatcacaccactgcactccagcctgggcaacagagtgagaccccayctcaaaaataaaattaaaaaacccaaaatagtccaggcacagtggctcacgactgtaatcccagcactttgggaggctgaggcgggcagatcacttgagg

SEQ ID NO: 429441 - DNA, 201 bp, Homo sapiens
caaggtgggtagatcatctgaggtcaggagttcaagaccagcctggctaacatggtgaaacccccgtctctactaaagatacaaaaattagccaggcgtgrtagttcatgcctgtagtctcgcctactcaggaagctgaggcaggagaatcgcttgaacccaggaggcggaggttgcagtgatctgagatcgtgccactgt

SEQ ID NO: 429442 - DNA, 201 bp, Homo sapiens
tctgcctattgagaattaatgacaaaaacagagctttttcacaagatggcgccgaaagcgaagaaggaagctcctgcccctcctaaagccgaagccaaagmgaatgctttaaaggccaagaaggcagtgttgaaaggtgtccatagccacaaaaaaaaagaagatccgcacatcacccaccttccggcggtccaagaccct

SEQ ID NO: 429443 - DNA, 201 bp, Homo sapiens
ctgaccaatacggtgaaagcccatctcaactaaaaatacaaaaattagctggctgtggtggtgggtgcctgtaatcccagctactcgggaggctgaggcasaagaattgcttgaacccaggaggcggaggttgcagtgagccgagatcgtgccattgctctccagcctgggtgacagagcagaactggttttgtttgtttt

SEQ ID NO: 429444 - DNA, 201 bp, Homo sapiens
actcctcccatgggcagctgtagctccaggactccatgtgggcctgatggaaactctcttagatctgttctgtactgtaagactcttcctacccagtcttyattctgcttctctccccttccaccaaagttagacctgcattagtttggaggctccccttccctctcccgcttctccccctccctctcctctgatctcaga

SEQ ID NO: 429445 - DNA, 201 bp, Homo sapiens
tacaaaaattagccgggcatggtggcatgcgcctgtagtcccagctgctcaggaggctgaagtgcgagatcacttgaacccaggaggtcgaggctgcagtragctgtaatcacaccactgcactccagcctgggcaacagagtgagaccccatctcaaaaataaaattaaaaaacccaaaatagtccaggcacagtggctc

SEQ ID NO: 429446 - DNA, 201 bp, Homo sapiens
aaaatgaaataaattagtccatgtggtagcacatgcctgtagtccagatactcaggaagctgcagtagtgggaggatctgtttggcccaggaggttgaggytgcagtgagccatgatcatgccactgcagtccaacctgagtgacagtgagaccctgcctcaaaaaaaagtcatatggagaaatttgcagtccaaccgaga

SEQ ID NO: 429447 - DNA, 201 bp, Homo sapiens
gcttgaacccaggaggcggaggttgcagtgagccgagatcgtgccattgctctccagcctgggtgacagagcagaactggttttgtttgtttttttttttwaaaaagtccgggcacaatggctcacgcctgtaatgccagcactttggaaaatcccagcactttggaaggccgaggcaggcggatcacttgaggtcaggag

SEQ ID NO: 429448 - DNA, 201 bp, Homo sapiens
aagcagattccatctgcatgctgatcctttccccaacatcacccagtcatttatagcactcctttctctcccccatagccacctggatcaagcccacttaygcagtccatagagccaactccctgttacttgtcaagtttcctccctgggcagaggagggtttcactagccaagtcagctgaatcacggaatgtgttgaat

SEQ ID NO: 429449 - DNA, 201 bp, Homo sapiens
atggtggcacacacctgtagtcccaggtactcagaaggctgagctgagaggatcacttgagcccaggaggtcaaggctgcaatgagctgtgattgtgccayagtcctccagcctgggcaacagagtgagacactgtctcaaacaaacaaacaaacaaacaaaaagacaatgccactgagcacatatttgaaaagggatgga

SEQ ID NO: 429450 - DNA, 201 bp, Homo sapiens
gctccacaccaaaggctgctgcccaaaccctactggccagctcctatatggctggtgagcaatggatacttttacaacattaaagatctggcataagccawtcttataataaaaaagacaaaacaaagttacctaaaactagaagcagcagcagctttttaaaagtatatagtctattcaaaagtcaaaatcataaatcta

SEQ ID NO: 429451 - DNA, 201 bp, Homo sapiens
aagccaaaacaaagtagcccacttttcctaaaatgaacagaaaattactaagttaaagctcattctgacaaagtaacattgtgtttcctcttgaagcaacttttttttttttttttttgagtcagagtcttgctctgtcccaggctggagtgtaggggcactatcttggttcactgcaacctccgcctcccgggttcaggt

SEQ ID NO: 429452 - DNA, 201 bp, Homo sapiens
agccaaaacaaagtagcccacttttcctaaaatgaacagaaaattactaagttaaagctcattctgacaaagtaacattgtgtttcctcttgaagcaacttttttttttttttttttgagtcagagtcttgctctgtcccaggctggagtgtaggggcactatcttggttcactgcaacctccgcctcccgggttcaggtg

SEQ ID NO: 429453 - DNA, 201 bp, Homo sapiens
aaaaaaaaattgcctaacacatgctacttcaagaactacacactatttaacaggcataaacttaagatattttccaaaaatactacatcccttccaggaayaacatttctctgcttagtagttagccttgatgtcttaggtttaaatattaatgtatatgaacattaaaaaggtagtttgcaaaatgttaatctgtatata

SEQ ID NO: 429454 - DNA, 201 bp, Homo sapiens
aagtaaaagaagtaaaatactgtccaagaattcatgtggcctcaagtcttattctgaaacttgtcctttggaaagtggataacctcatttttagagtcaaygcagcaaagagaaccagatacatgagcataaaaaacaaaaaaccctcatcacatgaaatttctcaaaacgagtttattttctccttcttctgccccagtc

SEQ ID NO: 429455 - DNA, 201 bp, Homo sapiens
tattccccaaatcttcagctcttctctgattttgttgttgcctaaaggggtctgtttcttcattatgaacaactccttatagcttacagaaagatgggagytgggcaaggtgtattttggcagaattaattccctaagacttccagtgtcctaacttattttttaagtgttctaatttacaaaagatttttcctattctaa

SEQ ID NO: 429456 - DNA, 201 bp, Homo sapiens
gtaagacatatataatttacaacttaattatacaaaaatcaagatttaaatggacattaggttcccacacttgccagcccacaaacacttatttatcagaycccaaatatgagtggcttttaattttgagaaacgggtcagcctaggccaaaaaaaaaaaatagttgctgattaattgagagttgaaacctttccatatca

SEQ ID NO: 429457 - DNA, 201 bp, Homo sapiens
ttagatatttaatcattaaatttcttttcttttttttcctaacctcattaagaattataaaattctgagtcagcactatatattagacacaaaaccgggcmcttcatatatatatttcatgtgatgtaccaaaccatatgtgccagaaattattccacttttcaggtaaggaaactaaggaccaaaaaagaaactttggct

SEQ ID NO: 429458 - DNA, 201 bp, Homo sapiens
gcaaaagtttacctcttggctatcacacactttcaaaaagcttttagtcttatcaaacacagacattatacgtcatcccctcaaacccattggaactagcyggtgaatctggacttggaatccaaaatttgtttaagaatttcatttttttttaatccttggaatctaactttccatatacatctgaaaagcattacctcc

SEQ ID NO: 429459 - DNA, 201 bp, Homo sapiens
tgccattctcctgcctcagcctcccaagtagctgggactacaggcacccaccaccatgcccggctaattttttgcatttttagtaaagacgggatttcacygtgttagccaggatggtctcaatctcctgacctcgtgatccacctgcctcagcctcccaaagtcctgggattacaggcataagccaccacacccagctgt

SEQ ID NO: 429460 - DNA, 201 bp, Homo sapiens
caaccattctttttctcttgtcagataattgagttatgcctgcacaccaccaaactagcatttggctttcactattttaaataactggccataggacatakgagacatctgcacagttacaattaaaaacaaaagctgagtaaagagccttactccttcacctaagccaccacagaatttggtgtttcccctggagaaaat

SEQ ID NO: 429461 - DNA, 201 bp, Homo sapiens
atatttgtgctgaatttagataaacacttattgaaatggttcatgtggccataattctgcaattaagaaccaatggatatgcccaaggctagatggaggcyataattggagtaagaccaatataaactaattgtgcaatttttcttccatctcaattcttggcatatcactttagctcaaagatactgaccactgattttg

SEQ ID NO: 429462 - DNA, 201 bp, Homo sapiens
ctaatattaccagatttttactaatttagtgttttagtatttgaaaagttttgccaaattgtatcactcattaatagtggcttcttatttctcatgatgtkaaaaaataacaaagcaccagacatctcaagacattaatagagtatccaatatggcagtttcattatcatacccctaatgaagacagacagaaaaacataa

SEQ ID NO: 429463 - DNA, 201 bp, Homo sapiens
atccatttataaaactctaaactagcgctcccctccaagtacagcaaaaccatcttattatttagtgtcttagggaacacaacttacccgcacttggaggscttgcacttccacaagatgagctttttccaaatcttctattttctttctttctgcttcctgtcttttgatgaaatcaagctctcttaagaagaaaataat

SEQ ID NO: 429464 - DNA, 201 bp, Homo sapiens
gccaaattgtatcactcattaatagtggcttcttatttctcatgatgttaaaaaataacaaagcaccagacatctcaagacattaatagagtatccaatayggcagtttcattatcatacccctaatgaagacagacagaaaaacataatggtgactttgataactgtaaaacacaatgttacttcatgtcaacgtttctg

SEQ ID NO: 429465 - DNA, 201 bp, Homo sapiens
agcagacatgctttctaaaataaatgtcaatttccttctgaataaattgaactcttgggcccacaatagaagcagaaagggtttggcagcagttattccaygttgaccactcttatagtctatttcactttgtggagaaatccattaggaataacataaaatccttctttcctttcttatttgcttcctccctccctttct

SEQ ID NO: 429466 - DNA, 201 bp, Homo sapiens
tgagagtctgggagatttagggggaaagtcagagtcaaagttttcttctctggctctcctttgctaatggcctgtggccggtcctggaacagaggaggggrggacatgggggagactccttaaacaggggctcagctacaaaacatttatatctttgaaagggccttcttaatagttaggttacagcaaaacttggctggt

SEQ ID NO: 429467 - DNA, 201 bp, Homo sapiens
aaagaaagtgccaaattcttccagatcaatcctaaagcaactcttaatggctaggactatgcaaagttaaaaggagactgcctaattatttcctgaatgaraggtagctgggagatgttacaatgagcgctgagaagaccagctgaggcaatgtacacgaaaacactctgtaacccatgagtgttgcagttatttggacat

SEQ ID NO: 429468 - DNA, 201 bp, Homo sapiens
ctgagcccccagattgggtgcctcaactttaagctgtggcaacctggttttcattttcaaataataaatgatctcctgatggccaaatcctaaggtcttgyactggactgcatctccttaatctcactgtaataagatacttgactatctcttcctttataatggggactcccaaatctacctggcagtcctgacctctct

SEQ ID NO: 429469 - DNA, 201 bp, Homo sapiens
gctattccctccttacctaccctttttttcccttaagtgctttgatggctattctaattgtacttccttggataggttttgtttaccaacctcagctggaygcaatctctctctcttctgagcgttgatataattgtactctatctatacttgcagaggcccaatgcttttaataagcaataaatcctgtaaagctttaaa

SEQ ID NO: 429470 - DNA, 201 bp, Homo sapiens
ccatgaattcaagtggtttaacatgaaaagtacctattaatatcattaaaggagaaatcttatatgattatatctatatagatgtattttaaaagttcaaygaaactcaatatccattcacaattttttaacacatggcaaataaataaatggcaattgaagagaacttccttaacctgatcaaatatacctaacaaaaat

SEQ ID NO: 429471 - DNA, 201 bp, Homo sapiens
gtggcacatgcctgtggccccaactactaggggaggctgaggtggaaagatcactgaagtctaggaagttgaggctgcagtgagccatgattgcaccactrcattccagcctgggtaacaaagtgagaccttgtctcagaaaaaatgatctttttaaattaattgccttttaattcatggacaaaaagaagacactatcca

SEQ ID NO: 429472 - DNA, 201 bp, Homo sapiens
ggctgcagtgagccatgattgcaccactacattccagcctgggtaacaaagtgagaccttgtctcagaaaaaatgatctttttaaattaattgccttttawttcatggacaaaaagaagacactatccacaacagtagcaaaaaatgttttaaacaaaagttgtataattatataataaatatattaaagaagacccaaag

SEQ ID NO: 429473 - DNA, 201 bp, Homo sapiens
acaaaatgaataataataattggagtacttagcctttctctctcttgggaaatacattgtccccagagctctctgtttaaacctggaaaagttctgaaagwccatggagtcccaagtttcaagtatgctataaatgccaggagaatgacaaaaggattaccaggatgcacaaagagaagttacaagatgcaaaagatggat

SEQ ID NO: 429474 - DNA, 201 bp, Homo sapiens
gatttagactcccacacaataatagtgggagattttaacaccccactgtgtatatcagacacctcaaggaggcagaaaattaacaaggatattcaggactygaactgagctctggtccaagtgacctaacagacatctacagaaatctccaccccaaatcaacagaatatacattctgagcaccacatcacacttactcta

SEQ ID NO: 429475 - DNA, 201 bp, Homo sapiens; identical to SEQ ID NO: 257656

SEQ ID NO: 429476 - DNA, 201 bp, Homo sapiens
ttaattcacgagtaaaacatgaatgtgttaaacgataagggcaaacattttccaaatactttaattcatactttaaatagtactttgctgcctaaaaggayatttgtatccaaatttggcactatttgatactacaattcatataaatagttcaaaacagtttttgcaaaagggcacccagtcatttctaaaaataacctt

SEQ ID NO: 429477 - DNA, 201 bp, Homo sapiens
ttgggctccactcaaatacattggctgtaccaatacaaatctgttctacgatttgtgcttaattcacgagtaaaacatgaatgtgttaaacgataagggcraacattttccaaatactttaattcatactttaaatagtactttgctgcctaaaaggacatttgtatccaaatttggcactatttgatactacaattcata

SEQ ID NO: 429478 - DNA, 201 bp, Homo sapiens
acaaagtataaaatgccttatataaccctccttgttcacacttttgggaagataacatgcagtattacctaactggtggtccactcactgagtaggtaggygtgaaaatgaaatgaagcagcacttggtagcaatattcaaatttcacagaaatccttgaatcacatttacaaacctacaagtgactaagttcctgttatg

SEQ ID NO: 429479 - DNA, 201 bp, Homo sapiens
cctgatgttgaaaagatttaaattaagactaggggattagttgatgtacagtgaatcccagaaaattcatttgactctaaagtttctatcccgaaacccartgaagattcaaaaagtagattcaatacatttctcatagaatacttttaggcacatagtaggcattgaaatatttataaaatagtcaacaatattgattaa

SEQ ID NO: 429480 - DNA, 201 bp, Homo sapiens
gctgcctgtggctaatgtgagccagggatggggtgatggaaatttctaaaattgattgtggctgaccaattctgcaagtatactaaaaattttatggtatrtgaattatatctcaataaagctgctataaaaaatagaaactatactttaaaattgagttatccatcatattaaaatttagaaagtctcattaagaaaggg

SEQ ID NO: 429481 - DNA, 201 bp, Homo sapiens
aatgatgagttaatgggtacagcacaccagcatggcacatgtatacatatgtaactaacctgcacgttgtgcacatgtaccctaaaacttaaaagtataattaaaaaaaaaaaaaacagagtagaagatactgttttgtaagggaaacttagatctatgaagaaaagctccatttgtaagagtatctccctctgtggcagg

SEQ ID NO: 429482 - DNA, 201 bp, Homo sapiens
aataaaatggcacatgtgcaggtggatatgccaatgggatatgccaatgccaggttccccacaatgcccccacatgaggccaagacctatgtgcatcactyattgtggtttttctgcttattctctactatctggtgtaaagatattgttgaatatgtcacaaaggcttgcctaatacataaagtattgcaaatattcaaa

SEQ ID NO: 429483 - DNA, 201 bp, Homo sapiens
tttggcaaaactacttgtagtcaattctcattattcgtggatttcaatatttgaaaagttgcccacttgctaaaacttatttgttacctcaaatctgtagrgcttttttggcatttgctgacaggtcagagtgacaaaaactttgagttgcccaatgggcacgttcccagctgaggtcaaataaggtgcacttttccttca

SEQ ID NO: 429484 - DNA, 201 bp, Homo sapiens
gcagcagccccagtcagaggcttatagataaaactcccatctccttgggacagagcacctgggggaaagggtggctctgggcgcagcttcagcagacttamacactcctgcctgccagctctgaagagagcagggagtctcccagcacagtgcttaagctctgctaagcatcagattgcctcctcaagtgcgttgctgacc

SEQ ID NO: 429485 - DNA, 201 bp, Homo sapiens
gttcctgggaagaaaactcaaacccaggaaacacagctggaataagttagtatcctagtcactgtgctaatgctagcaaaatcataaatctattattcacrggataatgcttagctacttgtgacaaattgaaggttgagaaaatatttgcacaaagaaccatcataccagctgagtcagggccaaggtagaggtcactgc

SEQ ID NO: 429486 - DNA, 201 bp, Homo sapiens
tggtattatcaagtcaatggaatattattttgcaataaaaatgaattaagtactgataaatgctacaacatgaatgaaccttgaaaacgtttctctagttaaaaaaaaaaaagccagtcacaaaagaccacatactgtattccatttacatgaaatggccaggagagccaaatgtatagagacagaaagtagatttgtgcc

SEQ ID NO: 429487 - DNA, 201 bp, Homo sapiens
tgaggcacaagaatcgcttgaacccggcagtccgaggttgccaagagctaagatcatgccactgcactccagcctgggcaacagagtgagactctatctaaataaataaataaataaataaataaataaataaataaataaaataagatatctcagctggttttggtagtgatgctattcttcttgtgctaaaaagtaatg

SEQ ID NO: 429488 - DNA, 201 bp, Homo sapiens
gaggcacaagaatcgcttgaacccggcagtccgaggttgccaagagctaagatcatgccactgcactccagcctgggcaacagagtgagactctatctaaataaataaataaataaataaataaataaataaataaataaaataagatatctcagctggttttggtagtgatgctattcttcttgtgctaaaaagtaatgc

SEQ ID NO: 429489 - DNA, 201 bp, Homo sapiens
ggttgccaagagctaagatcatgccactgcactccagcctgggcaacagagtgagactctatctaaataaataaataaataaataaataaataaataaatwaataaaataagatatctcagctggttttggtagtgatgctattcttcttgtgctaaaaagtaatgcaactcaaacagttgcacacgatcaacaatttctt

SEQ ID NO: 429490 - DNA, 201 bp, Homo sapiens
ctgttttacaaatctctagaaaaaaatcttttacttcctctaatttgatattccgttagatgcttatcatttagccagttataatgggacttctccatccyaatttccactgatgtccctcagatatgaaaaaaaatgatttgtaaatgtggtattgacacaattcagaaaatcgccaactcctgttagggtaaccagagc

SEQ ID NO: 429491 - DNA, 201 bp, Homo sapiens
ctttttaaaaattctagataaatggcaaccaatgatgaagccattttcagagtttatccagcaattttgagtataagaaaatatacttctagaccaggcawcaggaagctttctttacctttcaggggccacagagtaaaatattttaggtttgtgagatacacagtctctgtcacaacgactcaacactgctactgtagc

SEQ ID NO: 429492 - DNA, 201 bp, Homo sapiens
caatttttgaatctctgcttctgtaactgcatgtttgatttgcaactgaaaattgaaaagaaagaaaaaatctgaactaagaaagtgtatctatatttgtraagcctcagcagctacaagaatgccttattacatagtaaaaggcctagaaaagtgctgcagtgcagcaagttgtaaattaaagtgtctactgtgtgaaat

SEQ ID NO: 429493 - DNA, 201 bp, Homo sapiens
aagcggacttcaacaaaatattcagaataaatatattacttatattcagaataaataactcttaaaacagtaagaaaacaacttaatttttaaaaaatcaraaaatatttaagcaaatttttcacaaaataagatacacatatgattgcaaaaaaaggcaataaaaagatgcaaaatcattagccattagagaaatctaaa

SEQ ID NO: 429494 - DNA, 201 bp, Homo sapiens
cctaagacctacagaaacaattacttgtacgttcattatttcccactaagtaaaaccaatagctgaatatcaaaagcaccatcatgaaatatgacaatacrgataatgctcttggttagttcactgaatgaatagacaaaatattttgaattacaacaatataaagaattcaggagacaaagacgtgaactattctagctg

SEQ ID NO: 429495 - DNA, 201 bp, Homo sapiens
tccatatcaactatttttgaaacttaataaataagatcctctgttagaattaaaattttatccaatccttagaaaaaaggctacattttggaaaaataatyctgtattattaacatagcaacataatgatattaacactgtagcactcacgaacctttctctagctccactgggaaaagttccagcttttctacacgtttt

SEQ ID NO: 429496 - DNA, 201 bp, Homo sapiens
ttctatcagaggtacagaaaggagctggtcccattccttttgaaactattccaatcaatagaaaaagagagaattctccctaactcattttatgaggcaarcatcaccctgataccaaagcctggcagagacacagcaaaaaaagagaattttagaccaatatccctgacgaacattgatgcaaaaatcctcaataaaata

SEQ ID NO: 429497 - DNA, 201 bp, Homo sapiens
gaatccaggcgctctgtctctgggactgcttcattcaagtctaagaatattgaaagataatcagtgagagaaacctttggagagaactgatgaagagaccrcagacactgataaaatctcaaggtaaccagtaacatcaggtaaggatcaggtgaccaccatgacagcctgtaaccaagaaataaccaagaaatcagtggg

SEQ ID NO: 429498 - DNA, 201 bp, Homo sapiens
caaatcaataaatgtaatccagcatgtaaacagaaccaaagacaaaaaccacatgattatctcaatagatgcaaaaaaggccttcgataaaattcaacagsccttcatgctaaaaactctcaataaactaggtattgatggaacctatctcaaaataataagagctatttatgacaaacccacagccagtatcatactgaa

SEQ ID NO: 429499 - DNA, 201 bp, Homo sapiens
tctatatttgtagctgcccattaagagttcattagttgtgataactgggagagagtcaatcttataagctcttgcttaaatataaaatgtggaacaccacrtagatgaaagctgtaatataattagaaacactgtatgtagtacttgcacgttttatgccttatctagctcatatttggattgtatgctctataatacaaa

SEQ ID NO: 429500 - DNA, 201 bp, Homo sapiens
cccacagccagtatcatactgaatgggcaaaaactgaaagcattccctttgaaaactggcacaagacagggatgccctctctcaccactcctattcaacayagtgttggaagttctggccagggaaatcaggcaagagaaagaaataaaaggtattcgattaggaaacgaggaagtcaaactgtccctgtttgcagatgac

SEQ ID NO: 429501 - DNA, 201 bp, Homo sapiens
cgttttatgccttatctagctcatatttggattgtatgctctataatacaaatcatgccacatactctatctcatttgttccttacaacagccccatgagrtaccaatcaagtattttttttctctcctgaagctcagagaacttgagtagcatgccctcatttacataactaattaatgcgctaccatgattactctagt

SEQ ID NO: 429502 - DNA, 201 bp, Homo sapiens
gatgtgaacgacctcttcaaggagaactacaaaccactgctcaatgaaataaaagatgacacaaacaaattgaagaatattccatgctcatggataggaaraatcagtatcatgaaaatggccatactgctcaaggtaatttatagattcaatgccatccccatcaagctaccaatgactttcttcacagaattggaaaaa

SEQ ID NO: 429503 - DNA, 201 bp, Homo sapiens
ctaatattacaactcaaaataaccttgggattctggtcccagcttatttctcatataagaaaactgaggcttaaagaaggtcaatttgtgtattaacttgyaccacacagttaatctgtgacagagagtgaatagagctcaggcttcagaagcctattctccttctggaaggtcaatctcaagtctggaagtaaacttcac

SEQ ID NO: 429504 - DNA, 201 bp, Homo sapiens
ggggagggatagcattaggagaaatacctaatgtaaatgatgagttaatgggtgcggcaaaccaacatggcacgtgtatacatatgcaacaaacctgcacrttgtgcacaggtaccctagaacttaaagtataattaaaaaaaattaaattaaattaaaaaaagaaactcttctctgtaataatcacagcaacttgtaaca

SEQ ID NO: 429505 - DNA, 201 bp, Homo sapiens
cgggtggatcatgaggtcagggattcaagaccagcctggccaatatggtgaaatcccatctctactaaaaatacaaaaattagccgggcatggtggcacgygcctgtagtcccagctactcaggaggctgaggcagaagaatcgcttgaacctgggaggcagtggttgcagtgagccgagatcatgccactgaactccagc

SEQ ID NO: 429506 - DNA, 201 bp, Homo sapiens
cctgcattttaagactattttcaatactgctacaaattggatcctttaaaagaatttaatggatttgatgattttagcagctgttatgaaaaatgctctawgaaattaggatgctatatatcatattacacagagaccagttccctacagtaatactgtgagtcatacagtttttttcactagattgacgttatttttgac

SEQ ID NO: 429507 - DNA, 201 bp, Homo sapiens
aaatacattttctagtggtaaacatatgcatatagttgcatagaaaaactggaaagaggccgggtacagtggctcatgccatgcctgtaatctcagcactytgggaggccgaggtgggcagatcatgaggtcaggagttcaacaacatggtgaaaccctgtctctactaaaaatacaaaaattagccaggtgtgatggcgt

SEQ ID NO: 429508 - DNA, 201 bp, Homo sapiens
tttaaaaattcttaaaagccaacaataacaaaacaatcaatttgattaaacagatatatcccaccaatgaagatatacacatggtaaataagtagatgaamagatgctccacatatgtcattagggaactgcaaattaaaacaacaacatgatacccactacatgtattagaatagccaaaatccaaaatactaacaatac

SEQ ID NO: 429509 - DNA, 201 bp, Homo sapiens
attatacccagtgtttgaaagcatattttaagtaacacattagaatatcatatacacaatagtcgaacttaaggaaaacatctcaggcctatgcaaatgcyatataatcacaatttaaaatgaattggagggtctccttccccataatacttacaaggttagccacaaatgtgggatcaattttaccaaggtttaagaaat

SEQ ID NO: 429510 - DNA, 201 bp, Homo sapiens
acaataattgttattactagtgtaggagtagacagattgatgaaacagagagtccagaaagatccaaattcaaatatataaaactttggtttatgagatayaaaatatgtcaaaataatgaagagaaggtggattatacaataaatggtattaggaaattatgctaaccttatgaagaaaaataaagctagatcctcacat

SEQ ID NO: 429511 - DNA, 201 bp, Homo sapiens
ttatacccagtgtttgaaagcatattttaagtaacacattagaatatcatatacacaatagtcgaacttaaggaaaacatctcaggcctatgcaaatgctrtataatcacaatttaaaatgaattggagggtctccttccccataatacttacaaggttagccacaaatgtgggatcaattttaccaaggtttaagaaata

SEQ ID NO: 429512 - DNA, 201 bp, Homo sapiens
ataaaattatatttttttaggaatctatcctaaataataggtaattctagacgctaagcaagaaactgtatataatacagatatgaaaatcatagatttcrggcccagcccttctttttcttttttgaaacagggtcttgctctgttgcccaggctggagtgtggtggctcaatcacagctcactgcagcctcaatcttcc

SEQ ID NO: 429513 - DNA, 201 bp, Homo sapiens
ggtaattctagacgctaagcaagaaactgtatataatacagatatgaaaatcatagatttcgggcccagcccttctttttcttttttgaaacagggtcttrctctgttgcccaggctggagtgtggtggctcaatcacagctcactgcagcctcaatcttccagccagcctttatttttcaaaagacttacttacaggttt

SEQ ID NO: 429514 - DNA, 201 bp, Homo sapiens
aattggtctatttcatcttggttgtcaaacttgtgggcacagaggggctcataatattcttttattgtccttttagtgcccatgccatccacagtgaattkttctctctcatttttaatattactaatttgtgtcatctctctttttttcttagcctggttagaggcttatcaaaaatatcgatctttgctaagaaccagc

SEQ ID NO: 429515 - DNA, 201 bp, Homo sapiens
cccgtctccactaaaaatataaaaaattagccagacgtggtggcacatgcctatagtctcagctactcgggaggctgaggcaggagaatcgcctgaacccmggagtcagaggtgcagtgggccgagatcacaccactgcactccagcctgggtgacagagcgagacttcatctcaaaaaaaaaaaaaaaagaataaaacat

SEQ ID NO: 429516 - DNA, 201 bp, Homo sapiens
cgggcatggtggcacgcgcctgtagtcccagctactcaggaggctgaggcagaagaatcgcttgaacctgggaggcagtggttgcagtgagccgagatcaygccactgaactccagcctgggtgacagagcaagattccatttcaaaaaaaaaaaaaaaagaaaatgaaaaagaagaccaagatacccaagtcatccttca

SEQ ID NO: 429517 - DNA, 201 bp, Homo sapiens
acacttgcctcattgggtattcagagatcttccatggggtgaccttgataataacagattacaagtaactctaagtcaactgaaaacagctttctaaaaarctttttttaagtccacactatctagaaataacctaaaattactgtcaaagctttgcatccatttgctaagtagcatttaacattagtgcttattatcttt

SEQ ID NO: 429518 - DNA, 201 bp, Homo sapiens
atgtacatatgtatgtataatagcctaagatgaagacttcacctgaaaataacaccagctggaggttgaaaagaaaattatctgtaatacaaggtgaaaakatgcccacaagataattatctgtaataataagttttttttaaaaaaaacgtaggccaggcacagtggctcatgcctgtaaacccaacactttgggaggct

SEQ ID NO: 429519 - DNA, 201 bp, Homo sapiens
tatctgtaattatcttttggttaagagaaaaaataactatcagaaaccaaagtaggaacaggcagcagtttatgtgcatcttggaagaggtcacccttgcygtttgatggaatgcctattatttgatagctgctgataccacgataacacagagattccctttcaattaaaagtgcctggacaccacagccagacaacttc

SEQ ID NO: 429520 - DNA, 201 bp, Homo sapiens
ttaagaataaaacatgttaggctgagataggtggatcacgaggtcaggagatcgagaccatcctggctaacacactgaaaccccgtctccactaaaaatayaaaaaattagccagacgtggtggcacatgcctatagtctcagctactcgggaggctgaggcaggagaatcgcctgaacccaggagtcagaggtgcagtgg

SEQ ID NO: 429521 - DNA, 201 bp, Homo sapiens
aaaatattgagatcagcatgctgggggaaccagatgtcatcctacacatggtctacactctaggtgaggaactccaaaaacatgaatctggttgattatayaggagagggaaagctgtcccctctgcagcctctggggagggtggagggagaaatcttatctccttaatgtaaattcaacttgggaaggatcttgggctct

SEQ ID NO: 429522 - DNA, 201 bp, Homo sapiens
ctgaggcaggagaatcgcctgaacccaggagtcagaggtgcagtgggccgagatcacaccactgcactccagcctgggtgacagagcgagacttcatctcaaaaaaaaaaaaaaaagaataaaacatgttaaatataacagataatgtattatgcatgactcaccaaagaactaaaatccaacataataaacaatgccgta

SEQ ID NO: 429523 - DNA, 201 bp, Homo sapiens
cttttttagctataatttactggcttgctatcatttttggaaaaaagagaatcataagtcactcctaggaactgggagaaagaatggcttcaaattcgtcytcataatccaaagataccatttcagaggtagctgtttcctggcatttaaatggtttatgtaatatctcttataagtaatgaactcatttacatatatctt

SEQ ID NO: 429524 - DNA, 201 bp, Homo sapiens
gtatttatttatatatatatgtatttatatatgcatctaaaatttctagaagattacaaagaatatttatcattagttcttctggtgtgtgagccttgacaaaaaaaaaaaaaaaaaaaaaacttatttctttcaggtattgcattgaataacagtgcaaaatcaaaagaaactaattgtgtagaaattaggtaaaaaata

SEQ ID NO: 429525 - DNA, 201 bp, Homo sapiens
accttttaattattttaaagtttctagtctaaaacatttatataaaaatgtataccatatatgtaactcatatgaagaaagaaaaaaaaaaagacaaccaygtacctccatcaagcctaaactataaaattattacttttgaagccctctctgttctctatttctagttgtaacccctgtattttcttctagttattccat

SEQ ID NO: 429526 - DNA, 201 bp, Homo sapiens
tgtttaagaatgagtcactttacactagacctcttccactcagatgcagtttcaaagacctctagcttcaaggatcttaatccttaaaaaaaaaaaaaacaaaaaaaaaacaaaaaaaactacagcctgtccagaggtaaatggaaatgttgaacattttataaatctgcagcaaagctaaaagaacagcttcaagctacc

SEQ ID NO: 429527 - DNA, 201 bp, Homo sapiens
agcagacttaaacactcctgcctgccagctctgaagagagcagggagtctcccagcacagtgcttaagctctgctaagcatcagattgcctcctcaagtgsgttgctgacccctgtacctcctgattgggagacacctcccagcaggggtcgacagatacctcatacaggagagatctgactggcatctggaaggtgcccc

SEQ ID NO: 429528 - DNA, 201 bp, Homo sapiens
atggtaactttagaaaagcctagattgaccttttatctttatttaaatgcatcatagagtagcatttgacagagtatcacttactacaaagttgacaggarattgagggtagcagttaatgtataaaatgcatataaattgaaaacagcagccaagctcaaggtaaaaggtaaattagaattcagattaatttaagccata

SEQ ID NO: 429529 - DNA, 201 bp, Homo sapiens
gtaggcttcagaacatgggtaataacaaactcctccaagctaaaggagcatgttctaacccaatgcaaagaagctaagaactttgaaaaaaggttagatgwattgctaactagaataaccagtttagagaggaacataaatgacctgatggagctaaaaaacacagcacgagaacttcgtgaagcatacacaagtatcaat

SEQ ID NO: 429530 - DNA, 201 bp, Homo sapiens
ttgccagataaagaattcagaaggttgattactaaactactcaagtagataccagagaaagatgaaaaccagcttaaagaaattaaggaaaaaatacagtrtatggatgaaaaatgctccagaaaaacagataccataaagaaaaacaattacaacttctggaaatgaagtacacacttagagaaataaaaaaaggcactg

SEQ ID NO: 429531 - DNA, 201 bp, Homo sapiens
taatcccagcactttgggaggccgaggcgggtggatcacgaggtcaggagatcgagaccatcccggctaaaacggtgaaaccccgtctctactaaaaatayaaaaaattagccgggcgtagtggcgggcgcctgtagtcccagctacttgggaggctgaggcaggagaatggcgtgaacccgggaggcggagcttgcagtg

SEQ ID NO: 429532 - DNA, 201 bp, Homo sapiens
agcccaaaatctccttaagctgataagcaatttcagcaaaatctcaggataaaaaaatcaatgtgcaaaaatcacaagcattcctatacaccaataagagacaaacagagagccaaataatacgtgaactcacattcacaattgctacaaagagaataaactacctacgaatacaacttaaaggaatgtgaaggacctctt

SEQ ID NO: 429533 - DNA, 201 bp, Homo sapiens
gcccaaaatctccttaagctgataagcaatttcagcaaaatctcaggataaaaaaatcaatgtgcaaaaatcacaagcattcctatacaccaataagagacaaacagagagccaaataatacgtgaactcacattcacaattgctacaaagagaataaactacctacgaatacaacttaaaggaatgtgaaggacctcttc

SEQ ID NO: 429534 - DNA, 201 bp, Homo sapiens
cccaaaatctccttaagctgataagcaatttcagcaaaatctcaggataaaaaaatcaatgtgcaaaaatcacaagcattcctatacaccaataagagacaaacagagagccaaataatacgtgaactcacattcacaattgctacaaagagaataaactacctacgaatacaacttaaaggaatgtgaaggacctcttca

SEQ ID NO: 429535 - DNA, 201 bp, Homo sapiens
ccaaaatctccttaagctgataagcaatttcagcaaaatctcaggataaaaaaatcaatgtgcaaaaatcacaagcattcctatacaccaataagagacaaacagagagccaaataatacgtgaactcacattcacaattgctacaaagagaataaactacctacgaatacaacttaaaggaatgtgaaggacctcttcaa

SEQ ID NO: 429536 - DNA, 201 bp, Homo sapiens
tgtcctttgttttaaaaagttaataatcctttaaataattttttaaaaaatgaagtagcctatatttacccacataatttctatttctcttcatttccttstgtaggtctagaatttcgttttatattatttacattattaaagacttcccctgacatttcttataatagtattctccaggtaatgaattcttttagcttc

SEQ ID NO: 429537 - DNA, 201 bp, Homo sapiens
atccccagcagtggtgtgtaagagttcctttttctccacatccttgtcagcgtctgttaccttttgtctctttaataacagccattctaattggggtaagyggatatcttagtacagttttattttgcatttctctgatgattactgatgttgagcatcttcacatatatcagtcatttctatgtcttattttgagaaatg

SEQ ID NO: 429538 - DNA, 201 bp, Homo sapiens
gaatacttggtatgctcagatcctttaagtactgccaatcatacagctgtaaaaagatattacaatgtgatttcaattgcatttcactgattactagtgcrggtaaacattttttcatatgtttgtaagtcacctgtctacttccacaaattgtcaaatcatttcttttacccatttgttacactgttgttgttgggttga

SEQ ID NO: 429539 - DNA, 201 bp, Homo sapiens
tggtaatttctttattaaaataaataggtgaatgctctgtaagcaaaaaatcaaatgcagcaatcatctgtacctcctacctgggttcctgattctgtatrgacagttcatacttctggaccagttaggtgacttgatagcacctcagatttaaagtaccccaaagcaaaattatagtgtctcccattctgtcttctgtaa

SEQ ID NO: 429540 - DNA, 201 bp, Homo sapiens
tttgcttgctgatatcaagttagcttccaaagattttaaaacttgtgcaaactcacttacactgaatatctgaaaaaagctattatgtctcctcctcccamcagccaaatcttcctcaagataaatatctcatttttctgaaaactttctcatatccatccatacatggcaattgccattagctattaaaattaagttgaa

SEQ ID NO: 429541 - DNA, 201 bp, Homo sapiens
ctctcttctagctataattttgtatctgttaaccaacctctcctagcctctaataaccacaattctactctctacctctatccgctcatgttttagctccyatatatgagtgagaacacagtatttatctttctgtgcctgacttagttcacttagtataatgtcctccaggttcatccatgttgcagagaagcatgaatc

SEQ ID NO: 429542 - DNA, 201 bp, Homo sapiens
tgagacttttaagcttctccagtacagaagtttacactctcccatgaaaatcccccaggggtgactggacctctgaatggaagggagagtggggtaaagastatcatgaaaagcaaacattaaactctgaggtcttgagtaccttgggaagagtacctcaagccccaaattttacctggaaacagaatgaaacagccttga

SEQ ID NO: 429543 - DNA, 201 bp, Homo sapiens
ttcagccataaaaaagaaggaaatcctgtaatttgcaataacaaggatggaactggcggacattatgttaagtaaaataagccaaaaacagaaagttaaayaccacatgtctcattcatatgaggaagctaaaaaaatgttgatctcatagaagtaaagtagaacagaaaatactagatgctaagaaggggaagcacaagg
